United States Patent Application Publication US 2022/0339270 A1 - sequence listing, part 2

SEQ ID NO: 929 - DNA, 2205 bp, Artificial Sequence
  source: /note="Description of Artificial Sequence: Synthetic polynucleotide"
  variation (124)..(126): /replace="agt"
  variation (502)..(504): /replace="aaa"
  variation (928)..(930): /replace="aga"
  variation (1228)..(1230): /replace="cag"
  variation (1336)..(1338): /replace="aga"
  variation (1381)..(1383): /replace="ctc"
  variation (1411)..(1413): /replace="tct"
  variation (1423)..(1425): /replace="aga"
  variation (1510)..(1512): /replace="gcg"
  variation (1615)..(1617): /replace="aac"
  misc_feature (1)..(2205): /note="Variant nucleotides given in the sequence have no preference with respect to those in the annotations for variant positions"
atggctgctgacggttatcttccagattggctcgaggacaacctttctgaaggcattcgtgagtggtgggatctgaaacctggagcccctcaacccaaagcgaaccaacaacaccaggacgacggtcggggtcttgtgcttccgggttacaaatacctcggaccctttaacggactcgacaaaggagagccggtcaacgaggcggacgcggcagccctcgaacacgacaaagcttacgaccagcagctcaaggccggtgacaacccgtacctcaagtacaaccacgccgacgccgagtttcaggagcgtcttcaagaagatacgtcttttgggggcaaccttggcagagcagtcttccaggccaaaaagagggtccttgagcctcttggtctggttgaggaagcagctaaaacggctcctggaaagaagaggcctgtagaacagtctcctcaggaaccggactcatcatctggtattggcaaatcgggccaacagcctgccagaaaaagactaaatttcggtcagactggagactcagagtcagtcccagaccctcaacctctcggagaaccaccagcagccccctcaggtgtgggatctaatacaatggcttcaggcggtggcgcaccaatggcagacaataacgagggtgccgatggagtgggtaattcctcaggaaattggcattgcgattccacatggctgggcgacagagtcatcaccaccagcaccagaacctgggccctgcccacttacaacaaccatctctacaagcaaatctccagccaatcaggagcttcaaacgacaaccactactttggctacagcaccccttgggggtattttgactttaacagattccactgccacttctcaccacgtgactggcagcgactcattaacaacaactggggattccggcccaagaaactcaacttcaagctcttcaacatccaagttaaagaggtcacgcagaacgatggcacgacgactattgccaataaccttaccagcacggttcaagtgtttacggactcggagtatcagctcccgtacgtgctcgggtcggcgcaccaaggctgtctcccgccgtttccagcggacgtcttcatgatccctcagtatggatacctcaccctgaacaacggaagtcaagcggtgggacgctcatccttttactgcctggagtacttcccttcgcagatgctaaggactggaaataacttcacattcagctataccttcgaggatgtaccttttcacagcagctacgctcacagccagagtttggatcgcttgatgaatcctcttattgatcagtatctgtactacctgagcagaacgcaaacaacctctggaacaacccaacaatcacggctgcaatttagccaggctgggccttcgtctatggctcagcaggccaaaaattggctacctgggccctgctaccggcaacagagagtttcaaagactgctaacgacaacaacaacagtaactttgcttggacaggggccaccaaatatcatctcaatggccgcgactcgctggtgaatccaggaccagctatggccagtcacaaggacgatgaagaaaaatttttccctatgcacggcgttctaatatttggcaaacaagggacaggggcaagtaacgtagatttagataatgtaatgattacggatgaagaagagattcgtaccaccaatcctgtggcaacagagcagtatggaactgtggcaactaacttgcagagctcaaatacagctcccgcgactggaactgtcaatagtcagggggccttacctggcatggtgtggcaagatcgtgacgtgtaccttcaaggacctatctgggcaaagattcctcacacggatggacactttcatccttctcctctgatgggaggctttggactgaaacatccgcctcctcaaatcttgatcaaaaatactccggtaccggcaaatcctccgacgactttcagcccggccaagtttgcttcatttatcactcagtactccactggacaggtcagcgtggaaattgagtgggagctacagaaagaaaacagcaaacgttggaatccagagattcagtacacttccaactacaacaagtctgttaatgtggactttactgtagacactaatggtgtttatagtgaacctcgccctattggaacccggtatctcacacgaaacttg

SEQ ID NO: 930 - protein, 736 aa, Artificial Sequence
  source: /note="Description of Artificial Sequence: Synthetic polypeptide"
MAADGYLPDWLEDNLSEGIREWWDLKPGAPKPKANQQKQDDGRGLVLPGYKYLGPFNGLDKGEPVNAADAAALEHDKAYDQQLKAGDNPYLRYNHADAEFQERLQEDTSFGGNLGRAVFQAKKRVLEPLGLVEEGAKTAPGKKRPVEQSPQEPDSSSGIGKKGQQPARKRLNFGQTGDSESVPDPQPLGEPPAAPSGVGSNTMAAGGGAPMADNNEGADGVGNASGNWHCDSTWLGDRVITTSTRTWALPTYNNHLYKQISSQSGGSTNDNTYFGYSTPWGYFDFNRFHCHFSPRDWQRLINNNWGFRPKRLNFKLFNIQVKEVTTNDGTTTIANNLTSTVQVFTDSEYQLPYVLGSAHQGCLPPFPADVFMIPQYGYLTLNNGSQAVGRSSFYCLEYFPSQMLRTGNNFEFSYTFEDVPFHSSYAHSQSLDRLMNPLIDQYLYYLSRTQTTSGTAGNRTLQFSQAGPSSMANQAKNWLPGPCYRQQRVSKTANQNNNSNFAWTGATKYHLNGRDSLVNPGPAMATHKDDEDKFFPMSGVLIFGKQGAGNSNVDLDNVMITNEEEIKTTNPVATEQYGTVATNLQSANTAPATGTVNSQGALPGMVWQDRDVYLQGPIWAKIPHTDGHFHPSPLMGGFGLKHPPPQILIKNTPVPANPPTTFSPAKFASFITQYSTGQVSVEIEWELQKENSKRWNPEIQYTSNYNKSTNVDFAVDTNGVYSEPRPIGTRYLTRNL

SEQ ID NO: 931 - protein, 736 aa, Artificial Sequence
  source: /note="Description of Artificial Sequence: Synthetic polypeptide"
MAADGYLPDWLEDNLSEGIREWWDLKPGAPKPKANQQKQDDGRGLVLPGYKYLGPFNGLDKGEPVNAADAAALEHDKAYDQQLKAGDNPYLRYNHADAEFQERLQEDTSFGGNLGRAVFQAKKRVLEPLGLVEEGAKTAPGKKRPVEQSPQEPDSSSGIGKKGQQPAKKRLNFGQTGDSESVPDPQPLGEPPAAPSGVGSNTMASGGGAPMADNNEGADGVGNASGNWHCDSTWLGDRVITTSTRTWALPTYNNHLYKQISSQSGASTNDNTYFGYSTPWGYFDFNRFHCHFSPRDWQRLINNNWGFRPKRLNFKLFNIQVKEVTTNDGTTTIANNLTSTVQVFTDSEYQLPYVLGSAHQGCLPPFPADVFMIPQYGYLTLNNGSQAVGRSSFYCLEYFPSQMLRTGNNFQFSYTFEDVPFHSSYAHSQSLDRLMNPLIDQYLYYLSRTQTTSGTAGNRELQFSQAGPSSMANQAKNWLPGPCYRQQRVSKTTNQNNNSNFAWTGATKYHLNGRDSLVNPGPAMATHKDDEDKFFPMSGVLIFGKQGAGNSNVDLDNVMITNEEEIKTTNPVATEEYGTVATNLQSANTAPATGTVNSQGALPGMVWQNRDVYLQGPIWAKIPHTDGHFHPSPLMGGFGLKHPPPQILIKNTPVPANPPTTFSPAKFASFITQYSTGQVSVEIEWELQKENSKRWNPEIQYTSNYNKSTNVDFAVDTNGVYSEPRPIGTRYLTRNL

SEQ ID NO: 932 - protein, 736 aa, Artificial Sequence
  source: /note="Description of Artificial Sequence: Synthetic polypeptide"
MAADGYLPDWLEDNLSEGIREWWDLKPGAPKPKANQQKQDDGRGLVLPGYKYLGPFNGLDKGEPVNAADAAALEHDKAYDQQLKAGDNPYLRYNHADAEFQERLQEDTSFGGNLGRAVFQAKKRVLEPLGLVEEGAKTAPGKKRPVEQSPQEPDSSSGIGKKGQQPARKRLNFGQTGDSESVPDPQPLGEPPAAPSGVGSNTMAAGGGAPMADNNEGADGVGNASGNWHCDSTWLGDRVITTSTRTWALPTYNNHLYKQISSQSGGSTNDNTYFGYSTPWGYFDFNRFHCHFSPRDWQRLINNNWGFRPKRLNFKLFNIQVKEVTTNDGTTTIANNLTSTVQVFTDSEYQLPYVLGSAHQGCLPPFPADVFMIPQYGYLTLNNGSQAVGRSSFYCLEYFPSQMLRTGNNFEFSYTFEDVPFHSSYAHSQSLDRLMNPLIDQYLYYLSRTQTTSGTAGNRELQFSQAGPSSMANQAKNWLPGPCYRQQRVSKTTNQNNNSNFAWTGATKYHLNGRDSLVNPGPAMATHKDDEDKFFPMSGVLIFGKQGAGNSNVDLDNVMITSEEEIKTTNPVATEEYGTVATNLQSSNTAPATGTVNSQGALPGMVWQERDVYLQGPIWAKIPHTDGHFHPSPLMGGFGLKHPPPQILIKNTPVPANPPTTFSPAKFASFITQYSTGQVSVEIEWELQKENSKRWNPEIQYTSNYNKSTNVDFAVDTNGVYSEPRPIGTRYLTRNL

SEQ ID NO: 933 - protein, 736 aa, Artificial Sequence
  source: /note="Description of Artificial Sequence: Synthetic polypeptide"
MAADGYLPDWLEDNLSEGIREWWDLKPGAPKPKANQQKQDDGRGLVLPGYKYLGPFNGLDKGEPVNAADAAALEHDKAYDQQLKAGDNPYLRYNHADAEFQERLQEDTSFGGNLGRAVFQAKKRVLEPLGLVEEGAKTAPGKKRPVEQSPQEPDSSSGIGKKGQQPARKRLNFGQTGDSESVPDPQPLGEPPAAPSGVGSNTMASGGGAPMADNNEGADGVGNASGNWHCDSTWLGDRVITTSTRTWALPTYNNHLYKQISSQSGGSTNDNTYFGYSTPWGYFDFNRFHCHFSPRDWQRLINNNWGFRPKKLNFKLFNIQVKEVTTNDGTTTIANNLTSTVQVFTDSEYQLPYVLGSAHQGCLPPFPADVFMIPQYGYLTLNNGSQAVGRSSFYCLEYFPSQMLRTGNNFEFSYTFEDVPFHSSYAHSQSLDRLMNPLIDQYLYYLSRTQTTSGTAGNRELQFSQAGPSSMANQAKNWLPGPCYRQQRVSKTTNQNNNSNFAWTGATKYHLNGRDSLVNPGPAMATHKDDEDKFFPMSGVLIFGKQGAGNSNVDLDNVMITSEEEIKTTNPVATEEYGTVATNLQSANTAPATGTVNSQGALPGMVWQDRDVYLQGPIWAKIPHTDGHFHPSPLMGGFGLKHPPPQILIKNTPVPANPPTTFSPAKFASFITQYSTGQVSVEIEWELQKENSKRWNPEIQYTSNYNKSTNVDFAVDTNGVYSEPRPIGTRYLTRNL

SEQ ID NO: 934 - protein, 736 aa, Artificial Sequence
  source: /note="Description of Artificial Sequence: Synthetic polypeptide"
MAADGYLPDWLEDNLSEGIREWWDLKPGAPKPKANQQKQDDGRGLVLPGYKYLGPFNGLDKGEPVNAADAAALEHDKAYDQQLKAGDNPYLRYNHADAEFQERLQEDTSFGGNLGRAVFQAKKRVLEPLGLVEEGAKTAPGKKRPVEQSPQEPDSSSGIGKKGQQPARKRLNFGQTGDSESVPDPQPLGEPPAAPSGVGSNTMAAGGGAPMADNNEGADGVGNASGNWHCDSTWLGDRVITTSTRTWALPTYNNHLYKQISSQSGGSTNDNTYFGYSTPWGYFDFNRFHCHFSPRDWQRLINNNWGFRPKKLNFKLFNIQVKEVTTNDGTTTIANNLTSTVQVFTDSEYQLPYVLGSAHQGCLPPFPADVFMIPQYGYLTLNNGSQAVGRSSFYCLEYFPSQMLRTGNNFQFSYTFEDVPFHSSYAHSQSLDRLMNPLIDQYLYYLSRTQTTSGTAGNRTLQFSQAGPSSMANQAKNWLPGPCYRQQRVSKTTNQNNNSNFAWTGATKYHLNGRDSLVNPGPAMATHKDDEDKFFPMSGVLIFGKQGAGNSNVDLDNVMITNEEEIKTTNPVATEEYGTVATNLQSANTAPATGTVNSQGALPGMVWQDRDVYLQGPIWAKIPHTDGHFHPSPLMGGFGLKHPPPQILIKNTPVPANPPTTFSPAKFASFITQYSTGQVSVEIEWELQKENSKRWNPEIQYTSNYNKSTNVDFAVDTNGVYSEPRPIGTRYLTRNL

SEQ ID NO: 935 - protein, 736 aa, Artificial Sequence
  source: /note="Description of Artificial Sequence: Synthetic polypeptide"
MAADGYLPDWLEDNLSEGIREWWDLKPGAPKPKANQQKQDDGRGLVLPGYKYLGPFNGLDKGEPVNAADAAALEHDKAYDQQLKAGDNPYLRYNHADAEFQERLQEDTSFGGNLGRAVFQAKKRVLEPLGLVEEGAKTAPGKKRPVEQSPQEPDSSSGIGKKGQQPAKKRLNFGQTGDSESVPDPQPLGEPPAAPSGVGSNTMAAGGGAPMADNNEGADGVGNASGNWHCDSTWLGDRVITTSTRTWALPTYNNHLYKQISSQSGGSTNDNTYFGYSTPWGYFDFNRFHCHFSPRDWQRLINNNWGFRPKKLNFKLFNIQVKEVTTNDGTTTIANNLTSTVQVFTDSEYQLPYVLGSAHQGCLPPFPADVFMIPQYGYLTLNNGSQAVGRSSFYCLEYFPSQMLRTGNNFEFSYTFEDVPFHSSYAHSQSLDRLMNPLIDQYLYYLSRTQTTSGTAGNRTLQFSQAGPSSMANQAKNWLPGPCYRQQRVSKTANQNNNSNFAWTGATKYHLNGRDSLVNPGPAMATHKDDEDKFFPMSGVLIFGKQGAGNSNVDLDNVMITSEEEIKTTNPVATEQYGTVATNLQSSNTAPATGTVNSQGALPGMVWQNRDVYLQGPIWAKIPHTDGHFHPSPLMGGFGLKHPPPQILIKNTPVPANPPTTFSPAKFASFITQYSTGQVSVEIEWELQKENSKRWNPEIQYTSNYNKSTNVDFAVDTNGVYSEPRPIGTRYLTRNL

SEQ ID NO: 936 - protein, 736 aa, Artificial Sequence
  source: /note="Description of Artificial Sequence: Synthetic polypeptide"
MAADGYLPDWLEDNLSEGIREWWDLKPGAPKPKANQQKQDDGRGLVLPGYKYLGPFNGLDKGEPVNAADAAALEHDKAYDQQLKAGDNPYLRYNHADAEFQERLQEDTSFGGNLGRAVFQAKKRVLEPLGLVEEGAKTAPGKKRPVEQSPQEPDSSSGIGKKGQQPAKKRLNFGQTGDSESVPDPQPLGEPPAAPSGVGSNTMASGGGAPMADNNEGADGVGNASGNWHCDSTWLGDRVITTSTRTWALPTYNNHLYKQISSQSGGSTNDNTYFGYSTPWGYFDFNRFHCHFSPRDWQRLINNNWGFRPKKLNFKLFNIQVKEVTTNDGTTTIANNLTSTVQVFTDSEYQLPYVLGSAHQGCLPPFPADVFMIPQYGYLTLNNGSQAVGRSSFYCLEYFPSQMLRTGNNFEFSYTFEDVPFHSSYAHSQSLDRLMNPLIDQYLYYLSRTQTTSGTAGNRTLQFSQAGPSSMANQAKNWLPGPCYRQQRVSKTANQNNNSNFAWTGATKYHLNGRDSLVNPGPAMATHKDDEDKFFPMSGVLIFGKQGAGNSNVDLDNVMITSEEEIKTTNPVATEEYGTVATNLQSSNTAPATGTVNSQGALPGMVWQNRDVYLQGPIWAKIPHTDGHFHPSPLMGGFGLKHPPPQILIKNTPVPANPPTTFSPAKFASFITQYSTGQVSVEIEWELQKENSKRWNPEIQYTSNYNKSTNVDFAVDTNGVYSEPRPIGTRYLTRNL

SEQ ID NO: 937 - protein, 736 aa, Artificial Sequence
  source: /note="Description of Artificial Sequence: Synthetic polypeptide"
MAADGYLPDWLEDNLSEGIREWWDLKPGAPKPKANQQKQDDGRGLVLPGYKYLGPFNGLDKGEPVNAADAAALEHDKAYDQQLKAGDNPYLRYNHADAEFQERLQEDTSFGGNLGRAVFQAKKRVLEPLGLVEEGAKTAPGKKRPVEQSPQEPDSSSGIGKKGQQPAKKRLNFGQTGDSESVPDPQPLGEPPAAPSGVGSNTMASGGGAPMADNNEGADGVGNASGNWHCDSTWLGDRVITTSTRTWALPTYNNHLYKQISSQSGGSTNDNTYFGYSTPWGYFDFNRFHCHFSPRDWQRLINNNWGFRPKKLNFKLFNIQVKEVTTNDGTTTIANNLTSTVQVFTDSEYQLPYVLGSAHQGCLPPFPADVFMIPQYGYLTLNNGSQAVGRSSFYCLEYFPSQMLRTGNNFQFSYTFEDVPFHSSYAHSQSLDRLMNPLIDQYLYYLSRTQTTSGTAGNRELQFSQAGPSSMANQAKNWLPGPCYRQQRVSKTTNQNNNSNFAWTGATKYHLNGRDSLVNPGPAMATHKDDEDKFFPMSGVLIFGKQGAGNSNVDLDNVMITNEEEIKTTNPVATEQYGTVATNLQSANTAPATGTVNSQGALPGMVWQDRDVYLQGPIWAKIPHTDGHFHPSPLMGGFGLKHPPPQILIKNTPVPANPPTTFSPAKFASFITQYSTGQVSVEIEWELQKENSKRWNPEIQYTSNYNKSTNVDFAVDTNGVYSEPRPIGTRYLTRNL

SEQ ID NO: 938 - DNA, 2211 bp, Artificial Sequence
  source: /note="Description of Artificial Sequence: Synthetic polynucleotide"
atggctgccgatggttatcttccagattggctcgaggacaacctctctgagggcattcgcgagtggtgggacttgaaacctggagccccgaaacccaaagccaaccagcaaaagcaggacgacggccggggtctggtgcttcctggctacaagtacctcggacccttcaacggactcgacaagggggagcccgtcaacgcggcggacgcagcggccctcgagcacgacaaggcctacgaccagcagctcaaagcgggtgacaatccgtacctgcggtataaccacgccgacgccgagtttcaggagcgtctgcaagaagatacgtcttttgggggcaacctcgggcgagcagtcttccaggccaagaagcgggttctcgaacctctcggtctggttgaggaaggcgctaagacggctcctggaaagaagagaccggtagagcaatcaccccaggaaccagactcctcttcgggcatcggcaagaaaggccagcagcccgcgaaaaagagactcaactttgggcagacaggcgactcagagtcagtgcccgaccctcaaccactcggagaaccccccgcagccccctctggtgtgggatctaatacaatggctgcaggcggtggcgctccaatggcagacaataacgaaggcgccgacggagtgggtaacgcctcaggaaattggcattgcgattccacatggctgggcgacagagtcatcaccaccagcacccgaacctgggccctccccacctacaacaaccacctctacaagcaaatctccagccaatcgggagcaagcaccaacgacaacacctacttcggctacagcaccccctgggggtattttgactttaacagattccactgccacttctcaccacgtgactggcagcgactcatcaacaacaactggggattccggcccaagagactcaacttcaagctcttcaacatccaggtcaaggaggtcacgacgaatgatggcaccacgaccatcgccaataaccttaccagcacggttcaggtctttacggactcggaataccagctcccgtacgtcctcggctctgcgcaccagggctgcctgcctccgttcccggcggacgtcttcatgattcctcagtacgggtacctgactctgaacaatggcagtcaggccgtgggccgttcctccttctactgcctggagtactttccttctcaaatgctgagaacgggcaacaactttgagttcagctacacgtttgaggacgtgccttttcacagcagctacgcgcacagccaaagcctggaccggctgatgaaccccctcatcgaccagtacctgtactacctgtctcggactcagaccacgagtggtaccgcaggaaatcggacgttgcaattttctcaggccgggcctagtagcatggcgaatcaggccaaaaactggctacccgggccctgctaccggcagcaacgcgtctccaagacagcgaatcaaaataacaacagcaactttgcctggaccggtgccaccaagtatcatctgaatggcagagactctctggtaaatcccggtcccgctatggcaacccacaaggacgacgaagacaaattttttccgatgagcggagtcttaatatttgggaaacagggagctggaaatagcaacgtggaccttgacaacgttatgataaccagtgaggaagaaattaaaaccaccaacccagtggccacagaacagtacggcacggtggccactaacctgcaatcgtcaaacaccgctcctgctacagggaccgtcaacagtcaaggagccttacctggcatggtctggcagaaccgggacgtgtacctgcagggtcctatctgggccaagattcctcacacggacggacactttcatccctcgccgctgatgggaggctttggactgaaacacccgcctcctcagatcctgattaagaatacacctgttcccgcgaatcctccaactaccttcagtccagctaagtttgcgtcgttcatcacgcagtacagcaccggacaggtcagcgtggaaattgaatgggagctgcagaaagaaaacagcaaacgctggaacccagagattcaatacacttccaactacaacaaatctacaaatgtggactttgctgttgacacaaatggcgtttattctgagcctcgccccatcggcacccgttacctcacccgtaatctgtaa

SEQ ID NO: 939 - protein, 738 aa, Artificial Sequence; identical to SEQ ID NO: 18
  source: /note="Description of Artificial Sequence: Synthetic polypeptide"

SEQ ID NO: 940 - DNA, 2211 bp, Artificial Sequence
  source: /note="Description of Artificial Sequence: Synthetic polynucleotide"
atggctgccgatggttatcttccagattggctcgaggacaacctctctgagggcattcgcgagtggtgggacttgaaacctggagccccgaaacccaaagccaaccagcaaaagcaggacgacggccggggtctggtgcttcctggctacaagtacctcggacccttcaacggactcgacaagggggagcccgtcaacgcggcggacgcagcggccctcgagcacgacaaggcctacgaccagcagctcaaagcgggtgacaatccgtacctgcggtataaccacgccgacgccgagtttcaggagcgtctgcaagaagatacgtcttttgggggcaacctcgggcgagcagtcttccaggccaagaagcgggttctcgaaccttttggtctggttgaggaaggcgctaagacggctcctggaaagaaacgtccggtagagcagtcgccacaagagccagactcctcctcgggcatcggcaagacaggccagcagcccgctaaaaagagactcaattttggtcagactggcgactcagagtcagtccccgacccacaacctctcggagaacctccagcaacccccgctgctgtgggacctactacaatggcttcaggcggtggcgcaccaatggcagacaataacgaaggcgccgacggagtgggtaatgcctcaggaaattggcattgcgattccacatggctgggcgacagagtcatcaccaccagcacccgcacctgggccttgcccacctacaataaccacctctacaagcaaatctccagtgcttcaacgggggccagcaacgacaaccactacttcggctacagcaccccctgggggtattttgatttcaacagattccactgccacttttcaccgcgtgactggcagcgactcatcaacaacaattggggattccggcccaagagactcaacttcaagctcttcaacatccaagtcaaggaggtcacgacgagtgatggcgtcacaaccatcgctaataaccttaccagcacggttcaagtcttctcggactcggagtaccagcttccgtacgtcctcggctctgcgcaccagggctgcctccctccgttcccggcggacgtgttcatgattccgcaatacggctacctgacgctcaacaatggcagccaagccgtgggacgttcatccttttactgcctggaatatttcccttctcagatgctgagaacgggcaacaactttaccttcagctacacctttgaggaagtgcctttccacagcagctacgcgcacagccagagcctggaccggctgatgaatcctctcatcgaccaatacctgtattacctgaacagaactcaaaatcagtccggaagtgcccaaaacaaggacttgctgtttagccgtgggtctccagctggcatgtctgttcagcccaaaaactggctacctggaccctgttatcggcagcagcgcgtttctaaaacaaaaacaggcaacaacaacagcaattttacctggactggtgcttcaaaatataacctcaatgggcatgaatccatcatcaaccctggcactgctatggcctcacacaaagacgacgaagacaagttctttcccatgagcggtgtcatgatttttggaaaagagagcgccggagcttcaaacactgcattggacaatgtcatgattacagacgaagaggaaattaaagccactaaccctgtggccaccgaaagatttgggaccgtggcagtcaatttccagagcagcagcacacaccctgcgaccggagatgtgcatgttatgggagcattacctggcatggtgtggcaagatagagacgtgtacctgcagggtcccatctgggccaaaattcctcacacagatggacactttcacccgtctcctcttatgggcggctttggactcaagcacccgcctcctcagatcctcatcaaaaacacgcctgttcctgcgaatcctccggcggagttttcagctacaaagtttgcttcattcatcacccaatactccacaggacaagtgagtgtggaaattgaatgggagctgcagaaagaaaacagcaagcgctggaatcccgaagtgcagtacacatccaattatgcaaaatctgccaacgttgattttaccgtggacaacaatggactttatactgagcctcgccccattggcacccgttaccttacccgtcccctgtaa

SEQ ID NO: 941 - DNA, 2211 bp, Artificial Sequence; identical to SEQ ID NO: 940
  source: /note="Description of Artificial Sequence: Synthetic polynucleotide"

SEQ ID NO: 942 - DNA, 2202 bp, Artificial Sequence
  source: /note="Description of Artificial Sequence: Synthetic polynucleotide"
atgactgacggttaccttccagattggctagaggacaacctctctgaaggcgttcgagagtggtgggcgctgcaacctggagcccctaaacccaaggcaaatcaacaacatcaggacaacgctcggggtcttgtgcttccgggttacaaatacctcggacccggcaacggacttgacaagggggaacccgtcaacgcagcggacgcggcagccctcgaacacgacaaggcctacgaccagcagctcaaggccggtgacaacccctacctcaagtacaaccacgccgacgccgagtttcaggagcgtcttcaagaagatacgtcttttgggggcaacctcggacgagcagtcttccaggccaaaaagaggatccttgagcctctgggtctggttgaggaagcggctaagacggctcctggaaaaaagagacctgtagagcaatctccagcagaaccggactcctcttcgggcatcggcaaatcaggccagcagcccgctagaaaaagactgaattttggtcagactggcgacacagagtcagtcccagaccctcaaccactcggacaacctcccgcagccccctctggtgtgggatctactacaatggcttcaggcggtggcgcaccaatggcagacaataacgagggtgccgatggagtgggtaattcctcaggaaattggcattgcgattcccaatggctgggcgacagagtcatcaccaccagcacccgcacctgggccctgcccacctacaacaatcacctctacaagcaaatctccagccaatcaggagccaccaacgacaaccactactttggctacagcaccccctgggggtattttgacttcaacagattccactgccacttttcaccacgtgactggcaaagactcatcaacaacaactggggattccgacccaagagactcaacttcaagctctttaacattcaagtcaaagaggtcacgcagaatgacggtacgacgacgattgccaataaccttaccagcacggttcaggtgtttactgactccgagtaccagctcccgtacgtcctcggctcggcgcatcagggatgcctcccgccgttcccagcagacgtcttcatggtcccacagtatggatacctcaccctgaacaacgggagtcaggcggtaggacgctcttccttttactgcctggagtactttccttctcagatgctgcgtactggaaacaactttcagtttagctacacttttgaagacgtgcctttccacagcagctacgctcacagccaaagtctggaccgtctcatgaatcctctgatcgaccagtacctgtactatctgaacaggacacaaacagccagtggaactcagcagtctcggctactgtttagccaagctggacccaccagtatgtctcttcaagctaaaaactggctgcctggaccttgctacagacagcagcgtctgtcaaagcaggcaaacgacaacaacaacagcaactttccctggactggtgccaccaaatatcatctgaatggccgggactcattggtgaacccgggccctgctatggccagtcacaaggatgacaaagaaaagtttttccccatgcatggaaccctgatatttggtaaagaaggaacaaatgccaacaacgcggatttggaaaatgtcatgattacagatgaagaagaaatccgcaccaccaatcccgtggctacggagcagtacgggactgtgtcaaataatttgcaaaactcaaacgctggtccaactactggaactgtcaatcaccaaggagcgttacctggtatggtgtggcaggatcgagacgtgtacctgcagggacccatttgggccaagattcctcacaccgatggacactttcatccttctccactgatgggaggttttgggctcaaacacccgcctcctcagatcatgatcaaaaacactcccgttccagccaatcctcccacaaactttagtgcggcaaagtttgcttccttcatcacacagtactccacggggcaggtcagcgtggagatcgagtgggagctgcagaaggagaacagcaaacgctggaatcccgaaattcagtacacttccaactacaacaaatctgttaatgtggactttactgtggacactaatggtgtgtattcagagcctcgccccattggcaccagatacctgactcgtaatctgtaa

SEQ ID NO: 943 - DNA, 2211 bp, Artificial Sequence
  source: /note="Description of Artificial Sequence: Synthetic polynucleotide"
atggctgccgatggttatcttccagattggctcgaggacaacctctctgagggcattcgcgagtggtgggacttgaaacctggagccccgaaacccaaagccaaccagcaaaagcaggacgacggccggggtctggtgcttcctggctacaagtacctcggacccttcaacggactcgacaagggggagcccgtcaacgcggcggacgcagcggccctcgagcacgacaaggcctacgaccagcagctcaaagcgggtgacaatccgtacctgcggtataaccacgccgacgccgagtttcaggagcgtctgcaagaagatacgtcttttgggggcaacctcgggcgagcagtcttccaggccaagaagcgggttctcgaaccttttggtctggttgaggaaggcgctaagacggctcctggaaagaaacgtccggtagagcagtcgccacaagagccagactcctcctcgggcatcggcaagacaggccagcagcccgctaaaaagagactcaattttggtcagactggcgactcagagtcagtccccgacccacaacctctcggagaacctccagcaacccccgctgctgtgggacctactacaatggcttcaggcggtggcgcaccaatggcagacaataacgaaggcgccgacggagtgggtaatgcctcaggaaattggcattgcgattccacatggctgggcgacagagtcatcaccaccagcacccgcacctgggccttgcccacctacaataaccacctctacaagcaaatctccagtgcttcaacgggggccagcaacgacaaccactacttcggctacagcaccccctgggggtattttgatttcaacagattccactgccacttttcaccacgtgactggcagcgactcatcaacaacaattggggattccggcccaagagactcaacttcaagctcttcaacatccaagtcaaggaggtcacgacgaatgatggcgtcacaaccatcgctaataaccttaccagcacggttcaagtcttctcggactcggagtaccagcttccgtacgtcctcggctctgcgcaccagggctgcctccctccgttcccggcggacgtgttcatgattccgcaatacggctacctgacgctcaacaatggcagccaagccgtgggacgttcatccttttactgcctggaatatttcccttctcagatgctgagaacgggcaacaactttaccttcagctacacctttgaggaagtgcctttccacagcagctacgcgcacagccagagcctggaccggctgatgaatcctctcatcgaccaatacctgtattacctgaacagaactcaaaatcagtccggaagtgcccaaaacaaggacttgctgtttagccgtgggtctccagctggcatgtctgttcagcccaaaaactggctacctggaccctgttatcggcagcagcgcgtttctaaaacaaaaacagacaacaacaacagcaattttacctggactggtgcttcaaaatataacctcaatgggcgtgaatccatcatcaaccctggcactgctatggcctcacacaaagacgacgaagacaagttctttcccatgagcggtgtcatgatttttggaaaagagagcgccggagcttcaaacactgcattggacaatgtcatgattacagacgaagaggaaattaaagccactaaccctgtggccaccgaaagatttgggaccgtggcagtcaatttccagagcagcagcacagaccctgcgaccggagatgtgcatgttatgggagcattacctggcatggtgtggcaagatagagacgtgtacctgcagggtcccatctgggccaaaattcctcacacagatggacactttcacccgtctcctcttatgggcggctttggactcaagcacccgcctcctcagatcctcatcaaaaacacgcctgttcctgcgaatcctccggcggagttttcagctacaaagtttgcttcattcatcacccaatactccacaggacaagtgagtgtggaaattgaatgggagctgcagaaagaaaacagcaagcgctggaatcccgaagtgcagtacacatccaattatgcaaaatctgccaacgttgattttaccgtggacaacaatggactttatactgagcctcgccccattggcacccgttaccttacccgtcccctgtaa

SEQ ID NO: 944 - DNA, 2211 bp, Artificial Sequence
  source: /note="Description of Artificial Sequence: Synthetic polynucleotide"
atggctgccgatggttatcttccagattggctcgaggacaacctctctgagggcattcgcaagtggtgggacttgaaacctggagccccgaaacccaaagccaaccagcaaaagcaggacgacggccggggtctggtgcttcctggctacaagtacctcggacccttcaacggactcgacaagggggagcccgtcaacgcggcggacgcagcggccctcgagcacgacaaggcctacgaccagcagctcaaagcgggtgacaatccgtacctgcggtataaccacgccgacgccgagtttcaggagcgtctgcaagaagatacgtcttttgggggcaacctcgggagagcagtcttccaggccaagaagcgggttctcgaaccttttggtctggttgaggaaggcgctaagacggctcctggaaagaaacgtccggtagagcagtcgccacaagagccagactcctcctcgggcatcggcaagacaggccagcagcccgctaaaaagagactcaattttggtcagactggcgactcagagtcagtccccgacccacaacctctcggagaacctccagcaacccccgctgctgtgggacctactacaatggcttcaggcggtggcgcaccaatggcagacaataacgaaggcgccgacggagtgggtaatgcctcaggaaattggcattgcgattccacatggctgggcgacagagtcatcaccaccagcacccgcacctgggccttgcccacctacaataaccacctctacaagcaaatctccagtgcttcaacgggggccagcaacgacaaccactacttcggctacagcaccccctgggggtattttgatttcaacagattccactgccacttttcaccacgtgactggcagcgactcatcaacaacaattggggattccggcccaagagactcaacttcaagctcttcaacatccaagtcaaggaggtcacgacgaatgatggcgtcacaaccatcgctaataaccttaccagcacggttcaagtcttctcggactcggagtaccagcttccgtacgtcctcggctctgcgcaccagggctgcctccctccgttcccggcggacgtgttcatgattccgcaatacggctacctgacgctcaacaatggcagccaagccgtgggacgttcatccttttactgcctggaatatttcccttctcagatgctgagaacgggcaacaactttaccttcagctacacctttgaggaagtgcctttccacagcagctacgcgcacagccagagcctggaccggctgatgaatcctctcatcgaccaatacctgtattacctgaacagaactcaaaatcagtccggaagtgcccaaaacaaggacttgctgtttagccgtgggtctccagctggcatgtctgttcagcccaaaaactggctacctggaccctgttatcggcagcagcgcgtttctaaaacaaaaacagacaacaacaacagcaattttacctggactggtgcttcaaaatataacctcaatgggcgtgaatccatcatcaaccctggcactgctatggcctcacacaaagacgacaaagacaagttctttcccatgagcggtgtcatgatttttggaaaagagagcgccggagcttcaaacactgcattggacaatgtcatgattacagacgaagaggaaattaaagccactaaccctgtggccaccgaaagatttgggaccgtggcagtcaatttccagagcagcagcacagaccctgcgaccggagatgtgcatgttatgggagcattacctggcatggtgtggcaagatagagacgtgtacctgcagggtcccatttgggccaaaattcctcacacagatggacactttcacccgtctcctcttatgggcggctttggactcaagcacccgcctcctcagatcctcatcaaaaacacacctgttcctgcgaatcctccggcggagttttcagctacaaagtttgcttcattcatcacccaatactccacaggacaagtgagtgtggaaattgaatgggagctgcagaaagaaaacagcaagcgctggaatcccgaagtgcagtacacatccaattatgcaaaatctgccaacgttgattttaccgtggacaacaatggactttatactgagcctcgccccattggcacccgttaccttacccgtcccctgtaa

SEQ ID NO: 945 - DNA, 2211 bp, Artificial Sequence
  source: /note="Description of Artificial Sequence: Synthetic polynucleotide"
atggctgccgatggttatcttccagattggctcgaggacaacctctctgagggcattcgcgagtggtgggacttgaaacctggagccccgaaacccaaagccaaccagcaaaagcaggacaacggccggggtctggtgcttcctggctacaagtacctcggacccttcaacggactcgacaagggggagcccgtcaacgcggcggacgcagcggccctcgagcacgacaaggcctacgaccagcagctcaaagcgggtgacaatccgtacctgcggtataaccacgccgacgccgagtttcaggagcgtctgcaagaagatacgtcttttgggggcaacctcgggcgagcagtcttccaggccaagaagcgggttctcgaaccttttggtctggttgaggaaggcgctaagacggctcctggaaagaaacgtccggtagagcagtcgccacaagagccagactcctcctcgggcatcggcaagacaggccagcagcccgctaaaaagagactcaattttggtcagactggcgactcagagtcagtccccgacccacaacctctcggagaacctccagcaacccccgctgctgtgggacctactacaatggcttcaggcggtggcgcaccaatggcagacaataacgaaggcgccgacggagtgggtaatgcctcaggaaattggcattgcgattccacatggctgggcgacagagtcatcaccaccagcacccgcacctgggccttgcccacctacaataaccacctctacaagcaaatctccagtgcttcaacgggggccagcaacgacaaccactacttcggctacagcaccccctgggggtattttgatttcaacagattccactgccacttttcaccacgtgactggcagcgactcatcaacaacaattggggattccggcccaagagactcaacttcaagctcttcaacatccaagtcaaggaggtcacgacgaatgatggcgtcacaaccatcgctaataaccttaccagcacggttcaagtcttctcggactcggagtaccagcttccgtacgtcctcggctctgcgcaccagggctgcctccctccgttcccggcggacgtgttcatgattccgcaatacggctacctgacgctcaacaatggcagccaagccgtgggacgttcatccttttactgcctggaatatttcccttctcagatgctgagaacgggcaacaactttaccttcagctacacctttgaggaagtgcctttccacagcagctacgcgcacagccagagcctggaccggctgatgaatcctctcatcgaccaatacctgtattacctgaacagaactcaaaatcagtccggaagtgcccaaaacaaggacttgctgtttagccgtgggtctccagctggcatgtctgttcagcccaaaaactggctacctggaccctgttatcggcagcagcgcgtttctaaaacaaaaacagacaacaacaacagcaattttacctggactggtgcttcaaaatataacctcaatgggcgtgaatccatcatcaaccctggcactgctatggcctcacacaaagacgacgaagacaagttctttcccatgagcggtgtcatgatttttggaaaagagagcgccggagcttcaaacactgcattggacaatgtcatgattacagacgaagaggaaattaaagccactaaccctgtggccaccgaaagatttgggaccgtggcagtcaatttccagagcagcagcacacaccctgcgaccggagatgtgcatgttatgggagcattacctggcatggtgtggcaagatagagacgtgtacctgcagggtcccatctgggccaaaattcctcacacagatggacactttcacccgtctcctcttatgggcggctttggactcaagcacccgcctcctcagatcctcatcaaaaacacgcctgttcctgcgaatcctccggcggagttttcagctacaaagtttgcttcattcatcacccaatactccacaggacaagtgagtgtggaaattgaatgggagctgcagaaagaaaacagcaagcgctggaatcccgaagtgcagtacacatccaattatgcaaaatctgccaacgttgattttaccgtggacaacaatggactttatactgagcctcgccccattggcacccgttaccttacccgtcccctgtaa

SEQ ID NO: 946 - DNA, 2211 bp, Artificial Sequence
  source: /note="Description of Artificial Sequence: Synthetic polynucleotide"
atggctgccgatggttatcttccagattggctcgaggacaacctctctgagggcattcgcgagtggtgggacttgaaacctggagccccgaaacccaaagccaaccagcaaaagcaggacgacggccggggtctggtgcttcctggctacaagtacctcggacccttcaacggactcgacaagggggagcccgtcaacgcggcggacgcagcggccctcgagcacgacaaggcctacgaccagcagctcaaagcgggtgacaatccgtacctgcggtataaccacgccgacgccgagtttcaggagcgtctgcaagaagatacgtcttttgggggcaacctcgggcgagcagtcttccaggccaaaaagcgggttctcgaaccttttggtctggttgaggaaggcgctaagacggctcctggaaagaaacgtccggtagagcagtcgccacaagagccagactcctcctcgggcatcggcaagacaggccagcagcccgctaaaaagagactcaattttggtcagactggcgactcagagtcagtccccgacccacaacctctcggagaacctccagcaacccccgctgctgtgggacctactacaatggcttcaggcggtggcgcaccaatggcagacaataacgaaggcgccgacggagtgggtaatgcctcaggaaattggcattgcgattccacatggctgggcgacagagtcatcaccaccagcacccgcacctgggccttgcccacctacaataaccacctctacaagcaaatctccagtgcttcaacgggggccagcaacgacaaccactacttcggctacagcaccccctgggggtattttgatttcaacagattccactgccacttttcaccacgtgactggcagcgactcatcaacaacaattggggattccggcccaagagactcaacttcaagctcttcaacatccaagtcaaggaggtcacgacgaatgatggcgtcacaaccatcgctaataaccttaccagcacggttcaagtcttctcggactcggagtaccagcttccgtacgtcctcggctctgcgcaccagggctgcctccctccgttcccggcggacgtgttcatgattccgcaatacggctacctgacgctcaacaatggcagccaagccgtgggacgttcatccttttattgcctggaatatttcccatcgcagatgctgagaacgggcaataactttaccttcagctacacctttgaggacgtgcctttccacagcagctacgcgcacagccagagcctggaccggctgatgaatcctctcatcgaccagtacctgtattacctgaacagaactcagaaccagtccggaagtgcccaaaacaaggacttgctgtttagccgggggtctccagctggcatgtctgttcagctcaaaaactggctacctggaccctgttatcggcagcagcgcgtttctaaaacaaaaacagacaacaacaacagcaattttacctggactggtgcttcaaaatataaccttaatgggcgtgaatccatcatcaaccctggcactgctatggcctcacacaaagacgacgaagacaagttctttcccatgagcggtgtcatgatttttggaaaagagagcgccggagcttcaaacactgcattggacaatgtcatgattacagacgaagaggaaattaaagccactaaccctgtggccaccgaaagatttgggaccgtggcagtcaatttccagagcagcagcacagaccctgcgaccggagatgtgcatgttatgggagcattacctggcatggtgtggcaagatagagacgtgtacctgcagggtcccatttgggccaaaattcctcacacagatggacactttcacccgtctcctcttatgggcggctttggactcaaacacccgcctcctcagatcctcatcaaaaacacacctgttcctgcgaatcctccggcggagttttcagctacaaagtttgcttcattcatcacccaatactccacaggacaagtgagcgtggaaattgaatgggagctgcagaaagaaaacagcaagcgctggaatcccgaagtgcagtacacatccaattatgcaaaatctgccaacgttgattttaccgtggacaacaatggactttatactgagcctcgccccattggcacccgttaccttacccgtcccctgtaa

SEQ ID NO: 947 - DNA, 2211 bp, Artificial Sequence
  source: /note="Description of Artificial Sequence: Synthetic polynucleotide"
atggctgccgatggttatcttccagattggctcgaggacaacctctctgagggcattcgcgagtggtgggacttgaaacctggagccccgaaacccaaagccaaccagcaaaagcaggacgacggccggggtctggtgcttcctggctacaagtacctcggacccttcaacggactcgacaagggggagcccgtcaacgcggcggacgcagcggccctcgagcacgacaaggcctacgaccagcagctcaaagcgggtgacaatccgtacctgcggtataaccacgccgacgccgagtttcaggagcgtctgcaagaagatacgtcttttgggggcaacctcgggcgagcagtcttccaggccaagaagcgggttctcgaaccttttggtctggttgaggaaggtgctaagacggctcctggaaagaagagaccggtagagcagtcgccccaagaaccagactcctcatcgggcatcggcaaatcaggccagcagcccgctaaaaagagactcaattttggtcagactggcgactcagagtcagtccccgacccacaacctctcggagaacctccagcaacccccgctgctgtgggacctactacaatggcttcaggcggtggcgcaccaatggcagacaataacgaaggcgccgacggagtgggtaatgcctcaggaaattggcattgcgattccacatggctgggcgacagagtcattaccaccagcacccgaacctgggccctgcccacctataacaaccacctctacaaacaaatctccagcgcttcaacgggggccagcaacgacaaccactacttcggctacagcaccccctgggggtattttgattttaacagattccactgccacttctcaccacgtgactggcagcgactcatcaacaacaattggggattccggcccaagagactcaacttcaagctcttcaacatccaagtcaaggaggtcacgacgaacgatggcgtcacgaccatcgctaataaccttaccagcacggttcaagtcttctcggactcggagtaccagttgccgtacgtcctcggctctgcgcaccagggctgcctccctccgttcccggcggacgtgttcatgattccgcagtacggctacctaacactcaacaatggcagccaggccgtgggacgttcatccttttactgcctggaatatttcccatcgcagatgctgagaacgggcaataactttaccttcagctacacattcgaggacgtgcctttccacagcagctacgcgcacagccaaagcctggaccggctgatgaatcctctcatcgaccagtacttgtattacctaaacagaactcaaaatcagtccggaagtgcccaaaacaaggacttgctgtttagccgggggtctccagctggcatgtctgttcagcccaaaaactggctacctggaccctgttatcggcagcagcgcgtttctaaaacaaaaacagacaacaacaacagcaactttacctggactggtgcttcaaaatataaccttaatgggcgtgaatctataatcaaccctggcactgctatggcttcacacaaagacgacgaagacaagttctttccaatgagcggtgtcatgatttttggcaaggagagcgccggagcttcaaacactgcattggacaatgtcatgattacagacgaagaggaaattaaagccactaaccctgtggccaccgaaagatttgggaccgtggcagtcaatttccagagcagcagcacagaccctgcgaccggagatgtgcatgttatgggagcattacctggcatggtgtggcaagatagagacgtgtacctgcagggtccaatttgggccaaaattcctcacacagatggacactttcacccgtctcctcttatgggcggctttggacttaagcacccgcctcctcagatcctcatcaaaaacacgcctgttcctgcgaatcctccggcagagttttcggctacaaagtttgcttcattcatcacccagtattccacaggacaagtgagtgtggaaattgaatgggagttgcagaaagaaaacagcaagcgttggaatcccgaagtgcagtacacatctaattatgcaaaatctgccaacgttgatttcactgtggacaacaatggactttatactgagcctcgccccattggcacccgttacctcacccgtcccctgtaa

SEQ ID NO: 948 - DNA, 2211 bp, Artificial Sequence
  source: /note="Description of Artificial Sequence: Synthetic polynucleotide"
atggctgccgatggttatcttccagattggctcgaggacaacctctctgagggcattcgcgagtggtgggacttgaaacctggagccccgaaacccaaagccaaccagcaaaagcaggacgacggccggggtctggtgcttcctggctacaagtacctcggacccttcaacggactcgacaagggggagcccgtcaacgcggcggacgcagcggccctcgagcacgacaaggcctacgaccagcagctcaaagcgggtgacaatccgtacctgcggtataaccacgccgacgccgagtttcaggagcgtctgcaagaagatacgtcttttgggggcaacctcgggcgagcagtcttccaggccaagaagagggttctcgaaccttttggtctggttgaggaaggtgctaagacggctcctggaaagaaacgtccggtagagcagtcaccccaagaaccagactcctcctcgggcattggcaaatcaggccagcagcccgctaaaaagagactcaattttggtcagactggcgactcagagtcagtccccgacccacaacctctcggagaacctccagcaacccccgctgctttgggacctactacaatggcttcaggcggtggcgcaccaatggcagacaataacgaaggcgccgacggagtgggtaatgcctcaggaaattggcattgcgattccacatggctgggcgacagagtcatcaccaccagcacccgcacctgggccttgcccacctacaataaccacctctacaagcaaatctccagtgcttcaacgggggccagcaacgacaaccactacttcggctacagcaccccctgggggtattttgatttcaacagattccactgccatttctcaccacgtgactggcagcgactcatcaacaacaactggggattccggcccaagagactcaacttcaagctcttcaacatccaagtcaaggaggtcacgacgaacgatggcgtcacgaccatcgctaataaccttaccagcacggttcaagtcttctcggactcggagtaccagcttccgtacgtcctcggctctgcgcaccagggctgcctccctccgttcccggcggacgtgttcatgattccgcagtacggctacctgacgctcaacaatggcagcaaagccgtgggacgttcatccttttactgcctggaatatttcccttctcagatgctgagaacgggcaacaactttaccttcagctacacctttgaggaagtgcctttccacagcagctacgcgcacagccagagcctggaccggctgatgaatcctctcatcgaccaatacctgtattacctgaacagaactcaaaatcagtccggaagtgcccaaaacaaggacttgctgtttagccgtgggtctccagctggcatgtctgttcagcccaaaaactggctacctggaccctgttatcggcagcagcgcgtttctaaaacaaaaacagacaacaacaacagcaattttacctggactggtgcttcaaaatataacctcaatgggcgtgaatccatcatcaaccctggcactgctatggcctcacacaaagacgacgaagacaagttctttcccatgagcggtgtcatgatttttggaaaagagagcgccggagcttcaaacactgcattggacaatgtcatgattacagacgaagaggaaattaaagccactaaccctgtggccaccgaaagatttgggaccgtggcagtcaatttccagagcagcagcacagaccctgcgaccggagatgtgcatgttatgggagcattacctggcatggtgtggcaagatagagacgtgtacctgcagggtcccatttgggccaaaattcctcacacggatggacactttcacccgtctcctcttatgggcggctttggactcaagcacccgcctcctcagatcctcatcaaaaacacacctgttcctgcgaatcctccggcagagttttcggctacaaagtttgcttcattcatcacccagtactccacaggacaagtgagcgtggaaattgaatgggagttgcagaaagaaaacagtaagcgctggaatcccgaagtgcagtacacatctaattatgcaaaatctgccaacgttgacttcactgtggacaacaatggactttatactgagcctcgccccattggcacccgttacctcacccgtcccctgtaa

SEQ ID NO: 949 - DNA, 2970 bp, Artificial Sequence
  source: /note="Description of Artificial Sequence: Synthetic polynucleotide"
agatgaccgccaaggtcgtagagtccgccaaggccattctgggcggcagcaaggtgcgcgtggaccaaaaatgcaaggcctctgcgcagatcgaccccacccccgtgatcgtcacctccaacaccaacatgtgcgccgtgattgacgggaacagcaccaccttcgagcaccagcagcccctgcaggaccggatgttcaagtttgaactcacccgccgcctcgactacgactttggcaaggtcaccaagcaggaagtcaaggactttttccggtgggcggctgatcacgtgactgacgtggctcatgagttttacgtcacaaagggtggagctaagaaaaggcccgccccctctgacgaggatataagcgagcccaagcggccgcgcgtgtcatttgcgcagccggagacgtcagacgcggaagctcccggagacttcgccgacaggtaccaaaacaaatgttctcgtcacgcgggtatgctgcagatgctctttccctgcaagacgtgcgagagaatgaatcagaattccaacgtctgcttcacgcacggtcagaaagattgcggggagtgctttcccgggtcagaatctcaaccggtttctgtcgtcagaaaaacgtatcagaaactgtgcatccttcatcagctccggggggcacccgagatcgcctgctctgcttgcgaccaactcaaccccgatttggacgattgccaatttgagcaataaatgactgaaatcaggtatggctgctgacggttatcttccagattggctcgaggacaacctctctgaaggcattcgcgagtggtgggcgctgaaacctggagctccacaacccaaggccaaccaacagcatcaggacaacggcaggggtcttgtgcttcctgggtacaagtacctcggacccttcaacggactcgacaagggagagccggtcaacgaggcagacgccgcggccctcgagcacgacaaggcctacgacaagcagctcgagcagggggacaacccgtatctcaagtacaaccacggcgacgccgagttccagcagcgcttggcgaccgacacctcttttgggggcaacctcgggcgagcagtcttccaggccaaaaagaggattctcgagcctctgggtctggttgaagagggcgttaaaacggctcctggaaagaaacgcccattagaaaagactccaaatcggccgaccaacccggactctgggaaggccccggccaagaaaaagcaaaaagacggcgaaccagccgactctgctagaaggacactcgactttgaagactctggagcaggagacggaccccctgagggatcatcttccggagaaatgtctcatgatgctgagatgcgtgcggcgccaggcggaaatgctgtcgaggcgggacaaggtgccgatggagtgggtaatgcctccggtgattggcattgcgattccacctggtcagagggccgagtcaccaccaccagcacccgaacctgggtcctacccacgtacaacaaccacctgtacctgcgaatcggaacaacggccaacagcaacacctacaacggattctccaccccctggggatactttgactttaaccgcttccactgccacttttccccacgcgactggcagcgactcatcaacaacaactggggactcaggccgaaatcgatgcgtgttaaaatcttcaacatacaggtcaaggaggtcacgacgtcaaacggcgagactacggtcgctaataaccttaccagcacggttcagatctttgcggattcgacgtatgaactcccatacgtgatggacgccggtcaggaggggagctttcctccgtttcccaacgacgtctttatggttccccaatacggatactgcggagttgtcactggaaaaaaccagaaccagacagacagaaatgccttttactgcctggaatactttccatcccaaatgctaagaactggcaacaattttgaagtcagttaccaatttgaaaaagttcctttccattcaatgtacgcgcacagccagagcctggacagaatgatgaatcctttactggatcagtacctgtggcatctgcaatcgaccactaccggaaattcccttaatcaaggaacagctaccaccacgtacgggaaaattaccactggagactttgcctactacaggaaaaactggttgcctggagcctgcattaaacaacaaaaattttcaaagaatgccaatcaaaactacaagattcccgccagcgggggagacgcccttttaaagtatgacacgcataccactctaaatgggcgatggagtaacatggctcctggacctccaatggcaaccgcaggtgccggggactcggattttagcaacagccagctgatctttgccggacccaatccgagcggtaacacgaccacatcttcaaacaatttgttgtttacctcagaagaggagattgccacaacaaacccacgagacacggacatgtttggacagattgcagataataatcaaaatgccaccaccgcccctcacatcgctaacctggacgctatgggaattgttcccggaatggtctggcaaaacagagacatctactaccagggccctatttgggccaaggtccctcacacggacggacactttcacccttcgccgctgatgggaggatttggactgaaacacccgcctccacagattttcatcaaaaacacccccgtacccgccaatcccaatactacctttagcgctgcaaggattaattcttttctgacgcagtacagcaccggacaagttgccgttcagatcgactgggaaattcagaaggagcattccaaacgctggaatcccgaagttcaatttacttcaaactacggcactcaaaattctatgctgtgggctcccgacaatgctggcaactaccacgaactccgggctattgggtcccgtttcctcacccaccacttgtaa

SEQ ID NO: 950 - protein, 736 aa, Artificial Sequence
  source: /note="Description of Artificial Sequence: Synthetic polypeptide"
MAADGYLPDWLEDNLSEGIREWWDLKPGAPKPKANQQKQDDGRGLVLPGYKYLGPFNGLDKGEPVNAADAAALEHDKAYDQQLKAGDNPYLRYNHADAEFQERLQEDTSFGGNLGRAVFQAKKRVLEPFGLVEEGAKTAPGKKRPVEQSPQEPDSSSGIGKTGQQPAKKRLNFGQTGDSESVPDPQPLGEPPATPAAVGPTTMASGGGAPMADNNEGADGVGNASGNWHCDSTWLGDRVITTSTRTWALPTYNNHLYKQISSASTGASNDNHYFGYSTPWGYFDFNRFHCHFSPRDWQRLINNNWGFRPKRLNFKLFNIQVKEVTTSDGVTTIANNLTSTVQVFSDSEYQLPYVLGSAHQGCLPPFPADVFMIPQYGYLTLNNGSQAVGRSSFYCLEYFPSQMLRTGNNFTFSYTFEEVPFHSSYAHSQSLDRLMNPLIDQYLYYLNRTQNQSGSAQNKDLLFSRGSPAGMSVQPKNWLPGPCYRQQRVSKTKTGNNNSNFTWTGASKYNLNGHESIINPGTAMASHKDDEDKFFPMSGVMIFGKESAGASNTALDNVMITDEEEIKATNPVATERFGTVAVNFQSSSTHPATGDVHVMGALPGMVWQDRDVYLQGPIWAKIPHTDGHFHPSPLMGGFGLKHPPPQILIKNTPVPANPPAEFSATKFASFITQYSTGQVSVEIEWELQKENSKRWNPEVQYTSNYAKSANVDFTVDNNGLYTEPRPIGTRYLTRPL

SEQ ID NO: 951 - protein, 736 aa, Artificial Sequence; identical to SEQ ID NO: 950
  source: /note="Description of Artificial Sequence: Synthetic polypeptide"

SEQ ID NO: 952 - protein, 733 aa, Artificial Sequence
  source: /note="Description of Artificial Sequence: Synthetic polypeptide"
MTDGYLPDWLEDNLSEGVREWWALQPGAPKPKANQQHQDNARGLVLPGYKYLGPGNGLDKGEPVNAADAAALEHDKAYDQQLKAGDNPYLKYNHADAEFQERLQEDTSFGGNLGRAVFQAKKRILEPLGLVEEAAKTAPGKKRPVEQSPAEPDSSSGIGKSGQQPARKRLNFGQTGDTESVPDPQPLGQPPAAPSGVGSTTMASGGGAPMADNNEGADGVGNSSGNWHCDSQWLGDRVITTSTRTWALPTYNNHLYKQISSQSGATNDNHYFGYSTPWGYFDFNRFHCHFSPRDWQRLINNNWGFRPKRLNFKLFNIQVKEVTQNDGTTTIANNLTSTVQVFTDSEYQLPYVLGSAHQGCLPPFPADVFMVPQYGYLTLNNGSQAVGRSSFYCLEYFPSQMLRTGNNFQFSYTFEDVPFHSSYAHSQSLDRLMNPLIDQYLYYLNRTQTASGTQQSRLLFSQAGPTSMSLQAKNWLPGPCYRQQRLSKQANDNNNSNFPWTGATKYHLNGRDSLVNPGPAMASHKDDKEKFFPMHGTLIFGKEGTNANNADLENVMITDEEEIRTTNPVATEQYGTVSNNLQNSNAGPTTGTVNHQGALPGMVWQDRDVYLQGPIWAKIPHTDGHFHPSPLMGGFGLKHPPPQIMIKNTPVPANPPTNFSAAKFASFITQYSTGQVSVEIEWELQKENSKRWNPEIQYTSNYNKSVNVDFTVDTNGVYSEPRPIGTRYLTRNL

SEQ ID NO: 953 - protein, 736 aa, Artificial Sequence; identical to SEQ ID NO: 768
  source: /note="Description of Artificial Sequence: Synthetic polypeptide"

SEQ ID NO: 954 - protein, 736 aa, Artificial Sequence
  source: /note="Description of Artificial Sequence: Synthetic polypeptide"
MAADGYLPDWLEDNLSEGIRKWWDLKPGAPKPKANQQKQDDGRGLVLPGYKYLGPFNGLDKGEPVNAADAAALEHDKAYDQQLKAGDNPYLRYNHADAEFQERLQEDTSFGGNLGRAVFQAKKRVLEPFGLVEEGAKTAPGKKRPVEQSPQEPDSSSGIGKTGQQPAKKRLNFGQTGDSESVPDPQPLGEPPATPAAVGPTTMASGGGAPMADNNEGADGVGNASGNWHCDSTWLGDRVITTSTRTWALPTYNNHLYKQISSASTGASNDNHYFGYSTPWGYFDFNRFHCHFSPRDWQRLINNNWGFRPKRLNFKLFNIQVKEVTTNDGVTTIANNLTSTVQVFSDSEYQLPYVLGSAHQGCLPPFPADVFMIPQYGYLTLNNGSQAVGRSSFYCLEYFPSQMLRTGNNFTFSYTFEEVPFHSSYAHSQSLDRLMNPLIDQYLYYLNRTQNQSGSAQNKDLLFSRGSPAGMSVQPKNWLPGPCYRQQRVSKTKTDNNNSNFTWTGASKYNLNGRESIINPGTAMASHKDDKDKFFPMSGVMIFGKESAGASNTALDNVMITDEEEIKATNPVATERFGTVAVNFQSSSTDPATGDVHVMGALPGMVWQDRDVYLQGPIWAKIPHTDGHFHPSPLMGGFGLKHPPPQILIKNTPVPANPPAEFSATKFASFITQYSTGQVSVEIEWELQKENSKRWNPEVQYTSNYAKSANVDFTVDNNGLYTEPRPIGTRYLTRPL

SEQ ID NO: 955 - protein, 736 aa, Artificial Sequence
  source: /note="Description of Artificial Sequence: Synthetic polypeptide"
MAADGYLPDWLEDNLSEGIREWWDLKPGAPKPKANQQKQDNGRGLVLPGYKYLGPFNGLDKGEPVNAADAAALEHDKAYDQQLKAGDNPYLRYNHADAEFQERLQEDTSFGGNLGRAVFQAKKRVLEPFGLVEEGAKTAPGKKRPVEQSPQEPDSSSGIGKTGQQPAKKRLNFGQTGDSESVPDPQPLGEPPATPAAVGPTTMASGGGAPMADNNEGADGVGNASGNWHCDSTWLGDRVITTSTRTWALPTYNNHLYKQISSASTGASNDNHYFGYSTPWGYFDFNRFHCHFSPRDWQRLINNNWGFRPKRLNFKLFNIQVKEVTTNDGVTTIANNLTSTVQVFSDSEYQLPYVLGSAHQGCLPPFPADVFMIPQYGYLTLNNGSQAVGRSSFYCLEYFPSQMLRTGNNFTFSYTFEEVPFHSSYAHSQSLDRLMNPLIDQYLYYLNRTQNQSGSAQNKDLLFSRGSPAGMSVQPKNWLPGPCYRQQRVSKTKTDNNNSNFTWTGASKYNLNGRESIINPGTAMASHKDDEDKFFPMSGVMIFGKESAGASNTALDNVMITDEEEIKATNPVATERFGTVAVNFQSSSTHPATGDVHVMGALPGMVWQDRDVYLQGPIWAKIPHTDGHFHPSPLMGGFGLKHPPPQILIKNTPVPANPPAEFSATKFASFITQYSTGQVSVEIEWELQKENSKRWNPEVQYTSNYAKSANVDFTVDNNGLYTEPRPIGTRYLTRPL

SEQ ID NO: 956 - protein, 736 aa, Artificial Sequence
  source: /note="Description of Artificial Sequence: Synthetic polypeptide"
MAADGYLPDWLEDNLSEGIREWWDLKPGAPKPKANQQKQDDGRGLVLPGYKYLGPFNGLDKGEPVNAADAAALEHDKAYDQQLKAGDNPYLRYNHADAEFQERLQEDTSFGGNLGRAVFQAKKRVLEPFGLVEEGAKTAPGKKRPVEQSPQEPDSSSGIGKTGQQPAKKRLNFGQTGDSESVPDPQPLGEPPATPAAVGPTTMASGGGAPMADNNEGADGVGNASGNWHCDSTWLGDRVITTSTRTWALPTYNNHLYKQISSASTGASNDNHYFGYSTPWGYFDFNRFHCHFSPRDWQRLINNNWGFRPKRLNFKLFNIQVKEVTTNDGVTTIANNLTSTVQVFSDSEYQLPYVLGSAHQGCLPPFPADVFMIPQYGYLTLNNGSQAVGRSSFYCLEYFPSQMLRTGNNFTFSYTFEDVPFHSSYAHSQSLDRLMNPLIDQYLYYLNRTQNQSGSAQNKDLLFSRGSPAGMSVQLKNWLPGPCYRQQRVSKTKTDNNNSNFTWTGASKYNLNGRESIINPGTAMASHKDDEDKFFPMSGVMIFGKESAGASNTALDNVMITDEEEIKATNPVATERFGTVAVNFQSSSTDPATGDVHVMGALPGMVWQDRDVYLQGPIWAKIPHTDGHFHPSPLMGGFGLKHPPPQILIKNTPVPANPPAEFSATKFASFITQYSTGQVSVEIEWELQKENSKRWNPEVQYTSNYAKSANVDFTVDNNGLYTEPRPIGTRYLTRPL

SEQ ID NO: 957 - protein, 736 aa, Artificial Sequence
  source: /note="Description of Artificial Sequence: Synthetic polypeptide"
MAADGYLPDWLEDNLSEGIREWWDLKPGAPKPKANQQKQDDGRGLVLPGYKYLGPFNGLDKGEPVNAADAAALEHDKAYDQQLKAGDNPYLRYNHADAEFQERLQEDTSFGGNLGRAVFQAKKRVLEPFGLVEEGAKTAPGKKRPVEQSPQEPDSSSGIGKSGQQPAKKRLNFGQTGDSESVPDPQPLGEPPATPAAVGPTTMASGGGAPMADNNEGADGVGNASGNWHCDSTWLGDRVITTSTRTWALPTYNNHLYKQISSASTGASNDNHYFGYSTPWGYFDFNRFHCHFSPRDWQRLINNNWGFRPKRLNFKLFNIQVKEVTTNDGVTTIANNLTSTVQVFSDSEYQLPYVLGSAHQGCLPPFPADVFMIPQYGYLTLNNGSQAVGRSSFYCLEYFPSQMLRTGNNFTFSYTFEDVPFHSSYAHSQSLDRLMNPLIDQYLYYLNRTQNQSGSAQNKDLLFSRGSPAGMSVQPKNWLPGPCYRQQRVSKTKTDNNNSNFTWTGASKYNLNGRESIINPGTAMASHKDDEDKFFPMSGVMIFGKGSAGASNTALDNVMITDEEEIKATNPVATERFGTVAVNFQSSSTDPATGDVHVMGALPGMVWQDRDVYLQGPIWAKIPHTDGHFHPSPLMGGFGLKHPPPQILIKNTPVPANPPAEFSATKFASFITQYSTGQVSVEIEWELQKENSKRWNPEVQYTSNYAKSANVDFTVDNNGLYTEPRPIGTRYLTRPL

SEQ ID NO: 958 - protein, 736 aa, Artificial Sequence; identical to SEQ ID NO: 699
  source: /note="Description of Artificial Sequence: Synthetic polypeptide"

SEQ ID NO: 959 - protein, 742 aa, Artificial Sequence
  source: /note="Description of Artificial Sequence: Synthetic polypeptide"
MAADGYLPDWLEDNLSEGIREWWALKPGAPQPKANQQHQDNGRGLVLPGYKYLGPFNGLDKGEPVNEADAAALEHDKAYDKQLEQGDNPYLKYNHADAEFQQRLATDTSFGGNLGRAVFQAKKRILEPLGLVEEGVKTAPGKKRPLEKTPNRPTNPDSGKAPAKKKQKDGEPADSARRTLDFEDSGAGDGPPEGSSSGEMSHDAEMRAAPGGNAVEAGQGADGVGNASGDWHCDSTWSEGRVTTTSTRTWVLPTYNNHLYLRIGTTANSNTYNGFSTPWGYFDFNRFHCHFSPRDWQRLINNNWGLRPKSMRVKIFNIQVKEVTTSNGETTVANNLTSTVQIFADSTYELPYVMDAGQEGSFPPFPNDVFMVPQYGYCGVVTGKNQNQTDRNAFYCLEYFPSQMLRTGNNFEVSYQFEKVPFHSMYAHSQSLDRMMNPLLDQYLWHLQSTTTGNSLNQGTATTTYGKITTGDFAYYRKNWLPGACIKQQKFSKNANQNYKIPASGGDALLKYDTHTTLNGRWSNMAPGPPMATAGAGDSDFSNSQLIFAGPNPSGNTTTSSNNLLFTSEEEIATTNPRDTDMFGQIADNNQNATTAPHIANLDAMGIVPGMVWQNRDIYYQGPIWAKVPHTDGHFHPSPLMGGFGLKHPPPQIFIKNTPVPANPNTTFSAARINSFLTQYSTGQVAVQIDWEIQKEHSKRWNPEVQFTSNYGTQNSMLWAPDNAGNYHELRAIGSRFLTHHL

SEQ ID NO: 960 - DNA, 2211 bp, Artificial Sequence
  source: /note="Description of Artificial Sequence: Synthetic polynucleotide"
atggctgccgatggttatcttccagattggctcgaggacaacctctctgagggcattcgcgagtggtgggacttgaaacctggagccccgaagcccaaagccaaccagcaaaagcaggacgacggccggggtctggtgcttcctggctacaagtacctcggacccttcaacggactcgacaagggggagcccgtcaacgcggcggacgcagcggccctcgagcacgacaaggcctacgaccagcagctcaaagcgggtgacaatccgtacctgcggtataaccacgccgacgccgagtttcaggagcgtctgcaagaagatacgtcttttgggggcaacctcgggcgagcagtcttccaggccaagaagcgggttctcgaacctctcggtctggttgaggaaggcgctaaggcggctcctggaaagaaacgtccggtagagcagtcgccacaagagccagactcctcctcgggcatcggcaagacaggccagcagcccgctaaaaagagactcaattttggtcagactggcgactcagagtcagtccccgatccacaacctctcggagaacctccagcagccccctcaggtctgggacctaatacaatggcttcaggcggtggcgctccaatggcagacaataacgaaggcgccgacggagtgggtaattcctcgggaaattggcattgcgattccacatggctgggggacagagtcatcaccaccagcacccgaacctgggccctgcccacctacaacaaccacctctacaagcaaatctccaacggcacctcgggaggaagcaccaacgacaacacctattttggctacagcaccccctgggggtattttgacttcaacagattccactgtcacttttcaccacgtgactggcaacgactcatcaacaacaattggggattccggcccaaaagactcaacttcaagctgttcaacatccaggtcaaggaagtcacgacgaacgaaggcaccaagaccatcgccaataatctcaccagcaccgtgcaggtctttacggactcggagtaccagttaccgtacgtgctaggatccgctcaccagggatgtctgcctccgttcccggcggacgtcttcatggttcctcagtacggctatttaactttaaacaatggaagccaagccctgggacgttcctccttctactgtctggagtatttcccatcgcagatgctgagaaccggcaacaactttcagttcagctacaccttcgaggacgtgcctttccacagcagctacgcgcacagccagagcctggacaggctgatgaatcccctcatcgaccagtacctgtactacctggtcagaacgcaaacgactggaactggagggacgcagactctggcattcagccaagcgggtcctagctcaatggccaaccaggctagaaattgggtgcccggaccttgctaccggcagcagcgcgtctccacgacaaccaaccagaacaacaacagcaactttgcctggacgggagctgccaagtttaagctgaacggccgagactctctaatgaatccgggcgtggcaatggcttcccacaaggatgacgacgaccgcttcttcccttcgagcggggtcctgatttttggcaagcaaggagccgggaacgatggagtggattacagccaagtgctgattacagatgaggaagaaatcaaggctaccaaccccgtggccacagaagaatatggagcagtggccatcaacaaccaggccgccaatacgcaggcgcagaccggactcgtgcacaaccagggggtgattcccggcatggtgtggcagaatagagacgtgtacctgcagggtcccatctgggccaaaattcctcacacggacggcaactttcacccgtctcccctgatgggcggctttggactgaagcacccgcctcctcaaattctcatcaagaacacaccggttccagcggacccgccgcttaccttcaaccaggccaagctgaactctttcatcacgcagtacagcaccggacaggtcagcgtggaaatcgagtgggagctgcagaaagaaaacagcaaacgctggaatccagagattcaatacacttccaactactacaaatctacaaatgtggactttgctgtcaacacggagggggtttatagcgagcctcgccccattggcacccgttacctcacccgcaacctgtaa

SEQ ID NO: 961 - DNA, 2592 bp, Artificial Sequence
  source: /note="Description of Artificial Sequence: Synthetic polynucleotide"
ctggctgccgatggttatcttccagattggctcgaggacaacctctctgagggcattcgcgagtggtgggacttgaaacctggagccccgaagcccaaagccaaccagcaaaagcaggacgacggccggggtctggtgcttcctggctacaagtacctcggacccttcaacggactcgacaagggggagcccgtcaacgcggcggacgcagcggccctcgagcacgacaaggcctacgaccagcagctcaaagcgggtgacaatccgtacctgcggtataaccacgccgacgccgagtttcaggagcgtctgcaagaagatacgtcttttgggggcaacctcgggcgagcagtcttccaggccaagaagcgggttctcgaacctctcggtctggttgaggaaggcgctaagatggaagtgcagctccaagccagtggtggcggactggtgcaggcaggaggcagcttgaggctcagctgtgccgccagcggcttcaagatcacccactacaccatgggctggttccggcaggcccctggcaaggagagggagttcgtgagcaggattacctggggtggtgacaacaccttctacagcaacagcgtgaagggcaggttcaccatcagcagggacaacgccaagaacaccgtgtacctgcagatgaacagcctgaagcccgaggacaccgccgactactactgtgcagccggcagtaccagcaccgctacccccctgagggtggactactggggcaaaggcactcaggtgacagtgtcttcaggagggggtggcagcgctcctggaaagaaacgtccggtagagcagtcgccacaagagccagactcctcctcgggcatcggcaagacaggccagcagcccgctaaaaagagactcaattttggtcagactggcgactcagagtcagtccccgatccacaacctctcggagaacctccagcagccccctcaggtctgggacctaatacaatggcttcaggcggtggcgctccaatggcagacaataacgaaggcgccgacggagtgggtaattcctcgggaaattggcattgcgattccacatggctgggggacagagtcatcaccaccagcacccgaacctgggccctgcccacctacaacaaccacctctacaagcaaatctccaacggcacctcgggaggaagcaccaacgacaacacctattttggctacagcaccccctgggggtattttgacttcaacagattccactgtcacttttcaccacgtgactggcaacgactcatcaacaacaattggggattccggcccaaaagactcaacttcaagctgttcaacatccaggtcaaggaagtcacgacgaacgaaggcaccaagaccatcgccaataatctcaccagcaccgtgcaggtctttacggactcggagtaccagttaccgtacgtgctaggatccgctcaccagggatgtctgcctccgttcccggcggacgtcttcatggttcctcagtacggctatttaactttaaacaatggaagccaagccctgggacgttcctccttctactgtctggagtatttcccatcgcagatgctgagaaccggcaacaactttcagttcagctacaccttcgaggacgtgcctttccacagcagctacgcgcacagccagagcctggacaggctgatgaatcccctcatcgaccagtacctgtactacctggtcagaacgcaaacgactggaactggagggacgcagactctggcattcagccaagcgggtcctagctcaatggccaaccaggctagaaattgggtgcccggaccttgctaccggcagcagcgcgtctccacgacaaccaaccagaacaacaacagcaactttgcctggacgggagctgccaagtttaagctgaacggccgagactctctaatgaatccgggcgtggcaatggcttcccacaaggatgacgacgaccgcttcttcccttcgagcggggtcctgatttttggcaagcaaggagccgggaacgatggagtggattacagccaagtgctgattacagatgaggaagaaatcaaggctaccaaccccgtggccacagaagaatatggagcagtggccatcaacaaccaggccgccaatacgcaggcgcagaccggactcgtgcacaaccagggggtgattcccggcatggtgtggcagaatagagacgtgtacctgcagggtcccatctgggccaaaattcctcacacggacggcaactttcacccgtctcccctgatgggcggctttggactgaagcacccgcctcctcaaattctcatcaagaacacaccggttccagcggacccgccgcttaccttcaaccaggccaagctgaactctttcatcacgcagtacagcaccggacaggtcagcgtggaaatcgagtgggagctgcagaaagaaaacagcaaacgctggaatccagagattcaatacacttccaactactacaaatctacaaatgtggactttgctgtcaacacggagggggtttatagcgagcctcgccccattggcacccgttacctcacccgcaacctgtaa

SEQ ID NO: 962 - DNA, 2601 bp, Artificial Sequence
  source: /note="Description of Artificial Sequence: Synthetic polynucleotide"
ctggctgccgatggttatcttccagattggctcgaggacaacctctctgagggcattcgcgagtggtgggacttgaaacctggagccccgaagcccaaagccaaccagcaaaagcaggacgacggccggggtctggtgcttcctggctacaagtacctcggacccttcaacggactcgacaagggggagcccgtcaacgcggcggacgcagcggccctcgagcacgacaaggcctacgaccagcagctcaaagcgggtgacaatccgtacctgcggtataaccacgccgacgccgagtttcaggagcgtctgcaagaagatacgtcttttgggggcaacctcgggcgagcagtcttccaggccaagaagcgggttctcgaacctctcggtctggttgaggaaggcgctaagatggaggtgcagctgcaggcttctggaggaggactggtgcaggctggagggagtctgaggctgtcttgcagtgcctcagtgaggactttctccatctacgccatgggctggtttaggcaggctcccgggaaggagcgcgaattcgtggccggaatcaaccggtctggcgacgtgaccaagtacgctgatttcgtgaaaggccggtttagcatttccagagacaacgccaagaatatggtgtatctgcagatgaactccctgaaacctgaagacacagctctgtactattgtgccgctacttgggcctacgataccgtgggggctctgacatcaggatataatttttggggccaggggacccaggtgacagtgagctccggaggaggaggaagcgctcctggaaagaaacgtccggtagagcagtcgccacaagagccagactcctcctcgggcatcggcaagacaggccagcagcccgctaaaaagagactcaattttggtcagactggcgactcagagtcagtccccgatccacaacctctcggagaacctccagcagccccctcaggtctgggacctaatacaatggcttcaggcggtggcgctccaatggcagacaataacgaaggcgccgacggagtgggtaattcctcgggaaattggcattgcgattccacatggctgggggacagagtcatcaccaccagcacccgaacctgggccctgcccacctacaacaaccacctctacaagcaaatctccaacggcacctcgggaggaagcaccaacgacaacacctattttggctacagcaccccctgggggtattttgacttcaacagattccactgtcacttttcaccacgtgactggcaacgactcatcaacaacaattggggattccggcccaaaagactcaacttcaagctgttcaacatccaggtcaaggaagtcacgacgaacgaaggcaccaagaccatcgccaataatctcaccagcaccgtgcaggtctttacggactcggagtaccagttaccgtacgtgctaggatccgctcaccagggatgtctgcctccgttcccggcggacgtcttcatggttcctcagtacggctatttaactttaaacaatggaagccaagccctgggacgttcctccttctactgtctggagtatttcccatcgcagatgctgagaaccggcaacaactttcagttcagctacaccttcgaggacgtgcctttccacagcagctacgcgcacagccagagcctggacaggctgatgaatcccctcatcgaccagtacctgtactacctggtcagaacgcaaacgactggaactggagggacgcagactctggcattcagccaagcgggtcctagctcaatggccaaccaggctagaaattgggtgcccggaccttgctaccggcagcagcgcgtctccacgacaaccaaccagaacaacaacagcaactttgcctggacgggagctgccaagtttaagctgaacggccgagactctctaatgaatccgggcgtggcaatggcttcccacaaggatgacgacgaccgcttcttcccttcgagcggggtcctgatttttggcaagcaaggagccgggaacgatggagtggattacagccaagtgctgattacagatgaggaagaaatcaaggctaccaaccccgtggccacagaagaatatggagcagtggccatcaacaaccaggccgccaatacgcaggcgcagaccggactcgtgcacaaccagggggtgattcccggcatggtgtggcagaatagagacgtgtacctgcagggtcccatctgggccaaaattcctcacacggacggcaactttcacccgtctcccctgatgggcggctttggactgaagcacccgcctcctcaaattctcatcaagaacacaccggttccagcggacccgccgcttaccttcaaccaggccaagctgaactctttcatcacgcagtacagcaccggacaggtcagcgtggaaatcgagtgggagctgcagaaagaaaacagcaaacgctggaatccagagattcaatacacttccaactactacaaatctacaaatgtggactttgctgtcaacacggagggggtttatagcgagcctcgccccattggcacccgttacctcacccgcaacctgtaa

SEQ ID NO: 963 - DNA, 2367 bp, Artificial Sequence
  source: /note="Description of Artificial Sequence: Synthetic polynucleotide"
ctggctgccgatggttatcttccagattggctcgaggacaacctctctgagggcattcgcgagtggtgggacttgaaacctggagccccgaagcccaaagccaaccagcaaaagcaggacgacggccggggtctggtgcttcctggctacaagtacctcggacccttcaacggactcgacaagggggagcccgtcaacgcggcggacgcagcggccctcgagcacgacaaggcctacgaccagcagctcaaagcgggtgacaatccgtacctgcggtataaccacgccgacgccgagtttcaggagcgtctgcaagaagatacgtcttttgggggcaacctcgggcgagcagtcttccaggccaagaagcgggttctcgaacctctcggtctggttgaggaaggcgctaagatgccaagcagtgtaatcgatgcgctgcagtacaagctggagggcaccacgaggctgaccaggaagaggggtctgaagctggccacggccctcagccttagcaataagttcgtagagggcagccccagcggcggcggcggcagcggcggcggcggcagcgctcctggaaagaaacgtccggtagagcagtcgccacaagagccagactcctcctcgggcatcggcaagacaggccagcagcccgctaaaaagagactcaattttggtcagactggcgactcagagtcagtccccgatccacaacctctcggagaacctccagcagccccctcaggtctgggacctaatacaatggcttcaggcggtggcgctccaatggcagacaataacgaaggcgccgacggagtgggtaattcctcgggaaattggcattgcgattccacatggctgggggacagagtcatcaccaccagcacccgaacctgggccctgcccacctacaacaaccacctctacaagcaaatctccaacggcacctcgggaggaagcaccaacgacaacacctattttggctacagcaccccctgggggtattttgacttcaacagattccactgtcacttttcaccacgtgactggcaacgactcatcaacaacaattggggattccggcccaaaagactcaacttcaagctgttcaacatccaggtcaaggaagtcacgacgaacgaaggcaccaagaccatcgccaataatctcaccagcaccgtgcaggtctttacggactcggagtaccagttaccgtacgtgctaggatccgctcaccagggatgtctgcctccgttcccggcggacgtcttcatggttcctcagtacggctatttaactttaaacaatggaagccaagccctgggacgttcctccttctactgtctggagtatttcccatcgcagatgctgagaaccggcaacaactttcagttcagctacaccttcgaggacgtgcctttccacagcagctacgcgcacagccagagcctggacaggctgatgaatcccctcatcgaccagtacctgtactacctggtcagaacgcaaacgactggaactggagggacgcagactctggcattcagccaagcgggtcctagctcaatggccaaccaggctagaaattgggtgcccggaccttgctaccggcagcagcgcgtctccacgacaaccaaccagaacaacaacagcaactttgcctggacgggagctgccaagtttaagctgaacggccgagactctctaatgaatccgggcgtggcaatggcttcccacaaggatgacgacgaccgcttcttcccttcgagcggggtcctgatttttggcaagcaaggagccgggaacgatggagtggattacagccaagtgctgattacagatgaggaagaaatcaaggctaccaaccccgtggccacagaagaatatggagcagtggccatcaacaaccaggccgccaatacgcaggcgcagaccggactcgtgcacaaccagggggtgattcccggcatggtgtggcagaatagagacgtgtacctgcagggtcccatctgggccaaaattcctcacacggacggcaactttcacccgtctcccctgatgggcggctttggactgaagcacccgcctcctcaaattctcatcaagaacacaccggttccagcggacccgccgcttaccttcaaccaggccaagctgaactctttcatcacgcagtacagcaccggacaggtcagcgtggaaatcgagtgggagctgcagaaagaaaacagcaaacgctggaatccagagattcaatacacttccaactactacaaatctacaaatgtggactttgctgtcaacacggagggggtttatagcgagcctcgccccattggcacccgttacctcacccgcaacctgtaa

SEQ ID NO: 964 - DNA, 2328 bp, Artificial Sequence
  source: /note="Description of Artificial Sequence: Synthetic polynucleotide"
ctggctgccgatggttatcttccagattggctcgaggacaacctctctgagggcattcgcgagtggtgggacttgaaacctggagccccgaagcccaaagccaaccagcaaaagcaggacgacggccggggtctggtgcttcctggctacaagtacctcggacccttcaacggactcgacaagggggagcccgtcaacgcggcggacgcagcggccctcgagcacgacaaggcctacgaccagcagctcaaagcgggtgacaatccgtacctgcggtataaccacgccgacgccgagtttcaggagcgtctgcaagaagatacgtcttttgggggcaacctcgggcgagcagtcttccaggccaagaagcgggttctcgaacctctcggtctggttgaggaaggcgctaagatgtataccatctggatgcccgagaaccccaggcccggtaccccctgcgacatcttcaccaacagcaggggcaagcgagccagcaacggcggcggcggcggcagcggcggcggcggcagcgctcctggaaagaaacgtccggtagagcagtcgccacaagagccagactcctcctcgggcatcggcaagacaggccagcagcccgctaaaaagagactcaattttggtcagactggcgactcagagtcagtccccgatccacaacctctcggagaacctccagcagccccctcaggtctgggacctaatacaatggcttcaggcggtggcgctccaatggcagacaataacgaaggcgccgacggagtgggtaattcctcgggaaattggcattgcgattccacatggctgggggacagagtcatcaccaccagcacccgaacctgggccctgcccacctacaacaaccacctctacaagcaaatctccaacggcacctcgggaggaagcaccaacgacaacacctattttggctacagcaccccctgggggtattttgacttcaacagattccactgtcacttttcaccacgtgactggcaacgactcatcaacaacaattggggattccggcccaaaagactcaacttcaagctgttcaacatccaggtcaaggaagtcacgacgaacgaaggcaccaagaccatcgccaataatctcaccagcaccgtgcaggtctttacggactcggagtaccagttaccgtacgtgctaggatccgctcaccagggatgtctgcctccgttcccggcggacgtcttcatggttcctcagtacggctatttaactttaaacaatggaagccaagccctgggacgttcctccttctactgtctggagtatttcccatcgcagatgctgagaaccggcaacaactttcagttcagctacaccttcgaggacgtgcctttccacagcagctacgcgcacagccagagcctggacaggctgatgaatcccctcatcgaccagtacctgtactacctggtcagaacgcaaacgactggaactggagggacgcagactctggcattcagccaagcgggtcctagctcaatggccaaccaggctagaaattgggtgcccggaccttgctaccggcagcagcgcgtctccacgacaaccaaccagaacaacaacagcaactttgcctggacgggagctgccaagtttaagctgaacggccgagactctctaatgaatccgggcgtggcaatggcttcccacaaggatgacgacgaccgcttcttcccttcgagcggggtcctgatttttggcaagcaaggagccgggaacgatggagtggattacagccaagtgctgattacagatgaggaagaaatcaaggctaccaaccccgtggccacagaagaatatggagcagtggccatcaacaaccaggccgccaatacgcaggcgcagaccggactcgtgcacaaccagggggtgattcccggcatggtgtggcagaatagagacgtgtacctgcagggtcccatctgggccaaaattcctcacacggacggcaactttcacccgtctcccctgatgggcggctttggactgaagcacccgcctcctcaaattctcatcaagaacacaccggttccagcggacccgccgcttaccttcaaccaggccaagctgaactctttcatcacgcagtacagcaccggacaggtcagcgtggaaatcgagtgggagctgcagaaagaaaacagcaaacgctggaatccagagattcaatacacttccaactactacaaatctacaaatgtggactttgctgtcaacacggagggggtttatagcgagcctcgccccattggcacccgttacctcacccgcaacctgtaa

SEQ ID NO: 965 - DNA, 2298 bp, Artificial Sequence
  source: /note="Description of Artificial Sequence: Synthetic polynucleotide"
ctggctgccgatggttatcttccagattggctcgaggacaacctctctgagggcattcgcgagtggtgggacttgaaacctggagccccgaagcccaaagccaaccagcaaaagcaggacgacggccggggtctggtgcttcctggctacaagtacctcggacccttcaacggactcgacaagggggagcccgtcaacgcggcggacgcagcggccctcgagcacgacaaggcctacgaccagcagctcaaagcgggtgacaatccgtacctgcggtataaccacgccgacgccgagtttcaggagcgtctgcaagaagatacgtcttttgggggcaacctcgggcgagcagtcttccaggccaagaagcgggttctcgaacctctcggtctggttgaggaaggcgctaagatgaccttcttctacggcggcagcaggggcaagaggaacaacttcaagaccgaggagtacggcggcggcggcagcggcggcggcggcagcgctcctggaaagaaacgtccggtagagcagtcgccacaagagccagactcctcctcgggcatcggcaagacaggccagcagcccgctaaaaagagactcaattttggtcagactggcgactcagagtcagtccccgatccacaacctctcggagaacctccagcagccccctcaggtctgggacctaatacaatggcttcaggcggtggcgctccaatggcagacaataacgaaggcgccgacggagtgggtaattcctcgggaaattggcattgcgattccacatggctgggggacagagtcatcaccaccagcacccgaacctgggccctgcccacctacaacaaccacctctacaagcaaatctccaacggcacctcgggaggaagcaccaacgacaacacctattttggctacagcaccccctgggggtattttgacttcaacagattccactgtcacttttcaccacgtgactggcaacgactcatcaacaacaattggggattccggcccaaaagactcaacttcaagctgttcaacatccaggtcaaggaagtcacgacgaacgaaggcaccaagaccatcgccaataatctcaccagcaccgtgcaggtctttacggactcggagtaccagttaccgtacgtgctaggatccgctcaccagggatgtctgcctccgttcccggcggacgtcttcatggttcctcagtacggctatttaactttaaacaatggaagccaagccctgggacgttcctccttctactgtctggagtatttcccatcgcagatgctgagaaccggcaacaactttcagttcagctacaccttcgaggacgtgcctttccacagcagctacgcgcacagccagagcctggacaggctgatgaatcccctcatcgaccagtacctgtactacctggtcagaacgcaaacgactggaactggagggacgcagactctggcattcagccaagcgggtcctagctcaatggccaaccaggctagaaattgggtgcccggaccttgctaccggcagcagcgcgtctccacgacaaccaaccagaacaacaacagcaactttgcctggacgggagctgccaagtttaagctgaacggccgagactctctaatgaatccgggcgtggcaatggcttcccacaaggatgacgacgaccgcttcttcccttcgagcggggtcctgatttttggcaagcaaggagccgggaacgatggagtggattacagccaagtgctgattacagatgaggaagaaatcaaggctaccaaccccgtggccacagaagaatatggagcagtggccatcaacaaccaggccgccaatacgcaggcgcagaccggactcgtgcacaaccagggggtgattcccggcatggtgtggcagaatagagacgtgtacctgcagggtcccatctgggccaaaattcctcacacggacggcaactttcacccgtctcccctgatgggcggctttggactgaagcacccgcctcctcaaattctcatcaagaacacaccggttccagcggacccgccgcttaccttcaaccaggccaagctgaactctttcatcacgcagtacagcaccggacaggtcagcgtggaaatcgagtgggagctgcagaaagaaaacagcaaacgctggaatccagagattcaatacacttccaactactacaaatctacaaatgtggactttgctgtcaacacggagggggtttatagcgagcctcgccccattggcacccgttacctcacccgcaacctgtaa

SEQ ID NO: 966 - DNA, 2211 bp, Artificial Sequence
  source: /note="Description of Artificial Sequence: Synthetic polynucleotide"
atggctgccgatggttatcttccagattggctcgaggacaaccttagtgaaggaattcgcgagtggtgggctttgaaacctggagcccctcaacccaaggcaaatcaacaacatcaagacaacgctcgaggtcttgtgcttccgggttacaaataccttggacccggcaacggactcgacaagggggagccggtcaacgcagcagacgcggcggccctcgagcacgacaaggcctacgaccagcagctcaaggccggagacaacccgtacctcaagtacaaccacgccgacgccgagttccaggagcggctcaaagaagatacgtcttttgggggcaacctcgggcgagcagtcttccaggccaaaaagaggcttcttgaacctcttggtctggttgaggaagcggctaaggcggctcctggaaagaagaggcctgtagagcagtctcctcaggaaccggactcctccgcgggtattggcaaatcgggtgcacagcccgctaaaaagagactcaatttcggtcagactggcgacacagagtcagtcccagaccctcaaccaatcggagaacctcccgcagccccctcaggtgtgggatctcttacaatggcttcaggtggtggcgcaccagtggcagacaataacgaaggtgccgatggagtgggtagttcctcgggaaattggcattgcgattcccaatggctgggggacagagtcatcaccaccagcacccgaacctgggccctgcccacctacaacaatcacctctacaagcaaatctccaacagcacatctggaggatcttcaaatgacaacgcctacttcggctacagcaccccctgggggtattttgacttcaacagattccactgccacttctcaccacgtgactggcagcgactcatcaacaacaactggggattccggcctaagcgactcaacttcaagctcttcaacattcaggtcaaagaggttacggacaacaatggagtcaagaccatcgccaataaccttaccagcacggtccaggtcttcacggactcagactatcagctcccgtacgtgctcgggtcggctcacgagggctgcctcccgccgttcccagcggacgttttcatgattcctcagtacgggtatctgacgcttaatgatggaagccaggccgtgggtcgttcgtccttttactgcctggaatatttcccgtcgcaaatgctaagaacgggtaacaacttccagttcaactacgagtttgagaacgtacctttccatagcagctacgctcacagccaaagcctggaccgactaatgaatccactcatcgaccaatacttgtactatctctcaaagactattaacgattctggacagaatcaacaaacgctaaaattcagtgtggccggacccagcaacatggctgtccagggaagaaactacatacctggacccagctaccgacaacaacgtgtctcaaccactgtgactcaaaacaacaacagcgaatttgcttggcctggagcttcttcttgggctctcaatggacgtaatagcttgatgaatcctggacctgctatggccagccacaaagaaggagaggaccgtttctttcctttgtctggatctttaatttttggcaaacaaggaactggaagagacaacgtggatgcggacgaagtcatgataaccaacgaagaagaaattaaaactactaacccggtagcaacggagtcctatggacaagtggccataaaccaccagagtgcccaagcacaggcgcagaccggctgggttcaaaaccaaggaatacttccgggtatggtttggcaggacagagatgtgtacctgcaaggacccatttgggccaaaattcctcacacggacggcaactttcacccttctccgctgatgggagggtttggaatgaagcacccgcctcctcagatcctcatcaaaaacacacctgtacctgcggatcctccaacggccttcaacaaggacaagctgaactctttcatcacccagtattctactggccaagtcagcgtggagatcgagtgggagctgcagaaggaaaacagcaagcgctggaacccggagatccagtacacttccaactattacaagtctaataatgttgaatttgctgttaatactgaaggtgtatatagtgaaccccgccccattggcaccagatacctgactcgtaatctgtaa

SEQ ID NO: 967 - DNA, 2277 bp, Artificial Sequence
  source: /note="Description of Artificial Sequence: Synthetic polynucleotide"
ctggctgccgatggttatcttccagattggctcgaggacaaccttagtgaaggaattcgcgagtggtgggctttgaaacctggagcccctcaacccaaggcaaatcaacaacatcaagacaacgctcgaggtcttgtgcttccgggttacaaataccttggacccggcaacggactcgacaagggggagccggtcaacgcagcagacgcggcggccctcgagcacgacaaggcctacgaccagcagctcaaggccggagacaacccgtacctcaagtacaaccacgccgacgccgagttccaggagcggctcaaagaagatacgtcttttgggggcaacctcgggcgagcagtcttccaggccaaaaagaggcttcttgaacctcttggtctggttgaggaagcggctaagatgaacaaccagaagatcgtgaacctgaaggagaaggtggcccagctggaggccggcggcggcggcagcgctcctggaaagaagaggcctgtagagcagtctcctcaggaaccggactcctccgcgggtattggcaaatcgggtgcacagcccgctaaaaagagactcaatttcggtcagactggcgacacagagtcagtcccagaccctcaaccaatcggagaacctcccgcagccccctcaggtgtgggatctcttacaatggcttcaggtggtggcgcaccagtggcagacaataacgaaggtgccgatggagtgggtagttcctcgggaaattggcattgcgattcccaatggctgggggacagagtcatcaccaccagcacccgaacctgggccctgcccacctacaacaatcacctctacaagcaaatctccaacagcacatctggaggatcttcaaatgacaacgcctacttcggctacagcaccccctgggggtattttgacttcaacagattccactgccacttctcaccacgtgactggcagcgactcatcaacaacaactggggattccggcctaagcgactcaacttcaagctcttcaacattcaggtcaaagaggttacggacaacaatggagtcaagaccatcgccaataaccttaccagcacggtccaggtcttcacggactcagactatcagctcccgtacgtgctcgggtcggctcacgagggctgcctcccgccgttcccagcggacgttttcatgattcctcagtacgggtatctgacgcttaatgatggaagccaggccgtgggtcgttcgtccttttactgcctggaatatttcccgtcgcaaatgctaagaacgggtaacaacttccagttcaactacgagtttgagaacgtacctttccatagcagctacgctcacagccaaagcctggaccgactaatgaatccactcatcgaccaatacttgtactatctctcaaagactattaacgattctggacagaatcaacaaacgctaaaattcagtgtggccggacccagcaacatggctgtccagggaagaaactacatacctggacccagctaccgacaacaacgtgtctcaaccactgtgactcaaaacaacaacagcgaatttgcttggcctggagcttcttcttgggctctcaatggacgtaatagcttgatgaatcctggacctgctatggccagccacaaagaaggagaggaccgtttctttcctttgtctggatctttaatttttggcaaacaaggaactggaagagacaacgtggatgcggacgaagtcatgataaccaacgaagaagaaattaaaactactaacccggtagcaacggagtcctatggacaagtggccataaaccaccagagtgcccaagcacaggcgcagaccggctgggttcaaaaccaaggaatacttccgggtatggtttggcaggacagagatgtgtacctgcaaggacccatttgggccaaaattcctcacacggacggcaactttcacccttctccgctgatgggagggtttggaatgaagcacccgcctcctcagatcctcatcaaaaacacacctgtacctgcggatcctccaacggccttcaacaaggacaagctgaactctttcatcacccagtattctactggccaagtcagcgtggagatcgagtgggagctgcagaaggaaaacagcaagcgctggaacccggagatccagtacacttccaactattacaagtctaataatgttgaatttgctgttaatactgaaggtgtatatagtgaaccccgccccattggcaccagatacctgactcgtaatctgtaa

SEQ ID NO: 968 - DNA, 2313 bp, Artificial Sequence
  source: /note="Description of Artificial Sequence: Synthetic polynucleotide"
ctggctgccgatggttatcttccagattggctcgaggacaaccttagtgaaggaattcgcgagtggtgggctttgaaacctggagcccctcaacccaaggcaaatcaacaacatcaagacaacgctcgaggtcttgtgcttccgggttacaaataccttggacccggcaacggactcgacaagggggagccggtcaacgcagcagacgcggcggccctcgagcacgacaaggcctacgaccagcagctcaaggccggagacaacccgtacctcaagtacaaccacgccgacgccgagttccaggagcggctcaaagaagatacgtcttttgggggcaacctcgggcgagcagtcttccaggccaaaaagaggcttcttgaacctcttggtctggttgaggaagcggctaagatgtataccatctggatgcccgagaaccccaggcccggtaccccctgcgacatcttcaccaacagcaggggcaagcgagccagcaacggcggcggcggcggcagcgctcctggaaagaagaggcctgtagagcagtctcctcaggaaccggactcctccgcgggtattggcaaatcgggtgcacagcccgctaaaaagagactcaatttcggtcagactggcgacacagagtcagtcccagaccctcaaccaatcggagaacctcccgcagccccctcaggtgtgggatctcttacaatggcttcaggtggtggcgcaccagtggcagacaataacgaaggtgccgatggagtgggtagttcctcgggaaattggcattgcgattcccaatggctgggggacagagtcatcaccaccagcacccgaacctgggccctgcccacctacaacaatcacctctacaagcaaatctccaacagcacatctggaggatcttcaaatgacaacgcctacttcggctacagcaccccctgggggtattttgacttcaacagattccactgccacttctcaccacgtgactggcagcgactcatcaacaacaactggggattccggcctaagcgactcaacttcaagctcttcaacattcaggtcaaagaggttacggacaacaatggagtcaagaccatcgccaataaccttaccagcacggtccaggtcttcacggactcagactatcagctcccgtacgtgctcgggtcggctcacgagggctgcctcccgccgttcccagcggacgttttcatgattcctcagtacgggtatctgacgcttaatgatggaagccaggccgtgggtcgttcgtccttttactgcctggaatatttcccgtcgcaaatgctaagaacgggtaacaacttccagttcaactacgagtttgagaacgtacctttccatagcagctacgctcacagccaaagcctggaccgactaatgaatccactcatcgaccaatacttgtactatctctcaaagactattaacgattctggacagaatcaacaaacgctaaaattcagtgtggccggacccagcaacatggctgtccagggaagaaactacatacctggacccagctaccgacaacaacgtgtctcaaccactgtgactcaaaacaacaacagcgaatttgcttggcctggagcttcttcttgggctctcaatggacgtaatagcttgatgaatcctggacctgctatggccagccacaaagaaggagaggaccgtttctttcctttgtctggatctttaatttttggcaaacaaggaactggaagagacaacgtggatgcggacgaagtcatgataaccaacgaagaagaaattaaaactactaacccggtagcaacggagtcctatggacaagtggccataaaccaccagagtgcccaagcacaggcgcagaccggctgggttcaaaaccaaggaatacttccgggtatggtttggcaggacagagatgtgtacctgcaaggacccatttgggccaaaattcctcacacggacggcaactttcacccttctccgctgatgggagggtttggaatgaagcacccgcctcctcagatcctcatcaaaaacacacctgtacctgcggatcctccaacggccttcaacaaggacaagctgaactctttcatcacccagtattctactggccaagtcagcgtggagatcgagtgggagctgcagaaggaaaacagcaagcgctggaacccggagatccagtacacttccaactattacaagtctaataatgttgaatttgctgttaatactgaaggtgtatatagtgaaccccgccccattggcaccagatacctgactcgtaatctgtaa

SEQ ID NO: 969 - DNA, 2283 bp, Artificial Sequence
  source: /note="Description of Artificial Sequence: Synthetic polynucleotide"
ctggctgccgatggttatcttccagattggctcgaggacaaccttagtgaaggaattcgcgagtggtgggctttgaaacctggagcccctcaacccaaggcaaatcaacaacatcaagacaacgctcgaggtcttgtgcttccgggttacaaataccttggacccggcaacggactcgacaagggggagccggtcaacgcagcagacgcggcggccctcgagcacgacaaggcctacgaccagcagctcaaggccggagacaacccgtacctcaagtacaaccacgccgacgccgagttccaggagcggctcaaagaagatacgtcttttgggggcaacctcgggcgagcagtcttccaggccaaaaagaggcttcttgaacctcttggtctggttgaggaagcggctaagatgaccttcttctacggcggcagcaggggcaagaggaacaacttcaagaccgaggagtacggcggcggcggcagcgctcctggaaagaagaggcctgtagagcagtctcctcaggaaccggactcctccgcgggtattggcaaatcgggtgcacagcccgctaaaaagagactcaatttcggtcagactggcgacacagagtcagtcccagaccctcaaccaatcggagaacctcccgcagccccctcaggtgtgggatctcttacaatggcttcaggtggtggcgcaccagtggcagacaataacgaaggtgccgatggagtgggtagttcctcgggaaattggcattgcgattcccaatggctgggggacagagtcatcaccaccagcacccgaacctgggccctgcccacctacaacaatcacctctacaagcaaatctccaacagcacatctggaggatcttcaaatgacaacgcctacttcggctacagcaccccctgggggtattttgacttcaacagattccactgccacttctcaccacgtgactggcagcgactcatcaacaacaactggggattccggcctaagcgactcaacttcaagctcttcaacattcaggtcaaagaggttacggacaacaatggagtcaagaccatcgccaataaccttaccagcacggtccaggtcttcacggactcagactatcagctcccgtacgtgctcgggtcggctcacgagggctgcctcccgccgttcccagcggacgttttcatgattcctcagtacgggtatctgacgcttaatgatggaagccaggccgtgggtcgttcgtccttttactgcctggaatatttcccgtcgcaaatgctaagaacgggtaacaacttccagttcaactacgagtttgagaacgtacctttccatagcagctacgctcacagccaaagcctggaccgactaatgaatccactcatcgaccaatacttgtactatctctcaaagactattaacgattctggacagaatcaacaaacgctaaaattcagtgtggccggacccagcaacatggctgtccagggaagaaactacatacctggacccagctaccgacaacaacgtgtctcaaccactgtgactcaaaacaacaacagcgaatttgcttggcctggagcttcttcttgggctctcaatggacgtaatagcttgatgaatcctggacctgctatggccagccacaaagaaggagaggaccgtttctttcctttgtctggatctttaatttttggcaaacaaggaactggaagagacaacgtggatgcggacgaagtcatgataaccaacgaagaagaaattaaaactactaacccggtagcaacggagtcctatggacaagtggccataaaccaccagagtgcccaagcacaggcgcagaccggctgggttcaaaaccaaggaatacttccgggtatggtttggcaggacagagatgtgtacctgcaaggacccatttgggccaaaattcctcacacggacggcaactttcacccttctccgctgatgggagggtttggaatgaagcacccgcctcctcagatcctcatcaaaaacacacctgtacctgcggatcctccaacggccttcaacaaggacaagctgaactctttcatcacccagtattctactggccaagtcagcgtggagatcgagtgggagctgcagaaggaaaacagcaagcgctggaacccggagatccagtacacttccaactattacaagtctaataatgttgaatttgctgttaatactgaaggtgtatatagtgaaccccgccccattggcaccagatacctgactcgtaatctgtaa

SEQ ID NO: 970 - DNA, 2283 bp, Artificial Sequence
  source: /note="Description of Artificial Sequence: Synthetic polynucleotide"
ctggctgccgatggttatcttccagattggctcgaggacaaccttagtgaaggaattcgcgagtggtgggctttgaaacctggagcccctcaacccaaggcaaatcaacaacatcaagacaacgctcgaggtcttgtgcttccgggttacaaataccttggacccggcaacggactcgacaagggggagccggtcaacgcagcagacgcggcggccctcgagcacgacaaggcctacgaccagcagctcaaggccggagacaacccgtacctcaagtacaaccacgccgacgccgagttccaggagcggctcaaagaagatacgtcttttgggggcaacctcgggcgagcagtcttccaggccaaaaagaggcttcttgaacctcttggtctggttgaggaagcggctaagatggcagctgcggccgccgcggctgcagcggctgcagccgccgcagctgcggctgcagcgggcggcggcggcagcgctcctggaaagaagaggcctgtagagcagtctcctcaggaaccggactcctccgcgggtattggcaaatcgggtgcacagcccgctaaaaagagactcaatttcggtcagactggcgacacagagtcagtcccagaccctcaaccaatcggagaacctcccgcagccccctcaggtgtgggatctcttacaatggcttcaggtggtggcgcaccagtggcagacaataacgaaggtgccgatggagtgggtagttcctcgggaaattggcattgcgattcccaatggctgggggacagagtcatcaccaccagcacccgaacctgggccctgcccacctacaacaatcacctctacaagcaaatctccaacagcacatctggaggatcttcaaatgacaacgcctacttcggctacagcaccccctgggggtattttgacttcaacagattccactgccacttctcaccacgtgactggcagcgactcatcaacaacaactggggattccggcctaagcgactcaacttcaagctcttcaacattcaggtcaaagaggttacggacaacaatggagtcaagaccatcgccaataaccttaccagcacggtccaggtcttcacggactcagactatcagctcccgtacgtgctcgggtcggctcacgagggctgcctcccgccgttcccagcggacgttttcatgattcctcagtacgggtatctgacgcttaatgatggaagccaggccgtgggtcgttcgtccttttactgcctggaatatttcccgtcgcaaatgctaagaacgggtaacaacttccagttcaactacgagtttgagaacgtacctttccatagcagctacgctcacagccaaagcctggaccgactaatgaatccactcatcgaccaatacttgtactatctctcaaagactattaacgattctggacagaatcaacaaacgctaaaattcagtgtggccggacccagcaacatggctgtccagggaagaaactacatacctggacccagctaccgacaacaacgtgtctcaaccactgtgactcaaaacaacaacagcgaatttgcttggcctggagcttcttcttgggctctcaatggacgtaatagcttgatgaatcctggacctgctatggccagccacaaagaaggagaggaccgtttctttcctttgtctggatctttaatttttggcaaacaaggaactggaagagacaacgtggatgcggacgaagtcatgataaccaacgaagaagaaattaaaactactaacccggtagcaacggagtcctatggacaagtggccataaaccaccagagtgcccaagcacaggcgcagaccggctgggttcaaaaccaaggaatacttccgggtatggtttggcaggacagagatgtgtacctgcaaggacccatttgggccaaaattcctcacacggacggcaactttcacccttctccgctgatgggagggtttggaatgaagcacccgcctcctcagatcctcatcaaaaacacacctgtacctgcggatcctccaacggccttcaacaaggacaagctgaactctttcatcacccagtattctactggccaagtcagcgtggagatcgagtgggagctgcagaaggaaaacagcaagcgctggaacccggagatccagtacacttccaactattacaagtctaataatgttgaatttgctgttaatactgaaggtgtatatagtgaaccccgccccattggcaccagatacctgactcgtaatctgtaa

SEQ ID NO: 971 - protein, 726 aa, Artificial Sequence
  source: /note="Description of Artificial Sequence: Synthetic polypeptide"
MEVQLQASGGGLVQAGGSLRLSCAASGFKITHYTMGWFRQAPGKEREFVSRITWGGDNTFYSNSVKGRFTISRDNAKNTVYLQMNSLKPEDTADYYCAAGSTSTATPLRVDYWGKGTQVTVSSGGGGSAPGKKRPVEQSPQEPDSSSGIGKTGQQPAKKRLNFGQTGDSESVPDPQPLGEPPAAPSGLGPNTMASGGGAPMADNNEGADGVGNSSGNWHCDSTWLGDRVITTSTRTWALPTYNNHLYKQISNGTSGGSTNDNTYFGYSTPWGYFDFNRFHCHFSPRDWQRLINNNWGFRPKRLNFKLFNIQVKEVTTNEGTKTIANNLTSTVQVFTDSEYQLPYVLGSAHQGCLPPFPADVFMVPQYGYLTLNNGSQALGRSSFYCLEYFPSQMLRTGNNFQFSYTFEDVPFHSSYAHSQSLDRLMNPLIDQYLYYLVRTQTTGTGGTQTLAFSQAGPSSMANQARNWVPGPCYRQQRVSTTTNQNNNSNFAWTGAAKFKLNGRDSLMNPGVAMASHKDDDDRFFPSSGVLIFGKQGAGNDGVDYSQVLITDEEEIKATNPVATEEYGAVAINNQAANTQAQTGLVHNQGVIPGMVWQNRDVYLQGPIWAKIPHTDGNFHPSPLMGGFGLKHPPPQILIKNTPVPADPPLTFNQAKLNSFITQYSTGQVSVEIEWELQKENSKRWNPEIQYTSNYYKSTNVDFAVNTEGVYSEPRPIGTRYLTRNL

SEQ ID NO: 972 - protein, 729 aa, Artificial Sequence
  source: /note="Description of Artificial Sequence: Synthetic polypeptide"
MEVQLQASGGGLVQAGGSLRLSCSASVRTFSIYAMGWFRQAPGKEREFVAGINRSGDVTKYADFVKGRFSISRDNAKNMVYLQMNSLKPEDTALYYCAATWAYDTVGALTSGYNFWGQGTQVTVSSGGGGSAPGKKRPVEQSPQEPDSSSGIGKTGQQPAKKRLNFGQTGDSESVPDPQPLGEPPAAPSGLGPNTMASGGGAPMADNNEGADGVGNSSGNWHCDSTWLGDRVITTSTRTWALPTYNNHLYKQISNGTSGGSTNDNTYFGYSTPWGYFDFNRFHCHFSPRDWQRLINNNWGFRPKRLNFKLFNIQVKEVTTNEGTKTIANNLTSTVQVFTDSEYQLPYVLGSAHQGCLPPFPADVFMVPQYGYLTLNNGSQALGRSSFYCLEYFPSQMLRTGNNFQFSYTFEDVPFHSSYAHSQSLDRLMNPLIDQYLYYLVRTQTTGTGGTQTLAFSQAGPSSMANQARNWVPGPCYRQQRVSTTTNQNNNSNFAWTGAAKFKLNGRDSLMNPGVAMASHKDDDDRFFPSSGVLIFGKQGAGNDGVDYSQVLITDEEEIKATNPVATEEYGAVAINNQAANTQAQTGLVHNQGVIPGMVWQNRDVYLQGPIWAKIPHTDGNFHPSPLMGGFGLKHPPPQILIKNTPVPADPPLTFNQAKLNSFITQYSTGQVSVEIEWELQKENSKRWNPEIQYTSNYYKSTNVDFAVNTEGVYSEPRPIGTRYLTRNL

SEQ ID NO: 973 - protein, 651 aa, Artificial Sequence
  source: /note="Description of Artificial Sequence: Synthetic polypeptide"
MPSSVIDALQYKLEGTTRLTRKRGLKLATALSLSNKFVEGSPSGGGGSGGGGSAPGKKRPVEQSPQEPDSSSGIGKTGQQPAKKRLNFGQTGDSESVPDPQPLGEPPAAPSGLGPNTMASGGGAPMADNNEGADGVGNSSGNWHCDSTWLGDRVITTSTRTWALPTYNNHLYKQISNGTSGGSTNDNTYFGYSTPWGYFDFNRFHCHFSPRDWQRLINNNWGFRPKRLNFKLFNIQVKEVTTNEGTKTIANNLTSTVQVFTDSEYQLPYVLGSAHQGCLPPFPADVFMVPQYGYLTLNNGSQALGRSSFYCLEYFPSQMLRTGNNFQFSYTFEDVPFHSSYAHSQSLDRLMNPLIDQYLYYLVRTQTTGTGGTQTLAFSQAGPSSMANQARNWVPGPCYRQQRVSTTTNQNNNSNFAWTGAAKFKLNGRDSLMNPGVAMASHKDDDDRFFPSSGVLIFGKQGAGNDGVDYSQVLITDEEEIKATNPVATEEYGAVAINNQAANTQAQTGLVHNQGVIPGMVWQNRDVYLQGPIWAKIPHTDGNFHPSPLMGGFGLKHPPPQILIKNTPVPADPPLTFNQAKLNSFITQYSTGQVSVEIEWELQKENSKRWNPEIQYTSNYYKSTNVDFAVNTEGVYSEPRPIGTRYLTRNL

SEQ ID NO: 974 - protein, 638 aa, Artificial Sequence
  source: /note="Description of Artificial Sequence: Synthetic polypeptide"
MYTIWMPENPRPGTPCDIFTNSRGKRASNGGGGGSGGGGSAPGKKRPVEQSPQEPDSSSGIGKTGQQPAKKRLNFGQTGDSESVPDPQPLGEPPAAPSGLGPNTMASGGGAPMADNNEGADGVGNSSGNWHCDSTWLGDRVITTSTRTWALPTYNNHLYKQISNGTSGGSTNDNTYFGYSTPWGYFDFNRFHCHFSPRDWQRLINNNWGFRPKRLNFKLFNIQVKEVTTNEGTKTIANNLTSTVQVFTDSEYQLPYVLGSAHQGCLPPFPADVFMVPQYGYLTLNNGSQALGRSSFYCLEYFPSQMLRTGNNFQFSYTFEDVPFHSSYAHSQSLDRLMNPLIDQYLYYLVRTQTTGTGGTQTLAFSQAGPSSMANQARNWVPGPCYRQQRVSTTTNQNNNSNFAWTGAAKFKLNGRDSLMNPGVAMASHKDDDDRFFPSSGVLIFGKQGAGNDGVDYSQVLITDEEEIKATNPVATEEYGAVAINNQAANTQAQTGLVHNQGVIPGMVWQNRDVYLQGPIWAKIPHTDGNFHPSPLMGGFGLKHPPPQILIKNTPVPADPPLTFNQAKLNSFITQYSTGQVSVEIEWELQKENSKRWNPEIQYTSNYYKSTNVDFAVNTEGVYSEPRPIGTRYLTRNL

SEQ ID NO: 975 - protein, 628 aa, Artificial Sequence
  source: /note="Description of Artificial Sequence: Synthetic polypeptide"
MTFFYGGSRGKRNNFKTEEYGGGGSGGGGSAPGKKRPVEQSPQEPDSSSGIGKTGQQPAKKRLNFGQTGDSESVPDPQPLGEPPAAPSGLGPNTMASGGGAPMADNNEGADGVGNSSGNWHCDSTWLGDRVITTSTRTWALPTYNNHLYKQISNGTSGGSTNDNTYFGYSTPWGYFDFNRFHCHFSPRDWQRLINNNWGFRPKRLNFKLFNIQVKEVTTNEGTKTIANNLTSTVQVFTDSEYQLPYVLGSAHQGCLPPFPADVFMVPQYGYLTLNNGSQALGRSSFYCLEYFPSQMLRTGNNFQFSYTFEDVPFHSSYAHSQSLDRLMNPLIDQYLYYLVRTQTTGTGGTQTLAFSQAGPSSMANQARNWVPGPCYRQQRVSTTTNQNNNSNFAWTGAAKFKLNGRDSLMNPGVAMASHKDDDDRFFPSSGVLIFGKQGAGNDGVDYSQVLITDEEEIKATNPVATEEYGAVAINNQAANTQAQTGLVHNQGVIPGMVWQNRDVYLQGPIWAKIPHTDGNFHPSPLMGGFGLKHPPPQILIKNTPVPADPPLTFNQAKLNSFITQYSTGQVSVEIEWELQKENSKRWNPEIQYTSNYYKSTNVDFAVNTEGVYSEPRPIGTRYLTRNL

SEQ ID NO: 976 - protein, 621 aa, Artificial Sequence
  source: /note="Description of Artificial Sequence: Synthetic polypeptide"
MNNQKIVNLKEKVAQLEAGGGGSAPGKKRPVEQSPQEPDSSAGIGKSGAQPAKKRLNFGQTGDTESVPDPQPIGEPPAAPSGVGSLTMASGGGAPVADNNEGADGVGSSSGNWHCDSQWLGDRVITTSTRTWALPTYNNHLYKQISNSTSGGSSNDNAYFGYSTPWGYFDFNRFHCHFSPRDWQRLINNNWGFRPKRLNFKLFNIQVKEVTDNNGVKTIANNLTSTVQVFTDSDYQLPYVLGSAHEGCLPPFPADVFMIPQYGYLTLNDGSQAVGRSSFYCLEYFPSQMLRTGNNFQFNYEFENVPFHSSYAHSQSLDRLMNPLIDQYLYYLSKTINDSGQNQQTLKFSVAGPSNMAVQGRNYIPGPSYRQQRVSTTVTQNNNSEFAWPGASSWALNGRNSLMNPGPAMASHKEGEDRFFPLSGSLIFGKQGTGRDNVDADEVMITNEEEIKTTNPVATESYGQVAINHQSAQAQAQTGWVQNQGILPGMVWQDRDVYLQGPIWAKIPHTDGNFHPSPLMGGFGMKHPPPQILIKNTPVPADPPTAFNKDKLNSFITQYSTGQVSVEIEWELQKENSKRWNPEIQYTSNYYKSNNVEFAVNTEGVYSEPRPIGTRYLTRNL

SEQ ID NO: 977 - protein, 633 aa, Artificial Sequence
  source: /note="Description of Artificial Sequence: Synthetic polypeptide"
MYTIWMPENPRPGTPCDIFTNSRGKRASNGGGGGSAPGKKRPVEQSPQEPDSSAGIGKSGAQPAKKRLNFGQTGDTESVPDPQPIGEPPAAPSGVGSLTMASGGGAPVADNNEGADGVGSSSGNWHCDSQWLGDRVITTSTRTWALPTYNNHLYKQISNSTSGGSSNDNAYFGYSTPWGYFDFNRFHCHFSPRDWQRLINNNWGFRPKRLNFKLFNIQVKEVTDNNGVKTIANNLTSTVQVFTDSDYQLPYVLGSAHEGCLPPFPADVFMIPQYGYLTLNDGSQAVGRSSFYCLEYFPSQMLRTGNNFQFNYEFENVPFHSSYAHSQSLDRLMNPLIDQYLYYLSKTINDSGQNQQTLKFSVAGPSNMAVQGRNYIPGPSYRQQRVSTTVTQNNNSEFAWPGASSWALNGRNSLMNPGPAMASHKEGEDRFFPLSGSLIFGKQGTGRDNVDADEVMITNEEEIKTTNPVATESYGQVAINHQSAQAQAQTGWVQNQGILPGMVWQDRDVYLQGPIWAKIPHTDGNFHPSPLMGGFGMKHPPPQILIKNTPVPADPPTAFNKDKLNSFITQYSTGQVSVEIEWELQKENSKRWNPEIQYTSNYYKSNNVEFAVNTEGVYSEPRPIGTRYLTRNL

SEQ ID NO: 978 - protein, 623 aa, Artificial Sequence
  source: /note="Description of Artificial Sequence: Synthetic polypeptide"
MTFFYGGSRGKRNNFKTEEYGGGGSAPGKKRPVEQSPQEPDSSAGIGKSGAQPAKKRLNFGQTGDTESVPDPQPIGEPPAAPSGVGSLTMASGGGAPVADNNEGADGVGSSSGNWHCDSQWLGDRVITTSTRTWALPTYNNHLYKQISNSTSGGSSNDNAYFGYSTPWGYFDFNRFHCHFSPRDWQRLINNNWGFRPKRLNFKLFNIQVKEVTDNNGVKTIANNLTSTVQVFTDSDYQLPYVLGSAHEGCLPPFPADVFMIPQYGYLTLNDGSQAVGRSSFYCLEYFPSQMLRTGNNFQFNYEFENVPFHSSYAHSQSLDRLMNPLIDQYLYYLSKTINDSGQNQQTLKFSVAGPSNMAVQGRNYIPGPSYRQQRVSTTVTQNNNSEFAWPGASSWALNGRNSLMNPGPAMASHKEGEDRFFPLSGSLIFGKQGTGRDNVDADEVMITNEEEIKTTNPVATESYGQVAINHQSAQAQAQTGWVQNQGILPGMVWQDRDVYLQGPIWAKIPHTDGNFHPSPLMGGFGMKHPPPQILIKNTPVPADPPTAFNKDKLNSFITQYSTGQVSVEIEWELQKENSKRWNPEIQYTSNYYKSNNVEFAVNTEGVYSEPRPIGTRYLTRNL

SEQ ID NO: 979 - protein, 623 aa, Artificial Sequence
  source: /note="Description of Artificial Sequence: Synthetic polypeptide"
MAAAAAAAAAAAAAAAAAAAGGGGSAPGKKRPVEQSPQEPDSSAGIGKSGAQPAKKRLNFGQTGDTESVPDPQPIGEPPAAPSGVGSLTMASGGGAPVADNNEGADGVGSSSGNWHCDSQWLGDRVITTSTRTWALPTYNNHLYKQISNSTSGGSSNDNAYFGYSTPWGYFDFNRFHCHFSPRDWQRLINNNWGFRPKRLNFKLFNIQVKEVTDNNGVKTIANNLTSTVQVFTDSDYQLPYVLGSAHEGCLPPFPADVFMIPQYGYLTLNDGSQAVGRSSFYCLEYFPSQMLRTGNNFQFNYEFENVPFHSSYAHSQSLDRLMNPLIDQYLYYLSKTINDSGQNQQTLKFSVAGPSNMAVQGRNYIPGPSYRQQRVSTTVTQNNNSEFAWPGASSWALNGRNSLMNPGPAMASHKEGEDRFFPLSGSLIFGKQGTGRDNVDADEVMITNEEEIKTTNPVATESYGQVAINHQSAQAQAQTGWVQNQGILPGMVWQDRDVYLQGPIWAKIPHTDGNFHPSPLMGGFGMKHPPPQILIKNTPVPADPPTAFNKDKLNSFITQYSTGQVSVEIEWELQKENSKRWNPEIQYTSNYYKSNNVEFAVNTEGVYSEPRPIGTRYLTRNL

SEQ ID NO: 980 - DNA, 2214 bp, Artificial Sequence
  source: /note="Description of Artificial Sequence: Synthetic polynucleotide"
atggctgccgatggttatcttccagattggctcgaggacaacctctctgagggcattcgcgagtggtgggacttgaaacctggagccccgaagcccaaagccaaccagcaaaagcaggacgacggccggggtctggtgcttcctggctacaagtacctcggacccttcaacggactcgacaagggggagcccgtcaacgcggcggacgcagcggccctcgagcacgacaaggcctacgaccagcagctcaaagcgggtgacaatccgtacctgcggtataaccacgccgacgtcgagtttcaggagcgtctgcaagaagatacgtcttttgggggcaacctcgggcgagcagtcttccaggccaagaagagggttctcgaaccttttggtctggttgaggaaggcgctaagacggctcctggaaagaaacgtccggtagagcagtcgccacaagagccagactcctcctcgggcatcggcaagaaaggccaacagcccgccagaaaaagactcaattttggccagactggcgactcagagtcagttccagaccctcaacctctcggagaacctccagcagcgccctctggtgtgggacctaatacaatggctgcaggcggtggcgcaccaatggcagacaataacgagggcgccgacggagtgggtaattcctcgggaaattggcattgcgattccacatggatgggggacagagtcatcaccaccagcacccgaacctgggccctgcccacctacaacaaccacctctacaagcaaatctccaacggcacctcgggaggaagcaccaacgacaacacctattttggctacagcaccccctgggggtattttgatttcaacagattccactgccacttctcaccacgtgactggcagcgactcatcaacaacaactggggattccggccaaaaagactcagcttcaagctcttcaacatccaggtcaaggaggtcacgcagaatgaaggcaccaagaccatcgccaataaccttaccagcacgattcaggtatttacggactcggaataccagctgccatacgtcctcggctccgcgcaccagggctgcctgcctccgttcccggcggacgtcttcatgattccccagtacggctaccttacactgaacaatggaagtcaagccgtaggccgttcctccttctactgcctggaatattttccttctcaaatgctgagaacgggcaacaactttgagttcagctaccagtttgaggacgtgccttttcacagcagctacgcgcacagccaaagcctggaccggctgatgaaccccctcatcgaccagtacctgtactacctgtctcggactcagtccacgggaggtaccgcaagaactcagcagttgctattttctcaggccgggcctaatacaatggccaatcaggcaaagaactggctgccaggaccctgttaccgccaacaacgcgtctcaacgacaaccgggcaaaacaacaatagcaactctgcctggactgctgggaccaaataccatctgaatggaagaaattcattggctaatcctggcatcgctatggcaacacacaaagacgacgaggagcgtttttttcccagtaacgggatcctgatttttggcaaacaaaatgctgccagagacaatgcggattacagcgatgtcatgctcaccagcgaggaagaaatcaaaaccactaaccctgtggctacagaggaatacggtatcgtggcagataacttgcagcagcaaaacacggctcctcaaattggaactgtcaacagccagggggccttacccggtatggtctggcagaaccgggacgtgtacctgcagggtcccatctgggccaagattcctcacacggacggcaacttccacccatctccgctgatgggcggctttggcctgaaacatcctccgcctcagatcctgatcaagaacacgcctgtacctgcggatcctccgaccaccttcaaccagtcaaagctgaactctttcatcacgcaatacagcaccggacaggtcagcgtggaaattgaatgggagctacagaaggaaaacagcaagcgctggaaccccgagatccagtacacctccaactactacaaatctacaagtgtggactttgctgttaatacagaaggcgtgtactctgaaccccgccccattggcacccgttacctcacccgtaatctgtaa

SEQ ID NO: 981 - DNA, 2214 bp, Artificial Sequence
  source: /note="Description of Artificial Sequence: Synthetic polynucleotide"
atggctgccgatggttatcttccagattggctcgaggacaacctctctgagggcattcgcgagtggtgggcgctgaaacctggagccccgaagcccaaagccaaccagcaaaagcaggacgacggccggggtctggtgcttcctggctacaagtacctcggacccttcaacggactcgacaagggggagcccgtcaacgcggcggacgcagcggccctcgagcacgacaaggcctacgaccagcagctcaaagcgggtgacaatccgtacctgcggtataaccacgccgacgccgagtttcaggagcgtctgcaagaagatacgtcttttgggggcaacctcgggcgagcagtcttccaggccaagaagcgggttctcgaacctctcggtctggttgaggacggcgctaagacggctcctggaaagaagagaccagtagagcagtcaccccaagaaccagactcctcctcgggcatcggcaagaaaggccaacagcccgccagaaaaagactcaattttggccagactggcgactcagagtcagttccagaccctcaacctctcggagaacctccagcaacccccgctgctgtgggacctactacaatggcttcaggcggtggcgcaccaatggcagacaataacgaaggcgccgacggagtgggtagttcctcgggaaattggcattgcgattccacatggctgggcgacagagtcatcaccaccagcacccgaacctgggccctgcccacctacaacaaccacctctacaagcaaatctccaacgggacatcgggaggagccaccaacgacaacacctacttcggctacagcaccccctgggggtattttgactttaacagattccactgccacttttcaccacgtgactggcagcgactcatcaacaacaactggggattccggcccaagagactcagcttcaagctcttcaacatccaggtcaaggaggtcacgcagaatgaaggcaccaagaccatcgccaataacctcaccagcaccatccaggtgtttacggactcggagtaccagctgccgtacgttctcggctctgcccaccagggctgcctgcctccgttcccggcggacgtgttcatgattccccagtacggctacctaacactcaacaacggtagtcaggccgtgggacgctcctccttctactgcctggaatactttccttcgcagatgctgagaaccggcaacaacttccagtttacttacaccttcgaggacgtgcctttccacagcagctacgcccacagccagagcttggaccggctgatgaatcctctgattgaccagtacctgtactacttgtctcggactcaaacaacaggaggcacggcaaatacgcagactctgggcttcagccaaggtgggcctaatacaatggccaatcaggcaaagaactggctgccaggaccctgttaccgccaacaacgcgtctcaacgacaaccgggcaaaacaacaatagcaactttgcctggactgctgggaccaaataccatctgaatggaagaaattcattggctaatcctggcatcgctatggcaacacacaaggacgacgaggagcgtttttttcccagtaacgggatcctgatttttggcaaacaaaatgctgccagagacaatgcggattacagcgatgtcatgctcaccagcgaggaagaaatcaaaaccactaaccctgtggctacagaggaatacggtatcgtggcagataacttgcagcagcaaaacacggctcctcaaattggaactgtcaacagccagggggccttacccggtatggtctggcagaaccgggacgtgtacctgcagggtcccatctgggccaagattcctcacacggacggcaacttccacccgtctccgctgatgggcggctttggcctgaaacatcctccgcctcagatcctgatcaagaacacgcctgtacctgcggatcctccgaccaccttcaaccagtcaaagctgaactctttcatcacgcaatacagcaccggacaggtcagcgtggaaatcgagtgggagctgcagaaagaaaacagcaagcgctggaaccccgagatccagtacacctccaactactacaaatctacaaatgtggactttgctgtcaacacggagggggtttatagcgagcctcgccccattggcacccgttacctcacccgcaacctgtaa

SEQ ID NO: 982 - DNA, 2211 bp, Artificial Sequence
  source: /note="Description of Artificial Sequence: Synthetic polynucleotide"
  modified_base (715)..(715): a, c, t, or g
atggctgccgatggttatcttccagattggctcgaggacaacctctctgagggcattcgcgagtggtgggcgctgaaacctggagccccgaagcccaaagccaaccagcaaaagcaggacgacggccggggtctggtgcttcctggctacaagtacctcggacccttcaacggactcgacaagggggagcccgtcaacgcggcggacgcagcggccctcgagcacgacaaggcctacgaccagcagctcaaagcgggtgacaatccgtacctgcggtataaccacgccgacgccgagtttcaggagcgtctgcaagaagatacgtcttttgggggcaacctcgggcgagcagtcttccaggccaagaagcgggttctcgaacctctcggtctggttgaggaaggcgctaagacggctcctggaaagaaacgtccggtagagcagtcgccacaagagccagactcctcctcgggcatcggcaagacaggccagcagcccgctaaaaagaggctcaattttggtcagactggcgactcagagtcagtccccgacccacaacctctcggagaacctccagcaacccccgctgctgtgggacctactacaatggcttcaggcggtggcgcaccaatggcagacaataacgaaggcgccgacggagtgggtaatgcctcaggaaattggcattgcgattccacatggctgggcgacagantcatcaccaccagcacccgaacatgggccttgcccacctataacaaccacctctacaagcaaatctccagtgcttcaacgggggccagcaacgacaaccactacttcggctacagcaccccctgggggtattttgatttcaacagattccactgccatttctcaccacgtgactggcagcgactcatcaacaacaattggggattccggcccaagagactcaacttcaagctcttcaacatccaagtcaaggaggtcacgcagaatgaaggcaccaagaccatcgccaataacctcaccagcaccatccaggtgtttacggactcggagtaccagctgccgtacgttctcggctctgcccaccagggctgcctgcctccgttcccggcggacgtgttcatgattccccagtacggctacctaacactcaacaacggtagtcaggccgtgggacgctcctccttctactgcctggaatattttccatctcaaatgctgcgaactggaaacaattttgaattcagctacaccttcgaggacgtgcctttccacagcagctacgcacacagccagagcttggaccgactgatgaatcctctcatcgaccagtacctgtactacttgtctcggactcaaacaacaggaggcacggcaaatacgcagactctgggcttcagccaaggtgggcctaatacaatggccaatcaggcaaagaactggctgccaggaccctgttaccgccaacaacgcgtctcaacgacaaccgggcaaaacaacaatagcaactttgcctggactgctgggaccaaataccatctgaatggaagaaattcattggctaatcctggcatcgctatggcaacacacaaagacgacgaggagcgtttttttcccagtaacgggatcctgatttttggcaaacaaaatgctgccagagacaatgcggattacagcgatgtcatgctcaccagcgaggaagaaatcaaaaccactaaccctgtggctacagaggaatacggtatcgtggcagataacttgcagcagcaaaacacggctcctcaaattggaactgtcaacagccaggggaccttacccggtatggtctggcagaaccgggacgtgtacctgcagggtcccatctgggccaagattcctcacacggacggcaacttccacccgtctccgctgatgggcggctttggcctgaaacatcctccgcctcagatcctgatcaagaacacgcctgtacctgcggatcctccgaccaccttcaaccagtcaaagctgaactctttcatcacgcaatacagcaccggacaggtcagcgtggaaattgaatgggagctacagaaggaaaacagcaagcgctggaaccccgagatccagtacacctccaattactacaaatctacaagtgtggactttgctgttaatacagaaggcgtgtactctgaaccccgccccattggcacgcgtttcctcacccgtaatctgtaa

SEQ ID NO: 983 - DNA, 2214 bp, Artificial Sequence
  source: /note="Description of Artificial Sequence: Synthetic polynucleotide"
atggctgccgatggttatcttccagattggctcgaggacaacctctctgagggcattcgcgagtggtgggcgctgaaacctggagccccgaagcccaaagccaaccagcaaaagcaggacgacggccggggtctggtgcttcctggctacaagtacctcggacccttcaacggactcgacaagggggagcccgtcaacgcggcggacgcagcggccctcgagcacgacaaggcctacgaccagcagctcaaagcgggtgacaatccgtacctgcggtataaccacgccgacgccgagtttcaggagcgtctgcaagaagatacgtcttttgggggcaacctcgggcgagcagtcttccaggccaagaagcgggttctcgaacctctcggtctggttgaggaaggcgctaagacggctcctggaaagaaacgtccggtagagcagtcgccacaagagccagactcctcctcgggcatcggcaagacaggccagcagcccgctaaaaagaggctcaattttggccagactggcgactcagagtcagttccagaccctcaacctctcggagaacctccagcagcgccctctggtgtgggacctaatacaatggctgcaggcggtggcgcaccaatggcagacaataacgaaggcgccgacggagtgggtagttcctcgggaaattggcattgcgattccacatggctgggcgacagagtcatcaccaccagcacccgaacctgggccctgcccacctacaacaaccacctctacaagcaaatctccaacgggacatcgggaggagccaccaacgacaacacctacttcggctacagcaccccctgggggtattttgactttaacagattccactgccacttttcaccacgtgactggcagcgactcatcaacaacaactggggattccggcccaagagactcagcttcaagctcttcaacatccaggtcaaggaggtcacgcagaatgaaggcaccaagaccatcgccaataacctcaccagcaccatccaggtgtttacggactcggagtaccagctgccgtacgtactaggatccgctcaccagggatgtctgcctccgttcccggcggacgtgttcatgattccccagtacggctacctaacactcaacaacggtagtcaggccgtgggacgctcctccttctactgcctggaatattttccatctcagatgctgagaacgggcaataactttaccttcagctacaccttcgaggacgtgcctttccacagcagctatgcccacagccagagcttggaccggctgatgaatcctctgattgaccagtacctgtactacttgtctcggactcaaacaacaggaggcacggcaaatacgcagactctgggcttcagccaaggtgggcctaatacaatggccaatcaggcaaagaactggctgccaggaccctgttaccgccaacaacgcgtctcaacgacaaccgggcaaaacaacaatagcaactttgcctggactgctgggaccaaataccatctgaatggaagaaattcattggctaatcctggcatcgctatggcaacacacaaagacgacgaggagcgtttttttcccagtaacgggatcctgatttttggcaaacaaaatgctgccagagacaatgcggattacagcgatgtcatgctcaccagcgaggaagaaatcaaaaccactaaccctgtggctacagaggaatacggtatcgtggcagataacttgcagcagcaaaacacggctcctcaaattggaactgtcaacagccagggggccttacccggtatggtctggcagaaccgggacgtgtacctgcagggtcccatctgggccaagattcctcacacggacggcaacttccacccgtctccgctaatgggaggatttggactgaagcacccacctcctcagatcctgatcaagaacacgccggtacctgcggatcctccgaccaccttcaaccagtcaaagctgtactctttcatcacgcaatacagcaccggacaggtcagcgtggaaattgaatgggagctgcagaaggaaaacagcaagcgctggaaccccgagatccaatacacctccaactactacaaatctacaagtgtggactttgctgttaatacagaaggcgtgtactctgaaccccgccccattggcacccgttacctcacccgtaatctgtaa

SEQ ID NO: 984 - protein, 737 aa, Artificial Sequence
  source: /note="Description of Artificial Sequence: Synthetic polypeptide"
MAADGYLPDWLEDNLSEGIREWWDLKPGAPKPKANQQKQDDGRGLVLPGYKYLGPFNGLDKGEPVNAADAAALEHDKAYDQQLKAGDNPYLRYNHADVEFQERLQEDTSFGGNLGRAVFQAKKRVLEPFGLVEEGAKTAPGKKRPVEQSPQEPDSSSGIGKKGQQPARKRLNFGQTGDSESVPDPQPLGEPPAAPSGVGPNTMAAGGGAPMADNNEGADGVGNSSGNWHCDSTWMGDRVITTSTRTWALPTYNNHLYKQISNGTSGGSTNDNTYFGYSTPWGYFDFNRFHCHFSPRDWQRLINNNWGFRPKRLSFKLFNIQVKEVTQNEGTKTIANNLTSTIQVFTDSEYQLPYVLGSAHQGCLPPFPADVFMIPQYGYLTLNNGSQAVGRSSFYCLEYFPSQMLRTGNNFEFSYQFEDVPFHSSYAHSQSLDRLMNPLIDQYLYYLSRTQSTGGTARTQQLLFSQAGPNTMANQAKNWLPGPCYRQQRVSTTTGQNNNSNSAWTAGTKYHLNGRNSLANPGIAMATHKDDEERFFPSNGILIFGKQNAARDNADYSDVMLTSEEEIKTTNPVATEEYGIVADNLQQQNTAPQIGTVNSQGALPGMVWQNRDVYLQGPIWAKIPHTDGNFHPSPLMGGFGLKHPPPQILIKNTPVPADPPTTFNQSKLNSFITQYSTGQVSVEIEWELQKENSKRWNPEIQYTSNYYKSTSVDFAVNTEGVYSEPRPIGTRYLTRNL

SEQ ID NO: 985 - protein, 737 aa, Artificial Sequence
  source: /note="Description of Artificial Sequence: Synthetic polypeptide"
MAADGYLPDWLEDNLSEGIREWWALKPGAPKPKANQQKQDDGRGLVLPGYKYLGPFNGLDKGEPVNAADAAALEHDKAYDQQLKAGDNPYLRYNHADAEFQERLQEDTSFGGNLGRAVFQAKKRVLEPLGLVEDGAKTAPGKKRPVEQSPQEPDSSSGIGKKGQQPARKRLNFGQTGDSESVPDPQPLGEPPATPAAVGPTTMASGGGAPMADNNEGADGVGSSSGNWHCDSTWLGDRVITTSTRTWALPTYNNHLYKQISNGTSGGATNDNTYFGYSTPWGYFDFNRFHCHFSPRDWQRLINNNWGFRPKRLSFKLFNIQVKEVTQNEGTKTIANNLTSTIQVFTDSEYQLPYVLGSAHQGCLPPFPADVFMIPQYGYLTLNNGSQAVGRSSFYCLEYFPSQMLRTGNNFQFTYTFEDVPFHSSYAHSQSLDRLMNPLIDQYLYYLSRTQTTGGTANTQTLGFSQGGPNTMANQAKNWLPGPCYRQQRVSTTTGQNNNSNFAWTAGTKYHLNGRNSLANPGIAMATHKDDEERFFPSNGILIFGKQNAARDNADYSDVMLTSEEEIKTTNPVATEEYGIVADNLQQQNTAPQIGTVNSQGALPGMVWQNRDVYLQGPIWAKIPHTDGNFHPSPLMGGFGLKHPPPQILIKNTPVPADPPTTFNQSKLNSFITQYSTGQVSVEIEWELQKENSKRWNPEIQYTSNYYKSTNVDFAVNTEGVYSEPRPIGTRYLTRNL

SEQ ID NO: 986 - protein, 736 aa, Artificial Sequence
  source: /note="Description of Artificial Sequence: Synthetic polypeptide"
  MOD_RES (239)..(239): Any naturally occurring amino acid
MAADGYLPDWLEDNLSEGIREWWALKPGAPKPKANQQKQDDGRGLVLPGYKYLGPFNGLDKGEPVNAADAAALEHDKAYDQQLKAGDNPYLRYNHADAEFQERLQEDTSFGGNLGRAVFQAKKRVLEPLGLVEEGAKTAPGKKRPVEQSPQEPDSSSGIGKTGQQPAKKRLNFGQTGDSESVPDPQPLGEPPATPAAVGPTTMASGGGAPMADNNEGADGVGNASGNWHCDSTWLGDRXITTSTRTWALPTYNNHLYKQISSASTGASNDNHYFGYSTPWGYFDFNRFHCHFSPRDWQRLINNNWGFRPKRLNFKLFNIQVKEVTQNEGTKTIANNLTSTIQVFTDSEYQLPYVLGSAHQGCLPPFPADVFMIPQYGYLTLNNGSQAVGRSSFYCLEYFPSQMLRTGNNFEFSYTFEDVPFHSSYAHSQSLDRLMNPLIDQYLYYLSRTQTTGGTANTQTLGFSQGGPNTMANQAKNWLPGPCYRQQRVSTTTGQNNNSNFAWTAGTKYHLNGRNSLANPGIAMATHKDDEERFFPSNGILIFGKQNAARDNADYSDVMLTSEEEIKTTNPVATEEYGIVADNLQQQNTAPQIGTVNSQGTLPGMVWQNRDVYLQGPIWAKIPHTDGNFHPSPLMGGFGLKHPPPQILIKNTPVPADPPTTFNQSKLNSFITQYSTGQVSVEIEWELQKENSKRWNPEIQYTSNYYKSTSVDFAVNTEGVYSEPRPIGTRFLTRNL

SEQ ID NO: 987 - protein, 737 aa, Artificial Sequence
  source: /note="Description of Artificial Sequence: Synthetic polypeptide"
MAADGYLPDWLEDNLSEGIREWWALKPGAPKPKANQQKQDDGRGLVLPGYKYLGPFNGLDKGEPVNAADAAALEHDKAYDQQLKAGDNPYLRYNHADAEFQERLQEDTSFGGNLGRAVFQAKKRVLEPLGLVEEGAKTAPGKKRPVEQSPQEPDSSSGIGKTGQQPAKKRLNFGQTGDSESVPDPQPLGEPPAAPSGVGPNTMAAGGGAPMADNNEGADGVGSSSGNWHCDSTWLGDRVITTSTRTWALPTYNNHLYKQISNGTSGGATNDNTYFGYSTPWGYFDFNRFHCHFSPRDWQRLINNNWGFRPKRLSFKLFNIQVKEVTQNEGTKTIANNLTSTIQVFTDSEYQLPYVLGSAHQGCLPPFPADVFMIPQYGYLTLNNGSQAVGRSSFYCLEYFPSQMLRTGNNFTFSYTFEDVPFHSSYAHSQSLDRLMNPLIDQYLYYLSRTQTTGGTANTQTLGFSQGGPNTMANQAKNWLPGPCYRQQRVSTTTGQNNNSNFAWTAGTKYHLNGRNSLANPGIAMATHKDDEERFFPSNGILIFGKQNAARDNADYSDVMLTSEEEIKTTNPVATEEYGIVADNLQQQNTAPQIGTVNSQGALPGMVWQNRDVYLQGPIWAKIPHTDGNFHPSPLMGGFGLKHPPPQILIKNTPVPADPPTTFNQSKLYSFITQYSTGQVSVEIEWELQKENSKRWNPEIQYTSNYYKSTSVDFAVNTEGVYSEPRPIGTRYLTRNL

SEQ ID NO: 988 - DNA, 2208 bp, Artificial Sequence
  source: /note="Description of Artificial Sequence: Synthetic polynucleotide"
atggctgccgatggttatcttccagattggctcgaggacaacctctctgagggcattcgcgagtggtgggacttgaaacctggagccccgaaacccaaagccaaccagcaaaagcaggacgacggccggggtctggtgcttcctggctacaagtacctcggacccttcaacggactcgacaagggggagcccgtcaacgcggcggatgcagcggccctcgagcacgacaaagcctacgaccggcagctcgacagcggagacaacccgtacctcaagtacaaccacgccgacgcggagtttcaggagcgccttaaagaagatacgtcttttgggggcaacctcggacgagcagtcttccaggccaagaagagggttctcgaaccttttggtctggttgaggaaggtgctaagacggctcctggaaagaaacgtccggtagagcagtcgccacaagagccagactcctcctcgggcattggcaagacaggccagcagcccgctaaaaagagactcaattttggtcagactggcgactcagagtcagtccccgacccacaacctctcggagaacctccagcaacccccgctgctgtgggacctactacaatggcttcaggtggtggcgcaccagtggcagacaataacgaaggcgccgacggagtgggtagttcctcgggaaattggcattgcgattccacatggctgggcgacagagtcatcaccaccagcacccgaacatgggccttgcccacctataacaaccacctctacaagcaaatctccagtgcttcgacgggggccagcaacgacaaccactacttcggctacagcaccccctgggggtattttgatttcaacaggttccactgccatttctcaccacgtgactggcagcgactcatcaacaacaattggggattccggcccaaaagactcaacttcaagctgttcaacatccaggtcaaggaagtcacgacgaacgaaggcaccaagaccatcgccaataatctcaccagcaccgtgcaggtctttacggactcggagtaccagttaccgtacgtgctaggatccgctcaccagggatgtctgcctccgttcccggcggacgtcttcatggttcctcagtacggctatttaactttaaacaatggaagccaagccctgggacgttcctccttctactgtctggagtatttcccatcgcagatgctgagaacgggcaacaactttacctttagctacaccttcgaggacgtgcctttccacagcagctacgcgcacagccagagcctggacaggctgatgaatcccctcatcgaccagtacctgtactacctggtcagaacgcaaacgactggaactggagggacgcagactctggcattcagccaagcgggtcctagctcaatggccaaccaggctagaaattgggtgcccggaccttgctaccggcagcagcgcgtctccacgacaaccaaccagaacaacaacagcaactttgcctggacgggagctgccaagtttaagctgaacggccgagactctctaatgaatccgggcgtggcaatggcttcccacaaggatgacgacgaccgcttcttcccttcgagcggggtcctgatttttggcaagcaaggagccgggaacgatggagtggattacagccaagtgctgattacagatgaggaagaaatcaaggctaccaaccccgtggccacagaagaatatggagcagtggccatcaacaaccaggccgccaatacgcaggcgcagaccggactcgtgcacaaccagggggtgattcccggcatggtgtggcagaatagagacgtgtacctgcagggtcccatctgggccaaaattcctcacacggacggcaactttcacccgtctcccctgatgggcggctttggactgaagcacccgcctcctcaaattctcatcaagaacacaccggttccagcggacccgccgcttaccttcaaccaggccaagctgaactctttcatcacgcagtacagcaccggacaggtcagcgtggaaatcgagtgggagctgcagaaagaaaacagcaaacgctggaatccagagattcaatacacttccaactactacaaatctacaaatgtggactttgctgtcaacacggagggggtttatagcgagcctcgccccattggcacccgttacctcacccgcaacctgtaa

SEQ ID NO: 989 - DNA, 2211 bp, Artificial Sequence
  source: /note="Description of Artificial Sequence: Synthetic polynucleotide"
  modified_base (337)..(337): a, c, g, or t
atggctgccgatggttatcttccagattggctcgaggacactctctctgaaggaataagacagtggtggaagctcaaacctggcccaccaccaccaaagcccgcagagcggcataaggacgacagcaggggtcttgtgcttcctggctacaagtacctcggacccttcaacggactcgacaagggggagcccgtcaacgcggcggacgcagcgaccctcgagcacgacaaggcctacgaccagcagctcaaagcgggtgacaatccgtacctgcggtataaccacgccgacgccgagtttcaggagcgtctgcaagaagatacgtcttttgggggcnacctcgggcgagcagtcttccaggccaagaagcgggttctcgaacctctcggtctggttgaggaagctgctaagacggctcctggaaagaagagaccagtagagccatcaccccagcgttctccagactcctctacgggcatcggcaagaaaggccaacagcccgccagaaaaagactcaattttggtcagactggcgactcagagtcagttccagaccctcaacctctcggagaacctccagcagcgccctctggtgtgggacctaatacaatggctgcaggcggtggcgcaccaatggcagacaataacgaaggcgccgacggagtgggtagttcctcgggaaattggcattgcgattccacatggctgggcgacagagtcatcaccaccagcacccgaacctgggccctgcccacctacaacaaccacctctacaagcaaatctccagtgcttcaacgggggccagcaacgacaaccactacttcggctacagcaccccctgggggtattttgatttcaacagattccactgccatttctcaccacgtgactggcagcgactcatcaacaacaattggggattccggcccaagagactcaacttcaagctcttcaacatccaagtcaaggaggtcacgacgaatgatggcgtcacgaccatcgctaataaccttaccagcacggttcaagtcttctcggactcagactatcagctcccgtacgtgctcgggtcggctcacgagggctgcctcccgccgttcccagcggacgttttcatgattcctcagtacggctatttaactttaaacaatggaagccaagccctgggacgttcctccttctactgtctggagtatttcccatcgcagatgctgagaaccggcaacaactttcagttcagctacaccttcgaggacgtgcctttccacagcagctacgcgcacagccagagcctggacaggctgatgaatcccctcatcgaccagtacctgtactacctggtcagaacgcaaacgactggaactggagggacgcagactctggcattcagccaagcgggtcctagctcaatggccaaccaggctagaaattgggtgcccggaccttgctaccggcagcagcgcgtctccacgacaaccaaccagaacaacaacagcaactttgcctggacgggagctgccaagtttaagctgaacggccgagactctctaatgaatccgggcgtggcaatggcttcccacaaggatgacgacgaccgcttcttcccttcgagcggggtcctgatttttggcaagcaaggagccgggaacgatggagtggattacagccaagtgctgattacagatgaggaagaaatcaaggctaccaaccccgtagccacagaagaatatggagcagtggccatcaacaaccaggccgccaatacgcaggcgcagaccggactcgtgcacaaccagggggtgattcccggaatggtgtggcaagacagagacgtatacctgcagggtcctatttgggccaaaattcctcacacggatggacactttcacccgtctcctctcatgggcggctttggacttaagcacccgcctcctcagatcctcatcaaaaacacgcctgttcctgcgaatcctccggcagagttttcggctacaaagtttgcttcattcatcacccagtattccacaggacaagtgagcgtggagattgaatgggagctgcagaaagaaaacagcaaacgctggaatcccgaagtgcagtatacatctaactatgcaaaatctgccaacgttgatttcactgtggacaacaatggactttatactgagcctcgccccattggcacccgttacctcacccgtcccctgtaa

SEQ ID NO: 990 - DNA, 2214 bp, Artificial Sequence
  source: /note="Description of Artificial Sequence: Synthetic polynucleotide"
  modified_base (335)..(335): a, c, g, or t
atgactgacggttaccttccagattggctagaggacaacctctctgaaggcgttcgagagtggtgggcgctgcaacctggagccccgaagcccaaagccaaccagcaaaagcaggacgacggccggggtctggtgcttcctggctacaagtacctcggacccttcaacggactcgacaagggggagcccgtcaacgcggcggacgcagcggccctcgagcacgacaaggcctacgaccagcagctcaaagcgggtgacaatccgtacctgcggtataaccacgccgacgccgagtttcaggagcgtctgcaagaagatacgtcttttgggggcancctcgggcgagcagtcttccaggccaagaagcgggttctcgaacctctcggtctggttgaggaaggcgctaagacggctcctggaaagaaacgtccggtagagccatcaccccagcgttctccagactcctctacgggcatcggcaagaaaggccaacagcccgccagaaaaagactcaattttggtcagactggcgactcagagtcagttccagaccctcaacctctcggagaacctccagcagcgccctcaggtgtgggatctcttacaatggcttcaggtggtggcgcaccagtggcagacaataacgaaggtgccgatggagtgggtagttcctcgggaaattggcattgcgattcccaatggctgggggacagagtcatcaccaccagcacccgaacctgggccctgcccacctacaacaatcacctctacaagcaaatctccaacagcacatctggaggatcttcaaatgacaacgcctacttcggctacagcaccccctgggggtattttgacttcaacagattccactgccacttctcaccacgtgactggcagcgactcatcaacaacaactggggattccggcccaagagactcagcttcaagctcttcaacatccaggtcaaggaggtcacgcagaatgaaggcaccaagaccatcgccaataacctcaccagcaccatccaggtgtttacggactcggagtaccagctgccgtacgttctcggctctgcccaccagggctgcctgcctccgttcccggcggacgtgttcatgattccccagtacggctacctaacactcaacaacggtagtcaggccgtgggacgctcctccttctactgcctggaatactttccttcgcagatgctgagaaccggcaacaacttccagtttacttacaccttcgaggacgtgcctttccacagcagctacgcccacagccagagcttggaccggctgatgaatcctctgattgaccagtacctgtactacttgtctcggactcaaacaacaggaggcacggcaaatacgcagactctgggcttcagccaaggtgggcctaatacaatggccaatcaggcaaagaactggctgccaggaccctgttaccgccaacaacgcgtctcaacgacaaccgggcaaaacaacaatagcaactttgcctggactgctgggaccaaataccatctgaatggaagaaattcattggctaatcctggcatcgctatggcaacacacaaagacgacgaggagcgtttttttcccagtaacgggatcctgatttttggcaaacaaaatgctgccagagacaatgcggattacagcgatgtcatgctcaccagcgaggaagaaatcaaaaccactaaccctgtggctacagaggaatacggtatcgtggcagataacttgcagcagcaaaacacggctcctcaaattggaactgtcaacagccagggggccttacccggtatggtctggcagaaccgggacgtgtacctgcagggtcccatctgggccaagattcctcacacggacggcaacttccacccgtctccgctgatgggcggctttggcctgaaacatcctccgcctcagatcctgatcaagaacacgcctgtacctgcggatcctccgaccaccttaaaccaggccaagctgaactctttcatcacgcaatacagcaccggacaggtcagcgtggaaattgaatgggagctgcagaaggaaaacagcaagcgctggaacccagagattcagtacacttcaaactactacaaatctacaaatgtggactttgctgtcaatacagagggaacttatagtgaaccccgccccattggcaccagatttctgactcgtaatctgtaa

SEQ ID NO: 991 - DNA, 2211 bp, Artificial Sequence
  source: /note="Description of Artificial Sequence: Synthetic polynucleotide"
  modified_base (338)..(338): a, c, g, or t
atggctgccgatggttatcttccagattggctcgaggacactctctctgaaggaataagacagtggtggaagctcaaacctggcccaccaccaccaaagcccgcagagcggcataaggacgacagcaggggtcttgtgcttcctgggtacaagtacctcggccccttcaacggactcgacaagggggagcccgtcaacgcggcggacgcagcggccctcgagcacgacaaggcctacgaccagcagctcgaagcgggtgacaatccgtacctgcggtataaccacgccgacgccgagtttcaggagcgtctgcaagaagatacgtcttttgggggcancctcgggcgagcagtcttccaggccaagaagcgggttctcgaacctctcggtctggttgaggaaggcgctaagacggctcctggaaagaagagaccagtagagcagtcaccccaagaaccagactcctcctcgggcatcggcaggaaaggccaacagcccgccagaaaaagactcaattttggccagactggcgactcagagtcagttccagaccctcaacctctcggagaacctccagcagcgccctctggtgtgggacctaatacaatggcttcaggcggtggcgctccaatggcagacaataacgaaggcgccgacggagtgggtaatgcctcaggaaattggcattgcgattccacatggctgggcgacagagtcatcaccaccagcacccgcacctgggccttgcccacctacaataaccacctctacaagcaaatctccagtgcttcaacgggggccagcaacgacaaccactacttcggctacagcaccccctgggggtattttgatttcaacagattccactgccacttttcaccacgtgactggcagcgactcatcaacaacaattggggattccggcccaagagactcaacttcaaactcttcaacatccaggtcaaggaggtcacgcagaatgaaggcactaagaccatcgccaataaccttaccagcacgattcaggtatttacggactcggaataccagctgccgtacgtcctcggctccgcgcaccagggctgcctgcctccgttcccggcggacgtcttcatgattccccagtacggctaccttacactgaacaatggaagtcaagccgtaggccgttcctccttctactgcctggaatattttccatctcaaatgctgcgaactggcaacaacttccagtttacctacaccttcgaggacgtgcctttccacagcagctacgcccacagccagagcttggaccggctgatgaatcctctgattgaccagtacctgtactacttgtctcggactcagtccacaggaggaactcaaggtacccagcaattgttattttctcaagctgggcctgcaaacatgtcggctcaggctaagaactggctacctggaccttgctaccggcagcagcgagtctctacgacactgtcgcaaaacaacaacagcaactttgcttggactggtgccaccaaatatcacctgaacggaagagactctttggtaaatcccggtgtcgccatggcaacccacaaggacgacgaggaacgcttcttcccgtcgagtggagtcctgatgtttggaaaacagggtgctggaagagacaatgtggactacagcagcgttatgctaaccagcgaagaagaaattaaaaccactaaccctgtagccacagaacaatacggtgtggtggttgataacttgcagcaaaccaatacggggcctattgtgggaaatgtcaacagccaaggagccttacctggtatggtctggcagaaccgggacgtgtacctgcagggtcccatctgggccaagattcctcacacggacggcaacttccacccgtctccgctgatgggcggctttggcctgaaacatcctccgcctcagatcctcatcaaaaacacacctgtacctgcggatcctccaacggccttcaacaaggacaagctgaactctttcatcacccagtattctactggccaagtcagcgtggagatcgagtgggagctgcagaaggaaaacagcaagcgctggaacccggagatccagtacacttccaactattacaagtctaataatgttgaatttgctgttaatactgaaggtgtatatagtgaaccccgccccattggcaccagatacctgactcgtaatctgtaa

SEQ ID NO: 992 - protein, 735 aa, Artificial Sequence
  source: /note="Description of Artificial Sequence: Synthetic polypeptide"
MAADGYLPDWLEDNLSEGIREWWDLKPGAPKPKANQQKQDDGRGLVLPGYKYLGPFNGLDKGEPVNAADAAALEHDKAYDRQLDSGDNPYLKYNHADAEFQERLKEDTSFGGNLGRAVFQAKKRVLEPFGLVEEGAKTAPGKKRPVEQSPQEPDSSSGIGKTGQQPAKKRLNFGQTGDSESVPDPQPLGEPPATPAAVGPTTMASGGGAPVADNNEGADGVGSSSGNWHCDSTWLGDRVITTSTRTWALPTYNNHLYKQISSASTGASNDNHYFGYSTPWGYFDFNRFHCHFSPRDWQRLINNNWGFRPKRLNFKLFNIQVKEVTTNEGTKTIANNLTSTVQVFTDSEYQLPYVLGSAHQGCLPPFPADVFMVPQYGYLTLNNGSQALGRSSFYCLEYFPSQMLRTGNNFTFSYTFEDVPFHSSYAHSQSLDRLMNPLIDQYLYYLVRTQTTGTGGTQTLAFSQAGPSSMANQARNWVPGPCYRQQRVSTTTNQNNNSNFAWTGAAKFKLNGRDSLMNPGVAMASHKDDDDRFFPSSGVLIFGKQGAGNDGVDYSQVLITDEEEIKATNPVATEEYGAVAINNQAANTQAQTGLVHNQGVIPGMVWQNRDVYLQGPIWAKIPHTDGNFHPSPLMGGFGLKHPPPQILIKNTPVPADPPLTFNQAKLNSFITQYSTGQVSVEIEWELQKENSKRWNPEIQYTSNYYKSTNVDFAVNTEGVYSEPRPIGTRYLTRNL

SEQ ID NO: 993 - protein, 736 aa, Artificial Sequence
  source: /note="Description of Artificial Sequence: Synthetic polypeptide"
  MOD_RES (113)..(113): Any naturally occurring amino acid
MAADGYLPDWLEDTLSEGIRQWWKLKPGPPPPKPAERHKDDSRGLVLPGYKYLGPFNGLDKGEPVNAADAATLEHDKAYDQQLKAGDNPYLRYNHADAEFQERLQEDTSFGGXLGRAVFQAKKRVLEPLGLVEEAAKTAPGKKRPVEPSPQRSPDSSTGIGKKGQQPARKRLNFGQTGDSESVPDPQPLGEPPAAPSGVGPNTMAAGGGAPMADNNEGADGVGSSSGNWHCDSTWLGDRVITTSTRTWALPTYNNHLYKQISSASTGASNDNHYFGYSTPWGYFDFNRFHCHFSPRDWQRLINNNWGFRPKRLNFKLFNIQVKEVTTNDGVTTIANNLTSTVQVFSDSDYQLPYVLGSAHEGCLPPFPADVFMIPQYGYLTLNNGSQALGRSSFYCLEYFPSQMLRTGNNFQFSYTFEDVPFHSSYAHSQSLDRLMNPLIDQYLYYLVRTQTTGTGGTQTLAFSQAGPSSMANQARNWVPGPCYRQQRVSTTTNQNNNSNFAWTGAAKFKLNGRDSLMNPGVAMASHKDDDDRFFPSSGVLIFGKQGAGNDGVDYSQVLITDEEEIKATNPVATEEYGAVAINNQAANTQAQTGLVHNQGVIPGMVWQDRDVYLQGPIWAKIPHTDGHFHPSPLMGGFGLKHPPPQILIKNTPVPANPPAEFSATKFASFITQYSTGQVSVEIEWELQKENSKRWNPEVQYTSNYAKSANVDFTVDNNGLYTEPRPIGTRYLTRPL

SEQ ID NO: 994 - protein, 737 aa, Artificial Sequence
  source: /note="Description of Artificial Sequence: Synthetic polypeptide"
  MOD_RES (112)..(112): Any naturally occurring amino acid
MTDGYLPDWLEDNLSEGVREWWALQPGAPKPKANQQKQDDGRGLVLPGYKYLGPFNGLDKGEPVNAADAAALEHDKAYDQQLKAGDNPYLRYNHADAEFQERLQEDTSFGGXLGRAVFQAKKRVLEPLGLVEEGAKTAPGKKRPVEPSPQRSPDSSTGIGKKGQQPARKRLNFGQTGDSESVPDPQPLGEPPAAPSGVGSLTMASGGGAPVADNNEGADGVGSSSGNWHCDSQWLGDRVITTSTRTWALPTYNNHLYKQISNSTSGGSSNDNAYFGYSTPWGYFDFNRFHCHFSPRDWQRLINNNWGFRPKRLSFKLFNIQVKEVTQNEGTKTIANNLTSTIQVFTDSEYQLPYVLGSAHQGCLPPFPADVFMIPQYGYLTLNNGSQAVGRSSFYCLEYFPSQMLRTGNNFQFTYTFEDVPFHSSYAHSQSLDRLMNPLIDQYLYYLSRTQTTGGTANTQTLGFSQGGPNTMANQAKNWLPGPCYRQQRVSTTTGQNNNSNFAWTAGTKYHLNGRNSLANPGIAMATHKDDEERFFPSNGILIFGKQNAARDNADYSDVMLTSEEEIKTTNPVATEEYGIVADNLQQQNTAPQIGTVNSQGALPGMVWQNRDVYLQGPIWAKIPHTDGNFHPSPLMGGFGLKHPPPQILIKNTPVPADPPTTLNQAKLNSFITQYSTGQVSVEIEWELQKENSKRWNPEIQYTSNYYKSTNVDFAVNTEGTYSEPRPIGTRFLTRNL

SEQ ID NO: 995 - protein, 736 aa, Artificial Sequence
  source: /note="Description of Artificial Sequence: Synthetic polypeptide"
  MOD_RES (113)..(113): Any naturally occurring amino acid
MAADGYLPDWLEDTLSEGIRQWWKLKPGPPPPKPAERHKDDSRGLVLPGYKYLGPFNGLDKGEPVNAADAAALEHDKAYDQQLEAGDNPYLRYNHADAEFQERLQEDTSFGGXLGRAVFQAKKRVLEPLGLVEEGAKTAPGKKRPVEQSPQEPDSSSGIGRKGQQPARKRLNFGQTGDSESVPDPQPLGEPPAAPSGVGPNTMASGGGAPMADNNEGADGVGNASGNWHCDSTWLGDRVITTSTRTWALPTYNNHLYKQISSASTGASNDNHYFGYSTPWGYFDFNRFHCHFSPRDWQRLINNNWGFRPKRLNFKLFNIQVKEVTQNEGTKTIANNLTSTIQVFTDSEYQLPYVLGSAHQGCLPPFPADVFMIPQYGYLTLNNGSQAVGRSSFYCLEYFPSQMLRTGNNFQFTYTFEDVPFHSSYAHSQSLDRLMNPLIDQYLYYLSRTQSTGGTQGTQQLLFSQAGPANMSAQAKNWLPGPCYRQQRVSTTLSQNNNSNFAWTGATKYHLNGRDSLVNPGVAMATHKDDEERFFPSSGVLMFGKQGAGRDNVDYSSVMLTSEEEIKTTNPVATEQYGVVVDNLQQTNTGPIVGNVNSQGALPGMVWQNRDVYLQGPIWAKIPHTDGNFHPSPLMGGFGLKHPPPQILIKNTPVPADPPTAFNKDKLNSFITQYSTGQVSVEIEWELQKENSKRWNPEIQYTSNYYKSNNVEFAVNTEGVYSEPRPIGTRYLTRNL

SEQ ID NO: 996 - DNA, 2211 bp, Artificial Sequence
  source: /note="Description of Artificial Sequence: Synthetic AAV9 VP1"
atggccgccgacggctacctgcccgactggctggaggacaacctgagcgagggcatccgcgagtggtgggccctgaagcccggcgccccccagcccaaggccaaccagcagcaccaggacaacgcccgcggcctggtgctgcccggctacaagtacctgggccccggcaacggcctggacaagggcgagcccgtgaacgccgccgacgccgccgccctggagcacgacaaggcctacgaccagcagctgaaggccggcgacaacccctacctgaagtacaaccacgccgacgccgagttccaggagcgcctgaaggaggacaccagcttcggcggcaacctgggccgcgccgtgttccaggccaagaagcgcctgctggagcccctgggcctggtggaggaggccgccaagaccgcccccggcaagaagcgccccgtggagcagagcccccaggagcccgacagcagcgccggcatcggcaagagcggcgcccagcccgccaagaagcgcctgaacttcggccagaccggcgacaccgagagcgtgcccgacccccagcccatcggcgagccccccgccgcccccagcggcgtgggcagcctgaccatggccagcggcggcggcgcccccgtggccgacaacaacgagggcgccgacggcgtgggcagcagcagcggcaactggcactgcgacagccagtggctgggcgaccgcgtgatcaccaccagcacccgcacctgggccctgcccacctacaacaaccacctgtacaagcagatcagcaacagcaccagcggcggcagcagcaacgacaacgcctacttcggctacagcaccccctggggctacttcgacttcaaccgcttccactgccacttcagcccccgcgactggcagcgcctgatcaacaacaactggggcttccgccccaagcgcctgaacttcaagctgttcaacatccaggtgaaggaggtgaccgacaacaacggcgtgaagaccatcgccaacaacctgaccagcaccgtgcaggtgttcaccgacagcgactaccagctgccctacgtgctgggcagcgcccacgagggctgcctgccccccttccccgccgacgtgttcatgatcccccagtacggctacctgaccctgaacgacggcagccaggccgtgggccgcagcagcttctactgcctggagtacttccccagccagatgctgcgcaccggcaacaacttccagttcagctacgagttcgagaacgtgcccttccacagcagctacgcccacagccagagcctggaccgcctgatgaaccccctgatcgaccagtacctgtactacctgagcaagaccatcaacggcagcggccagaaccagcagaccctgaagttcagcgtggccggccccagcaacatggccgtgcagggccgcaactacatccccggccccagctaccgccagcagcgcgtgagcaccaccgtgacccagaacaacaacagcgagttcgcctggcccggcgccagcagctgggccctgaacggccgcaacagcctgatgaaccccggccccgccatggccagccacaaggagggcgaggaccgcttcttccccctgagcggcagcctgatcttcggcaagcagggcaccggccgcgacaacgtggacgccgacaaggtgatgatcaccaacgaggaggagatcaagaccaccaaccccgtggccaccgagagctacggccaggtggccaccaaccaccagagcgcccaggcccaggcccagaccggctgggtgcagaaccagggcatcctgcccggcatggtgtggcaggaccgcgacgtgtacctgcagggccccatctgggccaagatcccccacaccgacggcaacttccaccccagccccctgatgggcggcttcggcatgaagcacccccccccccagatcctgatcaagaacacccccgtgcccgccgacccccccaccgccttcaacaaggacaagctgaacagcttcatcacccagtacagcaccggccaggtgagcgtggagatcgagtgggagctgcagaaggagaacagcaagcgctggaaccccgagatccagtacaccagcaactactacaagagcaacaacgtggagttcgccgtgaacaccgagggcgtgtacagcgagccccgccccatcggcacccgctacctgacccgcaacctgtaa

SEQ ID NO: 997 - DNA, 2211 bp, Artificial Sequence
  source: /note="Description of Artificial Sequence: Synthetic polynucleotide"
atggctgccgatggttatcttccagattggctcgaggacactctctctgaaggaataagacagtggtggaagctcaaacctggcccaccaccaccaaagcccgcagagcggcataaggacgacagcaggggtcttgtgcttcctgggtacaagtacctcggacccttcaacggactcgacaagggagagccggtcaacgaggcagacgccgcggccctcgagcacgacaaggcctacgaccagcagctcaaggccggagacaacccgtacctcaagtacaaccacgccgacgccgagttccaggagcggctcaaagaagatacgtcttttgggggcaacctcggacgagcagtcttccaggccaagaagcgggttctcgaacctctcggtctggttgaggaaggcgctaagacggctcctggaaagaaacgtccggtagagcagtcgccacaagagccagactcctcctcgggcattggcaagacaggccagcagcccgctaaaaagagactcaattttggtcagactggcgactcagagtcagtccccgacccacaacctctcggagaacctccagcaacccccgctgctgtgggacctactacaatggcttcaggcggtggcgcaccaatggcggacaataacgaaggcgccgatggagtgggtagttcctcgggaaattggcattgcgattcccaatggctgggggacagagtcatcaccaccagcacccgaacatgggccttgcccacctataacaaccacctctacaagcaaatctccagtgcttcaacgggggccagcaacgacaaccactacttcggctacagcaccccctgggggtattttgacttcaacagattccactgccacttctcaccacgtgactggcagcgactcatcaacaacaactggggattccgacccaagagactcaacttcaagctctttaacattcaagtcaaggaggtcacgcagaatgaaggcaccaagaccatcgccaataacctcaccagcaccatccaggtgtttacggactcggagtaccagctgccgtacgttctcggctccgcccaccagggctgcctgcctccgttcccggcggacgtgttcatgattccccagtacggctacctaacactcaacaacggtagtcaggccgtgggacgctcctccttctactgcctggaatactttccttcgcagatgctgagaaccggcaacaacttccagtttacttacaccttcgaggacgtgcctttccacagcagctacgcccacagccagagcttggaccggctgatgaatcctctgattgaccagtacctgtactacttgtctcggactcaaacaacaggaggcacggcaaatacgcagactctgggcttcagccaaggtgggcctaatacaatggccaatcaggcaaagaactggctgccaggaccctgttaccgccaacaacgcgtctcaacgacaaccgggcaaaacaacaatagcaactttgcctggactgctgggaccaaataccatctgaatggaagaaattcattggctaatcctggcatcgctatggcaacacacaaagacgacaaggagcgtttttttcccagtaacgggatcctgatttttggcaaacaaaatgctgccagagacaatgcggattacagcgatgtcatgctcaccagcgaggaagaaatcaaaaccactaaccctgtggctacagaggaatacggtatcgtggcagataacttgcagcagcaaaacacggctcctcaaattggaactgtcaacagccagggggccttacccggtatggtctggcagaaccgggacgtgtacctgcagggtcccatctgggccaagattcctcacacggacggcaacttccacccgtctccgctgatgggcggctttggcctgaaacatcctccgcctcagatcctgatcaagaacacgcctgtacctgcggatcctccgaccaccttcaaccagtcaaagctgaactctttcatcacgcaatacagcaccggacaggtcagcgtggaaattgaatgggagctgcagaaagaaaacagcaaacgctggaacccagagattcaatacacttccaactactacaaatctacaagtgtggactttgctgttaatacagaaggcgtgtactctgaaccccaccccattggcacccgttacctcacccgtcccctgtaa

SEQ ID NO: 998 - DNA, 2211 bp, Artificial Sequence
  source: /note="Description of Artificial Sequence: Synthetic polynucleotide"
atggctgccgatggttatcttccagattggctcgaggacaacctctctgagggcattcgcgagtggtgggcgctgaaacctggagccccgaagcccaaagccaaccagcaaaagcaggacgacggccggggtctggtgcttcctggctacaagtacctcggacccttcaacggactcgacaagggggagccggtcaacgcagcagacgcggcggccctcgagcacgacaaggcctacgaccagcagctcaaggccggagacaacccgtacctcaagtacaaccacgccgacgccgagttccaggagcggctcaaagaagatacgtcttttgggggcaacctcgggcgagcagtcttccaggccaaaaagaggcttcttgaacctcttggtctggttgaggaagcggctaagacggctcctggaaagaagaggcctgtagagcagtctcctcaggaaccggactcctccgcgggtattggcaaatcgggtgcacagcccgctaaaaagagactcaattttggtcagactggcgactcagagtcagtccccgacccacaacctctcggagaacctccagcaacccccgctgctgtgggacctactacaatggcttcaggcggtggcgcaccaatggcagacaataacgaaggcgccgacggagtgggtaatgcctcaggaaattggcattgcgattccacatggctgggcgacagagtcatcaccaccagcacccgaacctgggccctgcccacctacaataaccacctctacaagcaaatctccagtgcttcaacgggggccagcaacgacaaccactacttcggctacagcaccccctgggggtattttgatttcaacagattccactgccacttttcaccacgtgactggcagcgactcatcaacaacaattggggattccggcccaagagactcaacttcaaactcttcaacatccaagtcaaggaggtcacgcagaatgaaggcaccaagaccatcgccaataacctcaccagcaccatccaggtgtttacggactcggagtaccagctgccgtacgttctcggctctgcccaccagggctgcctgcctccgttcccggcggacgtgttcatgattccccagtacggctacctaacactcaacaacggtagtcaggccgtgggacgctcctccttctactgcctggaatactttccttcgcagatgctgagaaccggcaacaacttccagtttacttacaccttcgaggacgtgcctttccacagcagctacgcccacagccagagcttggaccggctgatgaatcctctgattgaccagtacctgtactacttgtctcggactcaaacaacaggaggcacggcaaatacgcagactctgggcttcagccaaggtgggcctaatacaatggccaatcaggcaaagaactggctgccaggaccctgttaccgccaacaacgcgtctcaacgacaaccgggcaaaacaacaatagcaactttgcctggactgctgggaccaaataccatctgaatggaagaaattcattggctaatcctggcatcgctatggcaacacacaaagacgacaaggagcgtttttttcccagtaacgggatcctgatttttggcaaacaaaatgctgccagagacaatgcggattacagcgatgtcatgctcaccagcgaggaagaaatcaaagccactaaccctgtggctacagaggaatacggtatcgtggcagataacttgcagcagcaaaacacggctcctcaaattggaactgtcaacagccagggggccttacccggtatggtttggcagaaccgggacgtgtacctgcagggtcccatctgggccaagattcctcacacggacggcaacttccacccgtctccgctgatgggcggctttggcctgaaacatcctccgcctcagatcctgatcaagaacacgcctgtacctgcggatcctccgaccaccttcaaccagtcaaagctgaactctttcatcacgcaatacagcaccggacaggtcagcgtggaaattgaatgggagctgcagaaggaaaacagcaagcgctggaaccccgagatccagtacacctccaactactacaaatctacaagtgtggactttgctgttaatacagaaggcgtgtactctgaaccccaccccattggcacccgttacctcacccgtcccctgtaa

SEQ ID NO: 999 - DNA, 2214 bp, Artificial Sequence
  source: /note="Description of Artificial Sequence: Synthetic polynucleotide"
atggctgccgatggttatcttccagattggctcgaggacaacctctctgagggcattcgcgagtggtgggacttgaaacctggagccccgaagcccaaagccaaccagcaaaagcaggacgacggccggggtctggtgcttcctggctacaagtacctcggacccttcaacggactcgacaagggggagcccgtcaacgcggcggacgcagcggccctcgagcacgacaaggcctacgaccagcagctcaaagcgggtgacaatccgtacctgcggtataaccacgccgacgccgagtttcaggagcgtctgcaagaagatacgtcttttgggggcaacctcgggcgagcagtcttccaggccaagaagcgggttctcgaacctctcggtctggttgaggaaggcgctaatacggctcctggaaagaaacgtccggtagagcagtcgccacaagagccagactcctccgcgggtattggcaaatcgggtgcacagcccgctaaaaagagactcaatttcggtcagactggcgacacagagtcagtcccagaccctcaaccaatcggagaacctcccgcagccccctcaggtgtgggatctcttacaatggcttcaggtggtggcgcaccagtggcagacaataacgaaggtgccgatggagtgggtagttcctcgggaaattggcattgcgattcccaatggctgggggacagagtcatcaccaccagcacccgaacctgggccctgcccacctacaacaatcacctctacaagcaaatctccaacagcacatctggaggatcttcaaatgacaacgcctacttcggctacagcaccccctgggggtattttgacttcaacagattccactgccacttctcaccacgtgactggcagcgactcatcaacaacaactggggattccggcctaagcgactcaacttcaagctcttcaacattcaggtcaaagaggttacggacaacaatggagtcaagaccatcgccaataacctcaccagcaccatccaggtgtttacggactcggagtaccagctgccgtacgttctcggctccgcccaccagggctgcctgcctccgttcccggcggacgtgttcatgattccccagtacggctacctaacactcaacaacggtagtcaggccgtgggacgctcctccttctactgcctggaatactttccttcgcagatgctgagaaccggcaacaacttccagtttacttacaccttcgaggacgtgcctttccacagcagctacgcccacagccagagcttggaccggctgatgaatcctctgattgaccagtacctgtactacttgtctcggactcaaacaacaggaggcacggcaaatacgcagactctgggcttcagccaaggtgggcctaatacaatggccaatcaggcaaagaactggctgccaggaccctgttaccgccaacaacgcgtctcaacgacaaccgggcaaaacaacaatagcaactttgcctggactgctgggaccaaataccatctgaatggaagaaattcattggctaatcctggcatcgctatggcctcacacaaagacgacaaggagcgtttttttcccagtaacgggatcctgatttttggcaaacaaaatgctgccagagacaatgcggattacagcgatgtcatgctcaccagcgaggaagaaatcaaaaccactaaccctgtggctacagaggaatacggtatcgtggcagataacttgcagcagcaaaacacggctcctcaaattggaactgtcaacagtcaaggagccttacctggcatggtctggcagaaccgggacgtgtacctgcagggtcccatctgggccaagattcctcacacggacggcaacttccacccgtctccgctgatgggcggctttggcctgaaacatcctccgcctcagatcctgatcaagaacacgcctgtacctgcggatcctccgaccaccttcaaccagtcaaagctgaactctttcatcacgcaatacagcaccggacaggtcagcgtggaaattgaatgggagctgcagaaggaaaacagcaagcgctggaaccccgagatccagtacaccaccaactactacaaatctacaagtgtggactttgctgttaatacagaaggcgtgtactctgaaccccaccccattggcacccgttacctcacccgtcccctgtaa

SEQ ID NO: 1000 - DNA, 2211 bp, Artificial Sequence
  source: /note="Description of Artificial Sequence: Synthetic polynucleotide"
atggctgccgatggttatcttccagattggctcgaggacaacctctctgagggcattcgcgagtggtgggcgctgaaacctggagccccgaagcccaaagccaaccagcaaaagcaggacgacggccggggtctggtgcttcctggctacaagtacctcggacccttcaacggactcgacaaaggagagccggtcaacgaggcggacgcggcagccctcgaacacgacaaagcttacgaccagcagctcaaggccggtgacaatccgtacctgcggtataaccacgccgacgccgagtttcaggagcgtcttcaagaagatacgtcttttgggggcaacctcgggcgagcagtcttccaggccaagaagcgggttctcgaacctctcggtctggttgaggaaggcgctaagacggctcctggaaagaaacgtccggtagagcagtcgccacaagagccagactcctcctcgggcatcggcaagacaggccagcagcccgctaaaaagagactcaattttggtcagactggcgactcagagtcagtccccgacccacaacctctcggagaacctccagcaacccccgctgctgtgggacctactacaatggcttcaggcggtggcgcaccaatggcagacaataacgaaggcgccgacggagtgggtaatgcctcaggaaattggcattgcgattccacatggctgggcgacagagtcatcaccaccagcacccgcacctgggccttgcccacctacaataaccacctctacaagcaaatctccagtgcttcaacgggggccagcaacgacaaccactacttcggctacagcaccccctgggggtattttgactttaacagattccactgccacttttcaccacgtgactggcaaagactcatcaacaacaactggggattccggcccaagagactcaacttcaagctcttcaacatccaggtcaaggaggtcacgcagaatgaaggcaccaagaccatcgccaataaccttaccagcacgattcaggtctttacggactcggaataccagctcccgtacgtcctcggctctgcgcaccagggctgcctccctccgttcccggcggacgtgttcatgattccgcagtacggctacctaacactcaacaacggtagtcaggccgtgggacgctcctccttctactgcctggaatactttccttcgcagatgctgagaaccggcaacaacttccagtttacttacaccttcgaggacgtgcctttccacagcagctacgcccacagccagagcttggaccggctgatgaatcctctgattgaccagtacctgtactacttgtctcggactcaaacaacaggaggcacggcaaatacgcagactctgggcttcagccaaggtgggcctaatacaatggccaatcaggcaaagaactggctgccaggaccctgttaccgccaacaacgcgtctcaacgacaaccgggcaaaacaacaatagcaactttgcctggactgctgggaccaaataccatctgaatggaagaaattcattggctaatcctggcatcgctatggcaacacacaaagacgacaaggagcgtttttttcccagtaacgggatcctgatttttggcaaacaaaatgctgccagagacaatgcggattacagcgatgtcatgctcaccagcgaggaagaaatcaaaaccactaaccctgtggctacagaggaatacggtatcgtggcagataacttgcagcagcaaaacacggctcctcaaattggaactgtcaacagccagggggccttacccggtatggtctggcagaaccgggacgtgtacctgcagggtcccatctgggccaagattcctcacacggacggcaacttccacccgtctccgctgatgggcggctttggcctgaaacatcctccgcctcagatcctgatcaagaacacgcctgtacctgcggatcctccgaccaccttcaaccagtcaaagctgaactctttcatcacgcaatacagcaccggacaggtcagcgtggaaattgaatgggagctgcagaaggaaaacagcaagcgctggaaccccgagatccagtacacctccaactactacaaatctacaagtgtggactttgctgttaatacagaaggcgtgtactctgaaccccaccccattggcacccgttacctcacccgtcccctgtaa

SEQ ID NO: 1001 - DNA, 2211 bp, Artificial Sequence
  source: /note="Description of Artificial Sequence: Synthetic polynucleotide"
atggctgccgatggttatcttccagattggctcgaggacaacctctctgagggcattcgcgagtggtgggcgctgaaacctggagccccgaagcccaaagccaaccagcaaaagcaggacgacggccggggtctggtgcttcctggctacaagtacctcggacccttcaacggactcgacaaaggagagccggtcaacgaggcggacgcggcagccctcgaacacgacaaagcttacgaccagcagctcaaagcgggtgacaatccgtacctgcggtataaccacgccgacgccgagtttcaggagcgtctgcaagaagatacgtcttttgggggcaacctcgggcgagcagtcttccaggccaagaagagggttctcgaaccttttggtctggttgaggaaggtgctaagacggctcctggaaagaaacgtccggtagagcagtcgccacaagagccagactcctcctcgggcattggcaagacaggccagcagcccgctaaaaagagactcaattttggtcagactggcgactcagagtcagtccccgacccacaacctctcggagaacctccagcaacccccgctgctgtgggacctactacaatggcttcaggcggtggcgcaccaatggcagacaataacgaaggcgccgacggagtgggtaatgcctcaggaaattggcattgcgattcccaatggctgggcgacagagtcatcaccaccagcaccagaacctgggccttgcccacctataacaaccacctctacaagcaaatctccagtgcttcaacgggggccagcaacgacaaccactacttcggctacagcaccccctgggggtattttgatttcaacagattccactgccacttctcaccacgtgactggcagcgactcatcaacaacaactggggattccggcctaagcgactcaacttcaagctcttcaacattcaggtcaaagaggttacggacaacaatggagtcaagaccatcgccaataaccttaccagcacggttcaagtcttctcggactcggagtaccagttgccgtacgtcctcggctctgcgcaccagggctgcctccctccgttcccggcggacgtgttcatgattccccagtacggctacctaacactcaacaacggtagtcaggccgtgggacgctcctccttctactgcctggaatactttccttcgcagatgctgagaaccggcaacaacttccagtttacttacaccttcgaggacgtgcctttccacagcagctacgcgcacagccagagcttggaccggctgatgaatcctctgattgaccagtacctgtactacttgtctcggactcaaacaacaggaggcacggcaaatacgcagactctgggcttcagccaaggtgggcctaatacaatggccaatcaggcaaagaactggctgccaggaccctgttaccgccaacaacgcgtctcaacgacaaccgggcaaaacaacaatagcaactttgcctggactgctgggaccaaataccatctgaatggaagaaattcattggctaatcctggcatcgctatggcaacacacaaagacgacaaggagcgtttttttcccagtaacgggatcctgatttttggcaaacaaaatgctgccagagacaatgcggattacagcgatgtcatgctcaccagcgaggaagaaatcaaaaccactaaccctgtggctacagaggaatacggtatcgtggcagataacttgcagcagcaaaacacggctcctcaaattggaactgtcaacagccagggggccttacccggtatggtctggcagaaccgggacgtgtacctgcagggtcccatctgggccaagattcctcacacggacggcaacttccacccgtctccgctgatgggcggctttggcctgaaacatcctccgcctcagatcctgatcaagaacacgcctgtacctgcggatcctccgaccaccttcaaccagtcaaagctgaactctttcatcacgcaatacagcaccggacaggtcagcgtggaaattgaatgggagctgcagaaggaaaacagcaagcgctggaaccccgagatccagtacacctccaactactacaaatctacaagtgtggactttgctgttaatacagaaggcgtgtactctgaaccccaccccattggcacccgttacctcacccgtcccctgtaa

SEQ ID NO: 1002 - DNA, 2244 bp, Artificial Sequence
  source: /note="Description of Artificial Sequence: Synthetic polynucleotide"
  modified_base (2241)..(2241): a, c, g, or t
atggctgccgatggttatcttccagattggctcgaggacactctctctgaaggaataagacagtggtggaagctcaaacctggcccaccaccaccaaagcccgcagagcggcataaggacgacagcaggggtcttgtgcttcctgggtacaagtacctcggacccttcaacggactcgacaagggagagccggtcaacgaggcagacgccgcggccctcgagcacgacaaagcctacgaccggcagctcgacagcggagacaacccgtacctcaagtacaaccacgccgacgcggagtttcaggagcgccttaaagaagatacgtcttttgggggcaacctcgggcgagcagtcttccaggccaagaagagggttctcgaaccttttggtctggttgaggaaggtgctaagacggctcctggaaagaaacgtccggtagagcagtcgccacaagagccagactcctcctcgggcattggcaagacaggccagcagcccgctaaaaagagactcaattttggtcagactggcgactcagagtcagtccccgacccacaacctctcggagaacctccagcaacccccgctgctgtgggacctactacaatggcttcaggcggtggcgcaccaatggcagacaataacgaaggcgccgacggagtgggtaatgcctcaggaaattggcattgcgattccacatggctgggcgacagagtcatcaccaccagcacccgaacatgggccttgcccacctataacaaccacctctacaagcaaatctccagtgcttcaacgggggccagcaacgacaaccactacttcggctacagcaccccctgggggtattttgacttcaacagattccactgccacttctcaccacgtgactggcagcgactcatcaacaacaactggggattccggcctaagcgactcaacttcaagctcttcaacattcaggtcaaagaggttacggacaacaatggagtcaagaccatcgccaataaccttaccagcacggtccaggtcttcacggactcagactatcagctcccgtacgtgctcgggtcggctcacgagggctgcctcccgccgttcccagcggacgttttcatgattcctcagtacggctacctaacactcaacaacggtagtcaggccgtgggacgctcctccttctactgcctggaatactttccttcgcagatgctgagaaccggcaacaacttccagtttacttacaccttcgaggacgtgcctttccacagcagctacgcgcacagccagagcttggaccggctgatgaatcctctgattgaccagtacctgtactacttgtctcggactcaaacaacaggaggcacggcaaatacgcagactctgggcttcagccaaggtgggcctaatacaatggccaatcaggcaaagaactggctgccaggaccctgttaccgccaacaacgcgtctcaacgacaaccgggcaaaacaacaatagcaactttgcctggactgctgggaccaaataccatctgaatggaagaaattcattggctaatcctggcatcgctatggcaacacacaaagacgacaaggagcgtttttttcccagtaacgggatcctgatttttggcaaacaaaatgctgccagagacaatgcggattacagcgatgtcatgctcaccagcgaggaagaaatcaaaaccactaaccctgtggctacagaggaatacggtatcgtggcagataacttgcagcagcaaaacacggctcctcaaattggaactgtcaacagccagggggccttacccggtatggtctggcagaaccgggacgtgtacctgcagggtcccatctgggccaagattcctcacacggacggcaacttccacccgtctccgctgatgggcggctttggcctgaaacatcctccgcctcagatcctgatcaagaacacgcctgtacctgcggatcctccgaccaccttcaaccagtcaaagctgaactctttcatcacgcaatacagcaccggacaggtcagcgtggaaattgaatgggagctgcagaaggaaaacagcaagcgctggaaccccgagatccagtacacctccaactactacaaatctacaagtgtggactttgctgttaatacagaaggcgtgtactctgaaccccaccccattggcaccagatacctgactcgtaatctgtaattgcttgttaatcaataaaccgtttaattnttt

SEQ ID NO: 1003 - DNA, 2217 bp, Artificial Sequence
  source: /note="Description of Artificial Sequence: Synthetic polynucleotide"
atggctgccgatggttatcttccagattggctcgaggacaacctctctgagggcattcgcgagtggtgggacttgaaacctggagccccgaaacccaaagccaaccagcaaaagcaggacgacggccggggtctggtgcttcctggctacaagtacctcggacccttcaacggactcgacaagggggagcccgtcaacgcggcggacgcagcggccctcgagcacgacaaggcctacgaccagcagctccaagcgggtgacaatccgtacctgcggtataaccacgccgacgccgagtttcaggagcgtctgcaagaagatacgtcttttgggggcaacctcggacgagcagtcttccaggcgaaaaagagggttctcgaacctctcggtctggttgaggaaggcgctaagacggctcctggaaagaagagaccggtagagccatcaccccagcgttctccagactcctctacgggcatcggcaagaaaggccaacagcccgccagaaaaagactcaattttggtcagactggcgactcagagtcagttccagaccctcaacctctcggagaacctccagcagcgccctctggtgtgggacctaatacaatggctgcaggcggtggcgcaccaatggcagacaataacgaaggcgccgacggagtgggtagttcctcgggaaattggcattgcgattcccaatggctgggggacagagtcatcaccaccagcacccgaacctgggccctgcccacctacaacaatcacctctacaagcaaatctccaacagcacatctggaggatcttcaaatgacaacgcctacttcggctacagcaccccctgggggtattttgacttcaaccgcttccactgccacttctcaccacgtgactggcagcgactcatcaacaacaactggggattccggcccaagagactcagcttcaaactcttcaacatccaggtcaaggaggtcacgcagaatgaaggcaccaagaccatcgccaataacctcaccagcaccatccaggtgtttacggactcggagtaccagctgccgtacgttctcggctctgcccaccagggctgcctgcctccgttcccggcggacgtgttcatgattcctcagtacggctacctaacgctcaacaatggcagccaggcagtgggacggtcatccttttactgcctggaatatttcccatcgcagatgctgagaacgggcaacaactttaccttcagctacacctttgaggacgttcctttccacagcagctacgctcacagccagagtctggaccgtctcatgaatcctctgattgaccagtacctgtactacttgtctcggactcaaacaacaggaggcacggcaaatacgcagactctgggcttcagccaaggtgggcctaatacaatggccaatcaggcaaagaactggctgccaggaccctgttaccgccaacaacgcgtctcaacgacaaccgggcaaaacaacaatagcaactttgcctggactgctgggaccaaataccatctgaatggaagaaattcattggctaatcctggcatcgctatggcaacacacaaagacgacaaggagcgtttttttcccagtaacgggatcctgatttttggcaaacaaaatgctgccagagacaatgcggattacagcgatgtcatgctcaccagcgaggaagaaatcaaaaccactaaccctgtggctacagaggaatacggtatcgtggcagataacttgcagcagcaaaacacggctcctcaaattggaactgtcaacagccagggggccttacccggtatggtctggcagaaccgggacgtgtacctgcagggtcccatctgggccaagattcctcacacggacggcaacttccacccgtctccgctgatgggcggctttggacttaagcacccgcctcctcagatcctcatcaaaaacacgcctgttcctgcggatcctccgaccaccttcaaccagtcaaagctgaactctttcatcacgcaatacagcaccggacaggtcagcgtggaaattgaatgggagctgcagaaggaaaacagcaagcgctggaaccccgagatccagtacacctccaactactacaaatctacaagtgtggactttgctgttaatacagaaggcgtgtactctgaaccccaccccattggcacccgttacctcacccgtcccctgtaa

SEQ ID NO: 1004 - DNA, 2214 bp, Artificial Sequence
  source: /note="Description of Artificial Sequence: Synthetic polynucleotide"
atggctgccgatggttatcttccagattggctcgaggacaacctctctgagggcattcgcgagtggtgggacttgaaacctggagccccgaagcccaaagccaaccagcaaaagcaggacgacggccggggtctggtgcttcctggctacaagtacctcggacccttcaacggactcgacaagggggagcccgtcaacgcggcggatgcagcggccctcgagcacgacaaagcctacgaccagcagctcaaagcgggtgacaatccgtacctgcggtataaccacgccgacgccgagtttcaggagcgtctgcaagaagatacgtcttttgggggcaacctcgggcgagcagtcttccaggccaagaagagggttctcgaaccttttggtctggttgaggaaggtgctaagacggctcctggaaagaaacgtccggtagagcagtcgccacaagagccagactcctcctcgggcattggcaagacaggccagcagcccgctaaaaagagactcaattttggtcagactggcgactcagagtcagtccccgacccacaacctctcggagaacctccagcaacccccgctgctgtgggacctactacaatggcttcaggcggtggcgcacccatgcaagacaataacgaaggcgccgacggagtgggtagttcctcgggaaattggcattgcgattccacatggctgggcgacagagtcatcaccaccagcacccgaacctgggccctgcccacctacaacaaccacctctacaagcaaatctccaacgggacatcgggaggagccaccaacgacaacacctacttcggctacagcaccccctgggggtattttgactttaacagattccactgccacttttcaccacgtgactggcagcgactcatcaacaacaactggggattccggcccaagagactcaacttcaagctcttcaacatccaggtcaaggaggtcacgcagaatgaaggcaccaagaccatcgccaataaccttaccagcacgattcaggtctttacggattcggaataccagctcccgtacgtcctcggctctgcgcaccagggctgcctccctccgttcccggcggacgtgttcatgattccgcagtacggctacctaacgctcaacaatggtagccaggcagtgggacggtcatccttttactgcctggaatatttcccatcgcagatgctgagaacgggcaacaactttaccttcagctacacctttgaggacgttcctttccacagcagctacgctcacagccagagtctggaccgtctcatgaatcctctgattgaccagtacctgtactacttgtctcggactcaaacaacaggaggcacggcaaatacgcagactctgggcttcagccaaggtgggcctaatacaatggccaatcaggcaaagaactggctgccaggaccctgttaccgccaacaacgcgtctcaacgacaaccgggcaaaacaacaatagcaactttgcctggactgctgggaccaaataccatctgaatggaagaaattcattggctaatcctggcatcgctatggcaacacacaaagacgacaaggagcgtttttttcccagtaacgggatcctgatttttggcaaacaaaatgctgccagagacaatgcggattacagcgatgtcatgctcaccagcgaggaagaaatcaaaaccactaaccctgtggctacagaggaatacggtatcgtggcagataacttgcagcagcaaaacacggctcctcaaattggaactgtcaacagccagggggccttacccggtatggtctggcagaaccgggacgtgtacctgcagggtcccatctgggccaagattcctcacacggacggcaacttccacccgtctccgctgatgggcggctttggcctgaaacatcctccgcctcagatcctgatcaagaacacgcctgtacctgcggatcctccgaccaccttcaaccagtcaaagctgaactctttcatcacgcaatacagcaccggacaggtcagcgtggaaattgaatgggagctgcagaaggaaaacagcaagcgctggaaccccgagatccagtacacctccaactactacaaatctacaagtgtggactttgctgttaatacagaaggcgtgtactctgaaccccaccccattggcacccgttacctcacccgtcccctgtaa

SEQ ID NO: 1005 - DNA, 2211 bp, Artificial Sequence
  source: /note="Description of Artificial Sequence: Synthetic polynucleotide"
atggctgccgatggttatcttccagattggctcgaggacaacctctctgagggcattcgcgagtggtgggcgctgaaacctggagccccgaagcccaaagccaaccagcaaaagcaggacgacggccggggtctggtgcttcctggctacaagtacctcggacccttcaacggactcgacaagggggagcccgtcaacgcggcggacgcagcggccctcgagcacgacaaggcctacgaccagcagctcaaagcgggtgacaatccgtacctgcggtataaccacgccgacgccgagtttcaggagcgtctgcaagaagatacgtcttttgggggcaacctcgggcgagcagtcttccaggccaagaagcgggttctcgaacctctcggtctggttgaggaaggcgctaagacggctcctggaaagaaacgtccggtagagcagtcgccacaagagccagactcctcctcgggcatcggcaagacaggccagcagcccgctaaaaagagactcaattttggtcagactggcgactcagagtcagtccccgacccacaacctctcggagaacctccagcaacccccgctgctgtgggacctactacaatggcttcaggcggtggcgcaccaatggcagacaataacgaaggcgccgacggagtgggtagttcctcgggaaattggcattgcgattccacatggctgggcgacagagtcatcaccaccagcacccgcacctgggccttgcccacctacaataaccacctctacaagcaaatctccagtgcttcaacgggggccagcaacgacaaccactacttcggctacagcaccccctgggggtattttgacttcaacagattccactgccacttctcaccacgtgactggcagcgactcatcaacaacaactggggattccggcctaagcgactcaacttcaagctcttcaacattcaggtcaaagaggttacggacaacaatggagtcaagaccatcgccaataaccttaccagcacggtccaggtcttcacggactcagactatcagctcccgtacgtgctcgggtcggctcacgagggctgcctcccgccgttcccagcggacgttttcatgattcctcagtacgggtatctgacgctcaacaatggcagccaggcagtgggacggtcatccttttactgcctggaatatttcccatcgcagatgctgagaacgggcaataactttaccttcagctacaccttcgaggacgtgcctttccacagcagctacgcgcacagccagagcctggaccggctgatgaatcctctgattgaccagtacctgtactacttgtctcggactcaaacaacaggaggcacggcaaatacgcagactctgggcttcagccaaggtgggcctaatacaatggccaatcaggcaaagaactggctgccaggaccctgttaccgccaacaacgcgtctcaacgacaaccgggcaaaacaacaatagcaactttgcctggactgctgggaccaaataccatctgaatggaagaaattcattggctaatcctggcatcgctatggcaacacacaaagacgacaaggagcgtttttttcccagtaacgggatcctgatttttggcaaacaaaatgctgccagagacaatgcggattacagcgatgtcatgctcaccagcgaggaagaaatcaaaaccactaaccctgtggctacagaggaatacggtatcgtggcagataacttgcagcagcaaaacacggctcctcaaattggaactgtcaacagccagggggccttacccggtatggtctggcagaaccgggacgtgtacctgcagggtcccatctgggccaagattcctcacacggacggcaacttccacccgtctccgctgatgggcggctttggcctgaaacatcctccgcctcagatcctgatcaagaacacgcctgtacctgcggatcctccgaccaccttcaaccagtcaaagctgaactctttcatcacgcaatacagcaccggacaggtcagcgtggaaattgaatgggagctgcagaaggaaaacagcaagcgctggaaccccgagatccagtacacctccaactactacaaatctacaagtgtggactttgctgttaatacagaaggcgtgtactctgaaccccaccccattggcacccgttacctcacccgtcccctgtaa

SEQ ID NO: 1006 - DNA, 2214 bp, Artificial Sequence
  source: /note="Description of Artificial Sequence: Synthetic polynucleotide"
atggctgccgatggttatcttccagattggctcgaggacaacctctctgagggcattcgcgagtggtgggacttgaaacctggagccccgaaacccaaagccaaccagcaaaagcaggacgacggccggggtctggtgcttcctggctacaagtacctcggacccttcaacggactcgacaagggggagcccgtcaacgcggcggatgcagcggccctcgagcacgacaaggcctacgaccagcagctcaaagcgggtgacaatccgtacctgcggtataaccacgccgacgccgagtttcaggagcgtctgcaagaagatacgtcttttgggggcaacctcgggcgagcagtcttccaggccaagaagcgggttctcgaacctctcggtctggttgaggaaggcgctaagacggctcctggaaagaagagaccggtagagccatcaccccagcgttctccagactcctctacgggcatcggcaagaaaggccaacagcccgccagaaaaagactcaattttggtcagactggcgactcagagtcagtccccgacccacaacctctcggagaacctccagcaacccccgctgctgtgggacctactacaatggcttcaggcggtggcgcaccaatggcagacaataacgaaggcgccgacggagtgggtaatgcctcaggaaattggcattgcgattccacatggctgggcgacagagtcatcaccaccagcacccgaacatgggccttgcccacctataacaaccacctctacaagcaaatctccagtgcttcaacgggggccagcaacgacaaccactacttcggctacagcaccccctgggggtattttgatttcaacagattccactgccatttctcaccacgtgactggcagcgactcatcaacaacaatttgggatcccggcccaagagactcaacttcaagctcttcatcatccaagtcaaggaggtcacgacgaatgatggcgtcacgaccatcgctaataaccttaccagcacggttcaagtcttctcggactcggagtaccagttgccgtacgtcctcggctctgcgcaccagggctgcctccctccgttcccggcggacgtgttcatgattccgcagtacggctacctaacgctcaacaatggcagccaggcagtgggacggtcatccttttactgcctggaatatttcccatcgcagatgctgagaacgggcaataactttaccttcagctacaccttcgaggacgtgcctttccacagcagctacgcgcacagccagagcctggaccggctgatgaatcctctcatcgaccagtacctgtattacctgaacagaactcagaatcagtccggaagtgcccaaaacaaggacttgctgtttagccgggggtctccagctggcatgtctgttcagcccaaaaactggctacctggaccctgttaccggcagcagcgcgtttctaaaacaaaaacagacaacaacaacagcaactttacctggactggtgcttcaaaatataaccttaatgggcgtgaatctataatcaaccctggcactgctatggcctcacacaaagacgacaaagacaagttctttcccatgagcggtgtcatgatttttggaaaggagagcgccggagcttcaaacactgcattggacaatgtcatgatcacagacgaagaggaaatcaaagccactaaccccgtggccaccgaaagatttgggactgtggcagtcaatctccagagcagcagcacagaccctgcgaccggagatgtgcatgttatgggagccttacctggaatggtgtggcaagacagagacgtatacctgcagggtcctatttgggccaaaattcctcacacggatggacactttcacccgtctcctctcatgggcggctttggacttaagcacccgcctcctcagatcctcatcaaaaacacgcctgttcctgcgaatcctccggcagagttttcggctacaaagtttgcttcattcatcacccagtattccacaggacaagtgagcgtggagattgaatgggagctgcagaaagaaaacagcaaacgctggaatcccgaagtgcagtatacatctaactatgcaaaatctgccaacgttgatttcactgtggacaacaatggactttatactgagcctcgccccattggcacccgttacctcacccgtcccctgtaa

SEQ ID NO: 1007 - DNA, 2211 bp, Artificial Sequence
  source: /note="Description of Artificial Sequence: Synthetic polynucleotide"
atggctgccgatggttatcttccagattggctcgaggacaacctctctgagggcattcgcgagtggtgggcgctgaaacctggagccccgaaacccaaagccaaccagcaaaagcaggacgacggccggggtctggtgcttcctggctacaagtacctcggacccttcaacggactcgacaagggggagcccgtcaacgcggcggacgcagcggccctcgagcacgacaaggcctacgaccagcagctcaaggcgggtgacaatccgtacctgcggtataaccacgccgacgccgagtttcaggagcgtctgcaagaagatacgtcttttgggggcaacctcgggcgagcagtcttccaggccaaaaagaggcttcttgaacctcttggtctggttgaggaagcggctaagacggctcctggaaagaaacgtccggtagagcagtcgccacaagagccagactcctcctcgggcattggcaagacaggccagcagcccgctaaaaagagactcaactttgggcagactggcgactcagagtcagtgcccgaccctcaaccaatcggagaacctccagcaacccccgctgctgtgggacctactacaatggcttcaggcggtggcgcaccaatggcggacaataacgaaggcgccgatggagtgggtaattcctcgggaaattggcattgcgattccacatggctgggcgacagagtcatcaccaccagcacccgaacctgggccctgcccacctacaacaatcacctctacaagcaaatctccagtgcttcaacgggggccagcaacgacaaccactacttcggctacagcaccccctgggggtattttgatttcaacagattccactgccacttttcaccacgtgactggcagcgactcatcaacaacaactggggattccggcccaagagactcaacttcaagctcttcaacatccaggtcaaggaggtcacgcagaatgaaggcaccaagaccatcgccaataacctcaccagcaccatccaggtgtttacggactcggagtaccagctgccgtacgttctcggctccgcccaccagggctgcctgcctccgttcccggcggacgtgttcatgattccgcagtacggctacctaacgctcaacaatggcagccaggcagtgggacggtcatccttttactgcctggaatatttcccatcgcagatgctgagaacgggcaacaactttaccttcagctacacctttgaggacgttcctttccacagcagctacgctcacagccagagtctggaccgtctcatgaatcctctgattgaccagtacctgtactacttgtctcggactcaaacaacaggaggcacggcaaatacgcagactctgggcttcagccaaggtgggcctaatacaatggccaatcaggcaaagaactggctgccaggaccctgttaccgccaacaacgcgtctcaacgacaaccgggcaaaacaacaatagcaactttgcctggactgctgggaccaaataccatctgaatggaagaaattcattggctaatcctggcatcgctatggcaacacacaaagacgacaaggagcgtttttttcccagtaacgggatcctgatttttggcaaacaaaatgctgccagagacaatgcggattacagcgatgtcatgctcaccagcgaggaagaaatcaaaaccactaaccctgtggctacagaggaatacggtatcgtggcagataacttgcagcagcaaaacacggctcctcaaattggaactgtcaacagccagggggccttacccggtatggtctggcagaaccgggacgtgtacctgcagggtcccatctgggccaagattcctcacacggacggcaacttccacccgtctccgctgatgggcggctttggcctgaaacatcctccgcctcagatcctgatcaagaacacgcctgtacctgcggatcctccgaccaccttcaaccagtcaaagctgaactctttcatcacgcaatacagcaccggacaggtcagcgtggaaattgaatgggagctgcagaaggaaaacagcaagcgctggaaccccgagatccagtacacctccaactactacaaatctacaagtgtggactttgctgttaatacagaaggcgtgtactctgatccccaccccattggcacccgttacctcacccgtcccctgtaa

SEQ ID NO: 1008 - DNA, 2211 bp, Artificial Sequence
  source: /note="Description of Artificial Sequence: Synthetic polynucleotide"
atggctgccgatggttatcttccagattggctcgaggacaacctctctgagggcattcgcgagtggtgggcgctgaaacctggagccccgaagcccaaagccaaccagcaagagcaggacgacggccggggtctggtgcttcctggctacaagtacctcggacccttcaacggactcgacaagggagagcccgtcaacgcggcggatgcagcggccctcgagcacgacaaagcctacgaccagcagctcaaagcgggtgacaatccgtacctgcggtataaccacgccgacgccgagtttcaggagcgtctgcaagaagatacgtcttttgggggcaacctcgggcgagcagtcttccaggccaagaagagggttctcgaaccttttggtctggttgaggaaggtgctaagacggctcctggaaagaaacgtccggtagagcagtcgccacaagagccagactcctcctcgggcattggcaagacaggccagcagcccgctaaaaagagactcaattttggtcagactggcgactcagagtcagttccagaccctcaacctctcggagaacctccagcagcgccctctggtgtgggacctaatacaatggctgcaggcggtggcgcaccaatggcagacaataacgaaggcgccgacggagtgggtagttcctcgggaaattggcattgcgattccacatggctgggcgacagagtcatcaccaccagcacccgaacctgggccctgcccacctacaacaaccacctctacaagcaaatctccagtgcttcaacgggggccagcaacgacaaccactacttcggctacagcaccccctgggggtattttgactttaacagattccactgccacttttcaccacgtgactggcagcgactcatcaacaacaactggggattccggcccaagagactcaacttcaagctcttcaacatccaggtcaaggaggtcacgcagaatgaaggcaccaagaccatcgccaataaccttaccagcacgattcaggtctttacggattcggaataccagctcccgtacgtcctcggctctgcgcaccagggctgcctccctccgttcccggcggacgtgttcatgattccgcagtacggctacctaacgctcaacaatggtagccaggcagtgggacggtcatcctttttctgcctggaatatttcccatcgcagatgctgagaacgggcaacaactttaccttcagctacacctttgaggacgttcctttccacagcagctacgctcacagccagagtctggaccgtctcatgaatcctctgattgaccagtacctgtactacttgtctcggactcaaacaacaggaggcacggcaaatacgcagactctgggcttcagccaaggtgggcctaatacaatggccaatcaggcaaagaactggctgccaggaccctgttaccgccaacaacgcgtctcaacgacaaccgggcaaaacaacaatagcaactttgcctggactgctgggaccaaataccatctgaatggaagaaattcattggctaatcctggcatcgctatggcaacacacaaagacgacaaggagcgtttttttcccagtaacgggatcctgatttttggcaaacaaaatgctgccagagacaatgcggattacagcgatgtcatgctcaccagcgaggaagaaatcaaaaccactaaccctgtggctacagaggaatacggtatcgtggcagataacttgcagcagcaaaacacggctcctcaaattggaactgtcaacagccagggggccttacccggtatggtctggcagaaccgagacgtgtacctgcagggtcccatctgggccaagattcctcacacggacggcaacttccacccgtctccgctgatgggcggctttggcctgaaacatcctccgcctcagatcctgatcaagaacacgcctgtacctgcggatcctccgaccaccttcaaccagtcaaagctgaactctttcatcacgcaatacagcaccggacaggtcagcgtggaaattgaatgggagctgcagaaggaaaacagcaagcgctggaaccccgagatccagtacacctccaactactacaaatctacaagtgtggactttgctgttaatacagaaggcgtgtactctgaaccccaccccattggcacccgttacctcacccgtcccctgtaa

SEQ ID NO: 1009 - DNA, 2211 bp, Artificial Sequence
  source: /note="Description of Artificial Sequence: Synthetic polynucleotide"
atggctgccgatggttatcttccagattggctcgaggacaacctctctgagggcattcgcgagtggtgggacttgaaacctggagccccgaagcccaaagccaaccagcaaaagcaggacgacggccggggtctggtgcttcctggctacaagtacctcggacccttcaacggactcgacaagggggagcccgtcaacgcggcggacgcagcggccctcgagcacgacaaggcctacgaccagcagctcaaagcgggtgacaatccgtacctgcggtataaccacgccgacgccgagtttcaggagcgtctgcaagaagatacgtcttttgggggcaacctcgggcgagcagtcttccaggccaagaagcgggttctcgaacctctcggtctggttgaggaaggcgctaagacggctcctggaaagaaacgtccggtagagcagtcaccacaagagccagactcctcctcgggcatcggcaagacaggccagcagcccgctaaaaagagactcaattttggtcagactggcgactcagagtcagtccccgacccacaacctctcggagaacctccagcaacccccgctgctgtgggacctactacaatggcttcaggcggtggcgcaccaatggcggacaataacgaaggcgccgacggagtgggtaatgcctcaggaaattggcattgcgattccacatggctgggcgacagagtcatcaccaccagcacccgaacatgggccttgcccacctataacaaccacctctacaagcaaatctccagtgcttcaacgggggccagcaacgacaaccactacttcggctacagcaccccctgggggtattttgatttcaacagattccactgccatttctcaccacgtgactggcagcgactcatcaacaacaattggggattccggcccaagagactcaacttcaagctcttcaacatccaagtcaaggaggtcacgacgaatgatggcgtcacgaccatcgctaataaccttaccagcacggttcaagtcttctcggactcggagtaccagttgccgtacgtcctcggctctgcgcaccagggctgcctccctccgttcccggcggacgtgttcatgattccgcagtacggctacctaacgctcaacaatggcagccaggcagtgggacggtcatccttttactgcctggaatatttcccatcgcagatgctgagaacgggcaataactttaccttcagctacaccttcgaggacgtgcctttccacagcagctacgcgcacagccagagcctggaccggctgatgaatcctctcatcgaccagtacctgtattacctgaacagaactcagaatcagtccggaagtgcccaaaacaaggacttgctgtttagccgggggtctccagctggcatgtctgttcagcccaaaaactggctacctggaccctgttaccggcagcagcgcgtttctaaaacaaaaacagacaacaacaacagcaactttacctggacaggtgcttcaaaatataaccttaatgggcgtgaatctataatcaaccctggcactgctatggcctcacacaaagacgacaaagacaagttctttcccatgagcggtgtcatgatttttggaaaggagagcgccggagcttcaaacactgcattggacaatgtcatgatcacagacgaagaggaaatcaaagccactaaccccgtggccaccgaaagatttgggactgtggcagtcaatctccagaacagcagcacagaccctgcgaccggagatgtgcatgttatgggagccttacctggaatggtgtggcaagacagagacgtatacctgcagggtcctatttgggccaaaattcctcacacggatggacactttcacccgtctcctctcatgggcggctttggacttaagcacccgcctcctcagatcctcatcaaaaacacgcctgttcctgcgaatcctccggcagagttttcggctacaaagtttgcttcattcatcacccagtattccacaggacaagtgagcgtggagattgaatgggagctgcagaaagaaaacagcaaacgctggaatcccgaagtgcagtatacatctaactatgcaaaatctgccaacgttgatttcactgtagacaacaatggactttatactgtgcctcgccccattggcacccgttacctcacccgtcccctgtaa

SEQ ID NO: 1010 - DNA, 2211 bp, Artificial Sequence
  source: /note="Description of Artificial Sequence: Synthetic polynucleotide"
atggctgccgatggttatcttccagattggctcgaggacaacctctctgagggcattcgcgagtggtgggcgctgaaacctggagccccgaagcccaaagccaaccagcaaaagcaggacgacggccggggtctggtgcttcctggctacaagtacctcggacccttcaacggactcgacaaaggagagccggtcaacgcggcggacgcggcggccctcgaacacgacaaggcttacgaccagcagctcaaggcgggtgacaacccctacctgcggtataaccacgccgacgccgagttccaggagcggctgcaagaagatacgtcttttgggggcaacctcgggcgagcagtcttccaggccaaaaagaggcttcttgaacctcttggtctggttgaggaaggcgctaagacggctcctggaaagaagaggcctgtagagcagtctcctcaagaaccggactcctcctcgggtattggcaaaacaggtgagcagcccgctaaaaagagactcaattttggtcagactggcgactcagagtcagtccccgacccacaacctctcggagaacctccagcaacccccgctgctgtgggacctactacaatggcttcaggcggtggcgcaccaatggcagacaataacgaaggcgccgacggagtgggtagtgcctcaggaaattggcattgcgattccacatggctgggcgacagagtcatcaccaccagcacccgaacctgggccctgcccacctataacaaccatctctacaagcaaatctccagtgcttcaacgggggccagcaacgacaaccactacttcggctacagcaccccctgggggtattttgacttcaacagattccactgccacttctcaccacgtgactggcagcgactcatcaacaacaactggggattccggcctaagcgactcaacttcaagctcttcaacattcaggtcaaagaggttacggacaacaatggagtcaagaccatcgccaataacctcaccagcaccatccaggtgttcacggactcagagtatcagctgccgtacgtgctcgggtcggctcaccagggctgcctccctccgttcccagcggacgtgttcatgattcctcagtacgggtatctgacactcaacaacggcagtcaggcagtgggacggtcatccttctactgcctggaatattttccatcgcagatgctgagaaccggcaacaactttccgttcagttacaccttcgaggacgtgcctttccacagcagctacgcgcacagccagagcctggaccggctgatgaatcctctgattgaccagtacctgtactacttgtctcggactcaaacaacaggaggcacggcaaatacgcagactctgggcttcagccaaggtgggcctaatacaatggccaatcaggcaaagaactggctgccaggaccctgttaccgccaacaacgcgtctcaacgacaaccgggcaaaacaacaatagcaactttgcctggactgctgggaccaaataccatctgaatggaagaaattcattggctaatcctggcatcgctatggcaacacacaaagacgacaaggagcgtttttttcccagtaacgggatcctgatttttggcaaacaaaatgctgccagagacaatgcggattacagcgatgtcatgctcaccagcgaggaagaaatcaaaaccactaaccctgtggctacagaggaatacggtatcgtggcagataacttgcagcagcaaaacacggctcctcaaattggaactgtcaacagccagggggccttacccggtatggtctggcagaaccgggacgtgtacctgcagggtcccatctgggccaagattcctcacacggacggcaacttccacccgtctccgctgatgggcggctttggcctgaaacatcctccgcctcagatcctgatcaagaacacgcctgtacctgcggatcctccgaccaccttcaaccagtcaaagctgaactctttcatcacgcaatacagcaccggacaggtcagcgtggaaattgaatgggagctgcagaaggaaaacagcaagcgctggaaccccgagatccagtacacctccaactactacaaatctacaagtgtggactttgctgttaatacagaaggcgtgtactctgaaccccaccccattggcacccgttacctcacccgtcccctgtaa

SEQ ID NO: 1011 - DNA, 2211 bp, Artificial Sequence
  source: /note="Description of Artificial Sequence: Synthetic polynucleotide"
atggctgccgatggttatcttccagattggctcgaggacaacctctctgagggcattcgcgagtggtgggcgctgaaacctggagccccgaagcccaaagccaaccagcaaaagcaggacgacggccggggtctggtgcttcctggctacaagtacctcggacccttcaacggactcgacaagggggagcccgtcaacgcggcggacgcagcggccctcgagcacgacaaggcctacgaccagcagctcaaagcgggtgacaatccgtacctgcggtataaccacgccgacgccgagtttcaggagcgtctgcaagaagatacgtcttttgggggcaacctcgggcgagcagtcttccaggccaagaagcgggttctcgaacctctcggtctggttgaggaaggcgctaagacggctcctggaaagaaacgtccggtagaacagtcgccacaagagccagactcctcctcgggcatcggcaagacaggccagcagcccgctaaaaagagactcaattttggtcagactggcgactcagagtcagtccccgatccacaacctctcggagaacctccagcaacccccgctgctgtgggacctactacaatggcttcaggcggtggcgcaccaatggcagacaataacgaaggcgccgacggagtgggtagttcctcgggaaattggcattgcgattcccaatggctgggggacagagtcatcaccaccagcacccgaacctgggccctgcccacctacaacaaccacctctacaagcaaatctccagtgcttcaacgggggccagcaacgacaaccactacttcggctacagcaccccctgggggtattttgatttcaacagattccactgccatttctcaccacgtgactggcagcgactcatcaacaacaactggggattccggcctaagcgactcaacttcaagctcttcaacattcaggtcaaagaggttacggacaacaatggagtcaagaccatcgccaataaccttaccagcacggtccaggtcttcacggactcggagtaccagttgccgtacgtcctcggctctgcgcaccaggactgcctccctccgttcccggcggacgtgttcatgattccgcagtacggctacctaacgctcaacaatggcagccaggcagtgggacggtcatccttttactgcctggaatatttcccatcgcagatgctgagaacgggcaacaactttaccttcagctacacctttgaggacgttcctttccacagcagctacgctcacagccagagtctggaccgtctcatgaatcctctgattgaccagtacctgtactacttgtctcggactcaaacaacaggaggcacggcaaatacgcagactctgggcttcagccaaggtgggcctaatacaatggccaatcaggcaaagaactggctgccaggaccctgttaccgccaacaacgcgtctcaacgacaaccggacaaaacaacaatagcaactttgcctggactgctgggaccaaataccatctgaatggaagaaattcattggctaatcctggcatcgctatggcaacacacaaagacgacaaggagcgtttttttcccagtaacgggatcctgatttttggcaaacaaaatgctgccagagacaatgcggattacagcgatgtcatgctcaccagcgaggaagaaatcaaaaccactaaccctgtggctacagaggaatacggtatcgtggcagataacttgcagcagcaaaacacggctcctcaaattggaactgtcaacagccagggggccttacccggtatggtctggcagaaccgggacgtgtacctgcagggtcccatctgggccaagattcctcacacggacggcaacttccacccgtctccgctgatgggcggctttggcctgaaacatcctccgcctcagatcctgatcaagaacacgcctgtacctgcggatcctccgaccaccttcaaccagtcaaagctgaactctttcatcacgcaatacagcaccggacaggtcagcgtggaaattgaatgggagctgcagaaggaaaacagcaagcgctggaaccccgagatccagtacacctccaactactacaaatctacaagtgtggactttgctgttaatacagaaggcgtgtactctgaaccccaccccattggcacccgttacctcacccgtcccctgtaa

SEQ ID NO: 1012 - DNA, 2211 bp, Artificial Sequence
  source: /note="Description of Artificial Sequence: Synthetic polynucleotide"
atggctgccgatggttatcttccagattggctcgaggacaacctctctgagggcattcgcgagtggtgggacttgaaacctggagccccgaagcccaaagccaaccagcaaaagcaggacgacggccggggtctggtgcttcctggctacaagtacctcggacccttcaacggactcgacaagggggagcccgtcaacgcggcggacgcagcggccctcgagcacgacaaggcctacgaccagcagctcaaagcgggtgacaatccgtacctgcggtataaccacgccgacgccgagtttcaggagcgtctgcaagaagatacgtcttttgggggcaacctcgggcgagcagtcttccaggccaagaagcgggttctcgaacctctcggtctggttgaggaaggcgctaagacggctcctggaaagaaacgtccggtagagcagtcaccacaagagccagactcctcctcgggcatcggcaagacaggccagcagcccgctaaaaagagactcaattttggtcagactggcgactcagagtcagtccccgacccacaacctctcggagaacctccagcaacccccgctgctgtgggacctactacaatggcttcaggcggtggcgcaccaatggcagacaataacgaaggtgccgacggagtgggtaatgcctcaggaaattggcattgcgattccacatggctgggcgactgagtcatcaccaccagcacccgcacctgggccttgcccacctacaataaccacctctacaagcaaatctccagtgcttcaacgggggccagcaacgacaaccactacttcggctacagcaccccctgggggtattttgatttcaacagattccactgccacttttcaccacgtgactggcagcgactcatcaacaacaattggggattccggcccaagagactcaacttcaaactcttcaacatccaagtcaaggaggtcacgcagaatgaaggcaccaagaccatcgccaataacctcaccagcaccatccaggtgtttacggactcggagtaccagctgccgtacgttctcggctctgcccaccagggctgcctgcctccgttcccggcggacgtgttcatgattccccagtacggctacctaacgctcaacaatggcagccaggcagtgggacggtcatccttttactgcctggaatactttccttcgcagatgctgagaaccggcaacaacttccagtttacttacaccttcgaggacgtgcctttccacagcagctacgcccacagccagagcttggaccggctgatgaatcctctgattgaccagtacctgtactacttgtctcggactcaaacaacaggaggcacggcaaatacgcagactctgggcttcagccaaggtgggcctaatacaatggccaatcaggcaaagaactggctgccaggaccctgttaccgccaacaacgcgtctcaacgacaaccgggcaaaacaacaatagcaactttgcctggactgctgggaccaaataccatctgaatggaagaaattcattggctaatcctggcatcgctatggcaacacacaaagacgacaaggagcgtttttttcccagtaacgggatcctgatttttggcaaacaaaatgctgccagagacaatgcggattacagcgatgtcatactcaccagcgaggaagaaatcaaaaccactaaccctgtggctacagaggaatacggtatcgtggcagataacttgcagcagcaaaacacggctcctcaaattggaactgtcaacagccagggggccttacccggtatggtctggcagaaccgggacgtgtacctgcagggtcccatctgggccaagattcctcacacggacggcaacttccacccgtctccgctgatgggcggctttggcctgaaacatcctccgcctcagatcctgatcaagaacacgcctgtacctgcggatcctccgaccaccttcaaccagtcaaagctgaactctttcatcacgcaatacagcaccggacaggtcagcgtggaaattgaatgggagctgcagaaggaaaacagcaagcgctggaaccccgagatccagtacacctccaactactacaaatctacaagtgtggactttgctgttaatacagaaggcgtgtactctgaaccccaccccattggcacccgttacctcacccgtcccctgtaa

SEQ ID NO: 1013 - DNA, 2211 bp, Artificial Sequence
  source: /note="Description of Artificial Sequence: Synthetic polynucleotide"
atggctgccgatggttatcttccagattggctcgaggacactctctctgaaggaataagacagtggtggaagctcaaacctggcccaccaccaccaaagcccgcagagcggcataaggacgacagcaggggtcttgtgcttcctgggtacaagtacctcggacccttcaacggactcgacaagggagagccggtcaacgaggcagacgccgcggccctcgagcacgacaaagcctacgaccggcagctcgacagcggagacaacccgtacctcaagtacaaccacgccgacgcggagtttcaggagcgccttaaagaagatacgtcttttgggggcaacctcgggcgagcagtcttccaggccaagaagagggttctcgaaccttttggtctggttgaggaaggtgctaagacggctcctggaaagaaacgtccggtagagcagtcgccacaagagccagactcctcctcgggcattggcaagacaggccagcagcccgctaaaaagagactcaattttggtcagactggcgactcagagtcagtccccgacccacaacctctcggagaacctccagcaacccccgctgctgtgggacctactacaatggcttcaggcggtggcgcaccaatggcagacaataacgaaggcgccgacggagtgggtaatgcctcaggaaattggcattgcgattccacatggctgggcgacagagtcatcaccaccagcacccgaacatgggccttgcccacctataacaaccacctctacaagcaaatctccagtacttcaacgggggccagtaacgacaaccactacttcggctacagcaccccctgggggtattttgacttcaacagattccactgccacttctcaccacgtgactggcagcgactcatcaacaacaactggggattccggcctaagcgactcaacttcaagctcttcaacattcaggtcaaagaggttacggacaacaatggagtcaagaccatcgccaataaccttaccagcacggtccaggtcttcacggactcggagtaccagttgccgtacgtcctcggctctgcgcaccagggctgcctgcctccgttcccggcggacgtgttcatgattccgcagtacggctacctaacgctcaacaatggcagccaggcagtgggacggtcatccttttactgcctggaatatttcccatcgcagatgctgagaacgggcaacaactttaccttcagctacacttttgaggacgttcctttccacagcagctacgctcacagccagagtctggaccgtctcatgaatcctctgattgaccagtacctgtactacttgtctcggactcaaacaacaggaggcacggcaaatacgcagactctgggcttcagccaaggtgggcctaatacaatggccaatcaggcaaagaactggctgccaggaccctgttaccgccaacaacgcgtctcaacgacaaccggacaaaacaacaatagcaactttgcctggactgctgggaccaaataccatctgaatggaagaaattcattggctaatcctggcatcgctatggcaacacacaaagacgacaaggagcgtttttttcccagtaacgggatcctgatttttggcaaacaaaatgctgccagagacaatgcggattacagcgatgtcatgctcaccagcgaggaagaaatcaaaaccactaaccctgtggctacagaggaatacggtatcgtggcagataacttgcagcagcaaaacacggctcctcaaattggaactgtcaacagccagggggccttacccggtatggtctggcagaaccgggacgtgtacctgcagggtcccatctgggccaagattcctcacacggacggcaacttccacccgtctccgctgatgggcggctttggcctgaaacatcctccgcctcagatcctgatcaagaacacgcctgtacctgcggatcctccgaccaccttcaaccagtcaaagctgaactctttcatcacgcaatacagcaccggacaggtcagcgtggaaattgaatgggagctgcagaaggaaaacagcaagcgctggaaccccgagatccagtacacctccaactactacaaatctacaagtgtggactttgctgttaatacagaaggcgtgtactctgaaccccaccccattggcacccgttacctcacccgtcccctgtaa

SEQ ID NO: 1014 - DNA, 2208 bp, Artificial Sequence
  source: /note="Description of Artificial Sequence: Synthetic polynucleotide"
atggctgccgatggttatcttccagattggctcgaggacaacctctctgagggcattcgcgagtggtgggacttgaaacctggagccccgaagcccaaagccaaccagcaaaagcaggacgacggccggggtctggtgcttcctggctacaagtacctcggacccttcaacggactcgacaagggggagcccgtcaacgcggcggatgcagcggccctcgagcacgacaaggcctacgaccggcagctcgacagcggagacaacccgtacctgcggtataaccacgccgacgcggagtttcaggagcgccttaaagaagatacgtcttttgggggcaacctcgggcgagcagtcttccaggccaagaagagggttctcgaaccttttggtctggttgaggaaggtgctaagacggctcctggaaagaaacgtccggtagagcagtcgccacaagagccagactcctcctcgggcattggcaagacaggccagcagcccgctaaaaagagactcaattttggtcagactggcgactcagagtcagtccccgacccacaacctctcggagaacctccagcaacccccgctgctgtgggacctactacaatggcttcaggcggtggcgcaccaatggcagacaataacgaaggcgccgacggagtgggtaatgcctcaggaaattggcattgcgattccacatggctgggcgacagagtcatcaccaccagcacccgcacctgggccttgcccacctacaataaccacctctacaagcaaatctccagtgcttcaacgggggccagcaacgacaaccactacttcggctacagcaccccctgggggtattttgactttaacagattccactgccacttttcaccacgtgactggcaaagactcatcaacaacaactggggattccggcccaagagactcaacttcaagctcttcaacatccaggtcaaggaggtcacgcagaatgaaggcaccaagaccatcgccaataaccttaccagcacgattcaggtctttacggactcggaataccagctcccgtacgtcctcggctctgcgcaccagggctgcctccctccgttcccggcggacgtgttcatgattccgcagtacggctacctaacactcaacaacggtagtcaggccgtgggacgctcctccttctactgcctggaatactttccttcgcagatgctgagaaccggcaacaacttccagtttacttacaccttcgaggacgtgcctttccacagcagctacgcccacagccagagcttggaccggctgatgaatcctctgattgaccagtacctgtactacttgtctcggactcaaacaacaggaggcacggcaaatacgcagactctgggcttcagccaaggtgggcctaatacaatggccaatcaggcaaagaactggctgccaggaccctgttaccgccaacaacgcgtctcaacgacaaccgggcaaaacaacaatagcaactttgcctggactgctgggaccaaataccatctgaatggaagaaattcactggctaatcctggcatcgctatggcaacacacaaagacgacaggagcgtttttttccagtaccgggatcctgattttggcaaacaaaatgctgccagagacaatgcggattacagcgatgtcatgctcaccagcgaggaagaaatcaaaaccactaaccctgtggctacagaggaatacggtatcgtggcagataacttgcagcagcaaaacacggctcctcaaattggaactgtcaacagccagggggccttacccggtatggtctggcagaaccgggacgtgtacctgcagggtcccatctgggccaagattcctcacacggacggcaacttccacccgtctccgctgatgggcggctttggcctgaaacatcctccgcctcagatcctgatcaagaacacgcctgtacctgcggatcctccgaccaccttcaaccagtcaaagctgaactctttcatcacgcaatacagcaccggacaggtcagcgtggaaattgaatgggagctgcagaaggaaaacagcaagcgctggaaccccgagatccagtacacctccaactactacaaatctacaagtgtggactttgctgttaatacagaaggcgtgtactctgaaccccaccccattggcacccgttacctcacccgtcccctgtaa

SEQ ID NO: 1015 - DNA, 2211 bp, Artificial Sequence
  source: /note="Description of Artificial Sequence: Synthetic polynucleotide"
atggctgccgatggttatcttccagattggctcgaggacaacctctctgagggcattcgcgagtggtgggcgctgaaacctggagccccgaagcccaaagccaaccagcaaaagcaggacgacggccggggtctggtgcttcctggctacaagtacctcggacccttcaacggactcgacaagggggagcccgtcaacgcggcggatgcagcagccctcgaacacgacaaagcttacgaccagcagctcaaggccggtgacaacccctacctcaagtataaccacgccgacgccgagtttcaggagcgtcttcaaggagatacgtcttttgggggcaacctcggacgagcagtcttccaggccaagaagcgggttctcgaacctcttggtctggttgaggaagcggctaagacggctcctggaaagaagaggcctgtagagcagtctcctcaggaaccggactcctccgcgggtattggcaaatcgggtgcacagcccgctaaaaagagactcaatttcggtcagactggcgacacagagtcagtcccagaccctcaacctctcggagaacctccagcagcgccctctggtgtgggacctaatacaatggctgcaggcggtggcgcaccaatggcagacaataacgaaggtgccgatggagtgggtagttcctcgggaaattggcattgcgattcccaatggctgggggacagagtcatcaccaccagcacccgaacctgggccctgcccacctacaacaaccacctctacaagcaaatctccagtgcttcaacgggggccagcaacgacaaccactacttcggctacagcaccccttgggggtattttgacttcaacagattccactgccacttttcaccacgtgactggcagcgactcatcaacaacaactggggattccggcctaagcgactcaacttcaagctcttcaacattcaggtcaaagaggttacggacaacaatggagtcaagaccatcgccaataaccttaccagcacggtccaggtcttcacggactcagactatcagctcccgtacgtgctcgggtcggctcacgagggctgcctccctccgttcccggcggacgtgttcatgattccgcagtacggctacctaacgctcaacaatggcagccaggcagtgggacggtcatccttttactgcctggaatactttccttcgcagatgctgagaaccggcaacaacttccagtttacttacaccttcgaggacgtgcctttccacagcagctacgctcacagccagagtctggaccgtctcatgaatcctctgattgaccagtacctgtactacttgtctcggactcaaacaacaggaggcacggcaaatacgcagactctgggcttcagccaaggtgggcctaatacaatggccaatcaggcaaagaactggctgccaggaccctgttaccgccaacaacgcgtctcaacgacaaccgggcaaaacaacaatagcaactttgcctggactgctgggaccaaataccatctgaatggaagaaattcattggctaatcctggcatcgctatggcaacacacaaagacgacaaggagcgtttttttcccagtaacgggatcctgatttttggcaaacaaaatgctgccagagacaatgcggattacagcgatgtcatgctcaccagcgaggaagaaatcaaaaccactaaccctgtggctacagaggaatacggtatcgtagcagataacttgcagcagcaaaacacggctcctcaaattggaactgtcaacagccagggggccttacccggtatggtctggcagaaccgggacgtgtacctgcagggtcccatctgggccaagattcctcacacggacggcaacttccacccgtctccgctgatgggcggctttggcctgaaacatcctccgcctcagatcctgatcaagaacacgcctgtacctgcggatcctccgaccaccttcaaccagtcaaagctgaactctttcatcacgcaatacagcaccggacaggtcagcgtggaaattgaatgggagctgcagaaggaaaacagcaagcgctggaaccccgagatccagtacacctccaactactacaaatctacaagtgtggactttgctgttaatacagaaggcgtgtactctgaaccccaccccattggcacccgttacctcacccgtcccctgtaa

SEQ ID NO: 1016 - DNA, 2211 bp, Artificial Sequence
  source: /note="Description of Artificial Sequence: Synthetic polynucleotide"
atggctgccgatggttatcttccagattggctcgaggacactctctctgaaggaataagacagtggtggaagctcaaacctggcccaccaccaccaaagcccgcagagcggcataaggacgacagcaggggtcttgtgcttcctgggtacaagtacctcggacccttcaacggactcgacaagggagagccggtcaacgaggcagacgccgcggccctcgagcacgacaaagcctacgaccggcagctcgacagcggagacaacccgtacctcaagtacaaccacgccgacgcggagtttcaggagcgccttaaagaagatacgtcttttgggggcaacctcgggcgagcagtcttccaggccaagaagagggttctcgaaccttttggtctggttgaggaagcggctaagacggctcctggaaagaaacgtccggtagagcagtcgccacaagagccagactcctcctcgggcattggcaagacaggccagcagcccgctaaaaagagactcaattttggtcagactggcgactcagagtcagtccccgacccacaacctctcggagaacctccagcaacccccgctgctgtgggacctactacaatggcttcaggcggtggcgcaccaatggcagacaataacgaaggcgccgacggagtgggtaatgcctcaggaaattggcattgcgattccacatggctgggcgacagagtcatcaccaccagcacccgaacatgggccttgcccacctataacaaccacctctacaagcaaatctccagtgcttcaacgggggccagcaacgacaaccactacttcggctacagcaccccctgggggtattttgacttcaacagattccactgccacttctcaccacgtgactggcagcgactcatcaacaacaactggggattccggcctaagcgactcaacttcaagctcttcaacattcaggtcaaagaggttacggacaacaatggagtcaagaccatcgccaataaccttaccagcacggtccaggtcttcacggactcagactatcagctcccgtacgtgctcgggtcggctcacgagggctgcctcccgccgttcccagcggacgttttcatgattcctcagtacggctacctaacactcaacaacggtagtcaggccgtgggacgctcctccttctactgcctggaatactttccttcgcagatgctgagaacgggcaacaactttaccttcagctacacctttgaggacgttcctttccacagcagctacgctcacagccagagtctggaccgtctcatgaatcctctgattgaccagtacctgtactacttgtctcggactcaaacaacaggaggcacggcaaatacgcagactctgggcttcagccaaggtgggcctaatacaatggccaatcaggcaaagaactggctgccaggaccctgttaccgccaacaacgcgtctcaacgacaaccgggcaaaacaacaatagcaactttgcctggactgctgggacaaaataccatctgaatggaagaaattcattggctaatcctggcatcgctatggcaacacacaaagacgacaaggagcgtttttttcccagtaacgggattctgatttttggcaaacaaaatgctgccagagacaatgcggattacagcgatgtcatgctcaccagcgaggaagaaatcaaaaccactaaccctgtggctacagaggaatacggtatcgtggcagataacttgcagcagcaaaacacggctcctcaaattggaactgtcaacagccagggggccttacccggtatggtctggcagaaccgggacgtgtacctgcagggtcccatctgggccaagattcctcacacggacggcaacttccacccgtctccgctgatgggcggctttggacttaagcacccgcctcctcagatcctcatcaaaaacacgcctgttcctgcggatcctccgaccaccttcaaccagtcaaagctgaactctttcatcacgcaatacagcaccggacaggtcagcgtggaaattgaatgggagctgcagaaggaaaacagcaagcgctggaaccccgagatccagtacacctccaactactacaaatctacaagtgtggactttgctgttaatacagaaggcgtgtactctgaaccccaccccattggcacccgttacctcacccgtcccctgtaa

SEQ ID NO: 1017 - DNA, 2211 bp, Artificial Sequence
  source: /note="Description of Artificial Sequence: Synthetic polynucleotide"
atggctgccgatggttatcttccagattggctcgaggacaacctctctgagggcattcgcgagtggtgggcgctgaaacctggagccccgaagcccaaagccaaccagcaaaagcaggacgacggccggggtctggtgcttcctggctacaagtacctcggacccttcaacggactcgacaaaggagagccggtcaacgcggcggacgcagcggccctcgagcacgacaaggcctacgaccagcagctcaaagcgggtgacaatccgtacctgcggtataaccacgccgacgccgagtttcaggagcgtctgcaagaagatacgtcttttgggggcaacctcgggcgagcagtcttccaggccaagaagcgggttctcgaacctctcggtctggttgaggaaggcgctaagacggctcctggaaagaaacgtccggtagagcagtcgccacaagagccagactcctcctcgggcatcggcaagacaggccagcagcccgctaaaaagagactcaattttggtcagactggcgactcagagtcagtccccgacccacaacctctcggagaacctccagcaacccccgctgctgtgggacctactacaatggcttcaggcggtggcgcaccaatggcagacaataacgaaggcgccgacggagtgggtagttcctcgggaaattggcattgcgattccacatggctgggcgacagagtcatcaccaccagcacccgcacctgggccttgcccacctacaataaccacctctacaagcaaatctccagtgcttcaacgggggccagcaacgacaaccactacttcggctacagcaccccctgggggtattttgacttcaacagattccactgccacttctcaccacgtgactggcagcgactcatcaacaacaactggggattccggcctaagcgactcaacttcaagctcttcaacattcaggtcaaagaggttacggacaacaatggagtcaagaccatcgccaataaccttaccagcacggtccaggtcttcacggactcggagtaccagttgccgtacgtcctcggctctgcgcaccagggctgcctccctccgttcccggcggacgtgttcatgattccgcagtacggctacctaacgctcaacaatggcagccaggcagtgggacggtcatccttttactgcctggaatatttcccatcgcagatgctgagaacgggcaacaactttaccttcagctacacctttgaggacgttcctttccacagcagctacgctcacagccagagtctggaccgtctcatgaatcctctgattgaccagtacctgtactacttgtctcggactcaaacaacaggaggcacggcaaatacgcagactctgggcttcagccaaggtgggcctaatacaatggccaatcaggcaaagaactggctgccaggaccctgttaccgccaacaacgcgtctcaacgacaaccgggcaaaacaacaatagcaactttgcctggactgctgggaccaaataccatctgaatggaagaaattcattggctaatcctggcatcgctatggcaacacacaaagacgacaaggagcgtttttttcccagtaacgggatcctgatttttggcaaacaaaatgctgccagagacaatgcggattacagcgatgtcatgctcaccagcgaggaagaaatcaaaaccactaaccctgtggctacagaggaatacggtatcgtggcagataacttgcagcagcaaaacacggctcctcaaattggaactgtcaacagccagggggccttacccggtatggtctggcagaaccgggatgtgtacctgcagggtcccatctgggccaagattcctcacacggacggcaacttccacccgtctccgctgatgggcggctttggcctgaaacatcctccgcctcagatcctgatcaagaacacgcctgtacctgcggatcctccgaccaccttcaaccagtcaaagctgaactctttcatcacgcaatacagcaccggacaggtcagcgtggaaattgaatgggagctgcagaaggaaaacagcaagcgctggaaccccgagatccagtacacctccaactactacaaatctacaagtgtggactttgctgttaatacagaaggcgtgtactctgaaccccaccccattggcacccgttacctcacccgtcccctgtaa

SEQ ID NO: 1018 - DNA, 2214 bp, Artificial Sequence
  source: /note="Description of Artificial Sequence: Synthetic polynucleotide"
atggctgccgatggttatcttccagattggctcgaggacaaccttagtgaaggaattcgcgagtggtgggcgctgaaacctggagccccgaagcccaaagccaaccagcaaaagcaggacgacggccggggtctggtgcttcctggctacaagtacctcggacccttcaacggactcgacaagggggagcccgtcaacgcggcggacgcagcggccctcgagcacgacaaggcctacgaccagcagctcaaagcgggtgacaatccgtacctgcggtataaccacgccgacgccgagtttcaggagcgtctgcaagaagatacgtcttttgggggcaacctcgggcgagcagtcttccaggccaagaagcgggttctcgaacctctcggtctggttgaggaaggcgctaagacggctcctggaaagaaacgtccggtagagcagtcgccacaagagccagactcctcctcgggcatcggcaagacaggccagcagcccgctaaaaagagactcaatttcggtcagactggcgacacagagtcagtcccagaccctcaaccaatcggagaacctcccgcagccccctcaggtgtgggatctcttacaatggcttcaggtggtggcgcaccagtggcagacaataacgaaggtgccgatggagtgggtagttcctcgggaaattggcattgcgattcccaatggctgggggacagagtcatcaccaccagcaccagaacctgggccttgcccacctacaataaccacctctacaagcaaatctccaacagcacatctggaggatcttcaaatgacaacgcctacttcggctacagcaccccctgggggtattttgactttaacagattccactgccacttttcaccacgtgactggcagcgactcatcaacaacaactggggattccgacccaagagactcaacttcaagctcttcaacatccaggtcaaggaggtcacgcagaacgaaggcaccaagaccatcgccaataacctcaccagcaccatccaggtgtttacggactcggagtaccagctgccgtacgttctcggctccgcccaccagggctgcctgcctccgttcccggcggacgtgttcatgattccccagtacggctacctaacgctcaacaacggtagtcaggccgtgggacgctcctccttctactgcctggaatactttccttcgcagatgctgagaaccggcaacaacttccagtttacttacaccttcgaggacgtgcctttccacagcagctacgcgcacagccagagcttggaccggctgatgaatcctctgattgaccagtacctgtactacttgtctcggactcaaacaacaggaggcacggcaaatacgcagactctgggcttcagccaaggtgggcctaatacaatggccaatcaggcaaagaactggctgccaggaccctgttaccgccaacaacgcgtctcaacgacaaccgggcaaaacaacaatagcaactttgcctggactgctgggaccaaataccatctgaatggaagaaattcattggctaatcctggcatcgctatggcaacacacaaagacgacaaggagcgtttttttcccagtaacgggatcctgatttttggcaaacaaaatgctgccagagacaatgcggattacagcgatgtcatgctcaccagcgaggaagaaatcaaaaccactaaccctgtggctacagaggaatacggtatcgtggcagataacttgcagcagcaaaacacggctcctcaaattggaactgtcaacagccagggggccttacccggtatggtctggcagaaccgggacgtgtacctgcagggtcccatctgggccaagattcctcacacggacggcaacttccacccgtctccgctgatgggcggctttggcctgaaacatcctccgcctcagatcctgatcaagaacacgcctgtacctgcggatcctccgaccaccttcaaccagtcaaagctgaactctttcatcacgcaatacagcaccggacaggtcagcgtggaaattgaatgggagctgcagaaggaaaacagcaagcgctggaaccccgagatccagtacacctccaactactacaaatctacaagtgtggactttgctgttaatacagaaggcgtgtactctgaaccccaccccattggcactcgttacctcacccgtcccctgtaa

SEQ ID NO: 1019 - DNA, 2211 bp, Artificial Sequence
  source: /note="Description of Artificial Sequence: Synthetic polynucleotide"
atggctgccgatggttatcttccagattggctcgaggacaacctctctgagggcattcgcgagtggtgggcgctgaaacctggagccccgaagcccaaagccaaccagcaaaagcaggacgacggccggggtctggtgcttcctggctacaagtacctcggacccttcaacggactcgacaagggggagcccgtcaacgcggcggatgcagcagccctcgaacacgacaaagcttacgaccagcagctcaaggccggtgacaacccctacctcaagtataaccacgccgacgccgagtttcaggagcgtcttcaaggagatacgtcttttgggggcaacctcggacgagcagtcttccaggccaagaagcgggttctcgaacctcttggtctggttgaggaagcggctaagacggctcctggaaagaagaggcctgtagagcagtctcctcaggaaccggactcctccgcgggtattggcaaatcgggtgcacagcccgctaaaaagagactcaatttcggtcagactggcgacacagagtcagtcccagaccctcaacctctcggagaacctccagcagcgccctctggtgtgggacctaatacaatggctgcaggcggtggcgcaccaatggcagacaataacgaaggtgccgatggagtgggtagttcctcgggaaattggcattgcgattcccaatggctgggggacagagtcatcaccaccagcacccgaacctgggccctgcccacctacaacaaccacctctacaagcaaatctccagtgcttcaacgggggccagcaacgacaaccactacttcggctacagcaccccttgggggtattttgacttcaacagattccactgccacttctcaccacgtgactggcagcgactcatcaacaacaactggggattccggcctaagcgactcaacttcaagctcttcaacattcaggtcaaagaggttacggacaacaatggagtcaagaccatcgccaataaccttaccagcacggtccaggtcttcacggactcggagtaccagttgccgtacgtcctcggctctgcgcaccagggctgcctccctccgttcccggcggacgtgttcatgattccgcagtacggctacctaacgctcaacaatggcagccaggcagtgggacggtcatccttttactgcctggaatatttcccatcgcagatgctgagaacgggcaacaactttaccttcagctacacctttgaggacgttcctttccacagcagctacgctcacagccagagtctggaccgtctcatgaatcctctgattgaccagtacctgtactacttgtctcggactcaaacaacaggaggcacggcaaatacgcagactctgggcttcagccaaggtgggcctaatacaatggccaatcaggcaaagaactggctgccaggaccctgttaccgccaacaacgcgtctcaacgacaaccgggcaaaacaacaatagcaactttgcctggactgctgggaccaaataccatctgaatggaagaaattcattggctaatcctggcatcgctatggcaacacacaaagacgacaaggagcgtttttttcccagtaacgggatcctgatttttgacaaacaaaatgctgccagagacaatgcggattacagcgatgtcatgctcaccagcgaggaagaaatcaaaaccactaaccctgtggctacagaggaatacggtatcgtggcagataacttgcagcagcaaaacacggctcctcaaattggaactgtcaacagccagggggccttacccggtatggtctggcagaaccgggatgtgtacctgcagggtcccatctgggccaagattcctcacacggacggcaacttccacccgtctccgctgatgggcggctttggcctgaaacatcctccgcctcagatcctgatcaagaacacgcctgtacctgcggatcctccgaccaccttcaaccagtcaaagctgaactctttcatcacgcaatacagcaccggacaggtcagcgtggaaattgaatgggagctgcagaaggaaaacagcaagcgctggaaccccgagatccagtacacctccaactactacaaatctacaagtgtggactttgctgttaatacagaaggcgtgtactctgaaccccaccccattggcacccgttacctcacccgtcccctgtaa

SEQ ID NO: 1020 - DNA, 2211 bp, Artificial Sequence
  source: /note="Description of Artificial Sequence: Synthetic polynucleotide"
atggctgccgatggttatcttccagattggctcgaggacactctctctgaaggaataagacagtggtggaagctcaaacctggcccaccaccaccaaagcccgcagagcggcataaggacgacagcaggggtcttgtgcttcctgggtacaagtacctcggacccttcaacggactcgacaagggagagccggtcaacgaggcagacgccgcggccctcgagcacgacaaagcctacgaccggcagctcgacagcggagacaacccgtacctcaagtacaaccacgccgacgcggagtttcaggagcgccttaaagaagatacgtcttttgggggcaacctcggacgagcagtcttccaggcgaaaaagagggttcttgaacctctgggcctggttgaggaacctgttaagacggctccgggaaaaaagaggccggtagagcactctcctgtggagccagactcctcctcgggaaccggaaaggcgggccagcagcctgcaagaaaaagattgaattttggtcagactggcgactcagagtcagtccccgacccacaacctctcggagaacctccagcaacccccgctgctgtgggacctaatacgatggctacaggcagtggcgcaccaatggcagacaataacgagggcgccgacggagtgggtaattcctcgggaaattggcattgcgattccacatggatgggcgacagagtcatcaccaccagcaccagaacctgggccctgcccacttacaacaaccatctctacaagcaaatctccagtgcttcaacgggggccagcaacgacaaccactacttcggctacagcaccccctgggggtattttgacttcaacagattccactgccacttctcaccacgtgactggcagcgactcatcaacaacaactggggattccggcctaagcgactcaacttcaagctcttcaacattcaggtcaaagaggttacggacaacaatggagtcaagaccatcgccaataaccttaccagcaccatccaggtctttacggactcggaataccagctgccgtacgttctcggctctgcccaccagggctgcctgcctccgttcccggcggacgtgttcatgattccccagtacggctacctaacactcaacaacggtagtcaggccgtgggacgctcctccttctactgcctggaatatttcccatcgcagatgctgagaacgggcaacaactttaccttcagctacacctttgaggacgttcctttccacagcagctacgctcacagccagagtctggaccgtctcatgaatcctctgattgaccagtacctgtactacttgtctcggactcaaacaacaggaggcaaggcaaatacgcagactctgggcttcagccaaggtgggcctaatacaatggccaatcaggcaaagaactggctgccaggaccctgttaccgccaacaacgcgtctcaacgacaaccgggcaaaacaacaatagcaactttgcctggactgctgggaccaaataccatctgaatggaagaaattcattggctaatcctggcatcgctatggcaacacacaaagacgacaaggagcgtttttttcccagtaacgggatcctgatttttggcaaacaaaatgctgccagagacaatgcggattacagcgatgtcatgctcaccagcgaggaagaaatcaaaaccactaaccctgtggctacagaggaatacggtatcgtggcagataacttgcagcagcaaaacacggctcctcaaattggaactgtcaacagccagggggccttacccggtatggtctggcagaaccgggacgtgtacctgcagggtcccatctgggccaagattcctcacacggacggcaacttccacccgtctccgctgatgggcggctttggcctgaaacatcctccgcctcagatcctgatcaagaacacgcctgtacctgcggatcctccgaccaccttcaaccagtcaaagctgaactctttcatcacgcaatacagcaccggacaggtcagcgtggaaattgaatgggagctgcagaaggaaaacagcaagcgctggaaccccgagatccagtacacctccaactactacaaatctacaagtgtggactttgctgttaatacagaaggcgtgtactctgaaccccaccccattggcacccgttacctcacccgtcccctgtaa

SEQ ID NO: 1021 - DNA, 2211 bp, Artificial Sequence
  source: /note="Description of Artificial Sequence: Synthetic polynucleotide"
atggctgccgatggttatcttccagattggctcgaggacaacctctctgagggcattcgcgagtggtgggcgctgaaacctggagccccgaagcccaaagccaaccagcaaaagcaggacgacggccggggtctggtgcttcctggctacaagtacctcggacccttcaacggactcgacaagggggagcccgtcaacgcggcggacgcagcggccctcgagcacgacaaggcctacgaccagcagctcaaagcgggtgacaatccgtacctgcggtataaccacgccgacgccgagtttcaggagcgtctgcaagaagatacgtcttttgggggcaacctcgggcgagcagtcttccaggccaagaagcgggttctcgaaccttttggtctggttgaggaaggtgctaagacggctcctggaaagaaacgtccggtagagcagtcgccacaagagccagactcctcctcgggcatcggcaagacaggccagcagcccgctaaaaagagactcaattttggtcagactggcgactcagagtcagtccccgacccacaacctctcggagaacctccagcaacccccgctgctgtgggacctactacaatggcttcaggcggtggcgcaccaatggcggacaataacgaaggcgccgacggagtgggtaatgcctcaggaaattggcattgcgattccacatggctgggcgacagagtcatcaccaccagcacccgcacctgggccttgcccacctacaataaccacctctacaagcaaatctccagtgcttcaacgggggccagcaacgacaaccactacttcggctacagcaccccctgggggtattttgacttcaacagattccactgccacttttcaccacgtgactggcaaagactcatcaacaacaactggggattccggcctaagcgactcaacttcaagctcttcaacattcaggtcaaagaggttacggacaacaatggagtcaagaccatcgccaataaccttaccagcacggtccaggtcttcacggactcggagtaccagttgccgtacgtcctcggctctgcgcaccagggctgcctccctccgttcccggcggacgtgttcatgattccgcagtacggctacctaacgctcaacaatggcagccaggcagtgggacggtcatccttttactgcctggaatatttcccatcgcagatgctgagaacgggcaacaactttaccttcagctacacctttgaggacgttcctttccacagcagctacgctcacagccagagtctggaccgtctcatgaatcctctgattgaccagtacctgtactacttgtctcggactcaaacaacaggaggcacgggaaatacgcagactctgggcttcagccaaggtgggcctaatacaatggccaatcaggcaaagaactggctgccaggaccctgttaccgccaacaacgcgtctcaacgacaaccgggcaaaacaacaatagcaactttgcctggactgctgggaccaaataccatctgaatggaagaaattcattggctaatcctggcatcgctatggcaacacacaaagacgacaaggagcgtttttttcccagtaacgggatcctgatttttggcaaacaaaatgctgccagagacaatgcggattacagcgatgtcatgctcaccagcgaggaagaaatcaaaaccactaaccctgtggctacagaggaatacggtatcgtggcagataacttgcagcagcaaaacacggctcctcaaattggaactgtcaacagccagggggccttacccggtatggtctggcagaaccgggacgtgtacctgcagggtcccatctgggccaagattcctcacacggacggcaacttccacccgtctccgctgatgggcggctttggcctgaaacatcctccgcctcagatcctgatcaagaacacgcctgtacctgcggatcctccgaccaccttcaaccagtcaaagctgaactctttcatcacgcaatacagcaccggacaggtcagcgtggaaattgaatgggagctgcagaaggaaaacagcaagcgctggaaccccgagatccagtacacctccaactactacaaatctacaagtgtggactttgctgttaatacagaaggcgtgtactctgaaccccaccccattggcacccgttacctcacccgtcccctgtaa

SEQ ID NO: 1022 - DNA, 2211 bp, Artificial Sequence
  source: /note="Description of Artificial Sequence: Synthetic polynucleotide"
atggctgccgatggttatcttccagattggctcgaggacaacctctctgagggcattcgcgagtggtgggacttgaaacctggagccccgaaacccaaagccaaccagcaaaagcaggacgacggccggggtctggtgcttcctggctacaagtacctcggacccttcaacggactcgacaagggggagcccgtcaacgcggcggacgcagcggccctcgagcacgacaaggcctacgaccagcagctcaaagcgggtgacaatccgtacctgcggtataaccacgccgacgccgagtttcaggagcgtctgcaagaagatacgtcttttgggggcaacctcgggcgagcagtcttccaggccaagaagcgggttctcgaacctctcggtctggttgaggaaggcgctaagacggctcctggaaagaagaggcctgtagagcagtcgccacaagagccagactcctcctcgggcatcggcaagacaggccagcagcccgctaaaaagagactcaattttggtcagactggcgactcagagtcagtccccgatccacaacctctcggagaacctccagcaacccccgctgctgtgggacctactacaatggcttcaggcggtggcgcaccaatggcagacaataacgaaggcgccgacggagtgggtagttcctcgggaaattggcattgcgattccacatggctgggcgacagagtcatcaccaccagcacccgaacatgggccttgcccacctataacaaccacctctacaagcaaatctccagtgcttcaacgggggccagcaacgacaaccactacttcggctacagcaccccctgggggtattttgacttcaacagattccactgccacttctcaccacgtgactggcagcgactcatcaacaacaactggggattccggcctaagcgactcaacttcaagctcttcaacatccaggtcaaggaggtcacgcagaatgaaggcaccaagaccatcgccaataacctcaccagcaccatccaggtgtttacggactcggagtaccagcttccgtacgtcctcggctctgcgcaccagggctgcctccctccgttcccggcggacgtgttcatgattccgcagtacggctacctaacgctcaacaatggcagccaggcagtgggacggtcatccttttactgcctggaatatttcccatcgcagatgctgagaacgggcaacaactttaccttcagctacacctttgaggacgttcctttccacagcagctacgcgcacagccagagcttggaccggctgatgaatcctctgattgaccagtacctgtactacttgtctcggactcaaacaacaggaggcacggcaaatacgcagactctgggcttcagccaaggtgggcctaatacaatggccaatcaggcaaagaactggctgccaggaccctgttaccgccaacaacgcgtctcaacgacaaccgggcaaaacaacaatagcaactttgcctggactgctgggaccaaataccatctgaatggaagaaattcattggctaatcctggcatcgctatggcaacacacaaagacgacaaggagcgtttttttcccagtaacgggatcctgatttttggcaaacaaaatgctgccagagacaatgcggattacagcgatgtcatgctcaccagcgaggaagaaatcaaaaccactaaccctgtggctacagaggaatacggtatcgtggcagataacttgcagcagcaaaacacggctcctcaaattggaactgtcaacagccagggggccttacccggtatggtctggcagaaccgggacgtgtacctgcagggtcccatctgggccaagattcctcacacggacggcaacttccacccgtctccgctgatgggcggctttggcctgaaacatcctccgcctcagatcctgatcaagaacacgcctgtacctgcggatcctccgaccaccttcaaccagtcaaagctgaactctttcatcacgcaatacagcaccggacaggtcagcgtggaaattgaatgggagctgcagaaggaaaacagcaagcgctggaaccccgagatccagtacacctccaactactacaaatctacaagtgtggactttgctgttaatacagaaggcgtgtactctgaaccccaccccattggcacccgttacctcacccgtcccctgtaa

SEQ ID NO: 1023 - DNA, 2211 bp, Artificial Sequence
  source: /note="Description of Artificial Sequence: Synthetic polynucleotide"
atggctgccgatggttatcttccagattggctcgaggacaacctctctgagggcattcgcgagtggtgggcgctgaaacctggagccccgaagcccaaagccaaccagcaaaagcaggacgacggccggggtctggtgcttcctggctacaagtacctcggacccttcaacggactcgacaagggggagcccgtcaacgcggcggatgcagcggccctcgagcacgacaaggcctacgaccagcagctcaaagcgggtgacaatccgtacctgcggtataaccacgccgacgccgagtttcaggagcgtctgcaagaagatacgtcttttgggggcaacctcgggcgagcagtcttccaggccaagaagcgggttctcgaacctctcggtctggttgaggaaggcgctaagacggctcctggaaagaaacgtccggtagagcagtcgccacaagagccagactcctcctcgggcatcggcaagacaggccagcagcccgctaaaaagagactcaattttggtcagactggcgactcagagtcagtccccgacccacaacctctcggagaacctccagcaacccccgctgctgtgggacctactacaatggctgcaggcggtggcgcaccaatggcagacaataacgaaggcgccgacggagtgggtagttcctcgggaaattggcattgcgattccacatggatgggcgacagagtcatcaccaccagcacccgaacctgggccttgcccacctataacaaccatctctacaagcaaatctccagtgcttcaacgggggccagcaacgacaaccactacttcggctacagcaccccctgggggtattttgacttcaacagattccactgccacttctcaccacgtgactggcagcgactcatcaacaacaactggggattccggcccaagagactcagcttcaagctcttcaacatccaggtcaaggaggtcacgcagaatgaaggcaccaagaccatcgccaataacctcaccagcaccatccaggtgtttacggactcggagtaccagctgccgtacgtcctcggctctgcgcaccagggctgcctccctccgttcccggcggacgtgttcatgattccgcagtacggctacctaacgctcaacaatggcagccaggcagtgggacggtcatccttttactgcctggaatatttcccatcgcagatgctgagaacgggcaacaactttaccttcagctacacctttgaggacgttcctttccacagcagctacgctcacagccagagcttggaccggctgatgaatcctctgattgaccagtacctgtactacttgtctcggactcaaacaacaggaggcacggcaaatacgcagactctgggtttcagccaaggtgggcctaatacaatggccaatcaggcaaagaactggctgcaaggaccctgttaccgccaacaacgcgtctcaacgacaaccgggcaaaacaacaatagcaactttgcctggactgctgggaccaaataccatctgaatggaagaaattcattggctaatcctggcatcgctatggcaacacacaaagacgacaaggagcgtttttttcccagtaacgggatcctgatttttggcaaacaaaatgctgccagagacaatgcggattacagcgatgtcatgctcaccagcgaggaagaaatcaaaaccactaaccctgtggctacagaggaatacggtatcgtggcagataacttgcagcagcaaaacacggctcctcaaattggaactgtcaacagccagggggccttacccggtatggtctggcagaacctggacgtgtacctgcagggtcccatctgggccaagattcctcacacggacggcaacttccacccgtctccgctgatgggcggctttggcctgaaacatcctccgcctcagatcctgatcaagaacacgcctgtacctgcggatcctccgaccaccttcaaccagtcaaagctgaactctttcatcacgcaatacagcaccggacaggtcagcgtggaaattgaatgggagctgcagaaggaaaacagcaagcgctggaaccccgagatccagtacacctccaactactacaaatctacaagtgtggactttgctgttaatacagaaggcgtgtactctgaaccccaccccattggcacccgttacctcacccgtcccctgtaa

SEQ ID NO: 1024 - DNA, 2214 bp, Artificial Sequence
  source: /note="Description of Artificial Sequence: Synthetic polynucleotide"
atggctgccgatggttatcttccagattggctcgaggacaacctctctgagggcattcgcgagtggtgggcgctgaaacctggagccccgaagcccaaagccaaccagcaaaagcaggacgacggccggggtctggtgcttcctggctacaagtacctcggacccttcaacggactcgacaagggagagcccgtcaacgcggcggacgcagcggccctcgagcacgacaaggcctacgaccagcagctcaaagcgggtgacaatccgtacctgcggtataaccacgccgacgccgagtttcaggagcgtctgcaagaagatacgtcttttgggggcaacctcgggcgagcagtcttccaggccaagaagcgggttctcgaacctctcggtctggttgaggaaggcgctaagacggctcctggaaagaagagaccggtagagccatcaccccagcgttctccagactcctcctcgggcatcggcaagacaggccagcagcccgctaaaaagagactcaattttggtcagactggcgactcagagtcagtccccgacccacaacctctcggagaacctccagcaacccccgctgctgtgggacctactacaatggcttcaggtggtggcgcaccaatggcagacaataacgaaggcgccgacggagtgggtaatgcctcaggaaattggcattgcgattcccaatggctgggcgacagagtcatcaccaccagcacccgaacatgggccttgcccacctataacaaccacctctacaagcaaatctccagtgcttcaacgggggccagcaacgacaaccactacttcggctacagcaccccctgggggtattttgacttcaacagattccactgccacttttcaccacgtgactggcagcgactcatcaacaacaactggggattccggcctaagcgactcaacttcaagctcttcaacattcaggtcaaagaggttacggacaacaatggagtcaagaccatcgccaataaccttaccagcacggtccaggtcttcacggactcagactatcagctcccgtacgtgctcgggtcggctcacgagggctgcctcccgccgttcccagcggacgttttcatgattccccagtacggctacctaacactcaacaacggtagtcaggccgtgggacgctcctccttctactgcctggaatactttccttcgcagatgctgagaaccggcaacaacttccagtttacttacaccttcgaggacgtgcctttccacagcagctacgctcacagccagagcttggaccggctgatgaatcctctgattgaccagtacctgtactacttgtctcggactcaaacaacaggaggcacggcaaatacgcagactttgggcttcagccaaggtgggcctaatacaatggccaatcaggcaaagaactgggtgccaggaccctgttaccgccaacaacgggtttcaacggcaaccgggcaaaacaacaatagcaactttgcctggactgctgggaccaaataccatctgaaaggaagaaattcattggctaatcctggcatcgctatggcaacacacaaagacgacaaggagcgtttttttcccagtaacgggatcctgatttttggcaaacaaaatgctgccagagacaatgcggattacagcgatgtcatgctcaccagcgaggaagaaatcaaaaccactaaccctgtggctacagaggaatacggtatcgtggcagataacttgcagcagcaaaacacggctcctcaaattggaactgtcaacagccagggggccttacccggtatggtctggcagaaccgggacgtgtacctgcagggtcccatctgggccaagattcctcacacggacggcaacttccacccgtctccgctgatgggcggctttggcctgaaacatcctccgcctcagatcctgatcaagaacacgcctgtacctgcggatcctccgaccaccttcaaccagtcaaagctgaactctttcatcacgcaatacagcaccggacaggtcagcgtggaaattgaatgggagctgcagaaggaaaacagcaaacgctggaacccagagattcaatacacttccaactactacaaatctacaagtgtggactttgctgttaatacagaaggcgtgtactctgaaccccaccccattggcacccgttacctcacccgtcccctgtaa

SEQ ID NO: 1025 - DNA, 2214 bp, Artificial Sequence
  source: /note="Description of Artificial Sequence: Synthetic polynucleotide"
  modified_base (676)..(676): a, c, g, or t
  modified_base (697)..(697): a, c, g, or t
  modified_base (715)..(715): a, c, g, or t
  modified_base (748)..(748): a, c, g, or t
  modified_base (750)..(750): a, c, g, or t
  modified_base (757)..(757): a, c, g, or t
  modified_base (763)..(763): a, c, g, or t
atggctgccgatggttatcttccagattggctcgaggacactctctctgaaggaataagacagtggtggaagctcaaacctggcccaccaccaccaaagcccgcagagcggcataaggacgacagcaggggtcttgtgcttcctgggtacaagtacctcggacccttcaacggactcgacaagggagagccggtcaacgaggcagacgccgcggccctcgagcacgacaaagcctacgaccggcagctcgacagcggagacaacccgtacctcaagtacaaccacgccgacgcggagtttcaggagcgccttaaagaagatacgtcttttgggggcaacctcggacgagcagtcttccaggcgaaaaagagggttcttgaacctctcggtctggttgaggaaggcgctaagacggctcctggaaagaaacgtccggtagagcagtcgccacaagagccagactcctcctcgggcatcggcaagacaggccagcagcccgctaaaaagagactcaattttggtcagactggcgactcagagtcagtccccgacccacaacctctcggagaacctccagcaacgccctctggtgtgggacctaatacaatggctgcaggcggtggcgctccaatggcagacaataacgaaggcgccgacggagtgggtagttcctcangaaattggcattgcgattccncatggctgggcgacagantcatcaccaccagcacccgaacctgggccctgncnacctacnacaacnacctctacaagcaaatctccaacagcacatctggaggagccaccaacgacaacacctacttcggctacagcaccccctgggggtattttgactttaacagattccactgccacttttcaccacgtgactggcagcgactcatcaacaacaactggggattccggcctaagcgactcaacttcaagctcttcaacatccaggtcaaggaggtcacgcagaatgaaggcaccaagaccatcgccaataacctcaccagcaccatccaggtgtttacggactcggagtaccagctgccgtacgttctcggctctgcccaccagggctgcctgcctccgttcccggcggacgtgttcatgattccccagtacggctacctaacactcaacaacggtagtcaggccgtgggacgctcctccttctactgcctggaatactttccttcgcagatgctgagaaccggcaacaacttccagtttacttacaccttcgaggacgtgcctttccacagcagctacgcccacagccagagcttggaccggctgatgaatcctctgattgaccagtacctgtactacttgtctcggactcaaacaacaggaggcacggcaaatacgcagactctgggcttcagccaaggtgggcctaatacaatggccaatcaggcaaagaactggctgccaggaccctgttaccgccaacaacgcgtctcaacgacaaccgggcaaaacaacaatagcaactttgcctggactgctgggaccaaataccatctgaatggaagaaattcattggctaatcctggcatcgctatggcaacacacaaagacgacaaggagcgtttttttcccagtaacgggatcctgatttttggcaaacaaaatgctgccagagacaatgcggattacagcgatgtcatgctcaccagcgaggaagaaatcaaaaccactaaccctgtggctacagaggaatacggtatcgtggcagataacttgcagcagcaaaacacggctcctcaaattggaactgtcaacagccagggggccttacccggtatggtttggcagaaccgggacgtgtacctgcagggtcctatctgggccaagattcctcacacggacggaaactttcatccctcgccgctgatgggaggctttggactgaaacacccgcctcctcagatcctgattaagaatacacctgttcccgcggatcctccaactaccttcagtcaagctaagctggcgtcgttcatcacgcaatacagcacaggacaagtgagtgtggaaattgaatgggagctgcagaaagaaaacagcaagcgctggaatcccgaagtgcagtacacatccaattatgcaaaatctgccaacgttgattttactgtggacaacaatggactttatactgagcctcgccccattggcacccgttaccttacccgtcccctgtaa

SEQ ID NO: 1026 - DNA, 2214 bp, Artificial Sequence
  source: /note="Description of Artificial Sequence: Synthetic polynucleotide"
atggctgccgatggttatcttccagattggctcgaggacaacctctctgagggcattcgcgagtggtgggacttgaaacctggagccccgaagcccaaagccaaccagcaaaagcaggacgacggccggggtctggtgcttcctggctacaagtacctcggacccttcaacggactcgacaagggggagcccgtcaacgcggcggacgcagcggccctcgagcacgacaaggcctacgaccagcagctcaaagcgggtgacaatccgtacctgcggtataaccacgccgacgccgagtttcaggagcgtctgcaagaagatacgtcttttgggggcaacctcgggcgagcagtcttccaggccaagaagcgggttctcgaacctctcggtctggttgaggaaggcgctaagacggctcctggaaagaagagaccggtagagccatcaccccagcgttctccagactcctctacgggcatcggcaagaaaggccagcagcccgcgaaaaagagactcaactttgggcagactggcgactcagagtcagtgcccgaccctcaaccaatcggagaaccccccgcaggcccctctggtgtgggatctcttacaatggcttcaggtggtggcgcaccagtggcagacaataacgaaggtgccgatggagtgggtagttcctcgggaaattggcattgcgattcccaatggctgggggacagagtcatcaccaccagcacccgaacatgggccttgcccacctataacaaccacctctacaagcaaatctccagtgcttcaacgggggccagcaacgacaaccactacttcggctacagcaccccctgggggtattttgactttaacagattccactgccacttctcaccacgtgactggcagcgactcatcaacaacaactggggattccggcccaagagactcaacttcaagctcttcaacatccaggtcaaggaggtcacggacaatgatggagtcaagaccatcgccaataaccttaccagcacgattcaggtctttacggactcggaataccagttgccgtacgtcctcggctctgcgcaccagggctgcctgcctccgttcccggcggacgtgttcatgattccgcagtacggctacctaacgctcaacaatggcagccaggcagtgggacggtcatccttttactgcctggaatatttcccatcgcagatgctgagaacgggcaacaactttaccttcagctacacttttgaggacgttcctttccacagcagctacgctcacagccagagtctggaccgtctcatgaatcctctgattgaccagtacctgtactacttgtctcggactcaaacaacaggaggcacggcaaatacgcagactctgggcttcagccaaggtgggcctaatacaatggccaatcacgcaaagaactggctgccaggaccctgttaccgccaacaacgcgtctcaacgacaaccggacaaaacaacaatagcaactttgcctggactgctgggaccaaataccatctgaatggaagaaattcattggctaatcctggcatcgctatggcaacacacaaagacgacaaggagcgtttttttcccagtaacgggatcctgatttttggcaaacaaaatgctgccagagacaatgcggattacagcgatgtcatgctcaccagcgaggaagaaatcaaaaccactaaccctgtggctacagaggaatacggtatcgtggcagataacttgcagcagcaaaacacggctcctcaaattggaactgtcaacagccagggggccttacccggtatggtctggcagaaccgggacgtgtacctgcagggtcccatctgggccaagattcctcacacggacggcaacttccacccgtctccgctgatgggcggctttggcctgaaacatcctccgcctcagatcctgatcaagaacacgcctgtacctgcggatcctccgaccaccttcaaccagtcaaagctgaactctttcatcacgcaatacagcaccggacaggtcagcgtggaaattgaatgggagctgcagaaggaaaacagcaagcgctggaaccccgagatccagtacacctccaactactacaaatctacaagtgtggactttgctgttaatacagaaggcgtgtactctgaaccccaccccattggcacccgttacctcacccgtcccctgtaa

SEQ ID NO: 1027 - DNA, 2211 bp, Artificial Sequence
  source: /note="Description of Artificial Sequence: Synthetic polynucleotide"
atggctgccgatggttatcttccagattggctcgaggacactctctctgaaggaataagacagtggtggaagctcaaacctggcccaccaccaccaaagcccgcagagcggcacaaggacgacagcaggggtcttgtgcttcctgggtacaagtacctcggacccttcaacggactcgacaagggagagccggtcaacgaggcagacgccgcggccctcgagcacgacaaagcctacgaccggcagctcgacagcggagacaacccgtacctcaagtacaaccacgccgacgcggagtttcaggagcgccttaaagaagatacgtcttttgggggcaacctcggacgagcagtcttccaggcgaaaaagagggttcttgaacctctgggcctggttgaggaacctgttaagacggctccgggaaaaaagaggccggtagagcactctcctgtggagccagactcctcctcgggaaccggaaaggcgggccagcagcctgctaaaaagagactcaattttggtcagactggcgactcagagtcagtccccgacccacaacctctcggagaacctccagcaacccccgctgctgtgggacctactacaatggcttcaggtggtggcgcaccaatggcagacaataacgaaggcgccgacggagtgggtaatgcctcaggaaattggcattgcgattccacatggctgggcgacagagtcatcaccaccagcacccgcacctgggccttgcccacctacaataaccacctctacaagcaaatctccagtgcttcaacgggggccagcaacgacaaccactacttcggctacagcaccccctgggggtattttgacttcaacagattccactgccacttctcaccacgtgactggcagcgactcatcaacaacaactggggattccggcccaagagactcaacttcaaactcttcaacatccaagtcaaggaggtcacgcagaatgaaggcaccaagaccatcgccaataacctcaccagcaccatccaggtgtttacggactcggagtaccagctgccgtacgttctcggctctgcccaccagggctgcctgcctccgttcccggcggacgtgttcatgattccccagtacggctacctaacactcaacaacggtagtcaggccgtgggacgctcctccttctactgcctggaatactttccttcgcagatgctgagaaccggcaacaacttccagtttacttacaccttcgaggacgtgcctttccacagcagctacgcgcacagccagagcttggaccggctgatgaatcctctgattgaccagtacctgtactacttgtctcggactcaaacaacaggaggcacggcaaatacgcagactctgggcttcagccaaggtgggcctaatacaatggccaatcaggcaaagaactggctgccaggaccctgttaccgccaacaacgcgtctcaacgacaaccgggcaaaacaacaatagcaactttgcctggactgctgggaccaaataccatctgaatggaagaaattcattggctaatcctggcatcgctatggcaacacacaaagacgacaaggagcgtttttttcccagtaacgggatcctgatttttggcaaacaaaatgctgccagagacaatgcggattacagcgatgtcatgctcaccagcgaggaagaaatcaaaaccactaaccctgtggctacagaggaatacggtatcgtggcagataacttgcagcagcaaaacacggctcctcaaattggaactgtcaacagccagggggccttacccggtatggtctggcagaaccgggacgtgtacctgcagggtcccatctgggccaagattcctcacacggacggcaacttccacccgtctccgctgatgggcggctttggcctgaaacatcctccgcctcagatcctgatcaagaacacgcctgtacctgcggatcctccgaccaccttcaaccagtcaaagctgaactctttcatcacgcaatacagcaccggacaggtcagcgtggaaattgaatgggagctgcagaaggaaaacagcaagcgctggaaccccgagatccagtacacctccaactactacaaatctacaagtgtggactttgctgttaatacagaaggcgtgtactctgaaccccaccccattggcacccgttacctcacccgtcccctgtaa

SEQ ID NO: 1028 - DNA, 2211 bp, Artificial Sequence
  source: /note="Description of Artificial Sequence: Synthetic polynucleotide"
atggctgccgatggttatcttccagattggctcgaggacaacctctctgagggcattcgcgagtggtgggcgctgaaacctggagccccgaagcccaaagccaaccagcaaaagcaggacgacggccggggtctggtgcttcctggctacaagtacctcggacccttcaacggactcgacaagggggagcccgtcaacgcggcggatgcagcggccctcgagcacgacaaggcctacgaccagcagctccaagcgggtgacaatccgtacctgcggtataaccacgccgacgccgagtttcaggagcgtcttcaaggagatacgtcttttgggggcaacctcggacgagcagtcttccaggccaagaagcgggttctcgaacctctcggtctggttgaggaaggcgctaagacggctcctggaaagaaacgtccggtagagcagtcgccacaagagccagactcctcctcgggcatcggcaagacaggccagcagcccgctaaaaagagactcaattttggtcagactggcgactcagagtcagtccccgacccacaacctctcggagaacctccagcaacccccgctgctgtgggacctactacaatggcttcaggcggtggcgcaccaatggcggacaataacgaaggcgccgatggagtgggtaatgcctcaggaaattggcattgcgattccacatggctgggcgacagagtcatcaccaccagcacccgcacctgggccttgcccacctacaataaccacctctacaagcaaatctccagtgcttcaacgggggccagcaacgacaaccactacttcggctacagcaccccctgggggtattttgacttcaacagattccactgccacttctcaccacgtgactggcagcgactcatcaacaacaactggggattccggcctaagcgactcaacttcaagctcttcaacattcaggtcaaagaggttacggacaacaatggagtcaagaccatcgccaataacctcaccagcaccatccaggtgtttacggactcggagtaccagctgccgtacgttctcggctctgcccaccagggctgcctgcctccgttcccggcggacgtgttcatgattccccagtacggctacctaacactcaacaacggtagtcaggccgtgggacgctcctccttctactgcctggaatactttccttcgcagatgctgagaaccggcaacaacttccagtttacttacaccttcgaggacgtgcctttccacagcagctacgcccacagccagagcttggaccggctgatgaatcctctgattgaccagtacctgtactacttgtctcggactcaaacaacaggaggcacggcaaatacgcagactctgggcttcagccaaggtgggcctaatacaatggccaatcaggcaaagaactggctgccaggaccctgttaccgccaacaacgcgtctcaacgacaaccgggcaaaacaacaatagcaactttgcctggactgctgggaccaaataccatctgaatggaagaaattcattggctaatcctggcatcgctatggcaacacacaaagacgacaaggagcgtttttttcccagtaacgggatcctgatttttggcaaacaaaatgctgccagagacaatgcggattacagcgatgtcatgctcaccagcgaggaagaaatcaaaaccactaaccctgtggctacagaggaatacggtatcgtggcagataacttgcagcagcaaaacacggctcctcaaattggaactgtcaacagccagggggccttacccggtatggtctggcagaaccgggacgtgtacctgcagggtcccatctgggccaagattcctcacacggacggcaacttccacccgtctccgctgatgggcggctttggcctgaaacatcctccgcctcagatcctgatcaagaacacgcctgtacctgcggatcctccgaccaccttcaaccagtcaaagctgaactctttcatcacgcaatacagcaccggacaggtcagcgtggaaattgaatgggagctgcagaaggaaaacagcaagcgctggaaccccgagatccagtacacctccaactactacaaatctacaagtgtggactttgctgttaatacagaaggcgtgtactctgaaccccaccccattggcacccgttacctcacccgtcccctgtaa

SEQ ID NO: 1029 - DNA, 2217 bp, Artificial Sequence
  source: /note="Description of Artificial Sequence: Synthetic polynucleotide"
atggctgccgatggttatcttccagattggctcgaggacactctctctgaaggaataagacagtggtggaagctcaaacctggcccaccaccaccaaagcccgcagagcggcataaggacgacagcaggggtcttgtgcttcctgggtacaagtacctcggacccttcaacggactcgacaagggggagcccgtcaacgcggcggatgcagcggccctcgagcacgacaaggcctacgaccagcagctcaaagcgggtgacaatccgtacctgcggtataaccacgccgacgcggagtttcaggagcgccttaaagaagatacgtcttttgggggcaacctcggacgagcagtcttccaggcgaaaaagagggttcttgaacctctcggtctggttgaggaaggcgctaagacggctcctggaaagaagagaccggtagagccatcaccccagcgttctccagactcctctacgggcatcggcaagaaaggccaacagcccgccagaaaaagactcaattttggtcagactggcgactcagagtcagttccagaccctcaacctctcggagaacctccagcagcgccctctggtgtgggacctaatacaatggctgcaggcggtggcgcaccaatggcagacaataacgaaggcgccgacggagtgggtagttcctcgggaaattggcattgcgattcccaatggctgggggacagagtcatcaccaccagcaccagaacctgggccctgcccacctacaacaatcacctctacaagcaaatctccaacagcacatctggaggatcttcaaatgacaacgcctacttcggctacagcaccccctgggggtattttgacttcaaccgcttccactgccacttctcaccacgtgactggcagcgactcatcaacaacaactggggattccggcccaagagactcaacttcaagctcttcaacattcaggtcaaagaggttacggacaacaatggagtcaagaccatcgccaataaccttaccagcacggtccaggtctttacggactcggagtaccagttgccgtacgtcctcggctctgcgcaccagggctgcctccctccgttcccggcggacgtgttcatgattccccagtacggctacctaacactcaacaacggtagtcaggccgtgggacgctcctccttctactgcctggaatatttcccttctcagatgctgagaacgggcaacaactttaccttcagctacacctttgaggacgttcctttccacagcagctacgctcacagccagagtctggaccgtctcatgaatcctctgattgaccagtacctgtactacttgtctcggactcaaacaacaggaggcacggcaaatacgcagactctgggcttcagccaaggtgggcctaatacaatggccaatcaggcaaagaactggctgccaggaccctgttaccgccaacaacgcgtctcaacgacaaccgggcaaaacaacaatagcaactttgcctggactgctgggaccaaataccatctgaatggaagaaattcattggctaatcctggcatcgctatggcaacacacaaagacgacaaggagcgtttttttcccagtaacgggatcctgatttttggcaaacaaaatgctgccagagacaatgcggattacagcgatgtcatgctcaccagcgaggaagaaatcaaaaccactaaccctgtggctacagaggaatacggtatcgtggcagataacttgcagcagcaaaacacggctcctcaaattggaactgtcaacagccagggggccttacccggtatggtctggcagaaccgggacgtgtacctgcagggtcccatctgggcaaagattccacacacggacggacattttcacccctctcccctcatgggtggattcggacttaaacaccctcctccacagattctcatcaagaacaccccggtacctgcgaatcctccgaccaccttcaaccagtcaaagctgaactctttcatcacgcaatacagcacaggacaagtgagtgtggaaattgaatgggagctgcagaaagaaaacagcaagcgctggaatcccgaagtgcagtacacatccaattatgcaaaatctgccaacgttgattttactgtggacaacaatggactttatactgagcctcgccccattggcacccgttaccttacccgtcccctgtaa

SEQ ID NO: 1030 - DNA, 2211 bp, Artificial Sequence
  source: /note="Description of Artificial Sequence: Synthetic polynucleotide"
atggctgccgatggttatcttccagattggctcgaggacaacctctctgagggcattcgcgagtggtgggcgctgaaacctggagccccgaaacccaaagccaaccagcaaaagcaggacgacggccggggtctggtgcttcctggctacaagtacctcggacccttcaacggactcgacaagggggagcccgtcaacgcggcggacgcagcggccctcgagcacgacaaggcctacgaccagcagctcaaggcgggtgacaatccgtacctgcggtataaccacgccgacgccgagtttcaggagcgtctgcaagaagatacgtcttttgggggcaacctcgggcgagcagtcttccaggccaaaaagaggcttcttgaacctcttggtctggttgaggaaggggctaagacggctcctggaaagaaacgtccggtagagcagtcgccacaagagccagactcctcctcgggcattggcaagacaggccagcagcccgctaaaaagagactcaactttgggcagactggcgactcagagtcagtgcccgatcctcaacctctcggagaacctccagcaacccccgctgctgtgggacctactacaatggcttcaggcggtggcgcaccaatggcggacaataacgaaggcgccgatggagtgggtaattcctcgggaaattggcattgcgattccacatggatgggcgacagagtcatcaccaccagcacccgaacctgggccctgcccacctacaacaatcacctctacaagcaaatctccagtgcttcaacgggggccagcaacgacaaccactacttcggctacagcaccccctgggggtattttgatttcaacagattccactgccatttttcaccacgtgactggcagcgactcatcaacaacaactggggattccggcccaagagactcaacttcaagctcttcaacatccaggtcaaggaggtcacgcagaatgaaggcaccaagaccatcgccaataaccttaccagcacgattcaggtctttacggattcggaataccagctcccgtacgtcctcggctctgcgcaccagggctgcctccctccgttcccggcggacgtgttcattattccgcagtacggctacctaacgctcaacaatggtagccaggcagtgggacggtcatccttttactgcctggaatatttcccatcgcagatgctgagaacgggcaacaactttaccttcagctacacctttgaggacgttcctttccacagcagctacgctcacagccagagtctggaccgtctcatgaatcctctgattgaccagtacctgtactacttgtctcggactcaaacaacaggaggcacggcaaatacgcagactctgggcttcagccaaggtgggcctaatacaatggccaatcaggcaaagaactggctgccaggaccctgttaccgccaacaacgcgtctcaacgacaaccgggcaaaacaacaatagcaactttgcctggactgctgggaccaaataccatctgaatggaagaaattcattggctaatcctggcatcgctatggcaacacacaaagacgacaaggagcgtttttttcccagtaacgggatcctgatttttggcaaacaaaatgctgccagagacaatgcggattacagcgatgtcatgctcaccagcgaggaagaaatcaaaaccactaaccctgtggctacagaggaatacggtatcgtggcagataacttgcagcagcaaaacacggctcctcaaattggaactgtcaacagccagggggccttacccggtatggtctggcagaaccgggacgtgtacctgcagggtcccatctgggccaagattcctcacacggacggcaacttccacccgtctccgctgatgggcggctttggcctgaaacatcctccgcctcagatcctgatcaagaacacgccagtacctgcggatcctccgaccaccttcaaccagtcaaagctgaactctttcatcacgcaatacagcaccggacaggtcagcgtggaaattgaatgggagctgcagaaggaaaacagcaagcgctggaaccccgagatccagtacacctccaactactacaaatctacaagtgtggactttgctgttaatacagaaggcgtgtactctgaaccccaccccattggcacccgttacctcacccgtcccctgtaa

SEQ ID NO: 1031 - DNA, 2211 bp, Artificial Sequence
  source: /note="Description of Artificial Sequence: Synthetic polynucleotide"
atggctgccgatggttatcttccagattggctcgaggacaacctctctgagggcattcgcgagtggtgggcgctgaaacctggagccccgaaacccaaagccaaccagcaaaagcaggacgacggccggggtctggtgcttcctggctacaagtacctcggacccttcaacggactcgacaagggggagcccgtcaacgcggcggatgcagcggccctcgagcacgacaaggcctacgaccagcagctcaaggcgggtgacaatccgtacctgcggtataaccacgccgacgccgagtttcaggagcgtctgcaagaagatacgtcttttgggggcaacctcgggcgagcagtcttccaggccaaaaagagggttcttgaaccttttggtctggttgaggaagctgctaagacggctcctggaaagaaacgtccggtagagcagtcgccacaagagccagactcctcctcgggcattggcaagacaggccagcagcccgctaaaaagagactcaattttggtcagactggcgactcagagtcagtgcccgaccctcaacctctcggagaacctccagcaacccccgctgctgtgggacctactacaatggcttcaggcggtggcgcaccaatggcagacaataacgaaggcgccgatggagtgggtaatgcctcaggaaattggcattgcgattccacatggctgggcgacagagtcatcaccaccagcacccgaacctgggccctgcccacctacaacaatcacctctacaagcaaatctccagtgcttcaacgggggccagcaacgacaaccactacttcggctacagcaccccctgggggtattttgactttaacagattccactgccacttttcaccacgtgactggcagcgactcatcaacaacaactggggattccggcccaagagactcaacttcaagctcttcaacatccaggtcaaggaggtcacgcagaatgaaggcaccaagaccatcgccaataacctcaccagcaccattcaggtctttacggattcggaataccagctcccgtacgtcctcggctctgcccaccagggctgcctccctccgttcccggcggacgtgttcatgattccgcagtacggctacctaacgctcaacaatggtagccaggcagtgggacggtcatccttttactgcctggaatatttcccatcgcagatgctgagaacgggcaacaactttaccttcagctacacctttgaggacgttcctttccacagcagctacgctcacagccagagtctggaccgtctcatgaatcctctgattgaccagtacctgtactacttgtctcggactcaaacaacaggaggcacggcaaatacgcagactctgggcttcagccaaggtgggcctaatacaatggccaatcacgcaaagaactggctgccaggaccctgttaccgccaacaacgcgtctcaacgacaaccgggcaaaacaacaatagcaactttgcctggactgctgggaccaaataccatctgaatggaagaaattcattggctaatcctggcatcgctatggcaacacacaaagacgacaaggagcgtttttttcccagtaacgggatcctgatttttggcaaacaaaatgctgccagagacaatgcggattacagcgatgtcatgctcaccagcgaggaagaaatcaaaaccactaaccctgtggctacagaggaatacggtatcgtggcagataacttgcagcagcaaaacacggctcctcaaattggaactgtcaacagccagggggccttacccggtatggtctggcagaaccgggacgtgtacctgcagggtcccatctgggccaagattcctcacacggacggcaacttccacccgtctccgctgatgggcggctttggcctgaaacatcctccgcctcagatcctgatcaagaacacgcctgtacctgcggatcctccgaccaccttcaaccagtcaaagctgaactctttcatcacgcaatacagcaccggacaggtcagcgtggaaattgaatgggagctgcagaaggaaaacagcaagcgctggaaccccgagatccagtacacctccaactactacaaatctacaagtgtggactttgctgttaatacagaaggcgtgtactctgaaccccaccccattggcacccgttacctcacccgtcccctgtaa

SEQ ID NO: 1032 - DNA, 2211 bp, Artificial Sequence
  source: /note="Description of Artificial Sequence: Synthetic polynucleotide"
atggctgccgatggttatcttccagattggctcgaggacaacctctctgagggcattcgcgagtggtgggcgctgaaacctggagccccgaagcccaaagccaaccagcaaaagcaggacgacggccggggtctggtgcttcctggctacaagtacctcggacccttcaacggactcgacaaaggagagcccgtcaacgaggcggacgcggcggccctcgaacacgacaaggcttacgaccagcagctcaaggccggtgacaacccctacctgcggtacaaccacgccgacgccgagttccaggagcggctgcaagaagatacgtcttttgggggcaacctcgggcgagcagtcttccaggccaagaagaggcttcttgaacctcttggtctggttgaggaagcggctaagacggctcctggaaagaagaggcctgtagagcagtctcctcaggaaccggactcctccgcgggtattggcaaatcaggtgcacagcccgctaaaaagagactcaattttggtcagactggcgactcagagtcagtccccgacccacaacctctcggagaacctccagcaacccccgctgctgtgggacctactacaatggcttcaggcggtggcgcaccaatggcagacaataacgaaggcgccgatggagtgggtaatgcctcaggaaattggcattgcgattccacatggctgggcgacagagtcatcaccaccagcacccgaacctgggccctgcccacctataacaaccatctctacaagcaaatctccagtgcttcaacgggggccagtaacgacaaccactacttcggctacagcaccccctgggggtattttgactttaacagattccactgccacttctcaccacgtgactggcagcgactcatcaacaacaactggggattccggcccaagcgactcaacttcaagctcttcaacattcaggtcaaagaggttacggacaacgatggagtcaagaccatcgccaataaccttaccagcaccattcaggtgtttacggactcggaataccagctgccgtacgttctcggctccgcccaccagggctgcctgcctccgttcccggcggacgtgttcatgattccccagtacggctacctaacactcaacaacggtagtcaggccgtgggacgctcctccttctactgcctggaatactttccttcgcagatgctgagaactggcaacaacttccagtttacttacaccttcgaggacgtgcctttccacagcagctacgcccacagccagagcttggaccggctgatgaatcctctgattgaccagtacctgtactacttgtctcggactcaaacaacaggaggcacggcaaatacgcagactctgggcttcagccaaggtgggcctaatacaatggccaatcaggcaaagaactggctgccaggaccctgttaccgccaacaacgcgtctcaacgacaaccgggcaaaacaacaatagcaactttgcctggactgctgggaccaaataccatctgaatggaagaaattcattggctaatcctggcatcgctatggcaacacacaaagacgacaaggagcgtttttttcccagtaacgggatcctgatttttggcaaacaaaatgctgccagagacaatgcggattacagcgatgtcatgctcaccagcgaggaagaaatcaaaaccactaaccctgtggctacagaggaatacggtatcgtggcagataacttgcagcagcaaaacacggctcctcaaattggaactgtcaacagccagggggccttacccggtatggtctggcagaaccgggacgtgtacctgcagggtcccatctgggccaagattcctcacacggacggcaacttccacccgtctccgctgatgggcggctttggcctgaaacatcctccgcctcagatcctgatcaagaacacgcctgtacctgcggatcctccgaccaccttcaaccagtcaaagctgaactctttcatcacgcaatacagcaccggacaggtcagcgtggaaattgaatgggagctgcagaaggaaaacagcaagcgctggaaccccgagatccagtacacctccaactactacaaatctacaagtgtggactttgctgttaatacagaaggcgtgtactctgaaccccaccccattggcacccgttacctcacccgtcccctgtaa

SEQ ID NO: 1033 - DNA, 2211 bp, Artificial Sequence
  source: /note="Description of Artificial Sequence: Synthetic polynucleotide"
atggctgccgatggttatcttccagattggctcgaggacaacctctctgagggcattcgcgagtggtgggcgctgaaacctggagccccgaagcccaaagccaaccagcaaaagcaggacgacggccggggtctggtgcttcctggctacaagtacctcggacccttcaacggactcgacaagggggagcccgtcaacgcggcggatgcagcggccctcgagcacgacaaagcctacgaccagcagctcaaagcgggtgacaatccgtacctgcggtataaccacgccgacgccgagtttcaggagcgtctgcaagaagatacgtcttttgggggcaacctcgggcgagcagtcttccaggccaagaagagggttctcgaacctttgggtctggttgaggaaggggctaagacggctcctggaaagaaaaggccggtagagcagtctcctcaggaaccggactcctccgcgggtattggcaagacaggtgcacagcccgctaaaaagagactcaattttggtcagactggcgactcagagtcagtccccgacccacaacctctcggagaacctccagcaacccccgctgctgtgggacctactacaatggcttcaggcggtggcgcaccaatggcagacaataacgaaggcgccgacggagtgggtagtgcctcgggaaattggcattgcgattccacatggctgggcgacagagtcatcaccaccagcacccgaacctgggccctgcccacctataacaaccatctctacaagcaaatctccagtgcttcaacgggggccagtaacgacaaccactacttcggctacagcaccccctgggggtattttgacttcaacagattccactgccacttctcaccacgtgactggcagcgactcatcaacaacaactggggattccggcccaagcgactcaacttcaagctcttcaacattcaggtcaaagaggttacggacaacaatggagtcaagaccatcgccaataaccttaccagcacgatccaggtctttacggactcggagtaccagctgccgtacgtcctcggctctgcgcaccagggctgcctgcctccgttcccggcggacgtgttcatgattccgcagtacggctacctaacgctcaacaatggtagccaggcagtgggacggtcatccttttactgcctggaatatttcccatcgcagatgctgagaacgggcaacaactttaccttcagctacacctttgaggacgttcctttccacagcagctacgctcacagccagagtctggaccgtctcatgaatcctctgattgaccagtacctgtactacttgtctcggactcaaacaacaggaggcacggcaaatacgcagactctgggcttcagccaaggtgggcctaatacaatggccaatcaggcaaagaactggctgccaggaccctgttaccgccaacaacgcgtctcaacgacaaccgggcaaaacaacaatagcaactttgcctggactgctgggaccaaataccatctgaatggaagaaattcattggctaatcctggcatcgctatggcaacacacaaagacgacaaggagcgtttttttcccagtaacgggatcctgatttttggcaaacaaaatgctgccagagacaatgcggattacagcgatgtcatgctcaccagcgaggaagaaatcaaaaccactaaccctgtggctacagaggaatacggtatcgtggcagataacttgcagcagcaaaacacggctcctcaaattggaactgtcaacagccagggggccttacccggtatggtctggcagaaccgggacgtgtacctgcagggtcccatctgggccaagattcctcacacggacggcaacttccacccgtctccgctgatgggcggctttggcctgaaacatcctccgcctcagatcctgatcaagaacacgcctgtacctgcggatcctccgaccaccttcaaccagtcaaagctgaactctttcatcacgcaatacagcaccggacaggtcagcgtggaaattgaatgggagctgcagaaggaaaacagcaagcgctggaaccccgagatccagtacacctccaactactacaaatctacaagtgtggactttgctgttaatacagaaggcgtgtactctgaaccccaccccattggcacccgttacctcacccgtcccctgtaa

SEQ ID NO: 1034 - DNA, 2211 bp, Artificial Sequence
  source: /note="Description of Artificial Sequence: Synthetic polynucleotide"
atggctgccgatggttatcttccagattggctcgaggacaacctctctgagggcattcgcgagtggtgggacttgaaacctggagccccgaagcccaaagccaaccagcaaaagcaggacgacggccggggtctggtgcttcctggctacaagtacctcggacccttcaacggactcgacaagggggagcccgtcaacgcggcggacgcagcggccctcgagcacgacaaggcctacgaccagcagctcaaagcgggtgacaatccgtacctgcggtataaccacgccgacgccgagtttcaggagcgtctgcaagaagatacgtcttttgggggcaacctcggacgagcagtcttccaggccaaaaagaggcttcttgaacctcttggtctggttgaggaagcggctaagacggctcctggaaagaagaggcctgtagagcagtctcctcaggaaccggactcctccgcgggtattggcaaatcgggtgcacagcccgctaaaaagagactcaatttcggtcagactggcgacacagagtcagtcccagaccctcaaccaatcggagaacctccagcagcgccctctggtgtgggacctaatacaatggctgcaggcggtggcgcaccaatggcagacaataacgaaggtgccgatggagtgggtagttcctcgggaaattggcattgcgattcccaatggctgggggacagagtcatcaccaccagcacccgaacctgggccctgcccacctataacaaccacctctacaagcaaatctccagtgcttcaacgggggccagcaacgacaaccactactttggctacagcaccccttgggggtattttgacttcaacagattccactgccacttttcaccacgtgactggcaaagactcatcaacaacaactggggattccgacccaagagactcaacttcaagctcttcaacatccaggtcaaggaggtcacgcagaatgaaggcaccaagaccatcgccaataacctcaccagcaccatccaggtgtttacggactcggagtaccagctgccgtacgttctcggctctgcccaccagggctgcctgcctccgttcccggcggacgtgttcatgattccccagtacggctacctaacactcaacaacggtagtcaggccgtgggacgctcctccttctactgcctggaatactttccttcgcagatgctgagaaccggcaacaacttccagtttacttacaccttcgaggacgtgcctttccacagcagctacgcgcacagccagagcttggaccggctgatgaatcctctgattgaccagtacctgtactacttgtctcggactcaaacaacaggaggcacggcaaatacgcagactctgggcttcagccaaggtgggcctaatacaatggccaatcacgcaaagaactggctgccaggaccctgttaccgccaacaacgcgtctcaacgacaaccgggcaaaacaacaatagcaactttgcctggactgctgggaccaaataccatctgaatggaagaaattcattggctaatcctggcatcgctatggcaacacacaaagacgacaaggagcgtttttttcccagtaacgggatcctgatttttggcaaacaaaatgctgccagagacaatgcggattacagcgatgtcatgctcaccagcgaggaagaaatcaaaaccactaaccctgtggctacagaggaatacggtatcgtggcagataacttgcagcagcaaaacacggctcctcaaattggaactgtcaacagccagggggccttacccggtatggtctggcagaaccgggacgtgtacctgcagggtcccatctgggccaagattcctcacacggacggcaacttccacccgtctccgctgatgggcggctttggcctgaaacatcctccgcctcagatcctgatcaagaacacgcctgtacctgcggatcctccgaccaccttcaaccagtcaaagctgaactctttcatcacgcaatacagcaccggacaggtcagcgtggaaattgaatgggagctgcagaaggaaaacagcaagcgctggaaccccgagatccagtacacctccaactactacaaatctacaagtgtggactttgctgttaatacagaaggcgtgtactctgaaccccaccccattggcacccgttacctcacccgtcccctgtaa

SEQ ID NO: 1035 - DNA, 2214 bp, Artificial Sequence
  source: /note="Description of Artificial Sequence: Synthetic polynucleotide"
atggctgccgatggttatcttccagattggctcgaggacaaccttagtgaaggaattcgcgagtggtgggcgctgaaacctggagccccgaagcccaaagccaaccagcaaaagcaggacgacggccggggtctggtgcttcctggctacaagtacctcggacccttcaacggactcgacaagggggagcccgtcaacgcggcggacgcagcggccctcgagcacgacaaggcctacgaccagcagctcaaagcgggtgacaatccgtacctgcggtataaccacgccgacgccgagtttcaggagcgtctgcaagaagatacgtcttttgggggcaacctcgggcgagcagtcttccaggccaagaagcgggttctcgaacctctcggtctggttgaggaaggcgctaagacggctcctggaaagaaacgtccggtagagcagtcgccacaagagccagactcctcctcgggcatcggcaagacaggccagcagcccgctaaaaagagactcaatttcggtcagactggcgacacagagtcagtcccagaccctcaaccaatcggagaacctcccgcagccccctcaggtgtgggatctcttacaatggcttcaggtggtggcgcaccagtggcagacaataacgaaggtgccgatggagtgggtagttcctcgggaaattggcattgcgattcccaatggctgggggacagagtcatcaccaccagcaccagaacctgggccttgcccacctacaataaccacctctacaagcaaatctccaacagcacatctggaggatcttcaaatgacaacgcctacttcggctacagcaccccctgggggtattttgactttaacagattccactgccacttttcaccacgtgactggcagcgactcatcaacaacaactggggattccgacccaagagactcaacttcaagctcttcaacatccaggtcaaggaggtcacgcagaacgaaggcaccaagaccatcgccaataacctcaccagcaccatccaggtgtttacggactcggagtaccagctgccgtacgttctcggctccgcccaccagggctgcctgcctccgttcccggcggacgtgttcatgattccccagtacggctacctaacgctcaacaacggtagtcaggccgtgggacgctcctccttctactgcctggaatactttccttcgcagatgctgagaaccggcaacaacttccagtttacttacaccttcgaggacgtgcctttccacagcagctacgcgcacagccagagcttggaccggctgatgaatcctctgattgaccagtacctgtactacttgtctcggactcaaacaacaggaggcacggcaaatacgcagactctgggcttcagccaaggtgggcctaatacaatggccaatcaggcaaagaactggctgccaggaccctgttaccgccaacaacgcgtctcaacgacaaccgggcaaaacaacaatagcaactttgcctggactgctgggaccaaataccatctgaatggaagaaattcattggctaatcctggcatcgctatggcaacacacaaagacgacaaggagcgtttttttcccagtaacgggatcctgatttttggcaaacaaaatgctgccagagacaatgcggattacagcgatgtcatgctcaccagcgaggaagaaatcaaaaccactaaccctgtggctacagaggaatacggtatcgtggcagataacttgcagcagcaaaacacggctcctcaaattggaactgtcaacagccagggggccttacccggtatggtctggcagaaccgggacgtgtacctgcagggtcccatctgggccaagattcctcacacggacggcaacttccacccgtctccgctgatgggcggctttggcctgaaacatcctccgcctcagatcctgatcaagaacacgcctgtacctgcggatcctccgaccaccttcaaccagtcaaagctgaactctttcatcacgcaatacagcaccggacaggtcagcgtggaaattgaatgggagctgcagaaggaaaacagcaagcgctggaaccccgagatccagtacacctccaactactacaaatctacaagtgtggactttgctgttaatacagaaggcgtgtactctgaaccccaccccattggcacccgttacctcacccgtcccctgtaa

SEQ ID NO: 1036 - DNA, 2214 bp, Artificial Sequence
  source: /note="Description of Artificial Sequence: Synthetic polynucleotide"
atggctgccgatggttatcttccagattggctcgaggacaaccttagtgaaggaattcgcgagtggtgggcgctgaaacctggagccccgaagcccaaagccaaccagcaaaagcaggacgacggccggggtctggtgcttcctggctacaagtacctcggacccttcaacggactcgacaagggggagcccgtcaacgcggcggacgcagcggccctcgagcacgacaaggcctacgaccagcagctcaaagcgggtgacaatccgtacctgcggtataaccacgccgacgcggagtttcaggagcgccttaaagaagatacgtcttttgggggcaacctcgggcgagcagtcttccaggccaagaagagggttctcgaaccttttggtctggttgaggaaggtgctaagacggctcctggaaagaaacgtccggtagagcagtcgccacaagagccagactcctcctcgggcatcggcaagacaggccagcagcccgctaaaaagagactcaattttggtcagactggcgactcagagtcagttccagaccctcaacctctcggagaacctccagcagcgccctctggtgtgggacctaatacaatggctgcaggcggtggcgcaccaatggcagacaataacgaaggtgccgatggagtgggtagttcctcgggaaattggcattgcgattcccaatggctggggaacagagtcatcaccaccagcacccgaacctgggccctgcccacctacaacaatcacctctacaagcaaatctccaacagcacatctggaggatcttcaaatgacaacgcctacttcggctacagcaccccctgggggtattttgacttcaacagattccactgccacttctcaccacgtgactggcagcgactcatcaacaacaactggggattccggcccaagagactcaacttcaagctcttcaacattcaggtcaaagaggttacggacaacaatggagtcaagaccatcgccaataaccttaccagcacggtccaggtcttcacggactcggagtaccagttgccgtacgtcctcggctctgcgcaccagggctgcctccctccgttcccggcggacgtgttcatgattccgcaatacggctacctgacgctcaacaacggtagccaagccgtgggacgttcatccttttactgcctggaatatttcccttctcagatgctgagaaccggcaacaacttccagtttacttacaccttcgaggacgtgcctttccacagcagctacgcgcacagccagagcttggaccggctgatgaatcctctgattgaccagtacctgtactacttgtctcggactcaaacaacaggaggcacggcaaatacgcagactctgggcttcagccaaggtgggcctaatacaatggccaatcaggcaaagaactggctgccaggaccctgttaccgccaacaacgcgtctcaacgacaaccgggcaaaacaacaatagcaactttgcctggactgctgggaccaaataccatctgaatggaagaaattcattggctaatcctggcatcgctatggcaacacacaaagacgacaaggagcgtttttttcccagtaacgggatcctgatttttggcaaacaaaatgctgccagagacaatgcggattacagcgatgtcatgctcaccagcgaggaagaaatcaaaaccactaaccctgtggctacagaggaatacggtatcgtggcagataacttgcagcagcaaaacacggctcctcaaattggaactgtcaacagccagggggccttacccggtatggtctggcagaaccgggacgtgtacctgcagggtcccatctgggccaagattcctcacacggacggcaacttccacccgtctccgctgatgggcggctttggcctgaaacatcctccgcctcagatcctgatcaagaacacgcctgtacctgcggatcctccgaccaccttcaaccagtcaaagctgaactctttcatcacgcaatacagcaccggacaggtcagcgtggaaattgaatgggagctgcagaaggaaaacagcaagcgctggaaccccgagatccagtacacctccaactactacaaatctacaagtgtggactttgctgttaatacagaaggcgtgtactctgaaccccaccccattggcacccgttacctcacccgtcccctgtaa

SEQ ID NO: 1037 - DNA, 2211 bp, Artificial Sequence
  source: /note="Description of Artificial Sequence: Synthetic polynucleotide"
atggctgccgatggttatcttccagattggctcgaggacaacctctctgagggcattcgcgagtggtgggacttgaaacctggagccccgaagcccaaagccaaccagcaaaagcaggacgacggccggggtctggtgcttcctggctacaagtacctcggacccttcaacggactcgacaggggggagcccgtcaacgcggcggacgcagcggccctcgagcacgacaaggcctacgaccagcagctcaaagcgggtgacaatccgtacctgcggtataaccacgccgacgccgagtttcaggagcgtctgcaagaagatacgtcttttgggggcaacctcgggcgagcagtcttccaggccaagaagcgggttctcgaacctctcggtctggttgaggaaggcgctaagacggctcctggaaagaaacgtccggtagagcagtcgccacaagagccagactcctcctcgggcatcggcaagacaggccagcagcccgctaaaaagagactcaattttggtcagactggcgactcagagtcagtccccgacccacaacctctcggagaacctccagcaacccccgctgctgtgggacctactacaatggcttcaggcggtggcgcaccaatggcagacaataacgaaggcgccgacggagtgggtaatgcctcaggaaattggcattgcgattccacatggctgggcgacagagtcatcaccaccagcacccgaacctgggccttgcccacctataacaaccacctctacaagcaaatctccagtgcttcaacgggggccagcaacgacaaccactacttcggctacagcaccccctgggggtattttgacttcaacagattccactgccacttctcaccacgtgactggcagcgactcatcaacaacaactggggattccggcctaagcgactcaacttcaagctcttcaacattcaggtcaaagaggttacggacaacaatggagtcaagaccatcgccaataacctcaccagcaccatccaggtgtttacggactcggagtaccagctgccgtacgttctcggctctgcccaccagggctgcctgcctccgttcccggcggacgtgttcatgattccccagtacggctacctaacactcaacaacggtagtcaggccgtgggacgctcctccttctactgcctggaatactttccttcgcagatgctgagaaccggcaacaacttccagtttacttacaccttcgaggacgtgcctttccacagcagctacgcccacagccagagcttggaccggctgatgaatcctctgattgaccagtacctgtactacttgtctcggactcaaacaacaggaggcacggcaaatacgcagactctgggcttcagccaaggtgggcctaatacaatggccaatcaggcaaagaactggctgccaggaccctgttaccgccaacaacgcgtctcaacgacaaccgggcaaaacaacaatagcaactttgcctggactgctgggaccaaataccatctgaatggaagaaattcattggctaatcctggcatcgctatggcaacacacaaagacgacaaggagcgtttttttcccagtaacgggatcctgatttttggcaaacaaaatgctgccagagacaatgcggattacagcgatgtcatgctcaccagcgaggaagaaatcaaaaccactaaccctgtggctacagaggaatacggtatcgtggcagataacttgcagcagcaaaacacggctcctcaaattggaactgtcaacagccagggggccttacccggtatggtctggcagaaccgggacgtgtacctgcagggtcccatctgggccaagattcctcacacggacggcaacttccacccgtctccgctgatgggcggctttggcctgaaacatcctccgcctcagatcctgatcaagaacacgcctgtacctgcggatcctccgaccaccttcaaccagtcaaagctgaactctttcatcacgcaatacagcaccggacaggtcagcgtggaaattgaatgggagctgcagaaggaaaacagcaagcgctggaaccccgagatccagtacacctccaactactacaaatctacaagtgtggactttgctgttaatacagaaggcgtgtactctgaaccccaccccattggcacccgttacctcacccgtcccctgtaa

SEQ ID NO: 1038 - DNA, 2211 bp, Artificial Sequence
  source: /note="Description of Artificial Sequence: Synthetic polynucleotide"
atggctgccgatggttatcttccagattggctcgaggacaacctctctgagggcattcgcgagtggtgggacttgaaacctggagccccgaagcccaaagccaaccagcaaaagcaggacgacggccggggtctggtgcttcctggctacaagtacctcggacccttcaacggactcgacaagggggagcccgtcaacgcggcggacgcagcggccctcgagcacgacaaggcctacgaccagcagctcaaagcgggtgacaatccgtacctgcggtataaccacgccgacgccgagtttcaggagcgtctgcaagaagatacgtcttttgggggcaacctcgggcgagcagtcttccaggccaagaagcgggttctcgaacctctcggtctggttgaggaaggcgctaagacggctcctggaaagaaacgtccggtagagcagtcgccacaagagccagactcctcctcgggcatcggcaagaaaggccaacagcccgccagaaaaagactcaattttggtcagactggcgactcagagtcagttccagaccctcaacctctcggagaacctcccgcagccccctcaggtgtgggatctcttacaatggcttcaggcggtggcgcaccaatggcagacaataacgaaggcgccgacggagtgggtaatgcctcaggaaattggcattgcgattccacatggctgggcgacagagtcatcaccaccagcacccgaacatgggccttgcccacttacaacaaccatctctacaagcaaatctccagtgcttcaacgggggccagcaacgacaaccactacttcggctacagcaccccctgggggtattttgatttcaacagattccactgccacttttcaccacgtgactggcaaagactcatcaacaacaactggggattccgacccaagagactcaacttcaagctctttaacattcaagtcaaagaggtcacgcagaatgaaggcaccaagaccatcgccaataaccttaccagcacggtccaggtcttcacggactcagactatcagctcccgtacgttctcggctccgcccaccagggctgcctgcctccgttcccggcggacgtgttcatgattccccagtacggctacctaacactcaacaacggtagtcaggccgtgggacgctcctccttctactgcctggaatactttccttcgcagatgctgagaaccggcaacaacttccagtttacttacacctttgaggacgttcctttccacagcagctacgctcacagccagagtctggaccgtctcatgaatcctctgattgaccagtacctgtactacttgtctcggactcaaacaacaggaggcacggcaaatacgcagactctgggcttcagccaaggtgggcctaatacaatggccaatcaggcaaagaactggctgccaggaccctgttaccgccaacaacgcgtctcaacgacaaccgggcaaaacaacaatagcaactttgcctggactgctggaaccaaataccatctgaatggaagaaattcattgtctaatcctggcatcgctatggcgacacacaaagacgacaaggagcgtttttttcccagtaacgggatcctgatttttggcaaacaaaatgctgccagagacaatgcggattacagcgatgtcatgctcaccagcgaggaagaaatcaaaaccactaaccctgtggctacagaggaatacggtatcgtggcagataacttgcagcagcaaaacacggctcctcaaattggaactgtcaacagccagggggccttacccggtatggtctggcagaaccgggacatgtacctgcagggtcccatctgggccaagattcctcacacggacggcaacttccacccgtctccgctgatgggcggctttggcctgaaacatcctccgcctcagatcctgatcaagaacacgcctgtacctgcggatcctccgaccaccttcaaccagtcaaagctgaactctttcatcacgcaatacagcaccggacaggtcagcgtggaaattgaatgggagctgcagaaggaaaacagcaagcgctggaaccccgagatccagtacacctccaactactacaaatctacaagtgtggactttgctgttaatacagaaggcgtgtactctgaaccccaccccattggcacccgttacctcacccgtcccctgtaa

SEQ ID NO: 1039 - DNA, 2211 bp, Artificial Sequence
  source: /note="Description of Artificial Sequence: Synthetic polynucleotide"
atggctgccgatggttatcttccagattggctcgaggacaacctctctgagggcattcgcgagtggtgggcgctgaaacctggagccccgaagcccaaagccaaccagcaaaagcaggacgacggccggggtctggtgcttcctggctacaagtacctcggacccttcaacggactcgacaagggggagcccgtcaacgcggcggatgcagcggccctcgagcacgacaaggcctacgaccagcagctcaaagcgggtgacaatccgtacctgcggtataaccacgccgacgccgagtttcaggagcgtctgcaggaagatacgtcttttgggggcaacctcgggcgagcagtcttccaggccaagaagagggttctcgaaccttttggtctggttgaggaaggcgctaagacggctcctggaaagaaacgtccggtagagcagtcgccacaagagccagactcctcctcgggcatcggcaagacaggccagcagcccgctaaaaagagactcaattttggtcagactggcggctcagagtcagtccccgacccacaacctctcggagaacctccagcaacccccgctgctgtgggacctactacaatggctgcaggcggtggcgcaccaatggcagacaataacgaaggcgccgacggagtgggtagttcctcgggaaattggcattgcgattccacatggctgggcgacagagtcatcaccaccagcaccagaacctgggccttgcccacctataacaaccacctctacaagcaaatctccagtgcttcaacgggggccagcaacgacaaccactacttcggctacagcaccccctgggggtattttgatttcaacagattccactgccatttctcaccacgtgactggcagcgactcatcaacaacaactggggattccggcccaagagactcaacttcaaactcttcaacattcaggtcaaagaggttacggacaacaatggagtcaagaccatcgccaataaccttaccagcacggtccaggtgtttacggactcggagtaccagctgccgtacgttctcggctctgcccaccagggctgcctccctccgttcccggcggacgtgttcatgattccgcagtacggctacctaacgctcaacaatggcagccaggcagtgggacggtcatccttttactgcctggaatatttcccttctcagatgctgagaacgggcaacaactttaccttcagctacacctttgaggaagtgcctttccacagcagctacgcgcacagccagagcctggaccggctgatgaatcctctgattgaccagtacctgtactacttgtctcggactcaaacaacaggaggcacggcaaatacgcagactctgggcttcagccaaggtgggcctaatacaatggccaatcaggcaaagaactggctgccaggaccctgttaccgccaacaacgcgtctcaacgacaaccgggcaaaacaacaatagcaactttgcctggactgctgggaccaaataccatctgaatggaagaaattcattggctaatcctggcatcgctatggcctcacacaaagacgacaaggagcgtttttttcccagtaacgggatcctgatttttggcaaacaaaatgctgccagagacaatgcggattacagcgatgtcatgctcaccagcgaggaagaaatcaaaaccactaaccctgtggctacagaggaatacggtatcgtggcagataacttgcagcagcaaaacacggctcctcaaattggaactgtcaacagccagggggccttacccggtatggtctggcagaaccgggacgtgtacctgcagggtcccatctgggccaagattcctcacacggacggcaacttccacccgtctccgctgatgggcggctttggcctgaaacatcctccgcctcagatcctgatcaagaacacgcctgtacctgcggatcctccgaccaccttcaaccagtcaaagctgaactctttcatcacgcaatacagcaccggacaggtcagcgtggaaattgaatgggagctgcagaaggaaaacagcaagcgctggaaccccgagatccagtacacctccaactactacaaatctacaagtgtggactttgctgttaatacagaaggcgtgtactctgaaccccaccccattggcacccgttacctcacccgtcccctgtaa

SEQ ID NO: 1040 - protein, 736 aa, Artificial Sequence
  source: /note="Description of Artificial Sequence: Synthetic polypeptide"
MAADGYLPDWLEDTLSEGIRQWWKLKPGPPPPKPAERHKDDSRGLVLPGYKYLGPFNGLDKGEPVNEADAAALEHDKAYDQQLKAGDNPYLKYNHADAEFQERLKEDTSFGGNLGRAVFQAKKRVLEPLGLVEEGAKTAPGKKRPVEQSPQEPDSSSGIGKTGQQPAKKRLNFGQTGDSESVPDPQPLGEPPATPAAVGPTTMASGGGAPMADNNEGADGVGSSSGNWHCDSQWLGDRVITTSTRTWALPTYNNHLYKQISSASTGASNDNHYFGYSTPWGYFDFNRFHCHFSPRDWQRLINNNWGFRPKRLNFKLFNIQVKEVTQNEGTKTIANNLTSTIQVFTDSEYQLPYVLGSAHQGCLPPFPADVFMIPQYGYLTLNNGSQAVGRSSFYCLEYFPSQMLRTGNNFQFTYTFEDVPFHSSYAHSQSLDRLMNPLIDQYLYYLSRTQTTGGTANTQTLGFSQGGPNTMANQAKNWLPGPCYRQQRVSTTTGQNNNSNFAWTAGTKYHLNGRNSLANPGIAMATHKDDKERFFPSNGILIFGKQNAARDNADYSDVMLTSEEEIKTTNPVATEEYGIVADNLQQQNTAPQIGTVNSQGALPGMVWQNRDVYLQGPIWAKIPHTDGNFHPSPLMGGFGLKHPPPQILIKNTPVPADPPTTFNQSKLNSFITQYSTGQVSVEIEWELQKENSKRWNPEIQYTSNYYKSTSVDFAVNTEGVYSEPHPIGTRYLTRPL

SEQ ID NO: 1041 - protein, 736 aa, Artificial Sequence
  source: /note="Description of Artificial Sequence: Synthetic polypeptide"
MAADGYLPDWLEDNLSEGIREWWALKPGAPKPKANQQKQDDGRGLVLPGYKYLGPFNGLDKGEPVNAADAAALEHDKAYDQQLKAGDNPYLKYNHADAEFQERLKEDTSFGGNLGRAVFQAKKRLLEPLGLVEEAAKTAPGKKRPVEQSPQEPDSSAGIGKSGAQPAKKRLNFGQTGDSESVPDPQPLGEPPATPAAVGPTTMASGGGAPMADNNEGADGVGNASGNWHCDSTWLGDRVITTSTRTWALPTYNNHLYKQISSASTGASNDNHYFGYSTPWGYFDFNRFHCHFSPRDWQRLINNNWGFRPKRLNFKLFNIQVKEVTQNEGTKTIANNLTSTIQVFTDSEYQLPYVLGSAHQGCLPPFPADVFMIPQYGYLTLNNGSQAVGRSSFYCLEYFPSQMLRTGNNFQFTYTFEDVPFHSSYAHSQSLDRLMNPLIDQYLYYLSRTQTTGGTANTQTLGFSQGGPNTMANQAKNWLPGPCYRQQRVSTTTGQNNNSNFAWTAGTKYHLNGRNSLANPGIAMATHKDDKERFFPSNGILIFGKQNAARDNADYSDVMLTSEEEIKATNPVATEEYGIVADNLQQQNTAPQIGTVNSQGALPGMVWQNRDVYLQGPIWAKIPHTDGNFHPSPLMGGFGLKHPPPQILIKNTPVPADPPTTFNQSKLNSFITQYSTGQVSVEIEWELQKENSKRWNPEIQYTSNYYKSTSVDFAVNTEGVYSEPHPIGTRYLTRPL

SEQ ID NO: 1042 - protein, 737 aa, Artificial Sequence
  source: /note="Description of Artificial Sequence: Synthetic polypeptide"
MAADGYLPDWLEDNLSEGIREWWDLKPGAPKPKANQQKQDDGRGLVLPGYKYLGPFNGLDKGEPVNAADAAALEHDKAYDQQLKAGDNPYLRYNHADAEFQERLQEDTSFGGNLGRAVFQAKKRVLEPLGLVEEGANTAPGKKRPVEQSPQEPDSSAGIGKSGAQPAKKRLNFGQTGDTESVPDPQPIGEPPAAPSGVGSLTMASGGGAPVADNNEGADGVGSSSGNWHCDSQWLGDRVITTSTRTWALPTYNNHLYKQISNSTSGGSSNDNAYFGYSTPWGYFDFNRFHCHFSPRDWQRLINNNWGFRPKRLNFKLFNIQVKEVTDNNGVKTIANNLTSTIQVFTDSEYQLPYVLGSAHQGCLPPFPADVFMIPQYGYLTLNNGSQAVGRSSFYCLEYFPSQMLRTGNNFQFTYTFEDVPFHSSYAHSQSLDRLMNPLIDQYLYYLSRTQTTGGTANTQTLGFSQGGPNTMANQAKNWLPGPCYRQQRVSTTTGQNNNSNFAWTAGTKYHLNGRNSLANPGIAMASHKDDKERFFPSNGILIFGKQNAARDNADYSDVMLTSEEEIKTTNPVATEEYGIVADNLQQQNTAPQIGTVNSQGALPGMVWQNRDVYLQGPIWAKIPHTDGNFHPSPLMGGFGLKHPPPQILIKNTPVPADPPTTFNQSKLNSFITQYSTGQVSVEIEWELQKENSKRWNPEIQYTTNYYKSTSVDFAVNTEGVYSEPHPIGTRYLTRPL

SEQ ID NO: 1043 - protein, 736 aa, Artificial Sequence
  source: /note="Description of Artificial Sequence: Synthetic polypeptide"
MAADGYLPDWLEDNLSEGIREWWALKPGAPKPKANQQKQDDGRGLVLPGYKYLGPFNGLDKGEPVNEADAAALEHDKAYDQQLKAGDNPYLRYNHADAEFQERLQEDTSFGGNLGRAVFQAKKRVLEPLGLVEEGAKTAPGKKRPVEQSPQEPDSSSGIGKTGQQPAKKRLNFGQTGDSESVPDPQPLGEPPATPAAVGPTTMASGGGAPMADNNEGADGVGNASGNWHCDSTWLGDRVITTSTRTWALPTYNNHLYKQISSASTGASNDNHYFGYSTPWGYFDFNRFHCHFSPRDWQRLINNNWGFRPKRLNFKLFNIQVKEVTQNEGTKTIANNLTSTIQVFTDSEYQLPYVLGSAHQGCLPPFPADVFMIPQYGYLTLNNGSQAVGRSSFYCLEYFPSQMLRTGNNFQFTYTFEDVPFHSSYAHSQSLDRLMNPLIDQYLYYLSRTQTTGGTANTQTLGFSQGGPNTMANQAKNWLPGPCYRQQRVSTTTGQNNNSNFAWTAGTKYHLNGRNSLANPGIAMATHKDDKERFFPSNGILIFGKQNAARDNADYSDVMLTSEEEIKTTNPVATEEYGIVADNLQQQNTAPQIGTVNSQGALPGMVWQNRDVYLQGPIWAKIPHTDGNFHPSPLMGGFGLKHPPPQILIKNTPVPADPPTTFNQSKLNSFITQYSTGQVSVEIEWELQKENSKRWNPEIQYTSNYYKSTSVDFAVNTEGVYSEPHPIGTRYLTRPL

SEQ ID NO: 1044 - protein, 736 aa, Artificial Sequence
  source: /note="Description of Artificial Sequence: Synthetic polypeptide"
MAADGYLPDWLEDNLSEGIREWWALKPGAPKPKANQQKQDDGRGLVLPGYKYLGPFNGLDKGEPVNEADAAALEHDKAYDQQLKAGDNPYLRYNHADAEFQERLQEDTSFGGNLGRAVFQAKKRVLEPFGLVEEGAKTAPGKKRPVEQSPQEPDSSSGIGKTGQQPAKKRLNFGQTGDSESVPDPQPLGEPPATPAAVGPTTMASGGGAPMADNNEGADGVGNASGNWHCDSQWLGDRVITTSTRTWALPTYNNHLYKQISSASTGASNDNHYFGYSTPWGYFDFNRFHCHFSPRDWQRLINNNWGFRPKRLNFKLFNIQVKEVTDNNGVKTIANNLTSTVQVFSDSEYQLPYVLGSAHQGCLPPFPADVFMIPQYGYLTLNNGSQAVGRSSFYCLEYFPSQMLRTGNNFQFTYTFEDVPFHSSYAHSQSLDRLMNPLIDQYLYYLSRTQTTGGTANTQTLGFSQGGPNTMANQAKNWLPGPCYRQQRVSTTTGQNNNSNFAWTAGTKYHLNGRNSLANPGIAMATHKDDKERFFPSNGILIFGKQNAARDNADYSDVMLTSEEEIKTTNPVATEEYGIVADNLQQQNTAPQIGTVNSQGALPGMVWQNRDVYLQGPIWAKIPHTDGNFHPSPLMGGFGLKHPPPQILIKNTPVPADPPTTFNQSKLNSFITQYSTGQVSVEIEWELQKENSKRWNPEIQYTSNYYKSTSVDFAVNTEGVYSEPHPIGTRYLTRPL

SEQ ID NO: 1045 - protein, 736 aa, Artificial Sequence
  source: /note="Description of Artificial Sequence: Synthetic polypeptide"
MAADGYLPDWLEDTLSEGIRQWWKLKPGPPPPKPAERHKDDSRGLVLPGYKYLGPFNGLDKGEPVNEADAAALEHDKAYDRQLDSGDNPYLKYNHADAEFQERLKEDTSFGGNLGRAVFQAKKRVLEPFGLVEEGAKTAPGKKRPVEQSPQEPDSSSGIGKTGQQPAKKRLNFGQTGDSESVPDPQPLGEPPATPAAVGPTTMASGGGAPMADNNEGADGVGNASGNWHCDSTWLGDRVITTSTRTWALPTYNNHLYKQISSASTGASNDNHYFGYSTPWGYFDFNRFHCHFSPRDWQRLINNNWGFRPKRLNFKLFNIQVKEVTDNNGVKTIANNLTSTVQVFTDSDYQLPYVLGSAHEGCLPPFPADVFMIPQYGYLTLNNGSQAVGRSSFYCLEYFPSQMLRTGNNFQFTYTFEDVPFHSSYAHSQSLDRLMNPLIDQYLYYLSRTQTTGGTANTQTLGFSQGGPNTMANQAKNWLPGPCYRQQRVSTTTGQNNNSNFAWTAGTKYHLNGRNSLANPGIAMATHKDDKERFFPSNGILIFGKQNAARDNADYSDVMLTSEEEIKTTNPVATEEYGIVADNLQQQNTAPQIGTVNSQGALPGMVWQNRDVYLQGPIWAKIPHTDGNFHPSPLMGGFGLKHPPPQILIKNTPVPADPPTTFNQSKLNSFITQYSTGQVSVEIEWELQKENSKRWNPEIQYTSNYYKSTSVDFAVNTEGVYSEPHPIGTRYLTRNL

SEQ ID NO: 1046 - protein, 738 aa, Artificial Sequence
  source: /note="Description of Artificial Sequence: Synthetic polypeptide"
MAADGYLPDWLEDNLSEGIREWWDLKPGAPKPKANQQKQDDGRGLVLPGYKYLGPFNGLDKGEPVNAADAAALEHDKAYDQQLQAGDNPYLRYNHADAEFQERLQEDTSFGGNLGRAVFQAKKRVLEPLGLVEEGAKTAPGKKRPVEPSPQRSPDSSTGIGKKGQQPARKRLNFGQTGDSESVPDPQPLGEPPAAPSGVGPNTMAAGGGAPMADNNEGADGVGSSSGNWHCDSQWLGDRVITTSTRTWALPTYNNHLYKQISNSTSGGSSNDNAYFGYSTPWGYFDFNRFHCHFSPRDWQRLINNNWGFRPKRLSFKLFNIQVKEVTQNEGTKTIANNLTSTIQVFTDSEYQLPYVLGSAHQGCLPPFPADVFMIPQYGYLTLNNGSQAVGRSSFYCLEYFPSQMLRTGNNFTFSYTFEDVPFHSSYAHSQSLDRLMNPLIDQYLYYLSRTQTTGGTANTQTLGFSQGGPNTMANQAKNWLPGPCYRQQRVSTTTGQNNNSNFAWTAGTKYHLNGRNSLANPGIAMATHKDDKERFFPSNGILIFGKQNAARDNADYSDVMLTSEEEIKTTNPVATEEYGIVADNLQQQNTAPQIGTVNSQGALPGMVWQNRDVYLQGPIWAKIPHTDGNFHPSPLMGGFGLKHPPPQILIKNTPVPADPPTTFNQSKLNSFITQYSTGQVSVEIEWELQKENSKRWNPEIQYTSNYYKSTSVDFAVNTEGVYSEPHPIGTRYLTRPL

SEQ ID NO: 1047 - protein, 737 aa, Artificial Sequence
  source: /note="Description of Artificial Sequence: Synthetic polypeptide"
MAADGYLPDWLEDNLSEGIREWWDLKPGAPKPKANQQKQDDGRGLVLPGYKYLGPFNGLDKGEPVNAADAAALEHDKAYDQQLKAGDNPYLRYNHADAEFQERLQEDTSFGGNLGRAVFQAKKRVLEPFGLVEEGAKTAPGKKRPVEQSPQEPDSSSGIGKTGQQPAKKRLNFGQTGDSESVPDPQPLGEPPATPAAVGPTTMASGGGAPMQDNNEGADGVGSSSGNWHCDSTWLGDRVITTSTRTWALPTYNNHLYKQISNGTSGGATNDNTYFGYSTPWGYFDFNRFHCHFSPRDWQRLINNNWGFRPKRLNFKLFNIQVKEVTQNEGTKTIANNLTSTIQVFTDSEYQLPYVLGSAHQGCLPPFPADVFMIPQYGYLTLNNGSQAVGRSSFYCLEYFPSQMLRTGNNFTFSYTFEDVPFHSSYAHSQSLDRLMNPLIDQYLYYLSRTQTTGGTANTQTLGFSQGGPNTMANQAKNWLPGPCYRQQRVSTTTGQNNNSNFAWTAGTKYHLNGRNSLANPGIAMATHKDDKERFFPSNGILIFGKQNAARDNADYSDVMLTSEEEIKTTNPVATEEYGIVADNLQQQNTAPQIGTVNSQGALPGMVWQNRDVYLQGPIWAKIPHTDGNFHPSPLMGGFGLKHPPPQILIKNTPVPADPPTTFNQSKLNSFITQYSTGQVSVEIEWELQKENSKRWNPEIQYTSNYYKSTSVDFAVNTEGVYSEPHPIGTRYLTRPL

SEQ ID NO: 1048 - protein, 736 aa, Artificial Sequence
  source: /note="Description of Artificial Sequence: Synthetic polypeptide"
MAADGYLPDWLEDNLSEGIREWWALKPGAPKPKANQQKQDDGRGLVLPGYKYLGPFNGLDKGEPVNAADAAALEHDKAYDQQLKAGDNPYLRYNHADAEFQERLQEDTSFGGNLGRAVFQAKKRVLEPLGLVEEGAKTAPGKKRPVEQSPQEPDSSSGIGKTGQQPAKKRLNFGQTGDSESVPDPQPLGEPPATPAAVGPTTMASGGGAPMADNNEGADGVGSSSGNWHCDSTWLGDRVITTSTRTWALPTYNNHLYKQISSASTGASNDNHYFGYSTPWGYFDFNRFHCHFSPRDWQRLINNNWGFRPKRLNFKLFNIQVKEVTDNNGVKTIANNLTSTVQVFTDSDYQLPYVLGSAHEGCLPPFPADVFMIPQYGYLTLNNGSQAVGRSSFYCLEYFPSQMLRTGNNFTFSYTFEDVPFHSSYAHSQSLDRLMNPLIDQYLYYLSRTQTTGGTANTQTLGFSQGGPNTMANQAKNWLPGPCYRQQRVSTTTGQNNNSNFAWTAGTKYHLNGRNSLANPGIAMATHKDDKERFFPSNGILIFGKQNAARDNADYSDVMLTSEEEIKTTNPVATEEYGIVADNLQQQNTAPQIGTVNSQGALPGMVWQNRDVYLQGPIWAKIPHTDGNFHPSPLMGGFGLKHPPPQILIKNTPVPADPPTTFNQSKLNSFITQYSTGQVSVEIEWELQKENSKRWNPEIQYTSNYYKSTSVDFAVNTEGVYSEPHPIGTRYLTRPL

SEQ ID NO: 1049 - protein, 737 aa, Artificial Sequence
  source: /note="Description of Artificial Sequence: Synthetic polypeptide"
MAADGYLPDWLEDNLSEGIREWWDLKPGAPKPKANQQKQDDGRGLVLPGYKYLGPFNGLDKGEPVNAADAAALEHDKAYDQQLKAGDNPYLRYNHADAEFQERLQEDTSFGGNLGRAVFQAKKRVLEPLGLVEEGAKTAPGKKRPVEPSPQRSPDSSTGIGKKGQQPARKRLNFGQTGDSESVPDPQPLGEPPATPAAVGPTTMASGGGAPMADNNEGADGVGNASGNWHCDSTWLGDRVITTSTRTWALPTYNNHLYKQISSASTGASNDNHYFGYSTPWGYFDFNRFHCHFSPRDWQRLINNNLGSRPKRLNFKLFIIQVKEVTTNDGVTTIANNLTSTVQVFSDSEYQLPYVLGSAHQGCLPPFPADVFMIPQYGYLTLNNGSQAVGRSSFYCLEYFPSQMLRTGNNFTFSYTFEDVPFHSSYAHSQSLDRLMNPLIDQYLYYLNRTQNQSGSAQNKDLLFSRGSPAGMSVQPKNWLPGPCYRQQRVSKTKTDNNNSNFTWTGASKYNLNGRESIINPGTAMASHKDDKDKFFPMSGVMIFGKESAGASNTALDNVMITDEEEIKATNPVATERFGTVAVNLQSSSTDPATGDVHVMGALPGMVWQDRDVYLQGPIWAKIPHTDGHFHPSPLMGGFGLKHPPPQILIKNTPVPANPPAEFSATKFASFITQYSTGQVSVEIEWELQKENSKRWNPEVQYTSNYAKSANVDFTVDNNGLYTEPRPIGTRYLTRPL

SEQ ID NO: 1050 - protein, 736 aa, Artificial Sequence
  source: /note="Description of Artificial Sequence: Synthetic polypeptide"
MAADGYLPDWLEDNLSEGIREWWALKPGAPKPKANQQKQDDGRGLVLPGYKYLGPFNGLDKGEPVNAADAAALEHDKAYDQQLKAGDNPYLRYNHADAEFQERLQEDTSFGGNLGRAVFQAKKRLLEPLGLVEEAAKTAPGKKRPVEQSPQEPDSSSGIGKTGQQPAKKRLNFGQTGDSESVPDPQPIGEPPATPAAVGPTTMASGGGAPMADNNEGADGVGNSSGNWHCDSTWLGDRVITTSTRTWALPTYNNHLYKQISSASTGASNDNHYFGYSTPWGYFDFNRFHCHFSPRDWQRLINNNWGFRPKRLNFKLFNIQVKEVTQNEGTKTIANNLTSTIQVFTDSEYQLPYVLGSAHQGCLPPFPADVFMIPQYGYLTLNNGSQAVGRSSFYCLEYFPSQMLRTGNNFTFSYTFEDVPFHSSYAHSQSLDRLMNPLIDQYLYYLSRTQTTGGTANTQTLGFSQGGPNTMANQAKNWLPGPCYRQQRVSTTTGQNNNSNFAWTAGTKYHLNGRNSLANPGIAMATHKDDKERFFPSNGILIFGKQNAARDNADYSDVMLTSEEEIKTTNPVATEEYGIVADNLQQQNTAPQIGTVNSQGALPGMVWQNRDVYLQGPIWAKIPHTDGNFHPSPLMGGFGLKHPPPQILIKNTPVPADPPTTFNQSKLNSFITQYSTGQVSVEIEWELQKENSKRWNPEIQYTSNYYKSTSVDFAVNTEGVYSDPHPIGTRYLTRPL

SEQ ID NO: 1051 - protein, 736 aa, Artificial Sequence
  source: /note="Description of Artificial Sequence: Synthetic polypeptide"
MAADGYLPDWLEDNLSEGIREWWALKPGAPKPKANQQEQDDGRGLVLPGYKYLGPFNGLDKGEPVNAADAAALEHDKAYDQQLKAGDNPYLRYNHADAEFQERLQEDTSFGGNLGRAVFQAKKRVLEPFGLVEEGAKTAPGKKRPVEQSPQEPDSSSGIGKTGQQPAKKRLNFGQTGDSESVPDPQPLGEPPAAPSGVGPNTMAAGGGAPMADNNEGADGVGSSSGNWHCDSTWLGDRVITTSTRTWALPTYNNHLYKQISSASTGASNDNHYFGYSTPWGYFDFNRFHCHFSPRDWQRLINNNWGFRPKRLNFKLFNIQVKEVTQNEGTKTIANNLTSTIQVFTDSEYQLPYVLGSAHQGCLPPFPADVFMIPQYGYLTLNNGSQAVGRSSFFCLEYFPSQMLRTGNNFTFSYTFEDVPFHSSYAHSQSLDRLMNPLIDQYLYYLSRTQTTGGTANTQTLGFSQGGPNTMANQAKNWLPGPCYRQQRVSTTTGQNNNSNFAWTAGTKYHLNGRNSLANPGIAMATHKDDKERFFPSNGILIFGKQNAARDNADYSDVMLTSEEEIKTTNPVATEEYGIVADNLQQQNTAPQIGTVNSQGALPGMVWQNRDVYLQGPIWAKIPHTDGNFHPSPLMGGFGLKHPPPQILIKNTPVPADPPTTFNQSKLNSFITQYSTGQVSVEIEWELQKENSKRWNPEIQYTSNYYKSTSVDFAVNTEGVYSEPHPIGTRYLTRPL

SEQ ID NO: 1052 - protein, 736 aa, Artificial Sequence
  source: /note="Description of Artificial Sequence: Synthetic polypeptide"
MAADGYLPDWLEDNLSEGIREWWDLKPGAPKPKANQQKQDDGRGLVLPGYKYLGPFNGLDKGEPVNAADAAALEHDKAYDQQLKAGDNPYLRYNHADAEFQERLQEDTSFGGNLGRAVFQAKKRVLEPLGLVEEGAKTAPGKKRPVEQSPQEPDSSSGIGKTGQQPAKKRLNFGQTGDSESVPDPQPLGEPPATPAAVGPTTMASGGGAPMADNNEGADGVGNASGNWHCDSTWLGDRVITTSTRTWALPTYNNHLYKQISSASTGASNDNHYFGYSTPWGYFDFNRFHCHFSPRDWQRLINNNWGFRPKRLNFKLFNIQVKEVTTNDGVTTIANNLTSTVQVFSDSEYQLPYVLGSAHQGCLPPFPADVFMIPQYGYLTLNNGSQAVGRSSFYCLEYFPSQMLRTGNNFTFSYTFEDVPFHSSYAHSQSLDRLMNPLIDQYLYYLNRTQNQSGSAQNKDLLFSRGSPAGMSVQPKNWLPGPCYRQQRVSKTKTDNNNSNFTWTGASKYNLNGRESIINPGTAMASHKDDKDKFFPMSGVMIFGKESAGASNTALDNVMITDEEEIKATNPVATERFGTVAVNLQNSSTDPATGDVHVMGALPGMVWQDRDVYLQGPIWAKIPHTDGHFHPSPLMGGFGLKHPPPQILIKNTPVPANPPAEFSATKFASFITQYSTGQVSVEIEWELQKENSKRWNPEVQYTSNYAKSANVDFTVDNNGLYTVPRPIGTRYLTRPL

SEQ ID NO: 1053 - protein, 736 aa, Artificial Sequence
  source: /note="Description of Artificial Sequence: Synthetic polypeptide"
MAADGYLPDWLEDNLSEGIREWWALKPGAPKPKANQQKQDDGRGLVLPGYKYLGPFNGLDKGEPVNAADAAALEHDKAYDQQLKAGDNPYLRYNHADAEFQERLQEDTSFGGNLGRAVFQAKKRLLEPLGLVEEGAKTAPGKKRPVEQSPQEPDSSSGIGKTGEQPAKKRLNFGQTGDSESVPDPQPLGEPPATPAAVGPTTMASGGGAPMADNNEGADGVGSASGNWHCDSTWLGDRVITTSTRTWALPTYNNHLYKQISSASTGASNDNHYFGYSTPWGYFDFNRFHCHFSPRDWQRLINNNWGFRPKRLNFKLFNIQVKEVTDNNGVKTIANNLTSTIQVFTDSEYQLPYVLGSAHQGCLPPFPADVFMIPQYGYLTLNNGSQAVGRSSFYCLEYFPSQMLRTGNNFPFSYTFEDVPFHSSYAHSQSLDRLMNPLIDQYLYYLSRTQTTGGTANTQTLGFSQGGPNTMANQAKNWLPGPCYRQQRVSTTTGQNNNSNFAWTAGTKYHLNGRNSLANPGIAMATHKDDKERFFPSNGILIFGKQNAARDNADYSDVMLTSEEEIKTTNPVATEEYGIVADNLQQQNTAPQIGTVNSQGALPGMVWQNRDVYLQGPIWAKIPHTDGNFHPSPLMGGFGLKHPPPQILIKNTPVPADPPTTFNQSKLNSFITQYSTGQVSVEIEWELQKENSKRWNPEIQYTSNYYKSTSVDFAVNTEGVYSEPHPIGTRYLTRPL

SEQ ID NO: 1054 - protein, 736 aa, Artificial Sequence
  source: /note="Description of Artificial Sequence: Synthetic polypeptide"
MAADGYLPDWLEDNLSEGIREWWALKPGAPKPKANQQKQDDGRGLVLPGYKYLGPFNGLDKGEPVNAADAAALEHDKAYDQQLKAGDNPYLRYNHADAEFQERLQEDTSFGGNLGRAVFQAKKRVLEPLGLVEEGAKTAPGKKRPVEQSPQEPDSSSGIGKTGQQPAKKRLNFGQTGDSESVPDPQPLGEPPATPAAVGPTTMASGGGAPMADNNEGADGVGSSSGNWHCDSQWLGDRVITTSTRTWALPTYNNHLYKQISSASTGASNDNHYFGYSTPWGYFDFNRFHCHFSPRDWQRLINNNWGFRPKRLNFKLFNIQVKEVTDNNGVKTIANNLTSTVQVFTDSEYQLPYVLGSAHQDCLPPFPADVFMIPQYGYLTLNNGSQAVGRSSFYCLEYFPSQMLRTGNNFTFSYTFEDVPFHSSYAHSQSLDRLMNPLIDQYLYYLSRTQTTGGTANTQTLGFSQGGPNTMANQAKNWLPGPCYRQQRVSTTTGQNNNSNFAWTAGTKYHLNGRNSLANPGIAMATHKDDKERFFPSNGILIFGKQNAARDNADYSDVMLTSEEEIKTTNPVATEEYGIVADNLQQQNTAPQIGTVNSQGALPGMVWQNRDVYLQGPIWAKIPHTDGNFHPSPLMGGFGLKHPPPQILIKNTPVPADPPTTFNQSKLNSFITQYSTGQVSVEIEWELQKENSKRWNPEIQYTSNYYKSTSVDFAVNTEGVYSEPHPIGTRYLTRPL

SEQ ID NO: 1055 - protein, 735 aa, Artificial Sequence
  source: /note="Description of Artificial Sequence: Synthetic polypeptide"
MAADGYLPDWLEDNLSEGIREWWDLKPGAPKPKANQQKQDDGRGLVLPGYKYLGPFNGLDKGEPVNAADAAALEHDKAYDQQLKAGDNPYLRYNHADAEFQERLQEDTSFGGNLGRAVFQAKKRVLEPLGLVEEGAKTAPGKKRPVEQSPQEPDSSSGIGKTGQQPAKKRLNFGQTGDSESVPDPQPLGEPPATPAAVGPTTMASGGGAPMADNNEGADGVGNASGNWHCDSTWLGDVITTSTRTWALPTYNNHLYKQISSASTGASNDNHYFGYSTPWGYFDFNRFHCHFSPRDWQRLINNNWGFRPKRLNFKLFNIQVKEVTQNEGTKTIANNLTSTIQVFTDSEYQLPYVLGSAHQGCLPPFPADVFMIPQYGYLTLNNGSQAVGRSSFYCLEYFPSQMLRTGNNFQFTYTFEDVPFHSSYAHSQSLDRLMNPLIDQYLYYLSRTQTTGGTANTQTLGFSQGGPNTMANQAKNWLPGPCYRQQRVSTTTGQNNNSNFAWTAGTKYHLNGRNSLANPGIAMATHKDDKERFFPSNGILIFGKQNAARDNADYSDVILTSEEEIKTTNPVATEEYGIVADNLQQQNTAPQIGTVNSQGALPGMVWQNRDVYLQGPIWAKIPHTDGNFHPSPLMGGFGLKHPPPQILIKNTPVPADPPTTFNQSKLNSFITQYSTGQVSVEIEWELQKENSKRWNPEIQYTSNYYKSTSVDFAVNTEGVYSEPHPIGTRYLTRPL

SEQ ID NO: 1056 - protein, 736 aa, Artificial Sequence
  source: /note="Description of Artificial Sequence: Synthetic polypeptide"
MAADGYLPDWLEDTLSEGIRQWWKLKPGPPPPKPAERHKDDSRGLVLPGYKYLGPFNGLDKGEPVNEADAAALEHDKAYDRQLDSGDNPYLKYNHADAEFQERLKEDTSFGGNLGRAVFQAKKRVLEPFGLVEEGAKTAPGKKRPVEQSPQEPDSSSGIGKTGQQPAKKRLNFGQTGDSESVPDPQPLGEPPATPAAVGPTTMASGGGAPMADNNEGADGVGNASGNWHCDSTWLGDRVITTSTRTWALPTYNNHLYKQISSTSTGASNDNHYFGYSTPWGYFDFNRFHCHFSPRDWQRLINNNWGFRPKRLNFKLFNIQVKEVTDNNGVKTIANNLTSTVQVFTDSEYQLPYVLGSAHQGCLPPFPADVFMIPQYGYLTLNNGSQAVGRSSFYCLEYFPSQMLRTGNNFTFSYTFEDVPFHSSYAHSQSLDRLMNPLIDQYLYYLSRTQTTGGTANTQTLGFSQGGPNTMANQAKNWLPGPCYRQQRVSTTTGQNNNSNFAWTAGTKYHLNGRNSLANPGIAMATHKDDKERFFPSNGILIFGKQNAARDNADYSDVMLTSEEEIKTTNPVATEEYGIVADNLQQQNTAPQIGTVNSQGALPGMVWQNRDVYLQGPIWAKIPHTDGNFHPSPLMGGFGLKHPPPQILIKNTPVPADPPTTFNQSKLNSFITQYSTGQVSVEIEWELQKENSKRWNPEIQYTSNYYKSTSVDFAVNTEGVYSEPHPIGTRYLTRPL

SEQ ID NO: 1057 - protein, 735 aa, Artificial Sequence
  source: /note="Description of Artificial Sequence: Synthetic polypeptide"
MAADGYLPDWLEDNLSEGIREWWDLKPGAPKPKANQQKQDDGRGLVLPGYKYLGPFNGLDKGEPVNAADAAALEHDKAYDRQLDSGDNPYLRYNHADAEFQERLKEDTSFGGNLGRAVFQAKKRVLEPFGLVEEGAKTAPGKKRPVEQSPQEPDSSSGIGKTGQQPAKKRLNFGQTGDSESVPDPQPLGEPPATPAAVGPTTMASGGGAPMADNNEGADGVGNASGNWHCDSTWLGDRVITTSTRTWALPTYNNHLYKQISSASTGASNDNHYFGYSTPWGYFDFNRFHCHFSPRDWQRLINNNWGFRPKRLNFKLFNIQVKEVTQNEGTKTIANNLTSTIQVFTDSEYQLPYVLGSAHQGCLPPFPADVFMIPQYGYLTLNNGSQAVGRSSFYCLEYFPSQMLRTGNNFQFTYTFEDVPFHSSYAHSQSLDRLMNPLIDQYLYYLSRTQTTGGTANTQTLGFSQGGPNTMANQAKNWLPGPCYRQQRVSTTTGQNNNSNFAWTAGTKYHLNGRNSLANPGIAMATHKDDRSVFFQYRDPDFGKQNAARDNADYSDVMLTSEEEIKTTNPVATEEYGIVADNLQQQNTAPQIGTVNSQGALPGMVWQNRDVYLQGPIWAKIPHTDGNFHPSPLMGGFGLKHPPPQILIKNTPVPADPPTTFNQSKLNSFITQYSTGQVSVEIEWELQKENSKRWNPEIQYTSNYYKSTSVDFAVNTEGVYSEPHPIGTRYLTRPL

SEQ ID NO: 1058 - protein, 736 aa, Artificial Sequence
  source: /note="Description of Artificial Sequence: Synthetic polypeptide"
MAADGYLPDWLEDNLSEGIREWWALKPGAPKPKANQQKQDDGRGLVLPGYKYLGPFNGLDKGEPVNAADAAALEHDKAYDQQLKAGDNPYLKYNHADAEFQERLQGDTSFGGNLGRAVFQAKKRVLEPLGLVEEAAKTAPGKKRPVEQSPQEPDSSAGIGKSGAQPAKKRLNFGQTGDTESVPDPQPLGEPPAAPSGVGPNTMAAGGGAPMADNNEGADGVGSSSGNWHCDSQWLGDRVITTSTRTWALPTYNNHLYKQISSASTGASNDNHYFGYSTPWGYFDFNRFHCHFSPRDWQRLINNNWGFRPKRLNFKLFNIQVKEVTDNNGVKTIANNLTSTVQVFTDSDYQLPYVLGSAHEGCLPPFPADVFMIPQYGYLTLNNGSQAVGRSSFYCLEYFPSQMLRTGNNFQFTYTFEDVPFHSSYAHSQSLDRLMNPLIDQYLYYLSRTQTTGGTANTQTLGFSQGGPNTMANQAKNWLPGPCYRQQRVSTTTGQNNNSNFAWTAGTKYHLNGRNSLANPGIAMATHKDDKERFFPSNGILIFGKQNAARDNADYSDVMLTSEEEIKTTNPVATEEYGIVADNLQQQNTAPQIGTVNSQGALPGMVWQNRDVYLQGPIWAKIPHTDGNFHPSPLMGGFGLKHPPPQILIKNTPVPADPPTTFNQSKLNSFITQYSTGQVSVEIEWELQKENSKRWNPEIQYTSNYYKSTSVDFAVNTEGVYSEPHPIGTRYLTRPL

SEQ ID NO: 1059 - protein, 736 aa, Artificial Sequence
  source: /note="Description of Artificial Sequence: Synthetic polypeptide"
MAADGYLPDWLEDTLSEGIRQWWKLKPGPPPPKPAERHKDDSRGLVLPGYKYLGPFNGLDKGEPVNEADAAALEHDKAYDRQLDSGDNPYLKYNHADAEFQERLKEDTSFGGNLGRAVFQAKKRVLEPFGLVEEAAKTAPGKKRPVEQSPQEPDSSSGIGKTGQQPAKKRLNFGQTGDSESVPDPQPLGEPPATPAAVGPTTMASGGGAPMADNNEGADGVGNASGNWHCDSTWLGDRVITTSTRTWALPTYNNHLYKQISSASTGASNDNHYFGYSTPWGYFDFNRFHCHFSPRDWQRLINNNWGFRPKRLNFKLFNIQVKEVTDNNGVKTIANNLTSTVQVFTDSDYQLPYVLGSAHEGCLPPFPADVFMIPQYGYLTLNNGSQAVGRSSFYCLEYFPSQMLRTGNNFTFSYTFEDVPFHSSYAHSQSLDRLMNPLIDQYLYYLSRTQTTGGTANTQTLGFSQGGPNTMANQAKNWLPGPCYRQQRVSTTTGQNNNSNFAWTAGTKYHLNGRNSLANPGIAMATHKDDKERFFPSNGILIFGKQNAARDNADYSDVMLTSEEEIKTTNPVATEEYGIVADNLQQQNTAPQIGTVNSQGALPGMVWQNRDVYLQGPIWAKIPHTDGNFHPSPLMGGFGLKHPPPQILIKNTPVPADPPTTFNQSKLNSFITQYSTGQVSVEIEWELQKENSKRWNPEIQYTSNYYKSTSVDFAVNTEGVYSEPHPIGTRYLTRPL

SEQ ID NO: 1060 - protein, 736 aa, Artificial Sequence
  source: /note="Description of Artificial Sequence: Synthetic polypeptide"
MAADGYLPDWLEDNLSEGIREWWALKPGAPKPKANQQKQDDGRGLVLPGYKYLGPFNGLDKGEPVNAADAAALEHDKAYDQQLKAGDNPYLRYNHADAEFQERLQEDTSFGGNLGRAVFQAKKRVLEPLGLVEEGAKTAPGKKRPVEQSPQEPDSSSGIGKTGQQPAKKRLNFGQTGDSESVPDPQPLGEPPATPAAVGPTTMASGGGAPMADNNEGADGVGSSSGNWHCDSTWLGDRVITTSTRTWALPTYNNHLYKQISSASTGASNDNHYFGYSTPWGYFDFNRFHCHFSPRDWQRLINNNWGFRPKRLNFKLFNIQVKEVTDNNGVKTIANNLTSTVQVFTDSEYQLPYVLGSAHQGCLPPFPADVFMIPQYGYLTLNNGSQAVGRSSFYCLEYFPSQMLRTGNNFTFSYTFEDVPFHSSYAHSQSLDRLMNPLIDQYLYYLSRTQTTGGTANTQTLGFSQGGPNTMANQAKNWLPGPCYRQQRVSTTTGQNNNSNFAWTAGTKYHLNGRNSLANPGIAMATHKDDKERFFPSNGILIFGKQNAARDNADYSDVMLTSEEEIKTTNPVATEEYGIVADNLQQQNTAPQIGTVNSQGALPGMVWQNRDVYLQGPIWAKIPHTDGNFHPSPLMGGFGLKHPPPQILIKNTPVPADPPTTFNQSKLNSFITQYSTGQVSVEIEWELQKENSKRWNPEIQYTSNYYKSTSVDFAVNTEGVYSEPHPIGTRYLTRPL

SEQ ID NO: 1061 - protein, 737 aa, Artificial Sequence
  source: /note="Description of Artificial Sequence: Synthetic polypeptide"
MAADGYLPDWLEDNLSEGIREWWALKPGAPKPKANQQKQDDGRGLVLPGYKYLGPFNGLDKGEPVNAADAAALEHDKAYDQQLKAGDNPYLRYNHADAEFQERLQEDTSFGGNLGRAVFQAKKRVLEPLGLVEEGAKTAPGKKRPVEQSPQEPDSSSGIGKTGQQPAKKRLNFGQTGDTESVPDPQPIGEPPAAPSGVGSLTMASGGGAPVADNNEGADGVGSSSGNWHCDSQWLGDRVITTSTRTWALPTYNNHLYKQISNSTSGGSSNDNAYFGYSTPWGYFDFNRFHCHFSPRDWQRLINNNWGFRPKRLNFKLFNIQVKEVTQNEGTKTIANNLTSTIQVFTDSEYQLPYVLGSAHQGCLPPFPADVFMIPQYGYLTLNNGSQAVGRSSFYCLEYFPSQMLRTGNNFQFTYTFEDVPFHSSYAHSQSLDRLMNPLIDQYLYYLSRTQTTGGTANTQTLGFSQGGPNTMANQAKNWLPGPCYRQQRVSTTTGQNNNSNFAWTAGTKYHLNGRNSLANPGIAMATHKDDKERFFPSNGILIFGKQNAARDNADYSDVMLTSEEEIKTTNPVATEEYGIVADNLQQQNTAPQIGTVNSQGALPGMVWQNRDVYLQGPIWAKIPHTDGNFHPSPLMGGFGLKHPPPQILIKNTPVPADPPTTFNQSKLNSFITQYSTGQVSVEIEWELQKENSKRWNPEIQYTSNYYKSTSVDFAVNTEGVYSEPHPIGTRYLTRPL

SEQ ID NO: 1062 - protein, 736 aa, Artificial Sequence
  source: /note="Description of Artificial Sequence: Synthetic polypeptide"
MAADGYLPDWLEDNLSEGIREWWALKPGAPKPKANQQKQDDGRGLVLPGYKYLGPFNGLDKGEPVNAADAAALEHDKAYDQQLKAGDNPYLKYNHADAEFQERLQGDTSFGGNLGRAVFQAKKRVLEPLGLVEEAAKTAPGKKRPVEQSPQEPDSSAGIGKSGAQPAKKRLNFGQTGDTESVPDPQPLGEPPAAPSGVGPNTMAAGGGAPMADNNEGADGVGSSSGNWHCDSQWLGDRVITTSTRTWALPTYNNHLYKQISSASTGASNDNHYFGYSTPWGYFDFNRFHCHFSPRDWQRLINNNWGFRPKRLNFKLFNIQVKEVTDNNGVKTIANNLTSTVQVFTDSEYQLPYVLGSAHQGCLPPFPADVFMIPQYGYLTLNNGSQAVGRSSFYCLEYFPSQMLRTGNNFTFSYTFEDVPFHSSYAHSQSLDRLMNPLIDQYLYYLSRTQTTGGTANTQTLGFSQGGPNTMANQAKNWLPGPCYRQQRVSTTTGQNNNSNFAWTAGTKYHLNGRNSLANPGIAMATHKDDKERFFPSNGILIFDKQNAARDNADYSDVMLTSEEEIKTTNPVATEEYGIVADNLQQQNTAPQIGTVNSQGALPGMVWQNRDVYLQGPIWAKIPHTDGNFHPSPLMGGFGLKHPPPQILIKNTPVPADPPTTFNQSKLNSFITQYSTGQVSVEIEWELQKENSKRWNPEIQYTSNYYKSTSVDFAVNTEGVYSEPHPIGTRYLTRPL

SEQ ID NO: 1063 - protein, 736 aa, Artificial Sequence
  source: /note="Description of Artificial Sequence: Synthetic polypeptide"
MAADGYLPDWLEDTLSEGIRQWWKLKPGPPPPKPAERHKDDSRGLVLPGYKYLGPFNGLDKGEPVNEADAAALEHDKAYDRQLDSGDNPYLKYNHADAEFQERLKEDTSFGGNLGRAVFQAKKRVLEPLGLVEEPVKTAPGKKRPVEHSPVEPDSSSGTGKAGQQPARKRLNFGQTGDSESVPDPQPLGEPPATPAAVGPNTMATGSGAPMADNNEGADGVGNSSGNWHCDSTWMGDRVITTSTRTWALPTYNNHLYKQISSASTGASNDNHYFGYSTPWGYFDFNRFHCHFSPRDWQRLINNNWGFRPKRLNFKLFNIQVKEVTDNNGVKTIANNLTSTIQVFTDSEYQLPYVLGSAHQGCLPPFPADVFMIPQYGYLTLNNGSQAVGRSSFYCLEYFPSQMLRTGNNFTFSYTFEDVPFHSSYAHSQSLDRLMNPLIDQYLYYLSRTQTTGGKANTQTLGFSQGGPNTMANQAKNWLPGPCYRQQRVSTTTGQNNNSNFAWTAGTKYHLNGRNSLANPGIAMATHKDDKERFFPSNGILIFGKQNAARDNADYSDVMLTSEEEIKTTNPVATEEYGIVADNLQQQNTAPQIGTVNSQGALPGMVWQNRDVYLQGPIWAKIPHTDGNFHPSPLMGGFGLKHPPPQILIKNTPVPADPPTTFNQSKLNSFITQYSTGQVSVEIEWELQKENSKRWNPEIQYTSNYYKSTSVDFAVNTEGVYSEPHPIGTRYLTRPL

SEQ ID NO: 1064 - protein, 736 aa, Artificial Sequence
  source: /note="Description of Artificial Sequence: Synthetic polypeptide"
MAADGYLPDWLEDNLSEGIREWWALKPGAPKPKANQQKQDDGRGLVLPGYKYLGPFNGLDKGEPVNAADAAALEHDKAYDQQLKAGDNPYLRYNHADAEFQERLQEDTSFGGNLGRAVFQAKKRVLEPFGLVEEGAKTAPGKKRPVEQSPQEPDSSSGIGKTGQQPAKKRLNFGQTGDSESVPDPQPLGEPPATPAAVGPTTMASGGGAPMADNNEGADGVGNASGNWHCDSTWLGDRVITTSTRTWALPTYNNHLYKQISSASTGASNDNHYFGYSTPWGYFDFNRFHCHFSPRDWQRLINNNWGFRPKRLNFKLFNIQVKEVTDNNGVKTIANNLTSTVQVFTDSEYQLPYVLGSAHQGCLPPFPADVFMIPQYGYLTLNNGSQAVGRSSFYCLEYFPSQMLRTGNNFTFSYTFEDVPFHSSYAHSQSLDRLMNPLIDQYLYYLSRTQTTGGTGNTQTLGFSQGGPNTMANQAKNWLPGPCYRQQRVSTTTGQNNNSNFAWTAGTKYHLNGRNSLANPGIAMATHKDDKERFFPSNGILIFGKQNAARDNADYSDVMLTSEEEIKTTNPVATEEYGIVADNLQQQNTAPQIGTVNSQGALPGMVWQNRDVYLQGPIWAKIPHTDGNFHPSPLMGGFGLKHPPPQILIKNTPVPADPPTTFNQSKLNSFITQYSTGQVSVEIEWELQKENSKRWNPEIQYTSNYYKSTSVDFAVNTEGVYSEPHPIGTRYLTRPL

SEQ ID NO: 1065 - protein, 736 aa, Artificial Sequence
  source: /note="Description of Artificial Sequence: Synthetic polypeptide"
MAADGYLPDWLEDNLSEGIREWWDLKPGAPKPKANQQKQDDGRGLVLPGYKYLGPFNGLDKGEPVNAADAAALEHDKAYDQQLKAGDNPYLRYNHADAEFQERLQEDTSFGGNLGRAVFQAKKRVLEPLGLVEEGAKTAPGKKRPVEQSPQEPDSSSGIGKTGQQPAKKRLNFGQTGDSESVPDPQPLGEPPATPAAVGPTTMASGGGAPMADNNEGADGVGSSSGNWHCDSTWLGDRVITTSTRTWALPTYNNHLYKQISSASTGASNDNHYFGYSTPWGYFDFNRFHCHFSPRDWQRLINNNWGFRPKRLNFKLFNIQVKEVTQNEGTKTIANNLTSTIQVFTDSEYQLPYVLGSAHQGCLPPFPADVFMIPQYGYLTLNNGSQAVGRSSFYCLEYFPSQMLRTGNNFTFSYTFEDVPFHSSYAHSQSLDRLMNPLIDQYLYYLSRTQTTGGTANTQTLGFSQGGPNTMANQAKNWLPGPCYRQQRVSTTTGQNNNSNFAWTAGTKYHLNGRNSLANPGIAMATHKDDKERFFPSNGILIFGKQNAARDNADYSDVMLTSEEEIKTTNPVATEEYGIVADNLQQQNTAPQIGTVNSQGALPGMVWQNRDVYLQGPIWAKIPHTDGNFHPSPLMGGFGLKHPPPQILIKNTPVPADPPTTFNQSKLNSFITQYSTGQVSVEIEWELQKENSKRWNPEIQYTSNYYKSTSVDFAVNTEGVYSEPHPIGTRYLTRPL

SEQ ID NO: 1066 - protein, 736 aa, Artificial Sequence
  source: /note="Description of Artificial Sequence: Synthetic polypeptide"
MAADGYLPDWLEDNLSEGIREWWALKPGAPKPKANQQKQDDGRGLVLPGYKYLGPFNGLDKGEPVNAADAAALEHDKAYDQQLKAGDNPYLRYNHADAEFQERLQEDTSFGGNLGRAVFQAKKRVLEPLGLVEEGAKTAPGKKRPVEQSPQEPDSSSGIGKTGQQPAKKRLNFGQTGDSESVPDPQPLGEPPATPAAVGPTTMAAGGGAPMADNNEGADGVGSSSGNWHCDSTWMGDRVITTSTRTWALPTYNNHLYKQISSASTGASNDNHYFGYSTPWGYFDFNRFHCHFSPRDWQRLINNNWGFRPKRLSFKLFNIQVKEVTQNEGTKTIANNLTSTIQVFTDSEYQLPYVLGSAHQGCLPPFPADVFMIPQYGYLTLNNGSQAVGRSSFYCLEYFPSQMLRTGNNFTFSYTFEDVPFHSSYAHSQSLDRLMNPLIDQYLYYLSRTQTTGGTANTQTLGFSQGGPNTMANQAKNWLQGPCYRQQRVSTTTGQNNNSNFAWTAGTKYHLNGRNSLANPGIAMATHKDDKERFFPSNGILIFGKQNAARDNADYSDVMLTSEEEIKTTNPVATEEYGIVADNLQQQNTAPQIGTVNSQGALPGMVWQNLDVYLQGPIWAKIPHTDGNFHPSPLMGGFGLKHPPPQILIKNTPVPADPPTTFNQSKLNSFITQYSTGQVSVEIEWELQKENSKRWNPEIQYTSNYYKSTSVDFAVNTEGVYSEPHPIGTRYLTRPL

SEQ ID NO: 1067 - protein, 737 aa, Artificial Sequence
  source: /note="Description of Artificial Sequence: Synthetic polypeptide"
MAADGYLPDWLEDNLSEGIREWWALKPGAPKPKANQQKQDDGRGLVLPGYKYLGPFNGLDKGEPVNAADAAALEHDKAYDQQLKAGDNPYLRYNHADAEFQERLQEDTSFGGNLGRAVFQAKKRVLEPLGLVEEGAKTAPGKKRPVEPSPQRSPDSSSGIGKTGQQPAKKRLNFGQTGDSESVPDPQPLGEPPATPAAVGPTTMASGGGAPMADNNEGADGVGNASGNWHCDSQWLGDRVITTSTRTWALPTYNNHLYKQISSASTGASNDNHYFGYSTPWGYFDFNRFHCHFSPRDWQRLINNNWGFRPKRLNFKLFNIQVKEVTDNNGVKTIANNLTSTVQVFTDSDYQLPYVLGSAHEGCLPPFPADVFMIPQYGYLTLNNGSQAVGRSSFYCLEYFPSQMLRTGNNFQFTYTFEDVPFHSSYAHSQSLDRLMNPLIDQYLYYLSRTQTTGGTANTQTLGFSQGGPNTMANQAKNWVPGPCYRQQRVSTATGQNNNSNFAWTAGTKYHLKGRNSLANPGIAMATHKDDKERFFPSNGILIFGKQNAARDNADYSDVMLTSEEEIKTTNPVATEEYGIVADNLQQQNTAPQIGTVNSQGALPGMVWQNRDVYLQGPIWAKIPHTDGNFHPSPLMGGFGLKHPPPQILIKNTPVPADPPTTFNQSKLNSFITQYSTGQVSVEIEWELQKENSKRWNPEIQYTSNYYKSTSVDFAVNTEGVYSEPHPIGTRYLTRPL

SEQ ID NO: 1068 - protein, 737 aa, Artificial Sequence
  source: /note="Description of Artificial Sequence: Synthetic polypeptide"
  MOD_RES (226)..(226): Any naturally occurring amino acid
  MOD_RES (233)..(233): Any naturally occurring amino acid
  MOD_RES (239)..(239): Any naturally occurring amino acid
  MOD_RES (250)..(250): Any naturally occurring amino acid
  MOD_RES (253)..(253): Any naturally occurring amino acid
  MOD_RES (255)..(255): Any naturally occurring amino acid
MAADGYLPDWLEDTLSEGIRQWWKLKPGPPPPKPAERHKDDSRGLVLPGYKYLGPFNGLDKGEPVNEADAAALEHDKAYDRQLDSGDNPYLKYNHADAEFQERLKEDTSFGGNLGRAVFQAKKRVLEPLGLVEEGAKTAPGKKRPVEQSPQEPDSSSGIGKTGQQPAKKRLNFGQTGDSESVPDPQPLGEPPATPSGVGPNTMAAGGGAPMADNNEGADGVGSSSXNWHCDSXWLGDRXITTSTRTWALXTYXNXLYKQISNSTSGGATNDNTYFGYSTPWGYFDFNRFHCHFSPRDWQRLINNNWGFRPKRLNFKLFNIQVKEVTQNEGTKTIANNLTSTIQVFTDSEYQLPYVLGSAHQGCLPPFPADVFMIPQYGYLTLNNGSQAVGRSSFYCLEYFPSQMLRTGNNFQFTYTFEDVPFHSSYAHSQSLDRLMNPLIDQYLYYLSRTQTTGGTANTQTLGFSQGGPNTMANQAKNWLPGPCYRQQRVSTTTGQNNNSNFAWTAGTKYHLNGRNSLANPGIAMATHKDDKERFFPSNGILIFGKQNAARDNADYSDVMLTSEEEIKTTNPVATEEYGIVADNLQQQNTAPQIGTVNSQGALPGMVWQNRDVYLQGPIWAKIPHTDGNFHPSPLMGGFGLKHPPPQILIKNTPVPADPPTTFSQAKLASFITQYSTGQVSVEIEWELQKENSKRWNPEVQYTSNYAKSANVDFTVDNNGLYTEPRPIGTRYLTRPL

SEQ ID NO: 1069 - protein, 737 aa, Artificial Sequence
  source: /note="Description of Artificial Sequence: Synthetic polypeptide"
MAADGYLPDWLEDNLSEGIREWWDLKPGAPKPKANQQKQDDGRGLVLPGYKYLGPFNGLDKGEPVNAADAAALEHDKAYDQQLKAGDNPYLRYNHADAEFQERLQEDTSFGGNLGRAVFQAKKRVLEPLGLVEEGAKTAPGKKRPVEPSPQRSPDSSTGIGKKGQQPAKKRLNFGQTGDSESVPDPQPIGEPPAGPSGVGSLTMASGGGAPVADNNEGADGVGSSSGNWHCDSQWLGDRVITTSTRTWALPTYNNHLYKQISSASTGASNDNHYFGYSTPWGYFDFNRFHCHFSPRDWQRLINNNWGFRPKRLNFKLFNIQVKEVTDNDGVKTIANNLTSTIQVFTDSEYQLPYVLGSAHQGCLPPFPADVFMIPQYGYLTLNNGSQAVGRSSFYCLEYFPSQMLRTGNNFTFSYTFEDVPFHSSYAHSQSLDRLMNPLIDQYLYYLSRTQTTGGTANTQTLGFSQGGPNTMANHAKNWLPGPCYRQQRVSTTTGQNNNSNFAWTAGTKYHLNGRNSLANPGIAMATHKDDKERFFPSNGILIFGKQNAARDNADYSDVMLTSEEEIKTTNPVATEEYGIVADNLQQQNTAPQIGTVNSQGALPGMVWQNRDVYLQGPIWAKIPHTDGNFHPSPLMGGFGLKHPPPQILIKNTPVPADPPTTFNQSKLNSFITQYSTGQVSVEIEWELQKENSKRWNPEIQYTSNYYKSTSVDFAVNTEGVYSEPHPIGTRYLTRPL

SEQ ID NO: 1070 - protein, 736 aa, Artificial Sequence
  source: /note="Description of Artificial Sequence: Synthetic polypeptide"
MAADGYLPDWLEDTLSEGIRQWWKLKPGPPPPKPAERHKDDSRGLVLPGYKYLGPFNGLDKGEPVNEADAAALEHDKAYDRQLDSGDNPYLKYNHADAEFQERLKEDTSFGGNLGRAVFQAKKRVLEPLGLVEEPVKTAPGKKRPVEHSPVEPDSSSGTGKAGQQPAKKRLNFGQTGDSESVPDPQPLGEPPATPAAVGPTTMASGGGAPMADNNEGADGVGNASGNWHCDSTWLGDRVITTSTRTWALPTYNNHLYKQISSASTGASNDNHYFGYSTPWGYFDFNRFHCHFSPRDWQRLINNNWGFRPKRLNFKLFNIQVKEVTQNEGTKTIANNLTSTIQVFTDSEYQLPYVLGSAHQGCLPPFPADVFMIPQYGYLTLNNGSQAVGRSSFYCLEYFPSQMLRTGNNFQFTYTFEDVPFHSSYAHSQSLDRLMNPLIDQYLYYLSRTQTTGGTANTQTLGFSQGGPNTMANQAKNWLPGPCYRQQRVSTTTGQNNNSNFAWTAGTKYHLNGRNSLANPGIAMATHKDDKERFFPSNGILIFGKQNAARDNADYSDVMLTSEEEIKTTNPVATEEYGIVADNLQQQNTAPQIGTVNSQGALPGMVWQNRDVYLQGPIWAKIPHTDGNFHPSPLMGGFGLKHPPPQILIKNTPVPADPPTTFNQSKLNSFITQYSTGQVSVEIEWELQKENSKRWNPEIQYTSNYYKSTSVDFAVNTEGVYSEPHPIGTRYLTRPL

SEQ ID NO: 1071 - protein, 736 aa, Artificial Sequence
  source: /note="Description of Artificial Sequence: Synthetic polypeptide"
MAADGYLPDWLEDNLSEGIREWWALKPGAPKPKANQQKQDDGRGLVLPGYKYLGPFNGLDKGEPVNAADAAALEHDKAYDQQLQAGDNPYLRYNHADAEFQERLQGDTSFGGNLGRAVFQAKKRVLEPLGLVEEGAKTAPGKKRPVEQSPQEPDSSSGIGKTGQQPAKKRLNFGQTGDSESVPDPQPLGEPPATPAAVGPTTMASGGGAPMADNNEGADGVGNASGNWHCDSTWLGDRVITTSTRTWALPTYNNHLYKQISSASTGASNDNHYFGYSTPWGYFDFNRFHCHFSPRDWQRLINNNWGFRPKRLNFKLFNIQVKEVTDNNGVKTIANNLTSTIQVFTDSEYQLPYVLGSAHQGCLPPFPADVFMIPQYGYLTLNNGSQAVGRSSFYCLEYFPSQMLRTGNNFQFTYTFEDVPFHSSYAHSQSLDRLMNPLIDQYLYYLSRTQTTGGTANTQTLGFSQGGPNTMANQAKNWLPGPCYRQQRVSTTTGQNNNSNFAWTAGTKYHLNGRNSLANPGIAMATHKDDKERFFPSNGILIFGKQNAARDNADYSDVMLTSEEEIKTTNPVATEEYGIVADNLQQQNTAPQIGTVNSQGALPGMVWQNRDVYLQGPIWAKIPHTDGNFHPSPLMGGFGLKHPPPQILIKNTPVPADPPTTFNQSKLNSFITQYSTGQVSVEIEWELQKENSKRWNPEIQYTSNYYKSTSVDFAVNTEGVYSEPHPIGTRYLTRPL

SEQ ID NO: 1072 - protein, 738 aa, Artificial Sequence
  source: /note="Description of Artificial Sequence: Synthetic polypeptide"
MAADGYLPDWLEDTLSEGIRQWWKLKPGPPPPKPAERHKDDSRGLVLPGYKYLGPFNGLDKGEPVNAADAAALEHDKAYDQQLKAGDNPYLRYNHADAEFQERLKEDTSFGGNLGRAVFQAKKRVLEPLGLVEEGAKTAPGKKRPVEPSPQRSPDSSTGIGKKGQQPARKRLNFGQTGDSESVPDPQPLGEPPAAPSGVGPNTMAAGGGAPMADNNEGADGVGSSSGNWHCDSQWLGDRVITTSTRTWALPTYNNHLYKQISNSTSGGSSNDNAYFGYSTPWGYFDFNRFHCHFSPRDWQRLINNNWGFRPKRLNFKLFNIQVKEVTDNNGVKTIANNLTSTVQVFTDSEYQLPYVLGSAHQGCLPPFPADVFMIPQYGYLTLNNGSQAVGRSSFYCLEYFPSQMLRTGNNFTFSYTFEDVPFHSSYAHSQSLDRLMNPLIDQYLYYLSRTQTTGGTANTQTLGFSQGGPNTMANQAKNWLPGPCYRQQRVSTTTGQNNNSNFAWTAGTKYHLNGRNSLANPGIAMATHKDDKERFFPSNGILIFGKQNAARDNADYSDVMLTSEEEIKTTNPVATEEYGIVADNLQQQNTAPQIGTVNSQGALPGMVWQNRDVYLQGPIWAKIPHTDGHFHPSPLMGGFGLKHPPPQILIKNTPVPANPPTTFNQSKLNSFITQYSTGQVSVEIEWELQKENSKRWNPEVQYTSNYAKSANVDFTVDNNGLYTEPRPIGTRYLTRPL

SEQ ID NO: 1073 - protein, 738 aa, Artificial Sequence; identical to SEQ ID NO: 1072
  source: /note="Description of Artificial Sequence: Synthetic polypeptide"

SEQ ID NO: 1074 - protein, 736 aa, Artificial Sequence
  source: /note="Description of Artificial Sequence: Synthetic polypeptide"
MAADGYLPDWLEDNLSEGIREWWALKPGAPKPKANQQKQDDGRGLVLPGYKYLGPFNGLDKGEPVNAADAAALEHDKAYDQQLKAGDNPYLRYNHADAEFQERLQEDTSFGGNLGRAVFQAKKRLLEPLGLVEEGAKTAPGKKRPVEQSPQEPDSSSGIGKTGQQPAKKRLNFGQTGDSESVPDPQPLGEPPATPAAVGPTTMASGGGAPMADNNEGADGVGNSSGNWHCDSTWMGDRVITTSTRTWALPTYNNHLYKQISSASTGASNDNHYFGYSTPWGYFDFNRFHCHFSPRDWQRLINNNWGFRPKRLNFKLFNIQVKEVTQNEGTKTIANNLTSTIQVFTDSEYQLPYVLGSAHQGCLPPFPADVFIIPQYGYLTLNNGSQAVGRSSFYCLEYFPSQMLRTGNNFTFSYTFEDVPFHSSYAHSQSLDRLMNPLIDQYLYYLSRTQTTGGTANTQTLGFSQGGPNTMANQAKNWLPGPCYRQQRVSTTTGQNNNSNFAWTAGTKYHLNGRNSLANPGIAMATHKDDKERFFPSNGILIFGKQNAARDNADYSDVMLTSEEEIKTTNPVATEEYGIVADNLQQQNTAPQIGTVNSQGALPGMVWQNRDVYLQGPIWAKIPHTDGNFHPSPLMGGFGLKHPPPQILIKNTPVPADPPTTFNQSKLNSFITQYSTGQVSVEIEWELQKENSKRWNPEIQYTSNYYKSTSVDFAVNTEGVYSEPHPIGTRYLTRPL

SEQ ID NO: 1075 - protein, 736 aa, Artificial Sequence
  source: /note="Description of Artificial Sequence: Synthetic polypeptide"
MAADGYLPDWLEDNLSEGIREWWALKPGAPKPKANQQKQDDGRGLVLPGYKYLGPFNGLDKGEPVNAADAAALEHDKAYDQQLKAGDNPYLRYNHADAEFQERLQEDTSFGGNLGRAVFQAKKRVLEPFGLVEEAAKTAPGKKRPVEQSPQEPDSSSGIGKTGQQPAKKRLNFGQTGDSESVPDPQPLGEPPATPAAVGPTTMASGGGAPMADNNEGADGVGNASGNWHCDSTWLGDRVITTSTRTWALPTYNNHLYKQISSASTGASNDNHYFGYSTPWGYFDFNRFHCHFSPRDWQRLINNNWGFRPKRLNFKLFNIQVKEVTQNEGTKTIANNLTSTIQVFTDSEYQLPYVLGSAHQGCLPPFPADVFMIPQYGYLTLNNGSQAVGRSSFYCLEYFPSQMLRTGNNFTFSYTFEDVPFHSSYAHSQSLDRLMNPLIDQYLYYLSRTQTTGGTANTQTLGFSQGGPNTMANHAKNWLPGPCYRQQRVSTTTGQNNNSNFAWTAGTKYHLNGRNSLANPGIAMATHKDDKERFFPSNGILIFGKQNAARDNADYSDVMLTSEEEIKTTNPVATEEYGIVADNLQQQNTAPQIGTVNSQGALPGMVWQNRDVYLQGPIWAKIPHTDGNFHPSPLMGGFGLKHPPPQILIKNTPVPADPPTTFNQSKLNSFITQYSTGQVSVEIEWELQKENSKRWNPEIQYTSNYYKSTSVDFAVNTEGVYSEPHPIGTRYLTRPL

SEQ ID NO: 1076 - protein, 736 aa, Artificial Sequence
  source: /note="Description of Artificial Sequence: Synthetic polypeptide"
MAADGYLPDWLEDNLSEGIREWWALKPGAPKPKANQQKQDDGRGLVLPGYKYLGPFNGLDKGEPVNEADAAALEHDKAYDQQLKAGDNPYLRYNHADAEFQERLQEDTSFGGNLGRAVFQAKKRLLEPLGLVEEAAKTAPGKKRPVEQSPQEPDSSAGIGKSGAQPAKKRLNFGQTGDSESVPDPQPLGEPPATPAAVGPTTMASGGGAPMADNNEGADGVGNASGNWHCDSTWLGDRVITTSTRTWALPTYNNHLYKQISSASTGASNDNHYFGYSTPWGYFDFNRFHCHFSPRDWQRLINNNWGFRPKRLNFKLFNIQVKEVTDNDGVKTIANNLTSTIQVFTDSEYQLPYVLGSAHQGCLPPFPADVFMIPQYGYLTLNNGSQAVGRSSFYCLEYFPSQMLRTGNNFQFTYTFEDVPFHSSYAHSQSLDRLMNPLIDQYLYYLSRTQTTGGTANTQTLGFSQGGPNTMANQAKNWLPGPCYRQQRVSTTTGQNNNSNFAWTAGTKYHLNGRNSLANPGIAMATHKDDKERFFPSNGILIFGKQNAARDNADYSDVMLTSEEEIKTTNPVATEEYGIVADNLQQQNTAPQIGTVNSQGALPGMVWQNRDVYLQGPIWAKIPHTDGNFHPSPLMGGFGLKHPPPQILIKNTPVPADPPTTFNQSKLNSFITQYSTGQVSVEIEWELQKENSKRWNPEIQYTSNYYKSTSVDFAVNTEGVYSEPHPIGTRYLTRPL

SEQ ID NO: 1077 - protein, 736 aa, Artificial Sequence
  source: /note="Description of Artificial Sequence: Synthetic polypeptide"
MAADGYLPDWLEDNLSEGIREWWALKPGAPKPKANQQKQDDGRGLVLPGYKYLGPFNGLDKGEPVNAADAAALEHDKAYDQQLKAGDNPYLRYNHADAEFQERLQEDTSFGGNLGRAVFQAKKRVLEPLGLVEEGAKTAPGKKRPVEQSPQEPDSSAGIGKTGAQPAKKRLNFGQTGDSESVPDPQPLGEPPATPAAVGPTTMASGGGAPMADNNEGADGVGSASGNWHCDSTWLGDRVITTSTRTWALPTYNNHLYKQISSASTGASNDNHYFGYSTPWGYFDFNRFHCHFSPRDWQRLINNNWGFRPKRLNFKLFNIQVKEVTDNNGVKTIANNLTSTIQVFTDSEYQLPYVLGSAHQGCLPPFPADVFMIPQYGYLTLNNGSQAVGRSSFYCLEYFPSQMLRTGNNFTFSYTFEDVPFHSSYAHSQSLDRLMNPLIDQYLYYLSRTQTTGGTANTQTLGFSQGGPNTMANQAKNWLPGPCYRQQRVSTTTGQNNNSNFAWTAGTKYHLNGRNSLANPGIAMATHKDDKERFFPSNGILIFGKQNAARDNADYSDVMLTSEEEIKTTNPVATEEYGIVADNLQQQNTAPQIGTVNSQGALPGMVWQNRDVYLQGPIWAKIPHTDGNFHPSPLMGGFGLKHPPPQILIKNTPVPADPPTTFNQSKLNSFITQYSTGQVSVEIEWELQKENSKRWNPEIQYTSNYYKSTSVDFAVNTEGVYSEPHPIGTRYLTRPL

SEQ ID NO: 1078 - protein, 736 aa, Artificial Sequence
  source: /note="Description of Artificial Sequence: Synthetic polypeptide"
MAADGYLPDWLEDNLSEGIREWWDLKPGAPKPKANQQKQDDGRGLVLPGYKYLGPFNGLDKGEPVNAADAAALEHDKAYDQQLKAGDNPYLRYNHADAEFQERLQEDTSFGGNLGRAVFQAKKRLLEPLGLVEEAAKTAPGKKRPVEQSPQEPDSSAGIGKSGAQPAKKRLNFGQTGDTESVPDPQPIGEPPAAPSGVGPNTMAAGGGAPMADNNEGADGVGSSSGNWHCDSQWLGDRVITTSTRTWALPTYNNHLYKQISSASTGASNDNHYFGYSTPWGYFDFNRFHCHFSPRDWQRLINNNWGFRPKRLNFKLFNIQVKEVTQNEGTKTIANNLTSTIQVFTDSEYQLPYVLGSAHQGCLPPFPADVFMIPQYGYLTLNNGSQAVGRSSFYCLEYFPSQMLRTGNNFQFTYTFEDVPFHSSYAHSQSLDRLMNPLIDQYLYYLSRTQTTGGTANTQTLGFSQGGPNTMANHAKNWLPGPCYRQQRVSTTTGQNNNSNFAWTAGTKYHLNGRNSLANPGIAMATHKDDKERFFPSNGILIFGKQNAARDNADYSDVMLTSEEEIKTTNPVATEEYGIVADNLQQQNTAPQIGTVNSQGALPGMVWQNRDVYLQGPIWAKIPHTDGNFHPSPLMGGFGLKHPPPQILIKNTPVPADPPTTFNQSKLNSFITQYSTGQVSVEIEWELQKENSKRWNPEIQYTSNYYKSTSVDFAVNTEGVYSEPHPIGTRYLTRPL

SEQ ID NO: 1079 - protein, 737 aa, Artificial Sequence; identical to SEQ ID NO: 1061
  source: /note="Description of Artificial Sequence: Synthetic polypeptide"

SEQ ID NO: 1080 - protein, 737 aa, Artificial Sequence
  source: /note="Description of Artificial Sequence: Synthetic polypeptide"
MAADGYLPDWLEDNLSEGIREWWALKPGAPKPKANQQKQDDGRGLVLPGYKYLGPFNGLDKGEPVNAADAAALEHDKAYDQQLKAGDNPYLRYNHADAEFQERLKEDTSFGGNLGRAVFQAKKRVLEPFGLVEEGAKTAPGKKRPVEQSPQEPDSSSGIGKTGQQPAKKRLNFGQTGDSESVPDPQPLGEPPAAPSGVGPNTMAAGGGAPMADNNEGADGVGSSSGNWHCDSQWLGNRVITTSTRTWALPTYNNHLYKQISNSTSGGSSNDNAYFGYSTPWGYFDFNRFHCHFSPRDWQRLINNNWGFRPKRLNFKLFNIQVKEVTDNNGVKTIANNLTSTVQVFTDSEYQLPYVLGSAHQGCLPPFPADVFMIPQYGYLTLNNGSQAVGRSSFYCLEYFPSQMLRTGNNFQFTYTFEDVPFHSSYAHSQSLDRLMNPLIDQYLYYLSRTQTTGGTANTQTLGFSQGGPNTMANQAKNWLPGPCYRQQRVSTTTGQNNNSNFAWTAGTKYHLNGRNSLANPGIAMATHKDDKERFFPSNGILIFGKQNAARDNADYSDVMLTSEEEIKTTNPVATEEYGIVADNLQQQNTAPQIGTVNSQGALPGMVWQNRDVYLQGPIWAKIPHTDGNFHPSPLMGGFGLKHPPPQILIKNTPVPADPPTTFNQSKLNSFITQYSTGQVSVEIEWELQKENSKRWNPEIQYTSNYYKSTSVDFAVNTEGVYSEPHPIGTRYLTRPL

SEQ ID NO: 1081 - protein, 736 aa, Artificial Sequence
  source: /note="Description of Artificial Sequence: Synthetic polypeptide"
MAADGYLPDWLEDNLSEGIREWWDLKPGAPKPKANQQKQDDGRGLVLPGYKYLGPFNGLDRGEPVNAADAAALEHDKAYDQQLKAGDNPYLRYNHADAEFQERLQEDTSFGGNLGRAVFQAKKRVLEPLGLVEEGAKTAPGKKRPVEQSPQEPDSSSGIGKTGQQPAKKRLNFGQTGDSESVPDPQPLGEPPATPAAVGPTTMASGGGAPMADNNEGADGVGNASGNWHCDSTWLGDRVITTSTRTWALPTYNNHLYKQISSASTGASNDNHYFGYSTPWGYFDFNRFHCHFSPRDWQRLINNNWGFRPKRLNFKLFNIQVKEVTDNNGVKTIANNLTSTIQVFTDSEYQLPYVLGSAHQGCLPPFPADVFMIPQYGYLTLNNGSQAVGRSSFYCLEYFPSQMLRTGNNFQFTYTFEDVPFHSSYAHSQSLDRLMNPLIDQYLYYLSRTQTTGGTANTQTLGFSQGGPNTMANQAKNWLPGPCYRQQRVSTTTGQNNNSNFAWTAGTKYHLNGRNSLANPGIAMATHKDDKERFFPSNGILIFGKQNAARDNADYSDVMLTSEEEIKTTNPVATEEYGIVADNLQQQNTAPQIGTVNSQGALPGMVWQNRDVYLQGPIWAKIPHTDGNFHPSPLMGGFGLKHPPPQILIKNTPVPADPPTTFNQSKLNSFITQYSTGQVSVEIEWELQKENSKRWNPEIQYTSNYYKSTSVDFAVNTEGVYSEPHPIGTRYLTRPL

SEQ ID NO: 1082 - protein, 736 aa, Artificial Sequence
  source: /note="Description of Artificial Sequence: Synthetic polypeptide"
MAADGYLPDWLEDNLSEGIREWWDLKPGAPKPKANQQKQDDGRGLVLPGYKYLGPFNGLDKGEPVNAADAAALEHDKAYDQQLKAGDNPYLRYNHADAEFQERLQEDTSFGGNLGRAVFQAKKRVLEPLGLVEEGAKTAPGKKRPVEQSPQEPDSSSGIGKKGQQPARKRLNFGQTGDSESVPDPQPLGEPPAAPSGVGSLTMASGGGAPMADNNEGADGVGNASGNWHCDSTWLGDRVITTSTRTWALPTYNNHLYKQISSASTGASNDNHYFGYSTPWGYFDFNRFHCHFSPRDWQRLINNNWGFRPKRLNFKLFNIQVKEVTQNEGTKTIANNLTSTVQVFTDSDYQLPYVLGSAHQGCLPPFPADVFMIPQYGYLTLNNGSQAVGRSSFYCLEYFPSQMLRTGNNFQFTYTFEDVPFHSSYAHSQSLDRLMNPLIDQYLYYLSRTQTTGGTANTQTLGFSQGGPNTMANQAKNWLPGPCYRQQRVSTTTGQNNNSNFAWTAGTKYHLNGRNSLSNPGIAMATHKDDKERFFPSNGILIFGKQNAARDNADYSDVMLTSEEEIKTTNPVATEEYGIVADNLQQQNTAPQIGTVNSQGALPGMVWQNRDMYLQGPIWAKIPHTDGNFHPSPLMGGFGLKHPPPQILIKNTPVPADPPTTFNQSKLNSFITQYSTGQVSVEIEWELQKENSKRWNPEIQYTSNYYKSTSVDFAVNTEGVYSEPHPIGTRYLTRPL

SEQ ID NO: 1083 - protein, 736 aa, Artificial Sequence
  source: /note="Description of Artificial Sequence: Synthetic polypeptide"
MAADGYLPDWLEDNLSEGIREWWALKPGAPKPKANQQKQDDGRGLVLPGYKYLGPFNGLDKGEPVNAADAAALEHDKAYDQQLKAGDNPYLRYNHADAEFQERLQEDTSFGGNLGRAVFQAKKRVLEPFGLVEEGAKTAPGKKRPVEQSPQEPDSSSGIGKTGQQPAKKRLNFGQTGGSESVPDPQPLGEPPATPAAVGPTTMAAGGGAPMADNNEGADGVGSSSGNWHCDSTWLGDRVITTSTRTWALPTYNNHLYKQISSASTGASNDNHYFGYSTPWGYFDFNRFHCHFSPRDWQRLINNNWGFRPKRLNFKLFNIQVKEVTDNNGVKTIANNLTSTVQVFTDSEYQLPYVLGSAHQGCLPPFPADVFMIPQYGYLTLNNGSQAVGRSSFYCLEYFPSQMLRTGNNFTFSYTFEEVPFHSSYAHSQSLDRLMNPLIDQYLYYLSRTQTTGGTANTQTLGFSQGGPNTMANQAKNWLPGPCYRQQRVSTTTGQNNNSNFAWTAGTKYHLNGRNSLANPGIAMASHKDDKERFFPSNGILIFGKQNAARDNADYSDVMLTSEEEIKTTNPVATEEYGIVADNLQQQNTAPQIGTVNSQGALPGMVWQNRDVYLQGPIWAKIPHTDGNFHPSPLMGGFGLKHPPPQILIKNTPVPADPPTTFNQSKLNSFITQYSTGQVSVEIEWELQKENSKRWNPEIQYTSNYYKSTSVDFAVNTEGVYSEPHPIGTRYLTRPL

SEQ ID NO: 1084 - DNA, 2211 bp, Artificial Sequence
  source: /note="Description of Artificial Sequence: Synthetic polynucleotide"
atggctgccgatggttatcttccagattggctcgaggacaacctctctgagggcattcgcgagtggtgggacttgaaacctgcatccccgaaacccaaagccaaccagcaaaagcaggacgacggccggggtctggtgcttcctggctacaagtacctcggacccttcaacggactcgacaagggggagcccgtcaacgcggcggacgcagcggccctcgagcacgacaaggcctacgaccagcagctcaaagcgggtgacaatccgtacctgcggtataaccacgccgacgccgagtttcaggagcgtctgcaagaagatacgtcttttgggggcaacctcgggcgagcagtcttccaggccaaaaagaggcttcttgaacctcttggtctggttgaggaagcggctaagacggctcctggaaagaagaggcctgtagagcagtctcctcaggaaccggactcctccgcgggtattggcaaatcgggtgcacagcccgccaaaaagagactcaatttcggtcagactggcggcacagagtcagttccagaccctcaacctctcggagaacctccagcagcgccctctggtgtgggacctaatacaatggctgcaggcggtggcgcaccaatggcagacaataacgaaggcgccgacggagtgggtagttcctcgggaaattggcattgcgattccacatggctgggcgacagagtcatcaccaccagcaccagaacctgggccctgcccacttacaacaaccatctctacaagcaaatctccagtgcttcaacgggggccagcaacgacaaccactacttcggctacagcaccccctgggggtattttgatttcaacagattccactgccacttctcaccacgtgactggcagcgactcatcaacaacaactggggattccggcccaagagactcagcttcaagctcttcaacatccaggtcaaggaggtcacgcagaatgaaggcaccaagaccatcgccaataacctcaccagcaccatccaggtgtttacggactcggagtaccagctgccgtacgttctcggctctgcccaccagggctgcctgcctccgttcccggcggacgtgttcatgattccccagtacggatacctaacactcaacaacggtagtcaggccgtgggacgctcctccttctactgcctggaatactttccttcgcagatgctgagaaccggcaacaacttccagtttacttacaccttcgaggacgtgcctttccacagcagctacgcccacagccagagcttggaccggctgatgaatcctctgattgaccagtacctgtactacttgtctcggactcaaacaacaggaggcacggcaaatacgcagactctgggcttcagccaaggtgggcctaatacaatggccaatcaggcaaagaactggctgccaggaccctgttaccgccaacaacgcgtctcaacgacaaccgggcaaaacaacaatagcaactttgcctggactgctgggaccaaataccatctgaatggaagaaattcattggctaatcctggcatcgctatggcaacacacaaagacgacaaggagcgtttttttcccagtaacgggatcctgatttttggcaaacaaaatgctgccagagacaatgcggattacagcgatgtcatgctcaccagcgaggaagaaatcaaaaccactaaccctgtggctacagaggaatacggtatcgtggcagataacttgcagcagcaaaacacggctcctcaaattggaactgtcaacagccagggggccttacccggtatggtctggcagaaccgggacgtgtacctgcagggtcccatctgggccaagattcctcacacggacggcaacttccacccgtctccgctgatgggcggctttggcctgaaacatcctccgcctcagatcctgatcaagaacacgcctgtacctgcggatcctccgaccaccttcaaccagtcaaagctgaactctttcatcacgcaatacagcaccggacaggtcagcgtggaaattgaatgggagctgcagaaggaaaacagcaagcgctggaaccccgagatccagtacacctccaactactacaaatctacaagtgtggactttgctgttaatacagaaggcgtgtactctgaaccccaccccattggcacccgttacctcacccgtcccctgtaa

SEQ ID NO: 1085 - DNA, 2211 bp, Artificial Sequence
  source: /note="Description of Artificial Sequence: Synthetic polynucleotide"
atggctgccgatggttatcttccagattggctcgaggacaacctctctgagggcattcgcgagtggtgggacttgaaacctggagccccgaaacccaaagccaaccagcaaaagcaggacgacggccggggtctggtgcttcctggctacaagtacctcggacccttcaacggactcgacaagggggagcccgtcaacgcggcggacgcagcggccctcgagcacgacaaggcctacgaccagcagctcaaagcgggtgacaatccgtacctgcggtataaccacgccgacgccgagtttcaggagcgtctgcaagaagatacgtcttttgggggcaacctcgggcgagcagtcttccaggccaagaagagggttctcgaaccttttggtctggttgaggaaggcgctaagacggctcctggaaagaaacgtccggtagagcagtcgccacaagagccagactcctcctcgggcattggcaagacaggccagcagcccgctaaaaagagactcaattttggtcagactggcgactcagagtcagtccccgacccacaacctctcggagaacctccagcaacccccgctgctgtgggacctactacaatggcttcaggtggtggcgcaccaatggcagacaataacgaaggcgccgacggagtgggtaatgcctcaggaaattggcattgcgattcccaatggctgggggacagagtcatcaccaccagcacccgaacctgggccctgcccacctacaacaatcacctctacaagcaaatctccagtgcttcaacgggggccagcaacgacaaccactacttcggctacagcaccccctgggggtattttgatttcaacagattccactgccatttctcaccacgtgactggcagcgactcatcaacaacaattggggattccggcccaagagactcaacttcaaactcttcaacatccaagtcaaggaggtcacgcagaatgaaggcaccaagaccatcgccaataacctcaccagcaccatccaggtgtttacggactcggagtaccagctgccgtacgttctcggctccgcccaccagggctgcctgcctccgttcccggcggacgtgttcatgattccccagtacggctacctaacactcaacaacggtagtcaggccgtgggacgctcctccttctactgcctggaatactttccttcgcagatgctgagaaccggcaacaacttccagtttacttacaccttcgaggacgtgcctttccacagcagctacgcccacagccagagcttggaccggctgatgaatcctctgattgaccagtacctgtactacttgtctcggactcaaacaacaggaggcacggcaaatacgcagactctgggcttcagccaaggtgggcctaatacaatggccaatcaggcaaagaactggctgccaggaccctgttaccgccaacaacgcgtctcaacgacaaccgggcaaaacaacaatagcaactttgcctggactgctgggaccaaataccatctgaatggaagaaattcattggctaatcctggcatcgctatggcaacacacaaagacgacaaggagcgtttttttcccagtaacgggatcctgatttttggcaaacaaaatgctgccagagacaatgcggattacagcgatgtcatgctcaccagcgaggaagaaatcaaaaccactaaccctgtggctacagaggaatacggtatcgtggcagataacttgcagcagcaaaacacggctcctcaaattggaactgtcaacagccagggggccttacccggtatggtctggcagaaccgggacgtgtacctgcagggtcccatctgggccaagattcctcacacggacggcaacttccacccgtctccgctgatgggcggctttggcctgaaacatcctccgcctcagatcctgatcaagaacacgcctgtacctgcggatcctccgaccaccttcaaccagtcaaagctgaactctttcatcacgcaatacagcaccggacaggtcagcgtggaaattgaatgggagctgcagaaggaaaacagcaagcgctggaaccccgagatccagtacacctccaactactacaaatctacaagtgtggactttgctgttaatacagaaggcgtgtactctgaaccccaccccattggcacccgttacctcacccgtcccctgtaa

SEQ ID NO: 1086 - DNA, 2211 bp, Artificial Sequence
  source: /note="Description of Artificial Sequence: Synthetic polynucleotide"
atggctgccgatggttatcttccagattggctcgaggacaacctctctgagggcattcgcgagtggtgggacttggaacctggagccccgaagcccaaagccaaccagcaaaagcaggacgacggccggggtctggtgcttcctggctacaagtacctcggacccttcaacggactcgacaagggggagcccgtcaacgcggcggacgcagcggccctcgagcacgacaaggcctacgaccagcagctcaaagcgggtgacaatccgtacctgcggtataaccacgccgacgccgagtttcaggagcgtctgcaagaagatacgtcttttgggggcaacctcgggcgagcagtcttccaggccaagaagcgggttctcgaacctctcggtctggttgaggaaggcgctaagacggctcctggaaagaaacgtccggtagagcagtcgccacaagagccagactcctcctcgggcatcggcaagacaggccagcagcccgctaaaaagagactcaattttggtcagactggcgactcagagtcagtccccgatccacaacctctcggagaacctccagcaacccccgctgctgtgggacctactacaatggcttcaggcggtggcgcaccaatggcagacaataacgaaggcgccgacggagtgggtaatgcctcaggaaattggcattgcgattccacatggctgggcgacagagtcatcaccaccagcacccgcacctgggccttgcccacctacaataaccacctctacaagcaaatctccagtgcttcaacaggggccagcaacgacaaccactacttcggctacagcaccccctgggggtattttgacttcaacagattccactgccacttctcaccacgtgactggcagcgactcatcaacaacaactggggattccggcctaagcgactcaacttcaagctcttcaacattcaggtcaaagaggttacggacaacaatggagtcaagaccatcgccaataaccttaccagcacggtccaggtcttcacggactcggagtaccagttgccgtacgtcctcggctctgcgcaccagggctgcctccctccgttcccggcggacgtgttcatgattccgcagtacggctacctaacgctcaacaacggtagtcaggccgtgggacgctcctccttctactgcctggaatactttccttcgcagatgctgagaaccggcaacaacttccagtttacttacaccttcgaggacgtgcctttccacagcagctacgcccacagccagagcttggaccggctgatgaatcctctgattgaccagtacctgtactacttgtctcggactcaaacaacaggaggcacggcaaatacgcagactctgggcttcagccaaggtgggcctaatacaatggccaatcaggcaaagaactggctgccaggaccctgttaccgccaacaacgcgtctcaacgacaaccgggcaaaacaacaatagcaactttgcctggactgctgggaccaaataccatctgaatggaagaaattcattggctaatcctggcatcgctatggcaacacacaaagacgacaaggagcgtttttttcccagtaacgggatcctgatttttggcaaacaaaatgctgccagagacaatgcggattacagcgatgtcatgctcaccagcgaggaagaaatcaaaaccactaaccctgtggctacagaggaatacggtatcgtggcagataacttgcagcagcaaaacacggctcctcaaattggaactgtcaacagccagggggccttacccggtatggtctggcagaaccgggacgtgtacctgcagggtcccatctgggccaagattcctcacacggacggcaacttccacccgtctccgctgatgggcggctttggcctgaaacatcctccgcctcagatcctgatcaagaacacgcctgtacctgcggatcctccgaccaccttcaaccagtcaaagctgaactctttcatcacgcaatacagcaccggacaggtcagcgtggaaattgaatgggagctgcagaaggaaaacagcaagcgctggaaccccgagatccagtacacctccaactactacaaatctacaagtgtggactttgctgttaatacagaaggcgtgtactctgaaccccaccccattggcacccgttacctcacccgtcccctgtaa

SEQ ID NO: 1087 - DNA, 2211 bp, Artificial Sequence
  source: /note="Description of Artificial Sequence: Synthetic polynucleotide"
atggctgccgatggttatcttccagattggctcgaggacactctctctgaaggaataagacagtggtggaagctcaaacctggcccaccaccaccaaagcccgcagagcggcataaggacgacagcaggggtcttgtgcttcctgggtacaagtacctcggacccttcaacggactcgacaagggagagccggtcaacgaggcagacgccgcggccctcgagcacgacaaagcctacgaccggcagctcgacagcggagacaacccgtacctcaagtacaaccacgccgacgcggagtttcaggagcgccttaaagaagatacgtcttttgggggcaacctcgggcgagcagtcttccaggccaagaagagggttctcgaaccttttggtctggttgaggaaggtgctaagacggctcctggaaagaaacgtccggtagagcagtcgccacaagagccagactcctcctcgggcattggcaagacaggccagcagcccgctaaaaagagactcaattttggtcagactggcgactcagagtcagtccccgacccacaacctctcggagaacctccagcaacccccgctgctgtgggacctactacaatggcttcaggcggtggcgcaccaatggcagacaataacgaaggcgccgacggagtgggtaatgcctcaggaaattggcattgcgattccacatggctgggcgacagagtcatcaccaccagcacccgaacatgggccttgcccacctataacaaccacctctacaagcaaatctccagtgcttcaacgggggccagcaacgacaaccactacttcggctacagcaccccctgggggtattttgacttcaacagattccactgccacttctcaccacgtgactggcagcgactcatcaacaacaactggggattccggcctaagcgactcaacttcaagctcttcaacattcaggtcaaagaggttacggacaacaatggagtcaagaccatcgccaataaccttaccagcacggtccaggtcttcacggactcagactatcagctcccgtacgtgctcgggtcggctcacgagggctgcctcccgccgttcccagcggacgttttcatgattcctcagtacggctacctaacactcaacaacggtagtcaggccgtgggacgctcctccttctactgcctggaatactttccttcgcagatgctgagaaccggcaacaacttccagtttacttacaccttcgaggacgtgcctttccacagcagctacgcgcacagccagagtctggaccggctgatgaatcctctgattgaccagtacctgtactacttgtctcggactcaaacaacaggaggcacggcaaatacgcagactctgggcttcagccaaggtgggcctaatacaatggccaatcaggcaaagaactggctgccaggaccctgttaccgccaacaacgcgtctcaacgacaaccgggcaaaacaacaatagcaactttgcctggactgctgggaccaaataccatctgaatggaagaaattcattggctaatcctggcatcgctatggcaacacacaaagacgacaaggagcgtttttttcccagtaacgggatcctgattttcggcaaacaaaatgctgccagagacaatgcggattacagcgatgtcatgctcaccagcgaggaagaaatcaaaaccactaaccctgtggctacagaggaatacggtatcgtggcagataacttgcagcagcaaaacacggctcctcaaattggaactgtcaacagccagggggccttacccggtatggtctggcagaaccgggacgtgtacctgcagggtcccatctgggccaagattcctcacacggacggcaacttccacccgtctccgctgatgggcggctttggcctgaaacatcctccgcctcagatcctgatcaagaacacgcctgtacctgcggatcctccgaccaccttcaaccagtcaaagctgaactctttcatcacgcaatacagcaccggacaggtcagcgtggaaattgaatgggagctgcagaaggaaaacagcaagcgctggaaccccgagatccagtacacctccaactactacaaatctacaagtgtggactttgctgttaatacagaaggcgtgtactctgaaccccaccccattggcaccagatacctgactcgtaatctgtaa

SEQ ID NO: 1088 - DNA, 2208 bp, Artificial Sequence
  source: /note="Description of Artificial Sequence: Synthetic polynucleotide"
atggctgccgatggttatcttccagattggctcgaggacactctctctgaaggaataagacagtggtggaagctcaaacctggcccaccaccaccaaagcccgcagagcggcataaggacgacagcaggggtcttgtgcttcctgggtacaagtacctcggacccttcaacggactcgacaagggagagccggtcaacgaggcagacgccgcggccctcgagcacgacaaagcctacgaccggcagctcgacagcggagacaacccgtacctcaagtacaaccacgccgacgcggagtttcaggagcgccttaaagaagatacgtcttttgggggcaacctcggacgagcagtcttccaggcgaaaaagagggttcttgaacctctgggcctggttgaggaacctgttaagacggctccgggaaaaaagaggccggtagagcagtcgccacaagagccagactcctcctcgggcatcggcaagaaaggccagcagcccgctaaaaagagactcaattttggtcagactggcgactcagagtcagtccccgacccacaacctctcggagaacctccagcaacccccgctgctgtgggacctactacaatggcttcaggcggtggcgcaccaatggcggacaataacgaaggcgccgatggagtgggtaatgcctcaggaaattggcattgcgattccacatggctgggcgacagagtcatcaccaccagcacccgaacatgggccttgcccacctataacaaccacctctacaagcaaatctccagtgcttcaacgggggccagcaacgacaaccactacttcggctacagcaccccctgggggtattttgacttcaacagattccactgccacttctcaccacgtgactggcagcgactcatcaacaacaactggggattccggcctaagcgactcaacttcaagctcttcaacattcaggtcaaagaggttacggacaacaatggagtcaagaccatcgccaataaccttaccagcacggtccaggtcttcacggactcagactatcagctcccgtacgttctcggctctgcccaccagggctgcctgcctccgttcccggcggacgtgttcatgattccccagtacggctacctaacactcaacaacggtagtcaggccgtgggacgctcctccttctactgcctggaatactttccttcgcagatgctgagaaccggcaacaacttccagtttacttacaccttcgaggacgtgcctttccacagcagctacgcccacagccagagcttggaccggctgatgaatcctctgattgaccagtacctgtactacttgtctcggactcaaacaacaggaggcacggcaaatacgcagactctgggcttcagccaaggtgggcctaatacaatggccaatcaggcaaagaactggctgccaggaccctgttaccgccaacaacgcgtctcaacgacaaccgggcaaaacaacaatagcaactttgcctggactgctgggaccaaataccatctgaatggaagaaattcattggctaatcctggcatcgctatggcaacacacaaagacgacaaggagcgtttttttcccagtaacgggatcctgatttttggcaaacaaaatgctgccagagacaatgcggattacagcgatgtcatgctcaccagcgaggaagaaatcaaaaccactaaccctgtggctacagaggaatacggtatcgtggcagataacttgcagcagcaaaacacggctcctcaaattggaactgtcaacagccagggggccttacccggtatggtctggcagaaccgggacgtgtacctgcagggtcccatctgggccaagattcctcacacggacggcaacttccacccgtctccgctgatgggcggctttggcctgaaacatcctccgcctcagatcctgatcaagaacacgcctgtacctgcggatcctccgaccaccttcaaccagtcaaagctgaactctttcatcacgcaatacagcaccggacaggtcagcgtggaaattgaatgggagctgcagaaggaaaacagcaagcgctggaaccccgagatccagtacacctccaactactacaaatctacaagtgtggactttgctgttaatacagaaggcgtgtactctgaaccccaccccattggcacccgttacctcacccgtcccctg

SEQ ID NO: 1089 - DNA, 2211 bp, Artificial Sequence
  source: /note="Description of Artificial Sequence: Synthetic polynucleotide"
atggctgccgatggttatcttccagattggctcgaggacactctctctgaaggaataagacagtggtggaagctcaaacctggcccaccaccaccaaagcccgcagagcggcataaggacgacagcaggggtcttgtgcttcctgggtacaagtacctcggacccttcaacggactcgacaagggagagccggtcaacgaggcagacgccgcggccctcgagcacgacaaagcctacgaccagcagctccaagcgggtgacaatccgtacctgcggtataaccacgccgacgccgagtttcaggagcgtcttcaaggagatacgtcttttgggggcaacctcggacgagcagtcttccaggccaaaaagaggcttcttgaacctcttggtctggttgaggaagcggctaagacggctcctggaaagaagaggcctgtagagcagtctcctcaggaaccggactcctccgcgggtattggcaaatcgggtgcacagcccgctaaaaagagactcaatttcggtcagactggcgacacagagtcagtcccagaccctcaaccaatcggagaacctcccgcagccccctcaggtgtgggatctcttacaatggcttcaggtggtggcgcaccagtggcagacaataacgaaggtgccgatggagtgggtagttcctcgggaaattggcattgcgattcccaatggctgggggacagagtcatcaccaccagcacccgaacatgggccttgcccacctataacaaccacctctacaagcaaatctccagtgcttcaacgggggccagcaacgacaaccactacttcggctacagcaccccctgggggtattttgacttcaaccgcttccactgccacttctcaccacgtgactggcagcgactcatcaacaacaactggggattccggcccaagagactcagcttcaagctcttcaaccatccaggtcaaggaggtcacgcagaatgaaggcaccaagaccatcgccaataacctcaccagcacatccaggtgtttacggactcggagtaccagctgccgtacgttctcggctctgcccaccagggctgcctgcctccgttcccggcggacgtgttcatgattccccagtacggctacctaacactcaacaacggtagtcaggccgtgggacgctcctccttctactgcctggaatactttccttcgcagatgctgagaaccggcaacaacttccagttcacttacaccttcgaggacgtgcctttccacagcagctacgcgcacagccagagcttggaccggctgatgaatcctctgattgaccagtacctgtactacttgtctcggactcaaacaacaggaggcacggcaaatacgcagactctgggcttcagccaaggtgggcctaatacaatggccaatcaggcaaagaactggctgccaggaccctgttaccgccaacaacgcgtctcaacgacaaccgggcaaaacaacaatagcaactttgcctggactgctgggaccaaataccatctgaatggaagaaattcattgggtaatcctggcatcgctatggcaacacacaaagacgacaaggagcgtttttttcccagtaacgggatcctgatttttggcaaacaaaatgctgccagagacaatgcggattacagcgatgtcatgctcaccagcgaggaagaaatcaaaaccactaaccctgtggctacagaggaatacggtatcgtggcagataacttgcagcagcaaaacacggctcctcaaattggaactgtcaacagccagggggccttacccggtatggtctggcagaaccgggacgtgtacctgcagggtcccatctgggccaagattcctcacacggacggcaacttccacccgtctccgctgatgggcggctttggcctgaaacatcctccgcctcagatcctcatcaaaaacacacctgtacctgcggatcctccaacggccttcaaccagtcaaagctgaactctttcatcacgcaatacagcaccggacaggtcagcgtggaaattgaatgggagctgcagaaggaaaacagcaagcgctggaaccccgagatccagtacacctccaactactacaaatctacaagtgtggactttgctgttaatacagaaggcgtgtactctgaaccccaccccattggcacccgttacctcacccgtcccctgtaa

SEQ ID NO: 1090 - DNA, 2214 bp, Artificial Sequence
  source: /note="Description of Artificial Sequence: Synthetic polynucleotide"
atggctgccgatggttatcttccagattggctcgaggacaacctctctgagggcattcgcgagtggtgggacttgaaacatggagccccgaaacccaaagccaaccagcaaaagcaggacgacggccggggtctggtgcttcctggctacaagtacctcggacccttcaacggactcgacaagggggagcccgtcaacgcggcggatgcagcggccctcgagcacgacaaggcctacgaccagcagctcaaagcgggtgacaatccgtacctgcggtataaccacgccgacgccgagtttcaggagcgtctgcaagaagatacgtcttttgggggcaacctcgggcgagcagtcttccaggccaagaagagggttctcgaaccttttggtctggttgaggaaggtgctaagacggctcctggaaagaaacgtccggtagagcagtcgccacaagagccagactcctcctcgggcattggcaagacaggccagcagcccgctaaaaagagactcaattttggtcagactggcgactcagagtcagtccccgacccacaacctctcggagaacctccagcaacccccgctgctgtgggacctactacaatggcttcaggcggtggcgcaccaatggcagacaataacgaaggcgccgacggagtgggtaatgcctcaggaaattggcattgcgattccacatggctgggcgacagagtcatcaccaccagcacccgaacatgggccttgcccacctataacaaccacctctacaagcaaatctccaacgggacttcgggaggaagcaccaacgacaacacctacttcggctacagcaccccctgggggtattttgactttaacagattccactgccacttctcaccacgtgactggcagcgactcatcaacaacaactggggattccggcccaagagactcaacttcaaactcttcaacatccaagtcaaggaggtcacgcagaatgaaggcaccaagaccatcgccaataacctcaccagcaccatccaggtgtttacggactcggagtaccagctgccgtacgttctcggctccgcccaccagggctgcctgcctccgttcccggcggacgtgttcatgattccccagtacggctacctaacactcaacaacggtagtcaggccgtgggacgctcctccttctactgcctggaatactttccttcgcagatgctgagaacgggcaacaactttaccttcagctacacctttgaggacgttcctttccacagcagctacgctcacagccagagtctggaccgtctcatgaatcctctgattgaccagtacctgtactacttgtctcggactcaaacaacaggaggcacggcaaatacgcagactctgggcttcagccaaggtgggcctaatacaatggccaatcaggcaaagaactggctgccaggaccctgttaccgccaacaacgcgtctcaacgacaaccgggcaaaacaacaatagcaactttgcctggactgctgggaccaaataccatctgaatggaagaaattcattggctaatcctggcatcgctatggcaacacacaaagacgacaaggagcgtttttttcccagtaacgggatcctgatttttggcaaacaaaatgctgccagagacaatgcggattacagcgatgtcatgctcaccagcgaggaagaaatcaaaaccactaaccctgtggctacagaggaatacggtatcgtggcagataacttgcagcagcaaaacacggctcctcaaattggaactgtcaacagccagggggccttacccggtatggtctggcagaaccgggacgtgtacctgcagggtcccatctgggccaagattcctcacacggacggcaacttccacccgtctccgctgatgggcggctttggcctgaaacatcctccgcctcagatcctgatcaagaacacgcctgtacctgcggatcctccgaccaccttcaaccagtcaaagctgaactctttcatcacgcaatacagcaccggacaggtcagcgtggaaattgaatgggagctgcagaaggaaaacagcaagcgctggaaccccgagatccagtacacctccaactactacaaatctacaagtgtggactttgctgttaatacagaaggcgtgtactctgatccccaccccattggcacccgttacctcacccgtcccctgtaa

SEQ ID NO: 1091 - DNA, 2214 bp, Artificial Sequence
  source: /note="Description of Artificial Sequence: Synthetic polynucleotide"
atggctgccgatggttatcttccagattggctcgaggacaacctctctgagggcattcgcgagtggtgggcgctgaaacctggagccccgaagcccaaagccaaccagcaaaagcaggacgacggccggggtctggtgcttcctggctacaagtacctcggacccttcaacggactcgacaaaggagagccggtcaacgaggcggacgcggcagccctcgaacacgacaaggcctacgaccagcagctcaaagcgggtgacaatccgtacctgcggtataaccacgccgacgccgagtttcaggagcgtctgcaagaagatacgtcttttgggggcaacctcgggcgagcagtcttccaggccaagaagcgggttctcgaacctctcggtctggttgaggaaggcgctaagacggctcctggaaagaagagaccggtagagccatcaccccagcgttctccagactcctctacgggcatcggcaagaaaggccagcagcccgccagaaaaagactcaattttggtcagactggcgactcagagtcagttccagaccctcaacctctcggagaacctccagcagcgccctctggtgtgggacctaatacaatggcttcaggcggtggcgcaccaatggcagacaataacgagggcgccgacggagtgggtaattcctcgggaaattggcattgcgattccacatggatgggcgacagagtcatcaccaccagcacccgaacctgggccctgcccacctacaacaaccacctctacaagcaaatctccagtgcttcaacgggggccagcaacgacaaccactacttcggctacagcaccccctgggggtattttgactttaacagattccactgccacttttcaccacgtgactggcagcgactcatcaacaacaactggggattccggcccaagagactcaacttcaagctcttcaacatccaagtcaaggaggtcacgcagaatgaaggcaccaagaccatcgccaataacctcaccagcaccatccaggtgtttacggactcggagtaccagctgccgtacgttctcggctctgcccaccagggctgcctgcctccgttcccggcggacgtgttcatgattccccagtacggctacctaacactcaacaacggtagtcaggccgtgggacgctcctccttctactgcctggaatactttccttcgcagatgctgagaaccggcaacaacttccagtttacttacaccttcgaggacgtgcctttccacagcagctacgcgcacagccagagcttggaccggctgatgaatcctctgattgaccagtacctgtactacttgtctcggactcaaacaacaggaggcacggcaaatacgcagactctgggcttcagccaaggtgggcctaatacaatggccaatcaggcaaagaactggctgccaggaccctgttaccgccaacaacgcgtctcaacgacaaccgggcaaaacaacaatagcaactttgcctggactgctgggaccaaataccatctgaatggaagaaattcattggctaatcctggcatcgctatggcaacacacaaagacgacaaggagcgtttttttcccagtaacgggatcctgatttttggcaaacaaaatgctgccagagacaatgcggattacagcgatgtcatgctcaccagcgaggaagaaatcaaaaccactaaccctgtggctacagaggaatacggtatcgtggcagataacttgcagcagcaaaacacggctcctcaaattggaactgtcaacagccagggggccttacccggtatggtctggcagaaccgggacgtgtacctgcagggtcccatctgggccaagattcctcacacggacggcaacttccacccgtctccgctgatgggcggctttggcctgaaacatcctccgcctcagatcctgatcaagaacacgcctgtacctgcggatcctccgaccaccttcaaccagtcaaagctgaactctttcatcacacaatacagcaccggacaggtcagcgtggaaattgaatgggagctgcagaaggaaaacagcaagcgctggaaccccgagatccagtacacctccaactactacaaatctacaagtgtggactttgctgttaatacagaaggcgtgtactctgaaccccaccccattggcacccgttacctcacccgtcccctgtaa

SEQ ID NO: 1092 - DNA, 2211 bp, Artificial Sequence
  source: /note="Description of Artificial Sequence: Synthetic polynucleotide"
  modified_base (676)..(676): a, c, g, or t
atggctgccgatggttatcttccagattggctcgaggacactctctctgaaggaataagacagtggtggaagctcaaacctggcccaccaccaccaaagcccgcagagcggcataaggacgacagcaggggtcttgtgcttcctgggtacaagtacctcggacccttcaacggactcgacaagggagagccggtcaacgaggcagacgccgcggccctcgagcacgacaaagcctacgaccggcagctcgacagcggagacaacccgtacctcaagtacaaccacgccgacgcggagtttcaggagcgccttaaagaagatacgtcttttgggggcaacctcggacgagcagtcttccaggcgaaaaagagggttcttgaacctctgggcctggttgaggaacctgttaagacggctccgggaaaaaagaggccggtagagcagtcgccacaagagccagactcctcctcgggcatcggcaagaaaggccagcagcccgctaaaaagagactcaattttggtcagactggcgactcagagtcagtccccgacccacaacctctcggagaacctccagcaacccccgctgctgtgggacctactacaatggcttcaggcggtggcgcaccaatggcggacaataacgaaggcgccgatggagtgggtaatgcctcangaaattggcattgcgattccacatggctgggcgacagagtcatcaccaccagcacccgaacatgggccttgccacctataacaaccacctctacaagcaaatctccagtgcttcaacgggggcgcagcaacgacaaccactacttcggctacagcaccccctgggggtattttgacttcaacagattccactgccacttctcaccacgtgactggcagcgactcatcaacaacaactggggattccggcctaagcgactcaacttcaagctcttcaacattcaggtcaaagaggttacggacaacaatggagtcaagaccatcgccaataaccttaccagcacggtccaggtcttcacggactcagactatcagctcccgtacgttctcggctctgcccaccagggctgcctgcctccgttcccggcggacgtgttcatgattccccagtacggctacctaacactcaacaacggtagtcaggccgtgggacgctcctccttctactgcctggaatactttccttcgcagatgctgagaaccggcaacaacttccagtttacttacaccttcgaggacgtgcctttccacagcagctacgcccacagccagagcttggaccggctgatgaatcctctgattgaccagtacctgtactacttgtctcggactcaaacaacaggaggcacggcaaatacgcagactctgggcttcagccaaggtgggcctaatacaatggccaatcaggcaaagaactggctgccaggaccctgttaccgccaacaacgcgtctcaacgacaaccgggcaaaacaacaatagcaactttgcctggactgctgggaccaaataccatctgaatggaagaaattcattggctaatcctggcatcgctatggcaacacacaaagacgacaaggagcgtttttttcccagtaacgggatcctgatttttggcaaacaaaatgctgccagagacaatgcggattacagcgatgtcatgctcaccagcgaggaagaaatcaaaaccactaaccctgtggctacagaggaatacggtatcgtggcagataacttgcagcagcaaaacacggctcctcaaattggaactgtcaacagccagggggccttacccggtatggtttggcagaaccgggacgtgtacctgcagggtcccatctgggccaagattcctcacacggacggcaacttccacccgtctccgctgatgggcggctttggcctgaaacatcctccgcctcagatcctgatcaagaacacgcctgtacctgcggatcctccgaccaccttcaaccagtcaaagctgaactctttcatcacacagtactccacgggacaggtcagcgtggaaattgaatgggagctgcagaaggaaaacagcaagcgctggaacccggagatccagtacacttccaactactacaaatctacaaatgtggactttgctgttaacacagaaggcgtgtactctgaaccccaccccattggcacccgttacctcacccgtcccctgtaa

SEQ ID NO: 1093 - DNA, 2211 bp, Artificial Sequence
  source: /note="Description of Artificial Sequence: Synthetic polynucleotide"
  modified_base (715)..(715): a, c, g, or t
atggctgccgatggttatcttccagattggctcgaggacaacctctctgagggcattcgcgagtggtgggacttgaaacctggagccccgaaacccaaagccaaccagcaaaagcaggacgacggccggggtctggtgcttcctggctacaagtacctcggacccttcaacggactcgacaagggggagcccgtcaacgcggcggatgcagcggccctcgagcacgacaaggcctacgaccagcagctccaagcgggtgacaatccgtacctgcggtataaccacgccgacgccgagtttcaggagcgtcttcaaggagatacgtcttttgggggcaacctcggacgagcagtcttccaggccaagaagcgggttctcgaacctctcggtctggttgaggaagcggctaagacggctcctggaaagaagaggcctgtagagcagtctcctcaggaaccggactcctccgcgggtattggcaaatcgggtgcacagcccgctaaaaagagactcaatttcggtcagactggcgacacagagtcagtcccagaccctcaaccaatcggagaacctcccgcagccccctctggtgtgggacctaatacaatggctgcaggcggtggcgcaccaatggcagacaataacgaaggcgccgatggagtgggtagttcctcgggaaattggcattgcgattccacatggctgggcgacagantcatcaccaccagcacccgaacctgggccctgcccacctataacaaccatctctacaagcaaatctccagtgcttcaacgggggccagcaacgacaaccactacttcggctacagcaccccctgggggtattttgacttcaacagattccactgccacttctcaccacgtgactggcagcgactcatcaacaacaactggggattccggcctaagcgactcaacttcaagctcttcaacattcaggtcaaagaggttacggacaacaatggagtcaagaccatcgccaataaccttaccagcacggtccaggtcttcacggactcggagtaccagttgccgtacgtcctcggctctgcgcaccagggctgcctgcctccgttcccggcggacgtgttcatgattccgcagtacggctacctaacgctcaacaatggcagccaggcagtgggacggtcatccttttactgcctggaatatttcccatcgcagatgctgagaacgggcaacaactttaccttcagctacacttttgaggacgttcctttccacagcagctacgctcacagccagagtctggaccgtctcatgaatcctctgattgaccagtacctgtactacttgtctcggactcaaacaacaggaggcacggcaaatacgcagactctgggcttcagccaaggtgggcctaatacaatggccaatcaggcaaagaactggctgccaggaccctgttaccgccaacaacgcgtctcaacgacaaccggacaaaacaacaatagcaactttgcctggactgctgggaccaaataccatctgaatggaagaaattcattggctaatcctggcatcgctatggcaacacacaaagacgacaaggagcgtttttttcccagtaacgggatcctgatttttggcaaacaaaatgctgccagagacaatgcggattacagcgatgtcatgctcaccagcgaggaagaaatcaaaaccactaaccctgtggctacagaggaatacggtatcgtggcagataactttcagcagcaaaacacggctcctcaaattggaactgtcaacagccagggggccttacccggtatggtctggcagaaccgggacgtgtacctgcagggtcccatctgggccaagattcctcacacggacggcaacttccacccgtctccgctgatgggcggctttggcctgaaacatcctccgcctcagatcctgatcaagaacacgcctgtacctgcggatcctccgaccaccttcaaccagtcaaagctgaactctttcatcacgcaatacagcaccggacaggtcagcgtggaaattgaatgggagctgcagaaggaaaacagcaagcgctggaaccccgagatccagtacacctccaactactacaaatctacaagtgtggactttgctgttaatacagaaggcgtgtactctgaaccccaccccattggcacccgttacctcacccgtcccctgtaa

SEQ ID NO: 1094 - DNA, 2211 bp, Artificial Sequence
  source: /note="Description of Artificial Sequence: Synthetic polynucleotide"
atggctgccgatggttatcttccagattggctcgaggacaacctctctgagggcattcgcgagtggtgggcgctgaaacctggagccccgaagcccaaagccaaccagcaaaagcaggacgacggccggggtctggtgcttcctggctacaagtacctcggacccttcaacggactcgacaaaggagagccggtcaacgaggcggacgcggcagccctcgaacacgacaaagcttacgaccagcagctcaaggccggtgacaacccctacctcaagtataaccacgccgacgccgagtttcaggagcgtctgcaagaagatacgtcttttgggggcaacctcgggcgagcagtcttccaggccaaaaagaggcttcttgaacctcttggtctggttgaggaagcggctaagacggctcctggaaagaagaggcctgtagagcagtctcctcaggaaccggactcctccgcgggtattggcaaatcgggtgcacagcccgctaaaaagagactcaatttcggtcagactggcgacacagagtcagtcccagacccacaacctctcggagaacctccagcaacccccgctgctgtgggacctactacaatggcttcaggcggtggcgcaccaatggcggacaataacgaaggcgccgatggagtgggtaatgcctcaggaaattggcattgcgattccacatggctgggcgacagagtcatcaccaccagcacccgaacatgggccttgcccacctataacaaccacctctacaagcaaatctccagtgcttcaacgggggccagcaacgacaaccactacttcggctacagcaccccctgggggtattttgacttcaacagattccactgccacttctcaccacgtgactggcagcgactcatcaacaacaactggggattccggcccaagagactcagcttcaagctcttcaacatccaggtcaaggaggtcacgcagaatgaaggcaccaagaccatcgccaataacctcaccagcaccatccaggtgtttacggactcggagtaccagctgccgtacgttctcggctccgcccaccagggctgcctgcctccgttcccggcggacgtgttcatgattccccagtacggctacctaacactcaacaacggtagtcaggccgtgggacgctcctccttctactgcctggaatactttccttcgcagatgctgagaaccggcaacaacttccagtttacttacaccttcgaggacgtgcctttccacagcagctacgcccacagccagagcttggaccggctgatgaatcctctgattgaccagtacctgtactacttgtctcggactcaaacaacaggaggcacggcaaatacgcagactctgggcttcagccaaggtgggcctaatacaatggccaatcaggcaaagaactggctgccaggaccctgttaccgccaacaacgcgtctcaacgacaaccgggcaaaacaacaatagcaactttgcctggactgctgggaccaaataccatctgaatggaagaaattcattggctaatcctggcatcgctatggcaacacacaaagacgacaaggagcgtttttttcccagtaacgggatcctgatttttggcaaacaaaatgctgccagagacaatgcggattacagcgatgtcatgctcaccagcgaggaagaaatcaaaaccactaaccctgtggctacagaggaatacggtatcgtggcagataacttgcagcagcaaaacacggctcctcaaattggaactgtcaacagccagggggccttacccggtatggtctggcagaaccgggacgtgtacctgcagggtcccatctgggccaagattcctcacacggacggcaacttccacccgtctccgctgatgggcggctttggcctgaaacatcctccgcctcagatcctgatcaagaacacgcctgtacctgcggatcctccgaccaccttcaaccagtcaaagctgaactctttcatcacgcaatacagcaccggacaggtcagcgtggaaattgaatgggagctgcagaaggaaaacagcaagcgctggaaccccgagatccagtacacctccaactactacaaatctacaagtgtggactttgctgttaatacagaaggcgtgtactctgaaccccaccccattggcacccgttacctcacccgtcccctgtaa

SEQ ID NO: 1095 - DNA, 2211 bp, Artificial Sequence
  source: /note="Description of Artificial Sequence: Synthetic polynucleotide"
atggctgccgatggttatcttccagattggctcgaggacactctctctgaaggaataagacagtggtggaagctcaaacctggcccaccaccaccaaagcccgcagagcggcataaggacgacagcaggggtcttgtgcttcctgggtacaagtacctcggacccttcaacggactcgacaagggagagccggtcaacgaggcagacgccgcggccctcgagcacgacaaagcctacgaccagcagctccaagcgggtgacaatccgtacctgcggtataaccacgccgacgccgagtttcaggagcgtcttcaaggagatacgtcttttgggggcaacctcggacgagcagtcttccaggccaaaaagaggcttcttgaacctcttggtctggttgaggaagcggctaagacggctcctggaaagaagaggcctgtagagcagtctcctcaggaaccggactcctccgcgggtattggcaaatcgggtgcacagcccgctaaaaagagactcaatttcggtcagactggcgacacagagtcagtcccagaccctcaaccaatcggagaacctcccgcagccccctcaggtgtgggatctcttacaatggcttcaggtggtggcgcaccagtggcagacaataacgaaggtgccgatggagtgggtagttcctcgggaaattggcattgcgattcccaatggctgggggacagagtcatcaccaccagcacccgaacatgggccttgcccacctataacaaccacctctacaagcaaatctccagtgcttcaacgggggccagcaacgacaaccactacttcggctacagcaccccctgggggtattttgacttcaaccgcttccactgccacttctcaccacgtgactggcagcgactcatcaacaacaactggggattccggcccaagagactcagcttcaagctcttcaacatccaggtcaaggaggtcacgcagaatgaaggcaccaagaccatcgccaataacctcaccagcaccatccaggtgtttacggactcggagtaccagctgccgtacgttctcggctctgcccaccagggctgcctgcctccgttcccggcggacgtgttcatgattccccagtacggctacctaacactcaacaacggtagtcaggccgtgggacgctcctccttctactgcctggaatactttccttcgcagatgctgagaaccggcaacaacttccagtttacttacaccttcgaggacgtgcctttccacagcagctacgcccacagccagagcttggaccggctgatgaatcctctgattgaccagtacctgtactacttgtctcggactcaaacaacaggaggcacggcaaatacgcagactctgggcttcagccaaggtgggcctaatacaatggccaatcaggcaaagaactggctgccaggaccctgttaccgccaacaacgcgtctcaacgacaaccgggcaaaacaacaatagcaactttgcctggactgctgggaccaaataccatctgaatggaagaaattcattggctaatcctggcatcgctatggcaacacacaaagacgacaaggagcgtttttttcccagtaacgggatcctgatttttggcaaacaaaatgctgccagagacaatgcggattacagcgatgtcatgctcaccagcgaggaagaaatcaaaaccactaaccctgtggctacagaggaatacggtatcgtggcagataacttgcagcagcaaaacacggctcctcaaattggaactgtcaacagccagggggccttacccggtatggtctggcagaaccgggacgtgtacctgcagggtcccatctgggccaagattcctcacacggacggcaacttccacccgtctccgctgatgggcggctttggcctgaaacatcctccgcctcagatcctgatcaagaacacgcctgtacctgcggatcctccgaccaccttcaaccagtcaaagctgaactctttcatcacgcaatacagcaccggacaggtcagcgtggaaattgaatgggagctgcagaaggaaaacagcaagcgctggaaccccgagatccagtacacctccaactactacaaatctacaagtgtggactttgctgttaatacagaaggcgtgtactctgaaccccaccccattggcacccgttacctcacccgtcccctgtaa

SEQ ID NO: 1096 - DNA, 2217 bp, Artificial Sequence
  source: /note="Description of Artificial Sequence: Synthetic polynucleotide"
atggctgccgatggttatcttccagattggctcgaggacaacctctctgagggaataagacagtggtggaagctcaaacctggcccaccaccaccaaagcccgcagagcggcataaggacgacagcaggggtcttgtgcttcctgggtacaagtacctcggacccttcaacggactcgacaagggagagccggtcaacgcggcggacgcagcggccctcgagcacgacaaggcctacgaccagcagctcaaagcgggtgacaatccgtacctgcggtataaccacgccgacgccgagtttcaggagcgtctgcaagaagatacgtcttttgggggcaacctcgggcgagcagtcttccaggccaagaagcgggttctcgaacctctcggtctggttgaggaaggcgctaagacggctcctggaaagaagagaccggtagagccatcaccccagcgttctccagactcctctacgggcatcggcaagaaaggccagcagcccgctaaaaagagactcaattttggtcagactggcgactcagagtcagtccccgacccacaacctctcggagaacctccagcaacccccgctgctgtgggacctactacaatggcttcaggcggtggcgcaccaatggcagacaataacgaaggcgccgacggagtgggtaatgcctcaggaaattggcattgcgattccacatggctgggggacagagtcatcaccaccagcacccgaacctgggccctgcccacctacaacaaccacctctacaagcaaatctccaacgggacttcgggaggaagcaccaacgacaacacctacttcggctgcgtcacgccctgggggtattttgactttaacaaattccactgccacttttcaccggatgactggcaacgactcatcaacaacggctggggattccggactaagcgactcaacttcaagctcttcagcatgaaagtcaaaaagggtacggacaacactggaatcaagaccatcgcgaataaccttaccaacacggtccatgtcttcgcggactcggagtaccagttgccgtacgtcctcggctctgcgcaccagggctgcctccctccgttcccggcggacgtgttcatgattccgcagtacggctacctaacgctcaacaatggcagccaggcagtgggacggtcatccttttactgcctggaatatttcccatcgcagatgctgagaacgggcaacaactttaccttcagctacacctttgaggacgttcctttccacagcagctacgctcacagccagagtctggaccgtctcatgaatcctctgattgaccagtacctgtactacttgtctcggactcaaacaacaggaggcacggcaaatacgcagactctgggcttcagccaaggtgggcctaatacaatggccaatcaggcaaagaactggctgccaggaccctgttaccgccaacaacgcgtctcaacgacaaccgggcaaaacaacaatagcaactttgcctggactgctgggaccaaataccatctgaatggaagaaattcattggctaatcctggcatcgctatggcaacacacaaagacgacaaggagcgtttttttcccagtaacgggatcctgatttttggcaaacaaaatgctgccagagacaatgcggattacagcgatgtcatgctcaccagcgaggaagaaatcaaaaccactaaccctgtggctacagaggaatacggtatcgtggcagataacttgcagcagcaaaacacggctcctcaaattggaactgtcaacagccagggggccttacccggtatggtctggcagaaccgggacgtgtacctgcagggtcccatctgggccaagattcctcacacggacggcaacttccacccgtctccgctgatgggcggctttggcctgaaacatcctccgcctcagatcctgatcaagaacacgcctgtacctgcggatcctccgaccaccttcaaccagtcaaagctgaactctttcatcacgcaatacagcaccggacaggtcagcgtggagatcgagtgggagctgcagaaggaaaacagcaagcgctggaacccggagatccagtacacctccaactactacaaatctacaagtgtggactttgctgttaatacagaaggcgtgtactctgaaccccaccccattggcacccgttacctcacccgtcccctgtaa

SEQ ID NO: 1097 - DNA, 2214 bp, Artificial Sequence
  source: /note="Description of Artificial Sequence: Synthetic polynucleotide"
atggctgccgatggttatcttccagattggctcgaggacactctctctgaaggaataagacagtggtggaagctcaaacctggcccaccaccaccaaagcccgcagagcggcataaggacgacagcaggggtcttgtgcttcctgggtacaagtacctcggacccttcaacggactcgacaagggggagcccgtcaacgcggcggacgcagcggccctcgagcacgacaaggcctacgaccagcagctcaaagcgggtgacaatccgtacctgcggtataaccacgccgacgccgagtttcaggagcgtctgcaagaagatacgtcttttgggggcaacctcgggcgagcagtcttccaggccaagaagcgggttctcgaacctctcggtctggttgaggaaggcgctaagacggctcctggaaagaagagaccggtagagccatcaccccagcgttctccagactcctctacgggcatcggcaagaaaggccagcagcccgcgaaaaagagactcaactttgggcagactggcgactcagagtcagtgcccgaccctcaaccaatcggagaaccccccgcaggcccctctggtctgggatctggtacaatggctgcaggcggtggcgctccaatggcagacaataacgaaggcgccgatggagtgggtagttcctcgggaaattggcattgcgattccacatggctgggggacagagtcatcaccaccagcacccgaacctgggccctgcccacctacaacaaccacctctacaaacaaatttccagcgcttcaacgggagcctcgaacgacaatcactactttggctacagcaccccctgggggtattttgacttcaacagattccactgccacttctcaccacgtgactggcagcgactcatcaacaacaactggggattccggcctaagcgactcaacttcaagctcttcaacattcaggtcaaagaggttacggacaacaatggagtcaagaccatcgccaataaccttaccagcacggtccaggtcttcacggactcggagtaccagttgccgtacgtcctcggctctgcgcaccagggctgcctccctccgttcccggcggacgtgttcatgattccgcagtacggctacctaacgctcaacaatggcagccaggcagtgggacggtcatccttttactgcctggaatatttcccatcgcagatgctgagaacgggcaacaactttaccttcagctacacctttgaggacgttcctttccacagcagctacgctcacagccagagtctggaccgtctcatgaatcctctgattgaccagtacctgtactacttgtctcggactcaaacaacaggaggcacggcaaatacgcagactctgggcttcagccaaggtgggcctaatacaatggccaatcaggcaaagaactggctgccaggaccctgttaccgccaacaacgcgtctcaacgacaaccgggcaaaacaacaatagcaactttgcctggactgctgggaccaaataccatctgaatggaagaaattcattggctaatcctggcatcgctatggcaacacacaaagacgacaaggagcgtttttttcccagtaacgggatcctgatttttggcaaacaaaatgctgccagagacaatgcggattacagcgatgtcatgctcaccagcgaggaagaaatcaaaaccactaaccctgtggctacagaggaatacggtatcgtggcagataacctgcagcagcaaaacacggctcctcaaattggaactgtcaacagccagggggccttacccggtatggtctggcagaaccgggacgtgtacctgcagggtcccatctgggccaagattcttcacacggacggcaactttcacccttctccgctgatgggagggtttggaatgaagcacccgcctcctccgatcctgatcaagaacacgcctgtacctgcggatcctccgaccaccttcaaccagtcaaagctgaactctttcatcacgcaatacagcaccggacaggtcagcgtggaaattgaatgggagctgccgaaggaaaacagcaagcgctggaaccccgagatccagtacacctccaactactacaaatctacaagtgtggactttgctgttaatacagaaggtgtgtactatgaaccccaccccattggcacccgttacctcacccctcccctgtaa

SEQ ID NO: 1098 - DNA, 2214 bp, Artificial Sequence
  source: /note="Description of Artificial Sequence: Synthetic polynucleotide"
atggctgccgatggttatcttccagattggctcgaggacaacctctctgagggcattcgcgagtggtgggcgctgaaacctggagccccgaagcccaaagccaaccagcaaaagcaggacgacggccggggtctggtgcttcctggctacaagtacctcggacccttcaacggactcgacaagggggagcccgtcaacgcggcggacgcagcggccctcgagcacgacaaggcctacgaccagcagctcaaagcgggtgacaatccgtacctgcggtataaccacgccgacgccgagtttcaggagcgtctgcaagaagatacgtcttttgggggcaacctcgggcgagcagtcttccaggccaagaagcgggttctcgaacctctcggtctggttgaggaaggcgctaagacggctcctggaaagaagagaccggtagagccatcaccccagcgctctccagactcctctacgggcatcggcaagaaaggccaacagcccgccagaaaaagactcaattttggtcagactggcgactcagagtcagttccagaccctcaacctctcggagaacctccagcagcgccctctggtgtggcacctaatacaatggctgcaggcggtggcgcaccaatggcagacaataacgaaggcgccgacggagtgggtaatgcctcaggaaattggcattgcgattccacatggctgggcgacagagtcatcaccaccagcacccgaacatgggccttgcccacctataacaaccacctctacaagcaaatctccagtgcttcaacgggggccagcaacgacaaccactacttcggctacagcaccccctgggggtattttgatttcaacagattccactgccacttttcaccacgtgactggcagcgactcatcacaacaattgggggattccggcctaagcgactcaacttcaagctcttcaacattcaggtcaaagaggttacggacaacaatggagtcaagaccatcgccaataaccttaccagcacggtccaggtcttcacggactcggagtaccagttgccgtacgtcctcggctctgcgcaccagggctgcctccctccgttcccggcggacgtgttcatgattccgcagtacggctacctaacgctcaacaatggcagccaggcagtgggacggtcatccttttactgcctggaatatttcccatcgcagatgctgagaacgggcaacaactttaccttcagctacacctttgaggacgttcctttccacagcagctacgctcacagccagagtctggaccggctgatgaatcctctgattgaccagtacctgtactacttgtctcggactcaaacaacaggaggcacggcaaatacgcagactctgggcttcagccaaggtgggcctaatacaatggccaatcaggcaaagaactggctgccaggaccctgttaccgccaacaacgcgtctcaacgacaaccgggcaaaacaacaatagcaactttgcctggactgctgggaccaaataccatctgaatggaagaaattcattggctaatcctggcatcgctatggcaacacacaaagacgacaaggagcgtttttttcccagtaacgggatcctgatttttggcaaacaaaatgctgccagagacaatgcggattacagcgatgtcatgctcaccagcgaggaagaaatcaaaaccactaaccctgtggctacagaggaatacggtatcgtggcagataacttgcagcagcaaaacacggctcctcaaattggaactgtcaacagccagggggccttacccggtatggtctggcagaaccgggacgtgtacctgcagggtcccatctgggccaagattcctcacacggacggcaacttccacccgtctccgctgatgggcggctttggcctgaaacatcctccgcctcagatcctgatcaagaacacgcctgtacctgcggatcctccgaccaccttcaaccagtcaaagctgaactctttcatcacgcaatacagcaccggacaggtcagcgtggaaattgaatgggagctgcagaaggaaaacagcaagcgctggaaccccgagatccagtacacctccaactactacaaatctacaagtgtggactttgctgttaatacagaaggcgtgtactctgaaccccaccccattggcacccgttacctcacccgtcccctgtaa

SEQ ID NO: 1099 - DNA, 2211 bp, Artificial Sequence
  source: /note="Description of Artificial Sequence: Synthetic polynucleotide"
atggctgccgatggttatcttccagattggctcgaggacactctctctgaaggaataagacagtggtggaagctcaaacctggcccaccaccaccaaagcccgcagagcggcataaggacgacggccggggtctggtgcttcctggctacaagtacctcggacccttcaacggactcgacaagggggagcccgtcaacgcggcggacgcagcggccctcgagcacgacaaggcctacgaccagcagctcaaagcgggtgacaatccgtacctgcggtataaccacgccgacgccgagtttcaggagcgtctgcaagaagatacgtcttttgggggcaacctcggacgagcagtcttccaggcgaaaaagagggttcttgaacctctgggcctggttgaggaacctgttaagacggctccgggaaaaaagaggccggtagagcagtcgccacaagagccagactcctcctcgggcatcggcaagaaaggccagcagcccgctaaaaagagactcaattttggtcagactggcgactcagagtcagtccccgacccacaacctctcggagaacctccagcaacccccgctgctgtgggacctactacaatggcttcaggcggtggcgcaccaatggcagacaataacgaaggcgccgacggagtgggtaatgcctcaggaaattggcattgcgattccacatggatgggcgacagagtcatcaccaccagcacccgaacatgggccttgcccacctataacaaccacctctacaagcaaatctccagtgcttcaacgggggccagcaacgacaaccactacttcggctacagcaccccctgggggtattttgactttaacagattccactgccacttttcaccacgtgactggcagcgactcatcaacaacaactggggattccggcctaagcgactcaacttcaagctcttcaacattcaggtcaaggaggtcacgcagaatgaaggcaccaagaccatcgccaataacctcaccagcaccatccaggtgtttacggactcggagtaccagctgccgtacgttctcggctccgcccaccagggctgcctgcctccgttcccggcggacgtgttcatgatcccccagtacggctacctaacactcaacaacggtagtcaggccgtgggacgctcctccttctactgcctggaatactttccttcgcagatgctgagaaccggcaacaacttccagtttacttacaccttcgaggacgtgcctttccacagcagctacgcgcacagccagagcttggaccggctgatgaatcctctgattgaccagtacctgtactacttgtctcggactcaaacaacaggaggcacggcaaatacgcagactctgggcttcagccaaggtgggcctaatacaatggccaatcacgcaaagaactggctgccaggaccctgttaccgccaacaacgcgtctcaacgacaaccgggcaaaacaacaatagcaactttgcctggactgctgggaccaaataccatctgaatggaagaaattcattggctaatcctggcatcgctatggcaacacacaaagacgacaaggagcgtttttttcccagtaacgggatcctgatttttggcaaacaaaatgctgccagagacaatgcggattacagcgatgtcatgctcaccagcgaggaagaaatcaaaaccactaaccctgtggctacagaggaatacggtatcgtggcagataacttgcagcagcaaaacacggctcctcaaattggaactgtcaacagccagggggccttacccggtatggtctggcagaaccgggacgtgtacctgcagggtcccatctgggccaagattcctcacacggacggcaacttccacccgtctccgctgatgggcggcttcggcctgaaacatcctccgcctcagatcctgatcaagaacacgcctgtacctgcggatcctccgaccaccttcaaccagtcaaagctgaactctttcatcacgcaatacagcaccggacaggtcagcgtggaaattgaatgggagctgcagaaggaaaacagcaagcgctggaaccccgagatccagtacacctccaactactacaaatctacaagtgtggactttgctgttaatacagaaggcgtgtactctgaaccccaccccattggcacccgttacctcacccgtcccctgtaa

SEQ ID NO: 1100 - DNA, 2214 bp, Artificial Sequence
  source: /note="Description of Artificial Sequence: Synthetic polynucleotide"
atggctgccgatggttatcttccagattggctcgaggacaacctctctcagggcattcgcgagtggtgggacttgaaacctggagccccgaaacccaaagccaaccagcaaaagcaggacgacggccggggtctggtgcttcctggctacaagtacctcggacccttcaacggactcgacaagggggagcccgtcaacgcggcggacgcagcggccctcgagcacgacaaggcctacgaccagcagctcaaagcgggtgacaatccgtacctgcggtataaccacgccgacgccgagtttcaggagcgtctgcaagaagatacgtcttttgggggcaacctcggacgagcagtcttccaggccaagaagcgggttctcgaacctctcggtctggttgaggaaggcgctaagacggctcctggaaagaagagaccggtagagccatcaccccagcgttctccagactcctctacgggcatcggcaagaaaggccaacagcccgccagaaaaagactcaattttggtcagactggcgactcagagtcagttccagaccctcaacctctcggagaacctccagcagcgcccgctgctgtgggacctactacaatggcttcaggcggtggcgcaccaatggcagacaataacgaaggcgccgacggagtgggtagttcctcgggaaattggcattgcgattcccaatggctgggggacagagtcatcaccaccagcacccgaacctgggccctgcccacctacaacaaccacctctacaagcaaatctccagtgcttcaacgggggccagcaacgacaaccactacttcggctacagcaccccctgggggtattttgacttcaacagattccactgccacttttcaccacgtgactggcaaagactcatcaacaacaactggggattccggcccaagagactcagcttcaagctcttcaacatccaggtcaaggaggtcacgcagaatgaaggcaccaagaccatcgccaataacctcaccagcaccatccaggtgtttacggactcggagtaccagctgccgtacgttctcggctctgcccaccagggctgcctgcctccgttcccggcggacgtgttcatgattccccagtacgggtacctgactctgaacaatggcagtcaggccgtgggccgttcctccttctactgcctggagtactttccttctcaaatgctgagaaccggcaacaacttccagtttacttacaccttcgaggacgtgcctttccacagcagctacgcccacagccagagcttggaccggctgatgaatcctctgattgaccagtacctgtactacttgtctcggactcaaacaacaggaggcacgacaaatgcgcagactctgggcttcagccaaggtgggcctaatacaatggccaatcaggcaaagaactggctgccaggaccctgttaccgccaacaacgcgtctcaacgacaaccgggcaaaacaacaatagcaactttgcctggactgctgggaccaaataccatctgaatggaagaaattcattggctaatcctggcatcgctatggcaacacacaaagacgacaaggagcgtttttttcccagtaacgggatcctgatttttggcaaacaaaatgctgccagagacaatgcggattacagcgatgtcatgctcaccagcgaggaagaaatcaaaaccactaaccctgtggctacagaggaatacggtatcgtggcagataacttgcagcagcaaaacacggctcctcaaattggaactgtcaacagccagggggccttacccggtatggtctggcagaaccgggacgtgtacctgcagggtcccatctgggccaagattcctcacacggacggcaacttccacccgtctccgctgatgggcggctttggcctgaaacatcctccgcctcagatcctgatcaagaacacgcctgtacctgcggatcctccgaccaccttcaaccagtcaaagctgaactctttcatcacacagtactccacgggacaggtcagcgtggaaattgaatgggagctgcagaaggaaaacagcaagcgctggaacccggagatccagtacacttccaactactacaaatctacaaatgtggactttgctgttaacacagaaggcgtgtactctgaaccccaccccattggcacccgttacctcacccgtcccctgtaa

SEQ ID NO: 1101 - DNA, 2211 bp, Artificial Sequence
  source: /note="Description of Artificial Sequence: Synthetic polynucleotide"
atggctgccgatggttatcttccagattggctcgaggacaacctctctgagggcattcgcgagtggtgggacttgaaacctggagccccgaaacccaaagccaaccagcaaaagcaggacgacggccggggtctggtgcttcctggctacaagtacctcggacccttcaacggactcgacaagggggagcccgtcaacgcggcggacgcagcggccctcgagcacgacaaggcctacgaccagcagctcaaagcgggtgacaatccgtacctgcggtataaccacgccgacgccgagtttcaggagcgtctgcaagaagatacgtcttttgggggcaacctcgggcgagcagtcttccaggccaagaagagggttctcgaaccttttggtctggttgaggaaggcgctaagacggctcctggaaagaaacgtccggtagagcagtcgccacaagagccagactcctcctcgggcatcggcaagacaggccagcagcccgctaaaaagagactcaatttcggtcagactggcgacacagagtcagtcccagaccctcaaccaatcggagaacctcccgcagccccctcaggtgtgggacctaatacaatggctgcaggcggtggcgcaccaatggcagacaataacgaaggcgccgacggagtgggtagttcctcgggaaattggcattgcgattccacatggatgggtgacagagtcatcaccaccagcacccgaacctgggccctgcccacctacaataaccacctctacaagcaaatctccagtgcttcaacgggggccagcaacgacaaccactacttcggctacagcaccccctgggggtattttgacttcaacagattccactgccacttctcaccacgtgactggcagcgactcatcaacaacaactggggattccggcctaagcgactcaacttcaagctcttcaacattcaggtcaaggaggtcacgcagaatgaaggcaccaagaccatcgccaataacctcaccagcaccatccaggtgtttacggactcggagtaccagctgccgtacgttctcggctctgcccaccagggctgcctgcctccgttcccggcggacgtgttcatgattccccagtacggctacctaacactcaacaacggtagtcaggccgtgggacgctcctccttctactgcctggaatactttccttcgcagatgctgagaaccggcaacaacttccagtttacttacaccttcgaggacgtgcctttccacagcagctacgcccacagccagagcttggaccggctgatgaatcctctgattgaccagtacctgtactacttgtctcggactcaaacaacaggaggcacggcaaatacgcagactctgggcttcagccaaggtgggcctaatacaatggccaatcaggcaaagaactggctgccaggaccctgttaccgccaacaacgcgtctcaacgacaaccgggcaaaacaacaatagcaactttgcctggactgctgggaccaaataccatctgaatggaagaaattcattggctaatcctggcatcgctatggcaacacacaaagacgacaaggagcgtttttttcccagtaacgggatcctgatttttggcaaacaaaatgctgccagagacaatgcggattacagcgatgtcatgctcaccagcgaggaagaaatcaaaaccactaaccctgtggctacagaggaatacggtatcgtggcagataacttgcagcagcaaaacacggctcctcaaattggaactgtcaacagccagggggccttacccggtatggtctggcagaaccgggacgtgtacctgcagggtcccatctgggccaagattcctcacacggacggcaacttccacccgtctccgctgatgggcggctttggcctgaaacatcctccgcctcagatcctgatcaagaacacgcctgtacctgcggatcctccgaccaccttcaaccagtcaaagctgaactctttcatcacacagtactccacgggacaggtcagcgtggaaattgaatgggagctgcagaaggaaaacagcaagcgctggaacccggagatccagtacacttccaactactacaaatctacaaatgtggactttgctgttaacacagaaggcgtgtactctgaaccccaccccattggcacccgttacttcacccgtcccctgtaa

SEQ ID NO: 1102 - DNA, 2211 bp, Artificial Sequence
  source: /note="Description of Artificial Sequence: Synthetic polynucleotide"
atggctgccgatggttatcttccagattggctcgaggacaacctctctgagggcattcgcgagtggtgggacttgaaacctggagccccgaaacccaaagccaaccagcaaaagcaggacgacggccggggtctggtgcttcctggctacaagtacctcggacccttcaacggactcgacaagggggagcccgtcaacgcggcggacgcagcggccctcgagcacgacaaggcctacgaccagcagctcaaagcgggtgacaatccgtacctgcggtataaccacgccgacgccgagtttcaggagcgtctgcaagaagatacgtcttttgggggcaacctcgggcgagcagtcttccaggccaagaagcgggttctcgaacctctcggtctggttgaggaaggcgctaagacggctcctggaaagaaacgtccggtagagcagtcgccacaagagccagactcctcctcgggcatcggcaagacaggccagcagcccgctaaaaaaagactcaattttggtcagactggcgactcagagtcagttccagaccctcaacctctcggagaacctccagcaacccccgctgctgtgggacctactacaatggcttcaggtggtggcgcaccaatggcagacaataacgagggcgccgacggagtgggtaattcctcgggaaattggcattgcgattccacatggatgggcgacagagtcatcaccaccagcacccgaacctgggccctgcccacctacaacaatcacctctacaagcaaatctccagtgcttcaacgggggccagcaacgacaaccactacttcggctacagcaccccctgggggtattttgacttcaacagattccactgccacttctcaccacgtgactggcagcgactcatcaacaacaactggggattccggcctaagcgactcaacttcaagctcttcaacattcaggtcaaagaggttacggacaacaatggagtcaagaccatcgccaataaccttaccagcacggtccaggtcttcacggactcggagtaccagttgccgtacgtcctcggctctgcgcaccagggctgcctccctccgttcccggcggacgtgttcatgattccgcagtacggctacctaacgctcaacaacggtagtcaggccgtgggacgctcctccttctactgcctggaatactttccttcgcagatgctgagaaccggcaacaacttccagtttacttacaccttcgaggacgtgcctttccacagcagctacgcccacagccagagcttggaccggctgatgaatcctctgattgaccagtacctgtactacttgtctcggactcaaacaacaggaggcacggcaaatacgcagactctgggcttcagccaaggtgggcctaatacaatggccaatcaggcaaagaactggctgccaggaccctgttaccgccaacaacgcgtctcgacgacaaccgggcaaaacaacaatagcaactttgcctggactgctgggaccaaataccatctgaatggaagaaattcattggctaatcctggcatcgctatggcaacacacaaagacgacaaggagcgtttttttcccagtaacgggatcctgatttttggcaaacaaaatgctgccagagacaatgcggattacagcgatgtcatgctcaccagcgaggaagaaatcaaaaccactaaccctgtggctacagaggaatacggtatcgtggcagataacttgcagcagcaaaacacggctcctcaaattggaactgtcaacagccagggggccttacccggtatggtttggcagaaccgggacgtgtacctgcagggtcccatctgggccaagattcctcacacggacggcaacttccacccgtctccgctgatgggcggctttggcctgaaacatcctccgcctcagatcctgatcaagaacacgcctgtacctgcggatcctccgaccaccttcaaccagtcaaagctgaactctttcatcacacagtactccacgggacaggtcagcgtggaaattgaatgggagctgcagaaggaaaacagcaagcgctggaacccggagatccagtacacttccaactactacaaatctacaaatgtggactttgctgttaacacagaaggcgtgtactctgaaccccaccccattggcacccgttacctcacccgtcccctgtaa

SEQ ID NO: 1103 - DNA, 2211 bp, Artificial Sequence
  source: /note="Description of Artificial Sequence: Synthetic polynucleotide"
atggctgccgatggttatcttccagattggctcgaggacaacctctctgagggcattcgcgagtggtgggacttgaaacctggagccccgaagcccaaagccaaccagcaaaagcaggacgacggccggggtctggtgcttcctggctacaagtacctcggacccttcaacggactcgacaagggggagcccgtcaacgcggcggacgcagcggccctcgagcacgacaaggcctacgaccagcagctcaaagcgggtgacaatccgtacctgcggtataaccacgccgacgccgagtttcaggagcgtctgcaagaagatacgtcttttgggggcaacctcgggcgagcagtcttccaggccaagaagcgggttctcgaacctctcggtctggttgaggaaggcgctaagacggctcctggaaagaaacgtccggtagagcagtcaccacaagagccagactcctcctcgggcatcggcaagacaggccagcagcccgctaaaaagagactcaattttggtcagactggcgactcagagtcagtccccgacccacaacctctcggagaacctccagcaacccccgctgctgtgggacctactacaatggcttcaggcggtggcgcaccaatggcggacaataacgaaggcgccgatggagtgggtaatgcctcaggaaattggcattgcgattccacatggctgggcgacagagtcatcaccaccagcacccgaacatgggccttgcccacctataacaaccacctctacaagcaaatctccagtgcttcaacgggggccagcaacgacaaccactacttcggctacagcaccccctgggggtattttgactttaacagattccactgccacttctcaccacgtgactggcagcgactcatcaacaacaactggggattccggcccaagagactcaacttcaagctcttcaacatccaggtcaaggaggtcacgcagaatgaaggcaccaagaccatcgccaataacctcaccagcaccatccaggtgtttacggactcggagtaccagctgccgtacgttctcggctctgcccaccagggctgcctgcctccgttcccggcggacgtgttcatgattccccagtacggctacctgactctgaacaatggcagtcaggccgtgggccgttcctccttctactgcctagagtactttccttctcaaatgctgagaacgggcaacaactttgagttcagctaccagtttgaggacgtgccttttcacagcagctacgcgcacagccaaagcctggaccggctgatgaatcctctgattgaccagtacctgtactacttgtctcggactcaaacaacaggaggcacggcaaatacgcagactctgggcttcagccaaggtgggcctaatacaatggccaatcaggcaaagaactggctgccaggaccctgttaccgccaacaacgcgtctcaacgacaaccgggcaaaacaacaatagcaactttgcctggactgctgggaccaaataccatatgaatggaagaaattcattggttaatcctggcatcgctatggcaacacacaaagacgacaaggagcgtttttttcccagtaacgggatcctgatttttggcaaacaaaatgttgccagagacaatgcggattacagcgatgtcatgctcaccagcgaggaagaaatcaaaaccactaaccctgtggctacagaggaatacggtattgtggcagataacttgcagcagcaaaacacggctcctcaaattggaactgtcaacagccagggggccttacccggtatggtctggcagaaccgggacgtgtacctgcagggtcccatctgggccaagattcctcacacggacggcaacttccacccgtcgccgctgatgggcggctttggcctgaaacatcctccgcctcagatcctgatcaagaacacgcctgtacctgcggatcctccgaccaccttcaaccagtcaaagctgaactctttcatcacgcaatacagcaccggacaggtcagcgtggaaattgaatgggagctgcagaaggaaaacagcaagcgctggaaccccgagatccagtacacctccaactactacaaatctacaagtgtggactttgctgttaatacagaaggcgtgtactctgaaccccaccccattggcacccgttacctcacccgtcccctgtaa

SEQ ID NO: 1104 - protein, 736 aa, Artificial Sequence
  source: /note="Description of Artificial Sequence: Synthetic polypeptide"
MAADGYLPDWLEDTLSEGIRQWWKLKPGPPPPKPAERHKDDSRGLVLPGYKYLGPFNGLDKGEPVNEADAAALEHDKAYDRQLDSGDNPYLKYNHADAEFQERLKEDTSFGGNLGRAVFQAKKRVLEPLGLVEEPVKTAPGKKRPVEQSPQEPDSSSGIGKKGQQPAKKRLNFGQTGDSESVPDPQPLGEPPATPAAVGPTTMASGGGAPMADNNEGADGVGNASGNWHCDSTWMGDRVITTSTRTWALPTYNNHLYKQISSASTGASNDNHYFGYSTPWGYFDFNRFHCHFSPRDWQRLINNNWGFRPKRLNFRLFNIQVKEVTDNNGVKTIANNLTSTVQVFTDSEYQLPYVLGSAHQGCLPPFPADVFMIPQYGYLTLNNGSQAVGRSSFYCLEYFPSQMLRTGNNFTFSYTFEEVPFHSSYAHSQSLDRLMNPLIDQYLYYLSRTQTTGGTANTQTLGFSQGGPNTMANQAKNWLPGPCYRQQRVSTTTGQNNNSNFAWTAGTKYHLNGRNSLANPGIAMATHKDDKERFFPSNGILIFGKQNAARDNADYSDVMLTSEEEIKTTNPVATEEYGIVADNLQQQNTAPQIGTVNSQGALPGMVWQNRDVYLQGPIWAKIPHTDGNFHPSPLMGGFGLKHPPPQILIKNTPVPADPPTTFNQSKLNSFITQYSTGQVSVEIEWELQKENSKRWNPEIQYTSNYYKSTSVDFAVNTEGVYSEPHPIGTRYLTRPL

SEQ ID NO: 1105 - protein, 736 aa, Artificial Sequence
  source: /note="Description of Artificial Sequence: Synthetic polypeptide"
MAADGYLPDWLEDNLSEGIREWWDLKPASPKPKANQQKQDDGRGLVLPGYKYLGPFNGLDKGEPVNAADAAALEHDKAYDQQLKAGDNPYLRYNHADAEFQERLQEDTSFGGNLGRAVFQAKKRLLEPLGLVEEAAKTAPGKKRPVEQSPQEPDSSAGIGKSGAQPAKKRLNFGQTGGTESVPDPQPLGEPPAAPSGVGPNTMAAGGGAPMADNNEGADGVGSSSGNWHCDSTWLGDRVITTSTRTWALPTYNNHLYKQISSASTGASNDNHYFGYSTPWGYFDFNRFHCHFSPRDWQRLINNNWGFRPKRLSFKLFNIQVKEVTQNEGTKTIANNLTSTIQVFTDSEYQLPYVLGSAHQGCLPPFPADVFMIPQYGYLTLNNGSQAVGRSSFYCLEYFPSQMLRTGNNFQFTYTFEDVPFHSSYAHSQSLDRLMNPLIDQYLYYLSRTQTTGGTANTQTLGFSQGGPNTMANQAKNWLPGPCYRQQRVSTTTGQNNNSNFAWTAGTKYHLNGRNSLANPGIAMATHKDDKERFFPSNGILIFGKQNAARDNADYSDVMLTSEEEIKTTNPVATEEYGIVADNLQQQNTAPQIGTVNSQGALPGMVWQNRDVYLQGPIWAKIPHTDGNFHPSPLMGGFGLKHPPPQILIKNTPVPADPPTTFNQSKLNSFITQYSTGQVSVEIEWELQKENSKRWNPEIQYTSNYYKSTSVDFAVNTEGVYSEPHPIGTRYLTRPL

SEQ ID NO: 1106 - protein, 736 aa, Artificial Sequence; identical to SEQ ID NO: 1045
  source: /note="Description of Artificial Sequence: Synthetic polypeptide"

SEQ ID NO: 1107 - protein, 736 aa, Artificial Sequence
  source: /note="Description of Artificial Sequence: Synthetic polypeptide"
MAADGYLPDWLEDNLSEGIREWWDLEPGAPKPKANQQKQDDGRGLVLPGYKYLGPFNGLDKGEPVNAADAAALEHDKAYDQQLKAGDNPYLRYNHADAEFQERLQEDTSFGGNLGRAVFQAKKRVLEPLGLVEEGAKTAPGKKRPVEQSPQEPDSSSGIGKTGQQPAKKRLNFGQTGDSESVPDPQPLGEPPATPAAVGPTTMASGGGAPMADNNEGADGVGNASGNWHCDSTWLGDRVITTSTRTWALPTYNNHLYKQISSASTGASNDNHYFGYSTPWGYFDFNRFHCHFSPRDWQRLINNNWGFRPKRLNFKLFNIQVKEVTDNNGVKTIANNLTSTVQVFTDSEYQLPYVLGSAHQGCLPPFPADVFMIPQYGYLTLNNGSQAVGRSSFYCLEYFPSQMLRTGNNFQFTYTFEDVPFHSSYAHSQSLDRLMNPLIDQYLYYLSRTQTTGGTANTQTLGFSQGGPNTMANQAKNWLPGPCYRQQRVSTTTGQNNNSNFAWTAGTKYHLNGRNSLANPGIAMATHKDDKERFFPSNGILIFGKQNAARDNADYSDVMLTSEEEIKTTNPVATEEYGIVADNLQQQNTAPQIGTVNSQGALPGMVWQNRDVYLQGPIWAKIPHTDGNFHPSPLMGGFGLKHPPPQILIKNTPVPADPPTTFNQSKLNSFITQYSTGQVSVEIEWELQKENSKRWNPEIQYTSNYYKSTSVDFAVNTEGVYSEPHPIGTRYLTRPL

SEQ ID NO: 1108 - protein, 736 aa, Artificial Sequence; identical to SEQ ID NO: 1045
  source: /note="Description of Artificial Sequence: Synthetic polypeptide"

SEQ ID NO: 1109 - protein, 736 aa, Artificial Sequence
  source: /note="Description of Artificial Sequence: Synthetic polypeptide"
MAADGYLPDWLEDTLSEGIRQWWKLKPGPPPPKPAERHKDDSRGLVLPGYKYLGPFNGLDKGEPVNEADAAALEHDKAYDRQLDSGDNPYLKYNHADAEFQERLKEDTSFGGNLGRAVFQAKKRVLEPLGLVEEPVKTAPGKKRPVEQSPQEPDSSSGIGKKGQQPAKKRLNFGQTGDSESVPDPQPLGEPPATPAAVGPTTMASGGGAPMADNNEGADGVGNASGNWHCDSTWLGDRVITTSTRTWALPTYNNHLYKQISSASTGASNDNHYFGYSTPWGYFDFNRFHCHFSPRDWQRLINNNWGFRPKRLNFKLFNIQVKEVTDNNGVKTIANNLTSTVQVFTDSDYQLPYVLGSAHQGCLPPFPADVFMIPQYGYLTLNNGSQAVGRSSFYCLEYFPSQMLRTGNNFQFTYTFEDVPFHSSYAHSQSLDRLMNPLIDQYLYYLSRTQTTGGTANTQTLGFSQGGPNTMANQAKNWLPGPCYRQQRVSTTTGQNNNSNFAWTAGTKYHLNGRNSLANPGIAMATHKDDKERFFPSNGILIFGKQNAARDNADYSDVMLTSEEEIKTTNPVATEEYGIVADNLQQQNTAPQIGTVNSQGALPGMVWQNRDVYLQGPIWAKIPHTDGNFHPSPLMGGFGLKHPPPQILIKNTPVPADPPTTFNQSKLNSFITQYSTGQVSVEIEWELQKENSKRWNPEIQYTSNYYKSTSVDFAVNTEGVYSEPHPIGTRYLTRPL

SEQ ID NO: 1110 - protein, 734 aa, Artificial Sequence
  source: /note="Description of Artificial Sequence: Synthetic polypeptide"
MAADGYLPDWLEDTLSEGIRQWWKLKPGPPPPKPAERHKDDSRGLVLPGYKYLGPFNGLDKGEPVNEADAAALEHDKAYDQQLQAGDNPYLRYNHADAEFQERLQGDTSFGGNLGRAVFQAKKRLLEPLGLVEEAAKTAPGKKRPVEQSPQEPDSSAGIGKSGAQPAKKRLNFGQTGDTESVPDPQPIGEPPAAPSGVGSLTMASGGGAPVADNNEGADGVGSSSGNWHCDSQWLGDRVITTSTRTWALPTYNNHLYKQISSASTGASNDNHYFGYSTPWGYFDFNRFHCHFSPRDWQRLINNNWGFRPKRLSFKLFNHPGQGGHAERHQDHRQPHQHIQVFTDSEYQLPYVLGSAHQGCLPPFPADVFMIPQYGYLTLNNGSQAVGRSSFYCLEYFPSQMLRTGNNFQFTYTFEDVPFHSSYAHSQSLDRLMNPLIDQYLYYLSRTQTTGGTANTQTLGFSQGGPNTMANQAKNWLPGPCYRQQRVSTTTGQNNNSNFAWTAGTKYHLNGRNSLGNPGIAMATHKDDKERFFPSNGILIFGKQNAARDNADYSDVMLTSEEEIKTTNPVATEEYGIVADNLQQQNTAPQIGTVNSQGALPGMVWQNRDVYLQGPIWAKIPHTDGNFHPSPLMGGFGLKHPPPQILIKNTPVPADPPTAFNQSKLNSFITQYSTGQVSVEIEWELQKENSKRWNPEIQYTSNYYKSTSVDFAVNTEGVYSEPHPIGTRYLTRPL

SEQ ID NO: 1111 - protein, 737 aa, Artificial Sequence
  source: /note="Description of Artificial Sequence: Synthetic polypeptide"
MAADGYLPDWLEDNLSEGIREWWDLKHGAPKPKANQQKQDDGRGLVLPGYKYLGPFNGLDKGEPVNAADAAALEHDKAYDQQLKAGDNPYLRYNHADAEFQERLQEDTSFGGNLGRAVFQAKKRVLEPFGLVEEGAKTAPGKKRPVEQSPQEPDSSSGIGKTGQQPAKKRLNFGQTGDSESVPDPQPLGEPPATPAAVGPTTMASGGGAPMADNNEGADGVGNASGNWHCDSTWLGDRVITTSTRTWALPTYNNHLYKQISNGTSGGSTNDNTYFGYSTPWGYFDFNRFHCHFSPRDWQRLINNNWGFRPKRLNFKLFNIQVKEVTQNEGTKTIANNLTSTIQVFTDSEYQLPYVLGSAHQGCLPPFPADVFMIPQYGYLTLNNGSQAVGRSSFYCLEYFPSQMLRTGNNFTFSYTFEDVPFHSSYAHSQSLDRLMNPLIDQYLYYLSRTQTTGGTANTQTLGFSQGGPNTMANQAKNWLPGPCYRQQRVSTTTGQNNNSNFAWTAGTKYHLNGRNSLANPGIAMATHKDDKERFFPSNGILIFGKQNAARDNADYSDVMLTSEEEIKTTNPVATEEYGIVADNLQQQNTAPQIGTVNSQGALPGMVWQNRDVYLQGPIWAKIPHTDGNFHPSPLMGGFGLKHPPPQILIKNTPVPADPPTTFNQSKLNSFITQYSTGQVSVEIEWELQKENSKRWNPEIQYTSNYYKSTSVDFAVNTEGVYSDPHPIGTRYLTRPL

SEQ ID NO: 1112 - protein, 737 aa, Artificial Sequence
  source: /note="Description of Artificial Sequence: Synthetic polypeptide"
MAADGYLPDWLEDNLSEGIREWWALKPGAPKPKANQQKQDDGRGLVLPGYKYLGPFNGLDKGEPVNEADAAALEHDKAYDQQLKAGDNPYLRYNHADAEFQERLQEDTSFGGNLGRAVFQAKKRVLEPLGLVEEGAKTAPGKKRPVEPSPQRSPDSSTGIGKKGQQPARKRLNFGQTGDSESVPDPQPLGEPPAAPSGVGPNTMASGGGAPMADNNEGADGVGNSSGNWHCDSTWMGDRVITTSTRTWALPTYNNHLYKQISSASTGASNDNHYFGYSTPWGYFDFNRFHCHFSPRDWQRLINNNWGFRPKRLNFKLFNIQVKEVTQNEGTKTIANNLTSTIQVFTDSEYQLPYVLGSAHQGCLPPFPADVFMIPQYGYLTLNNGSQAVGRSSFYCLEYFPSQMLRTGNNFQFTYTFEDVPFHSSYAHSQSLDRLMNPLIDQYLYYLSRTQTTGGTANTQTLGFSQGGPNTMANQAKNWLPGPCYRQQRVSTTTGQNNNSNFAWTAGTKYHLNGRNSLANPGIAMATHKDDKERFFPSNGILIFGKQNAARDNADYSDVMLTSEEEIKTTNPVATEEYGIVADNLQQQNTAPQIGTVNSQGALPGMVWQNRDVYLQGPIWAKIPHTDGNFHPSPLMGGFGLKHPPPQILIKNTPVPADPPTTFNQSKLNSFITQYSTGQVSVEIEWELQKENSKRWNPEIQYTSNYYKSTSVDFAVNTEGVYSEPHPIGTRYLTRPL

SEQ ID NO: 1113 - protein, 736 aa, Artificial Sequence
  source: /note="Description of Artificial Sequence: Synthetic polypeptide"
  MOD_RES (226)..(226): Any naturally occurring amino acid
MAADGYLPDWLEDTLSEGIRQWWKLKPGPPPPKPAERHKDDSRGLVLPGYKYLGPFNGLDKGEPVNEADAAALEHDKAYDRQLDSGDNPYLKYNHADAEFQERLKEDTSFGGNLGRAVFQAKKRVLEPLGLVEEPVKTAPGKKRPVEQSPQEPDSSSGIGKKGQQPAKKRLNFGQTGDSESVPDPQPLGEPPATPAAVGPTTMASGGGAPMADNNEGADGVGNASXNWHCDSTWLGDRVITTSTRTWALPPITTTSTSKSPVLQRGRSNDNHYFGYSTPWGYFDFNRFHCHFSPRDWQRLINNNWGFRPKRLNFKLFNIQVKEVTDNNGVKTIANNLTSTVQVFTDSDYQLPYVLGSAHQGCLPPFPADVFMIPQYGYLTLNNGSQAVGRSSFYCLEYFPSQMLRTGNNFQFTYTFEDVPFHSSYAHSQSLDRLMNPLIDQYLYYLSRTQTTGGTANTQTLGFSQGGPNTMANQAKNWLPGPCYRQQRVSTTTGQNNNSNFAWTAGTKYHLNGRNSLANPGIAMATHKDDKERFFPSNGILIFGKQNAARDNADYSDVMLTSEEEIKTTNPVATEEYGIVADNLQQQNTAPQIGTVNSQGALPGMVWQNRDVYLQGPIWAKIPHTDGNFHPSPLMGGFGLKHPPPQILIKNTPVPADPPTTFNQSKLNSFITQYSTGQVSVEIEWELQKENSKRWNPEIQYTSNYYKSTNVDFAVNTEGVYSEPHPIGTRYLTRPL

SEQ ID NO: 1114 - protein, 736 aa, Artificial Sequence
  source: /note="Description of Artificial Sequence: Synthetic polypeptide"
  MOD_RES (239)..(239): Any naturally occurring amino acid
MAADGYLPDWLEDNLSEGIREWWDLKPGAPKPKANQQKQDDGRGLVLPGYKYLGPFNGLDKGEPVNAADAAALEHDKAYDQQLQAGDNPYLRYNHADAEFQERLQGDTSFGGNLGRAVFQAKKRVLEPLGLVEEAAKTAPGKKRPVEQSPQEPDSSAGIGKSGAQPAKKRLNFGQTGDTESVPDPQPIGEPPAAPSGVGPNTMAAGGGAPMADNNEGADGVGSSSGNWHCDSTWLGDRXITTSTRTWALPTYNNHLYKQISSASTGASNDNHYFGYSTPWGYFDFNRFHCHFSPRDWQRLINNNWGFRPKRLNFKLFNIQVKEVTDNNGVKTIANNLTSTVQVFTDSEYQLPYVLGSAHQGCLPPFPADVFMIPQYGYLTLNNGSQAVGRSSFYCLEYFPSQMLRTGNNFTFSYTFEDVPFHSSYAHSQSLDRLMNPLIDQYLYYLSRTQTTGGTANTQTLGFSQGGPNTMANQAKNWLPGPCYRQQRVSTTTGQNNNSNFAWTAGTKYHLNGRNSLANPGIAMATHKDDKERFFPSNGILIFGKQNAARDNADYSDVMLTSEEEIKTTNPVATEEYGIVADNFQQQNTAPQIGTVNSQGALPGMVWQNRDVYLQGPIWAKIPHTDGNFHPSPLMGGFGLKHPPPQILIKNTPVPADPPTTFNQSKLNSFITQYSTGQVSVEIEWELQKENSKRWNPEIQYTSNYYKSTSVDFAVNTEGVYSEPHPIGTRYLTRPL

SEQ ID NO: 1115 - protein, 736 aa, Artificial Sequence
  source: /note="Description of Artificial Sequence: Synthetic polypeptide"
MAADGYLPDWLEDNLSEGIREWWALKPGAPKPKANQQKQDDGRGLVLPGYKYLGPFNGLDKGEPVNEADAAALEHDKAYDQQLKAGDNPYLKYNHADAEFQERLQEDTSFGGNLGRAVFQAKKRLLEPLGLVEEAAKTAPGKKRPVEQSPQEPDSSAGIGKSGAQPAKKRLNFGQTGDTESVPDPQPLGEPPATPAAVGPTTMASGGGAPMADNNEGADGVGNASGNWHCDSTWLGDRVITTSTRTWALPTYNNHLYKQISSASTGASNDNHYFGYSTPWGYFDFNRFHCHFSPRDWQRLINNNWGFRPKRLSFKLFNIQVKEVTQNEGTKTIANNLTSTIQVFTDSEYQLPYVLGSAHQGCLPPFPADVFMIPQYGYLTLNNGSQAVGRSSFYCLEYFPSQMLRTGNNFQFTYTFEDVPFHSSYAHSQSLDRLMNPLIDQYLYYLSRTQTTGGTANTQTLGFSQGGPNTMANQAKNWLPGPCYRQQRVSTTTGQNNNSNFAWTAGTKYHLNGRNSLANPGIAMATHKDDKERFFPSNGILIFGKQNAARDNADYSDVMLTSEEEIKTTNPVATEEYGIVADNLQQQNTAPQIGTVNSQGALPGMVWQNRDVYLQGPIWAKIPHTDGNFHPSPLMGGFGLKHPPPQILIKNTPVPADPPTTFNQSKLNSFITQYSTGQVSVEIEWELQKENSKRWNPEIQYTSNYYKSTSVDFAVNTEGVYSEPHPIGTRYLTRPL

SEQ ID NO: 1116 - protein, 736 aa, Artificial Sequence
  source: /note="Description of Artificial Sequence: Synthetic polypeptide"
MAADGYLPDWLEDTLSEGIRQWWKLKPGPPPPKPAERHKDDSRGLVLPGYKYLGPFNGLDKGEPVNEADAAALEHDKAYDQQLQAGDNPYLRYNHADAEFQERLQGDTSFGGNLGRAVFQAKKRLLEPLGLVEEAAKTAPGKKRPVEQSPQEPDSSAGIGKSGAQPAKKRLNFGQTGDTESVPDPQPIGEPPAAPSGVGSLTMASGGGAPVADNNEGADGVGSSSGNWHCDSQWLGDRVITTSTRTWALPTYNNHLYKQISSASTGASNDNHYFGYSTPWGYFDFNRFHCHFSPRDWQRLINNNWGFRPKRLSFKLFNIQVKEVTQNEGTKTIANNLTSTIQVFTDSEYQLPYVLGSAHQGCLPPFPADVFMIPQYGYLTLNNGSQAVGRSSFYCLEYFPSQMLRTGNNFQFTYTFEDVPFHSSYAHSQSLDRLMNPLIDQYLYYLSRTQTTGGTANTQTLGFSQGGPNTMANQAKNWLPGPCYRQQRVSTTTGQNNNSNFAWTAGTKYHLNGRNSLANPGIAMATHKDDKERFFPSNGILIFGKQNAARDNADYSDVMLTSEEEIKTTNPVATEEYGIVADNLQQQNTAPQIGTVNSQGALPGMVWQNRDVYLQGPIWAKIPHTDGNFHPSPLMGGFGLKHPPPQILIKNTPVPADPPTTFNQSKLNSFITQYSTGQVSVEIEWELQKENSKRWNPEIQYTSNYYKSTSVDFAVNTEGVYSEPHPIGTRYLTRPL

SEQ ID NO: 1117 - protein, 738 aa, Artificial Sequence
  source: /note="Description of Artificial Sequence: Synthetic polypeptide"
MAADGYLPDWLEDNLSEGIRQWWKLKPGPPPPKPAERHKDDSRGLVLPGYKYLGPFNGLDKGEPVNAADAAALEHDKAYDQQLKAGDNPYLRYNHADAEFQERLQEDTSFGGNLGRAVFQAKKRVLEPLGLVEEGAKTAPGKKRPVEPSPQRSPDSSTGIGKKGQQPAKKRLNFGQTGDSESVPDPQPLGEPPATPAAVGPTTMASGGGAPMADNNEGADGVGNASGNWHCDSTWLGDRVITTSTRTWALPTYNNHLYKQISNGTSGGSTNDNTYFGCVTPWGYFDFNKFHCHFSPDDWQRLINNGWGFRTKRLNFKLFSMKVKKGTDNTGIKTIANNLTNTVHVFADSEYQLPYVLGSAHQGCLPPFPADVFMIPQYGYLTLNNGSQAVGRSSFYCLEYFPSQMLRTGNNFTFSYTFEDVPFHSSYAHSQSLDRLMNPLIDQYLYYLSRTQTTGGTANTQTLGFSQGGPNTMANQAKNWLPGPCYRQQRVSTTTGQNNNSNFAWTAGTKYHLNGRNSLANPGIAMATHKDDKERFFPSNGILIFGKQNAARDNADYSDVMLTSEEEIKTTNPVATEEYGIVADNLQQQNTAPQIGTVNSQGALPGMVWQNRDVYLQGPIWAKIPHTDGNFHPSPLMGGFGLKHPPPQILIKNTPVPADPPTTFNQSKLNSFITQYSTGQVSVEIEWELQKENSKRWNPEIQYTSNYYKSTSVDFAVNTEGVYSEPHPIGTRYLTRPL

SEQ ID NO: 1118 - protein, 737 aa, Artificial Sequence
  source: /note="Description of Artificial Sequence: Synthetic polypeptide"
MAADGYLPDWLEDTLSEGIRQWWKLKPGPPPPKPAERHKDDSRGLVLPGYKYLGPFNGLDKGEPVNAADAAALEHDKAYDQQLKAGDNPYLRYNHADAEFQERLQEDTSFGGNLGRAVFQAKKRVLEPLGLVEEGAKTAPGKKRPVEPSPQRSPDSSTGIGKKGQQPAKKRLNFGQTGDSESVPDPQPIGEPPAGPSGLGSGTMAAGGGAPMADNNEGADGVGSSSGNWHCDSTWLGDRVITTSTRTWALPTYNNHLYKQISSASTGASNDNHYFGYSTPWGYFDFNRFHCHFSPRDWQRLINNNWGFRPKRLNFKLFNIQVKEVTDNNGVKTIANNLTSTVQVFTDSEYQLPYVLGSAHQGCLPPFPADVFMIPQYGYLTLNNGSQAVGRSSFYCLEYFPSQMLRTGNNFTFSYTFEDVPFHSSYAHSQSLDRLMNPLIDQYLYYLSRTQTTGGTANTQTLGFSQGGPNTMANQAKNWLPGPCYRQQRVSTTTGQNNNSNFAWTAGTKYHLNGRNSLANPGIAMATHKDDKERFFPSNGILIFGKQNAARDNADYSDVMLTSEEEIKTTNPVATEEYGIVADNLQQQNTAPQIGTVNSQGALPGMVWQNRDVYLQGPIWAKILHTDGNFHPSPLMGGFGMKHPPPPILIKNTPVPADPPTTFNQSKLNSFITQYSTGQVSVEIEWELPKENSKRWNPEIQYTSNYYKSTSVDFAVNTEGVYYEPHPIGTRYLTPPL

SEQ ID NO: 1119 - protein, 737 aa, Artificial Sequence
  source: /note="Description of Artificial Sequence: Synthetic polypeptide"
MAADGYLPDWLEDNLSEGIREWWALKPGAPKPKANQQKQDDGRGLVLPGYKYLGPFNGLDKGEPVNAADAAALEHDKAYDQQLKAGDNPYLRYNHADAEFQERLQEDTSFGGNLGRAVFQAKKRVLEPLGLVEEGAKTAPGKKRPVEPSPQRSPDSSTGIGKKGQQPARKRLNFGQTGDSESVPDPQPLGEPPAAPSGVAPNTMAAGGGAPMADNNEGADGVGNASGNWHCDSTWLGDRVITTSTRTWALPTYNNHLYKQISSASTGASNDNHYFGYSTPWGYFDFNRFHCHFSPRDWQRLITTIGGFRPKRLNFKLFNIQVKEVTDNNGVKTIANNLTSTVQVFTDSEYQLPYVLGSAHQGCLPPFPADVFMIPQYGYLTLNNGSQAVGRSSFYCLEYFPSQMLRTGNNFTFSYTFEDVPFHSSYAHSQSLDRLMNPLIDQYLYYLSRTQTTGGTANTQTLGFSQGGPNTMANQAKNWLPGPCYRQQRVSTTTGQNNNSNFAWTAGTKYHLNGRNSLANPGIAMATHKDDKERFFPSNGILIFGKQNAARDNADYSDVMLTSEEEIKTTNPVATEEYGIVADNLQQQNTAPQIGTVNSQGALPGMVWQNRDVYLQGPIWAKIPHTDGNFHPSPLMGGFGLKHPPPQILIKNTPVPADPPTTFNQSKLNSFITQYSTGQVSVEIEWELQKENSKRWNPEIQYTSNYYKSTSVDFAVNTEGVYSEPHPIGTRYLTRPL

SEQ ID NO: 1120 - protein, 736 aa, Artificial Sequence
  source: /note="Description of Artificial Sequence: Synthetic polypeptide"
MAADGYLPDWLEDTLSEGIRQWWKLKPGPPPPKPAERHKDDGRGLVLPGYKYLGPFNGLDKGEPVNAADAAALEHDKAYDQQLKAGDNPYLRYNHADAEFQERLQEDTSFGGNLGRAVFQAKKRVLEPLGLVEEPVKTAPGKKRPVEQSPQEPDSSSGIGKKGQQPAKKRLNFGQTGDSESVPDPQPLGEPPATPAAVGPTTMASGGGAPMADNNEGADGVGNASGNWHCDSTWMGDRVITTSTRTWALPTYNNHLYKQISSASTGASNDNHYFGYSTPWGYFDFNRFHCHFSPRDWQRLINNNWGFRPKRLNFKLFNIQVKEVTQNEGTKTIANNLTSTIQVFTDSEYQLPYVLGSAHQGCLPPFPADVFMIPQYGYLTLNNGSQAVGRSSFYCLEYFPSQMLRTGNNFQFTYTFEDVPFHSSYAHSQSLDRLMNPLIDQYLYYLSRTQTTGGTANTQTLGFSQGGPNTMANHAKNWLPGPCYRQQRVSTTTGQNNNSNFAWTAGTKYHLNGRNSLANPGIAMATHKDDKERFFPSNGILIFGKQNAARDNADYSDVMLTSEEEIKTTNPVATEEYGIVADNLQQQNTAPQIGTVNSQGALPGMVWQNRDVYLQGPIWAKIPHTDGNFHPSPLMGGFGLKHPPPQILIKNTPVPADPPTTFNQSKLNSFITQYSTGQVSVEIEWELQKENSKRWNPEIQYTSNYYKSTSVDFAVNTEGVYSEPHPIGTRYLTRPL

SEQ ID NO: 1121 - protein, 737 aa, Artificial Sequence
  source: /note="Description of Artificial Sequence: Synthetic polypeptide"
MAADGYLPDWLEDNLSQGIREWWDLKPGAPKPKANQQKQDDGRGLVLPGYKYLGPFNGLDKGEPVNAADAAALEHDKAYDQQLKAGDNPYLRYNHADAEFQERLQEDTSFGGNLGRAVFQAKKRVLEPLGLVEEGAKTAPGKKRPVEPSPQRSPDSSTGIGKKGQQPARKRLNFGQTGDSESVPDPQPLGEPPAAPAAVGPTTMASGGGAPMADNNEGADGVGSSSGNWHCDSQWLGDRVITTSTRTWALPTYNNHLYKQISSASTGASNDNHYFGYSTPWGYFDFNRFHCHFSPRDWQRLINNNWGFRPKRLSFKLFNIQVKEVTQNEGTKTIANNLTSTIQVFTDSEYQLPYVLGSAHQGCLPPFPADVFMIPQYGYLTLNNGSQAVGRSSFYCLEYFPSQMLRTGNNFQFTYTFEDVPFHSSYAHSQSLDRLMNPLIDQYLYYLSRTQTTGGTTNAQTLGFSQGGPNTMANQAKNWLPGPCYRQQRVSTTTGQNNNSNFAWTAGTKYHLNGRNSLANPGIAMATHKDDKERFFPSNGILIFGKQNAARDNADYSDVMLTSEEEIKTTNPVATEEYGIVADNLQQQNTAPQIGTVNSQGALPGMVWQNRDVYLQGPIWAKIPHTDGNFHPSPLMGGFGLKHPPPQILIKNTPVPADPPTTFNQSKLNSFITQYSTGQVSVEIEWELQKENSKRWNPEIQYTSNYYKSTNVDFAVNTEGVYSEPHPIGTRYLTRPL

SEQ ID NO: 1122 - protein, 736 aa, Artificial Sequence
  source: /note="Description of Artificial Sequence: Synthetic polypeptide"
MAADGYLPDWLEDNLSEGIREWWDLKPGAPKPKANQQKQDDGRGLVLPGYKYLGPFNGLDKGEPVNAADAAALEHDKAYDQQLKAGDNPYLRYNHADAEFQERLQEDTSFGGNLGRAVFQAKKRVLEPFGLVEEGAKTAPGKKRPVEQSPQEPDSSSGIGKTGQQPAKKRLNFGQTGDTESVPDPQPIGEPPAAPSGVGPNTMAAGGGAPMADNNEGADGVGSSSGNWHCDSTWMGDRVITTSTRTWALPTYNNHLYKQISSASTGASNDNHYFGYSTPWGYFDFNRFHCHFSPRDWQRLINNNWGFRPKRLNFKLFNIQVKEVTQNEGTKTIANNLTSTIQVFTDSEYQLPYVLGSAHQGCLPPFPADVFMIPQYGYLTLNNGSQAVGRSSFYCLEYFPSQMLRTGNNFQFTYTFEDVPFHSSYAHSQSLDRLMNPLIDQYLYYLSRTQTTGGTANTQTLGFSQGGPNTMANQAKNWLPGPCYRQQRVSTTTGQNNNSNFAWTAGTKYHLNGRNSLANPGIAMATHKDDKERFFPSNGILIFGKQNAARDNADYSDVMLTSEEEIKTTNPVATEEYGIVADNLQQQNTAPQIGTVNSQGALPGMVWQNRDVYLQGPIWAKIPHTDGNFHPSPLMGGFGLKHPPPQILIKNTPVPADPPTTFNQSKLNSFITQYSTGQVSVEIEWELQKENSKRWNPEIQYTSNYYKSTNVDFAVNTEGVYSEPHPIGTRYFTRPL

SEQ ID NO: 1123 - protein, 736 aa, Artificial Sequence
  source: /note="Description of Artificial Sequence: Synthetic polypeptide"
MAADGYLPDWLEDNLSEGIREWWDLKPGAPKPKANQQKQDDGRGLVLPGYKYLGPFNGLDKGEPVNAADAAALEHDKAYDQQLKAGDNPYLRYNHADAEFQERLQEDTSFGGNLGRAVFQAKKRVLEPLGLVEEGAKTAPGKKRPVEQSPQEPDSSSGIGKTGQQPAKKRLNFGQTGDSESVPDPQPLGEPPATPAAVGPTTMASGGGAPMADNNEGADGVGNSSGNWHCDSTWMGDRVITTSTRTWALPTYNNHLYKQISSASTGASNDNHYFGYSTPWGYFDFNRFHCHFSPRDWQRLINNNWGFRPKRLNFKLFNIQVKEVTDNNGVKTIANNLTSTVQVFTDSEYQLPYVLGSAHQGCLPPFPADVFMIPQYGYLTLNNGSQAVGRSSFYCLEYFPSQMLRTGNNFQFTYTFEDVPFHSSYAHSQSLDRLMNPLIDQYLYYLSRTQTTGGTANTQTLGFSQGGPNTMANQAKNWLPGPCYRQQRVSTTTGQNNNSNFAWTAGTKYHLNGRNSLANPGIAMATHKDDKERFFPSNGILIFGKQNAARDNADYSDVMLTSEEEIKTTNPVATEEYGIVADNLQQQNTAPQIGTVNSQGALPGMVWQNRDVYLQGPIWAKIPHTDGNFHPSPLMGGFGLKHPPPQILIKNTPVPADPPTTFNQSKLNSFITQYSTGQVSVEIEWELQKENSKRWNPEIQYTSNYYKSTNVDFAVNTEGVYSEPHPIGTRYLTRPL

SEQ ID NO: 1124 - protein, 736 aa, Artificial Sequence
  source: /note="Description of Artificial Sequence: Synthetic polypeptide"
MAADGYLPDWLEDNLSEGIREWWDLKPGAPKPKANQQKQDDGRGLVLPGYKYLGPFNGLDKGEPVNAADAAALEHDKAYDQQLKAGDNPYLRYNHADAEFQERLQEDTSFGGNLGRAVFQAKKRVLEPLGLVEEGAKTAPGKKRPVEQSPQEPDSSSGIGKTGQQPAKKRLNFGQTGDSESVPDPQPLGEPPATPAAVGPTTMASGGGAPMADNNEGADGVGNASGNWHCDSTWLGDRVITTSTRTWALPTYNNHLYKQISSASTGASNDNHYFGYSTPWGYFDFNRFHCHFSPRDWQRLINNNWGFRPKRLNFKLFNIQVKEVTQNEGTKTIANNLTSTIQVFTDSEYQLPYVLGSAHQGCLPPFPADVFMIPQYGYLTLNNGSQAVGRSSFYCLEYFPSQMLRTGNNFEFSYQFEDVPFHSSYAHSQSLDRLMNPLIDQYLYYLSRTQTTGGTANTQTLGFSQGGPNTMANQAKNWLPGPCYRQQRVSTTTGQNNNSNFAWTAGTKYHMNGRNSLVNPGIAMATHKDDKERFFPSNGILIFGKQNVARDNADYSDVMLTSEEEIKTTNPVATEEYGIVADNLQQQNTAPQIGTVNSQGALPGMVWQNRDVYLQGPIWAKIPHTDGNFHPSPLMGGFGLKHPPPQILIKNTPVPADPPTTFNQSKLNSFITQYSTGQVSVEIEWELQKENSKRWNPEIQYTSNYYKSTSVDFAVNTEGVYSEPHPIGTRYLTRPL

SEQ ID NO: 1125 - DNA, 2217 bp, Artificial Sequence
  source: /note="Description of Artificial Sequence: Synthetic polynucleotide"
atggctgccgatggttatcttccagattggctcgaggacaacctctctgagggcattcgcgagtggtgggcgctgaaacctggagccccgaagcccaaagccaaccagcaaaagcaggacgacggccggggtctggtgcttcctggctacaagtacctcggacccttcaacggactcgacaagggggagcccgtcaacgcggcggacgcagcggccctcgagcacgacaaggcctacgaccagcagctgcaggcgggtgacaatccgtacctgcggtataaccacgccgacgccgagtttcaggagcgtctgcaagaagatacgtcttttgggggcaacctcgggcgagcagtcttccaggccaagaagcgggttctcgaacctctcggtctggttgaggaaggcgctaagacggctcctggaaagaagagaccggtagagccatcaccccagcgttctccagactcctctacgggcatcggcaagaaaggccaacagcccgccagaaaaagactcaattttggtcagactggcgactcagagtcagttccagaccctcaacctctcggagaacctccagcagcgccctctggtgtgggacctaatacaatggctgcaggcggtggcgcaccaatggcagacaataacgaaggcgccgacggagtgggtagttcctcgggaaattggcattgcgattccacatggctgggcgacagagtcatcaccaccagcacccgaacctgggccctgcccacctacaacaaccacctctacaagcaaatctccaacgggacatcgggaggagccaccaacgacaacacctacttcggctacagcaccccctgggggtattttgactttaacagattccactgccacttttcaccacgtgactggcagcgactcatcaacaacaactggggattccggcccaagagactcagcttcaagctcttcaacatccaggtcaaggaggtcacgcagaatgaaggcaccaagaccatcgccaataacctcaccagcaccatccaggtgtttacggactcggagtaccagctgccgtacgttctcggctctgcccaccagggctgcctgcctccgttcccggcggacgtgttcatgattccccagtacggctacctaacactcaacaacggtagtcaggccgtgggacgctcctccttctactgcctggaatactttccttcgcagatgctgagaaccggcaacaacttccagtttacttacaccttcgaggacgtgcctttccacagcagctacgcccacagccagagcttggaccggctgatgaatcctctgattgaccagtacctgtactacttgtctcggactcaaacaacaggaggcacggcaaatacgcagactctgggcttcagccaaggtgggcctaatacaatggccaatcaggcaaagaactggctgccaggaccctgttaccgccaacaacgcgtctcaacgacaaccgggcaaaacaacaatagcaactttgcctggactgctgggaccaaataccatctgaatggaagaaattcattggctaatcctggcatcgctatggcaacacacaaagacgacgaggagcgtttttttcccagtaacgggatcctgatttttggcaaacaaaatgctgccagagacaatgcggattacagcgatgtcatgctcaccagcgaggaagaaatcaaaaccactaaccctgtggctacagaggaatacggtatcgtggcagataacttgcagcagcaaaacacggctcctcaaattggaactgtcaacagccagggggccttacccggtatggtttggcagaaccgggacgtgtacctgcagggtcccatctgggccaagattcctcacacggacggcaacttccacccgtctccgctgatgggcggctttggcctgaaacatcctccgcctcagatcctgatcaagaacacgcctgtacctgcggatcctccgaccaccttcaaccagtcaaagctgaactctttcatcacgcaatacagcaccggacaggtcagcgtggaaattgaatgggagctgcagaaggaaaacagcaagcgctggaaccccgagatccagtacacctccaactactacaaatctacaagtgtggactttgctgttaatacagaaggcgtgtactctgaaccccgccccattggcacccgttacctcacccgtaatctgtaa

SEQ ID NO: 1126 - protein, 738 aa, Artificial Sequence; identical to SEQ ID NO: 116
  source: /note="Description of Artificial Sequence: Synthetic polypeptide"

SEQ ID NO: 1127 - protein, 735 aa, Artificial Sequence
  source: /note="Description of Artificial Sequence: Synthetic polypeptide"
MAADGYLPDWLEDNLSEGVREWWALQPGAPKPKANQQHQDNARGLVLPGYKYLGPGNGLDKGEPVNAADAAALEHDKAYDQQLKAGDNPYLKYNHADAEFQQRLQGDTSFGGNLGRAVFQAKKRVLEPLGLVEQAGETAPGKKRPLIESPQQPDSSTGIGKKGKQPAKKKLVFEDETGAGDGPPEGSTSGAMSDDSEMRAAAGGAAVEGGQGADGVGNASGDWHCDSTWSEGHVTTTSTRTWVLPTYNNHLYKRLGESLQSNTYNGFSTPWGYFDFNRFHCHFSPRDWQRLINNNWGMRPKAMRVKIFNIQVKEVTTSNGETTVANNLTSTVQIFADSSYELPYVMDAGQEGSLPPFPNDVFMVPQYGYCGLVTGNTSQQQTDRNAFYCLEYFPSQMLRTGNNFEITYSFEKVPFHSMYAHSQSLDRLMNPLIDQYLWGLQSTTTGTTLNAGTATTNFTKLRPTNFSNFKKNWLPGPSIKQQGFSKTANQNYKIPATGSDSLIKYETHSTLDGRWSALTPGPPMATAGPADSKFSNSQLIFAGPKQNGNTATVPGTLIFTSEEELAATNATDTDMWGNLPGGDQSNSNLPTVDRLTALGAVPGMVWQNRDIYYQGPIWAKIPHTDGHFHPSPLIGGFGLKHPPPQIFIKNTPVPANPATTFSSTPVNSFITQYSTGQVSVQIDWEIQKERSKRWNPEVQFTSNYGQQNSLLWAPDAAGKYTEPRAIGTRYLTHHL

SEQ ID NO: 1128 - protein, 735 aa, Artificial Sequence
  source: /note="Description of Artificial Sequence: Synthetic polypeptide"
MAADGYLPDWLEDNLSEGVREWWALQPGAPKPKANQQHQDNARGLVLPGYKYLGPGNGLDKGEPVNAADAAALEHDKAYDQQLKAGDNPYLKYNHADAEFQQRLQGDTSFGGNLGRAVFQAKKRVLEPLGLVEQAGETAPGKKRPLIESPQQPDSSTGIGKKGKQPAKKKLVFEDETGAGDGPPEGSTSGAMSDDSEMRAAAGGAAVEGGQGADGVGNASGDWHCDSTWSEGHVTTTSTRTWVLPTYNNHLYKRLGESLQSNTYNGFSTPWGYFDFNRFHCHFSPRDWQRLINNNWGMRPKAMRVKIFNIQVKEVTTSNGETTVANNLTSTVQIFADSSYELPYVMDAGQEGSLPPFPNDVFMVPQYGYCGLVTGNTSQQQTDRNAFYCLEYFPSQMLRTGNNFEITYSFEKVPFHSMYAHSQSLDRLMNPLIDQYLWGLQSTTTGTTLNAGTATTNFTKLRPTNFSNFKKNWLPGPSIKQQGFSKTANQNYLIPATGSDSLIRYETHSTLDGRWSALTPGPPMATAGPADSKFSNSQLIFAGPKQNGNTATVPGTLIFTSEEELAATNATDTDMWGNLPFRDLSSSNLPTVDRSTPLGAVPGMVWQNRDIYYQGPIWAKIPHTDGHFHPSPLIGGFGLKHPPPQIFIKNTPVPANPATTFSSTPVNSFITQYSTGQVSVQIDWEIQKERSKRWNPEVQFTSNYGQQNSLLWAPDAAGKYTEPRAIGTRYLTHHL

SEQ ID NO: 1129 - protein, 735 aa, Artificial Sequence
  source: /note="Description of Artificial Sequence: Synthetic polypeptide"
MAADGYLPDWLEDNLSEGVREWWALQPGAPKPKANQQHQDNARGLVLPGYKYLGPGNGLDKGEPVNAADAAALEHDKAYDQQLKAGDNPYLKYNHADAEFQQRLQGDTSFGGNLGRAVFQAKKRVLEPLGLVEQAGETAPGKKRPLIESPQQPDSSTGIGKKGKQPAKKKLVFEDETGAGDGPPEGSTSGAMSDDSEMRAAAGGAAVEGGQGADGVGNASGDWHCDSTWSEGHVTTTSTRTWVLPTYNNHLYKRLGESLQSNTYNGFSTPWGYFDFNRFHCHFSPRDWQRLINNNWGMRPKAMRVKIFNIQVKEVTTSNGETTVANNLTSTVQIFADSSYELPYVMDAGQEGSLPPFPNDVFMVPQYGYCGLVTGNTSQQQTDRNAFYCLEYFPSQMLRTGNNFEITYSFEKVPFHSMYAHSQSLDRLMNPLIDQYLWGLQSTTTGTTLNAGTATTNFTKLRPTNFSNFKKNWLPGPSIKQQGFSKTANQNYYIPATGSDSLILYETHSTLDGRWSALTPGPPMATAGPADSKFSNSQLIFAGPKQNGNTATVPGTLIFTSEEELAATNATDTDMWGNLPGGDQSNSNLPTVDRLTALGAVPGMVWQNRDIYYQGPIWAKIPHTDGHFHPSPLIGGFGLKHPPPQIFIKNTPVPANPATTFSSTPVNSFITQYSTGQVSVQIDWEIQKERSKRWNPEVQFTSNYGQQNSLLWAPDAAGKYTEPRAIGTRYLTHHL

SEQ ID NO: 1130 - protein, 735 aa, Artificial Sequence
  source: /note="Description of Artificial Sequence: Synthetic polypeptide"
MAADGYLPDWLEDNLSEGVREWWALQPGAPKPKANQQHQDNARGLVLPGYKYLGPGNGLDKGEPVNAADAAALEHDKAYDQQLKAGDNPYLKYNHADAEFQQRLQGDTSFGGNLGRAVFQAKKRVLEPLGLVEQAGETAPGKKRPLIESPQQPDSSTGIGKKGKQPAKKKLVFEDETGAGDGPPEGSTSGAMSDDSEMRAAAGGAAVEGGQGADGVGNASGDWHCDSTWSEGHVTTTSTRTWVLPTYNNHLYKRLGESLQSNTYNGFSTPWGYFDFNRFHCHFSPRDWQRLINNNWGMRPKAMRVKIFNIQVKEVTTSNGETTVANNLTSTVQIFADSSYELPYVMDAGQEGSLPPFPNDVFMVPQYGYCGLVTGNTSQQQTDRNAFYCLEYFPSQMLRTGNNFEITYSFEKVPFHSMYAHSQSLDRLMNPLIDQYLWGLQSTTTGTTLNAGTATTNFTKLRPTNFSNFKKNWLPGPSIKQQGFSKTANQNYGIPATGSDSLIKYETHSTLDGRWSALTPGPPIATAGPADSKFSNSQLIFAGPKQNGNTATVPGTLIFTSEEELAATNATDTDMWGNLPLYDASSSNLPTVDRLTLLGAVPGMVWQNRDIYYQGPIWAKIPHTDGHFHPSPLIGGFGLKHPPPQIFIKNTPVPANPATTFSSTPVNSFITQYSTGQVSVQIDWEIQKERSKRWNPEVQFTSNYGQQNSLLWAPDAAGKYTEPRAIGTRYLTHHL

SEQ ID NO: 1131 - protein, 735 aa, Artificial Sequence
  source: /note="Description of Artificial Sequence: Synthetic polypeptide"
MAADGYLPDWLEDNLSEGVREWWALQPGAPKPKANQQHQDNARGLVLPGYKYLGPGNGLDKGEPVNAADAAALEHDKAYDQQLKAGDNPYLKYNHADAEFQQRLQGDTSFGGNLGRAVFQAKKRVLEPLGLVEQAGETAPGKKRPLIESPQQPDSSTGIGKKGKQPAKKKLVFEDETGAGDGPPEGSTSGAMSDDSEMRAAAGGAAVEGGQGADGVGNASGDWHCDSTWSEGHVTTTSTRTWVLPTYNNHLYKRLGESLQSNTYNGFSTPWGYFDFNRFHCHFSPRDWQRLINNNWGMRPKAMRVKIFNIQVKEVTTSNGETTVANNLTSTVQIFADSSYELPYVMDAGQEGSLPPFPNDVFMVPQYGYCGLVTGNTSQQQTDRNAFYCLEYFPSQMLRTGNNFEITYSFEKVPFHSMYAHSQSLDRLMNPLIDQYLWGLQSTTTGTTLNAGTATTNFTKLRPTNFSNFKKNWLPGPSIKQQGFSKTANQNYTIPATGSDSLITYETHSTLDGRWSALTPGPPGATAGPADSKFSNSQLIFAGPKQNGNTATVPGTLIFTSEEELAATNATDTDMWGNLPRVDTSASNLPTVDRYTNLGAVPGMVWQNRDIYYQGPIWAKIPHTDGHFHPSPLIGGFGLKHPPPQIFIKNTPVPANPATTFSSTPVNSFITQYSTGQVSVQIDWEIQKERSKRWNPEVQFTSNYGQQNSLLWAPDAAGKYTEPRAIGTRYLTHHL

SEQ ID NO: 1132 - protein, 735 aa, Artificial Sequence
  source: /note="Description of Artificial Sequence: Synthetic polypeptide"
MAADGYLPDWLEDNLSEGVREWWALQPGAPKPKANQQHQDNARGLVLPGYKYLGPGNGLDKGEPVNAADAAALEHDKAYDQQLKAGDNPYLKYNHADAEFQQRLQGDTSFGGNLGRAVFQAKKRVLEPLGLVEQAGETAPGKKRPLIESPQQPDSSTGIGKKGKQPAKKKLVFEDETGAGDGPPEGSTSGAMSDDSEMRAAAGGAAVEGGQGADGVGNASGDWHCDSTWSEGHVTTTSTRTWVLPTYNNHLYKRLGESLQSNTYNGFSTPWGYFDFNRFHCHFSPRDWQRLINNNWGMRPKAMRVKIFNIQVKEVTTSNGETTVANNLTSTVQIFADSSYELPYVMDAGQEGSLPPFPNDVFMVPQYGYCGLVTGNTSQQQTDRNAFYCLEYFPSQMLRTGNNFEITYSFEKVPFHSMYAHSQSLDRLMNPLIDQYLWGLQSTTTGTTLNAGTATTNFTKLRPTNFSNFKKNWLPGPSIKQQGFSKTANQNYSIPATGSDSLIKYETHSTLDGRWSALTPGPPFATAGPADSKFSNSQLIFAGPKQNGNTATVPGTLIFTSEEELAATNATDTDMWGNLPDYDSSLSNLPTVDRDTTLGAVPGMVWQNRDIYYQGPIWAKIPHTDGHFHPSPLIGGFGLKHPPPQIFIKNTPVPANPATTFSSTPVNSFITQYSTGQVSVQIDWEIQKERSKRWNPEVQFTSNYGQQNSLLWAPDAAGKYTEPRAIGTRYLTHHL

SEQ ID NO: 1133 - protein, 735 aa, Artificial Sequence
  source: /note="Description of Artificial Sequence: Synthetic polypeptide"
MAADGYLPDWLEDNLSEGVREWWALQPGAPKPKANQQHQDNARGLVLPGYKYLGPGNGLDKGEPVNAADAAALEHDKAYDQQLKAGDNPYLKYNHADAEFQQRLQGDTSFGGNLGRAVFQAKKRVLEPLGLVEQAGETAPGKKRPLIESPQQPDSSTGIGKKGKQPAKKKLVFEDETGAGDGPPEGSTSGAMSDDSEMRAAAGGAAVEGGQGADGVGNASGDWHCDSTWSEGHVTTTSTRTWVLPTYNNHLYKRLGESLQSNTYNGFSTPWGYFDFNRFHCHFSPRDWQRLINNNWGMRPKAMRVKIFNIQVKEVTTSNGETTVANNLTSTVQIFADSSYELPYVMDAGQEGSLPPFPNDVFMVPQYGYCGLVTGNTSQQQTDRNAFYCLEYFPSQMLRTGNNFEITYSFEKVPFHSMYAHSQSLDRLMNPLIDQYLWGLQSTTTGTTLNAGTATTNFTKLRPTNFSNFKKNWLPGPSIKQQGFSKTANQNYSIPATGSDSLIWYETHSTLDGRWSALTPGPPCATAGPADSKFSNSQLIFAGPKQNGNTATVPGTLIFTSEEELAATNATDTDMWGNLPQGDSSLSNLPTVDRMTVLGAVPGMVWQNRDIYYQGPIWAKIPHTDGHFHPSPLIGGFGLKHPPPQIFIKNTPVPANPATTFSSTPVNSFITQYSTGQVSVQIDWEIQKERSKRWNPEVQFTSNYGQQNSLLWAPDAAGKYTEPRAIGTRYLTHHL

SEQ ID NO: 1134 - protein, 735 aa, Artificial Sequence
  source: /note="Description of Artificial Sequence: Synthetic polypeptide"
MAADGYLPDWLEDNLSEGVREWWALQPGAPKPKANQQHQDNARGLVLPGYKYLGPGNGLDKGEPVNAADAAALEHDKAYDQQLKAGDNPYLKYNHADAEFQQRLQGDTSFGGNLGRAVFQAKKRVLEPLGLVEQAGETAPGKKRPLIESPQQPDSSTGIGKKGKQPAKKKLVFEDETGAGDGPPEGSTSGAMSDDSEMRAAAGGAAVEGGQGADGVGNASGDWHCDSTWSEGHVTTTSTRTWVLPTYNNHLYKRLGESLQSNTYNGFSTPWGYFDFNRFHCHFSPRDWQRLINNNWGMRPKAMRVKIFNIQVKEVTTSNGETTVANNLTSTVQIFADSSYELPYVMDAGQEGSLPPFPNDVFMVPQYGYCGLVTGNTSQQQTDRNAFYCLEYFPSQMLRTGNNFEITYSFEKVPFHSMYAHSQSLDRLMNPLIDQYLWGLQSTTTGTTLNAGTATTNFTKLRPTNFSNFKKNWLPGPSIKQQGFSKTANQNYCIPATGSDSLIRYETHSTLDGRWSALTPGPPLATAGPADSKFSNSQLIFAGPKQNGNTATVPGTLIFTSEEELAATNATDTDMWGNLPYKDSSRSNLPTVDRETSLGAVPGMVWQNRDIYYQGPIWAKIPHTDGHFHPSPLIGGFGLKHPPPQIFIKNTPVPANPATTFSSTPVNSFITQYSTGQVSVQIDWEIQKERSKRWNPEVQFTSNYGQQNSLLWAPDAAGKYTEPRAIGTRYLTHHL

SEQ ID NO: 1135 - protein, 735 aa, Artificial Sequence
  source: /note="Description of Artificial Sequence: Synthetic polypeptide"
MAADGYLPDWLEDNLSEGVREWWALQPGAPKPKANQQHQDNARGLVLPGYKYLGPGNGLDKGEPVNAADAAALEHDKAYDQQLKAGDNPYLKYNHADAEFQQRLQGDTSFGGNLGRAVFQAKKRVLEPLGLVEQAGETAPGKKRPLIESPQQPDSSTGIGKKGKQPAKKKLVFEDETGAGDGPPEGSTSGAMSDDSEMRAAAGGAAVEGGQGADGVGNASGDWHCDSTWSEGHVTTTSTRTWVLPTYNNHLYKRLGESLQSNTYNGFSTPWGYFDFNRFHCHFSPRDWQRLINNNWGMRPKAMRVKIFNIQVKEVTTSNGETTVANNLTSTVQIFADSSYELPYVMDAGQEGSLPPFPNDVFMVPQYGYCGLVTGNTSQQQTDRNAFYCLEYFPSQMLRTGNNFEITYSFEKVPFHSMYAHSQSLDRLMNPLIDQYLWGLQSTTTGTTLNAGTATTNFTKLRPTNFSNFKKNWLPGPSIKQQGFSKTANQNYIIPATGSDSLIYYETHSTLDGRWSALTPGPPRATAGPADSKFSNSQLIFAGPKQNGNTATVPGTLIFTSEEELAATNATDTDMWGNLPWIDNSRSNLPTVDRPTSLGAVPGMVWQNKNIYYQGPIWAKIPHTDGHFHPSPLIGGFGLKHPPPQIFIKNTPVPANPATTFTSTPVNSFITQYSTGQVSVQIDWEIQKERSKRWNPEVQFTSNYGQQNSLLWAPDAAGKYTEPRAIGTRYLTHHL

SEQ ID NO: 1136 - protein, 735 aa, Artificial Sequence
  source: /note="Description of Artificial Sequence: Synthetic polypeptide"
MAADGYLPDWLEDNLSEGVREWWALQPGAPKPKANQQHQDNARGLVLPGYKYLGPGNGLDKGEPVNAADAAALEHDKAYDQQLKAGDNPYLKYNHADAEFQQRLQGDTSFGGNLGRAVFQAKKRVLEPLGLVEQAGETAPGKKRPLIESPQQPDSSTGIGKKGKQPAKKKLVFEDETGAGDGPPEGSTSGAMSDDSEMRAAAGGAAVEGGQGADGVGNASGDWHCDSTWSEGHVTTTSTRTWVLPTYNNHLYKRLGESLQSNTYNGFSTPWGYFDFNRFHCHFSPRDWQRLINNNWGMRPKAMRVKIFNIQVKEVTTSNGETTVANNLTSTVQIFADSSYELPYVMDAGQEGSLPPFPNDVFMVPQYGYCGLVTGNTSQQQTDRNAFYCLEYFPSQMLRTGNNFEITYSFEKVPFHSMYAHSQSLDRLMNPLIDQYLWGLQSTTTGTTLNAGTATTNFTKLRPTNFSNFKKNWLPGPSIKQQGFSKTANQNYGIPATGSDSLIIYETHSTLDGRWSALTPGPPRATAGPADSKFSNSQLIFAGPKQNGNTATVPGTLIFTSEEELAATNATDTDMWGNLPGGDQSNSNLPTVDRLTALGAVPGMVWQNRDIYYQGPIWAKIPHTDGHFHPSPLIGGFGLKHPPPQIFIKNTPVPANPATTFSSTPVNSFITQYSTGQVSVQIDWEIQKERSKRWNPEVQFTSNYGQQNSLLWAPDAAGKYTEPRAIGTRYLTHHL

SEQ ID NO: 1137 - protein, 735 aa, Artificial Sequence
  source: /note="Description of Artificial Sequence: Synthetic polypeptide"
MAADGYLPDWLEDNLSEGVREWWALQPGAPKPKANQQHQDNARGLVLPGYKYLGPGNGLDKGEPVNAADAAALEHDKAYDQQLKAGDNPYLKYNHADAEFQQRLQGDTSFGGNLGRAVFQAKKRVLEPLGLVEQAGETAPGKKRPLIESPQQPDSSTGIGKKGKQPAKKKLVFEDETGAGDGPPEGSTSGAMSDDSEMRAAAGGAAVEGGQGADGVGNASGDWHCDSTWSEGHVTTTSTRTWVLPTYNNHLYKRLGESLQSNTYNGFSTPWGYFDFNRFHCHFSPRDWQRLINNNWGMRPKAMRVKIFNIQVKEVTTSNGETTVANNLTSTVQIFADSSYELPYVMDAGQEGSLPPFPNDVFMVPQYGYCGLVTGNTSQQQTDRNAFYCLEYFPSQMLRTGNNFEITYSFEKVPFHSMYAHSQSLDRLMNPLIDQYLWGLQSTTTGTTLNAGTATTNFTKLRPTNFSNFKKNWLPGPSIKQQGFSKTANQNYVIPATESDSLIYYETHSTLDGRWSALTPGPPYATAGPADSKFSNSQLIFAGPKQNGNTATVPGTLIFTSEEELAATNATDTDMWGNLPPRDDSTSNLPTVDRKTYLGAVPGMVWQNRDIYYQGPIWAKIPHTDGHFHPSPLIGGFGLKHPPPQIFIKNTPVPANPATTFSSTPVNSFITQYSTGQVSVQIDWEIQKERSKRWNPEVQFTSNYGQQNSLLWAPDAAGKYTEPRAIGTRYLTHHL

SEQ ID NO: 1138 - protein, 735 aa, Artificial Sequence
  source: /note="Description of Artificial Sequence: Synthetic polypeptide"
MAADGYLPDWLEDNLSEGVREWWALQPGAPKPKANQQHQDNARGLVLPGYKYLGPGNGLDKGEPVNAADAAALEHDKAYDQQLKAGDNPYLKYNHADAEFQQRLQGDTSFGGNLGRAVFQAKKRVLEPLGLVEQAGETAPGKKRPLIESPQQPDSSTGIGKKGKQPAKKKLVFEDETGAGDGPPEGSTSGAMSDDSEMRAAAGGAAVEGGQGADGVGNASGDWHCDSTWSEGHVTTTSTRTWVLPTYNNHLYKRLGESLQSNTYNGFSTPWGYFDFNRFHCHFSPRDWQRLINNNWGMRPKAMRVKIFNIQVKEVTTSNGETTVANNLTSTVQIFADSSYELPYVMDAGQEGSLPPFPNDVFMVPQYGYCGLVTGNTSQQQTDRNAFYCLEYFPSQMLRTGNNFEITYSFEKVPFHSMYAHSQSLDRLMNPLIDQYLWGLQSTTTGTTLNAGTATTNFTKLRPTNFSNFKKNWLPGPSIKQQGFSKTANQNYYIPATGSDSLIIYETHSTLDGRWSALTPGPPIATAGPADSKFSNSQLIFAGPKQNGNTATVPGTLIFTSEEELAATNSTDTDMWGNLPTDDDSRSNLPTVDRMTLLGAVPGMVWQNRDIYYQGPIWAKIPHTDGHFHPSPLIGGFGLKHPPPQIFIKNTPVPANPATTFSSTPVNSFITQYSTGQVSVQIDWEIQKERSKRWNPEVQFTSNYGQQNSLLWAPDAAGKYTEPRAIGTRYLTHHL

SEQ ID NO: 1139 - protein, 735 aa, Artificial Sequence
  source: /note="Description of Artificial Sequence: Synthetic polypeptide"
MAADGYLPDWLEDNLSEGVREWWALQPGAPKPKANQQHQDNARGLVLPGYKYLGPGNGLDKGEPVNAADAAALEHDKAYDQQLKAGDNPYLKYNHADAEFQQRLQGDTSFGGNLGRAVFQAKKRVLEPLGLVEQAGETAPGKKRPLIESPQQPDSSTGIGKKGKQPAKKKLVFEDETGAGDGPPEGSTSGAMSDDSEMRAAAGGAAVEGGQGADGVGNASGDWHCDSTWSEGHVTTTSTRTWVLPTYNNHLYKRLGESLQSNTYNGFSTPWGYFDFNRFHCHFSPRDWQRLINNNWGMRPKAMRVKIFNIQVKEVTTSNGETTVANNLTSTVQIFADSSYELPYVMDAGQEGSLPPFPNDVFMVPQYGYCGLVTGNTSQQQTDRNAFYCLEYFPSQMLRTGNNFEITYSFEKVPFHSMYAHSQSLDRLMNPLIDQYLWGLQSTTTGTTLNAGTATTNFTKLRPTNFSNFKKNWLPGPSIKQQGFSKTANQNYHIPATGSDSLIYYETHSTLDGRWSALTPGPPSATAGPADSKFSNSQLIFAGPKQNGNTATVPGTLIFTSEEELAATNATDTDMWGNLPRRDSSVSNLPTVDRYTDLGAVPGMVWQNRDIYYQGPIWAKIPHTDGHFHPSPLIGGFGLKHPPPQIFIKNTPVPANPATTFSSTPVNSFITQYSTGQVSVQIDWEIQKERSKRWNPEVQFTSNYGQQNSLLWAPDAAGKYTEPRAIGTRYLTHHL

SEQ ID NO: 1140 - protein, 735 aa, Artificial Sequence
  source: /note="Description of Artificial Sequence: Synthetic polypeptide"
MAADGYLPDWLEDNLSEGVREWWALQPGAPKPKANQQHQDNARGLVLPGYKYLGPGNGLDKGEPVNAADAAALEHDKAYDQQLKAGDNPYLKYNHADAEFQQRLQGDTSFGGNLGRAVFQAKKRVLEPLGLVEQAGETAPGKKRPLIESPQQPDSSTGIGKKGKQPAKKKLVFEDETGAGDGPPEGSTSGAMSDDSEMRAAAGGAAVEGGQGADGVGNASGDWHCDSTWSEGHVTTTSTRTWVLPTYNNHLYKRLGESLQSNTYNGFSTPWGYFDFNRFHCHFSPRDWQRLINNNWGMRPKAMRVKIFNIQVKEVTTSNGETTVANNLTSTVQIFADSSYELPYVMDAGQEGSLPPFPNDVFMVPQYGYCGLVTGNTSQQQTDRNAFYCLEYFPSQMLRTGNNFEITYSFEKVPFHSMYAHSQSLDRLMNPLIDQYLWGLQSTTTGTTLNAGTATTNFTKLRPTNFSNFKKNWLPGPSIKQQGFSKTANQNYSIPATGSDSLISYETHSTLDGRWSALTPGPPRATAGPADSKFSNSQLIFAGPKQNGNTATVPGTLIFTSEEELAATNATDTDMWGNLPRHDSSLSNLPTVDRNTGLGAVPGMVWQNRDIYYQGPIWAKIPHTDGHFHPSPLIGGFGLKHPPPQIFIKNTPVPANPATTFSSTPVNSFITQYSTGQVSVQIDWEIQKERSKRWNPEVQFTSNYGQQNSLLWAPDAAGKYTEPRAIGTRYLTHHL

SEQ ID NO: 1141 - protein, 735 aa, Artificial Sequence
  source: /note="Description of Artificial Sequence: Synthetic polypeptide"
MAADGYLPDWLEDNLSEGVREWWALQPGAPKPKANQQHQDNARGLVLPGYKYLGPGNGLDKGEPVNAADAAALEHDKAYDQQLKAGDNPYLKYNHADAEFQQRLQGDTSFGGNLGRAVFQAKKRVLEPLGLVEQAGETAPGKKRPLIESPQQPDSSTGIGKKGKQPAKKKLVFEDETGAGDGPPEGSTSGAMSDDSEMRAAAGGAAVEGGQGADGVGNASGDWHCDSTWSEGHVTTTSTRTWVLPTYNNHLYKRLGESLQSNTYNGFSTPWGYFDFNRFHCHFSPRDWQRLINNNWGMRPKAMRVKIFNIQVKEVTTSNGETTVANNLTSTVQIFADSSYELPYVMDAGQEGSLPPFPNDVFMVPQYGYCGLVTGNTSQQQTDRNAFYCLEYFPSQMLRTGNNFEITYSFEKVPFHSMYAHSQSLDRLMNPLIDQYLWGLQSTTTGTTLNAGTATTNFTKLRPTNFSNFKKNWLPGPSIKQQGFSKTANQNYFIPATGSDSLIRYETHSTLDGRWSALTPGPPLATAGPADSKFSNSQLIFAGPKQNGNTATVPGTLIFTSEEELAATNATDTDMWGNLPVIDFSKSNLPTVDRLTHLGAVPGMVWQNRDIYYQGPIWAKIPHTDGHFHPSPLIGGFGLKHPPPQIFIKNTPVPANPATTFSSTPVNSFITQYSTGQVSVQIDWEIQKERSKRWNPEVQFTSNYGQQNSLLWAPDAAGKYTEPRAIGTRYLTHHL

SEQ ID NO: 1142 - protein, 735 aa, Artificial Sequence
  source: /note="Description of Artificial Sequence: Synthetic polypeptide"
MAADGYLPDWLEDNLSEGVREWWALQPGAPKPKANQQHQDNARGLVLPGYKYLGPGNGLDKGEPVNAADAAALEHDKAYDQQLKAGDNPYLKYNHADAEFQQRLQGDTSFGGNLGRAVFQAKKRVLEPLGLVEQAGETAPGKKRPLIESPQQPDSSTGIGKKGKQPAKKKLVFEDETGAGDGPPEGSTSGAMSDDSEMRAAAGGAAVEGGQGADGVGNASGDWHCDSTWSEGHVTTTSTRTWVLPTYNNHLYKRLGESLQSNTYNGFSTPWGYFDFNRFHCHFSPRDWQRLINNNWGMRPKAMRVKIFNIQVKEVTTSNGETTVANNLTSTVQIFADSSYELPYVMDAGQEGSLPPFPNDVFMVPQYGYCGLVTGNTSQQQTDRNAFYCLEYFPSQMLRTGNNFEITYSFEKVPFHSMYAHSQSLDRLMNPLIDQYLWGLQSTTTGTTLNAGTATTNFTKLRPTNFSNFKKNWLPGPSIKQQGFSKTANQNYKIPATGSDSLIKYETHSTLDGRWSALTPGPPMATAGPADSKFSNSQLIFAGPKQNGNTATVPGTLIFTSEEELAATNATDTDMWGNLPVRDFSLSNLPTVDRTTKLGAVPGMVWQNRDIYYQGPIWAKIPHTDGHFHPSPLIGGFGLKHPPPQIFIKNTPVPANPATTFSSTPVNSFITQYSTGQVSVQIDWEIQKERSKRWNPEVQFTSNYGQQNSLLWAPDAAGKYTEPRAIGTRYLTHHL

SEQ ID NO: 1143 - protein, 735 aa, Artificial Sequence
  source: /note="Description of Artificial Sequence: Synthetic polypeptide"
MAADGYLPDWLEDNLSEGVREWWALQPGAPKPKANQQHQDNARGLVLPGYKYLGPGNGLDKGEPVNAADAAALEHDKAYDQQLKAGDNPYLKYNHADAEFQQRLQGDTSFGGNLGRAVFQAKKRVLEPLGLVEQAGETAPGKKRPLIESPQQPDSSTGIGKKGKQPAKKKLVFEDETGAGDGPPEGSTSGAMSDDSEMRAAAGGAAVEGGQGADGVGNASGDWHCDSTWSEGHVTTTSTRTWVLPTYNNHLYKRLGESLQSNTYNGFSTPWGYFDFNRFHCHFSPRDWQRLINNNWGMRPKAMRVKIFNIQVKEVTTSNGETTVANNLTSTVQIFADSSYELPYVMDAGQEGSLPPFPNDVFMVPQYGYCGLVTGNTSQQQTDRNAFYCLEYFPSQMLRTGNNFEITYSFEKVPFHSMYAHSQSLDRLMNPLIDQYLWGLQSTTTGTTLNAGTATTNFTKLRPTNFSNFKKNWLPGPSIKQQGFSKTANQNYFIPATGSDSLIQYETHSTLDGRWSALTPGPPMATAGPADSKFSNSQLIFAGPKQNGNTATVPGTLIFTSEEELAATNATDTDMWGNLPGGDQSNSNLPTVDRLTALGAVPGMVWQNRDIYYQGPIWAKIPHTDGHFHPSPLIGGFGLKHPPPQIFIKNTPVPANPATTFSSTPVNSFITQYSTGQVSVQIDWEIQKERSKRWNPEVQFTSNYGQQNSLLWAPDAAGKYTEPRAIGTRYLTHHL

SEQ ID NO: 1144 - protein, 735 aa, Artificial Sequence
  source: /note="Description of Artificial Sequence: Synthetic polypeptide"
MAADGYLPDWLEDNLSEGVREWWALQPGAPKPKANQQHQDNARGLVLPGYKYLGPGNGLDKGEPVNAADAAALEHDKAYDQQLKAGDNPYLKYNHADAEFQQRLQGDTSFGGNLGRAVFQAKKRVLEPLGLVEQAGETAPGKKRPLIESPQQPDSSTGIGKKGKQPAKKKLVFEDETGAGDGPPEGSTSGAMSDDSEMRAAAGGAAVEGGQGADGVGNASGDWHCDSTWSEGHVTTTSTRTWVLPTYNNHLYKRLGESLQSNTYNGFSTPWGYFDFNRFHCHFSPRDWQRLINNNWGMRPKAMRVKIFNIQVKEVTTSNGETTVANNLTSTVQIFADSSYELPYVMDAGQEGSLPPFPNDVFMVPQYGYCGLVTGNTSQQQTDRNAFYCLEYFPSQMLRTGNNFEITYSFEKVPFHSMYAHSQSLDRLMNPLIDQYLWGLQSTTTGTTLNAGTATTNFTKLRPTNFSNFKKNWLPGPSIKQQGFSKTANQNYEMPATGSDSLIIYETHSTLDGRWSALTPGPPFATAGPADSKFSNSQLIFAGPKQNGNTATVPGTLIFTSEEELAATNATDTDVWGNLPSGDHSQSNLPTVDRPTMLGAVPGMVWQNRDIYYQGPIWAKIPHTDGHFHPSPLIGGFGLKHPPPQIFIKNTPVPANPATTFISTPVNSFITQYSTGQVSVHIDWEIQKERSKRWNPEVQFTSDYGQHSSLLWAPDAAGKYTEPTAIGTRYLTHHL

SEQ ID NO: 1145 - protein, 734 aa, Artificial Sequence
  source: /note="Description of Artificial Sequence: Synthetic polypeptide"
MAADGYLPDWLEDNLSEGVREWWALQPGAPKPKANQQHQDNARGLVLPGYKYLGPGNGLDKGEPVNAADAAALEHDKAYDQQLKAGDNPYLKYNHADAEFQQRLQGDTSFGGNLGRAVFQAKKRVLEPLGLVEQAGETAPGKKRPLIESPQQPDSSTGIGKKGKQPAKKKLVFEDETGAGDGPPEGSTSGAMSDDSEMRAAAGGAAVEGGQGADGVGNASGDWHCDSTWSEGHVTTTSTRTWVLPTYNNHLYKRLGESLQSNTYNGFSTPWGYFDFNRFHCHFSPRDWQRLINNNWGMRPKAMRVKIFNIQVKEVTTSNGETTVANNLTSTVQIFADSSYELPYVMDAGQEGSLPPFPNDVFMVPQYGYCGLVTGNTSQQQTDRNAFYCLEYFPSQMLRTGNNFEITYSFEKVPFHSMYAHSQSLDRLMNPLIDQYLWGLQSTTTGTTLNAGTATTNFTKLRPTNFSNFKKNWLPGPSIKQQGFSKTANQNDIPATGSDSLIKYETHSTLDGRWSALTPGPPMATAGPADSKFSNSQLIFAGPKQNGNTATVPGTLIFTSEEELAATNATDTDMWGNLPGGDQSNSNLPTVDRLTALGAVPGMVWQNRDIYYQGPIWAKIPHTDGHFHPSPLIGGFGLKHPPPQIFIKNTPVPANPATTFSSTPVNSFITQYSTGQVSVQIDWEIQKERSKRWNPEVQFTSNYGQQNSLLWAPDAAGKYTEPRAIGTRYLTHHL

SEQ ID NO: 1146 - protein, 735 aa, Artificial Sequence
  source: /note="Description of Artificial Sequence: Synthetic polypeptide"
MAADGYLPDWLEDNLSEGVREWWALQPGAPKPKANQQHQDNARGLVLPGYKYLGPGNGLDKGEPVNAADAAALEHDKAYDQQLKAGDNPYLKYNHADAEFQQRLQGDTSFGGNLGRAVFQAKKRVLEPLGLVEQAGETAPGKKRPLIESPQQPDSSTGIGKKGKQPAKKKLVFEDETGAGDGPPEGSTSGAMSDDSEMRAAAGGAAVEGGQGADGVGNASGDWHCDSTWSEGHVTTTSTRTWVLPTYNNHLYKRLGESLQSNTYNGFSTPWGYFDFNRFHCHFSPRDWQRLINNNWGMRPKAMRVKIFNIQVKEVTTSNGETTVANNLTSTVQIFADSSYELPYVMDAGQEGSLPPFPNDVFMVPQYGYCGLVTGNTSQQQTDRNAFYCLEYFPSQMLRTGNNFEITYSFEKVPFHSMYAHSQSLDRLMNPLIDQYLWGLQSTTTGTTLNAGTATTNFTKLRPTNFSNFKKNWLPGPSIKQQGFSKTANQNYIIPATGSDSLITYETHSTLDGRWSALTPGPPVATAGPADSKFSNSQLIFAGPKQNGNTATVPGTLIFTSEEELAATNATDTDMWGNLPFNDDSSSNLPTVDRSTFLGAVPGMVWQNRDIYYQGPIWAKIPHTDGHFHPSPLIGGFGLKHPPPQIFIKNTPVPANPATTFSSTPVNSFITQYSTGQVSVQIDWEIQKERSKRWNPEVQFTSNYGQQNSLLWAPDAAGKYTEPRAIGTRYLTHHL

SEQ ID NO: 1147 - protein, 733 aa, Artificial Sequence
  source: /note="Description of Artificial Sequence: Synthetic polypeptide"
MAADGYLPDWLEDNLSEGIREWWDLKPGAPKPKANQQKQDDGRGLVLPGYKYLGPFNGLDKGEPVNAADAAALEHDKAYDQQLKAGDNPYLRYNHADAEFQERLQEDTSFGGNLGRAVFQAKKRVLEPLGLVEEGAKTAPGKKRPLESPQEPDSSSGIGKKGKQPARKRLNFEEDTGAGDGPPEGSDTSAMSSDIEMRAAPGGNAVDAGQGSDGVGNASGDWHCDSTWSEGKVTTTSTRTWVLPTYNNHLYLRLGTTSSSNTYNGFSTPWGYFDFNRFHCHFSPRDWQRLINNNWGLRPKAMRVKIFNIQVKEVTTSNGETTVANNLTSTVQIFADSSYELPYVMDAGQEGSLPPFPNDVFMVPQYGYCGIVTGENQNQTDRNAFYCLEYFPSQMLRTGNNFEMAYNFEKVPFHSMYAHSQSLDRLMNPLLDQYLWHLQSTTSGETLNQGNAATTFGKIRSGDFAFYRKNWLPGPCVKQQRFSKTASQNYKIPASGGNALLKYDTHYTLNNRWSNIAPGPPMATAGPSDGDFSNAQLIFPGPSVTGNTTTSANNLLFTSEEEIAATNPRDTDMFGQIADNNQNATTAPITGNVTAMGVLPGMVWQNRDIYYQGPIWAKIPHADGHFHPSPLIGGFGLKHPPPQIFIKNTPVPANPATTFTAARVDSFITQYSTGQVAVQIEWEIEKERSKRWNPEVQFTSNYGNQSSMLWAPDTTGKYTEPRVIGSRYLTNHL

SEQ ID NO: 1148 - protein, 742 aa, Artificial Sequence; identical to SEQ ID NO: 959
  source: /note="Description of Artificial Sequence: Synthetic polypeptide"

SEQ ID NO: 1149 - protein, 733 aa, Artificial Sequence; identical to SEQ ID NO: 432
  source: /note="Description of Artificial Sequence: Synthetic polypeptide"

SEQ ID NO: 1150 - protein, 733 aa, Artificial Sequence; identical to SEQ ID NO: 149
  source: /note="Description of Artificial Sequence: Synthetic polypeptide"

SEQ ID NO: 1151 - protein, 733 aa, Artificial Sequence; identical to SEQ ID NO: 436
  source: /note="Description of Artificial Sequence: Synthetic polypeptide"

SEQ ID NO: 1152 - protein, 735 aa, Artificial Sequence
  source: /note="Description of Artificial Sequence: Synthetic polypeptide"
MAADGYLPDWLEDNLSEGVREWWALQPGAPKPKANQQHQDNARGLVLPGYKYLGPGNGLDKGEPVNAADAAALEHDKAYDQQLKAGDNPYLKYNHADAEFQQRLQGDTSFGGNLGRAVFQAKKRVLEPLGLVEQAGETAPGKKRPLIESPQQPDSSTGIGKKGKQPAKKKLVFEDETGAGDGPPEGSTSGAMSDDSEMRAAAGGAAVEGGQGADGVGNASGDWHCDSTWSEGHVTTTSTRTWVLPTYNNHLYKRLGESLQSNTYNGFSTPWGYFDFNRFHCHFSPRDWQRLINNNWGMRPKAMRVKIFNIQVKEVTTSNGETTVANNLTSTVQIFADSSYELPYVMDAGQEGSLPPFPNDVFMVPQYGYCGLVTGNTSQQQTDRNAFYCLEYFPSQMLRTGNNFEITYSFEKVPFHSMYAHSQSLDRLMNPLIDQYLWGLQSTTTGTTLNAGTATTNFTKLRPTNFSNFKKNWLPGPSIKQQGFSKTANQNYEIPATGSDSLIEYETHSTLDGRWSALTPGPPMATAGPADSKFSNSQLIFAGPKQNGNTATVPGTLIFTSEEELAATNATDTDMWGNLPGGDQSSSNLPTVDRLTALGAVPGMVWQNRDIYYQGPIWAKIPHTDGHFHPSPLIGGFGLKHPPPQIFIKNTPVPANPATTFSSTPVNSFITQYSTGQVSVQIDWEIQKERSKRWNPEVQFTSNYGQQNSLLWAPDAAGKYTEPRAIGTRYLTHHL

SEQ ID NO: 1153 - protein, 735 aa, Artificial Sequence
  source: /note="Description of Artificial Sequence: Synthetic polypeptide"
MAADGYLPDWLEDNLSEGVREWWALQPGAPKPKANQQHQDNARGLVLPGYKYLGPGNGLDKGEPVNAADAAALEHDKAYDQQLKAGDNPYLKYNHADAEFQQRLQGDTSFGGNLGRAVFQAKKRVLEPLGLVEQAGETAPGKKRPLIESPQQPDSSTGIGKKGKQPAKKKLVFEDETGAGDGPPEGSTSGAMSDDSEMRAAAGGAAVEGGQGADGVGNASGDWHCDSTWSEGHVTTTSTRTWVLPTYNNHLYKRLGESLQSNTYNGFSTPWGYFDFNRFHCHFSPRDWQRLINNNWGMRPKAMRVKIFNIQVKEVTTSNGETTVANNLTSTVQIFADSSYELPYVMDAGQEGSLPPFPNDVFMVPQYGYCGLVTGNTSQQQTDRNAFYCLEYFPSQMLRTGNNFEITYSFEKVPFHSMYAHSQSLDRLMNPLIDQYLWGLQSTTTGTTLNAGTATTNFTKLRPTNFSNFKKNWLPGPSIKQQGFSKTANQNYEIPATGSDSLIEYETHSTLDGRWSALTPGPPMATAGPADSKFSNSQLIFAGPKQNGNTATVPGTLIFTSEEELAATNATDTDMWGNLPGGDQSSSNLPVVRGLRALGAVPGMVWQNRDIYYQGPIWAKIPHTDGHFHPSPLIGGFGLKHPPPQIFIKNTPVPANPATTFSSTPVNSFITQYSTGQVSVQIDWEIQKERSKRWNPEVQFTSNYGQQNSLLWAPDAAGKYTEPRAIGTRYLTHHL

SEQ ID NO: 1154 - protein, 735 aa, Artificial Sequence
  source: /note="Description of Artificial Sequence: Synthetic polypeptide"
MAADGYLPDWLEDNLSEGVREWWALQPGAPKPKANQQHQDNARGLVLPGYKYLGPGNGLDKGEPVNAADAAALEHDKAYDQQLKAGDNPYLKYNHADAEFQQRLQGDTSFGGNLGRAVFQAKKRVLEPLGLVEQAGETAPGKKRPLIESPQQPDSSTGIGKKGKQPAKKKLVFEDETGAGDGPPEGSTSGAMSDDSEMRAAAGGAAVEGGQGADGVGNASGDWHCDSTWSEGHVTTTSTRTWVLPTYNNHLYKRLGESLQSNTYNGFSTPWGYFDFNRFHCHFSPRDWQRLINNNWGMRPKAMRVKIFNIQVKEVTTSNGETTVANNLTSTVQIFADSSYELPYVMDAGQEGSLPPFPNDVFMVPQYGYCGLVTGNTSQQQTDRNAFYCLEYFPSQMLRTGNNFEITYSFEKVPFHSMYAHSQSLDRLMNPLIDQYLWGLQSTTTGTTLNAGTATTNFTKLRPTNFSNFKKNWLPGPSIKQQGFSKTANQNYEIPATGSDSLIEYETHSTLDGRWSALTPGPPMATAGPADSKFSNSQLIFAGPKQNGNTATVPGTLIFTSEEELAATNATDTDMWGNLPGGDQSSSNLPVVNRLSALGAVPGMVWQNRDIYYQGPIWAKIPHTDGHFHPSPLIGGFGLKHPPPQIFIKNTPVPANPATTFSSTPVNSFITQYSTGQVSVQIDWEIQKERSKRWNPEVQFTSNYGQQNSLLWAPDAAGKYTEPRAIGTRYLTHHL

SEQ ID NO: 1155 - protein, 735 aa, Artificial Sequence
  source: /note="Description of Artificial Sequence: Synthetic polypeptide"
MAADGYLPDWLEDNLSEGVREWWALQPGAPKPKANQQHQDNARGLVLPGYKYLGPGNGLDKGEPVNAADAAALEHDKAYDQQLKAGDNPYLKYNHADAEFQQRLQGDTSFGGNLGRAVFQAKKRVLEPLGLVEQAGETAPGKKRPLIESPQQPDSSTGIGKKGKQPAKKKLVFEDETGAGDGPPEGSTSGAMSDDSEMRAAAGGAAVEGGQGADGVGNASGDWHCDSTWSEGHVTTTSTRTWVLPTYNNHLYKRLGESLQSNTYNGFSTPWGYFDFNRFHCHFSPRDWQRLINNNWGMRPKAMRVKIFNIQVKEVTTSNGETTVANNLTSTVQIFADSSYELPYVMDAGQEGSLPPFPNDVFMVPQYGYCGLVTGNTSQQQTDRNAFYCLEYFPSQMLRTGNNFEITYSFEKVPFHSMYAHSQSLDRLMNPLIDQYLWGLQSTTTGTTLNAGTATTNFTKLRPTNFSNFKKNWLPGPSIKQQGFSKTANQNYEIPATGSDSLIEYETHSTLDGRWSALTPGPPMATAGPADSKFSNSQLIFAGPKQNGNTATVPGTLIFTSEEELAATNATDTDMWGNLPGGDQSSSNLPPVMGLGALGAVPGMVWQNRDIYYQGPIWAKIPHTDGHFHPSPLIGGFGLKHPPPQIFIKNTPVPANPATTFSSTPVNSFITQYSTGQVSVQIDWEIQKERSKRWNPEVQFTSNYGQQNSLLWAPDAAGKYTEPRAIGTRYLTHHL

SEQ ID NO: 1156 - protein, 736 aa, Artificial Sequence
  source: /note="Description of Artificial Sequence: Synthetic polypeptide"
MAADGYLPDWLEDNLSEGVREWWALQPGAPKPKANQQHQDNARGLVLPGYKYLGPGNGLDKGEPVNAADAAALEHDKAYDQQLKAGDNPYLKYNHADAEFQQRLQGDTSFGGNLGRAVFQAKKRVLEPLGLVEQAGETAPGKKRPLIESPQQPDSSTGIGKKGKQPAKKKLVFEDETGAGDGPPEGSTSGAMSDDSEMRAAAGGAAVEGGQGADGVGNASGDWHCDSTWSEGHVTTTSTRTWVLPTYNNHLYKRLGESLQSNTYNGFSTPWGYFDFNRFHCHFSPRDWQRLINNNWGMRPKAMRVKIFNIQVKEVTTSNGETTVANNLTSTVQIFADSSYELPYVMDAGQEGSLPPFPNDVFMVPQYGYCGLVTGNTSQQQTDRNAFYCLEYFPSQMLRTGNNFEITYSFEKVPFHSMYAHSQSLDRLMNPLIDQYLWGLQSTTTGTTLNAGTATTNFTKLRPTNFSNFKKNWLPGPSIKQQGFSKTANQNYEIPATGSDSLIEYETHSTLDGRWSALTPGPPMATAGPADSKFSNSQLIFAGPKQNGNTATVPGTLIFTSEEELAATNATDTDMWGNLPGGDQSRVDRLPTVDRLTALGAVPGMVWQNRDIYYQGPIWAKIPHTDGHFHPSPLIGGFGLKHPPPQIFIKNTPVPANPATTFSSTPVNSFITQYSTGQVSVQIDWEIQKERSKRWNPEVQFTSNYGQQNSLLWAPDAAGKYTEPRAIGTRYLTHHL

SEQ ID NO: 1157 - protein, 736 aa, Artificial Sequence
  source: /note="Description of Artificial Sequence: Synthetic polypeptide"
MAADGYLPDWLEDNLSEGVREWWALQPGAPKPKANQQHQDNARGLVLPGYKYLGPGNGLDKGEPVNAADAAALEHDKAYDQQLKAGDNPYLKYNHADAEFQQRLQGDTSFGGNLGRAVFQAKKRVLEPLGLVEQAGETAPGKKRPLIESPQQPDSSTGIGKKGKQPAKKKLVFEDETGAGDGPPEGSTSGAMSDDSEMRAAAGGAAVEGGQGADGVGNASGDWHCDSTWSEGHVTTTSTRTWVLPTYNNHLYKRLGESLQSNTYNGFSTPWGYFDFNRFHCHFSPRDWQRLINNNWGMRPKAMRVKIFNIQVKEVTTSNGETTVANNLTSTVQIFADSSYELPYVMDAGQEGSLPPFPNDVFMVPQYGYCGLVTGNTSQQQTDRNAFYCLEYFPSQMLRTGNNFEITYSFEKVPFHSMYAHSQSLDRLMNPLIDQYLWGLQSTTTGTTLNAGTATTNFTKLRPTNFSNFKKNWLPGPSIKQQGFSKTANQNYEIPATGSDSLIEYETHSTLDGRWSALTPGPPMATAGPADSKFSNSQLIFAGPKQNGNTATVPGTLIFTSEEELAATNATDTDMWGNLPGGDQSRALRLPTVDRLTALGAVPGMVWQNRDIYYQGPIWAKIPHTDGHFHPSPLIGGFGLKHPPPQIFIKNTPVPANPATTFSSTPVNSFITQYSTGQVSVQIDWEIQKERSKRWNPEVQFTSNYGQQNSLLWAPDAAGKYTEPRAIGTRYLTHHL

SEQ ID NO: 1158 - DNA, 1172 bp, Artificial Sequence
  source: /note="Description of Artificial Sequence: Synthetic polynucleotide"
cttaattaggctgcgcgctcgctcgctcactgaggccgcccgggcaaagcccgggcgtcgggcgacctttggtcgcccggcctcagtgagcgagcgagcgcgcagagagggagtggccaactccatcactaggggttccttgtagttaatgattaacccgccatgctacttatctaccagggtaatggggatcctctagaactatagctagtcgacattgattattgactagttattaatagtaatcaattacggggtcattagttcatagcccatatatggagttccgcgttacataacttacggtaaatggcccgcctggctgaccgcccaacgacccccgcccattgacgtcaataatgacgtatgttcccatagtaacgccaatagggactttccattgacgtcaatgggtggactatttacggtaaactgcccacttggcagtacatcaagtgtatcatatgccaagtacgccccctattgacgtcaatgacggtaaatggcccgcctggcattatgcccagtacatgaccttatgggactttcctacttggcagtacatctacgtattagtcatcgctattaccatgtcgaggccacgttctgcttcactctccccatctcccccccctccccacccccaattttgtatttatttattttttaattattttgtgcagcgatgggggcggggggggggggcgcgcgccaggcggggcggggcggggcgaggggcggggcggggcgaggcggagaggtgcggcggcagccaatcagagcggcgcgctccgaaagtttccttttatggcgaggcggcggcggcggcggccctataaaaagcgaagcgcgcggcgggcgggagcaagctttattgcggtagtttatcacagttaaattgctaacgcagtcagtgcttctgacacaacagtctcgaacttaagctgcagaagttggtcgtgaggcactgggcaggtaagtatcaaggttacaagacaggtttaaggagaccaatagaaactgggcttgtcgagacagagaagactcttgcgtttctgataggcacctattggtcttactgacatccactttgcctttctctccacaggtgtccactcccagttcaattacagctcttaaggctagagtacttaatacgactcsactatagg

SEQ ID NO: 1159 - DNA, 3231 bp, Artificial Sequence
  source: /note="Description of Artificial Sequence: Synthetic polynucleotide"
taagaattcacgcgtggtacctctagagtcgacccgggcggcctcgaggacggggtgaactacgcctgaggatccgatctttttccctctgccaaaaattatggggacatcatgaagccccttgagcatctgacttctggctaataaaggaaatttattttcattgcaatagtgtgttggaattttttgtgtctctcactcggaagcaattcgttgatctgaatttcgaccacccataatacccattaccctggtagataagtagcatggcgggttaatcattaactacaaggaacccctagtgatggagttggccactccctctctgcgcgctcgctcgctcactgaggccgggcgaccaaaggtcgcccgacgcccgggctttgcccgggcggcctcagtgagcgagcgagcgcgcagccttaattaacctaattcactggccgtcgttttacaacgtcgtgactgggaaaaccctggcgttacccaacttaatcgccttgcagcacatccccctttcgccagctggcgtaatagcgaagaggcccgcaccgatcgcccttcccaacagttgcgcagcctgaatggcgaatgggacgcgccctgtagcggcgcattaagcgcggcgggtgtggtggttacgcgcagcgtgaccgctacacttgccagcgccctagcgcccgctcctttcgctttcttcccttcctttctcgccacgttcgccggctttccccgtcaagctctaaatcgggggctccctttagggttccgatttagtgctttacggcacctcgaccccaaaaaacttgattagggtgatggttcacgtagtgggccatcgccctgatagacggtttttcgccctttgacgttggagtccacgttctttaatagtggactcttgttccaaactggaacaacactcaaccctatctcggtctattcttttgatttataagggattttgccgatttcggcctattggttaaaaaatgagctgatttaacaaaaatttaacgcgaattttaacaaaatattaacgcttacaatttaggtggcacttttcggggaaatgtgcgcggaacccctatttgtttatttttctaaatacattcaaatatgtatccgctcatgagacaataaccctgataaatgcttcaataatattgaaaaaggaagagtatgagtattcaacatttccgtgtcgcccttattcccttttttgcggcattttgccttcctgtttttgctcacccagaaacgctggtgaaagtaaaagatgctgaagatcagttgggtgcacgagtgggttacatcgaactggatctcaacagcggtaagatccttgagagttttcgccccgaagaacgttttccaatgatgagcacttttaaagttctgctatgtggcgcggtattatcccgtattgacgccgggcaagagcaactcggtcgccgcatacactattctcagaatgacttggttgagtactcaccagtcacagaaaagcatcttacggatggcatgacagtaagagaattatgcagtgctgccataaccatgagtgataacactgcggccaacttacttctgacaacgatcggaggaccgaaggagctaaccgcttttttgcacaacatgggggatcatgtaactcgccttgatcgttgggaaccggagctgaatgaagccataccaaacgacgagcgtgacaccacgatgcctgtagcaatggcaacaacgttgcgcaaactattaactggcgaactacttactctagcttcccggcaacaattaatagactggatggaggcggataaagttgcaggaccacttctgcgctcggcccttccggctggctggtttattgctgataaatctggagccggtgagcgtgggtctcgcggtatcattgcagcactggggccagatggtaagccctcccgtatcgtagttatctacacgacggggagtcaggcaactatggatgaacgaaatagacagatcgctgagataggtgcctcactgattaagcattggtaactgtcagaccaagtttactcatatatactttagattgatttaaaacttcatttttaatttaaaaggatctaggtgaagatcctttttgataatctcatgaccaaaatcccttaacgtgagttttcgttccactgagcgtcagaccccgtagaaaagatcaaaggatcttcttgagatcctttttttctgcgcgtaatctgctgcttgcaaacaaaaaaaccaccgctaccagcggtggtttgtttgccggatcaagagctaccaactctttttccgaaggtaactggcttcagcagagcgcagataccaaatactgttcttctagtgtagccgtagttaggccaccacttcaagaactctgtagcaccgcctacatacctcgctctgctaatcctgttaccagtggctgctgccagtggcgataagtcgtgtcttaccgggttggactcaagacgatagttaccggataaggcgcagcggtcgggctgaacggggggttcgtgcacacagcccagcttggagcgaacgacctacaccgaactgagatacctacagcgtgagctatgagaaagcgccacgcttcccgaagggagaaaggcggacaggtatccggtaagcggcagggtcggaacaggagagcgcacgagggagcttccagggggaaacgcctggtatctttatagtcctgtcgggtttcgccacctctgacttgagcgtcgatttttgtgatgctcgtcaggggggcggagcctatggaaaaacgccagcaacgcggcctttttacggttcctggccttttgctggccttttgctcacatgttctttcctgcgttatcccctgattctgtggataaccgtattaccgcctttgagtgagctgataccgctcgccgcagccgaacgaccgagcgcagcgagtcagtgagcgaggaagcggaagagcgcccaatacgcaaaccgcctctccccgcgcgttggccgattcattaatgcagctggcacgacaggtttcccgactggaaagcgggcagtgagcgcaacgcaattaatgtgagttagctcactcattaggcaccccaggctttacactttatgcttccggctcgtatgttgtgtggaattgtgagcggataacaatttcacacaggaaacagctatgaccatgattacgccagatttaattaaggc

SEQ ID NO: 1160 - protein, 737 aa, Artificial Sequence
  source: /note="Description of Artificial Sequence: Synthetic polypeptide"
  MOD_RES (264)..(264): Any amino acid
  MOD_RES (266)..(266): Any amino acid
  MOD_RES (268)..(268): Any amino acid
  MOD_RES (448)..(448): Any amino acid
  MOD_RES (459)..(460): Any amino acid
  MOD_RES (467)..(467): Any amino acid
  MOD_RES (470)..(471): Any amino acid
  MOD_RES (474)..(474): Any amino acid
  MOD_RES (495)..(495): Any amino acid
  MOD_RES (516)..(516): Any amino acid
  MOD_RES (533)..(533): Any amino acid
  MOD_RES (547)..(547): Any amino acid
  MOD_RES (551)..(551): Any amino acid
  MOD_RES (555)..(555): Any amino acid
  MOD_RES (557)..(557): Any amino acid
  MOD_RES (561)..(561): Any amino acid
  MOD_RES (563)..(563): Any amino acid
  MOD_RES (577)..(577): Any amino acid
  MOD_RES (583)..(583): Any amino acid
  MOD_RES (593)..(593): Any amino acid
  MOD_RES (596)..(596): Any amino acid
  MOD_RES (661)..(662): Any amino acid
  MOD_RES (664)..(665): Any amino acid
  MOD_RES (710)..(710): Any amino acid
  MOD_RES (717)..(719): Any amino acid
  MOD_RES (723)..(723): Any amino acid
MAADGYLPDWLEDNLSEGIREWWDLKPGAPKPKANQQKQDDGRGLVLPGYKYLGPFNGLDKGEPVNAADAAALEHDKAYDQQLKAGDNPYLRYNHADAEFQERLQEDTSFGGNLGRAVFQAKKRVLEPLGLVEEGAKTAPGKKRPVEPSPQRSPDSSTGIGKKGQQPAKKRLNFGQTGDSESVPDPQPLGEPPAGPSGLGSGTMAAGGGAPMADNNEGADGVGNASGNWHCDSTWLGDRVITTSTRTWALPTYNNHLYKQISSXSXGXTNDNHYFGYSTPWGYFDFNRFHCHFSPRDWQRLINNNWGFRPKRLNFKLFNIQVKEVTTNDGVTTIANNLTSTVQVFSDSEYQLPYVLGSAHQGCLPPFPADVFMIPQYGYLTLNNGSQAVGRSSFYCLEYFPSQMLRTGNNFTFSYTFEDVPFHSSYAHSQSLDRLMNPLIDQYLYYLXRTQSTGGTAGXXELLFSQXGPXXMSXQAKNWLPGPCYRQQRVSKTLXQNNNSNFAWTGATKYHLNGRXSLVNPGVAMATHKDDEXRFFPSSGVLIFGKXGAGXNNTXLXNVMXTXEEEIKTTNPVATEXYGVVAXNLQSSNTAPXTGXVNSQGALPGMVWQNRDVYLQGPIWAKIPHTDGNFHPSPLMGGFGLKHPPPQILIKNTPVPANPPXXFXXAKFASFITQYSTGQVSVEIEWELQKENSKRWNPEIQYTSNYAKSXNVDFAVXXXGVYXEPRPIGTRYLTRNL

SEQ ID NO: 1161 - protein, 737 aa, Artificial Sequence
  source: /note="Description of Artificial Sequence: Synthetic polypeptide"
MAADGYLPDWLEDNLSEGIREWWDLKPGAPKPKANQQKQDDGRGLVLPGYKYLGPFNGLDKGEPVNAADAAALEHDKAYDQQLKAGDNPYLRYNHADAEFQERLQEDTSFGGNLGRAVFQAKKRVLEPLGLVEEGAKTAPGKKRPVEPSPQRSPDSSTGIGKKGQQPAKKRLNFGQTGDSESVPDPQPLGEPPAGPSGLGSGTMAAGGGAPMADNNEGADGVGNASGNWHCDSTWLGDRVITTSTRTWALPTYNNHLYKQISSASSGSTNDNHYFGYSTPWGYFDFNRFHCHFSPRDWQRLINNNWGFRPKRLNFKLFNIQVKEVTTNDGVTTIANNLTSTVQVFSDSEYQLPYVLGSAHQGCLPPFPADVFMIPQYGYLTLNNGSQAVGRSSFYCLEYFPSQMLRTGNNFTFSYTFEDVPFHSSYAHSQSLDRLMNPLIDQYLYYLARTQSTGGTAGNRELLFSQGGPSNMSAQAKNWLPGPCYRQQRVSKTLAQNNNSNFAWTGATKYHLNGRDSLVNPGVAMATHKDDEDRFFPSSGVLIFGKEGAGANNTALENVMLTNEEEIKTTNPVATEQYGVVASNLQSSNTAPATGAVNSQGALPGMVWQNRDVYLQGPIWAKIPHTDGNFHPSPLMGGFGLKHPPPQILIKNTPVPANPPATFTPAKFASFITQYSTGQVSVEIEWELQKENSKRWNPEIQYTSNYAKSTNVDFAVNNEGVYSEPRPIGTRYLTRNL

SEQ ID NO: 1162 - protein, 737 aa, Artificial Sequence
  source: /note="Description of Artificial Sequence: Synthetic polypeptide"
MAADGYLPDWLEDNLSEGIREWWDLKPGAPKPKANQQKQDDGRGLVLPGYKYLGPFNGLDKGEPVNAADAAALEHDKAYDQQLKAGDNPYLRYNHADAEFQERLQEDTSFGGNLGRAVFQAKKRVLEPLGLVEEGAKTAPGKKRPVEPSPQRSPDSSTGIGKKGQQPAKKRLNFGQTGDSESVPDPQPLGEPPAGPSGLGSGTMAAGGGAPMADNNEGADGVGNASGNWHCDSTWLGDRVITTSTRTWALPTYNNHLYKQISSQSSGSTNDNHYFGYSTPWGYFDFNRFHCHFSPRDWQRLINNNWGFRPKRLNFKLFNIQVKEVTTNDGVTTIANNLTSTVQVFSDSEYQLPYVLGSAHQGCLPPFPADVFMIPQYGYLTLNNGSQAVGRSSFYCLEYFPSQMLRTGNNFTFSYTFEDVPFHSSYAHSQSLDRLMNPLIDQYLYYLSRTQSTGGTAGNRELLFSQGGPANMSAQAKNWLPGPCYRQQRVSKTLSQNNNSNFAWTGATKYHLNGRDSLVNPGVAMATHKDDEERFFPSSGVLIFGKQGAGANNTTLDNVMMTSEEEIKTTNPVATEQYGVVASNLQSSNTAPQTGTVNSQGALPGMVWQNRDVYLQGPIWAKIPHTDGNFHPSPLMGGFGLKHPPPQILIKNTPVPANPPAVFSPAKFASFITQYSTGQVSVEIEWELQKENSKRWNPEIQYTSNYAKSTNVDFAVNSEGVYSEPRPIGTRYLTRNL

SEQ ID NO: 1163 - protein, 737 aa, Artificial Sequence
  source: /note="Description of Artificial Sequence: Synthetic polypeptide"
MAADGYLPDWLEDNLSEGIREWWDLKPGAPKPKANQQKQDDGRGLVLPGYKYLGPFNGLDKGEPVNAADAAALEHDKAYDQQLKAGDNPYLRYNHADAEFQERLQEDTSFGGNLGRAVFQAKKRVLEPLGLVEEGAKTAPGKKRPVEPSPQRSPDSSTGIGKKGQQPAKKRLNFGQTGDSESVPDPQPLGEPPAGPSGLGSGTMAAGGGAPMADNNEGADGVGNASGNWHCDSTWLGDRVITTSTRTWALPTYNNHLYKQISSASSGSTNDNHYFGYSTPWGYFDFNRFHCHFSPRDWQRLINNNWGFRPKRLNFKLFNIQVKEVTTNDGVTTIANNLTSTVQVFSDSEYQLPYVLGSAHQGCLPPFPADVFMIPQYGYLTLNNGSQAVGRSSFYCLEYFPSQMLRTGNNFTFSYTFEDVPFHSSYAHSQSLDRLMNPLIDQYLYYLARTQSTGGTAGTRELLFSQGGPSNMSAQAKNWLPGPCYRQQRVSKTLTQNNNSNFAWTGATKYHLNGRDSLVNPGVAMATHKDDEDRFFPSSGVLIFGKQGAGANNTALDNVMITNEEEIKTTNPVATEQYGVVASNLQSSNTAPATGTVNSQGALPGMVWQNRDVYLQGPIWAKIPHTDGNFHPSPLMGGFGLKHPPPQILIKNTPVPANPPTVFSPAKFASFITQYSTGQVSVEIEWELQKENSKRWNPEIQYTSNYAKSTNVDFAVNSEGVYTEPRPIGTRYLTRNL

SEQ ID NO: 1164 - protein, 737 aa, Artificial Sequence
  source: /note="Description of Artificial Sequence: Synthetic polypeptide"
  MOD_RES (264)..(264): Any amino acid
  MOD_RES (448)..(448): Any amino acid
  MOD_RES (459)..(459): Any amino acid
  MOD_RES (470)..(470): Any amino acid
  MOD_RES (495)..(495): Any amino acid
  MOD_RES (533)..(533): Any amino acid
  MOD_RES (547)..(547): Any amino acid
  MOD_RES (555)..(555): Any amino acid
  MOD_RES (557)..(557): Any amino acid
  MOD_RES (561)..(561): Any amino acid
  MOD_RES (563)..(563): Any amino acid
  MOD_RES (593)..(593): Any amino acid
  MOD_RES (596)..(596): Any amino acid
  MOD_RES (661)..(662): Any amino acid
  MOD_RES (664)..(664): Any amino acid
  MOD_RES (718)..(718): Any amino acid
  MOD_RES (723)..(723): Any amino acid
MAADGYLPDWLEDNLSEGIREWWDLKPGAPKPKANQQKQDDGRGLVLPGYKYLGPFNGLDKGEPVNAADAAALEHDKAYDQQLKAGDNPYLRYNHADAEFQERLQEDTSFGGNLGRAVFQAKKRVLEPLGLVEEGAKTAPGKKRPVEPSPQRSPDSSTGIGKKGQQPAKKRLNFGQTGDSESVPDPQPLGEPPAGPSGLGSGTMAAGGGAPMADNNEGADGVGNASGNWHCDSTWLGDRVITTSTRTWALPTYNNHLYKQISSXSSGSTNDNHYFGYSTPWGYFDFNRFHCHFSPRDWQRLINNNWGFRPKRLNFKLFNIQVKEVTTNDGVTTIANNLTSTVQVFSDSEYQLPYVLGSAHQGCLPPFPADVFMIPQYGYLTLNNGSQAVGRSSFYCLEYFPSQMLRTGNNFTFSYTFEDVPFHSSYAHSQSLDRLMNPLIDQYLYYLXRTQSTGGTAGXRELLFSQGGPXNMSAQAKNWLPGPCYRQQRVSKTLXQNNNSNFAWTGATKYHLNGRDSLVNPGVAMATHKDDEXRFFPSSGVLIFGKXGAGANNTXLXNVMXTXEEEIKTTNPVATEQYGVVASNLQSSNTAPXTGXVNSQGALPGMVWQNRDVYLQGPIWAKIPHTDGNFHPSPLMGGFGLKHPPPQILIKNTPVPANPPXXFXPAKFASFITQYSTGQVSVEIEWELQKENSKRWNPEIQYTSNYAKSTNVDFAVNXEGVYXEPRPIGTRYLTRNL

SEQ ID NO: 1165 - protein, 737 aa, Artificial Sequence
  source: /note="Description of Artificial Sequence: Synthetic polypeptide"
  MOD_RES (264)..(264): Any amino acid
  MOD_RES (448)..(448): Any amino acid
  MOD_RES (470)..(470): Any amino acid
  MOD_RES (533)..(533): Any amino acid
  MOD_RES (547)..(547): Any amino acid
  MOD_RES (555)..(555): Any amino acid
  MOD_RES (557)..(557): Any amino acid
  MOD_RES (561)..(561): Any amino acid
  MOD_RES (563)..(563): Any amino acid
  MOD_RES (593)..(593): Any amino acid
  MOD_RES (596)..(596): Any amino acid
  MOD_RES (662)..(662): Any amino acid
  MOD_RES (664)..(664): Any amino acid
  MOD_RES (718)..(718): Any amino acid
MAADGYLPDWLEDNLSEGIREWWDLKPGAPKPKANQQKQDDGRGLVLPGYKYLGPFNGLDKGEPVNAADAAALEHDKAYDQQLKAGDNPYLRYNHADAEFQERLQEDTSFGGNLGRAVFQAKKRVLEPLGLVEEGAKTAPGKKRPVEPSPQRSPDSSTGIGKKGQQPAKKRLNFGQTGDSESVPDPQPLGEPPAGPSGLGSGTMAAGGGAPMADNNEGADGVGNASGNWHCDSTWLGDRVITTSTRTWALPTYNNHLYKQISSXSSGSTNDNHYFGYSTPWGYFDFNRFHCHFSPRDWQRLINNNWGFRPKRLNFKLFNIQVKEVTTNDGVTTIANNLTSTVQVFSDSEYQLPYVLGSAHQGCLPPFPADVFMIPQYGYLTLNNGSQAVGRSSFYCLEYFPSQMLRTGNNFTFSYTFEDVPFHSSYAHSQSLDRLMNPLIDQYLYYLXRTQSTGGTAGNRELLFSQGGPXNMSAQAKNWLPGPCYRQQRVSKTLSQNNNSNFAWTGATKYHLNGRDSLVNPGVAMATHKDDEXRFFPSSGVLIFGKXGAGANNTXLXNVMXTXEEEIKTTNPVATEQYGVVASNLQSSNTAPXTGXVNSQGALPGMVWQNRDVYLQGPIWAKIPHTDGNFHPSPLMGGFGLKHPPPQILIKNTPVPANPPAXFXPAKFASFITQYSTGQVSVEIEWELQKENSKRWNPEIQYTSNYAKSTNVDFAVNXEGVYSEPRPIGTRYLTRNL

SEQ ID NO: 1166 - DNA, 2217 bp, Artificial Sequence
  source: /note="Description of Artificial Sequence: Synthetic polynucleotide"
atggctgccgatggttatcttccagattggctcgaggacactctctctgaaggaataagacagtggtggaagctcaaacctggcccaccaccaccaaagcccgcagagcggcataaggacgacagcaggggtcttgtgcttcctgggtacaagtacctcggacccttcaacggactcgacaagggagagccggtcaacgaggcagacgccgcggccctcgagcacgacaaagcctacgaccggcagctcgacagcggagacaacccgtacctcaagtacaaccacgccgacgcggagtttcaggagcgccttaaagaagatacgtcttttgggggcaacctcggacgagcagtcttccaggcgaaaaagagggttcttgaacctctgggcctggttgaggaacctgttaagacggctccgggaaagaagagaccggtagagccatcaccccagcgttctccagactcctctacgggcatcggcaagaaaggccaacagcccgccagaaaaagactcaattttggtcagactggcgactcagagtcagttccagaccctcaacctctcggagaacctccagcagcgccctctggtgtgggacctaatacaatggctgcaggcggtggcgcaccaatggcagacaataacgaaggcgccgacggagtgggtagttcctcgggaaattggcattgcgattccacatggctgggcgacagagtcatcaccaccagcacccgaacctgggccctgcccacctacaacaaccacctctacaagcaaatctccaacgggacatcgggaggagccaccaacgacaacacctacttcggctacagcaccccctgggggtattttgactttaacagattccactgccacttttcaccacgtgactggcagcgactcatcaacaacaactggggattccggcccaagagactcagcttcaagctcttcaacatccaggtcaaggaggtcacgcagaatgaaggcaccaagaccatcgccaataacctcaccagcaccatccaggtgtttacggactcggagtaccagctgccgtacgttctcggctctgcccaccagggctgcctgcctccgttcccggcggacgtgttcatgattccccagtacggctacctaacactcaacaacggtagtcaggccgtgggacgctcctccttctactgcctggaatactttccttcgcagatgctgagaaccggcaacaacttccagtttacttacaccttcgaggacgtgcctttccacagcagctacgcccacagccagagcttggaccggctgatgaatcctctgattgaccagtacctgtactacttgtctcggactcaaacaacaggaggcacggcaaatacgcagactctgggcttcagccaaggtgggcctaatacaatggccaatcaggcaaagaactggctgccaggaccctgttaccgccaacaacgcgtctcaacgacaaccgggcaaaacaacaatagcaactttgcctggactgctgggaccaaataccatctgaatggaagaaattcattggctaatcctggcatcgctatggcaacacacaaagacgacgaggagcgtttttttcccagtaacgggatcctgatttttggcaaacaaaatgctgccagagacaatgcggattacagcgatgtcatgctcaccagcgaggaagaaatcaaaaccactaaccctgtggctacagaggaatacggtatcgtggcagataacttgcagcagcaaaacacggctcctcaaattggaactgtcaacagccagggggccttacccggtatggtctggcagaaccgggacgtgtacctgcagggtcccatctgggccaagattcctcacacggacggcaacttccacccgtctccgctgatgggcggctttggcctgaaacatcctccgcctcagatcctgatcaagaacacgcctgtacctgcggatcctccgaccaccttcaaccagtcaaagctgaactctttcatcacgcaatacagcaccggacaggtcagcgtggaaattgaatgggagctgcagaaggaaaacagcaagcgctggaaccccgagatccagtacacctccaactactacaaatctacaagtgtggactttgctgttaatacagaaggcgtgtactctgaaccccgccccattggcacccgttacctcacccgtaatctgtaa

SEQ ID NO: 1167 - protein, 733 aa, Artificial Sequence; identical to SEQ ID NO: 952
  source: /note="Description of Artificial Sequence: Synthetic polypeptide"

SEQ ID NO: 1168 - DNA, 2203 bp, Artificial Sequence
  source: /note="Description of Artificial Sequence: Synthetic polynucleotide"
atgtcttttgttgatcaccctccagattggttggaagaagttggtgaaggtcttcgcgagtttttgggccttgaagcgggcccaccgaaaccaaaacccaatcagcagcatcaagatcaagcccgtggtcttgtgctgcctggttataactatctcggacccggaaacggtctcgatcgaggagagcctgtcaacagggcagacgaggtcgcgcgagagcacgacatctcgtacaacgagcagcttgaggcgggagacaacccctacctcaagtacaaccacgcggacgccgagtttcaggagaagctcgccgacgacacatccttcgggggaaacctcggaaaggcagtctttcaggccaagaaaagggttctcgaaccttttggcctggttgaagagggtgctaagacggcccctaccggaaagcggatagacgaccactttccaaaaagaaagaaggctcggaccgaagaggactccaagccttccacctcgtcagacgccgaagctggacccagcggatcccagcagctgcaaatcccagcccaaccagcctcaagtttgggagctgatacaatgtctgcgggaggtggcggcccattgggcgacaataaccaaggtgccgatggagtgggcaatgcctcgggagattggcattgcgattccacgtggatgggggacagagtcgtcaccaagtccacccgaacctgggtgctgcccagctacaacaaccaccagtaccgagagatcaaaagcggctccgtcgacggaagcaacgccaacgcctactttggatacagcaccccctgggggtactttgactttaaccgcttccacagccactggagcccccgagactggcaaagactcatcaacaactactggggcttcagaccccggtccctcagagtcaaaatcttcaacattcaagtcaaagaggtcacggtgcaggactccaccaccaccatcgccaacaacctcacctccaccgtccaagtgtttacggacgacgactaccagctgccctacgtcgtcggcaacgggaccgagggatgcctgccggccttccctccgcaggtctttacgctgccgcagtacggttacgcgacgctgaaccgcgacaacacagaaaatcccaccgagaggagcagcttcttctgcctagagtactttcccagcaagatgctgagaacgggcaacaactttgagtttacctacaactttgaggaggtgcccttccactccagcttcgctcccagtcagaacctgttcaagctggccaacccgctggtggaccagtacttgtaccgcttcgtgagcacaaataacactggcggagtccagttcaacaagaacctggccgggagatacgccaacacctacaaaaactggttcccggggcccatgggccgaacccagggctggaacctgggctccggggtcaaccgcgccagtgtcagcgccttcgccacgaccaataggatggagctcgagggcgcgagttaccaggtgcccccgcagccgaacggcatgaccaacaacctccagggcagcaacacctatgccctggagaacactatgatcttcaacagccagccggcgaacccgggcaccaccgccacgtacctcgagggcaacatgctcatcaccagcgagagcgagacgcagccggtgaaccgcgtggcgtacaacgtcggcgggcaggtggccaccaacaaccagagctccaccactgcccccgcgaccggcacgtacaacctccaggaaatcgtgcccggcagcgtgtggatggagagggacgtgtacctccaaggacccatctgggccaagatcccagagacgggggcgcactttcacccctctccggccatgggcggattcggactcaaacacccaccgcccatgatgctcatcaagaacacgcctgtgcccggaaatatcaccagcttctcggacgtgcccgtcagcagcttcatcacccagtacagcaccgggcaggtcaccgtggagatggagtgggagctcaagaaggaaaactccaagaggtggaacccagagatccagtacacaaacaactacaacgacccccagtttgtggactttgccccggacagcaccggggaatacagaaccaccagacctatcggaacccgataccttacccgacccctttaacccattcatgtcgcataccctcaataaa

SEQ ID NO: 1169 - protein, 724 aa, Artificial Sequence
  source: /note="Description of Artificial Sequence: Synthetic polypeptide"
MSFVDHPPDWLEEVGEGLREFLGLEAGPPKPKPNQQHQDQARGLVLPGYNYLGPGNGLDRGEPVNRADEVAREHDISYNEQLEAGDNPYLKYNHADAEFQEKLADDTSFGGNLGKAVFQAKKRVLEPFGLVEEGAKTAPTGKRIDDHFPKRKKARTEEDSKPSTSSDAEAGPSGSQQLQIPAQPASSLGADTMSAGGGGPLGDNNQGADGVGNASGDWHCDSTWMGDRVVTKSTRTWVLPSYNNHQYREIKSGSVDGSNANAYFGYSTPWGYFDFNRFHSHWSPRDWQRLINNYWGFRPRSLRVKIFNIQVKEVTVQDSTTTIANNLTSTVQVFTDDDYQLPYVVGNGTEGCLPAFPPQVFTLPQYGYATLNRDNTENPTERSSFFCLEYFPSKMLRTGNNFEFTYNFEEVPFHSSFAPSQNLFKLANPLVDQYLYRFVSTNNTGGVQFNKNLAGRYANTYKNWFPGPMGRTQGWNLGSGVNRASVSAFATTNRMELEGASYQVPPQPNGMTNNLQGSNTYALENTMIFNSQPANPGTTATYLEGNMLITSESETQPVNRVAYNVGGQVATNNQSSTTAPATGTYNLQEIVPGSVWMERDVYLQGPIWAKIPETGAHFHPSPAMGGFGLKHPPPMMLIKNTPVPGNITSFSDVPVSSFITQYSTGQVTVEMEWELKKENSKRWNPEIQYTNNYNDPQFVDFAPDSTGEYRTTRPIGTRYLTRPL

SEQ ID NO: 1170 - DNA, 2203 bp, Artificial Sequence
  source: /note="Description of Artificial Sequence: Synthetic polynucleotide"
atgtcttttgttgatcaccctccagattggttggaagaagttggtgaaggtcttcgcgagtttttgggccttgaagcgggcccaccgaaaccaaaacccaatcagcagcatcaagatcaagcccgtggtcttgtgctgcctggttataactatctcggacccggaaacggtctcgatcgaggagagcctgtcaacagggcagacgaggtcgcgcgagagcacgacatctcgtacaacgagcagcttgaggcgggagacaacccctacctcaagtacaaccacgcggacgccgagtttcaggagaagctcgccgacgacacatccttcgggggaaacctcggaaaggcagtctttcaggccaagaaaagggttctcgaaccttttggcctggttgaagagggtgctaagacggcccctaccggaaagcggatagacgaccactttccaaaaagaaagaaggctcggaccgaagaggactccaagccttccacctcgtcagacgccgaagctggacccagcggatcccagcagctgcaaatcccagcccaaccagcctcaagtttgggagctgatacaatgtctgcgggaggtggcggcccattgggcgacaataaccaaggtgccgatggagtgggcaatgcctcgggagattggcattgcgattccacgtggatgggggacagagtcgtcaccaagtccacccgaacctgggtgctgcccagctacaacaaccaccagtaccgagagatcaaaagcggctccgtcgacggaagcaacgccaacgcctactttggatacagcaccccctgggggtactttgactttaaccgcttccacagccactggagcccccgagactggcaaagactcatcaacaactactggggcttcagaccccggtccctcagagtcaaaatcttcaacattcaagtcaaagaggtcacggtgcaggactccaccaccaccatcgccaacaacctcacctccaccgtccaagtgtttacggacgacgactaccagctgccctacgtcgtcggcaacgggaccgagggatgcctgccggccttccctccgcaggtctttacgctgccgcagtacggttacgcgacgctgaaccgcgacaacacagaaaatcccaccgagaggagcagcttcttctgcctagagtactttcccagcaagatgctgagaacgggcaacaactttgagtttacctacaactttgaggaggtgcccttccactccagcttcgctcccagtcagaacctgttcaagctggccaacccgctggtggaccagtacttgtaccgcttcgtgagcacaaataacactggcggagtccagttcaacaagaacctggccgggagatacgccaacacctacaaaaactggttcccggggcccatgggccgaacccagggctggaacctgggctccggggtcaaccgcgccagtgtcagcgccttcgccacgaccaataggatggagctcgagggcgcgagttaccaggtgcccccgcagccgaacggcatgaccaacaacctccagggcagcaacacctatgccctggagaacactatgatcttcaacagccagccggcgaacccgggcaccaccgccacgtacctcgagggcaacatgctcatcaccagcgagagcgagacgcagccggtgaaccgcgtggcgtacaacgtcggcgggcagatggccaccaacaaccagagctccaccactgcccccgcgaccggcacggtcaacctccaggaaatcgtgcccggcagcgtgtggatggagagggacgtgtacctccaaggacccatctgggccaagatcccagagacgggggcgcactttcacccctctccggccatgggcggattcggactcaaacacccaccgcccatgatgctcatcaagaacacgcctgtgcccggaaatatcaccagcttctcggacgtgcccgtcagcagcttcatcacccagtacagcaccgggcaggtcaccgtggagatggagtgggagctcaagaaggaaaactccaagaggtggaacccagagatccagtacacaaacaactacaacgacccccagtttgtggactttgccccggacagcaccggggaatacagaaccaccagacctatcggaacccgataccttacccgacccctttaacccattcatgtcgcataccctcaataaa

SEQ ID NO: 1171 - protein, 724 aa, Artificial Sequence
  source: /note="Description of Artificial Sequence: Synthetic polypeptide"
MSFVDHPPDWLEEVGEGLREFLGLEAGPPKPKPNQQHQDQARGLVLPGYNYLGPGNGLDRGEPVNRADEVAREHDISYNEQLEAGDNPYLKYNHADAEFQEKLADDTSFGGNLGKAVFQAKKRVLEPFGLVEEGAKTAPTGKRIDDHFPKRKKARTEEDSKPSTSSDAEAGPSGSQQLQIPAQPASSLGADTMSAGGGGPLGDNNQGADGVGNASGDWHCDSTWMGDRVVTKSTRTWVLPSYNNHQYREIKSGSVDGSNANAYFGYSTPWGYFDFNRFHSHWSPRDWQRLINNYWGFRPRSLRVKIFNIQVKEVTVQDSTTTIANNLTSTVQVFTDDDYQLPYVVGNGTEGCLPAFPPQVFTLPQYGYATLNRDNTENPTERSSFFCLEYFPSKMLRTGNNFEFTYNFEEVPFHSSFAPSQNLFKLANPLVDQYLYRFVSTNNTGGVQFNKNLAGRYANTYKNWFPGPMGRTQGWNLGSGVNRASVSAFATTNRMELEGASYQVPPQPNGMTNNLQGSNTYALENTMIFNSQPANPGTTATYLEGNMLITSESETQPVNRVAYNVGGQMATNNQSSTTAPATGTVNLQEIVPGSVWMERDVYLQGPIWAKIPETGAHFHPSPAMGGFGLKHPPPMMLIKNTPVPGNITSFSDVPVSSFITQYSTGQVTVEMEWELKKENSKRWNPEIQYTNNYNDPQFVDFAPDSTGEYRTTRPIGTRYLTRPL

SEQ ID NO: 1172 - DNA, 2203 bp, Artificial Sequence
  source: /note="Description of Artificial Sequence: Synthetic polynucleotide"
atgtcttttgttgatcaccctccagattggttggaagaagttggtgaaggtcttcgcgagtttttgggccttgaagcgggcccaccgaaaccaaaacccaatcagcagcatcaagatcaagcccgtggtcttgtgctgcctggttataactatctcggacccggaaacggtctcgatcgaggagagcctgtcaacagggcagacgaggtcgcgcgagagcacgacatctcgtacaacgagcagcttgaggcgggagacaacccctacctcaagtacaaccacgcggacgccgagtttcaggagaagctcgccgacgacacatccttcgggggaaacctcggaaaggcagtctttcaggccaagaaaagggttctcgaaccttttggcctggttgaagagggtgctaagacggcccctaccggaaagcggatagacgaccactttccaaaaagaaagaaggctcggaccgaagaggactccaagccttccacctcgtcagacgccgaagctggacccagcggatcccagcagctgcaaatcccagcccaaccagcctcaagtttgggagctgatacaatgtctgcgggaggtggcggcccattgggcgacaataaccaaggtgccgatggagtgggcaatgcctcgggagattggcattgcgattccacgtggatgggggacagagtcgtcaccaagtccacccgaacctgggtgctgcccagctacaacaaccaccagtaccgagagatcaaaagcggctccgtcgacggaagcaacgccaacgcctactttggatacagcaccccctgggggtactttgactttaaccgcttccacagccactggagcccccgagactggcaaagactcatcaacaactactggggcttcagaccccggtccctcagagtcaaaatcttcaacattcaagtcaaagaggtcacggtgcaggactccaccaccaccatcgccaacaacctcacctccaccgtccaagtgtttacggacgacgactaccagctgccctacgtcgtcggcaacgggaccgagggatgcctgccggccttccctccgcaggtctttacgctgccgcagtacggttacgcgacgctgaaccgcgacaacacagaaaatcccaccgagaggagcagcttcttctgcctagagtactttcccagcaagatgctgagaacgggcaacaactttgagtttacctacaactttgaggaggtgcccttccactccagcttcgctcccagtcagaacctgttcaagctggccaacccgctggtggaccagtacttgtaccgcttcgtgagcacaaataacactggcggagtccagttcaacaagaacctggccgggagatacgccaacacctacaaaaactggttcccggggcccatgggccgaacccagggctggaacctgggctccggggtcaaccgcgccagtgtcagcgccttcgccacgaccaataggatggagctcgagggcgcgagttaccaggtgcccccgcagccgaacggcatgaccaacaacctccagggcagcaacacctatgccctggagaacactatgatcttcaacagccagccggcgaacccgggcaccaccgccacgtacctcgagggcaacatgctcatcaccagcgagagcgagacgcagccggtgaaccgcgtggcgtacaacgtcggcgggcagatggccaccaacaaccagagctccaccactgcccccgcgaccggcacgtacaacacccaggaaatcgtgcccggcagcgtgtggatggagagggacgtgtacctccaaggacccatctgggccaagatcccagagacgggggcgcactttcacccctctccggccatgggcggattcggactcaaacacccaccgcccatgatgctcatcaagaacacgcctgtgcccggaaatatcaccagcttctcggacgtgcccgtcagcagcttcatcacccagtacagcaccgggcaggtcaccgtggagatggagtgggagctcaagaaggaaaactccaagaggtggaacccagagatccagtacacaaacaactacaacgacccccagtttgtggactttgccccggacagcaccggggaatacagaaccaccagacctatcggaacccgataccttacccgacccctttaacccattcatgtcgcataccctcaataaa

SEQ ID NO: 1173 - protein, 724 aa, Artificial Sequence
  source: /note="Description of Artificial Sequence: Synthetic polypeptide"
MSFVDHPPDWLEEVGEGLREFLGLEAGPPKPKPNQQHQDQARGLVLPGYNYLGPGNGLDRGEPVNRADEVAREHDISYNEQLEAGDNPYLKYNHADAEFQEKLADDTSFGGNLGKAVFQAKKRVLEPFGLVEEGAKTAPTGKRIDDHFPKRKKARTEEDSKPSTSSDAEAGPSGSQQLQIPAQPASSLGADTMSAGGGGPLGDNNQGADGVGNASGDWHCDSTWMGDRVVTKSTRTWVLPSYNNHQYREIKSGSVDGSNANAYFGYSTPWGYFDFNRFHSHWSPRDWQRLINNYWGFRPRSLRVKIFNIQVKEVTVQDSTTTIANNLTSTVQVFTDDDYQLPYVVGNGTEGCLPAFPPQVFTLPQYGYATLNRDNTENPTERSSFFCLEYFPSKMLRTGNNFEFTYNFEEVPFHSSFAPSQNLFKLANPLVDQYLYRFVSTNNTGGVQFNKNLAGRYANTYKNWFPGPMGRTQGWNLGSGVNRASVSAFATTNRMELEGASYQVPPQPNGMTNNLQGSNTYALENTMIFNSQPANPGTTATYLEGNMLITSESETQPVNRVAYNVGGQMATNNQSSTTAPATGTYNTQEIVPGSVWMERDVYLQGPIWAKIPETGAHFHPSPAMGGFGLKHPPPMMLIKNTPVPGNITSFSDVPVSSFITQYSTGQVTVEMEWELKKENSKRWNPEIQYTNNYNDPQFVDFAPDSTGEYRTTRPIGTRYLTRPL

SEQ ID NO: 1174 - DNA, 2203 bp, Artificial Sequence
  source: /note="Description of Artificial Sequence: Synthetic polynucleotide"
atgtcttttgttgatcaccctccagattggttggaagaagttggtgaaggtcttcgcgagtttttgggccttgaagcgggcccaccgaaaccaaaacccaatcagcagcatcaagatcaagcccgtggtcttgtgctgcctggttataactatctcggacccggaaacggtctcgatcgaggagagcctgtcaacagggcagacgaggtcgcgcgagagcacgacatctcgtacaacgagcagcttgaggcgggagacaacccctacctcaagtacaaccacgcggacgccgagtttcaggagaagctcgccgacgacacatccttcgggggaaacctcggaaaggcagtctttcaggccaagaaaagggttctcgaaccttttggcctggttgaagagggtgctaagacggcccctaccggaaagcggatagacgaccactttccaaaaagaaagaaggctcggaccgaagaggactccaagccttccacctcgtcagacgccgaagctggacccagcggatcccagcagctgcaaatcccagcccaaccagcctcaagtttgggagctgatacaatgtctgcgggaggtggcggcccattgggcgacaataaccaaggtgccgatggagtgggcaatgcctcgggagattggcattgcgattccacgtggatgggggacagagtcgtcaccaagtccacccgaacctgggtgctgcccagctacaacaaccaccagtaccgagagatcaaaagcggctccgtcgacggaagcaacgccaacgcctactttggatacagcaccccctgggggtactttgactttaaccgcttccacagccactggagcccccgagactggcaaagactcatcaacaactactggggcttcagaccccggtccctcagagtcaaaatcttcaacattcaagtcaaagaggtcacggtgcaggactccaccaccaccatcgccaacaacctcacctccaccgtccaagtgtttacggacgacgactaccagctgccctacgtcgtcggcaacgggaccgagggatgcctgccggccttccctccgcaggtctttacgctgccgcagtacggttacgcgacgctgaaccgcgacaacacagaaaatcccaccgagaggagcagcttcttctgcctagagtactttcccagcaagatgctgagaacgggcaacaactttgagtttacctacaactttgaggaggtgcccttccactccagcttcgctcccagtcagaacctgttcaagctggccaacccgctggtggaccagtacttgtaccgcttcgtgagcacaaataacactggcggagtccagttcaacaagaacctggccgggagatacgccaacacctacaaaaactggttcccggggcccatgggccgaacccagggctggaacctgggctccggggtcaaccgcgccagtgtcagcgccttcgccacgaccaataggatggagctcgagggcgcgagttaccaggtgcccccgcagccgaacggcatgaccaacaacctccagggcagcaacacctatgccctggagaacactatgatcttcaacagccagccggcgaacccgggcaccaccgccacgtacctcgagggcaacatgctcatcaccagcgagagcgagacgcagccggtgaaccgcgtggcgtacaacgtcggcgggcagatggccaccaacaaccagagctccaccactgcccccgcgaccggcacggtcaacacccaggaaatcgtgcccggcagcgtgtggatggagagggacgtgtacctccaaggacccatctgggccaagatcccagagacgggggcgcactttcacccctctccggccatgggcggattcggactcaaacacccaccgcccatgatgctcatcaagaacacgcctgtgcccggaaatatcaccagcttctcggacgtgcccgtcagcagcttcatcacccagtacagcaccgggcaggtcaccgtggagatggagtgggagctcaagaaggaaaactccaagaggtggaacccagagatccagtacacaaacaactacaacgacccccagtttgtggactttgccccggacagcaccggggaatacagaaccaccagacctatcggaacccgataccttacccgacccctttaacccattcatgtcgcataccctcaataaa

SEQ ID NO: 1175 - protein, 724 aa, Artificial Sequence
  source: /note="Description of Artificial Sequence: Synthetic polypeptide"
MSFVDHPPDWLEEVGEGLREFLGLEAGPPKPKPNQQHQDQARGLVLPGYNYLGPGNGLDRGEPVNRADEVAREHDISYNEQLEAGDNPYLKYNHADAEFQEKLADDTSFGGNLGKAVFQAKKRVLEPFGLVEEGAKTAPTGKRIDDHFPKRKKARTEEDSKPSTSSDAEAGPSGSQQLQIPAQPASSLGADTMSAGGGGPLGDNNQGADGVGNASGDWHCDSTWMGDRVVTKSTRTWVLPSYNNHQYREIKSGSVDGSNANAYFGYSTPWGYFDFNRFHSHWSPRDWQRLINNYWGFRPRSLRVKIFNIQVKEVTVQDSTTTIANNLTSTVQVFTDDDYQLPYVVGNGTEGCLPAFPPQVFTLPQYGYATLNRDNTENPTERSSFFCLEYFPSKMLRTGNNFEFTYNFEEVPFHSSFAPSQNLFKLANPLVDQYLYRFVSTNNTGGVQFNKNLAGRYANTYKNWFPGPMGRTQGWNLGSGVNRASVSAFATTNRMELEGASYQVPPQPNGMTNNLQGSNTYALENTMIFNSQPANPGTTATYLEGNMLITSESETQPVNRVAYNVGGQMATNNQSSTTAPATGTVNTQEIVPGSVWMERDVYLQGPIWAKIPETGAHFHPSPAMGGFGLKHPPPMMLIKNTPVPGNITSFSDVPVSSFITQYSTGQVTVEMEWELKKENSKRWNPEIQYTNNYNDPQFVDFAPDSTGEYRTTRPIGTRYLTRPL

SEQ ID NO: 1176 - DNA, 2203 bp, Artificial Sequence
  source: /note="Description of Artificial Sequence: Synthetic polynucleotide"
atgtcttttgttgatcaccctccagattggttggaagaagttggtgaaggtcttcgcgagtttttgggccttgaagcgggcccaccgaaaccaaaacccaatcagcagcatcaagatcaagcccgtggtcttgtgctgcctggttataactatctcggacccggaaacggtctcgatcgaggagagcctgtcaacagggcagacgaggtcgcgcgagagcacgacatctcgtacaacgagcagcttgaggcgggagacaacccctacctcaagtacaaccacgcggacgccgagtttcaggagaagctcgccgacgacacatccttcgggggaaacctcggaaaggcagtctttcaggccaagaaaagggttctcgaaccttttggcctggttgaagagggtgctaagacggcccctaccggaaagcggatagacgaccactttccaaaaagaaagaaggctcggaccgaagaggactccaagccttccacctcgtcagacgccgaagctggacccagcggatcccagcagctgcaaatcccagcccaaccagcctcaagtttgggagctgatacaatgtctgcgggaggtggcggcccattgggcgacaataaccaaggtgccgatggagtgggcaatgcctcgggagattggcattgcgattccacgtggatgggggacagagtcgtcaccaagtccacccgaacctgggtgctgcccagctacaacaaccaccagtaccgagagatcaaaagcggctccgtcgacggaagcaacgccaacgcctactttggatacagcaccccctgggggtactttgactttaaccgcttccacagccactggagcccccgagactggcaaagactcatcaacaactactggggcttcagaccccggtccctcagagtcaaaatcttcaacattcaagtcaaagaggtcacggtgcaggactccaccaccaccatcgccaacaacctcacctccaccgtccaagtgtttacggacgacgactaccagctgccctacgtcgtcggcaacgggaccgagggatgcctgccggccttccctccgcaggtctttacgctgccgcagtacggttacgcgacgctgaaccgcgacaacacagaaaatcccaccgagaggagcagcttcttctgcctagagtactttcccagcaagatgctgagaacgggcaacaactttgagtttacctacaactttgaggaggtgcccttccactccagcttcgctcccagtcagaacctgttcaagctggccaacccgctggtggaccagtacttgtaccgcttcgtgagcacaaataacactggcggagtccagttcaacaagaacctggccgggagatacgccaacacctacaaaaactggttcccggggcccatgggccgaacccagggctggaacctgggctccggggtcaaccgcgccagtgtcagcgccttcgccacgaccaataggatggagctcgagggcgcgagttaccaggtgcccccgcagccgaacggcatgaccaacaacctccagggcagcaacacctatgccctggagaacactatgatcttcaacagccagccggcgaacccgggcaccaccgccacgtacctcgagggcaacatgctcatcaccagcgagagcgagacgcagccggtgaaccgcgtggcgtacaacgtcggcgggcagatggccaccaacaaccagagctccaccactgcccccgcgaccggcacgtacaacctccaggaaatcgtgcccggcagcgtgtggatggagagggacgtgtacctccaaggacccatctgggccaagatcccagagacgggggcgcactttcacccctctccggccatgggcggattcggactcaaacacccaccgcccatgatgctcatcaagaacacgcctgtgcccggaaatatcaccagcttctcggccgtgcccgtcagcagcttcatcacccagtacagcaccgggcaggtcaccgtggagatggagtgggagctcaagaaggaaaactccaagaggtggaacccagagatccagtacacaaacaactacaacgacccccagtttgtggactttgccccggacagcaccggggaatacagaaccaccagacctatcggaacccgataccttacccgacccctttaacccattcatgtcgcataccctcaataaa

SEQ ID NO: 1177 - protein, 724 aa, Artificial Sequence
  source: /note="Description of Artificial Sequence: Synthetic polypeptide"
MSFVDHPPDWLEEVGEGLREFLGLEAGPPKPKPNQQHQDQARGLVLPGYNYLGPGNGLDRGEPVNRADEVAREHDISYNEQLEAGDNPYLKYNHADAEFQEKLADDTSFGGNLGKAVFQAKKRVLEPFGLVEEGAKTAPTGKRIDDHFPKRKKARTEEDSKPSTSSDAEAGPSGSQQLQIPAQPASSLGADTMSAGGGGPLGDNNQGADGVGNASGDWHCDSTWMGDRVVTKSTRTWVLPSYNNHQYREIKSGSVDGSNANAYFGYSTPWGYFDFNRFHSHWSPRDWQRLINNYWGFRPRSLRVKIFNIQVKEVTVQDSTTTIANNLTSTVQVFTDDDYQLPYVVGNGTEGCLPAFPPQVFTLPQYGYATLNRDNTENPTERSSFFCLEYFPSKMLRTGNNFEFTYNFEEVPFHSSFAPSQNLFKLANPLVDQYLYRFVSTNNTGGVQFNKNLAGRYANTYKNWFPGPMGRTQGWNLGSGVNRASVSAFATTNRMELEGASYQVPPQPNGMTNNLQGSNTYALENTMIFNSQPANPGTTATYLEGNMLITSESETQPVNRVAYNVGGQMATNNQSSTTAPATGTYNLQEIVPGSVWMERDVYLQGPIWAKIPETGAHFHPSPAMGGFGLKHPPPMMLIKNTPVPGNITSFSAVPVSSFITQYSTGQVTVEMEWELKKENSKRWNPEIQYTNNYNDPQFVDFAPDSTGEYRTTRPIGTRYLTRPL

SEQ ID NO: 1178 - DNA, 2203 bp, Artificial Sequence
  source: /note="Description of Artificial Sequence: Synthetic polynucleotide"
atgtcttttgttgatcaccctccagattggttggaagaagttggtgaaggtcttcgcgagtttttgggccttgaagcgggcccaccgaaaccaaaacccaatcagcagcatcaagatcaagcccgtggtcttgtgctgcctggttataactatctcggacccggaaacggtctcgatcgaggagagcctgtcaacagggcagacgaggtcgcgcgagagcacgacatctcgtacaacgagcagcttgaggcgggagacaacccctacctcaagtacaaccacgcggacgccgagtttcaggagaagctcgccgacgacacatccttcgggggaaacctcggaaaggcagtctttcaggccaagaaaagggttctcgaaccttttggcctggttgaagagggtgctaagacggcccctaccggaaagcggatagacgaccactttccaaaaagaaagaaggctcggaccgaagaggactccaagccttccacctcgtcagacgccgaagctggacccagcggatcccagcagctgcaaatcccagcccaaccagcctcaagtttgggagctgatacaatgtctgcgggaggtggcggcccattgggcgacaataaccaaggtgccgatggagtgggcaatgcctcgggagattggcattgcgattccacgtggatgggggacagagtcgtcaccaagtccacccgaacctgggtgctgcccagctacaacaaccaccagtaccgagagatcaaaagcggctccgtcgacggaagcaacgccaacgcctactttggatacagcaccccctgggggtactttgactttaaccgcttccacagccactggagcccccgagactggcaaagactcatcaacaactactggggcttcagaccccggtccctcagagtcaaaatcttcaacattcaagtcaaagaggtcacggtgcaggactccaccaccaccatcgccaacaacctcacctccaccgtccaagtgtttatggacgacgactaccagctgccctacgtcgtcggcaacgggaccgagggatgcctgccggccttccctccgcaggtctttacgctgccgcagtacggttacgcgacgctgaaccgcgacaacacagaaaatcccaccgagaggagcagcttcttctgcctagagtactttcccagcaagatgctgagaacgggcaacaactttgagtttacctacaactttgaggaggtgcccttccactccagcttcgctcccagtcagaacctgttcaagctggccaacccgctggtggaccagtacttgtaccgcttcgtgagcacaaataacactggcggagtccagttcaacaagaacctggccgggagatacgccaacacctacaaaaactggttcccggggcccatgggccgaacccagggctggaacctgggctccggggtcaaccgcgccagtgtcagcgccttcgccacgaccaataggatggagctcgagggcgcgagttaccaggtgcccccgcagccgaacggcatgaccaacaacctccagggcagcaacacctatgccctggagaacactatgatcttcaacagccagccggcgaacccgggcaccaccgccacgtacctcgagggcaacatgctcatcaccagcgagagcgagacgcagccggtgaaccgcgtggcgtacaacgtcggcgggcagatggccaccaacaaccagagctccaccactgcccccgcgaccggcacgtacaacctccaggaaatcgtgcccggcagcgtgtggatggagagggacgtgtacctccaaggacccatctgggccaagatcccagagacgggggcgcactttcacccctctccggccatgggcggattcggactcaaacacccaccgcccatgatgctcatcaagaacacgcctgtgcccggaaatatcaccagcttctcggacgtgcccgtcagcagcttcatcacccagtacagcaccgggcaggtcaccgtggagatggagtgggagctcaagaaggaaaactccaagaggtggaacccagagatccagtacacaaacaactacaacgacccccagtttgtggactttgccccggacagcaccggggaatacagaaccaccagacctatcggaacccgataccttacccgacccctttaacccattcatgtcgcataccctcaataaa

SEQ ID NO: 1179 - protein, 724 aa, Artificial Sequence
  source: /note="Description of Artificial Sequence: Synthetic polypeptide"
MSFVDHPPDWLEEVGEGLREFLGLEAGPPKPKPNQQHQDQARGLVLPGYNYLGPGNGLDRGEPVNRADEVAREHDISYNEQLEAGDNPYLKYNHADAEFQEKLADDTSFGGNLGKAVFQAKKRVLEPFGLVEEGAKTAPTGKRIDDHFPKRKKARTEEDSKPSTSSDAEAGPSGSQQLQIPAQPASSLGADTMSAGGGGPLGDNNQGADGVGNASGDWHCDSTWMGDRVVTKSTRTWVLPSYNNHQYREIKSGSVDGSNANAYFGYSTPWGYFDFNRFHSHWSPRDWQRLINNYWGFRPRSLRVKIFNIQVKEVTVQDSTTTIANNLTSTVQVFMDDDYQLPYVVGNGTEGCLPAFPPQVFTLPQYGYATLNRDNTENPTERSSFFCLEYFPSKMLRTGNNFEFTYNFEEVPFHSSFAPSQNLFKLANPLVDQYLYRFVSTNNTGGVQFNKNLAGRYANTYKNWFPGPMGRTQGWNLGSGVNRASVSAFATTNRMELEGASYQVPPQPNGMTNNLQGSNTYALENTMIFNSQPANPGTTATYLEGNMLITSESETQPVNRVAYNVGGQMATNNQSSTTAPATGTYNLQEIVPGSVWMERDVYLQGPIWAKIPETGAHFHPSPAMGGFGLKHPPPMMLIKNTPVPGNITSFSDVPVSSFITQYSTGQVTVEMEWELKKENSKRWNPEIQYTNNYNDPQFVDFAPDSTGEYRTTRPIGTRYLTRPL

SEQ ID NO: 1180 - DNA, 2203 bp, Artificial Sequence
  source: /note="Description of Artificial Sequence: Synthetic polynucleotide"
atgtcttttgttgatcaccctccagattggttggaagaagttggtgaaggtcttcgcgagtttttgggccttgaagcgggcccaccgaaaccaaaacccaatcagcagcatcaagatcaagcccgtggtcttgtgctgcctggttataactatctcggacccggaaacggtctcgatcgaggagagcctgtcaacagggcagacgaggtcgcgcgagagcacgacatctcgtacaacgagcagcttgaggcgggagacaacccctacctcaagtacaaccacgcggacgccgagtttcaggagaagctcgccgacgacacatccttcgggggaaacctcggaaaggcagtctttcaggccaagaaaagggttctcgaaccttttggcctggttgaagagggtgctaagacggcccctaccggaaagcggatagacgaccactttccaaaaagaaagaaggctcggaccgaagaggactccaagccttccacctcgtcagacgccgaagctggacccagcggatcccagcagctgcaaatcccagcccaaccagcctcaagtttgggagctgatacaatgtctgcgggaggtggcggcccattgggcgacaataaccaaggtgccgatggagtgggcaatgcctcgggagattggcattgcgattccacgtggatgggggacagagtcgtcaccaagtccacccgaacctgggtgctgcccagctacaacaaccaccagtaccgagagatcaaaagcggctccgtcgacggaagcaacgccaacgcctactttggatacagcaccccctgggggtactttgactttaaccgcttccacagccactggagcccccgagactggcaaagactcatcaacaactactggggcttcagaccccggtccctcagagtcaaaatcttcaacattcaagtcaaagaggtcacggtgcaggactccaccaccaccatcgccaacaacctcacctccaccgtcgatgtgtttacggacgacgactaccagctgccctacgtcgtcggcaacgggaccgagggatgcctgccggccttccctccgcaggtctttacgctgccgcagtacggttacgcgacgctgaaccgcgacaacacagaaaatcccaccgagaggagcagcttcttctgcctagagtactttcccagcaagatgctgagaacgggcaacaactttgagtttacctacaactttgaggaggtgcccttccactccagcttcgctcccagtcagaacctgttcaagctggccaacccgctggtggaccagtacttgtaccgcttcgtgagcacaaataacactggcggagtccagttcaacaagaacctggccgggagatacgccaacacctacaaaaactggttcccggggcccatgggccgaacccagggctggaacctgggctccggggtcaaccgcgccagtgtcagcgccttcgccacgaccaataggatggagctcgagggcgcgagttaccaggtgcccccgcagccgaacggcatgaccaacaacctccagggcagcaacacctatgccctggagaacactatgatcttcaacagccagccggcgaacccgggcaccaccgccacgtacctcgagggcaacatgctcatcaccagcgagagcgagacgcagccggtgaaccgcgtggcgtacaacgtcggcgggcagatggccaccaacaaccagagctccaccactgcccccgcgaccggcacgtacaacctccaggaaatcgtgcccggcagcgtgtggatggagagggacgtgtacctccaaggacccatctgggccaagatcccagagacgggggcgcactttcacccctctccggccatgggcggattcggactcaaacacccaccgcccatgatgctcatcaagaacacgcctgtgcccggaaatatcaccagcttctcggacgtgcccgtcagcagcttcatcacccagtacagcaccgggcaggtcaccgtggagatggagtgggagctcaagaaggaaaactccaagaggtggaacccagagatccagtacacaaacaactacaacgacccccagtttgtggactttgccccggacagcaccggggaatacagaaccaccagacctatcggaacccgataccttacccgacccctttaacccattcatgtcgcataccctcaataaa

SEQ ID NO: 1181 - protein, 724 aa, Artificial Sequence
  source: /note="Description of Artificial Sequence: Synthetic polypeptide"
MSFVDHPPDWLEEVGEGLREFLGLEAGPPKPKPNQQHQDQARGLVLPGYNYLGPGNGLDRGEPVNRADEVAREHDISYNEQLEAGDNPYLKYNHADAEFQEKLADDTSFGGNLGKAVFQAKKRVLEPFGLVEEGAKTAPTGKRIDDHFPKRKKARTEEDSKPSTSSDAEAGPSGSQQLQIPAQPASSLGADTMSAGGGGPLGDNNQGADGVGNASGDWHCDSTWMGDRVVTKSTRTWVLPSYNNHQYREIKSGSVDGSNANAYFGYSTPWGYFDFNRFHSHWSPRDWQRLINNYWGFRPRSLRVKIFNIQVKEVTVQDSTTTIANNLTSTVDVFTDDDYQLPYVVGNGTEGCLPAFPPQVFTLPQYGYATLNRDNTENPTERSSFFCLEYFPSKMLRTGNNFEFTYNFEEVPFHSSFAPSQNLFKLANPLVDQYLYRFVSTNNTGGVQFNKNLAGRYANTYKNWFPGPMGRTQGWNLGSGVNRASVSAFATTNRMELEGASYQVPPQPNGMTNNLQGSNTYALENTMIFNSQPANPGTTATYLEGNMLITSESETQPVNRVAYNVGGQMATNNQSSTTAPATGTYNLQEIVPGSVWMERDVYLQGPIWAKIPETGAHFHPSPAMGGFGLKHPPPMMLIKNTPVPGNITSFSDVPVSSFITQYSTGQVTVEMEWELKKENSKRWNPEIQYTNNYNDPQFVDFAPDSTGEYRTTRPIGTRYLTRPL

SEQ ID NO: 1182 - DNA, 2203 bp, Artificial Sequence
  source: /note="Description of Artificial Sequence: Synthetic polynucleotide"
atgtcttttgttgatcaccctccagattggttggaagaagttggtgaaggtcttcgcgagtttttgggccttgaagcgggcccaccgaaaccaaaacccaatcagcagcatcaagatcaagcccgtggtcttgtgctgcctggttataactatctcggacccggaaacggtctcgatcgaggagagcctgtcaacagggcagacgaggtcgcgcgagagcacgacatctcgtacaacgagcagcttgaggcgggagacaacccctacctcaagtacaaccacgcggacgccgagtttcaggagaagctcgccgacgacacatccttcgggggaaacctcggaaaggcagtctttcaggccaagaaaagggttctcgaaccttttggcctggttgaagagggtgctaagacggcccctaccggaaagcggatagacgaccactttccaaaaagaaagaaggctcggaccgaagaggactccaagccttccacctcgtcagacgccgaagctggacccagcggatcccagcagctgcaaatcccagcccaaccagcctcaagtttgggagctgatacaatgtctgcgggaggtggcggcccattgggcgacaataaccaaggtgccgatggagtgggcaatgcctcgggagattggcattgcgattccacgtggatgggggacagagtcgtcaccaagtccacccgaacctgggtgctgcccagctacaacaaccaccagtaccgagagatcaaaagcggctccgtcgacggaagcaacgccaacgcctactttggatacagcaccccctgggggtactttgactttaaccgcttccacagccactggagcccccgagactggcaaagactcatcaacaactactggggcttcagaccccggtccctcagagtcaaaatcttcaacattcaagtcaaagaggtcacggtgcaggactccaccaccaccatcgccaacaacctcacctccaccgtccaagtgtttacggacgacgactaccagctgccctacgtcgtcggcaacgggacccagggatgcctgccggccttccctccgcaggtctttacgctgccgcagtacggttacgcgacgctgaaccgcgacaacacagaaaatcccaccgagaggagcagcttcttctgcctagagtactttcccagcaagatgctgagaacgggcaacaactttgagtttacctacaactttgaggaggtgcccttccactccagcttcgctcccagtcagaacctgttcaagctggccaacccgctggtggaccagtacttgtaccgcttcgtgagcacaaataacactggcggagtccagttcaacaagaacctggccgggagatacgccaacacctacaaaaactggttcccggggcccatgggccgaacccagggctggaacctgggctccggggtcaaccgcgccagtgtcagcgccttcgccacgaccaataggatggagctcgagggcgcgagttaccaggtgcccccgcagccgaacggcatgaccaacaacctccagggcagcaacacctatgccctggagaacactatgatcttcaacagccagccggcgaacccgggcaccaccgccacgtacctcgagggcaacatgctcatcaccagcgagagcgagacgcagccggtgaaccgcgtggcgtacaacgtcggcgggcagatggccaccaacaaccagagctccaccactgcccccgcgaccggcacgtacaacctccaggaaatcgtgcccggcagcgtgtggatggagagggacgtgtacctccaaggacccatctgggccaagatcccagagacgggggcgcactttcacccctctccggccatgggcggattcggactcaaacacccaccgcccatgatgctcatcaagaacacgcctgtgcccggaaatatcaccagcttctcggacgtgcccgtcagcagcttcatcacccagtacagcaccgggcaggtcaccgtggagatggagtgggagctcaagaaggaaaactccaagaggtggaacccagagatccagtacacaaacaactacaacgacccccagtttgtggactttgccccggacagcaccggggaatacagaaccaccagacctatcggaacccgataccttacccgacccctttaacccattcatgtcgcataccctcaataaa

SEQ ID NO: 1183 - protein, 724 aa, Artificial Sequence
  source: /note="Description of Artificial Sequence: Synthetic polypeptide"
MSFVDHPPDWLEEVGEGLREFLGLEAGPPKPKPNQQHQDQARGLVLPGYNYLGPGNGLDRGEPVNRADEVAREHDISYNEQLEAGDNPYLKYNHADAEFQEKLADDTSFGGNLGKAVFQAKKRVLEPFGLVEEGAKTAPTGKRIDDHFPKRKKARTEEDSKPSTSSDAEAGPSGSQQLQIPAQPASSLGADTMSAGGGGPLGDNNQGADGVGNASGDWHCDSTWMGDRVVTKSTRTWVLPSYNNHQYREIKSGSVDGSNANAYFGYSTPWGYFDFNRFHSHWSPRDWQRLINNYWGFRPRSLRVKIFNIQVKEVTVQDSTTTIANNLTSTVQVFTDDDYQLPYVVGNGTQGCLPAFPPQVFTLPQYGYATLNRDNTENPTERSSFFCLEYFPSKMLRTGNNFEFTYNFEEVPFHSSFAPSQNLFKLANPLVDQYLYRFVSTNNTGGVQFNKNLAGRYANTYKNWFPGPMGRTQGWNLGSGVNRASVSAFATTNRMELEGASYQVPPQPNGMTNNLQGSNTYALENTMIFNSQPANPGTTATYLEGNMLITSESETQPVNRVAYNVGGQMATNNQSSTTAPATGTYNLQEIVPGSVWMERDVYLQGPIWAKIPETGAHFHPSPAMGGFGLKHPPPMMLIKNTPVPGNITSFSDVPVSSFITQYSTGQVTVEMEWELKKENSKRWNPEIQYTNNYNDPQFVDFAPDSTGEYRTTRPIGTRYLTRPL

SEQ ID NO: 1184 - DNA, 2203 bp, Artificial Sequence
  source: /note="Description of Artificial Sequence: Synthetic polynucleotide"
atgtcttttgttgatcaccctccagattggttggaagaagttggtgaaggtcttcgcgagtttttgggccttgaagcgggcccaccgaaaccaaaacccaatcagcagcatcaagatcaagcccgtggtcttgtgctgcctggttataactatctcggacccggaaacggtctcgatcgaggagagcctgtcaacagggcagacgaggtcgcgcgagagcacgacatctcgtacaacgagcagcttgaggcgggagacaacccctacctcaagtacaaccacgcggacgccgagtttcaggagaagctcgccgacgacacatccttcgggggaaacctcggaaaggcagtctttcaggccaagaaaagggttctcgaaccttttggcctggttgaagagggtgctaagacggcccctaccggaaagcggatagacgaccactttccaaaaagaaagaaggctcggaccgaagaggactccaagccttccacctcgtcagacgccgaagctggacccagcggatcccagcagctgcaaatcccagcccaaccagcctcaagtttgggagctgatacaatgtctgcgggaggtggcggcccattgggcgacaataaccaaggtgccgatggagtgggcaatgcctcgggagattggcattgcgattccacgtggatgggggacagagtcgtcaccaagtccacccgaacctgggtgctgcccagctacaacaaccaccagtaccgagagatcaaaagcggctccgtcgacggaagcaacgccaacgcctactttggatacagcaccccctgggggtactttgactttaaccgcttccacagccactggagcccccgagactggcaaagactcatcaacaactactggggcttcagaccccggtccctcagagtcaaaatcttcaacattcaagtcaaagaggtcacggtgcaggactccaccaccaccatcgccaacaacctcacctccaccgtccaagtgtttacggacgacgactaccagctgccctacgtcgtcggcaacgggaccgagggatgcctgccggccttccctccgcaggtctttacgctgccgcagtacggttacgcgacgctgaaccgcgacaacacagaaaatcccaccgagaggagcagcttcttctgcctagagtactttcccagcaagatgctgagaacgggcaacaactttgagtttacctacaactttgaggaggtgcccttccactccagcttcgctcccagtcagaacctgttcaagctggccaacccgctggtggaccagtacttgtaccgcttcgtgagcacaaataacactggcggagtccagttcaacaagaacctggccgggagatacgccaacacctacaaaaactggttcccggggcccatgggccgaacccagggctggaacctgggctccggggtcaaccgcgccagtgtcagcgccttcgccacgaccaataggatggagctcgagggcgcgagttaccaggtgcccccgcagccgaacggcatgaccaacaacctccagggcagcaacacctatgccctggagaacactatgatcttcaacagccagtcggcgaacccgggcaccaccgccacgtacctcgagggcaacatgctcatcaccagcgagagcgagacgcagccggtgaaccgcgtggcgtacaacgtcggcgggcagatggccaccaacaaccagagctccaccactgcccccgcgaccggcacgtacaacctccaggaaatcgtgcccggcagcgtgtggatggagagggacgtgtacctccaaggacccatctgggccaagatcccagagacgggggcgcactttcacccctctccggccatgggcggattcggactcaaacacccaccgcccatgatgctcatcaagaacacgcctgtgcccggaaatatcaccagcttctcggacgtgcccgtcagcagcttcatcacccagtacagcaccgggcaggtcaccgtggagatggagtgggagctcaagaaggaaaactccaagaggtggaacccagagatccagtacacaaacaactacaacgacccccagtttgtggactttgccccggacagcaccggggaatacagaaccaccagacctatcggaacccgataccttacccgacccctttaacccattcatgtcgcataccctcaataaa

SEQ ID NO: 1185 - protein, 724 aa, Artificial Sequence
  source: /note="Description of Artificial Sequence: Synthetic polypeptide"
MSFVDHPPDWLEEVGEGLREFLGLEAGPPKPKPNQQHQDQARGLVLPGYNYLGPGNGLDRGEPVNRADEVAREHDISYNEQLEAGDNPYLKYNHADAEFQEKLADDTSFGGNLGKAVFQAKKRVLEPFGLVEEGAKTAPTGKRIDDHFPKRKKARTEEDSKPSTSSDAEAGPSGSQQLQIPAQPASSLGADTMSAGGGGPLGDNNQGADGVGNASGDWHCDSTWMGDRVVTKSTRTWVLPSYNNHQYREIKSGSVDGSNANAYFGYSTPWGYFDFNRFHSHWSPRDWQRLINNYWGFRPRSLRVKIFNIQVKEVTVQDSTTTIANNLTSTVQVFTDDDYQLPYVVGNGTEGCLPAFPPQVFTLPQYGYATLNRDNTENPTERSSFFCLEYFPSKMLRTGNNFEFTYNFEEVPFHSSFAPSQNLFKLANPLVDQYLYRFVSTNNTGGVQFNKNLAGRYANTYKNWFPGPMGRTQGWNLGSGVNRASVSAFATTNRMELEGASYQVPPQPNGMTNNLQGSNTYALENTMIFNSQSANPGTTATYLEGNMLITSESETQPVNRVAYNVGGQMATNNQSSTTAPATGTYNLQEIVPGSVWMERDVYLQGPIWAKIPETGAHFHPSPAMGGFGLKHPPPMMLIKNTPVPGNITSFSDVPVSSFITQYSTGQVTVEMEWELKKENSKRWNPEIQYTNNYNDPQFVDFAPDSTGEYRTTRPIGTRYLTRPL

SEQ ID NO: 1186 - DNA, 2203 bp, Artificial Sequence
  source: /note="Description of Artificial Sequence: Synthetic polynucleotide"
atgtcttttgttgatcaccctccagattggttggaagaagttggtgaaggtcttcgcgagtttttgggccttgaagcgggcccaccgaaaccaaaacccaatcagcagcatcaagatcaagcccgtggtcttgtgctgcctggttataactatctcggacccggaaacggtctcgatcgaggagagcctgtcaacagggcagacgaggtcgcgcgagagcacgacatctcgtacaacgagcagcttgaggcgggagacaacccctacctcaagtacaaccacgcggacgccgagtttcaggagaagctcgccgacgacacatccttcgggggaaacctcggaaaggcagtctttcaggccaagaaaagggttctcgaaccttttggcctggttgaagagggtgctaagacggcccctaccggaaagcggatagacgaccactttccaaaaagaaagaaggctcggaccgaagaggactccaagccttccacctcgtcagacgccgaagctggacccagcggatcccagcagctgcaaatcccagcccaaccagcctcaagtttgggagctgatacaatgtctgcgggaggtggcggcccattgggcgacaataaccaaggtgccgatggagtgggcaatgcctcgggagattggcattgcgattccacgtggatgggggacagagtcgtcaccaagtccacccgaacctgggtgctgcccagctacaacaaccaccagtaccgagagatcaaaagcggctccgtcgacggaagcaacgccaacgcctactttggatacagcaccccctgggggtactttgactttaaccgcttccacagccactggagcccccgagactggcaaagactcatcaacaactactggggcttcagaccccggtccctcagagtcaaaatcttcaacattcaagtcaaagaggtcacggtgcaggactccaccaccaccatcgccaacaacctcacctccaccgtccaagtgtttacggacgacgactaccagctgccctacgtcgtcggcaacgggaccgagggatgcctgccggccttccctccgcaggtctttacgctgccgcagtacggttacgcgacgctgaaccgcgacaacacagaaaatcccaccgagaggagcagcttcttctgcctagagtactttcccagcaagatgctgagaacgggcaacaactttgagtttacctacaactttgaggaggtgcccttccactccagcttcgctcccagtcagaacctgttcaagctggccaacccgctggtggaccagtacttgtaccgcttcgtgagcacaaataacactggcggagtccagttcaacaagaacctggccgggagatacgccaacacctacaaaaactggttcccggggcccatgggccgaacccagggctggaacctgggctccggggtcaaccgcgccagtgtcagcgccttcgccacgaccaataggatggagctcgagggcgcgagttaccaggtgcccccgcagccgaacggcatgaccaacaacctccagggcagcaacacctatgccctggagaacactatgatcttcaacagccagggggcgaacccgggcaccaccgccacgtacctcgagggcaacatgctcatcaccagcgagagcgagacgcagccggtgaaccgcgtggcgtacaacgtcggcgggcagatggccaccaacaaccagagctccaccactgcccccgcgaccggcacgtacaacctccaggaaatcgtgcccggcagcgtgtggatggagagggacgtgtacctccaaggacccatctgggccaagatcccagagacgggggcgcactttcacccctctccggccatgggcggattcggactcaaacacccaccgcccatgatgctcatcaagaacacgcctgtgcccggaaatatcaccagcttctcggacgtgcccgtcagcagcttcatcacccagtacagcaccgggcaggtcaccgtggagatggagtgggagctcaagaaggaaaactccaagaggtggaacccagagatccagtacacaaacaactacaacgacccccagtttgtggactttgccccggacagcaccggggaatacagaaccaccagacctatcggaacccgataccttacccgacccctttaacccattcatgtcgcataccctcaataaa

SEQ ID NO: 1187 - protein, 724 aa, Artificial Sequence
  source: /note="Description of Artificial Sequence: Synthetic polypeptide"
MSFVDHPPDWLEEVGEGLREFLGLEAGPPKPKPNQQHQDQARGLVLPGYNYLGPGNGLDRGEPVNRADEVAREHDISYNEQLEAGDNPYLKYNHADAEFQEKLADDTSFGGNLGKAVFQAKKRVLEPFGLVEEGAKTAPTGKRIDDHFPKRKKARTEEDSKPSTSSDAEAGPSGSQQLQIPAQPASSLGADTMSAGGGGPLGDNNQGADGVGNASGDWHCDSTWMGDRVVTKSTRTWVLPSYNNHQYREIKSGSVDGSNANAYFGYSTPWGYFDFNRFHSHWSPRDWQRLINNYWGFRPRSLRVKIFNIQVKEVTVQDSTTTIANNLTSTVQVFTDDDYQLPYVVGNGTEGCLPAFPPQVFTLPQYGYATLNRDNTENPTERSSFFCLEYFPSKMLRTGNNFEFTYNFEEVPFHSSFAPSQNLFKLANPLVDQYLYRFVSTNNTGGVQFNKNLAGRYANTYKNWFPGPMGRTQGWNLGSGVNRASVSAFATTNRMELEGASYQVPPQPNGMTNNLQGSNTYALENTMIFNSQGANPGTTATYLEGNMLITSESETQPVNRVAYNVGGQMATNNQSSTTAPATGTYNLQEIVPGSVWMERDVYLQGPIWAKIPETGAHFHPSPAMGGFGLKHPPPMMLIKNTPVPGNITSFSDVPVSSFITQYSTGQVTVEMEWELKKENSKRWNPEIQYTNNYNDPQFVDFAPDSTGEYRTTRPIGTRYLTRPL

SEQ ID NO: 1188 - DNA, 2194 bp, Artificial Sequence
  source: /note="Description of Artificial Sequence: Synthetic polynucleotide"
atgtcttttgttgatcaccctccagattggttggaagaagttggtgaaggtcttcgcgagtttttgggccttgaagcgggcccaccgaaaccaaaacccaatcagcagcatcaagatcaagcccgtggtcttgtgctgcctggttataactatctcggacccggaaacggtctcgatcgaggagagcctgtcaacagggcagacgaggtcgcgcgagagcacgacatctcgtacaacgagcagcttgaggcgggagacaacccctacctcaagtacaaccacgcggacgccgagtttcaggagaagctcgccgacgacacatccttcgggggaaacctcggaaaggcagtctttcaggccaagaaaagggttctcgaaccttttggcctggttgaagagggtgctaagacggcccctaccggaaagcggatagacgaccactttccaaaaagaaagaaggctcggaccgaagaggactccaagccttccacctcgtcagacgccgaagctggacccagcggatcccagcagctgcaaatcccagcccaaccagcctcaagtttgggagctgatacaatgtctgcgggaggtggcggcccattgggcgacaataaccaaggtgccgatggagtgggcaatgcctcgggagattggcattgcgattccacgtggatgggggacagagtcgtcaccaagtccacccgaacctgggtgctgcccagctacaacaaccaccagtaccgagagatcaaaagcggctccgtcgacggaagcaacgccaacgcctactttggatacagcaccccctgggggtactttgactttaaccgcttccacagccactggagcccccgagactggcaaagactcatcaacaactactggggcttcagaccccggtccctcagagtcaaaatcttcaacattcaagtcaaagaggtcacggtgcaggactccaccaccaccatcgccaacaacctcacctccaccgtccaagtgtttacggacgacgactaccagctgccctacgtcgtcggcaacgggaccgagggatgcctgccggccttccctccgcaggtctttacgctgccgcagtacggttacgcgacgctgaaccgcgacaacacagaaaatcccaccgagaggagcagcttcttctgcctagagtactttcccagcaagatgctgagaacgggcaacaactttgagtttacctacaactttgaggaggtgcccttccactccagcttcgctcccagtcagaacctgttcaagctggccaacccgctggtggaccagtacttgtaccgcttcgtgagcacaaataacactggcggagtccagttcaacaagaacctggccgggagatacgccaacacctacaaaaactggttcccggggcccatgggccgaacccagggctggaacctgggctccggggtcaaccgcgccagtgtcagcgccttcgccacgaccaataggatggagctcgagggcgcgagttaccaggtgcccccgcagccgaacggcatgaccaacaacctccagggcagcaacacctatgccctggagaacactatgatcttcgggaagcaaggctcagagaaaacaaatgtggacattgaaaaggtcatgatcaccagcgagagcgagacgcagccggtgaaccgcgtggcgtacaacgtcggcgggcagatggccaccaacaaccagagctccaccactgcccccgcgaccggcacgtacaacctccaggaaatcgtgcccggcagcgtgtggatggagagggacgtgtacctccaaggacccatctgggccaagatcccagagacgggggcgcactttcacccctctccggccatgggcggattcggactcaaacacccaccgcccatgatgctcatcaagaacacgcctgtgcccggaaatatcaccagcttctcggacgtgcccgtcagcagcttcatcacccagtacagcaccgggcaggtcaccgtggagatggagtgggagctcaagaaggaaaactccaagaggtggaacccagagatccagtacacaaacaactacaacgacccccagtttgtggactttgccccggacagcaccggggaatacagaaccaccagacctatcggaacccgataccttacccgacccctttaacccattcatgtcgcataccctcaataaa

SEQ ID NO: 1189 - protein, 721 aa, Artificial Sequence
  source: /note="Description of Artificial Sequence: Synthetic polypeptide"
MSFVDHPPDWLEEVGEGLREFLGLEAGPPKPKPNQQHQDQARGLVLPGYNYLGPGNGLDRGEPVNRADEVAREHDISYNEQLEAGDNPYLKYNHADAEFQEKLADDTSFGGNLGKAVFQAKKRVLEPFGLVEEGAKTAPTGKRIDDHFPKRKKARTEEDSKPSTSSDAEAGPSGSQQLQIPAQPASSLGADTMSAGGGGPLGDNNQGADGVGNASGDWHCDSTWMGDRVVTKSTRTWVLPSYNNHQYREIKSGSVDGSNANAYFGYSTPWGYFDFNRFHSHWSPRDWQRLINNYWGFRPRSLRVKIFNIQVKEVTVQDSTTTIANNLTSTVQVFTDDDYQLPYVVGNGTEGCLPAFPPQVFTLPQYGYATLNRDNTENPTERSSFFCLEYFPSKMLRTGNNFEFTYNFEEVPFHSSFAPSQNLFKLANPLVDQYLYRFVSTNNTGGVQFNKNLAGRYANTYKNWFPGPMGRTQGWNLGSGVNRASVSAFATTNRMELEGASYQVPPQPNGMTNNLQGSNTYALENTMIFGKQGSEKTNVDIEKVMITSESETQPVNRVAYNVGGQMATNNQSSTTAPATGTYNLQEIVPGSVWMERDVYLQGPIWAKIPETGAHFHPSPAMGGFGLKHPPPMMLIKNTPVPGNITSFSDVPVSSFITQYSTGQVTVEMEWELKKENSKRWNPEIQYTNNYNDPQFVDFAPDSTGEYRTTRPIGTRYLTRPL

SEQ ID NO: 1190 - protein, 519 aa, Artificial Sequence
  source: /note="Description of Artificial Sequence: Synthetic polypeptide"
DGVGSSSGNWHCDSTWLGDRVITTSTRTWALPTYNNHLYKQISNGTSGGATNDNTYFGYSTPWGYFDFNRFHCHFSPRDWQRLINNNWGFRPKRLSFKLFNIQVKEVTQNEGTKTIANNLTSTIQVFTDSEYQLPYVLGSAHQGCLPPFPADVFMIPQYGYLTLNNGSQAVGRSSFYCLEYFPSQMLRTGNNFQFTYTFEDVPFHSSYAHSQSLDRLMNPLIDQYLYYLSRTQTTGGTANTQTLGFSQGGPNTMANQAKNWLPGPCYRQQRVSTTTGQNNNSNFAWTAGTKYHLNGRNSLANPGIAMATHKDDEERFFPSNGILIFGKQNAARDNADYSDVMLTSEEEIKTTNPVATEEYGIVADNLQQQNTAPQIGTVNSQGALPGMVWQNRDVYLQGPIWAKIPHTDGNFHPSPLMGGFGLKHPPPQILIKNTPVPADPPTTFNQSKLNSFITQYSTGQVSVEIEWELQKENSKRWNPEIQYTSNYYKSTSVDFAVNTEGVYSEPRPIGTRYLTRNL

SEQ ID NO: 1191 - protein, 738 aa, Artificial Sequence
  source: /note="Description of Artificial Sequence: Synthetic polypeptide"
MAADGYLPDWLEDNLSEGIREWWALQPGAPKPKANQQHQDNARGLVLPGYKYLGPGNGLDKGEPVNAADAAALEHDKAYDQQLKAGDNPYLKYNHADAEFQERLKEDTSFGGNLGRAVFQAKKRLLEPLGLVEEAAKTAPGKKRPVEPSPQRSPDSSTGIGKKGQQPARKRLNFGQTGDSESVPDPQPLGEPPAAPSGVGPNTMAAGGGAPMADNNEGADGVGSSSGNWHCDSTWLGDRVITTSTRTWALPTYNNHLYKQISNGTSGGATNDNTYFGYSTPWGYFDFNRFHCHFSPRDWQRLINNNWGFRPKRLSFKLFNIQVKEVTQNEGTKTIANNLTSTIQVFTDSEYQLPYVLGSAHQGCLPPFPADVFMIPQYGYLTLNNGSQAVGRSSFYCLEYFPSQMLRTGNNFQFTYTFEDVPFHSSYAHSQSLDRLMNPLIDQYLYYLSRTQTTGGTANTQTLGFSQGGPNTMANQAKNWLPGPCYRQQRVSTTTGQNNNSNFAWTAGTKYHLNGRNSLANPGIAMATHKDDEERFFPSNGILIFGKQNAARDNADYSDVMLTSEEEIKTTNPVATEEYGIVADNLQQQNTAPQIGTVNSQGALPGMVWQNRDVYLQGPIWAKIPHTDGNFHPSPLMGGFGLKHPPPQILIKNTPVPADPPTTFNQSKLNSFITQYSTGQVSVEIEWELQKENSKRWNPEIQYTSNYYKSTSVDFAVNTEGVYSEPRPIGTRYLTRNL

SEQ ID NO: 1192 - protein, 725 aa, Artificial Sequence
  source: /note="Description of Artificial Sequence: Synthetic polypeptide"
MAADGYLPDWLEDNLSEGIREWWALQPGAPKPKANQQHQDNARGLVLPGYKYLGPGNGLDKGEPVNAADAAALEHDKAYDQQLKAGDNPYLKYNHADAEFQERLKEDTSFGGNLGRAVFQAKKRLLEPLGLVEEAAKTAPTGKRIDDHFPKRKKARTEEDSKPSTSSDAEAGPSGSQQLQIPAQPASSLGADTMSAGGGGPLGDNNQGADGVGNASGDWHCDSTWMGDRVVTKSTRTWVLPSYNNHQYREIKSGSVDGSNANAYFGYSTPWGYFDFNRFHSHWSPRDWQRLINNYWGFRPRSLRVKIFNIQVKEVTVQDSTTTIANNLTSTVQVFTDDDYQLPYVVGNGTEGCLPAFPPQVFTLPQYGYATLNRDNTENPTERSSFFCLEYFPSKMLRTGNNFEFTYNFEEVPFHSSFAPSQNLFKLANPLVDQYLYRFVSTNNTGGVQFNKNLAGRYANTYKNWFPGPMGRTQGWNLGSGVNRASVSAFATTNRMELEGASYQVPPQPNGMTNNLQGSNTYALENTMIFNSQPANPGTTATYLEGNMLITSESETQPVNRVAYNVGGQMATNNQSSTTAPATGTYNLQEIVPGSVWMERDVYLQGPIWAKIPETGAHFHPSPAMGGFGLKHPPPMMLIKNTPVPGNITSFSDVPVSSFITQYSTGQVTVEMEWELKKENSKRWNPEIQYTNNYNDPQFVDFAPDSTGEYRTTRPIGTRYLTRPL

SEQ ID NO: 1193 - protein, 736 aa, Artificial Sequence
  source: /note="Description of Artificial Sequence: Synthetic polypeptide"
MAADGYLPDWLEDNLSEGIREWWALKPGAPKPKANQQKQDDGRGLVLPGYKYLGPFNGLDKGEPVNAADAAALEHDKAYDQQLQAGDNPYLRYNHADAEFQERLQEDTSFGGNLGRAVFQAKKRVLEPLGLVEEGAKTAPGKKRPVDQSPQEPDSSSGVGKSGKQPARKRLNFGQTGDSESVPDPQPLGEPPAAPTSLGSNTMASGGGAPMADNNEGADGVGNSSGNWHCDSQWLGDRVITTSTRTWALPTYNNHLYKQISSQSGASNDNHYFGYSTPWGYFDFNRFHCHFSPRDWQRLINNNWGFRPKKLSFKLFNIQVKEVTQNDGTTTIANNLTSTVQVFTDSEYQLPYVLGSAHQGCLPPFPADVFMVPQYGYLTLNNGSQAVGRSSFYCLEYFPSQMLRTGNNFQFSYTFEDVPFHSSYAHSQSLDRLMNPLIDQYLYYLNRTQGTTSGTTNQSRLLFSQAGPQSMSLQARNWLPGPCYRQQRLSKTANDNNNSNFPWTAASKYHLNGRDSLVNPGPAMASHKDDEEKFFPMHGNLIFGKEGTTASNAELDNVMITDEEEIRTTNPVATEQYGTVANNLQSSNTAPTTRTVNDQGALPGMVWQDRDVYLQGPIWAKIPHTDGHFHPSPLMGGFGLKHPPPQIMIKNTPVPANPPTTFSPAKFASFITQYSTGQVSVEIEWELQKENSKRWNPEIQYTSNYNKSVNVDFTVDTNGVYSEPRPIGTRYLTRNL

SEQ ID NO: 1194 - protein, 735 aa, Artificial Sequence
  source: /note="Description of Artificial Sequence: Synthetic polypeptide"
MSFVDHPPDWLEEVGEGLREFLGLEAGPPKPKPNQQHQDQARGLVLPGYNYLGPGNGLDRGEPVNRADEVAREHDISYNEQLEAGDNPYLKYNHADAEFQEKLADDTSFGGNLGKAVFQAKKRVLEPFGLVEEGAKTAPGKKRPVDQSPQEPDSSSGVGKSGKQPARKRLNFGQTGDSESVPDPQPLGEPPAAPTSLGSNTMASGGGAPMADNNEGADGVGNSSGNWHCDSQWLGDRVITTSTRTWALPTYNNHLYKQISSQSGASNDNHYFGYSTPWGYFDFNRFHCHFSPRDWQRLINNNWGFRPKKLSFKLFNIQVKEVTQNDGTTTIANNLTSTVQVFTDSEYQLPYVLGSAHQGCLPPFPADVFMVPQYGYLTLNNGSQAVGRSSFYCLEYFPSQMLRTGNNFQFSYTFEDVPFHSSYAHSQSLDRLMNPLIDQYLYYLNRTQGTTSGTTNQSRLLFSQAGPQSMSLQARNWLPGPCYRQQRLSKTANDNNNSNFPWTAASKYHLNGRDSLVNPGPAMASHKDDEEKFFPMHGNLIFGKEGTTASNAELDNVMITDEEEIRTTNPVATEQYGTVANNLQSSNTAPTTRTVNDQGALPGMVWQDRDVYLQGPIWAKIPHTDGHFHPSPLMGGFGLKHPPPQIMIKNTPVPANPPTTFSPAKFASFITQYSTGQVSVEIEWELQKENSKRWNPEIQYTSNYNKSVNVDFTVDTNGVYSEPRPIGTRYLTRPL

SEQ ID NO: 1195 - protein, 736 aa, Artificial Sequence
  source: /note="Description of Artificial Sequence: Synthetic polypeptide"
MAADGYLPDWLEDNLSEGIREWWALKPGAPKPKANQQKQDDGRGLVLPGYKYLGPFNGLDKGEPVNAADAAALEHDKAYDQQLQAGDNPYLRYNHADAEFQERLQEDTSFGGNLGRAVFQAKKRVLEPLGLVEEGAKTAPGKKRPVEPSPQRSPDSSTGIGKKGQQPARKRLNFGQTGDSESVPDPQPLGEPPAAPSGVGPNTMAAGGGAPMADNNEGADGVGSSSGNWHCDSTWLGDRVITTSTRTWALPTYNNHLYKQISSQSGASNDNHYFGYSTPWGYFDFNRFHCHFSPRDWQRLINNNWGFRPKRLSFKLFNIQVKEVTQNEGTKTIANNLTSTIQVFTDSEYQLPYVLGSAHQGCLPPFPADVFMIPQYGYLTLNNGSQAVGRSSFYCLEYFPSQMLRTGNNFQFTYTFEDVPFHSSYAHSQSLDRLMNPLIDQYLYYLSRTQTTGGTANTQTLGFSQGGPNTMANQAKNWLPGPCYRQQRVSTTTGQNNNSNFAWTAGTKYHLNGRNSLANPGIAMATHKDDEERFFPSNGILIFGKQGTTASNAELDNVMITDEEEIKTTNPVATEEYGIVADNLQQQNTAPQIGTVNSQGALPGMVWQNRDVYLQGPIWAKIPHTDGNFHPSPLMGGFGLKHPPPQILIKNTPVPADPPTTFNQSKLNSFITQYSTGQVSVEIEWELQKENSKRWNPEIQYTSNYNKSVNVDFTVDTNGVYSEPRPIGTRYLTRNL

SEQ ID NO: 1196 - protein, 736 aa, Artificial Sequence
  source: /note="Description of Artificial Sequence: Synthetic polypeptide"
MAADGYLPDWLEDNLSEGIREWWALKPGAPKPKANQQKQDDGRGLVLPGYKYLGPFNGLDKGEPVNAADAAALEHDKAYDQQLQAGDNPYLRYNHADAEFQERLQEDTSFGGNLGRAVFQAKKRVLEPLGLVEEGAKTAPGKKRPVEPSPQRSPDSSTGIGKKGQQPARKRLNFGQTGDSESVPDPQPLGEPPAAPSGVGPNTMAAGGGAPMADNNEGADGVGSSSGNWHCDSTWLGDRVITTSTRTWALPTYNNHLYKQISSQSGASNDNHYFGYSTPWGYFDFNRFHCHFSPRDWQRLINNNWGFRPKRLSFKLFNIQVKEVTQNEGTKTIANNLTSTIQVFTDSEYQLPYVLGSAHQGCLPPFPADVFMIPQYGYLTLNNGSQAVGRSSFYCLEYFPSQMLRTGNNFQFTYTFEDVPFHSSYAHSQSLDRLMNPLIDQYLYYLSRTQTTGGTANTQTLGFSQGGPNTMANQAKNWLPGPCYRQQRVSTTTGQNNNSNFAWTAGTKYHLNGRNSLANPGIAMATHKDDEERFFPSNGILIFGKQNAARDNADYSDVMLTSEEEIKTTNPVATEEYGIVADNLQQQNTAPQIGTVNSQGALPGMVWQNRDVYLQGPIWAKIPHTDGNFHPSPLMGGFGLKHPPPQILIKNTPVPADPPTTFNQSKLNSFITQYSTGQVSVEIEWELQKENSKRWNPEIQYTSNYYKSTSVDFAVNTEGVYSEPRPIGTRYLTRNL

SEQ ID NO: 1197 - protein, 736 aa, Artificial Sequence
  source: /note="Description of Artificial Sequence: Synthetic polypeptide"
MAADGYLPDWLEDNLSEGIREWWDLKPGAPKPKANQQKQDDGRGLVLPGYKYLGPFNGLDKGEPVNAADAAALEHDKAYDQQLKAGDNPYLRYNHADAEFQERLQEDTSFGGNLGRAVFQAKKRVLEPLGLVEEGAKTAPGKKRPVEQSPQEPDSSSGIGKTGQQPAKKRLNFGQTGDTESVPDPQPLGEPPAAPSGLGPNTMASGGGAPMADNNEGADGVGNSSGNWHCDSTWLGDRVITTSTRTWALPTYNNHLYKQISNGTSGGSTNDNTYFGYSTPWGYFDFNRFHCHFSPRDWQRLINNNWGFRPKRLNFKLFNIQVKEVTTNEGTKTIANNLTSTVQVFTDSEYQLPYVLGSAHQGCLPPFPADVFMVPQYGYLTLNNGSQALGRSSFYCLEYFPSQMLRTGNNFQFSYTFEDVPFHSSYAHSQSLDRLMNPLIDQYLYYLVRTQTTGTGGTQTLAFSQAGPSSMASQARNWVPGPSYRQQRVSTTTNQNNNSNFAWTGAAKFKLNGRDSLMNPGVAMASHKDDEDRFFPSSGVLIFGKQGAGNDGVDYSQVLITDEEEIKATNPVATEEYGAVAINNQAANTQAQTGLVHNQGVIPGMVWQNRDVYLQGPIWAKIPHTDGNFHPSPLMGGFGLKHPPPQILIKNTPVPADPPLTFNQAKLNSFITQYSTGQVSVEIEWELQKENSKRWNPEIQYTSNYYKSTNVDFAVNTEGVYSEPRPIGTRYLTRNL

SEQ ID NO: 1198 - DNA, 3695 bp, Artificial Sequence
  source: /note="Description of Artificial Sequence: Synthetic polynucleotide"
ctctttgcgcttgcgttttcccttgtccagatagcccagtagctgacattcatccggggtcagcaccgtttctgcggactggctttctacgtgaaaaggatctaggtgaagatcctttttgataatctcatgcctgacatttatattccccagaacatcaggttaatggcgtttttgatgtcattttcgcggtggctgagatcagccacttcttccccgataacggagaccggcacactggccatatcggtggtcatcatgcgccagctttcatccccgatatgcaccaccgggtaaagttcacgggagactttatctgacagcagacgtgcactggccagggggatcaccatccgtcgccccggcgtgtcaataatatcactctgtacatccacaaacagacgataacggctctctcttttataggtgtaaaccttaaactgccgtacgtataggctgcgcaactgttgggaagggcgatcggtgcgggcctcttcgctattacgccagctggcgaaagggggatgtgctgcaaggcgattaagttgggtaacgccagggttttcccagtcacgacgttgtaaaacgacggccagtgaattgtaatacgactcactatagggcgaattgaatttagcggccgcgaattcgcccttatgatatctggtgggaggagggcaagatgacggccaaggtcgtggagtccgccaaggccattctcggcggcagcaaagtgcgcgtggaccaaaagtgcaagtcgtccgcccagatcgatcccactcccgtcattgtcacctccaacaccaacatgtgcgccgtgattgacgggaacagcaccaccttcgagcaccagcagccgttgcaggaccggatgttcaaatttgaacttacccgccgtctggagcatgactttggcaaggtgacaaagcaggaagtcaaagagttcttccgctgggcgcaggatcacgtgaccgaggtggcgcatgagttccacgtcagaaagggtggagccaacaagagacccgcccccgatgacgctgataaaagcgagcccaagcgggcctgcccctcagtcgcagatccatcgacgtcagacgcggaaggagctccggtggactttgccgacaggtaccaaaacaaatgttctcgtcacgcgggcatgcttcagatgctgtttccctgcaagacatgcgagagaatgaatcagaatttcaacatttgcttcacgcacgggaccagggactgttcggagtgcttccccggcgtgtcagaatctcaaccggtcgtcagaaaaaggacgtatcggaaactctgtgccattcatcatctgctggggagggctcccgagattgcttgctcggcctgcgatctggtcaacgtggacctggatgactgtgtctctgagcaataaatgacttaaaccaggtatggctgccgatggttatcttccagattggctcgaggacaacctctctgagggcattcgcgagtggtgggacttgaaacctggagccccgaaacccaaagccaaccagcaaaagcaggacgacggccggggtctggtgcttcctggctacaagtacctcggacccttcaacggactcgacaagggggagcccgtcaacgcggcggacgcagcggccctcgagcacgacaaggcctacgaccagcagctcaaagcgggtgacaatccgtacctgcggtataaccacgccgacgccgagtttcaggagcgtctgcaagaagatacgtcttttgggggcaacctcgggcgagcagtcttccaggccaagaagcgggttctcgaacctctcggtctggttgaggaaggcgctaagacggctcctggaaagaagagaccggtagagcagtcaccccaagaaccagactcctcatcgggcatcggcaagacaggccagcagcccgctaaaaagagactcaattttggtcagactggcgacacagagtcagtccccgacccacaacctctcggagaacctccagcagccccctcaggtctgggacctaatacaatggcttcaggcggtggcgctccaatggcagacaataacgaaggcgccgacggagtgggtaattcctcgggaaattggcattgcgattccacatggctgggggacagagtcatcaccaccagcacccgaacctgggccctgcccacctacaacaaccacctctacaagcaaatctccaacggcacctcgggaggaagcaccaacgacaacacctactttggctacagcaccccctgggggtattttgacttcaacagattccactgccacttttcaccacgtgactggcagcgactcatcaacaacaattggggattccggcccaagagactcaacttcaagctcttcaacatccaggtcaaggaagtcacgacgaacgaaggcaccaagaccatcgccaataatctcaccagcaccgtgcaggtctttacggactcggagtaccagctaccgtacgtgctaggatcagctcaccagggatgtctgcctccgttcccggcggacgtcttcatggttcctcagtacggttatctaactctgaacaatggcagccaggccctgggacgttcctccttctactgcctggagtatttcccatcgcagatgctgagaaccggcaacaactttcagttcagctacaccttcgaggacgtgcctttccacagcagctacgcgcacagccaaagcctggacaggctgatgaatcccctcatcgaccagtacctgtattacctggtcagaacgcagacaaccgggactggagggacgcagactctggcattcagccaagcaggccctagctcaatggccagccaggctagaaactgggtgcccggaccgagctaccggcagcagcgcgtctccacgacaaccaaccagaacaacaacagcaactttgcctggacgggagctgccaaatttaaactgaacggccgagactctctaatgaaccccggcgtggccatggcttcacacaaggatgacgaggaccgcttcttcccttctagcggggtcctgattttcggcaagcaaggagccgggaatgatggagtggattacagccaagtgctgattacagatgaggaagaaatcaaggctaccaaccccgtggcaacagaggaatatggagcagtggccatcaacaaccaggccgctaatacgcaggcgcagaccggactcgtgcacaaccagggggtgattcccggcatggtgtggcagaacagagacgtgtacctgcagggtcccatctgggccaaaattcctcacacggacggcaactttcacccgtctcccctgatgggcggctttggactgaagcacccgcctcctcaaattctcatcaagaacacaccggttccagcggacccgccgcttaccttcaaccaggccaagctgaactctttcatcacgcagtacagcaccggacaggtcagcgtggaaatcgagtgggagctgcagaaagaaaacagcaaacgctggaatccagagattcagtacacttccaactactacaaatctacaaatgtggactttgctgtcaacacggaaggagtgtatagcgagcctcgccccattggcacccgttacctcacccgcaacctgtaattgcctgttaatcaataaaccggttaattcgtttcagtaaggaagaattcgtttaaa

SEQ ID NO: 1199 - protein, 736 aa, Artificial Sequence; identical to SEQ ID NO: 518
  source: /note="Description of Artificial Sequence: Synthetic polypeptide"

SEQ ID NO: 1200 - protein, 736 aa, Artificial Sequence
  source: /note="Description of Artificial Sequence: Synthetic polypeptide"
MAADGYLPDWLEDNLSEGIREWWDLKPGAPKPKANQQKQDDGRGLVLPGYKYLGPFNGLDKGEPVNAADAAALEHDKAYDQQLKAGDNPYLRYNHADAEFQERLQEDTSFGGNLGRAVFQAKKRVLEPLGLVEEGAKTAPGKKRPVEQSPQEPDSSSGIGKTGQQPAKKRLNFGQTGDTESVPDPQPLGEPPAAPSGLGPNTMASGGGAPMADNNEGADGVGNSSGNWHCDSTWLGDRVITTSTRTWALPTYNNHLYKQISNGTSGGSTNDNTYFGYSTPWGYFDFNRFHCHFSPRDWQRLINNNWGFRPKRLNFKLFNIQVKEVTTNEGTKTIANNLTSTVQVFTDSEYQLPYVLGSAHQGCLPPFPADVFMVPQYGYLTLNNGSQALGRSSFYCLEYFPSQMLRTGNNFQFSYTFEDVPFHSSYAHSQSLDRLMNPLIDQYLYYLVRTQTTGTGGTQTLAFSQAGPSNMASQARNWVPGPSYRQQRVSTTTNQNNNSNFAWTGAAKFKLNGRDSLMNPGVAMASHKDDEDRFFPSSGVLIFGKQGAGNDGVDYSQVLITDEEEIKATNPVATEEYGAVAINNQAANTQAQTGLVHNQGVIPGMVWQNRDVYLQGPIWAKIPHTDGNFHPSPLMGGFGLKHPPPQILIKNTPVPADPPLTFNQAKLNSFITQYSTGQVSVEIEWELQKENSKRWNPEIQYTSNYYKSTNVDFAVNTEGVYSEPRPIGTRYLTRNL

SEQ ID NO: 1201 - protein, 738 aa, Artificial Sequence; identical to SEQ ID NO: 895
  source: /note="Description of Artificial Sequence: Synthetic polypeptide"

SEQ ID NO: 1202 - protein, 736 aa, Artificial Sequence
  source: /note="Description of Artificial Sequence: Synthetic polypeptide"
MAADGYLPDWLEDNLSEGIREWWALQPGAPKPKANQQHQDNARGLVLPGYKYLGPGNGLDKGEPVNAADAAALEHDKAYDQQLKAGDNPYLKYNHADAEFQERLKEDTSFGGNLGRAVFQAKKRILEPLGLVEEAAKTAPGKKRPVDQSPQEPDSSSGVGKSGKQPARKRLNFGQTGDSESVPDPQPLGEPPAAPTSLGSNTMASGGGAPMADNNEGADGVGNSSGNWHCDSQWLGDRVITTSTRTWALPTYNNHLYKQISSQSGASNDNHYFGYSTPWGYFDFNRFHCHFSPRDWQRLINNNWGFRPKKLSFKLFNIQVKEVTQNDGTTTIANNLTSTVQVFTDSEYQLPYVLGSAHQGCLPPFPADVFMVPQYGYLTLNNGSQAVGRSSFYCLEYFPSQMLRTGNNFQFSYTFEDVPFHSSYAHSQSLDRLMNPLIDQYLYYLNRTQGTTSGTTNQSRLLFSQAGPQSMSLQARNWLPGPCYRQQRLSKTANDNNNSNFPWTAASKYHLNGRDSLVNPGPAMASHKDDEEKFFPMHGNLIFGKEGTTASNAELDNVMITDEEEIRTTNPVATEQYGTVANNLQSSNTAPTTRTVNDQGALPGMVWQDRDVYLQGPIWAKIPHTDGHFHPSPLMGGFGLKHPPPQIMIKNTPVPANPPTTFSPAKFASFITQYSTGQVSVEIEWELQKENSKRWNPEIQYTSNYNKSVNVDFTVDTNGVYSEPRPIGTRYLTRPL

SEQ ID NO: 1203 - protein, 736 aa, Artificial Sequence
  source: /note="Description of Artificial Sequence: Synthetic polypeptide"
MAADGYLPDWLEDNLSEGIREWWALQPGAPKPKANQQHQDNARGLVLPGYKYLGPGNGLDKGEPVNAADAAALEHDKAYDQQLKAGDNPYLKYNHADAEFQERLKEDTSFGGNLGRAVFQAKKRLLEPLGLVEEAAKTAPGKKRPVDQSPQEPDSSSGVGKSGKQPARKRLNFGQTGDSESVPDPQPLGEPPAAPTSLGSNTMASGGGAPMADNNEGADGVGNSSGNWHCDSQWLGDRVITTSTRTWALPTYNNHLYKQISSQSGASNDNHYFGYSTPWGYFDFNRFHCHFSPRDWQRLINNNWGFRPKKLSFKLFNIQVKEVTQNDGTTTIANNLTSTVQVFTDSEYQLPYVLGSAHQGCLPPFPADVFMVPQYGYLTLNNGSQAVGRSSFYCLEYFPSQMLRTGNNFQFSYTFEDVPFHSSYAHSQSLDRLMNPLIDQYLYYLNRTQGTTSGTTNQSRLLFSQAGPQSMSLQARNWLPGPCYRQQRLSKVANDNNNSNFPWTAASKYHLNGRDSLVNPGPAMASHKDDEEKFFPMHGNLIFGKEGTTASNAELDNVMITDEEEIRTTNPVATEQYGTVANNLQSSNTAPTTRTVNDQGALPGMVWQDRDVYLQGPIWAKIPHTDGHFHPSPLMGGFGLKHPPPQIMIKNTPVPANPPTTFVPAKFASFITQYSTGQVSVEIEWELQKENSKRWNPEIQYTSNYNKSVNVDFTVDTNGVYSEPRPIGTRYLTRPL

SEQ ID NO: 1204 - protein, 736 aa, Artificial Sequence; identical to SEQ ID NO: 912
  source: /note="Description of Artificial Sequence: Synthetic polypeptide"
  VARIANT (168)..(168): /replace="Arg"
  VARIANT (204)..(204): /replace="Ser"
  VARIANT (266)..(266): /replace="Gly"
  VARIANT (311)..(311): /replace="Lys"
  VARIANT (411)..(411): /replace="Gln"
  VARIANT (460)..(460): /replace="Glu"
  VARIANT (493)..(493): /replace="Thr"
  VARIANT (562)..(562): /replace="Asn"
  VARIANT (576)..(576): /replace="Glu"
  VARIANT (587)..(587): /replace="Ala"
  VARIANT (609)..(609): /replace="Asp"
  SITE (1)..(736): /note="Variant residues given in the sequence have no preference with respect to those in the annotations for variant positions"

SEQ ID NO: 1205 - DNA, 2208 bp, Artificial Sequence; identical to SEQ ID NO: 913
  source: /note="Description of Artificial Sequence: Synthetic polynucleotide"
  variation (502)..(504): /replace="aaa"
  variation (610)..(612): /replace="agc"
  variation (796)..(798): /replace="ggc"
  variation (931)..(933): /replace="aag"
  variation (1231)..(1233): /replace="cag"
  variation (1378)..(1380): /replace="gag"
  variation (1477)..(1479): /replace="acc"
  variation (1684)..(1686): /replace="aac"
  variation (1726)..(1728): /replace="gag"
  variation (1759)..(1761): /replace="gcc"
  variation (1825)..(1827): /replace="gac"
  misc_feature (1)..(2208): /note="Variant nucleotides given in the sequence have no preference with respect to those in the annotations for variant positions"

SEQ ID NO: 1206 - protein, 737 aa, Artificial Sequence
  source: /note="Description of Artificial Sequence: Synthetic polypeptide"
  VARIANT (157)..(157): /replace="Ser"
  VARIANT (168)..(168): /replace="Arg"
  VARIANT (262)..(262): /replace="Ser"
  VARIANT (263)..(263): /replace="His"
  VARIANT (312)..(312): /replace="Lys"
  VARIANT (412)..(412): /replace="Gln"
  VARIANT (460)..(460): /replace="Gln"
  VARIANT (461)..(461): /replace="Glu"
  VARIANT (552)..(552): /replace="Ser"
  VARIANT (556)..(556): /replace="Tyr"
  VARIANT (557)..(557): /replace="Ser"
  VARIANT (563)..(563): /replace="Asn"
  VARIANT (580)..(580): /replace="Ile"
  VARIANT (588)..(588): /replace="Ser"
  VARIANT (664)..(664): /replace="Thr"
  SITE (1)..(737): /note="Variant residues given in the sequence have no preference with respect to those in the annotations for variant positions"
MAADGYLPDWLEDNLSEGIREWWDLKPGAPKPKANQQKQDDGRGLVLPGYKYLGPFNGLDKGEPVNAADAAALEHDKAYDQQLKAGDNPYLRYNHADAEFQERLQEDTSFGGNLGRAVFQAKKRVLEPLGLVEEGAKTAPGKKRPVEQSPQEPDSSTGIGKKGQQPAKKRLNFGQTGDSESVPDPQPLGEPPAAPSGVGSNTMAAGGGAPMADNNEGADGVGNASGNWHCDSTWLGDRVITTSTRTWALPTYNNHLYKQISNSQSGGSTNDNTYFGYSTPWGYFDFNRFHCHFSPRDWQRLINNNWGFRPKRLNFKLFNIQVKEVTTNDGTTTIANNLTSTVQVFTDSEYQLPYVLGSAHQGCLPPFPADVFMIPQYGYLTLNNGSQAVGRSSFYCLEYFPSQMLRTGNNFEFSYTFEDVPFHSSYAHSQSLDRLMNPLIDQYLYYLSRTQTTGGTAGNRTLQFSQAGPSSMANQAKNWLPGPCYRQQRVSKTTNQNNNSNFAWTGATKYHLNGRDSLVNPGVAMATHKDDEDRFFPSSGVLIFGKQGAGNDNVDLDNVMITSEEEIKTTNPVATEEYGVVATNLQSNNTAPQTGTVNSQGALPGMVWQNRDVYLQGPIWAKIPHTDGNFHPSPLMGGFGLKHPPPQILIKNTPVPANPPTTFSPAKFASFITQYSTGQVSVEIEWELQKENSKRWNPEIQYTSNYNKSTNVDFAVDTEGVYSEPRPIGTRYLTRNL

SEQ ID NO: 1207 - DNA, 2211 bp, Artificial Sequence; identical to SEQ ID NO: 915
  source: /note="Description of Artificial Sequence: Synthetic polynucleotide"
  variation (469)..(471): /replace="agc"
  variation (502)..(504): /replace="aag"
  variation (784)..(786): /replace="agt"
  variation (787)..(789): /replace="cac"
  variation (934)..(936): /replace="aag"
  variation (1234)..(1236): /replace="cag"
  variation (1378)..(1380): /replace="cag"
  variation (1381)..(1383): /replace="gag"
  variation (1654)..(1656): /replace="agc"
  variation (1666)..(1668): /replace="tac"
  variation (1669)..(1671): /replace="agc"
  variation (1687)..(1689): /replace="aac"
  variation (1738)..(1740): /replace="atc"
  variation (1762)..(1764): /replace="agc"
  variation (1990)..(1992): /replace="acc"
  misc_feature (1)..(2211): /note="Variant nucleotides given in the sequence have no preference with respect to those in the annotations for variant positions"

SEQ ID NO: 1208 - protein, 738 aa, Artificial Sequence; identical to SEQ ID NO: 916
  source: /note="Description of Artificial Sequence: Synthetic polypeptide"
  VARIANT (158)..(158): /replace="Ser"
  VARIANT (169)..(169): /replace="Arg"
  VARIANT (564)..(564): /replace="Asn"
  SITE (1)..(738): /note="Variant residues given in the sequence have no preference with respect to those in the annotations for variant positions"

SEQ ID NO: 1209 - DNA, 2214 bp, Artificial Sequence; identical to SEQ ID NO: 917
  source: /note="Description of Artificial Sequence: Synthetic polynucleotide"
  variation (472)..(474): /replace="agc"
  variation (505)..(507): /replace="aga"
  variation (1690)..(1692): /replace="aac"
  misc_feature (1)..(2214): /note="Variant nucleotides given in the sequence have no preference with respect to those in the annotations for variant positions"

SEQ ID NO: 1210 - protein, 738 aa, Artificial Sequence; identical to SEQ ID NO: 918
  source: /note="Description of Artificial Sequence: Synthetic polypeptide"
  VARIANT (158)..(158): /replace="Ser"
  VARIANT (169)..(169): /replace="Lys"
  VARIANT (315)..(315): /replace="Ser"
  VARIANT (413)..(413): /replace="Glu"
  VARIANT (472)..(472): /replace="Thr" or "Ser"
  VARIANT (534)..(534): /replace="Glu"
  VARIANT (542)..(542): /replace="Val"
  VARIANT (595)..(595): /replace="Val"
  SITE (1)..(738): /note="Variant residues given in the sequence have no preference with respect to those in the annotations for variant positions"

SEQ ID NO: 1211 - DNA, 2214 bp, Artificial Sequence
  source: /note="Description of Artificial Sequence: Synthetic polynucleotide"
  variation (472)..(474): /replace="agc"
  variation (505)..(507): /replace="aag"
  variation (943)..(945): /replace="agc"
  variation (1237)..(1239): /replace="gaa"
  variation (1414)..(1416): /replace="acc" or "agc"
  variation (1600)..(1602): /replace="gag"
  variation (1624)..(1626): /replace="gtc"
  variation (1783)..(1785): /replace="gta"
  misc_feature (1)..(2214): /note="Variant nucleotides given in the sequence have no preference with respect to those in the annotations for variant positions"
atggctgccgatggttatcttccagattggctcgaggacaacctctctgagggcattcgcgagtggtgggacctgaaacctggagccccgaaacccaaagccaaccagcaaaagcaggacgacggccggggtctggtgcttcctggctacaagtacctcggacccttcaacggactcgacaagggggagcccgtcaacgcggcggacgcagcggccctcgagcacgacaaggcctacgaccagcagctcaaagcgggtgacaatccgtacctgcggtataatcacgccgacgccgagtttcaggagcgtctgcaagaagatacgtcttttgggggcaacctcgggcgagcagtcttccaggccaagaagcgggttctcgaacctctcggtctggttgaggaaggcgctaagacggctcctggaaagaagagaccggtagagcagtcaccacagcgtgagcccgactcctccacgggcatcggcaagaaaggccagcagcccgccagaaagagactcaatttcggtcagactggcgactcagagtcagtccccgaccctcaacctctcggagaacctccagcagcgccctctggtgtgggatctaatacaatggctgcaggcggtggcgcaccaatggcagacaataacgaaggtgccgacggagtgggtagttcctcgggaaattggcattgcgattccacatggctgggcgacagagtcatcaccaccagcacccgaacctgggccctgcccacctacaacaaccacctctacaagcaaatctccaacgggacctcgggaggcagcaccaacgacaacacctactttggctacagcaccccctgggggtattttgactttaacagattccactgccacttctcaccacgtgactggcagcgactcatcaacaacaactggggattccggcccaagagactcaacttcaagctcttcaacatccaggtcaaagaggtcacgcagaatgaaggcaccaagaccatcgccaataacctcaccagcaccatccaggtgtttacggactcggaataccagctgccgtacgtcctcggctctgcccaccagggctgcctgcctccgttcccggcggacgtcttcatgattcctcagtacggctacctgactctcaacaacggtagtcaggccgtgggacgttcctccttctactgcctggagtacttcccctctcagatgctgagaacgggcaacaactttcaattcagctacactttcgaggacgtgcctttccacagcagctacgcgcacagccagagtttggacaggctgatgaatcctctcatcgaccagtacctgtactacctgtcaagaacccagactacgggaggcacagcgggaacccagacgttgcagttttctcaggccgggcctagcaacatggcgaatcaggccaaaaactggctgcctggaccctgctacagacagcagcgcgtctccacgacaacgtcgcaaaacaacaacagcaactttgcctggactggtgccaccaagtatcatctgaacggcagagactctctggtgaatccgggcgtcgccatggcaacccacaaggacgacgaggaccgcttcttcccatccagcggcatcctcatatttggcaagcagggagctggaaaagacaacgtggactatagcaacgtgatgctaaccagcgaggaagaaatcaagaccaccaaccccgtggccacagaagagtatggcgtggtggctgataacctacagcagcaaaacaccgctcctcaaatagggaccgtcaacagccagggagccttacctggcatggtctggcagaaccgggacgtgtacctgcagggtcctatttgggccaagattcctcacacagatggcaactttcacccgtctcctttaatgggcggctttggacttaaacatccgcctcctcagatcctcatcaaaaacactcctgttcctgcggatcctccaacaacgttcaaccaggccaagctgaattctttcatcacgcagtacagcaccggacaagtcagcgtggagatcgagtgggagctgcagaaggagaacagcaagcgctggaacccagagattcagtatacttccaactactacaaatctacaaatgtggactttgctgttaatactgagggtgtttactctgagcctcgccccattggcactcgttacctcacccgtaatctg

SEQ ID NO: 1212 - protein, 738 aa, Artificial Sequence; identical to SEQ ID NO: 920
  source: /note="Description of Artificial Sequence: Synthetic polypeptide"
  VARIANT (169)..(169): /replace="Lys"
  VARIANT (315)..(315): /replace="Ser"
  VARIANT (534)..(534): /replace="Glu"
  VARIANT (542)..(542): /replace="Val"
  SITE (1)..(738): /note="Variant residues given in the sequence have no preference with respect to those in the annotations for variant positions"

SEQ ID NO: 1213 - DNA, 2214 bp, Artificial Sequence; identical to SEQ ID NO: 921
  source: /note="Description of Artificial Sequence: Synthetic polynucleotide"
  variation (505)..(507): /replace="aaa"
  variation (943)..(945): /replace="agc"
  variation (1600)..(1602): /replace="gag"
  variation (1624)..(1626): /replace="gtc"
  misc_feature (1)..(2214): /note="Variant nucleotides given in the sequence have no preference with respect to those in the annotations for variant positions"

SEQ ID NO: 1214 - protein, 738 aa, Artificial Sequence; identical to SEQ ID NO: 922
  source: /note="Description of Artificial Sequence: Synthetic polypeptide"
  VARIANT (471)..(471): /replace="Asn"
  SITE (1)..(738): /note="Variant residues given in the sequence have no preference with respect to those in the annotations for variant positions"

SEQ ID NO: 1215 - DNA, 2214 bp, Artificial Sequence; identical to SEQ ID NO: 923
  source: /note="Description of Artificial Sequence: Synthetic polynucleotide"
  variation (1411)..(1413): /replace="aat"
  misc_feature (1)..(2214): /note="Variant nucleotides given in the sequence have no preference with respect to those in the annotations for variant positions"

SEQ ID NO: 1216 - protein, 737 aa, Artificial Sequence; identical to SEQ ID NO: 924
  source: /note="Description of Artificial Sequence: Synthetic polypeptide"
  VARIANT (148)..(148): /replace="Gln"
  VARIANT (169)..(169): /replace="Arg"
  VARIANT (314)..(314): /replace="Asn"
  VARIANT (466)..(466): /replace="His"
  VARIANT (563)..(563): /replace="Ser"
  VARIANT (580)..(580): /replace="Ile"
  VARIANT (588)..(588): /replace="Ser"
  SITE (1)..(737): /note="Variant residues given in the sequence have no preference with respect to those in the annotations for variant positions"

SEQ ID NO: 1217 - DNA, 2211 bp, Artificial Sequence; identical to SEQ ID NO: 925
  source: /note="Description of Artificial Sequence: Synthetic polynucleotide"
  variation (442)..(444): /replace="cag"
  variation (505)..(507): /replace="aga"
  variation (940)..(942): /replace="aac"
  variation (1396)..(1398): /replace="cac"
  variation (1687)..(1689): /replace="agt"
  variation (1738)..(1740): /replace="ata"
  variation (1762)..(1764): /replace="tct"
  misc_feature (1)..(2211): /note="Variant nucleotides given in the sequence have no preference with respect to those in the annotations for variant positions"

SEQ ID NO: 1218 - protein, 735 aa, Artificial Sequence; identical to SEQ ID NO: 926
  source: /note="Description of Artificial Sequence: Synthetic polypeptide"
  VARIANT (162)..(162): /replace="Thr"
  VARIANT (168)..(168): /replace="Arg"
  VARIANT (224)..(224): /replace="Ser"
  VARIANT (310)..(310): /replace="Lys"
  VARIANT (410)..(410): /replace="Gln"
  VARIANT (446)..(446): /replace="Asn"
  VARIANT (461)..(461): /replace="Leu"
  VARIANT (471)..(471): /replace="Ser"
  VARIANT (708)..(708): /replace="Thr"
  SITE (1)..(735): /note="Variant residues given in the sequence have no preference with respect to those in the annotations for variant positions"

SEQ ID NO: 1219 - DNA, 2205 bp, Artificial Sequence; identical to SEQ ID NO: 927
  source: /note="Description of Artificial Sequence: Synthetic polynucleotide"
  variation (484)..(486): /replace="aca"
  variation (502)..(504): /replace="aga"
  variation (670)..(672): /replace="tcc"
  variation (928)..(930): /replace="aaa"
  variation (1228)..(1230): /replace="cag"
  variation (1336)..(1338): /replace="aac"
  variation (1381)..(1383): /replace="ctg"
  variation (1411)..(1413): /replace="tct"
  variation (2122)..(2124): /replace="acc"
  misc_feature (1)..(2205): /note="Variant nucleotides given in the sequence have no preference with respect to those in the annotations for variant positions"

SEQ ID NO: 1220 - protein, 735 aa, Artificial Sequence; identical to SEQ ID NO: 928
  source: /note="Description of Artificial Sequence: Synthetic polypeptide"
  VARIANT (42)..(42): /replace="Ser"
  VARIANT (168)..(168): /replace="Lys"
  VARIANT (310)..(310): /replace="Arg"
  VARIANT (410)..(410): /replace="Gln"
  VARIANT (446)..(446): /replace="Arg"
  VARIANT (461)..(461): /replace="Leu"
  VARIANT (471)..(471): /replace="Ser"
  VARIANT (475)..(475): /replace="Arg"
  VARIANT (504)..(504): /replace="Ala"
  VARIANT (539)..(539): /replace="Asn"
  SITE (1)..(735): /note="Variant residues given in the sequence have no preference with respect to those in the annotations for variant positions"

SEQ ID NO: 1221 - DNA, 2205 bp, Artificial Sequence; identical to SEQ ID NO: 929
  source: /note="Description of Artificial Sequence: Synthetic polynucleotide"
  variation (124)..(126): /replace="agt"
  variation (502)..(504): /replace="aaa"
  variation (928)..(930): /replace="aga"
  variation (1228)..(1230): /replace="cag"
  variation (1336)..(1338): /replace="aga"
  variation (1381)..(1383): /replace="ctc"
  variation (1411)..(1413): /replace="tct"
  variation (1423)..(1425): /replace="aga"
  variation (1510)..(1512): /replace="gcg"
  variation (1615)..(1617): /replace="gac"
  misc_feature (1)..(2205): /note="Variant nucleotides given in the sequence have no preference with respect to those in the annotations for variant positions"

SEQ ID NO: 1222 - protein, 736 aa, Artificial Sequence; identical to SEQ ID NO: 930
  source: /note="Description of Artificial Sequence: Synthetic polypeptide"

SEQ ID NO: 1223 - protein, 736 aa, Artificial Sequence; identical to SEQ ID NO: 931
  source: /note="Description of Artificial Sequence: Synthetic polypeptide"

SEQ ID NO: 1224 - protein, 736 aa, Artificial Sequence; identical to SEQ ID NO: 932
  source: /note="Description of Artificial Sequence: Synthetic polypeptide"

SEQ ID NO: 1225 - protein, 736 aa, Artificial Sequence; identical to SEQ ID NO: 933
  source: /note="Description of Artificial Sequence: Synthetic polypeptide"

SEQ ID NO: 1226 - protein, 736 aa, Artificial Sequence; identical to SEQ ID NO: 934
  source: /note="Description of Artificial Sequence: Synthetic polypeptide"

SEQ ID NO: 1227 - protein, 736 aa, Artificial Sequence; identical to SEQ ID NO: 935
  source: /note="Description of Artificial Sequence: Synthetic polypeptide"

SEQ ID NO: 1228 - protein, 736 aa, Artificial Sequence; identical to SEQ ID NO: 936
  source: /note="Description of Artificial Sequence: Synthetic polypeptide"

SEQ ID NO: 1229 - protein, 736 aa, Artificial Sequence; identical to SEQ ID NO: 937
  source: /note="Description of Artificial Sequence: Synthetic polypeptide"

SEQ ID NO: 1230 - DNA, 2211 bp, Artificial Sequence; identical to SEQ ID NO: 938
  source: /note="Description of Artificial Sequence: Synthetic polynucleotide"

SEQ ID NO: 1231 - protein, 738 aa, Artificial Sequence; identical to SEQ ID NO: 18
  source: /note="Description of Artificial Sequence: Synthetic polypeptide"

SEQ ID NO: 1232 - protein, 738 aa, Artificial Sequence; identical to SEQ ID NO: 18
  source: /note="Description of Artificial Sequence: Synthetic polypeptide"

SEQ ID NO: 1233 - protein, 738 aa, Artificial Sequence
  source: /note="Description of Artificial Sequence: Synthetic polypeptide"
  VARIANT (157)..(157): /replace="Thr"
  VARIANT (169)..(169): /replace="Arg"
  VARIANT (457)..(457): /replace="Gly"
  VARIANT (463)..(463): /replace="Ala"
  VARIANT (508)..(508): /replace="Ala"
  VARIANT (510)..(510): /replace="Phe"
  VARIANT (511)..(511): /replace="Lys"
  VARIANT (558)..(558): /replace="Asn"
  VARIANT (585)..(585): /replace="His"
  VARIANT (587)..(587): /replace="Ala"
  SITE (1)..(738): /note="Variant residues given in the sequence have no preference with respect to those in the annotations for variant positions"
MAADGYLPDWLEDNLSEGIREWWDLKPGAPKPKANQQKQDDGRGLVLPGYKYLGPFNGLDKGEPVNAADAAALEHDKAYDQQLKAGDNPYLRYNHADAEFQERLQEDTSFGGNLGRAVFQAKKRVLEPLGLVEEGAKTAPGKKRPVEQSPQEPDSSSLGIGKTGQQPAKKRLNFGQTGDSESVPDPQPLGEPPAAPSGVGSNTMASGGGAPMADNNEGADGVGNSSGNWHCDSTWLGDRVITTSTRTWALPTYNNHLYKQISNGTSGGSTNDNTYFGYSTPWGYFDFNRFHCHFSPRDWQRLINNNWGFRPKRLNFKLFNIQVKEVTTNEGTKTIANNLTSTVQVFTDSEYQLPYVLGSAHQGCLPPFPADVFMIPQYGYLTLNNGSQAVGRSSFYCLEYFPSQMLRTGNNFQFSYTFEDVPFHSSYAHSQSLDRLMNPLIDQYLYYLSRTQTTGTAGTQTLQFSQAGPSSMANQARNWVPGPCYRQQRVSTTTNQNNNSNFAWTGATKYHLNGRDSLMNPGVAMASHKDDEDRFFPSSGVLIFGKQGAGNDNVDYSQVMITNEEEIKTTNPVATEEYGAVATNNQSLANTQAQTGLVHNQGVLPGMVWQNRDVYLQGPIWAKIPHTDGNFHPSPLMGGFGLKHPPPQILIKNTPVPADPPTTFNQAKLNSFITQYSTGQVSVEIEWELQKENSKRWNPEIQYTSNYYKSTNVDFAVNTEGVYSEPRPIGTRYLTRNL

SEQ ID NO: 1234 - DNA, 2211 bp, Artificial Sequence
  source: /note="Description of Artificial Sequence: Synthetic polynucleotide"
  variation (469)..(471): /replace="acg"
  variation (502)..(504): /replace="aga"
  variation (1366)..(1368): /replace="gga"
  variation (1384)..(1386): /replace="gca"
  variation (1519)..(1521): /replace="gcc"
  variation (1525)..(1527): /replace="ttt"
  variation (1528)..(1530): /replace="aaa"
  variation (1669)..(1671): /replace="aac"
  variation (1750)..(1752): /replace="cac"
  variation (1756)..(1758): /replace="gcc"
  misc_feature (1)..(2211): /note="Variant nucleotides given in the sequence have no preference with respect to those in the annotations for variant positions"
atggctgccgatggttatcttccagattggctcgaggacaacctctctgagggcattcgcgagtggtgggacttgaaacctggagccccgaaacccaaagccaaccagcaaaagcaggacgacggccggggtctggtgcttcctggctacaagtacctcggacccttcaacggactcgacaagggggagcccgtcaacgcggcggacgcagcggccctcgagcacgacaaagcctacgaccagcagctcaaagcgggtgacaatccgtacctgcggtataatcacgccgacgccgagtttcaggagcgtctgcaagaagatacgtcttttgggggcaacctcgggcgagcagtcttccaggccaagaagcgggttctcgaacctctcggtctggttgaggaaggcgctaagacggctcctggaaagaagaggccggtagagcagtcgccacaagagccagactcctcctcgggcatcggcaagacaggccagcagcccgctaaaaagagactcaattttggtcagactggcgactcagagtcagtccccgacccacaacctctcggagaacctccagcagccccctcaggtgtgggatctaatacaatggcttcaggcggtggcgctccaatggcagacaataacgaaggcgccgacggagtgggtaattcctcgggaaattggcattgcgattccacatggctgggggacagagtcatcaccaccagcacccgaacctgggccctgcccacctacaacaaccacctctacaagcaaatctccaacggcacctcgggaggaagcaccaacgacaacacctattttggctacagcaccccctgggggtattttgacttcaacagattccactgtcacttttcaccacgtgactggcaacgactcatcaacaacaattggggattccggcccaaaagactcaacttcaagctgttcaacatccaggtcaaggaagtcacgacgaacgaaggcaccaagaccatcgccaataatctcaccagcaccgtgcaggtctttacggactcggagtaccagttaccgtacgtgctaggatccgctcaccagggatgtctgcctccgttcccggcggacgtcttcatgattcctcagtacggctatttaactttaaacaatggaagccaagccgtgggacgttcctccttctactgtctggagtatttcccatcgcagatgctgagaaccggcaacaactttcagttcagctacaccttcgaggacgtgcctttccacagcagctacgcgcacagccagagcctggacaggctgatgaatcccctcatcgaccagtacctgtactacctgtccagaacgcaaacgactggaactgcagggacgcagactctgcaattcagccaagcgggtcctagctcaatggccaaccaggctagaaattgggtgcccggaccttgctaccggcagcagcgcgtctccacgacaaccaaccagaacaacaacagcaactttgcctggacgggagctaccaagtatcacctgaacggccgagactctctaatgaatccgggcgtggcaatggcttcccacaaggatgacgaggaccgcttcttcccttcgagcggggtcctgatttttggcaagcaaggagccgggaacgataatgtggattacagccaagtgatgattacaaatgaggaagaaatcaagactaccaaccccgtggccacagaagaatatggagcagtggccaccaacaaccagtccgccaatacgcaggcgcagaccggactcgtgcacaaccagggggtgcttcccggcatggtgtggcagaatagagacgtgtacctgcagggtcccatctgggccaaaattcctcacacggacggcaactttcacccgtctcccctgatgggcggctttggactgaagcacccgcctcctcaaattctcatcaagaacacaccggttccagcggacccgccgactaccttcaaccaggccaagctgaactctttcatcacgcagtacagcaccggacaggtcagcgtggaaatcgagtgggagctgcagaaagaaaacagcaaacgctggaatccagagattcaatacacttccaactactacaaatctacaaatgtggactttgctgtcaacacggagggggtttatagcgagcctcgccccattggcacccgttacctcacccgcaacctgtaa

SEQ ID NO: 1235 - protein, 733 aa, Artificial Sequence; identical to SEQ ID NO: 434
  source: /note="Description of Artificial Sequence: Synthetic polypeptide"

SEQ ID NO: 1236 - DNA, 4472 bp, Artificial Sequence
  source: /note="Description of Artificial Sequence: Synthetic polynucleotide"
ctccatcactaggggtaaccgcgaagcgcctcccacgctgccgcgtcagcgctgacgtaaattacgtcataggggagtggtcctgtattagctgtcacgtgagtgcttttgcgacattttgcgacaccacgtggccattcatggtatatatggccgagtgagcgagcaggatctccattttgaccgcgaaatttgaacgagcagcagccatgccgggcttctacgagatcgtgcttaaggtgccgagcgacctggacgagcacctgccgggcatttctgactcgtttgtgaactgggtggcagagaaggaatgggagctgcccccggattctgacatggatcggaatctgattgagcaggcacccctgaccgtggccgagaagctacagcgcgacttcctggtccaatggcgccgcgtgagtaaggccccggaggccctcttctttgttcagttcgagaagggcgagtcctacttccacctccatattctggtagagaccacgggggtcaaatccatggtgctgggccgcttcctgagtcagattcgggacaagctggtgcagaccatctaccgcgggatcgagccgaccctgcccaactggttcgcggtgacaaagacgcgtaatggcgccggaggggggaacaaggtggtggacgagtgctacatccccaactacctgctgcccaagactcagcccgagctgcagtgggcgtggactaacatggaggagtatataagcgcgtgcttgaacctggccgagcgcaaacggctcgtggcgcagcacctgacccacgtcagccagacccaggagcagaacaaggagaatctgaacccgaattctgacgcgcctgtcatccggtcaaaaacctccgcgcgctacatggagctggtcgggtggctggtggaccggggcatcacctccgagaagcagtggatccaggaggaccaggcctcgtacatctccttcaacgccgcctccaactcgcggtctcagatcaaggccgcgctggacaatgccggcaagatcatggcgctgaccaaatccgcgcccgactacctggtaggccccgctctgcccgcggacattaaatccaaccgcatctaccgcatcctggagctgaatggctacgaccctgcctacgccggttccgtctttctcggctgggcccagaaaaagtttggcaaaaggaacaccatctggctgtttgggccggccaccacgggcaagaccaacatcgcggaagccatcgcccacgccgtgcccttctacggctgcgtcaactggaccaatgagaactttcccttcaacgattgcgtcgacaagatggtgatctggtgggaggagggcaagatgacggccaaggtcgtggagtccgccaaggccattctcggcggcagcaaggtgcgcgtggaccaaaagtgcaagtcgtccgcccagatcgatcccacccccgtgatcgtcacctccaacaccaacatgtgcgccgtgattgacgggaacagcaccaccttcgagcaccagcagccgttgcaggaccggatgttcaaatttgaacttacccgccgtctggagcacgactttggcaaggtgacaaagcaggaagtcaaagagttcttccgctgggcgcaggatcacgtgaccgaggtggcgcatgagttctacgtcagaaagggtggagctaacaaaagacccgcccccgatgacgcggatataagcgagcccaagcgggcctgcccctcagtcgcggatccatcgacgtcagacgcggaaggagctccggtggactttgccgacaggtaccaaaacaaatgttctcgtcacgcgggcatgcttcagatgctgtttccctgcaaaacatgcgagagaatgaatcagaatttcaacatttgcttcacgcacgggaccagagactgttcagaatgtttccctggcgtgtcagaatctcaaccggtcgtcagaaaaaagacgtatcggaaactctgtgcgattcatcatctgctggggcgggcacccgagattgcttgctcggcctgcgacctggtcaacgtggacctggatgactgtgtttctgagcaataaatgacttaaaccaggtatggctgccgatggttatcttccagattggctcgaggacaacctctctgagggcattcgcgagtggtgggacctgaaacctggagccccgaaacccaaagccaaccagcaaaagcaggacaacggccggggtctggtgcttcctggctacaagtacctcggacccttcaacggactcgacaagggggagcccgtcaacgcggcggacgcagcggccctcgagcacgacaaggcctacgaccagcagctccaagcgggtgacaatccgtacctgcggtataatcacgccgacgccgagtttcaggagcgtctgcaagaagatacgtcttttgggggcaacctcgggcgcgcagtcttccaggccaaaaagcgggttctcgaacctctgggcctggttgaatcgccggttaagacggctcctggaaagaagagaccggtagagccatcaccccagcgctctccagactcctctacgggcatcggcaagaaaggccagcagcccgcaaaaaagagactcaattttgggcagactggcgactcagagtcagtccccgaccctcaaccaatcggagaaccaccagcaggcccctctggtctgggatctggtacaatggctgcaggcggtggcgctccaatggcagacaataacgaaggcgccgacggagtgggtagttcctcaggaaattggcattgcgattccacatggctgggcgacagagtcatcaccaccagcacccgcacctgggccctgcccacctacaacaaccacctctacaagcaaatctccaacgggacctcgggaggaagcaccaacgacaacacctacttcggctacagcaccccctgggggtattttgacttcaacagattccactgccacttttcaccacgtgactggcagcgactcatcaacaacaactggggattccggcccaagaggctcaacttcaagctcttcaacatccaagtcaaggaggtcacgcagaatgaaggcaccaagaccatcgccaataaccttaccagcacgattcaggtctttacggactcggaataccagctcccgtacgtgctcggctcggcgcaccagggctgcctgcctccgttcccggcggacgtcttcatgattcctcagtacgggtacctgactctgaacaatggcagtcaggctgtgggccggtcgtccttctactgcctggagtactttccttctcaaatgctgagaacgggcaacaactttgaattcagctacaacttcgaggacgtgcccttccacagcagctacgcgcacagccagagcctggaccggctgatgaaccctctcatcgaccagtacttgtactacctgtcccggactcaaagcacgggcggtactgcaggaactcagcagttgctattttctcaggccgggcctaacaacatgtcggctcaggccaagaactggctacccggtccctgctaccggcagcaacgcgtctccacgacactgtcgcagaacaacaacagcaactttgcctggacgggtgccaccaagtatcatctgaatggcagagactctctggtgaatcctggcgttgccatggctacccacaaggacgacgaagagcgattttttccatccagcggagtcttaatgtttgggaaacagggagctggaaaagacaacgtggactatagcagcgtgatgctaaccagcgaggaagaaataaagaccaccaacccagtggccacagaacagtacggcgtggtggccgataacctgcaacagcaaaacgccgctcctattgtaggggccgtcaatagtcaaggagccttacctggcatggtgtggcagaaccgggacgtgtacctgcagggtcccatctgggccaagattcctcatacggacggcaactttcatccctcgccgctgatgggaggctttggactgaagcatccgcctcctcagatcctgattaaaaacacacctgttcccgcggatcctccgaccaccttcactaaggccaagctggcttctttcatcacgcagtacagtaccggccaggtcagcgtggagatcgagtgggagctgcagaaggagaacagcaaacgctggaacccagagattcagtacacttccaactactacaaatctacaaatgtggactttgctgtcaatactgagggtacttattccgagcctcgccccattggcacccgttacctcacccgtaatctgtaattacatgttaatcaataaaccggttaattcgtttcagttgaactttggtctcctgtccttcttatcttatcggttaccatagaaactggttacttattaactgcttggtgcgcttcgcgataaaagacttacgtcatcgggttacccctagtgatgga

SEQ ID NO: 1237 - DNA, 2208 bp, Artificial Sequence
  source: /note="Description of Artificial Sequence: Synthetic polynucleotide"
atggctgccgatggttatcttccagattggctcgaggacactctctctgaaggaataagacagtggtggaagctcaaacctggcccaccaccaccaaagcccgcagagcggcataaggacgacagcaggggtcttgtgcttcctgggtacaagtacctcggacccttcaacggactcgacaagggagagccggtcaacgaggcagacgccgcggccctcgagcacgacaaagcctacgaccggcagctcgacagcggagacaacccgtacctcaagtacaaccacgccgacgcggagtttcaggagcgccttaaagaagatacgtcttttgggggcaacctcggacgagcagtcttccaggcgaaaaagagggttcttgaacctctgggcctggttgaggaacctgttaagaaggctccgggaaaaaagaggccggtagagcactctcctgtggagccagactcctcctcgggaaccggaaaggcgggccagcagcctgcaagaaaaagattgaattttggtcagactggagacgcagactcagtacctgacccccagcctctcggacagccaccagcagccccctctggtctgggaactaataccatggctacaggcagtggcgcaccaatggcagacaataacgagggtgccgacggagtgggtaattcctcgggaaattggcattgcgattccacatggatgggcgacagagtcatcaccaccagcacccgaacctgggccctgcccacctacaacaaccacctctacaaacaaatttccagccaatcaggagcctcgaacgacaatcactactttggctacagcaccccttgggggtattttgacttcaacagattccactgccacttttcaccacgtgactggcaaagactcatcaacaacaactggggattccgacccaagagactcaacttcaagctctttaacattcaagtcaaagaggtcacgcagaatgacggtacgacgacgattgccaataaccttaccagcacggttcaggtgtttactgactcggagtaccagctcccgtacgtcctcggctcggcgcatcaaggatgcctcccgccgttcccagcagacgtcttcatggtgccacagtatggatacctcaccctgaacaacgggagtcaggcagtaggacgctcttcattttactgcctggagtactttccttctcagatgctgcgtaccggaaacaactttaccttcagctacacttttgaggacgttcctttccacagcagctacgctcacagccagagtctggaccgtctcatgaatcctctcatcgaccagtacctgtattacttgagcagaacaaacactccaagtggaaccaccacgcagtcaaggcttcagttttctcaggccggagcgagtgacattcgggaccagtctaggaactggcttcctggaccctgttaccgccagcagcgagtatcaaagacatctgcggataacaacaacagtgaatactcgtggactggagctaccaagtaccacctcaatggcagagactctctggtgaatccgggcccggctatggcaagccacaaggacgatgaagaaaagttttttcctcagagcggggttctcatctttgggaagcaaggctcagagaaaacaaatgtggacattgaaaaggtcatgattacagacgaagaggaaatcaggacaaccaatcccgtggctacggagcagtatggttctgtatctaccaacctccagagaggcaacagacaagcagctaccgcagatgtcaacacacaaggcgttcttccaggcatggtctggcaggacagagatgtgtaccttcaggggcccatctgggcaaagattccacacacggacggacattttcacccctctcccctcatgggtggattcggacttaaacaccctcctccacagattctcatcaagaacaccccggtgcctgcgaatccttcgaccaccttcagtgcggcaaagtttgcttccttcatcacacagtactccacgggacaggtcagcgtggagatcgagtgggagctgcagaaggaaaacagcaaacgctggaatcccgaaattcagtacacttccaactacaacaagtctgttaatgtggactttactgtggacactaatggcgtgtattcagagcctcgccccattggcaccagatacctgactcgtaatctgtaa

SEQ ID NO: 1238 - protein, 735 aa, Artificial Sequence
  source: /note="Description of Artificial Sequence: Synthetic polypeptide"
MAADGYLPDWLEDTLSEGIRQWWKLKPGPPPPKPAERHKDDSRGLVLPGYKYLGPFNGLDKGEPVNEADAAALEHDKAYDRQLDSGDNPYLKYNHADAEFQERLKEDTSFGGNLGRAVFQAKKRVLEPLGLVEEPVKKAPGKKRPVEHSPVEPDSSSGTGKAGQQPARKRLNFGQTGDADSVPDPQPLGQPPAAPSGLGTNTMATGSGAPMADNNEGADGVGNSSGNWHCDSTWMGDRVITTSTRTWALPTYNNHLYKQISSQSGASNDNHYFGYSTPWGYFDFNRFHCHFSPRDWQRLINNNWGFRPKRLNFKLFNIQVKEVTQNDGTTTIANNLTSTVQVFTDSEYQLPYVLGSAHQGCLPPFPADVFMVPQYGYLTLNNGSQAVGRSSFYCLEYFPSQMLRTGNNFTFSYTFEDVPFHSSYAHSQSLDRLMNPLIDQYLYYLSRTNTPSGTTTQSRLQFSQAGASDIRDQSRNWLPGPCYRQQRVSKTSADNNNSEYSWTGATKYHLNGRDSLVNPGPAMASHKDDEEKFFPQSGVLIFGKQGSEKTNVDIEKVMITDEEEIRTTNPVATEQYGSVSTNLQRGNRQAATADVNTQGVLPGMVWQDRDVYLQGPIWAKIPHTDGHFHPSPLMGGFGLKHPPPQILIKNTPVPANPSTTFSAAKFASFITQYSTGQVSVEIEWELQKENSKRWNPEIQYTSNYNKSVNVDFTVDTNGVYSEPRPIGTRYLTRNL

SEQ ID NO: 1239 - DNA, 8376 bp, Artificial Sequence
  source: /note="Description of Artificial Sequence: Synthetic polynucleotide"
aattcccatcatcaataatataccttattttggattgaagccaatatgataatgagggggtggagtttgtgacgtggcgcggggcgtgggaacggggcgggtgacgtagtagtctctagagtcctgtattagaggtcacgtgagtgttttgcgacattttgcgacaccatgtggtcacgctgggtatttaagcccgagtgagcacgcagggtctccattttgaagcgggaggtttgaacgcgcagccaccacgccggggttttacgagattgtgattaaggtccccagcgaccttgacgggcatctgcccggcatttctgacagctttgtgaactgggtggccgagaaggaatgggagttgccgccagattctgacatggatctgaatctgattgagcaggcacccctgaccgtggccgagaagctgcagcgcgactttctgacggaatggcgccgtgtgagtaaggccccggaggcccttttctttgtgcaatttgagaagggagagagctacttccacatgcacgtgctcgtggaaaccaccggggtgaaatccatggttttgggacgtttcctgagtcagattcgcgaaaaactgattcagagaatttaccgcgggatcgagccgactttgccaaactggttcgcggtcacaaagaccagaaatggcgccggaggcgggaacaaggtggtggatgagtgctacatccccaattacttgctccccaaaacccagcctgagctccagtgggcgtggactaatatggaacagtatttaagcgcctgtttgaatctcacggagcgtaaacggttggtggcgcagcatctgacgcacgtgtcgcagacgcaggagcagaacaaagagaatcagaatcccaattctgatgcgccggtgatcagatcaaaaacttcagccaggtacatggagctggtcgggtggctcgtggacaaggggattacctcggagaagcagtggatccaggaggaccaggcctcatacatctccttcaatgcggcctccaactcgcggtcccaaatcaaggctgccttggacaatgcgggaaagattatgagcctgactaaaaccgcccccgactacctggtgggccagcagcccgtggaggacatttccagcaatcggatttataaaattttggaactaaacgggtacgatccccaatatgcggcttccgtctttctgggatgggccacgaaaaagttcggcaagaggaacaccatctggctgtttgggcctgcaactaccgggaagaccaacatcgcggaggccatagcccacactgtgcccttctacgggtgcgtaaactggaccaatgagaactttcccttcaacgactgtgtcgacaagatggtgatctggtgggaggaggggaagatgaccgccaaggtcgtggagtcggccaaagccattctcggaggaagcaaggtgcgcgtggaccagaaatgcaagtcctcggcccagatagacccgactcccgtgatcgtcacctccaacaccaacatgtgcgccgtgattgacgggaactcaacgaccttcgaacaccagcagccgttgcaagaccggatgttcaaatttgaactcacccgccgtctggatcatgactttgggaaggtcaccaagcaggaagtcaaagactttttccggtgggcaaaggatcacgtggttgaggtggagcatgaattctacgtcaaaaagggtggagccaagaaaagacccgcccccagtgacgcagatataagtgagcccaaacgggtgcgcgagtcagttgcgcagccatcgacgtcagacgcggaagcttcgatcaactacgcagacaggtaccaaaacaaatgttctcgtcacgtgggcatgaatctgatgctgtttccctgcagacaatgcgagagaatgaatcagaattcaaatatctgcttcactcacggacagaaagactgtttagagtgctttcccgtgtcagaatctcaacccgtttctgtcgtcaaaaaggcgtatcagaaactgtgctacattcatcatatcatgggaaaggtgccagacgcttgcactgcctgcgatctggtcaatgtggatttggatgactgcatctttgaacaataaatgatttaaatcaggtatggctgccgatggttatcttccagattggctcgaggacactctctctgaaggaataagacagtggtggaagctcaaacctggcccaccaccaccaaagcccgcagagcggcataaggacgacagcaggggtcttgtgcttcctgggtacaagtacctcggacccttcaacggactcgacaagggagagccggtcaacgaggcagacgccgcggccctcgagcacgacaaagcctacgaccggcagctcgacagcggagacaacccgtacctcaagtacaaccacgccgacgcggagtttcaggagcgccttaaagaagatacgtcttttgggggcaacctcggacgagcagtcttccaggcgaaaaagagggttcttgaacctctgggcctggttgaggaacctgttaagacggctccgggaaaaaagaggccggtagagcactctcctgtggagccagactcctcctcgggaaccggaaaggcgggccagcagcctgcaagaaaaagattgaattttggtcagactggagacgcagactcagtacctgacccccagcctctcggacagccaccagcagccccctctggtctgggaactaatacgatggctacaggcagtggcgcaccaatggcagacaataacgagggcgccgacggagtgggtaattcctcgggaaattggcattgcgattccacatggatgggcgacagagtcatcaccaccagcacccgaacctgggccctgcccacctacaacaaccacctctacaaacaaatttccagccaatcaggagcctcgaacgacaatcactactttggctacagcaccccttgggggtattttgacttcaacagattccactgccacttttcaccacgtgactggcaaagactcatcaacaacaactggggattccgacccaagagactcaacttcaagctctttaacattcaagtcaaagaggtcacgcagaatgacggtacgacgacgattgccaataaccttaccagcacggttcaggtgtttactgactcggagtaccagctcccgtacgtcctcggctcggcgcatcaaggatgcctcccgccgttcccagcagacgtcttcatggtgccacagtatggatacctcaccctgaacaacgggagtcaggcagtaggacgctcttcattttactgcctggagtactttccttctcagatgctgcgtaccggaaacaactttaccttcagctacacttttgaggacgttcctttccacagcagctacgctcacagccagagtctggaccgtctcatgaatcctctcatcgaccagtacctgtattacttgagcagaacaaacactccaagtggaaccaccacgcagtcaaggcttcagttttctcaggccggagcgagtgacattcgggaccagtctaggaactggcttcctggaccctgttaccgccagcagcgagtatcaaagacatctgcggataacaacaacagtgaatactcgtggactggagctaccaagtaccacctcaatggcagagactctctggtgaatccgggcccggccatggcaagccacaaggacgatgaagaaaagttttttcctcagagcggggttctcatctttgggaagcaaggctcagagaaaacaaatgtggacattgaaaaggtcatgattacagacgaagaggaaatcaggacaaccaatcccgtggctacggagcagtatggttctgtatctaccaacctccagagaggcaacagacaagcagctaccgcagatgtcaacacacaaggcgttcttccaggcatggtctggcaggacagagatgtgtaccttcaggggcccatctgggcaaagattccacacacggacggacattttcacccctctcccctcatgggtggattcggacttaaacaccctcctccacagattctcatcaagaacaccccggtacctgcgaatccttcgaccaccttcagtgcggcaaagtttgcttccttcatcacacagtactccacgggacaggtcagcgtggagatcgagtgggagctgcagaaggaaaacagcaaacgctggaatcccgaaattcagtacacttccaactacaacaagtctgttaatgtggactttactgtggacactaatggcgtgtattcagagcctcgccccattggcaccagatacctgactcgtaatctgtaattgcttgttaatcaataaaccgtttaattcgtttcagttgaactttggtctctgcgtatttctttcttatctagtttccatgctctagagtcctgtattagaggtcacgtgagtgttttgcgacattttgcgacaccatgtggtcacgctgggtatttaagcccgagtgagcacgcagggtctccattttgaagcgggaggtttgaacgcgcagccaccacggcggggttttacgagattgtgattaaggtccccagcgaccttgacgggcatctgcccggcatttctgacagctttgtgaactgggtggccgagaaggaatgggagttgccgccagattctgacatggatctgaatctgattgagcaggcacccctgaccgtggccgagaagctgcatcgctggcgtaatagcgaagaggcccgcaccgatcgcccttcccaacagttgcgcagcctgaatggcgaatggaattccagacgattgagcgtcaaaatgtaggtatttccatgagcgtttttcctgttgcaatggctggcggtaatattgttctggatattaccagcaaggccgatagtttgagttcttctactcaggcaagtgatgttattactaatcaaagaagtattgcgacaacggttaatttgcgtgatggacagactcttttactcggtggcctcactgattataaaaacacttctcaggattctggcgtaccgttcctgtctaaaatccctttaatcggcctcctgtttagctcccgctctgattctaacgaggaaagcacgttatacgtgctcgtcaaagcaaccatagtacgcgccctgtagcggcgcattaagcgcggcgggtgtggtggttacgcgcagcgtgaccgctacacttgccagcgccctagcgcccgctcctttcgctttcttcccttcctttctcgccacgttcgccggctttccccgtcaagctctaaatcgggggctccctttagggttccgatttagtgctttacggcacctcgaccccaaaaaacttgattagggtgatggttcacgtagtgggccatcgccctgatagacggtttttcgccctttgacgttggagtccacgttctttaatagtggactcttgttccaaactggaacaacactcaaccctatctcggtctattcttttgatttataagggattttgccgatttcggcctattggttaaaaaatgagctgatttaacaaaaatttaacgcgaattttaacaaaatattaacgtttacaatttaaatatttgcttatacaatcttcctgtttttggggcttttctgattatcaaccggggtacatatgattgacatgctagttttacgattaccgttcatcgattctcttgtttgctccagactctcaggcaatgacctgatagcctttgtagagacctctcaaaaatagctaccctctccggcatgaatttatcagctagaacggttgaatatcatattgatggtgatttgactgtctccggcctttctcacccgtttgaatctttacctacacattactcaggcattgcatttaaaatatatgagggttctaaaaatttttatccttgcgttgaaataaaggcttctcccgcaaaagtattacagggtcataatgtttttggtacaaccgatttagctttatgctctgaggctttattgcttaattttgctaattctttgccttgcctgtatgatttattggatgttggaattcctgatgcggtattttctccttacgcatctgtgcggtatttcacaccgcatatggtgcactctcagtacaatctgctctgatgccgcatagttaagccagccccgacacccgccaacacccgctgacgcgccctgacgggcttgtctgctcccggcatccgcttacagacaagctgtgaccgtctccgggagctgcatgtgtcagaggttttcaccgtcatcaccgaaacgcgcgagacgaaagggcctcgtgatacgcctatttttataggttaatgtcatgataataatggtttcttagacgtcaggtggcacttttcggggaaatgtgcgcggaacccctatttgtttatttttctaaatacattcaaatatgtatccgctcatgagacaataaccctgataaatgcttcaataatattgaaaaaggaagagtatgagtattcaacatttccgtgtcgcccttattcccttttttgcggcattttgccttcctgtttttgctcacccagaaacgctggtgaaagtaaaagatgctgaagatcagttgggtgcacgagtgggttacatcgaactggatctcaacagcggtaagatccttgagagttttcgccccgaagaacgttttccaatgatgagcacttttaaagttctgctatgtggcgcggtattatcccgtattgacgccgggcaagagcaactcggtcgccgcatacactattctcagaatgacttggttgagtactcaccagtcacagaaaagcatcttacggatggcatgacagtaagagaattatgcagtgctgccataaccatgagtgataacactgcggccaacttacttctgacaacgatcggaggaccgaaggagctaaccgcttttttgcacaacatgggggatcatgtaactcgccttgatcgttgggaaccggagctgaatgaagccataccaaacgacgagcgtgacaccacgatgcctgtagcaatggcaacaacgttgcgcaaactattaactggcgaactacttactctagcttcccggcaacaattaatagactggatggaggcggataaagttgcaggaccacttctgcgctcggcccttccggctggctggtttattgctgataaatctggagccggtgagcgtgggtctcgcggtatcattgcagcactggggccagatggtaagccctcccgtatcgtagttatctacacgacggggagtcaggcaactatggatgaacgaaatagacagatcgctgagataggtgcctcactgattaagcattggtaactgtcagaccaagtttactcatatatactttagattgatttaaaacttcatttttaatttaaaaggatctaggtgaagatcctttttgataatctcatgaccaaaatcccttaacgtgagttttcgttccactgagcgtcagaccccgtagaaaagatcaaaggatcttcttgagatcctttttttctgcgcgtaatctgctgcttgcaaacaaaaaaaccaccgctaccagcggtggtttgtttgccggatcaagagctaccaactctttttccgaaggtaactggcttcagcagagcgcagataccaaatactgtccttctagtgtagccgtagttaggccaccacttcaagaactctgtagcaccgcctacatacctcgctctgctaatcctgttaccagtggctgctgccagtggcgataagtcgtgtcttaccgggttggactcaagacgatagttaccggataaggcgcagcggtcgggctgaacggggggttcgtgcacacagcccagcttggagcgaacgacctacaccgaactgagatacctacagcgtgagctatgagaaagcgccacgcttcccgaagggagaaaggcggacaggtatccggtaagcggcagggtcggaacaggagagcgcacgagggagcttccagggggaaacgcctggtatctttatagtcctgtcgggtttcgccacctctgacttgagcgtcgatttttgtgatgctcgtcaggggggcggagcctatggaaaaacgccagcaacgcggcctttttacggttcctggccttttgctggccttttgctcacatgttctttcctgcgttatcccctgattctgtggataaccgtattaccgcctttgagtgagctgataccgctcgccgcagccgaacgaccgagcgcagcgagtcagtgagcgaggaagcggaagagcgcccaatacgcaaaccgcctctccccgcgcgttggccgattcattaatgca

SEQ ID NO: 1240 - DNA, 1085 bp, Artificial Sequence
  source: /note="Description of Artificial Sequence: Synthetic polynucleotide"
  modified_base (611)..(611): a, c, g, or t
  modified_base (640)..(640): a, c, g, or t
  modified_base (1039)..(1039): a, c, g, or t
tgcccacttacaacaaccatctctacaagcaaatctccagcvvmdcaggagctascaacgacaaccactactttggctacagcaccccttgggggtattttgactttaacagattccactgccacttctcaccacgtgactggcagcgactcattaacaacaactggggattccggcccaagaaactcagcttcaagctcttcaacatccaagttagaggggtcacgcagaacgatggcacgacgactattgccaataaccttaccagcacggttcaagtgtttacggactcggagtatcagctcccgtacgtgctcgggtcggcgcaccaaggctgtctcccgccgtttccagcggacgtcttcatggtccctcagtatggatacctcaccctgaacaacggaagtcaagcggtgggacgctcatccttttactgcctggagtacttcccttcgcagatgctaaggactggaaataacttccaattcagctataccttcgaggatgtaccttttcacagcagctacgctcacagccagagtttggatcgcttgatgaatcctcttattgatcagtatctgtactacctgaacagaacgcaargcamcvcnrgcggaacarccrvcmhsmrsvvsctgvngtttagccaggctgggcctcagtctatgtctttgcaggccagaaattggctacctgggccctgctaccggcaacagagactttcaamarycbmcrvcsrsaacaacaacagtrastttccttggmcagcggccagcamatatcatctcaatggccgcgactcgctggtgaatccaggaccagctatggccagtcacrrggacgatrmsgrsaratttttccctatgcacggcaatctaatatttggcaaasaarrcrscrvsrvarvcratrycgmsdwcgrsvrsgtaatgattacggatgaagaagagattcgtaccaccaatcctgtggcaacagagcagtatggaactgtggcaaataacttgcagrvsvvsmrsrvcvvscccacgdhtvvsrnsgtcvmscatcagggggccttacctggcatggtgtggcaagatcgt

SEQ ID NO: 1241 - protein, 620 aa, Artificial Sequence
  source: /note="Description of Artificial Sequence: Synthetic polypeptide"
  MOD_RES (263)..(264): Any naturally occurring amino acid
  MOD_RES (267)..(267): Any naturally occurring amino acid
  MOD_RES (450)..(453): Any naturally occurring amino acid
  MOD_RES (456)..(460): Any naturally occurring amino acid
  MOD_RES (462)..(462): Any naturally occurring amino acid
  MOD_RES (491)..(495): Any naturally occurring amino acid
  MOD_RES (500)..(500): Any naturally occurring amino acid
  MOD_RES (504)..(504): Any naturally occurring amino acid
  MOD_RES (508)..(508): Any naturally occurring amino acid
  MOD_RES (528)..(528): Any naturally occurring amino acid
  MOD_RES (531)..(533): Any naturally occurring amino acid
  MOD_RES (546)..(557): Any naturally occurring amino acid
  MOD_RES (586)..(590): Any naturally occurring amino acid
  MOD_RES (593)..(595): Any naturally occurring amino acid
  MOD_RES (597)..(597): Any naturally occurring amino acid
MAADGYLPDWLEDNLSEGIREWWALKPGVPQPKANQQHQDNRRGLVLPGYKYLGPGNGLDKGEPVNEADAAALEHDKAYDQQLKAGDNPYLKYNHADAEFQERLQEDTSFGGNLGRAVFQAKKRILEPLGLVEEAAKTAPGKKGAVDQSPQEPDSSSGVGKSGKQPARKRLNFGQTGDSESVPDPQPLGEPPAAPTSLGSNTMASGGGAPMADNNEGADGVGNSSGNWHCDSQWLGDRVITTSTRTWALPTYNNHLYKQISSXXGAXNDNHYFGYSTPWGYFDFNRFHCHFSPRDWQRLINNNWGFRPKKLSFKLFNIQVRGVTQNDGTTTIANNLTSTVQVFTDSEYQLPYVLGSAHQGCLPPFPADVFMVPQYGYLTLNNGSQAVGRSSFYCLEYFPSQMLRTGNNFQFSYTFEDVPFHSSYAHSQSLDRLMNPLIDQYLYYLNRTQXXXXGTXXXXXLXFSQAGPQSMSLQARNWLPGPCYRQQRLSXXXXXNNNSXFPWXAASXYHLNGRDSLVNPGPAMASHXDDXXXFFPMHGNLIFGKXXXXXXXXXXXXVMITDEEEIRTTNPVATEQYGTVANNLQXXXXXPTXXXVXHQGALPGMVWQDRDVYLQGPIWA

SEQ ID NO: 1242 - DNA, 1491 bp, Artificial Sequence
  source: /note="Description of Artificial Sequence: Synthetic polynucleotide"
accaccagcaccagaacctgggccctgcccacttacaacaaccatctctacaagcaaatctccagccaatcaggagcttcaaacgacaaccactactttggctacagcaccccttgggggtattttgactttaacagattccactgccacttctcaccacgtgactggcagcgactcattaacaacaactggggattccggcccaagaaactcagcttcaagctcttcaacatccaagttagaggggtcacgcagaacgatggcacgacgactattgccaataaccttaccagcacggttcaagtgtttacggactcggagtatcagctcccgtacgtgctcgggtcggcgcaccaaggctgtctcccgccgtttccagcggacgtcttcatggtccctcagtatggatacctcaccctgaacaacggaagtcaagcggtgggacgctcatccttttactgcctggagtacttcccttcgcagatgctaaggactggaaataacttccaattcagctataccttcgaggatgtaccttttcacagcagctacgctcacagccagagtttggatcgcttgatgaatcctcttattgatcagtatctgtactacctgaacagaacgcaaggaacaacctctggaacaaccaaccaatcacggctgctttttagccaggctgggcctcagtctatgtctttgcaggccagaaattggctacctgggccctgctaccggcaacagagactttcaaagactgctaacgacaacaacaacagtaactttccttggacagcggccagcaaatatcatctcaatggccgcgactcgctggtgaatccaggaccagctatggccagtcacaaggacgatgaagaaaaatttttccctatgcacggcaatctaatatttggcaaagaagggacaacggcaagtaacgcagaattagataatgtaatgattacggatgaagaagagattcgtaccaccaatcctgtggcaacagagcagtatggaactgtggcaaataacttgcagagctcaaatacagctcccacgactggaactgtcaatcatcagggggccttacctggcatggtgtggcaagatcgtgacgtctaccttcaaggacctatctgggcaaagattcctcacacggatggacactttcatccttctcctctgatgggaggctttggactgaaacatccgcctcctcaaatcatgatcaaaaatactccggtaccggcaaatcctccgacgactttcagcccggccaagtttgcttcatttatcactcagtactccactggacaggtcagcgtggaaattgagtgggagctacagaaagaaaacagcaaacgttggaatccagagattcagtacacttccaactacaacaagtctgttaatgtggactttactgtagacactaatggtgtttatagtgaacctcgccctattggaacccggtatctcacacgaaacttgtga

SEQ ID NO: 1243 - protein, 482 aa, Artificial Sequence
  source: /note="Description of Artificial Sequence: Synthetic polypeptide"
TTSTRTWALPTYNNHLYKQISSQSGASNDNHYFGYSTPWYFDFNRFHCHFSPRDWQRLNNNWGFRPKKLSFKLFNIQRGVTQNDGTTTIANNLTSTQVFTDSEYQLPYVLGSAHQCLPPFPADVFMVPQYGYLTNNGSQAVGRSSFYCLEYFPQMLRTGNNFQFSYTFEDVPHSSYAHSQSLDRLMNPLIDYLYYLNRTQGTTSGTTNQSLLFSQAGPQSMSLQARNWLGPCYRQQRLSKTANDNNNSFPWTAASKYHLNGRDSLVNGPAMASHKDDEEKFFPMHGLIFGKEGTTASNAELDNVMITDEEEIRTTNPVATEQYGTVANNLQSSNTAPTTGTVNHQGALPGMVWQDRDVYLQGPIWAKIPHTDGHFHPSPLMGGFGLKHPPPQIMIKNTPVPANPPTTFSPAKFASFITQYSTGQVSVEIEWELQKENSKRWNPEIQYTSNYNKSVNVDFTVDTNGVYSEPRPIGTRYLTRNL

SEQ ID NO: 1244 - DNA, 1140 bp, Artificial Sequence
  source: /note="Description of Artificial Sequence: Synthetic polynucleotide"
  modified_base (636)..(636): a, c, g, or t
  modified_base (665)..(665): a, c, g, or t
  modified_base (1064)..(1064): a, c, g, or t
accaccagcaccagaacctgggccctgcccacttacaacaaccatctctacaagcaaatctccagcvvmdcaggagctascaacgacaaccactactttggctacagcaccccttgggggtattttgactttaacagattccactgccacttctcaccacgtgactggcagcgactcattaacaacaactggggattccggcccaagaaactcagcttcaagctcttcaacatccaagttagaggggtcacgcagaacgatggcacgacgactattgccaataaccttaccagcacggttcaagtgtttacggactcggagtatcagctcccgtacgtgctcgggtcggcgcaccaaggctgtctcccgccgtttccagcggacgtcttcatggtccctcagtatggatacctcaccctgaacaacggaagtcaagcggtgggacgctcatccttttactgcctggagtacttcccttcgcagatgctaaggactggaaataacttccaattcagctataccttcgaggatgtaccttttcacagcagctacgctcacagccagagtttggatcgcttgatgaatcctcttattgatcagtatctgtactacctgaacagaacgcaargcamcvcnrgcggaacarccrvcmhsmrsvvsctgvngtttagccaggctgggcctcagtctatgtctttgcaggccagaaattggctacctgggccctgctaccggcaacagagactttcaamarycbmcrvcsrsaacaacaacagtrastttccttggmcagcggccagcamatatcatctcaatggccgcgactcgctggtgaatccaggaccagctatggccagtcacrrggacgatrmsgrsaratttttccctatgcacggcaatctaatatttggcaaasaarrcrscrvsrvarvcratrycgmsdwcgrsvrsgtaatgattacggatgaagaagagattcgtaccaccaatcctgtggcaacagagcagtatggaactgtggcaaataacttgcagrvsvvsmrsrvcvvscccacgdhtvvsrnsgtcvmscatcagggggccttacctggcatggtgtggcaagatcgtgacgtctaccttcaaggacctatctgggca

SEQ ID NO: 1245 - protein, 620 aa, Artificial Sequence; identical to SEQ ID NO: 1241
  source: /note="Description of Artificial Sequence: Synthetic polypeptide"
  MOD_RES (263)..(264): Any naturally occurring amino acid
  MOD_RES (267)..(267): Any naturally occurring amino acid
  MOD_RES (450)..(453): Any naturally occurring amino acid
  MOD_RES (456)..(460): Any naturally occurring amino acid
  MOD_RES (462)..(462): Any naturally occurring amino acid
  MOD_RES (491)..(495): Any naturally occurring amino acid
  MOD_RES (500)..(500): Any naturally occurring amino acid
  MOD_RES (504)..(504): Any naturally occurring amino acid
  MOD_RES (508)..(508): Any naturally occurring amino acid
  MOD_RES (528)..(528): Any naturally occurring amino acid
  MOD_RES (531)..(533): Any naturally occurring amino acid
  MOD_RES (546)..(557): Any naturally occurring amino acid
  MOD_RES (586)..(590): Any naturally occurring amino acid
  MOD_RES (593)..(595): Any naturally occurring amino acid
  MOD_RES (597)..(597): Any naturally occurring amino acid

SEQ ID NO: 1246 - protein, 738 aa, Artificial Sequence; identical to SEQ ID NO: 18
  source: /note="Description of Artificial Sequence: Synthetic polypeptide"

SEQ ID NO: 1247 - DNA, 2258 bp, Artificial Sequence
  source: /note="Description of Artificial Sequence: Synthetic polynucleotide"
tcgaggacaacctctctgagggcattcgcgagtggtgggacttgaaacctggagccccgaaacccaaagccaaccagcaaaagcaggacgacggccggggtctggtgcttcctggctacaagtacctcggacccttcaacggactcgacaagggggagcccgtcaacgcggcggacgcagcggccctcgagcacgacaaggcctacgaccagcagctcaaagcgggtgacaatccgtacctgcggtataaccacgccgacgccgagtttcaggagcgtctgcaagaagatacgtcttttgggggcaacctcgggcgagcagtcttccaggccaagaagcgggttctcgaacctctcggtctggttgaggaaggcgctaagacggctcctggaaagaagagaccggtagagccatcaccccagcgttctccagactcctctacgggcatcggcaagaaaggccagcagcccgcgaaaaagagactcaactttgggcagactggcgactcagagtcagtgcccgaccctcaaccaatcggagaaccccccgcaggcccctctggtctgggatctggtacaatggctgcaggcggtggcgctccaatggcagacaataacgaaggcgccgacggagtgggtagttcctcaggaaattggcattgcgattccacatggctgggcgacagagtcatcaccaccagcacccgaacctgggccctccccacctacaacaaccacctctacaagcaaatctccaacgggacttcgggaggaagcaccaacgacaacacctacttcggctacagcaccccctgggggtattttgactttaacagattccactgccacttctcaccacgtgactggcagcgactcatcaacaacaactggggattccggcccaagagactcaacttcaagctcttcaacatccaggtcaaggaggtcacgcagaatgaaggcaccaagaccatcgccaataaccttaccagcacgattcaggtctttacggactcggaataccagctcccgtacgtcctcggctctgcgcaccagggctgcctgcctccgttcccggcggacgtcttcatgattcctcagtacgggtacctgactctgaacaatggcagtcaggccgtgggccgttcctccttctactgcctggagtactttccttctcaaatgctgagaacgggcaacaactttgagttcagctaccagtttgaggacgtgccttttcacagcagctacgcgcacagccaaagcctggaccggctgatgaaccccctcatcgaccagtacctgtactacctgtctcggactcagtccacgggaggtaccgcaggaactcagcagttgctattttctcaggccgggcctaataacatgtcggctcaggccaaaaactggctacccgggccctgctaccggcagcaacgcgtctccacgacactgtcgcaaaataacaacagcaactttgcctggaccggtgccaccaagtatcatctgaatggcagagactctctggtaaatcccggtgtcgctatggcaacccacaaggacgacgaagagcgattttttccgtccagcggagtcttaatgtttgggaaacagggagctggaaaagacaacgtggactatagcagcgttatgctaaccagtgaggaagaaattaaaaccaccaacccagtggccacagaacagtacggcgtggtggccgataacctgcaacagcaaaacgccgctcctattgtaggggccgtcaacagtcaaggagccttacctggcatggtctggcagaaccgggacgtgtacctgcagggtcctatctgggccaagattcctcacacggacggaaactttcatccctcgccgctgatgggaggctttggactgaaacacccgcctcctcagatcctgattaagaatacacctgttcccgcggatcctccaactaccttcagtcaagctaagctggcgtcgttcatcacgcagtacagcaccggacaggtcagcgtggaaattgaatgggagctgcagaaagaaaacagcaaacgctggaacccagagattcaatacacttccaactactacaaatctacaaatgtggactttgctgttaacacagatggcacttattctgagcctcgccccatcggcacccgttacctcacccgtaatctgtaattgcttgttaatcaataaaccggttgattcgtttcagttgaactttggtctctgcgaagggcgaattcgttt

SEQ ID NO: 1248 - DNA, 2208 bp, Artificial Sequence
  source: /note="Description of Artificial Sequence: Synthetic polynucleotide"
atggctgccgatggttatcttccagattggctcgaggacactctctctgaaggaataagacagtggtggaagctcaaacctggcccaccaccaccaaagcccgcagagcggcataaggacgacagcaggggtcttgtgcttcctgggtacaagtacctcggacccttcaacggactcgacaagggagagccggtcaacgaggcagacgccgcggccctcgagcacgacaaagcctacgaccggcagctcgacagcggagacaacccgtacctcaagtacaaccacgccgacgcggagtttcaggagcgccttaaagaagatacgtcttttgggggcaacctcggacgagcagtcttccaggcgaaaaagagggttcttgaacctctgggcctggttgaggaacctgttaagacggctccgggaaaaaagaggccggtagagcactctcctgtggagccagactcctcctcgggaaccggaaaggcgggccagcagcctgcaagaaaaagattgaattttggtcagactggagacgcagactcagtacctgacccccagcctctcggacagccaccagcagccccctctggtctgggaactaatacgatggctacaggcagtggcgcaccaatggcagacaataacgagggcgccgacggagtgggtaattcctcgggaaattggcattgcgattccacatggatgggcgacagagtcatcaccaccagcacccgaacctgggccctgcccacctacaacaaccacctctacaaacaaatttccagccaatcaggagcctcgaacgacaatcactactttggctacagcaccccttgggggtattttgacttcaacagattccactgccacttttcaccacgtgactggcaaagactcatcaacaacaactggggattccgacccaagagactcaacttcaagctctttaacattcaagtcaaagaggtcacgcagaatgacggtacgacgacgattgccaataaccttaccagcacggttcaggtgtttactgactcggagtaccagctcccgtacgtcctcggctcggcgcatcaaggatgcctcccgccgttcccagcagacgtcttcatggtgccacagtatggatacctcaccctgaacaacgggagtcaggcagtaggacgctcttcattttactgcctggagtactttccttctcagatgctgcgtaccggaaacaactttaccttcagctacacttttgaggacgttcctttccacagcagctacgctcacagccagagtctggaccgtctcatgaatcctctcatcgaccagtacctgtatttcttaagcagaacaaacactccaagtggaaccaccacgcagtcaaggcttcagttttctcaggccggagcgagtgacattcgggaccagtctaggaactggcttcctggaccctgttaccgccagcagcgagtatcaaagacatctgcggataacaacaacagtgaattctcgtggaccggtgctaccaagtaccacctcaatggcagagactctctggtgaatccgggcccggccatggcaagccacaaggacgatgaagaaaagttttttcctcagagcggggttctcatctttgggaagcaaggctcagagaaaacaaatgtggacattgaaaaggtcatgattacagacgaagaggaaatcaggacaaccaatcccgtggctacggagcagtatggttctgtatctaccaacctccagagaggcaacagacaagcagctaccgcagatgtcaacacacaaggcgttcttccaggcatggtctggcaggacagagatgtgtaccttcaggggcccatctgggcaaagattccacacacggacggacattttcacccctctcccctcatgggtggattcggacttaaacaccctcctccacagattctcatcaagaacaccccggtacctgcgaatccttcgaccaccttcagtgcggcaaagtttgcttccttcatcacacagtactccacgggacaggtcagcgtggagatcgagtgggagctgcagaaggaaaacagcaaacgctggaatcccgaaattcagtacacttccaactacaacaagtctgttaatgtggactttactgtggacactaatggcgtgtattcagagcctcgccccattggtaccagattcctgactcgtaatctgtaa

SEQ ID NO: 1249 - protein, 737 aa, Artificial Sequence
  source: /note="Description of Artificial Sequence: Synthetic polypeptide"
MAADGYLPDWLEDNLSEGIREWWDLKPGAPKPKANQQKQDNGRGLVLPGYKYLGPFNGLDKGEPVNAADAAALEHDKAYDQQLQAGDNPYLRYNHADAEFQERLQEDTSFGGNLGRAVFQAKKRVLEPLGLVESPVKTAPGKKRPVEPSPQRSPDSSTGIGKKGQQPAKKRLNFGQTGDSESVPDPQPIGEPPAAPSGVGPNTMAAGGGAPMADNNEGADGVGSSSGNWHCDSTWLGDRVITTSTRTWALPTYNNHLYKQISNGTSGGSTNDNTYFGYSTPWGYFDFNRFHCHFSPRDWQRLINNNWGFRPKRLNFKLFNIQVKEVTQNEGTKTIANNLTSTIQVFTDSEYQLPYVLGSAHQGCLPPFPADVFMIPQYGYLTLNNGSQAVGRSSFYCLEYFPSQMLRTGNNFEFSYNFEDVPFHSSYAHSQSLDRLMNPLIDQYLYYLSRTQSTGGTAGTQQLLFSQAGPNNMSAQAKNWLPGPCYRQQRVSTTLSQNNNSNFAWTGATKYHLNGRDSLVNPGVAMATHKDDEERFFPSSGVLMFGKQGAGKDNVDYSSVMLTSEEEIKTTNPVATEQYGWADNLQQQNAAPIVGAVNSQGALPGMVWQNRDVYLQGPIWAKIPHTDGNFHPSPLMGGFGLKHPPPQILIKNTPVPADPPTTFNQAKLASFITQYSTGQVSVEIEWELQKENSKRWNPEIQYTSNYYKSTNVDFAVNTEGTYSEPRPIGTRYLTRNL

SEQ ID NO: 1250 - DNA, 2211 bp, Artificial Sequence
  source: /note="Description of Artificial Sequence: Synthetic polynucleotide"
atggctgccgatggttatcttccagattggctcgaggacactctctctgaaggaataagacagtggtggaagctcaaacctggcccaccaccaccaaagcccgcagagcggcataaggacgacagcaggggtcttgtgcttcctgggtacaagtacctcggacccttcaacggactcgacaagggagagccggtcaacgaggcagacgccgcggccctcgagcacgacaaagcctacgaccggcagctcgacagcggagacaacccgtacctcaagtacaaccacgccgacgcggagtttcaggagcgccttaaagaagatacgtcttttgggggcaacctcggacgagcagtcttccaggcgaaaaagagggttcttgaacctctgggcctggttgaggaacctgttaagacggctccgggaaaaaagaggccggtagagcactctcctgtggagccagactcctcctcgggaaccggaaaggcgggccagcagcctgcaagaaaaagattgaattttggtcagactggagacgcagactcagtacctgacccccagcctctcggacagccaccagcagccccctctggtctgggaactaatacgatggctacaggcagtggcgcaccaatggcagacaataacgagggcgccgacggagtgggtaattcctcgggaaattggcattgcgattccacatggatgggcgacagagtcatcaccaccagcacccgaacctgggccctgcccacctacaacaaccacctctacaaacaaatttccagcgcttcaacgggagcctcgaacgacaatcactactttggctacagcaccccttgggggtattttgacttcaacagattccactgccacttttcaccacgtgactggcaaagactcatcaacaacaactggggattccgacccaagagactcaacttcaagctctttaacattcaagtcaaagaggtcacgcagaatgacggtacgacgacgattgccaataaccttaccagcacggttcaggtgtttactgactcggagtaccagctcccgtacgtcctcggctcggcgcatcaaggatgcctcccgccgttcccagcagacgtcttcatggtgccacagtatggatacctcaccctgaacaacgggagtcaggcagtaggacgctcttcattttactgcctggagtactttccttctcagatgctgcgtaccggaaacaactttaccttcagctacacttttgaggacgttcctttccacagcagctacgctcacagccagagtctggaccgtctcatgaatcctctcatcgaccagtacctgtattacttgagcagaacaaacactccaagtggaaccaccacgcagtcaaggcttcagttttctcaggccggagcgagtgacattcgggaccagtctaggaactggcttcctggaccctgttaccgccagcagcgagtatcaaagacatctgcggataacaacaacagtgaatactcgtggactggagctaccaagtaccacctcaatggcagagactctctggtgaatccgggcccggccatggcaagccacaaggacgatgaagaaaagttttttcctcagagcggggttctcatctttgggaagcaaggctcagagaaaacaaatgtggacattgaaaaggtcatgattacagacgaagaggaaatcaggacaaccaatcccgtggctacggagcagtatggttctgtatctaccaacctccagagaggcaacagacaagcagctaccgcagatgtcaacacacaaggcgttcttccaggcatggtctggcaggacagagatgtgtaccttcaggggcccatctgggcaaagattccacacacggacggacattttcacccctctcccctcatgggtggattcggacttaaacaccctcctccacagattctcatcaagaacaccccggtacctgcgaatccttcgaccaccttcagtgcggcaaagtttgcttccttcatcacacagtactccacgggacaggtcagcgtggagatcgagtgggagctgcagaaggaaaacagcaaacgctggaatcccgaaattcagtacacttccaactacgccaagtctgtcaatgtggactttactgtggacaataatggcgtgtattcagagcctcgccccattggcaccagatacctgactcgtaatctgtaa

SEQ ID NO: 1251 - DNA, 2208 bp, Artificial Sequence
  source: /note="Description of Artificial Sequence: Synthetic polynucleotide"
atggctgccgatggttatcttccagattggctcgaggacaacctctctgagggcattcgcgagtggtgggacttgaaacctggagccccgaagcccaaagccaaccagcaaaagcaggacgacggccggggtctggtgcttcctggctacaagtacctcggacccttcaacggactcgacaagggggagcccgtcaacgcggcggacgcagcggccctcgagcacgacaaggcctacgaccagcagctcaaagcgggtgacaatccgtacctgcggtataaccacgccgacgccgagtttcaggagcgtctgcaagaagatacgtcttttgggggcaacctcgggcgagcagtcttccaggccaagaagcgggttctcgaacctctcggtctggttgaggaaggcgctaagacggctcctggaaagaaacgtccggtagagcagtcgccacaagagccagactcctcctcgggcatcggcaagacaggccagcagcccgctaaaaagagactcaattttggtcagactggcgactcagagtcagtccccgatccacaacctctcggagaacctccagcaacccccgctgctgtgggacctactacaatggcttcaggcggtggcgcaccaatggcagacaataacgaaggcgccgacggagtgggtaatgcctcaggaaattggcattgcgattccacatggctgggcgacagagtcatcaccaccagcacccgcacctgggccttgcccacctacaataaccacctctacaagcaaatctccagtgcttcaggggccagcaacgacaaccactacttcggctacagcaccccctgggggtattttgatttcaacagattccactgccacttttcaccacgtgactggcagcgactcatcaacaacaattggggattccggcccaagagactcaacttcaaactcttcaacatccaagtcaaggaggtcacgacgaatgatggcgtcacaaccatcgctaataaccttaccagcacggttcaagtcttctcggactcggagtaccagcttccgtacgtcctcggctctgcgcaccagggctgcctccctccgttcccggcggacgtgttcatgattccgcaatacggctacctgacgctcaacaatggcagccaagccgtgggacgttcatccttttactgcctggaatatttcccttctcagatgctgagaacgggcaacaactttaccttcagctacacctttgaggaagtgcctttccacagcagctacgcgcacagccagagcctggaccggctgatgaatcctctcatcgaccaatacctgtattacctgaacagaactcaaaatcagtccggaagtgcccaaaacaaggacttgctgtttagccgtgggtctccagctggcatgtctgttcagcccaaaaactggctacctggaccctgttatcggcagcagcgcgtttctaaaacaaaaacagacaacaacaacagcaattttacctggactggtgcttcaaaatataacctcaatgggcgtgaatccatcatcaaccctggcactgctatggcctcacacaaagacgacgaagacaagttctttcccatgagcggtgtcatgatttttggaaaagagagcgccggagcttcaaacactgcattggacaatgtcatgattacagacgaagaggaaattaaagccactaaccctgtggccaccgaaagatttgggaccgtggcagtcaatttccagagcagcagcacagaccctgcgaccggagatgtgcatgctatgggagcattacctggcatggtgtggcaagatagagacgtgtacctgcagggtcccatttgggccaaaattcctcacacagatggacactttcacccgtctcctcttatgggcggctttggactcaagaacccgcctcctcagatcctcatcaaaaacacgcctgttcctgcgaatcctccggcggagttttcagctacaaagtttgcttcattcatcacccaatactccacaggacaagtgagtgtggaaattgaatgggagctgcagaaagaaaacagcaagcgctggaatcccgaagtgcagtacacatccaattatgcaaaatctgccaacgttgattttactgtggacaacaatggactttatactgagcctcgccccattggcacccgttaccttacccgtcccctgtaa

SEQ ID NO: 1252 - DNA, 2205 bp, Artificial Sequence
  source: /note="Description of Artificial Sequence: Synthetic polynucleotide"
atggctgccgatggttatcttccagattggctcgaggacaacctctdgagggcattcgcgagtggtgggacttgaaacctggagccccgaaacccaaagccaaccagcaaaagcaggacgacggccggggtdggtgcttcctggctacaagtacctcggacccttcaacggactcgacaagggggagcccgtcaacgcggcggatgcagcggccctcgagcacgacaaggcctacgaccagcagctcaaagcgggtgacaatccgtacctgcggtataaccacgccgacgccgagtttcaggagcgtctgcaagaagatacgtcttttgggggcaacctcgggcgagcagtcttccaggccaagaagagggttctcgaaccttttggtdggttgaggaaggtgctaagacggctcctggaaagaaacgtccggtagagcagtcgccacaagagccagactcctcctcgggcattggcaagacaggccagcagcccgctaaaaagagactcaattttggtcagactggcgactcagagtcagtccccgacccacaacctctcggagaacctccagcaacccccgctgctgtgggacctactacaatggcttcaggcggtggcgcaccaatggcagacaataacgaaggcgccgacggagtgggtaatgcctcaggaaattggcattgcgattccacatggctgggcgacagagtcatcaccaccagcacccgaacatgggccttgcccacctataacaaccacctctacaagcaaatctccagtgcttcaggggccagcaacgacaaccactacttcggctacagcaccccctgggggtattttgatttcaacagattccactgccatttctcaccacgtgactggcagcgactcatcaacaacaattggggattccggcccaagagactcaacttcaagctcttcaacatccaagtcaaggaggtcacgacgaatgatggcgtcacgaccatcgctaataaccttaccagcacggttcaagtcttctcggactcggagtaccagttgccgtacgtcctcggctctgcgcaccagggctgcctccctccgttcccggcggacgtgttcatgattccgcagtacggctacctaacgctcaacaatggcagccaggcagtgggacggtcatccttttactgcctggaatatttcccatcgcagatgctgagaacgggcaataactttaccttcagctacaccttcgaggacgtgcctttccacagcagctacgcgcacagccagagcctggaccggctgatgaatcctctcatcgaccagtacctgtattacctgaacagaactcagaatcagtccggaagtgcccaaaacaaggacttgctgtttagccgggggtctccagctggcatgtctgttcagcccaaaaactggctacctggaccctgttaccggcagcagcgcgtttctaaaacaaaaacagacaacaacaacagcaactttacctggactggtgcttcaaaatataaccttaatgggcgtgaatctataatcaaccctggcactgctatggcctcacacaaagacgacaaagacaagttctttcccatgagcggtgtcatgatttttggaaaggagagcgccggagcttcaaacactgcattggacaatgtcatgatcacagacgaagaggaaatcaaagccactaaccccgtggccaccgaaagatttgggactgtggcagtcaatctccagagcagcagcacagaccctgcgaccggagatgtgcatgttatgggagccttacctggaatggtgtggcaagacagagacgtatacctgcagggtcctatttgggccaaaattcctcacacggatggacactttcacccgtctcctctcatgggcggctttggacttaagcacccgcctcctcagatcctcatcaaaaacacgcctgttcctgcgaatcctccggcagagttttcggctacaaagtttgcttcattcatcacccagtattccacaggacaagtgagcgtggagattgaatgggagctgcagaaagaaaacagcaaacgctggaatcccgaagtgcagtatacatctaactatgcaaaatctgccaacgttgatttcactgtggacaacaatggactttatactgagcctcgccccattggcacccgttacctcacccgtcccctgtaa

SEQ ID NO: 1253 - DNA, 2208 bp, Artificial Sequence
  source: /note="Description of Artificial Sequence: Synthetic polynucleotide"
atggctgccgatggttatcttccagattggctcgaggacaacctctctgagggcattcgcgagtggtgggacttgaaacctggagccccgaaacccaaagccaaccagcaaaagcaggacgacggccggggtctggtgcttcctggctacaagtacctcggacccttcaacggactcgacaagggggagcccgtcaacgcggcggatgcagcggccctcgagcacgacaaggcctacgaccagcagctcaaagcgggtgacaatccgtacctgcggtataaccacgccgacgccgagtttcaggagcgtctgcaagaagatacgtcttttgggggcaacctcgggcgagcagtcttccaggccaagaagagggttctcgaaccttttggtctggttgaggaaggtgctaagacggctcctggaaagaaacgtccggtagagcagtcgccacaagagccagactcctcctcgggcattggcaagacaggccagcagcccgctaaaaagagactcaattttggtcagactggcgactcagagtcagtccccgacccacaacctctcggagaacctccagcaacccccgctgctgtgggacctactacaatggcttcaggcggtggcgcaccaatggcagacaataacgaaggcgccgacggagtgggtaatgcctcaggaaattggcattgcgattccacatggctgggcgacagagtcatcaccaccagcacccgaacatgggccttgcccacctataacaaccacctctacaagcaaatctccagtgcttcaggggccagcaacgacaaccactacttcggctacagcaccccctgggggtattttgatttcaacagattccactgccatttctcaccacgtgactggcagcgactcatcaacaacaattggggattccggcccaagagactcaacttcaagctcttcaacatccaagtcaaggaggtcacgacgaatgatggcgtcacgaccatcgctaataaccttaccagcacggttcaagtcttctcggactcggagtaccagttgccgtacgtcctcggctctgcgcaccagggctgcctccctccgttcccggcggacgtgttcatgattccgcagtacggctacctaacgctcaacaatggcagccaggcagtgggacggtcatccttttactgcctggaatatttcccatcgcagatgctgagaacgggcaataactttaccttcagctacaccttcgaggacgtgcctttccacagcagctacgcgcacagccagagcctggaccggctgatgaatcctctcatcgaccagtacctgtattacctgaacagaactcagaatcagtccggaagtgcccaaaacaaggacttgctgtttagccgggggtctccagctggcatgtctgttcagcccaaaaactggctacctggaccctgttaccggcagcagcgcgtttctaaaacaaaaacagacaacaacaacagcaactttacctggactggtgcttcaaaatataaccttaatgggcgtgaatctataatcaaccctggcactgctatggcctcacacaaagacgacgaagacaagttctttcccatgagcggtgtcatgatttttggaaaggagagcgccggagcttcaaacactgcattggacaatgtcatgatcacagacgaagaggaaatcaaagccactaaccccgtggccaccgaaagatttgggactgtggcagtcaatctccagagcagcagcacagaccctgcgaccggagatgtgcatgttatgggagccttacctggaatggtgtggcaagacagagacgtatacctgcagggtcctatttgggccaaaattcctcacacggatggacactttcacccgtctcctctcatgggcggctttggacttaagcacccgcctcctcagatcctcatcaaaaacacgcctgttcctgcgaatcctccggcagagttttcggctacaaagtttgcttcattcatcacccagtattccacaggacaagtgagcgtggagattgaatgggagctgcagaaagaaaacagcaaacgctggaatcccgaagtgcagtatacatctaactatgcaaaatctgccaacgttgatttcactgtggacaacaatggactttatactgagcctcgccccattggcacccgttacctcacccgtcccctgtaa

SEQ ID NO: 1254 - DNA, 2208 bp, Artificial Sequence
  source: /note="Description of Artificial Sequence: Synthetic polynucleotide"
atggctgccgatggttatcttccagattggctcgaggacactctctctgaaggaataagacagtggtggaagctcaaacctggcccaccaccaccaaagcccgcagagcggcataaggacgacagcaggggtcttgtgcttcctgggtacaagtacctcggacccttcaacggactcgacaagggagagccggtcaacgaggcagacgccgcggccctcgagcacgacaaagcctacgaccggcagctcgacagcggagacaacccgtacctcaagtacaaccacgccgacgcggagtttcaggagcgccttaaagaagatacgtcttttgggggcaacctcggacgagcagtcttccaggcgaaaaagagggttcttgaacctctgggcctggttgaggaacctgttaagacggctccgggaaaaaagaggccggtagagcactctcctgtggagccagactcctcctcgggaaccggaaaggcgggccagcagcctgcaagaaaaagattgaattttggtcagactggagacgcagactcagtacctgacccccagcctctcggacagccaccagcagccccctctggtctgggaactaatacgatggctacaggcagtggcgcaccaatggcagacaataacgagggcgccgacggagtgggtaattcctcgggaaattggcattgcgattccacatggatgggcgacagagtcatcaccaccagcacccgaacctgggccctgcccacctacaacaaccacctctacaaacaaatttccagccaatcaggagcctcgaacgacaatcactactttggctacagcaccccttgggggtattttgacttcaacagattccactgccacttttcaccacgtgactggcaaagactcatcaacaacaactggggattccgacccaagagactcaacttcaagctctttaacattcaagtcaaagaggtcacgcagaatgacggtacgacgacgattgccaataaccttaccagcacggttcaggtgtttactgactcggagtaccagctcccgtacgtcctcggctcggcgcatcaaggatgcctcccgccgttcccagcagacgtcttcatggtgccacagtatggatacctcaccctgaacaacgggagtcaggcagtaggacgctcttcattttactgcctggagtactttccttctcagatgctgcgtaccggaaacaactttaccttcagctacacttttgaggacgttcctttccacagcagctacgctcacagccagagtctggaccgtctcatgaatcctctcatcgaccagtacctgtattacttgagcagaacaaacactccaagtggaaccaccacgcagtcaaggcttcagttttctgtggccggacccagtaacatggctgtccagggaaggaactggcttcctggaccctgttaccgccagcagcgagtatcaaagacatctgcggataacaacaacagtgaatttgcttggactggagctaccaagtaccacctcaatggcagagactctctggtgaatccgggcccggccatggcaagccacaaggacgatgaagaaaagttttttcctcagagcggggttctcatctttgggaagcaaggctcagagaaaacaaatgtggacattgaaaaggtcatgattacagacgaagaggaaatcaggacaaccaatcccgtggctacggagcagtatggttctgtatctaccaacctccagcaacagaacacagcaccagctaccgcagatgtcaacacacaaggcgttcttccaggcatggtctggcaggacagagatgtgtaccttcaggggcccatctgggcaaagattccacacacggacggacattttcacccctctcccctcatgggtggattcggacttaaacaccctcctccacagattctcatcaagaacaccccggtacctgcgaatccttcgaccaccttcagtgcggcaaagtttgcttccttcatcacacagtactccacgggacaggtcagcgtggagatcgagtgggagctgcagaaggaaaacagcaaacgctggaatcccgaaattcagtacacttccaactacaacaagtctgttaatgtggactttactgtggacactaatggcgtgtattcagagcctcgccccattggcaccagatacctgactcgtaatctgtaa

SEQ ID NO: 1255 - protein, 735 aa, Artificial Sequence
  source: /note="Description of Artificial Sequence: Synthetic polypeptide"
MAADGYLPDWLEDTLSEGIRQWWKLKPGPPPPKPAERHKDDSRGLVLPGYKYLGPFNGLDKGEPVNEADAAALEHDKAYDRQLDSGDNPYLKYNHADAEFQERLKEDTSFGGNLGRAVFQAKKRVLEPLGLVEEPVKTAPGKKRPVEHSPVEPDSSSGTGKAGQQPARKRLNFGQTGDADSVPDPQPLGQPPAAPSGLGTNTMATGSGAPMADNNEGADGVGNSSGNWHCDSTWMGDRVITTSTRTWALPTYNNHLYKQISSQSGASNDNHYFGYSTPWGYFDFNRFHCHFSPRDWQRLINNNWGFRPKRLNFKLFNIQVKEVTQNDGTTTIANNLTSTVQVFTDSEYQLPYVLGSAHQGCLPPFPADVFMVPQYGYLTLNNGSQAVGRSSFYCLEYFPSQMLRTGNNFTFSYTFEDVPFHSSYAHSQSLDRLMNPLIDQYLYYLSRTNTPSGTTTQSRLQFSVAGPSNMAVQGRNWLPGPCYRQQRVSKTSADNNNSEFAWTGATKYHLNGRDSLVNPGPAMASHKDDEEKFFPQSGVLIFGKQGSEKTNVDIEKVMITDEEEIRTTNPVATEQYGSVSTNLQQQNTAPATADVNTQGVLPGMVWQDRDVYLQGPIWAKIPHTDGHFHPSPLMGGFGLKHPPPQILIKNTPVPANPSTTFSAAKFASFITQYSTGQVSVEIEWELQKENSKRWNPEIQYTSNYNKSVNVDFTVDTNGVYSEPRPIGTRYLTRNL

SEQ ID NO: 1256 - DNA, 2208 bp, Artificial Sequence
  source: /note="Description of Artificial Sequence: Synthetic polynucleotide"
atggctgccgatggttatcttccagattggctcgaggacactctctctgaaggaataagacagtggtggaagctcaaacctggcccaccaccaccaaagcccgcagagcggcataaggacgacagcaggggtcttgtgcttcctgggtacaagtacctcggacccttcaacggactcgacaagggagagccggtcaacgaggcagacgccgcggccctcgagcacgacaaagcctacgaccggcagctcgacagcggagacaacccgtacctcaagtacaaccacgccgacgcggagtttcaggagcgccttaaagaagatacgtcttttgggggcaacctcggacgagcagtcttccaggcgaaaaagaggattcttgaacctctgggcctggttgaggaacctgttaagacggctccgggaaaaaagaggccggtagagcactctcctgcggagccagactcctcctcgggaaccggaaagtcgggccagcagcctgcaagaaaaagattgaattttggtcagactggagacgcagactcagtacctgacccccagcctctcggacagccaccagcagccccctctggtctgggaactaatacgatggcttcaggcagtggcgcaccaatggcagacaataacgagggcgccgacggagtgggtaattcctcgggaaattggcattgcgattccacatggatgggcgacagagtcatcaccaccagcacccgaacctgggccctgcccacctacaacaaccacctctacaaacaaatttccagccaatcaggagcctcgaacgacaatcactactttggctacagcaccccttgggggtattttgacttcaacagattccactgccacttttcaccacgtgactggcaaagactcatcaacaacaactggggattccgacccaagagactcagcttcaagctctttaacattcaagtcaaagaggtcacgcagaatgacggtacgacgacgattgccaataaccttaccagcacggttcaggtgtttactgactcggagtaccagctcccgtacgtcctcggctcggcgcatcaaggatgcctcccgccgttcccagcagacgtcttcatggtgccacagtatggatacctcaccctgaacaacgggagtcaggcagtaggacgctcttcattttactgcctggagtactttccttctcagatgctgcgtaccggaaacaactttaccttcagctacacttttgaggacgttcctttccacagcagctacgctcacagccagagtctggaccgtctcatgaatcctctcatcgaccagtacctgtattacttgagcagaacaaacactccaagtggaaccaccacgatgtcaaggcttcagttttctcaggccggagcgagtgacattcgggaccagtctaggaactggcttcctggaccctgttaccgccagcagcgagtatcaaagacagctgcggataacaacaacagtgattactcgtggactggagctaccaagtaccacctcaatggcagagactctctggtgaatccgggcccggccatggcaagccacaaggacgatgaagaaaagtattttcctcagagcggggttctcatctttgggaagcaagactcaggaaaaacaaatgtggacattgaaaaggtcatgattacagacgaagaggaaatcaggacaaccaatcccgtggctacggagcagtatggttctgtatctaccaacctccagagcggcaacacacaagcagctacctcagatgtcaacacacaaggcgttcttccaggcatggtctggcaggacagagatgtgtaccttcaggggcccatctgggcaaagattccacacacggacggacattttcacccctctcccctcatgggtggattcggacttaaacaccctcctccacagattctcatcaagaacaccccggtacctgcgaatccttcgaccaccttcagtgcggcaaagtttgcttccttcatcacacagtactccacgggacaggtcagcgtggagatcgagtgggagctgcagaaggaaaacagcaaacgctggaatcccgaaattcagtacacttccaactacaacaagtctgttaatgtggactttactgtggacactaatggcgtgtattcagagcctcgccccattggcaccagatacctgactcgtaatctgtaa

SEQ ID NO: 1257 - DNA, 2208 bp, Artificial Sequence
  source: /note="Description of Artificial Sequence: Synthetic polynucleotide"
atggctgccgatggttatcttccagattggctcgaggacactctctctgaaggaataagacagtggtggaagctcaaacctggcccaccaccaccaaagcccgcagagcggcataaggacgacagcaggggtcttgtgcttcctgggtacaagtacctcggacccttcaacggactcgacaagggagagccggtcaacgaggcagacgccgcggccctcgagcacgacaaagcctacgaccggcagctcgacagcggagacaacccgtacctcaagtacaaccacgccgacgcggagtttcaggagcgccttaaagaagatacgtcttttgggggcaacctcggacgagcagtcttccaggcgaaaaagaggattcttgaacctctgggcctggttgaggaacctgttaagacggctccgggaaaaaagaggccggtagagcactctcctgcggagccagactcctcctcgggaaccggaaagtcgggccagcagcctgcaagaaaaagattgaattttggtcagactggagacgcagactcagtacctgacccccagcctctcggacagccaccagcagccccctctggtctgggaactaatacgatggcttcaggcagtggcgcaccaatggcagacaataacgagggcgccgacggagtgggtaattcctcgggaaattggcattgcgattccacatggatgggcgacagagtcatcaccaccagcacccgaacctgggccctgcccacctacaacaaccacctctacaaacaaatttccagccaatcaggagcctcgaacgacaatcactactttggctacagcaccccttgggggtattttgacttcaacagattccactgccacttttcaccacgtgactggcaaagactcatcaacaacaactggggattccgacccaagagactcaacttcaagctctttaacattcaagtcaaagaggtcacgcagaatgacggtacgacgacgattgccaataaccttaccagcacggttcaggtgtttactgactcggagtaccagctcccgtacgtcctcggctcggcgcatcaaggatgcctcccgccgttcccagcagacgtcttcatggtgccacagtatggatacctcaccctgaacaacgggagtcaggcagtaggacgctcttcattttactgcctggagtactttccttctcagatgctgcgtaccggaaacaactttaccttcagctacacttttgaggacgttcctttccacagcagctacgctcacagccagagtctggaccgtctcatgaatcctctcatcgaccagtacctgtattacttgagcagaacaaacactccaagtggaaccaccacgatgtcaaggcttcagttttctcaggccggagcgagtgacattcgggaccagtctaggaactggcttcctggaccctgttaccgccagcagcgagtatcaaagacagctgcggataacaacaacagtgattactcgtggactggagctaccaagtaccacctcaatggcagagactctctggtgaatccgggcccggccatggcaagccacaaggacgatgaagaaaagtattttcctcagagcggggttctcatctttgggaagcaagactcaggaaaaacaaatgtggacattgaaaaggtcatgattacagacgaagaggaaatcaggacaaccaatcccgtggctacggagcagtatggttctgtatctaccaacctccagagcggcaacacacaagcagctacctcagatgtcaacacacaaggcgttcttccaggcatggtctggcaggacagagatgtgtaccttcaggggcccatctgggcaaagattccacacacggacggacattttcacccctctcccctcatgggtggattcggacttaaacaccctcctccacagattctcatcaagaacaccccggtacctgcgaatccttcgaccaccttcagtgcggcaaagtttgcttccttcatcacacagtactccacgggacaggtcagcgtggagatcgagtgggagctgcagaaggaaaacagcaaacgctggaatcccgaaattcagtacacttccaactacaacaagtctgttaatgtggactttactgtggacactaatggcgtgtattcagagcctcgccccattggcaccagatacctgactcgtaatctgtaa

SEQ ID NO: 1258 - protein, 735 aa, Artificial Sequence
  source: /note="Description of Artificial Sequence: Synthetic polypeptide"
MAADGYLPDWLEDTLSEGIRQWWKLKPGPPPPKPAERHKDDSRGLVLPGYKYLGPFNGLDKGEPVNEADAAALEHDKAYDRQLDSGDNPYLKYNHADAEFQERLKEDTSFGGNLGRAVFQAKKRILEPLGLVEEPVKTAPGKKRPVEHSPAEPDSSSGTGKSGQQPARKRLNFGQTGDADSVPDPQPLGQPPAAPSGLGTNTMASGSGAPMADNNEGADGVGNSSGNWHCDSTWMGDRVITTSTRTWALPTYNNHLYKQISSQSGASNDNHYFGYSTPWGYFDFNRFHCHFSPRDWQRLINNNWGFRPKRLNFKLFNIQVKEVTQNDGTTTIANNLTSTVQVFTDSEYQLPYVLGSAHQGCLPPFPADVFMVPQYGYLTLNNGSQAVGRSSFYCLEYFPSQMLRTGNNFTFSYTFEDVPFHSSYAHSQSLDRLMNPLIDQYLYYLSRTNTPSGTTTMSRLQFSQAGASDIRDQSRNWLPGPCYRQQRVSKTAADNNNSDYSWTGATKYHLNGRDSLVNPGPAMASHKDDEEKYFPQSGVLIFGKQDSGKTNVDIEKVMITDEEEIRTTNPVATEQYGSVSTNLQSGNTQAATSDVNTQGVLPGMVWQDRDVYLQGPIWAKIPHTDGHFHPSPLMGGFGLKHPPPQILIKNTPVPANPSTTFSAAKFASFITQYSTGQVSVEIEWELQKENSKRWNPEIQYTSNYNKSVNVDFTVDTNGVYSEPRPIGTRYLTRNL

SEQ ID NO: 1259 - protein, 736 aa, Artificial Sequence
  source: /note="Description of Artificial Sequence: Synthetic polypeptide"
MAADGYLPDWLEDNLSEGIREWWDLKPGAPKPKANQQKQDDGRGLVLPGYKYLGPFNGLDKGEPVNAADAAALEHDKAYDQQLKAGDNPYLRYNHADAEFQERLQEDTSFGGNLGRAVFQAKKRVLEPFGLVEEGAKTAPGKKRPVEQSPQEPDSSSGIGKTGQQPAKKRLNFGQTGDSESVPDPQPLGEPPATPAAVGPTTMASGGGAPMADNNEGADGVGNASGNWHCDSTWLGDRVITTSTRTWALPTYNNHLYKQISSASTGASNDNHYFGYSTPWGYFDFNRFHCHFSPRDWQRLINNNWGFRPKRLNFKLFNIQVKEVTTNDGVTTIANNLTSTVQVFSDSEYQLPYVLGSAHQGCLPPFPADVFMIPQYGYLTLNNGSQAVGRSSFYCLEYFPSQMLRTGNNFTFSYTFEDVPFHSSYAHSQSLDRLMNPLIDQYLYFLNRTQNQSGSAQNKDLLFSRGSPAGMSVQPKNWLPGPCYRQQRVSKTKTDNNNSNFTWTGASKYNLNGRESIINPGTAMASHKDDKDKFFPMSGVMIFGKESAGASNTALDNVMITDEEEIKATNPVATERFGTVAVNLQSSSTDPATGDVHVMGALPGMVWQDRDVYLQGPIWAKIPHTDGHFHPSPLMGGFGLKHPPPQILIKNTPVPANPPAEFSATKFASFITQYSTGQVSVEIEWELQKENSKRWNPEVQYTSNYAKSANVDFTVDNNGLYTEPRPIGTRYLTRPL

SEQ ID NO: 1260 - protein, 747 aa, Artificial Sequence
  source: /note="Description of Artificial Sequence: Synthetic polypeptide"
MAADGYLPDWLEDTLSEGIRQWWKLKPGPPPPKPAERHKDDSRGLVLPGYKYLGPFNGLDKGEPVNEADAAALEHDKAYDRQLDSGDNPYLKYNHADAEFQERLKEDTSFGGNLGRAVFQAKKRVLEPLGLVEEPVKTAPGKKRPVEHSPVEPDSSSGTGKAGQQPARKRLNFGQTGDADSVPDPQPLGQPPAAPSGLGTNTMATGSGAPMADNNEGADGVGNSSGNWHCDSTWMGDRVITTSTRTWALPTYNNHLYKQISSQSGASNDNHYFGYSTPWGYFDFNRFHCHFSPRDWQRLINNNWGFRPKRLNFKLFNIQVKEVTQNDGTTTIANNLTSTVQVFTDSEYQLPYVLGSAHQGCLPPFPADVFMVPQYGYLTLNNGSQAVGRSSFYCLEYFPSQMLRTGNNFTFSYTFEDVPFHSSYAHSQSLDRLMNPLIDQYLYYLSRTNTPSGTTTQSRLQFSQAGASDIRDQSRNWLPGPCYRQQRVSKTSADNNNSEYSWTGATKYHLNGRDSLVNPGPAMASHKDDEEKFFPQSGVLIFGKQGSEKTNVDIEKVMITDEEEIRTTNPVATEQYGSVSTNLQRGNAAAGSTPPPMAARQAATADVNTQGVLPGMVWQDRDVYLQGPIWAKIPHTDGHFHPSPLMGGFGLKHPPPQILIKNTPVPANPSTTFSAAKFASFITQYSTGQVSVEIEWELQKENSKRWNPEIQYTSNYNKSVNVDFTVDTNGVYSEPRPIGTRYLTRNL

SEQ ID NO: 1261 - protein, 747 aa, Artificial Sequence
  source: /note="Description of Artificial Sequence: Synthetic polypeptide"
MAADGYLPDWLEDTLSEGIRQWWKLKPGPPPPKPAERHKDDSRGLVLPGYKYLGPFNGLDKGEPVNEADAAALEHDKAYDRQLDSGDNPYLKYNHADAEFQERLKEDTSFGGNLGRAVFQAKKRVLEPLGLVEEPVKTAPGKKRPVEHSPVEPDSSSGTGKAGQQPARKRLNFGQTGDADSVPDPQPLGQPPAAPSGLGTNTMATGSGAPMADNNEGADGVGNSSGNWHCDSTWMGDRVITTSTRTWALPTYNNHLYKQISSQSGASNDNHYFGYSTPWGYFDFNRFHCHFSPRDWQRLINNNWGFRPKRLNFKLFNIQVKEVTQNDGTTTIANNLTSTVQVFTDSEYQLPYVLGSAHQGCLPPFPADVFMVPQYGYLTLNNGSQAVGRSSFYCLEYFPSQMLRTGNNFTFSYTFEDVPFHSSYAHSQSLDRLMNPLIDQYLYYLSRTNTPSGTTTQSRLQFSQAGASDIRDQSRNWLPGPCYRQQRVSKTSADNNNSEYSWTGATKYHLNGRDSLVNPGPAMASHKDDEEKFFPQSGVLIFGKQGSEKTNVDIEKVMITDEEEIRTTNPVATEQYGSVSTNLQRGNAAAGETRAPLAARQAATADVNTQGVLPGMVWQDRDVYLQGPIWAKIPHTDGHFHPSPLMGGFGLKHPPPQILIKNTPVPANPSTTFSAAKFASFITQYSTGQVSVEIEWELQKENSKRWNPEIQYTSNYNKSVNVDFTVDTNGVYSEPRPIGTRYLTRNL

SEQ ID NO: 1262 - protein, 7 aa, Artificial Sequence
  source: /note="Description of Artificial Sequence: Synthetic peptide"
TLAVPFK

SEQ ID NO: 1263 - protein, 7 aa, Artificial Sequence
  source: /note="Description of Artificial Sequence: Synthetic peptide"
KFPVALT

SEQ ID NO: 1264 - protein, 6 aa, Artificial Sequence
  source: /note="Description of Artificial Sequence: Synthetic peptide"
LAVPFK

SEQ ID NO: 1265 - protein, 5 aa, Artificial Sequence
  source: /note="Description of Artificial Sequence: Synthetic peptide"
AVPFK

SEQ ID NO: 1266 - protein, 4 aa, Artificial Sequence
  source: /note="Description of Artificial Sequence: Synthetic peptide"
VPFK

SEQ ID NO: 1267 - protein, 6 aa, Artificial Sequence
  source: /note="Description of Artificial Sequence: Synthetic peptide"
TLAVPF

SEQ ID NO: 1268 - protein, 5 aa, Artificial Sequence
  source: /note="Description of Artificial Sequence: Synthetic peptide"
TLAVP

SEQ ID NO: 1269 - protein, 4 aa, Artificial Sequence
  source: /note="Description of Artificial Sequence: Synthetic peptide"
TLAV

SEQ ID NO: 1270 - protein, 7 aa, Artificial Sequence
  source: /note="Description of Artificial Sequence: Synthetic peptide"
SVSKPFL

SEQ ID NO: 1271 - protein, 7 aa, Artificial Sequence
  source: /note="Description of Artificial Sequence: Synthetic peptide"
FTLTTPK

SEQ ID NO: 1272 - protein, 7 aa, Artificial Sequence
  source: /note="Description of Artificial Sequence: Synthetic peptide"
MNATKNV

SEQ ID NO: 1273 - protein, 7 aa, Artificial Sequence
  source: /note="Description of Artificial Sequence: Synthetic peptide"
QSSQTPR

SEQ ID NO: 1274 - protein, 7 aa, Artificial Sequence
  source: /note="Description of Artificial Sequence: Synthetic peptide"
ILGTGTS

SEQ ID NO: 1275 - protein, 7 aa, Artificial Sequence
  source: /note="Description of Artificial Sequence: Synthetic peptide"
TRTNPEA

SEQ ID NO: 1276 - protein, 7 aa, Artificial Sequence
  source: /note="Description of Artificial Sequence: Synthetic peptide"
NGGTSSS

SEQ ID NO: 1277 - protein, 7 aa, Artificial Sequence
  source: /note="Description of Artificial Sequence: Synthetic peptide"
YTLSQGW

SEQ ID NO: 1278 - DNA, 21 bp, Artificial Sequence
  source: /note="Description of Artificial Sequence: Synthetic oligonucleotide"
aagtttcctgtggcgttgact

SEQ ID NO: 1279 - DNA, 21 bp, Artificial Sequence
  source: /note="Description of Artificial Sequence: Synthetic oligonucleotide"
actttggcggtgccttttaag

SEQ ID NO: 1280 - DNA, 21 bp, Artificial Sequence
  source: /note="Description of Artificial Sequence: Synthetic oligonucleotide"
agtgtgagtaagccttttttg

SEQ ID NO: 1281 - DNA, 21 bp, Artificial Sequence
  source: /note="Description of Artificial Sequence: Synthetic oligonucleotide"
tttacgttgacgacgcctaag

SEQ ID NO: 1282 - DNA, 21 bp, Artificial Sequence
  source: /note="Description of Artificial Sequence: Synthetic oligonucleotide"
atgaatgctacgaagaatgtg

SEQ ID NO: 1283 - DNA, 21 bp, Artificial Sequence
  source: /note="Description of Artificial Sequence: Synthetic oligonucleotide"
cagtcgtcgcagacgcctagg

SEQ ID NO: 1284 - DNA, 21 bp, Artificial Sequence
  source: /note="Description of Artificial Sequence: Synthetic oligonucleotide"
attctggggactggtacttcg

SEQ ID NO: 1285 - DNA, 21 bp, Artificial Sequence
  source: /note="Description of Artificial Sequence: Synthetic oligonucleotide"
acgcggactaatcctgaggct

SEQ ID NO: 1286 - DNA, 21 bp, Artificial Sequence
  source: /note="Description of Artificial Sequence: Synthetic oligonucleotide"
aatggggggactagtagttct

SEQ ID NO: 1287 - DNA, 21 bp, Artificial Sequence
  source: /note="Description of Artificial Sequence: Synthetic oligonucleotide"
tatactttgtcgcagggttgg

SEQ ID NO: 1288 - protein, 11 aa, Artificial Sequence
  source: /note="Description of Artificial Sequence: Synthetic peptide"
AQTLAVPFKAQ

SEQ ID NO: 1289 - protein, 11 aa, Artificial Sequence
  source: /note="Description of Artificial Sequence: Synthetic peptide"
AQSVSKPFLAQ

SEQ ID NO: 1290 - protein, 11 aa, Artificial Sequence
  source: /note="Description of Artificial Sequence: Synthetic peptide"
AQFTLTTPKAQ

SEQ ID NO: 1291 - protein, 11 aa, Artificial Sequence
  source: /note="Description of Artificial Sequence: Synthetic peptide"
DGTLAVPFKAQ

SEQ ID NO: 1292 - protein, 11 aa, Artificial Sequence
  source: /note="Description of Artificial Sequence: Synthetic peptide"
ESTLAVPFKAQ

SEQ ID NO: 1293 - protein, 11 aa, Artificial Sequence
  source: /note="Description of Artificial Sequence: Synthetic peptide"
GGTLAVPFKAQ

SEQ ID NO: 1294 - protein, 11 aa, Artificial Sequence
  source: /note="Description of Artificial Sequence: Synthetic peptide"
AQTLATPFKAQ

SEQ ID NO: 1295 - protein, 11 aa, Artificial Sequence
  source: /note="Description of Artificial Sequence: Synthetic peptide"
ATTLATPFKAQ

SEQ ID NO: 1296 - protein, 11 aa, Artificial Sequence
  source: /note="Description of Artificial Sequence: Synthetic peptide"
DGTLATPFKAQ

SEQ ID NO: 1297 - protein, 11 aa, Artificial Sequence
  source: /note="Description of Artificial Sequence: Synthetic peptide"
GGTLATPFKAQ

SEQ ID NO: 1298 - protein, 11 aa, Artificial Sequence
  source: /note="Description of Artificial Sequence: Synthetic peptide"
SGSLAVPFKAQ

SEQ ID NO: 1299 - protein, 11 aa, Artificial Sequence
  source: /note="Description of Artificial Sequence: Synthetic peptide"
AQTLAQPFKAQ

SEQ ID NO: 1300 - protein, 11 aa, Artificial Sequence
  source: /note="Description of Artificial Sequence: Synthetic peptide"
AQTLQQPFKAQ

SEQ ID NO: 1301 - protein, 11 aa, Artificial Sequence
  source: /note="Description of Artificial Sequence: Synthetic peptide"
AQTLSNPFKAQ

SEQ ID NO: 1302 - protein, 11 aa, Artificial Sequence
  source: /note="Description of Artificial Sequence: Synthetic peptide"
AQTLAVPFSNP

SEQ ID NO: 1303 - protein, 11 aa, Artificial Sequence
  source: /note="Description of Artificial Sequence: Synthetic peptide"
QGTLAVPFKAQ

SEQ ID NO: 1304 - protein, 11 aa, Artificial Sequence
  source: /note="Description of Artificial Sequence: Synthetic peptide"
NQTLAVPFKAQ

SEQ ID NO: 1305 - protein, 11 aa, Artificial Sequence
  source: /note="Description of Artificial Sequence: Synthetic peptide"
EGSLAVPFKAQ

SEQ ID NO: 1306 - protein, 11 aa, Artificial Sequence
  source: /note="Description of Artificial Sequence: Synthetic peptide"
SGNLAVPFKAQ

SEQ ID NO: 1307 - protein, 11 aa, Artificial Sequence
  source: /note="Description of Artificial Sequence: Synthetic peptide"
EGTLAVPFKAQ

SEQ ID NO: 1308 - protein, 11 aa, Artificial Sequence
  source: /note="Description of Artificial Sequence: Synthetic peptide"
DSTLAVPFKAQ

SEQ ID NO: 1309 - protein, 11 aa, Artificial Sequence
  source: /note="Description of Artificial Sequence: Synthetic peptide"
AVTLAVPFKAQ

SEQ ID NO: 1310 - protein, 11 aa, Artificial Sequence
  source: /note="Description of Artificial Sequence: Synthetic peptide"
AQTLSTPFKAQ

SEQ ID NO: 1311 - protein, 11 aa, Artificial Sequence
  source: /note="Description of Artificial Sequence: Synthetic peptide"
AQTLPQPFKAQ

SEQ ID NO: 1312 - protein, 11 aa, Artificial Sequence
  source: /note="Description of Artificial Sequence: Synthetic peptide"
AQTLSQPFKAQ

SEQ ID NO: 1313 - protein, 11 aa, Artificial Sequence
  source: /note="Description of Artificial Sequence: Synthetic peptide"
AQTLQLPFKAQ

SEQ ID NO: 1314 - protein, 11 aa, Artificial Sequence
  source: /note="Description of Artificial Sequence: Synthetic peptide"
AQTLTMPFKAQ

SEQ ID NO: 1315 - protein, 11 aa, Artificial Sequence
  source: /note="Description of Artificial Sequence: Synthetic peptide"
AQTLTTPFKAQ

SEQ ID NO: 1316 - protein, 11 aa, Artificial Sequence
  source: /note="Description of Artificial Sequence: Synthetic peptide"
AQYTLSQGWAQ

SEQ ID NO: 1317 - protein, 11 aa, Artificial Sequence
  source: /note="Description of Artificial Sequence: Synthetic peptide"
AQMNATKNVAQ

SEQ ID NO: 1318 - protein, 11 aa, Artificial Sequence
  source: /note="Description of Artificial Sequence: Synthetic peptide"
AQVSGGHHSAQ

SEQ ID NO: 1319 - protein, 11 aa, Artificial Sequence
  source: /note="Description of Artificial Sequence: Synthetic peptide"
AQTLTAPFKAQ

SEQ ID NO: 1320 - protein, 11 aa, Artificial Sequence
  source: /note="Description of Artificial Sequence: Synthetic peptide"
AQTLSKPFKAQ

SEQ ID NO: 1321 - protein, 7 aa, Artificial Sequence
  source: /note="Description of Artificial Sequence: Synthetic peptide"
QAVRTSL

SEQ ID NO: 1322 - protein, 7 aa, Artificial Sequence
  source: /note="Description of Artificial Sequence: Synthetic peptide"
LAKERLS

SEQ ID NO: 1323 - protein, 7 aa, Artificial Sequence
  source: /note="Description of Artificial Sequence: Synthetic peptide"
MNSTKNV

SEQ ID NO: 1324 - protein, 7 aa, Artificial Sequence
  source: /note="Description of Artificial Sequence: Synthetic peptide"
VSGGHHS

SEQ ID NO: 1325 - protein, 14 aa, Artificial Sequence
  source: /note="Description of Artificial Sequence: Synthetic peptide"
SAQTLAVPFKAQAQ

SEQ ID NO: 1326 - protein, 14 aa, Artificial Sequence
  source: /note="Description of Artificial Sequence: Synthetic peptide"
  MOD_RES (2)..(4): Any amino acid
SXXXLAVPFKAQAQ

SEQ ID NO: 1327 - protein, 14 aa, Artificial Sequence
  source: /note="Description of Artificial Sequence: Synthetic peptide"
  MOD_RES (4)..(6): Any amino acid
SAQXXXVPFKAQAQ

SEQ ID NO: 1328 - protein, 14 aa, Artificial Sequence
  source: /note="Description of Artificial Sequence: Synthetic peptide"
  MOD_RES (6)..(8): Any amino acid
SAQTLXXXFKAQAQ

SEQ ID NO: 1329 - protein, 14 aa, Artificial Sequence
  source: /note="Description of Artificial Sequence: Synthetic peptide"
  MOD_RES (8)..(10): Any amino acid
SAQTLAVXXXAQAQ

SEQ ID NO: 1330 - protein, 14 aa, Artificial Sequence
  source: /note="Description of Artificial Sequence: Synthetic peptide"
  MOD_RES (10)..(12): Any amino acid
SAQTLAVPFXXXAQ

SEQ ID NO: 1331 - protein, 7 aa, Artificial Sequence
  source: /note="Description of Artificial Sequence: Synthetic peptide"
TNHQSAQ

SEQ ID NO: 1332 - protein, 7 aa, Artificial Sequence
  source: /note="Description of Artificial Sequence: Synthetic peptide"
AQAQTGW

SEQ ID NO: 1333 - protein, 9 aa, Artificial Sequence
  source: /note="Description of Artificial Sequence: Synthetic peptide"
DGTLATPFK

SEQ ID NO: 1334 - protein, 11 aa, Artificial Sequence
  source: /note="Description of Artificial Sequence: Synthetic peptide"
  MOD_RES (10)..(11): Any amino acid
DGTLATPFKXX

SEQ ID NO: 1335 - protein, 8 aa, Artificial Sequence
  source: /note="Description of Artificial Sequence: Synthetic peptide"
LAVPFKAQ

SEQ ID NO: 1336 - protein, 6 aa, Artificial Sequence
  source: /note="Description of Artificial Sequence: Synthetic peptide"
VPFKAQ

SEQ ID NO: 1337 - protein, 4 aa, Artificial Sequence
  source: /note="Description of Artificial Sequence: Synthetic peptide"
FKAQ

SEQ ID NO: 1338 - protein, 6 aa, Artificial Sequence
  source: /note="Description of Artificial Sequence: Synthetic peptide"
AQTLAV

SEQ ID NO: 1339 - protein, 8 aa, Artificial Sequence
  source: /note="Description of Artificial Sequence: Synthetic peptide"
AQTLAVPF

SEQ ID NO: 1340 - protein, 4 aa, Artificial Sequence
  source: /note="Description of Artificial Sequence: Synthetic peptide"
QAVR

SEQ ID NO: 1341 - protein, 4 aa, Artificial Sequence
  source: /note="Description of Artificial Sequence: Synthetic peptide"
AVRT

SEQ ID NO: 1342 - protein, 4 aa, Artificial Sequence
  source: /note="Description of Artificial Sequence: Synthetic peptide"
VRTS

SEQ ID NO: 1343 - protein, 4 aa, Artificial Sequence
  source: /note="Description of Artificial Sequence: Synthetic peptide"
RTSL

SEQ ID NO: 1344 - protein, 5 aa, Artificial Sequence
  source: /note="Description of Artificial Sequence: Synthetic peptide"
QAVRT

SEQ ID NO: 1345 - protein, 5 aa, Artificial Sequence
  source: /note="Description of Artificial Sequence: Synthetic peptide"
AVRTS

SEQ ID NO: 1346 - protein, 5 aa, Artificial Sequence
  source: /note="Description of Artificial Sequence: Synthetic peptide"
VRTSL

SEQ ID NO: 1347 - protein, 6 aa, Artificial Sequence
  source: /note="Description of Artificial Sequence: Synthetic peptide"
QAVRTS

SEQ ID NO: 1348 - protein, 6 aa, Artificial Sequence
  source: /note="Description of Artificial Sequence: Synthetic peptide"
AVRTSL

SEQ ID NO: 1349 - DNA, 33 bp, Artificial Sequence
  source: /note="Description of Artificial Sequence: Synthetic oligonucleotide"
gatgggactttggcggtgccttttaaggcacag

SEQ ID NO: 1350 - DNA, 33 bp, Artificial Sequence
  source: /note="Description of Artificial Sequence: Synthetic oligonucleotide"
gatgggacgttggcggtgccttttaaggcacag

SEQ ID NO: 1351 - DNA, 21 bp, Artificial Sequence
  source: /note="Description of Artificial Sequence: Synthetic oligonucleotide"
caggcggttaggacgtctttg

SEQ ID NO: 1352 - DNA, 27 bp, Artificial Sequence
  source: /note="Description of Artificial Sequence: Synthetic oligonucleotide"
caggtcttcacggactcagactatcag

SEQ ID NO: 1353 - DNA, 32 bp, Artificial Sequence
  source: /note="Description of Artificial Sequence: Synthetic oligonucleotide"
caagtaaaacctctacaaatgtggtaaaatcg

SEQ ID NO: 1354 - DNA, 36 bp, Artificial Sequence
  source: /note="Description of Artificial Sequence: Synthetic oligonucleotide"
actcatcgaccaatacttgtactatctctctagaac

SEQ ID NO: 1355 - DNA, 26 bp, Artificial Sequence
  source: /note="Description of Artificial Sequence: Synthetic oligonucleotide"
ggaagtattccttggttttgaaccca

SEQ ID NO: 1356 - DNA, 23 bp, Artificial Sequence
  source: /note="Description of Artificial Sequence: Synthetic oligonucleotide"
ggtcgcggttcttgtttgtggat

SEQ ID NO: 1357 - DNA, 24 bp, Artificial Sequence
  source: /note="Description of Artificial Sequence: Synthetic oligonucleotide"
cgaccttgaagcgcatgaactcct

SEQ ID NO: 1358 - DNA, 83 bp, Artificial Sequence
  source: /note="Description of Artificial Sequence: Synthetic oligonucleotide"
  modified_base (42)..(43): a, c, t, or g
  modified_base (45)..(46): a, c, t, or g
  modified_base (48)..(49): a, c, t, or g
  modified_base (51)..(52): a, c, t, or g
  modified_base (54)..(55): a, c, t, or g
  modified_base (57)..(58): a, c, t, or g
  modified_base (60)..(61): a, c, t, or g
gtattccttggttttgaacccaaccggtctgcgcctgtgcmnnmnnmnnmnnmnnmnnmnnttgggcactctggtggtttgtc

SEQ ID NO: 1359 - DNA, 64 bp, Artificial Sequence
  source: /note="Description of Artificial Sequence: Synthetic oligonucleotide"
  modified_base (36)..(37): a, c, t, or g
  modified_base (39)..(40): a, c, t, or g
  modified_base (42)..(43): a, c, t, or g
gtattccttggttttgaacccaaccggtctgcgcmnnmnnmnnaaaaggcaccgccaaagtttg

SEQ ID NO: 1360 - DNA, 70 bp, Artificial Sequence
  source: /note="Description of Artificial Sequence: Synthetic oligonucleotide"
  modified_base (42)..(43): a, c, t, or g
  modified_base (45)..(46): a, c, t, or g
  modified_base (48)..(49): a, c, t, or g
gtattccttggttttgaacccaaccggtctgcgcctgtgcmnnmnnmnncaccgccaaagtttgggcact

SEQ ID NO: 1361 - DNA, 77 bp, Artificial Sequence
  source: /note="Description of Artificial Sequence: Synthetic oligonucleotide"
  modified_base (48)..(49): a, c, t, or g
  modified_base (51)..(52): a, c, t, or g
  modified_base (54)..(55): a, c, t, or g
gtattccttggttttgaacccaaccggtctgcgcctgtgccttaaamnnmnnmnncaaagtttgggcactctggtgg

SEQ ID NO: 1362 - DNA, 83 bp, Artificial Sequence
  source: /note="Description of Artificial Sequence: Synthetic oligonucleotide"
  modified_base (54)..(55): a, c, t, or g
  modified_base (57)..(58): a, c, t, or g
  modified_base (60)..(61): a, c, t, or g
gtattccttggttttgaacccaaccggtctgcgcctgtgccttaaaaggcacmnnmnnmnnttgggcactctggtggtttgtg

SEQ ID NO: 1363 - DNA, 21 bp, Artificial Sequence
  source: /note="Description of Artificial Sequence: Synthetic oligonucleotide"
cttgcgaaggagcggctttcg

SEQ ID NO: 1364 - protein, 10 aa, Artificial Sequence
  source: /note="Description of Artificial Sequence: Synthetic peptide"
VNLTWSRASG

SEQ ID NO: 1365 - protein, 14 aa, Artificial Sequence
  source: /note="Description of Artificial Sequence: Synthetic peptide"
EFCINHRGYWVCGD

SEQ ID NO: 1366 - protein, 11 aa, Artificial Sequence
  source: /note="Description of Artificial Sequence: Synthetic peptide"
EDGQVMDVDLS

SEQ ID NO: 1367 - protein, 9 aa, Artificial Sequence
  source: /note="Description of Artificial Sequence: Synthetic peptide"
EKQRNGTLT

SEQ ID NO: 1368 - protein, 17 aa, Artificial Sequence
  source: /note="Description of Artificial Sequence: Synthetic peptide"
TYQCRVTHPHLPRALMR

SEQ ID NO: 1369 - protein, 14 aa, Artificial Sequence
  source: /note="Description of Artificial Sequence: Synthetic peptide"
RHSTTQPRKTKGSG

SEQ ID NO: 1370 - protein, 13 aa, Artificial Sequence
  source: /note="Description of Artificial Sequence: Synthetic peptide"
DSNPRGVSAYLSR

SEQ ID NO: 1371 - protein, 12 aa, Artificial Sequence
  source: /note="Description of Artificial Sequence: Synthetic peptide"
TITCLWDLAPSK

SEQ ID NO: 1372 - protein, 10 aa, Artificial Sequence
  source: /note="Description of Artificial Sequence: Synthetic peptide"
KTKGSGFFVF

SEQ ID NO: 1373 - protein, 12 aa, Artificial Sequence
  source: /note="Description of Artificial Sequence: Synthetic peptide"
THPHLPRALMRS

SEQ ID NO: 1374 - protein, 23 aa, Artificial Sequence
  source: /note="Description of Artificial Sequence: Synthetic peptide"
GETYQCRVTHPHLPRALMRSTTK

SEQ ID NO: 1375 - protein, 8 aa, Artificial Sequence
  source: /note="Description of Artificial Sequence: Synthetic peptide"
LPRALMRS

SEQ ID NO: 1376 - protein, 8 aa, Artificial Sequence
  source: /note="Description of Artificial Sequence: Synthetic peptide"
INHRGYWV

SEQ ID NO: 1377 - protein, 12 aa, Artificial Sequence
  source: /note="Description of Artificial Sequence: Synthetic peptide"
CDAGSVRTNAPD

SEQ ID NO: 1378 - protein, 17 aa, Artificial Sequence
  source: /note="Description of Artificial Sequence: Synthetic peptide"
AKAVSNLTESRSESLQS

SEQ ID NO: 1379 - protein, 13 aa, Artificial Sequence
  source: /note="Description of Artificial Sequence: Synthetic peptide"
SLTGDEFKKVLET

SEQ ID NO: 1380 - protein, 11 aa, Artificial Sequence
  source: /note="Description of Artificial Sequence: Synthetic peptide"
REAVAYRFEED

SEQ ID NO: 1381 - protein, 10 aa, Artificial Sequence
  source: /note="Description of Artificial Sequence: Synthetic peptide"
INPEIITLDG

SEQ ID NO: 1382 - protein, 15 aa, Artificial Sequence
  source: /note="Description of Artificial Sequence: Synthetic peptide"
DISVTGAPVITATYL

SEQ ID NO: 1383 - protein, 12 aa, Artificial Sequence
  source: /note="Description of Artificial Sequence: Synthetic peptide"
DISVTGAPVITA

SEQ ID NO: 1384 - protein, 17 aa, Artificial Sequence
  source: /note="Description of Artificial Sequence: Synthetic peptide"
PKTVSNLTESSSESVQS

SEQ ID NO: 1385 - protein, 13 aa, Artificial Sequence
  source: /note="Description of Artificial Sequence: Synthetic peptide"
SLMGDEFKAVLET

SEQ ID NO: 1386 - protein, 11 aa, Artificial Sequence
  source: /note="Description of Artificial Sequence: Synthetic peptide"
QHSVAYTFEED

SEQ ID NO: 1387 - protein, 10 aa, Artificial Sequence
  source: /note="Description of Artificial Sequence: Synthetic peptide"
INPEIITRDG

SEQ ID NO: 1388 - protein, 15 aa, Artificial Sequence
  source: /note="Description of Artificial Sequence: Synthetic peptide"
DISLTGDPVITASYL

SEQ ID NO: 1389 - protein, 12 aa, Artificial Sequence
  source: /note="Description of Artificial Sequence: Synthetic peptide"
DISLTGDPVITA

SEQ ID NO: 1390 - protein, 11 aa, Artificial Sequence
  source: /note="Description of Artificial Sequence: Synthetic peptide"
DQSIDFEIDSA

SEQ ID NO: 1391 - protein, 20 aa, Artificial Sequence
  source: /note="Description of Artificial Sequence: Synthetic peptide"
KNVSEDLPLPTFSPTLLGDS

SEQ ID NO: 1392 - protein, 11 aa, Artificial Sequence
  source: /note="Description of Artificial Sequence: Synthetic peptide"
KNVSEDLPLPT

SEQ ID NO: 1393 - protein, 12 aa, Artificial Sequence
  source: /note="Description of Artificial Sequence: Synthetic peptide"
CDSGRVRTDAPD

SEQ ID NO: 1394 - protein, 14 aa, Artificial Sequence
  source: /note="Description of Artificial Sequence: Synthetic peptide"
FPEHLLVDFLQSLS

SEQ ID NO: 1395 - protein, 9 aa, Artificial Sequence
  source: /note="Description of Artificial Sequence: Synthetic peptide"
DAEFRHDSG

SEQ ID NO: 1396 - protein, 16 aa, Artificial Sequence
  source: /note="Description of Artificial Sequence: Synthetic peptide"
HYAAAQWDFGNTMCQL

SEQ ID NO: 1397 - protein, 13 aa, Artificial Sequence
  source: /note="Description of Artificial Sequence: Synthetic peptide"
YAAQWDFGNTMCQ

SEQ ID NO: 1398 - protein, 10 aa, Artificial Sequence
  source: /note="Description of Artificial Sequence: Synthetic peptide"
RSQKEGLHYT

SEQ ID NO: 1399 - protein, 19 aa, Artificial Sequence
  source: /note="Description of Artificial Sequence: Synthetic peptide"
SSRTPSDKPVAHWANPQAE

SEQ ID NO: 1400 - protein, 15 aa, Artificial Sequence
  source: /note="Description of Artificial Sequence: Synthetic peptide"
SRTPSDKPVAHWANP

SEQ ID NO: 1401 - protein, 9 aa, Artificial Sequence
  source: /note="Description of Artificial Sequence: Synthetic peptide"
SSRTPSDKP

SEQ ID NO: 1402 - protein, 14 aa, Artificial Sequence
  source: /note="Description of Artificial Sequence: Synthetic peptide"
NADGNVDYHMNSVP

SEQ ID NO: 1403 - protein, 11 aa, Artificial Sequence
  source: /note="Description of Artificial Sequence: Synthetic peptide"
DGNVDYHMNSV

SEQ ID NO: 1404 - protein, 16 aa, Artificial Sequence
  source: /note="Description of Artificial Sequence: Synthetic peptide"
RSFKEFLQSSLRALRQ

SEQ ID NO: 1405 - protein, 11 aa, Artificial Sequence
  source: /note="Description of Artificial Sequence: Synthetic peptide"
FKEFLQSSLRA

SEQ ID NO: 1406 - protein, 10 aa, Artificial Sequence
  source: /note="Description of Artificial Sequence: Synthetic peptide"
QMWAPQWGPD

SEQ ID NO: 1407 - protein, 6 aa, Artificial Sequence
  source: /note="Description of Artificial Sequence: Synthetic peptide"
RGNRQA

SEQ ID NO: 1408 - protein, 6 aa, Artificial Sequence
  source: /note="Description of Artificial Sequence: Synthetic peptide"
SSSTDP

SEQ ID NO: 1409 - protein, 6 aa, Artificial Sequence
  source: /note="Description of Artificial Sequence: Synthetic peptide"
SSNTAP

SEQ ID NO: 1410 - protein, 6 aa, Artificial Sequence
  source: /note="Description of Artificial Sequence: Synthetic peptide"
SNSNLP

SEQ ID NO: 1411 - protein, 6 aa, Artificial Sequence
  source: /note="Description of Artificial Sequence: Synthetic peptide"
SSTTAP

SEQ ID NO: 1412 - protein, 6 aa, Artificial Sequence
  source: /note="Description of Artificial Sequence: Synthetic peptide"
AANTAA

SEQ ID NO: 1413 - protein, 6 aa, Artificial Sequence
  source: /note="Description of Artificial Sequence: Synthetic peptide"
QQNTAP

SEQ ID NO: 1414 - protein, 6 aa, Artificial Sequence
  source: /note="Description of Artificial Sequence: Synthetic peptide"
SAQAQA

SEQ ID NO: 1415 - protein, 6 aa, Artificial Sequence
  source: /note="Description of Artificial Sequence: Synthetic peptide"
QANTGP

SEQ ID NO: 1416 - protein, 6 aa, Artificial Sequence
  source: /note="Description of Artificial Sequence: Synthetic peptide"
NATTAP

SEQ ID NO: 1417 - protein, 6 aa, Artificial Sequence
  source: /note="Description of Artificial Sequence: Synthetic peptide"
SSTAGP

SEQ ID NO: 1418 - protein, 6 aa, Artificial Sequence
  source: /note="Description of Artificial Sequence: Synthetic peptide"
QQNTAA

SEQ ID NO: 1419 - protein, 6 aa, Artificial Sequence
  source: /note="Description of Artificial Sequence: Synthetic peptide"
PSTAGP

SEQ ID NO: 1420 - protein, 6 aa, Artificial Sequence
  source: /note="Description of Artificial Sequence: Synthetic peptide"
NQNTAP

SEQ ID NO: 1421 - protein, 6 aa, Artificial Sequence
  source: /note="Description of Artificial Sequence: Synthetic peptide"
QAANAP

SEQ ID NO: 1422 - protein, 6 aa, Artificial Sequence
  source: /note="Description of Artificial Sequence: Synthetic peptide"
SIVGLP

SEQ ID NO: 1423 - protein, 6 aa, Artificial Sequence
  source: /note="Description of Artificial Sequence: Synthetic peptide"
AASTAA

SEQ ID NO: 1424 - protein, 6 aa, Artificial Sequence
  source: /note="Description of Artificial Sequence: Synthetic peptide"
SQNTTA

SEQ ID NO: 1425 - protein, 6 aa, Artificial Sequence
  source: /note="Description of Artificial Sequence: Synthetic peptide"
QQDTAP

SEQ ID NO: 1426 - protein, 6 aa, Artificial Sequence
  source: /note="Description of Artificial Sequence: Synthetic peptide"
QTNTGP

SEQ ID NO: 1427 - protein, 6 aa, Artificial Sequence
  source: /note="Description of Artificial Sequence: Synthetic peptide"
QTNGAP

SEQ ID NO: 1428 - protein, 6 aa, Artificial Sequence
  source: /note="Description of Artificial Sequence: Synthetic peptide"
QQNAAP

SEQ ID NO: 1429 - protein, 6 aa, Artificial Sequence
  source: /note="Description of Artificial Sequence: Synthetic peptide"
AANTQA

SEQ ID NO: 1430 - protein, 6 aa, Artificial Sequence
  source: /note="Description of Artificial Sequence: Synthetic peptide"
NGRAHA

SEQ ID NO: 1431 - protein, 7 aa, Artificial Sequence
  source: /note="Description of Artificial Sequence: Synthetic peptide"
QPEHSST

SEQ ID NO: 1432 - protein, 7 aa, Artificial Sequence
  source: /note="Description of Artificial Sequence: Synthetic peptide"
VNTANST

SEQ ID NO: 1433 - protein, 7 aa, Artificial Sequence
  source: /note="Description of Artificial Sequence: Synthetic peptide"
HGPMQKS

SEQ ID NO: 1434 - protein, 7 aa, Artificial Sequence
  source: /note="Description of Artificial Sequence: Synthetic peptide"
PHKPPLA

SEQ ID NO: 1435 - protein, 7 aa, Artificial Sequence
  source: /note="Description of Artificial Sequence: Synthetic peptide"
IKNNEMW

SEQ ID NO: 1436 - protein, 7 aa, Artificial Sequence
  source: /note="Description of Artificial Sequence: Synthetic peptide"
RNLDTPM

SEQ ID NO: 1437 - protein, 7 aa, Artificial Sequence
  source: /note="Description of Artificial Sequence: Synthetic peptide"
VDSHRQS

SEQ ID NO: 1438 - protein, 7 aa, Artificial Sequence
  source: /note="Description of Artificial Sequence: Synthetic peptide"
YDSKTKT

SEQ ID NO: 1439 - protein, 7 aa, Artificial Sequence
  source: /note="Description of Artificial Sequence: Synthetic peptide"
SQLPHQK

SEQ ID NO: 1440 - protein, 7 aa, Artificial Sequence
  source: /note="Description of Artificial Sequence: Synthetic peptide"
STMQQNT

SEQ ID NO: 1441 - protein, 7 aa, Artificial Sequence
  source: /note="Description of Artificial Sequence: Synthetic peptide"
TERYMTQ

SEQ ID NO: 1442 - protein, 7 aa, Artificial Sequence
  source: /note="Description of Artificial Sequence: Synthetic peptide"
DASLSTS

SEQ ID NO: 1443 - protein, 7 aa, Artificial Sequence
  source: /note="Description of Artificial Sequence: Synthetic peptide"
DLPNKKT

SEQ ID NO: 1444 - protein, 7 aa, Artificial Sequence
  source: /note="Description of Artificial Sequence: Synthetic peptide"
DLTAARL

SEQ ID NO: 1445 - protein, 7 aa, Artificial Sequence
  source: /note="Description of Artificial Sequence: Synthetic peptide"
EPHQFNY

SEQ ID NO: 1446 - protein, 7 aa, Artificial Sequence
  source: /note="Description of Artificial Sequence: Synthetic peptide"
EPQSNHT

SEQ ID NO: 1447 - protein, 7 aa, Artificial Sequence
  source: /note="Description of Artificial Sequence: Synthetic peptide"
MSSWPSQ

SEQ ID NO: 1448 - protein, 7 aa, Artificial Sequence
  source: /note="Description of Artificial Sequence: Synthetic peptide"
NPKHNAT

SEQ ID NO: 1449 - protein, 7 aa, Artificial Sequence
  source: /note="Description of Artificial Sequence: Synthetic peptide"
PDGMRTT

SEQ ID NO: 1450 - protein, 7 aa, Artificial Sequence
  source: /note="Description of Artificial Sequence: Synthetic peptide"
PNNNKTT

SEQ ID NO: 1451 - protein, 7 aa, Artificial Sequence
  source: /note="Description of Artificial Sequence: Synthetic peptide"
QSTTHDS

SEQ ID NO: 1452 - protein, 7 aa, Artificial Sequence
  source: /note="Description of Artificial Sequence: Synthetic peptide"
TGSKQKQ

SEQ ID NO: 1453 - protein, 7 aa, Artificial Sequence
  source: /note="Description of Artificial Sequence: Synthetic peptide"
SLKHQAL

SEQ ID NO: 1454 - protein, 7 aa, Artificial Sequence
  source: /note="Description of Artificial Sequence: Synthetic peptide"
SPIDGEQ

SEQ ID NO: 1455 - protein, 8 aa, Artificial Sequence
  source: /note="Description of Artificial Sequence: Synthetic peptide"
WIFPWIQL

SEQ ID NO: 1456 - protein, 9 aa, Artificial Sequence
  source: /note="Description of Artificial Sequence: Synthetic peptide"
CDCRGDCFC

SEQ ID NO: 1457 - protein, 5 aa, Artificial Sequence
  source: /note="Description of Artificial Sequence: Synthetic peptide"
CNGRC

SEQ ID NO: 1458 - protein, 7 aa, Artificial Sequence
  source: /note="Description of Artificial Sequence: Synthetic peptide"
CPRECES

SEQ ID NO: 1459 - protein, 10 aa, Artificial Sequence
  source: /note="Description of Artificial Sequence: Synthetic peptide"
CTTHWGFTLC

SEQ ID NO: 1460 - protein, 9 aa, Artificial Sequence
  source: /note="Description of Artificial Sequence: Synthetic peptide"
CGRRAGGSC

SEQ ID NO: 1461 - protein, 9 aa, Artificial Sequence
  source: /note="Description of Artificial Sequence: Synthetic peptide"
CKGGRAKDC

SEQ ID NO: 1462 - protein, 9 aa, Artificial Sequence
  source: /note="Description of Artificial Sequence: Synthetic peptide"
CVPELGHEC

SEQ ID NO: 1463 - protein, 9 aa, Artificial Sequence
  source: /note="Description of Artificial Sequence: Synthetic peptide"
CRRETAWAK

SEQ ID NO: 1464 - protein, 14 aa, Artificial Sequence
  source: /note="Description of Artificial Sequence: Synthetic peptide"
VSWFSHRYSPFAVS

SEQ ID NO: 1465 - protein, 13 aa, Artificial Sequence
  source: /note="Description of Artificial Sequence: Synthetic peptide"
GYRDGYAGPILYN

SEQ ID NO: 1466 - protein, 7 aa, Artificial Sequence
  source: /note="Description of Artificial Sequence: Synthetic peptide"
  MOD_RES (1)..(3): Any amino acid
  MOD_RES (5)..(7): Any amino acid
XXXYXXX

SEQ ID NO: 1467 - protein, 4 aa, Artificial Sequence
  source: /note="Description of Artificial Sequence: Synthetic peptide"
  VARIANT (2)..(2): /replace="Met"
  SITE (1)..(4): /note="Variant residues given in the sequence have no preference with respect to those in the annotations for variant positions"
YENW

SEQ ID NO: 1468 - protein, 7 aa, Artificial Sequence
  source: /note="Description of Artificial Sequence: Synthetic peptide"
RPLPPLP

SEQ ID NO: 1469 - protein, 7 aa, Artificial Sequence
  source: /note="Description of Artificial Sequence: Synthetic peptide"
APPLPPR

SEQ ID NO: 1470 - protein, 12 aa, Artificial Sequence
  source: /note="Description of Artificial Sequence: Synthetic peptide"
DVFYPYPYASGS

SEQ ID NO: 1471 - protein, 6 aa, Artificial Sequence
  source: /note="Description of Artificial Sequence: Synthetic peptide"
MYWYPY

SEQ ID NO: 1472 - protein, 12 aa, Artificial Sequence
  source: /note="Description of Artificial Sequence: Synthetic peptide"
DITWDQLWDLMK

SEQ ID NO: 1473 - protein, 8 aa, Artificial Sequence
  source: /note="Description of Artificial Sequence: Synthetic peptide"
  VARIANT (5)..(5): /replace="Leu"
  SITE (1)..(8): /note="Variant residues given in the sequence have no preference with respect to those in the annotations for variant positions"
CWDDGWLC

SEQ ID NO: 1474 - protein, 14 aa, Artificial Sequence
  source: /note="Description of Artificial Sequence: Synthetic peptide"
EWCEYLGGYLRCYA

SEQ ID NO: 1475 - protein, 14 aa, Artificial Sequence
  source: /note="Description of Artificial Sequence: Synthetic peptide"
  MOD_RES (2)..(2): Any amino acid
  MOD_RES (4)..(5): Any amino acid
  MOD_RES (8)..(8): Any amino acid
  MOD_RES (11)..(11): Any amino acid
  MOD_RES (13)..(13): Any amino acid
YXCXXGPXTWXCXP

SEQ ID NO: 1476 - protein, 14 aa, Artificial Sequence
  source: /note="Description of Artificial Sequence: Synthetic peptide"
IEGPTLRQWLAARA

SEQ ID NO: 1477 - protein, 5 aa, Artificial Sequence
  source: /note="Description of Artificial Sequence: Synthetic peptide"
  MOD_RES (3)..(4): Any amino acid
  VARIANT (5)..(5): /replace="Trp" or "Phe" or "His"
  SITE (1)..(5): /note="Variant residues given in the sequence have no preference with respect to those in the annotations for variant positions"
LWXXY

SEQ ID NO: 1478 - protein, 7 aa, Artificial Sequence
  source: /note="Description of Artificial Sequence: Synthetic peptide"
  MOD_RES (1)..(1): Any amino acid
  MOD_RES (3)..(4): Any amino acid
XFXXYLW

SEQ ID NO: 1479 - protein, 13 aa, Artificial Sequence
  source: /note="Description of Artificial Sequence: Synthetic peptide"
SSIISHFRWGLCD

SEQ ID NO: 1480 - protein, 13 aa, Artificial Sequence
  source: /note="Description of Artificial Sequence: Synthetic peptide"
MSRPACPPNDKYE

SEQ ID NO: 1481 - protein, 8 aa, Artificial Sequence
  source: /note="Description of Artificial Sequence: Synthetic peptide"
CLRSGRGC

SEQ ID NO: 1482 - protein, 9 aa, Artificial Sequence
  source: /note="Description of Artificial Sequence: Synthetic peptide"
CHWMFSPWC

SEQ ID NO: 1483 - protein, 4 aa, Artificial Sequence
  source: /note="Description of Artificial Sequence: Synthetic peptide"
  MOD_RES (2)..(3): Any amino acid
WXXF

SEQ ID NO: 1484 - protein, 8 aa, Artificial Sequence
  source: /note="Description of Artificial Sequence: Synthetic peptide"
CSSRLDAC

SEQ ID NO: 1485 - protein, 7 aa, Artificial Sequence
  source: /note="Description of Artificial Sequence: Synthetic peptide"
CLPVASC

SEQ ID NO: 1486 - protein, 13 aa, Artificial Sequence
  source: /note="Description of Artificial Sequence: Synthetic peptide"
CGFECVRQCPERC

SEQ ID NO: 1487 - protein, 13 aa, Artificial Sequence
  source: /note="Description of Artificial Sequence: Synthetic peptide"
CVALCREACGEGC

SEQ ID NO: 1488 - protein, 9 aa, Artificial Sequence
  source: /note="Description of Artificial Sequence: Synthetic peptide"
SWCEPGWCR

SEQ ID NO: 1489 - protein, 7 aa, Artificial Sequence
  source: /note="Description of Artificial Sequence: Synthetic peptide"
YSGKWGW

SEQ ID NO: 1490 - protein, 7 aa, Artificial Sequence
  source: /note="Description of Artificial Sequence: Synthetic peptide"
GLSGGRS

SEQ ID NO: 1491 - protein, 7 aa, Artificial Sequence
  source: /note="Description of Artificial Sequence: Synthetic peptide"
LMLPRAD

SEQ ID NO: 1492 - protein, 9 aa, Artificial Sequence
  source: /note="Description of Artificial Sequence: Synthetic peptide"
CSCFRDVCC

SEQ ID NO: 1493 - protein, 9 aa, Artificial Sequence
  source: /note="Description of Artificial Sequence: Synthetic peptide"
CRDVVSVIC

SEQ ID NO: 1494 - protein, 6 aa, Artificial Sequence
  source: /note="Description of Artificial Sequence: Synthetic peptide"
MARSGL

SEQ ID NO: 1495 - protein, 6 aa, Artificial Sequence
  source: /note="Description of Artificial Sequence: Synthetic peptide"
MARAKE

SEQ ID NO: 1496 - protein, 6 aa, Artificial Sequence
  source: /note="Description of Artificial Sequence: Synthetic peptide"
MSRTMS

SEQ ID NO: 1497 - protein, 6 aa, Artificial Sequence
  source: /note="Description of Artificial Sequence: Synthetic peptide"
KCCYSL

SEQ ID NO: 1498 - protein, 14 aa, Artificial Sequence
  source: /note="Description of Artificial Sequence: Synthetic peptide"
MYWGDSHWLQYWYE

SEQ ID NO: 1499 - protein, 7 aa, Artificial Sequence
  source: /note="Description of Artificial Sequence: Synthetic peptide"
MQLPLAT

SEQ ID NO: 1500 - protein, 4 aa, Artificial Sequence
  source: /note="Description of Artificial Sequence: Synthetic peptide"
EWLS

SEQ ID NO: 1501 - protein, 4 aa, Artificial Sequence
  source: /note="Description of Artificial Sequence: Synthetic peptide"
SNEW

SEQ ID NO: 1502 - protein, 4 aa, Artificial Sequence
  source: /note="Description of Artificial Sequence: Synthetic peptide"
TNYL

SEQ ID NO: 1503 - protein, 12 aa, Artificial Sequence
  source: /note="Description of Artificial Sequence: Synthetic peptide"
WDLAWMFRLPVG

SEQ ID NO: 1504 - protein, 13 aa, Artificial Sequence
  source: /note="Description of Artificial Sequence: Synthetic peptide"
CTVALPGGYVRVC

SEQ ID NO: 1505 - protein, 13 aa, Artificial Sequence
  source: /note="Description of Artificial Sequence: Synthetic peptide"
CVAYCIEHHCWTC

SEQ ID NO: 1506 - protein, 12 aa, Artificial Sequence
  source: /note="Description of Artificial Sequence: Synthetic peptide"
CVFAHNYDYLVC

SEQ ID NO: 1507 - protein, 10 aa, Artificial Sequence
  source: /note="Description of Artificial Sequence: Synthetic peptide"
CVFTSNYAFC

SEQ ID NO: 1508 - protein, 7 aa, Artificial Sequence
  source: /note="Description of Artificial Sequence: Synthetic peptide"
VHSPNKK

SEQ ID NO: 1509 - protein, 7 aa, Artificial Sequence
  source: /note="Description of Artificial Sequence: Synthetic peptide"
CRGDGWC

SEQ ID NO: 1510 - protein, 6 aa, Artificial Sequence
  source: /note="Description of Artificial Sequence: Synthetic peptide"
  MOD_RES (1)..(1): Any amino acid
  MOD_RES (6)..(6): Any amino acid
XRGCDX

SEQ ID NO: 1511 - protein, 4 aa, Artificial Sequence
  source: /note="Description of Artificial Sequence: Synthetic peptide"
  MOD_RES (2)..(3): Any amino acid
  VARIANT (4)..(4): /replace="Thr"
  SITE (1)..(4): /note="Variant residues given in the sequence have no preference with respect to those in the annotations for variant positions"
PXXS

SEQ ID NO: 1512 - protein, 11 aa, Artificial Sequence
  source: /note="Description of Artificial Sequence: Synthetic peptide"
SGKGPRQITAL

SEQ ID NO: 1513 - protein, 14 aa, Artificial Sequence
  source: /note="Description of Artificial Sequence: Synthetic peptide"
  VARIANT (10)..(10): /replace="Gln"
  VARIANT (11)..(11): /replace="Ala"
  VARIANT (12)..(12): /replace="Tyr"
  VARIANT (13)..(13): /replace="Val" or "Met" or "Arg"
  VARIANT (14)..(14): /replace="Lys"
  SITE (1)..(14): /note="Variant residues given in the sequence have no preference with respect to those in the annotations for variant positions"
AAAAAAAAAANLTR

SEQ ID NO: 1514 - protein, 6 aa, Artificial Sequence
  source: /note="Description of Artificial Sequence: Synthetic peptide"
VYMSPF

SEQ ID NO: 1515 - protein, 7 aa, Artificial Sequence
  source: /note="Description of Artificial Sequence: Synthetic peptide"
ATWLPPR

SEQ ID NO: 1516 - protein, 12 aa, Artificial Sequence
  source: /note="Description of Artificial Sequence: Synthetic peptide"
HTMYYHHYQHHL

SEQ ID NO: 1517 - protein, 19 aa, Artificial Sequence
  source: /note="Description of Artificial Sequence: Synthetic peptide"
SEVGCRAGPLQWLCEKYFG

SEQ ID NO: 1518 - protein, 18 aa, Artificial Sequence
  source: /note="Description of Artificial Sequence: Synthetic peptide"
CGLLPVGRPDRNVWRWLC

SEQ ID NO: 1519 - protein, 15 aa, Artificial Sequence
  source: /note="Description of Artificial Sequence: Synthetic peptide"
CKGQCDRFKGLPWEC

SEQ ID NO: 1520 - protein, 5 aa, Artificial Sequence
  source: /note="Description of Artificial Sequence: Synthetic peptide"
SGRSA

SEQ ID NO: 1521 - protein, 4 aa, Artificial Sequence
  source: /note="Description of Artificial Sequence: Synthetic peptide"
WGFP

SEQ ID NO: 1522 - protein, 17 aa, Artificial Sequence
  source: /note="Description of Artificial Sequence: Synthetic peptide"
AEPMPHSLNFSQYLWYT

SEQ ID NO: 1523 - protein, 6 aa, Artificial Sequence
  source: /note="Description of Artificial Sequence: Synthetic peptide"
  VARIANT (4)..(4): /replace="Phe"
  SITE (1)..(6): /note="Variant residues given in the sequence have no preference with respect to those in the annotations for variant positions"
WAYWSP

SEQ ID NO: 1524 - protein, 7 aa, Artificial Sequence
  source: /note="Description of Artificial Sequence: Synthetic peptide"
IELLQAR

SEQ ID NO: 1525 - protein, 16 aa, Artificial Sequence
  source: /note="Description of Artificial Sequence: Synthetic peptide"
AYTKCSRQWRTCMTTH

SEQ ID NO: 1526 - protein, 15 aa, Artificial Sequence
  source: /note="Description of Artificial Sequence: Synthetic peptide"
PQNSKIPGPTFLDPH

SEQ ID NO: 1527 - protein, 15 aa, Artificial Sequence
  source: /note="Description of Artificial Sequence: Synthetic peptide"
SMEPALPDWWWKMFK

SEQ ID NO: 1528 - protein, 16 aa, Artificial Sequence
  source: /note="Description of Artificial Sequence: Synthetic peptide"
ANTPCGPYTHDCPVKR

SEQ ID NO: 1529 - protein, 12 aa, Artificial Sequence
  source: /note="Description of Artificial Sequence: Synthetic peptide"
TACHQHVRMVRP

SEQ ID NO: 1530 - protein, 12 aa, Artificial Sequence
  source: /note="Description of Artificial Sequence: Synthetic peptide"
VPWMEPAYQRFL

SEQ ID NO: 1531 - protein, 8 aa, Artificial Sequence
  source: /note="Description of Artificial Sequence: Synthetic peptide"
DPRATPGS

SEQ ID NO: 1532 - protein, 12 aa, Artificial Sequence
  source: /note="Description of Artificial Sequence: Synthetic peptide"
FRPNRAQDYNTN

SEQ ID NO: 1533 - protein, 9 aa, Artificial Sequence
  source: /note="Description of Artificial Sequence: Synthetic peptide"
CTKNSYLMC

SEQ ID NO: 1534 - protein, 11 aa, Artificial Sequence
  source: /note="Description of Artificial Sequence: Synthetic peptide"
  VARIANT (2)..(2): /replace="Arg"
  VARIANT (3)..(3): /replace="Arg"
  VARIANT (5)..(5): /replace="Asn"
  MOD_RES (6)..(7): Any amino acid
  VARIANT (9)..(9): /replace="Val"
  SITE (1)..(11): /note="Variant residues given in the sequence have no preference with respect to those in the annotations for variant positions"
CQLTGXXGAGC

SEQ ID NO: 1535 - protein, 9 aa, Artificial Sequence
  source: /note="Description of Artificial Sequence: Synthetic peptide"
CPIEDRPMC

SEQ ID NO: 1536 - protein, 12 aa, Artificial Sequence
  source: /note="Description of Artificial Sequence: Synthetic peptide"
HEWSYLAPYPWF

SEQ ID NO: 1537 - protein, 9 aa, Artificial Sequence
  source: /note="Description of Artificial Sequence: Synthetic peptide"
MCPKHPLGC

SEQ ID NO: 1538 - protein, 15 aa, Artificial Sequence
  source: /note="Description of Artificial Sequence: Synthetic peptide"
RMWPSSTVNLSAGRR

SEQ ID NO: 1539 - protein, 20 aa, Artificial Sequence
  source: /note="Description of Artificial Sequence: Synthetic peptide"
SAKTAVSQRVWLPSHRGGEP

SEQ ID NO: 1540 - protein, 20 aa, Artificial Sequence
  source: /note="Description of Artificial Sequence: Synthetic peptide"
KSREHVNNSACPSKRITAAL

SEQ ID NO: 1541 - protein, 4 aa, Artificial Sequence
  source: /note="Description of Artificial Sequence: Synthetic peptide"
EGFR

SEQ ID NO: 1542 - protein, 6 aa, Artificial Sequence
  source: /note="Description of Artificial Sequence: Synthetic peptide"
AGLGVR

SEQ ID NO: 1543 - protein, 15 aa, Artificial Sequence
  source: /note="Description of Artificial Sequence: Synthetic peptide"
GTRQGHTMRLGVSDG

SEQ ID NO: 1544 - protein, 15 aa, Artificial Sequence
  source: /note="Description of Artificial Sequence: Synthetic peptide"
IAGLATPGWSHWLAL

SEQ ID NO: 1545 - protein, 7 aa, Artificial Sequence
  source: /note="Description of Artificial Sequence: Synthetic peptide"
SMSIARL

SEQ ID NO: 1546 - protein, 7 aa, Artificial Sequence
  source: /note="Description of Artificial Sequence: Synthetic peptide"
HTFEPGV

SEQ ID NO: 1547 - protein, 15 aa, Artificial Sequence
  source: /note="Description of Artificial Sequence: Synthetic peptide"
NTSLKRISNKRIRRK

SEQ ID NO: 1548 - protein, 15 aa, Artificial Sequence
  source: /note="Description of Artificial Sequence: Synthetic peptide"
LRIKRKRRKRKKTRK

SEQ ID NO: 1549 - DNA, 21 bp, Adeno-associated virus 2
agcvvmdcaggarscascaac

SEQ ID NO: 1550 - protein, 7 aa, Artificial Sequence
  source: /note="Description of Artificial Sequence: Synthetic peptide"
SDSGASN

SEQ ID NO: 1551 - protein, 7 aa, Artificial Sequence
  source: /note="Description of Artificial Sequence: Synthetic peptide"
SPSGASN

SEQ ID NO: 1552 - protein, 7 aa, Artificial Sequence
  source: /note="Description of Artificial Sequence: Synthetic peptide"
SHSGASN

SEQ ID NO: 1553 - protein, 7 aa, Artificial Sequence
  source: /note="Description of Artificial Sequence: Synthetic peptide"
SRSGASN

SEQ ID NO: 1554 - protein, 7 aa, Artificial Sequence
  source: /note="Description of Artificial Sequence: Synthetic peptide"
SKSGASN

SEQ ID NO: 1555 - protein, 7 aa, Artificial Sequence
  source: /note="Description of Artificial Sequence: Synthetic peptide"
SNSGASN

SEQ ID NO: 1556 - protein, 7 aa, Artificial Sequence
  source: /note="Description of Artificial Sequence: Synthetic peptide"
SGSGASN

SEQ ID NO: 1557 - protein, 7 aa, Artificial Sequence
  source: /note="Description of Artificial Sequence: Synthetic peptide"
SASGASN

SEQ ID NO: 1558 - protein, 7 aa, Artificial Sequence
  source: /note="Description of Artificial Sequence: Synthetic peptide"
SESGTSN

SEQ ID NO: 1559 - protein, 7 aa, Artificial Sequence
  source: /note="Description of Artificial Sequence: Synthetic peptide"
STTGGSN

SEQ ID NO: 1560 - protein, 7 aa, Artificial Sequence
  source: /note="Description of Artificial Sequence: Synthetic peptide"
SSAGSTN

SEQ ID NO: 1561 - protein, 6 aa, Artificial Sequence
  source: /note="Description of Artificial Sequence: Synthetic peptide"
NNDSQA

SEQ ID NO: 1562 - protein, 6 aa, Artificial Sequence
  source: /note="Description of Artificial Sequence: Synthetic peptide"
NNRNQA

SEQ ID NO: 1563 - protein, 6 aa, Artificial Sequence
  source: /note="Description of Artificial Sequence: Synthetic peptide"
NNNKQA

SEQ ID NO: 1564 - protein, 6 aa, Artificial Sequence
  source: /note="Description of Artificial Sequence: Synthetic peptide"
NAKRQA

SEQ ID NO: 1565 - protein, 6 aa, Artificial Sequence
  source: /note="Description of Artificial Sequence: Synthetic peptide"
NDEHQA

SEQ ID NO: 1566 - protein, 6 aa, Artificial Sequence
  source: /note="Description of Artificial Sequence: Synthetic peptide"
NTSQKA

SEQ ID NO: 1567 - protein, 25 aa, Artificial Sequence
  source: /note="Description of Artificial Sequence: Synthetic peptide"
YYLSRTNTPSGTDTQSRLVFSQAGA

SEQ ID NO: 1568 - protein, 25 aa, Artificial Sequence
  source: /note="Description of Artificial Sequence: Synthetic peptide"
YYLSRTNTDSGTETQSGLDFSQAGA

SEQ ID NO: 1569 - protein, 25 aa, Artificial Sequence
  source: /note="Description of Artificial Sequence: Synthetic peptide"
YYLSRTNTESGTPTQSALEFSQAGA

SEQ ID NO: 1570 - protein, 25 aa, Artificial Sequence
  source: /note="Description of Artificial Sequence: Synthetic peptide"
YYLSRTNTHSGTHTQSPLHFSQAGA

SEQ ID NO: 1571 - protein, 25 aa, Artificial Sequence
  source: /note="Description of Artificial Sequence: Synthetic peptide"
YYLSRTNTSSGTITISHLIFSQAGA

SEQ ID NO: 1572 - protein, 25 aa, Artificial Sequence
  source: /note="Description of Artificial Sequence: Synthetic peptide"
YYLSRTNTRSGIMTKSSLMFSQAGA

SEQ ID NO: 1573 - protein, 25 aa, Artificial Sequence
  source: /note="Description of Artificial Sequence: Synthetic peptide"
YYLSRTNTKSGRKTLSNLSFSQAGA

SEQ ID NO: 1574 - protein, 25 aa, Artificial Sequence
  source: /note="Description of Artificial Sequence: Synthetic peptide"
YYLSRTNDGSGPVTPSKLRFSQRGA

SEQ ID NO: 1575 - protein, 25 aa, Artificial Sequence
  source: /note="Description of Artificial Sequence: Synthetic peptide"
YYLSRTNAASGHATHSDLKFSQPGA

SEQ ID NO: 1576 - protein, 25 aa, Artificial Sequence
  source: /note="Description of Artificial Sequence: Synthetic peptide"
YYLSRTNGQAGSLTMSELGFSQVGA

SEQ ID NO: 1577 - protein, 25 aa, Artificial Sequence
  source: /note="Description of Artificial Sequence: Synthetic peptide"
YYLSRTNSTGGNQTTSQLLFSQLSA

SEQ ID NO: 1578 - protein, 25 aa, Artificial Sequence
  source: /note="Description of Artificial Sequence: Synthetic peptide"
YFLSRTNNNTGLNTNSTLNFSQGRA

SEQ ID NO: 1579 - protein, 16 aa, Artificial Sequence
  source: /note="Description of Artificial Sequence: Synthetic peptide"
SKTGADNNNSEYSWTG

SEQ ID NO: 1580 - protein, 16 aa, Artificial Sequence
  source: /note="Description of Artificial Sequence: Synthetic peptide"
SKTDADNNNSEYSWTG

SEQ ID NO: 1581 - protein, 16 aa, Artificial Sequence
  source: /note="Description of Artificial Sequence: Synthetic peptide"
SKTEADNNNSEYSWTG

SEQ ID NO: 1582 - protein, 16 aa, Artificial Sequence
  source: /note="Description of Artificial Sequence: Synthetic peptide"
SKTPADNNNSEYSWTG

SEQ ID NO: 1583 - protein, 16 aa, Artificial Sequence
  source: /note="Description of Artificial Sequence: Synthetic peptide"
SKTHADNNNSEYSWTG

SEQ ID NO: 1584 - protein, 16 aa, Artificial Sequence
  source: /note="Description of Artificial Sequence: Synthetic peptide"
SKTQADNNNSEYSWTG

SEQ ID NO: 1585 - protein, 16 aa, Artificial Sequence
  source: /note="Description of Artificial Sequence: Synthetic peptide"
SKTIADNNNSEYSWTG

SEQ ID NO: 1586 - protein, 16 aa, Artificial Sequence
  source: /note="Description of Artificial Sequence: Synthetic peptide"
SKTMADNNNSEYSWTG

SEQ ID NO: 1587 - protein, 16 aa, Artificial Sequence
  source: /note="Description of Artificial Sequence: Synthetic peptide"
SKTRADNNNSEYSWTG

SEQ ID NO: 1588 - protein, 16 aa, Artificial Sequence
  source: /note="Description of Artificial Sequence: Synthetic peptide"
SKTNADNNNSEYSWTG

SEQ ID NO: 1589 - protein, 16 aa, Artificial Sequence
  source: /note="Description of Artificial Sequence: Synthetic peptide"
SKTVGRNNNSEYSWTG

SEQ ID NO: 1590 - protein, 16 aa, Artificial Sequence
  source: /note="Description of Artificial Sequence: Synthetic peptide"
SKTADRNNNSEYSWTG

SEQ ID NO: 1591 - protein, 16 aa, Artificial Sequence
  source: /note="Description of Artificial Sequence: Synthetic peptide"
SKKLSQNNNSKYSWQG

SEQ ID NO: 1592 - protein, 16 aa, Artificial Sequence
  source: /note="Description of Artificial Sequence: Synthetic peptide"
SKPTTGNNNSDYSWPG

SEQ ID NO: 1593 - protein, 16 aa, Artificial Sequence
  source: /note="Description of Artificial Sequence: Synthetic peptide"
STQKNENNNSNYSWPG

SEQ ID NO: 1594 - protein, 8 aa, Artificial Sequence
  source: /note="Description of Artificial Sequence: Synthetic peptide"
HKDDEGKF

SEQ ID NO: 1595 - protein, 8 aa, Artificial Sequence
  source: /note="Description of Artificial Sequence: Synthetic peptide"
HKDDNRKF

SEQ ID NO: 1596 - protein, 8 aa, Artificial Sequence
  source: /note="Description of Artificial Sequence: Synthetic peptide"
HKDDTNKF

SEQ ID NO: 1597 - protein, 8 aa, Artificial Sequence
  source: /note="Description of Artificial Sequence: Synthetic peptide"
HEDSDKNF

SEQ ID NO: 1598 - protein, 8 aa, Artificial Sequence
  source: /note="Description of Artificial Sequence: Synthetic peptide"
HRDGADSF

SEQ ID NO: 1599 - protein, 8 aa, Artificial Sequence
  source: /note="Description of Artificial Sequence: Synthetic peptide"
HGDNKSRF

SEQ ID NO: 1600 - protein, 14 aa, Artificial Sequence
  source: /note="Description of Artificial Sequence: Synthetic peptide"
KQGSEKTNVDFEEV

SEQ ID NO: 1601 - protein, 14 aa, Artificial Sequence
  source: /note="Description of Artificial Sequence: Synthetic peptide"
KQGSEKTNVDSEEV

SEQ ID NO: 1602 - protein, 14 aa, Artificial Sequence
  source: /note="Description of Artificial Sequence: Synthetic peptide"
KQGSEKTNVDVEEV

SEQ ID NO: 1603 - protein, 14 aa, Artificial Sequence
  source: /note="Description of Artificial Sequence: Synthetic peptide"
KQGSDKTNVDDAGV

SEQ ID NO: 1604 - protein, 14 aa, Artificial Sequence
  source: /note="Description of Artificial Sequence: Synthetic peptide"
KQGSSKTNVDPREV

SEQ ID NO: 1605 - protein, 14 aa, Artificial Sequence
  source: /note="Description of Artificial Sequence: Synthetic peptide"
KQGSRKTNVDHKQV

SEQ ID NO: 1606 - protein, 14 aa, Artificial Sequence
  source: /note="Description of Artificial Sequence: Synthetic peptide"
KQGSKGGNVDTNRV

SEQ ID NO: 1607 - protein, 14 aa, Artificial Sequence
  source: /note="Description of Artificial Sequence: Synthetic peptide"
KQGSGEANVDNGDV

SEQ ID NO: 1608 - protein, 14 aa, Artificial Sequence
  source: /note="Description of Artificial Sequence: Synthetic peptide"
KQDAAADNIDYDHV

SEQ ID NO: 1609 - protein, 14 aa, Artificial Sequence
  source: /note="Description of Artificial Sequence: Synthetic peptide"
KQSGTRSNAAASSV

SEQ ID NO: 1610 - protein, 14 aa, Artificial Sequence
  source: /note="Description of Artificial Sequence: Synthetic peptide"
KENTNTNDTELTNV

SEQ ID NO: 1611 - protein, 14 aa, Artificial Sequence
  source: /note="Description of Artificial Sequence: Synthetic peptide"
QRGNNVAATADVNT

SEQ ID NO: 1612 - protein, 14 aa, Artificial Sequence
  source: /note="Description of Artificial Sequence: Synthetic peptide"
QRGNNEAATADVNT

SEQ ID NO: 1613 - protein, 14 aa, Artificial Sequence
  source: /note="Description of Artificial Sequence: Synthetic peptide"
QRGNNPAATADVNT

SEQ ID NO: 1614 - protein, 14 aa, Artificial Sequence
  source: /note="Description of Artificial Sequence: Synthetic peptide"
QRGNNHAATADVNT

SEQ ID NO: 1615 - protein, 14 aa, Artificial Sequence
  source: /note="Description of Artificial Sequence: Synthetic peptide"
QEENNIAATPGVNT

SEQ ID NO: 1616 - protein, 14 aa, Artificial Sequence
  source: /note="Description of Artificial Sequence: Synthetic peptide"
QPPNNMAATHEVNT

SEQ ID NO: 1617 - protein, 14 aa, Artificial Sequence
  source: /note="Description of Artificial Sequence: Synthetic peptide"
QHHNNSAATTIVNT

SEQ ID NO: 1618 - protein, 14 aa, Artificial Sequence
  source: /note="Description of Artificial Sequence: Synthetic peptide"
QTTNNRAAFNMVET

SEQ ID NO: 1619 - protein, 14 aa, Artificial Sequence
  source: /note="Description of Artificial Sequence: Synthetic peptide"
QKKNNNAASKKVAT

SEQ ID NO: 1620 - protein, 14 aa, Artificial Sequence
  source: /note="Description of Artificial Sequence: Synthetic peptide"
QGGNNKAADDAVKT

SEQ ID NO: 1621 - protein, 14 aa, Artificial Sequence
  source: /note="Description of Artificial Sequence: Synthetic peptide"
QAAKGGAADDAVKT

SEQ ID NO: 1622 - protein, 14 aa, Artificial Sequence
  source: /note="Description of Artificial Sequence: Synthetic peptide"
QDDRAAAANESVDT

SEQ ID NO: 1623 - protein, 14 aa, Artificial Sequence
  source: /note="Description of Artificial Sequence: Synthetic peptide"
QQQHDDAAYQRVHT

SEQ ID NO: 1624 - protein, 14 aa, Artificial Sequence
  source: /note="Description of Artificial Sequence: Synthetic peptide"
QSSSSLAAVSTVQT

SEQ ID NO: 1625 - protein, 14 aa, Artificial Sequence
  source: /note="Description of Artificial Sequence: Synthetic peptide"
QNNQTTAAIRNVTT

SEQ ID NO: 1626 - protein, 12 aa, Artificial Sequence
  source: /note="Description of Artificial Sequence: Synthetic peptide"
NYNKKSDNVDFT

SEQ ID NO: 1627 - protein, 12 aa, Artificial Sequence
  source: /note="Description of Artificial Sequence: Synthetic peptide"
NYNKKSENVDFT

SEQ ID NO: 1628 - protein, 12 aa, Artificial Sequence
  source: /note="Description of Artificial Sequence: Synthetic peptide"
NYNKKSLNVDFT

SEQ ID NO: 1629 - protein, 12 aa, Artificial Sequence
  source: /note="Description of Artificial Sequence: Synthetic peptide"
NYNKKSPNVDFT

SEQ ID NO: 1630 - protein, 12 aa, Artificial Sequence
  source: /note="Description of Artificial Sequence: Synthetic peptide"
NYSKKSHCVDFT

SEQ ID NO: 1631 - protein, 11 aa, Artificial Sequence
  source: /note="Description of Artificial Sequence: Synthetic peptide"
NYRKTIYVDFT

SEQ ID NO: 1632 - protein, 11 aa, Artificial Sequence
  source: /note="Description of Artificial Sequence: Synthetic peptide"
NYKEKKDVHFT

SEQ ID NO: 1633 - protein, 11 aa, Artificial Sequence
  source: /note="Description of Artificial Sequence: Synthetic peptide"
NYGHRAIVQFT

SEQ ID NO: 1634 - protein, 11 aa, Artificial Sequence
  source: /note="Description of Artificial Sequence: Synthetic peptide"
NYANHQFVVCT

SEQ ID NO: 1635 - protein, 12 aa, Artificial Sequence
  source: /note="Description of Artificial Sequence: Synthetic peptide"
NYDDDPTGVLLT

SEQ ID NO: 1636 - protein, 11 aa, Artificial Sequence
  source: /note="Description of Artificial Sequence: Synthetic peptide"
NYDDPTGVLLT

SEQ ID NO: 1637 - protein, 11 aa, Artificial Sequence
  source: /note="Description of Artificial Sequence: Synthetic peptide"
NFEQQNSVEWT

SEQ ID NO: 1638 - protein, 7 aa, Artificial Sequence
  source: /note="Description of Artificial Sequence: Synthetic peptide"
SQSGASN

SEQ ID NO: 1639 - protein, 6 aa, Artificial Sequence
  source: /note="Description of Artificial Sequence: Synthetic peptide"
NNGSQA

SEQ ID NO: 1640 - protein, 25 aa, Artificial Sequence
  source: /note="Description of Artificial Sequence: Synthetic peptide"
YYLSRTNTPSGTTTWSRLQFSQAGA

SEQ ID NO: 1641 - protein, 16 aa, Artificial Sequence
  source: /note="Description of Artificial Sequence: Synthetic peptide"
SKTSADNNNSEYSWTG

SEQ ID NO: 1642 - protein, 8 aa, Artificial Sequence
  source: /note="Description of Artificial Sequence: Synthetic peptide"
HKDDEEKF

SEQ ID NO: 1643 - protein, 14 aa, Artificial Sequence
  source: /note="Description of Artificial Sequence: Synthetic peptide"
KQGSEKTNVDIEEV

SEQ ID NO: 1644 - protein, 14 aa, Artificial Sequence
  source: /note="Description of Artificial Sequence: Synthetic peptide"
QRGNNQAATADVNT

SEQ ID NO: 1645 - protein, 12 aa, Artificial Sequence
  source: /note="Description of Artificial Sequence: Synthetic peptide"
NYNKKSVNVDFT

SEQ ID NO: 1646 - protein, 42 aa, Artificial Sequence
  source: /note="Description of Artificial Sequence: Synthetic polypeptide"
SQSGASNYNTPSGTTTQSRLQFSTSADNNNSEYSWTGATKYH

SEQ ID NO: 1647 - protein, 42 aa, Artificial Sequence
  source: /note="Description of Artificial Sequence: Synthetic polypeptide"
SASGASNFNSEGGSLTQSSLGFSTDGENNNSDFSWTGATKYH

SEQ ID NO: 1648 - protein, 42 aa, Artificial Sequence
  source: /note="Description of Artificial Sequence: Synthetic polypeptide"
SQSGASNYNTPSGTTTQSRLQFSTDGENNNSDFSWTGATKYH

SEQ ID NO: 1649 - protein, 42 aa, Artificial Sequence
  source: /note="Description of Artificial Sequence: Synthetic polypeptide"
SASGASNYNTPSGTTTQSRLQFSTSADNNNSEFSWPGATTYH

SEQ ID NO: 1650 - protein, 42 aa, Artificial Sequence
  source: /note="Description of Artificial Sequence: Synthetic polypeptide"
SQSGASNFNSEGGSLTQSSLGFSTDGENNNSDFSWTGATKYH

SEQ ID NO: 1651 - protein, 42 aa, Artificial Sequence
  source: /note="Description of Artificial Sequence: Synthetic polypeptide"
SASGASNYNTPSGSLTQSSLGFSTDGENNNSDFSWTGATKYH

SEQ ID NO: 1652 - protein, 42 aa, Artificial Sequence
  source: /note="Description of Artificial Sequence: Synthetic polypeptide"
SQSGASNYNTPSGTTTQSRLQFSTSADNNNSDFSWTGATKYH

SEQ ID NO: 1653 - protein, 42 aa, Artificial Sequence
  source: /note="Description of Artificial Sequence: Synthetic polypeptide"
SGAGASNFNSEGGSLTQSSLGFSTDGENNNSDFSWTGATKYH

SEQ ID NO: 1654 - protein, 7 aa, Artificial Sequence
  source: /note="Description of Artificial Sequence: Synthetic peptide"
SGAGASN

SEQ ID NO: 1655 - protein, 15 aa, Artificial Sequence
  source: /note="Description of Artificial Sequence: Synthetic peptide"
NSEGGSLTQSSLGFS

SEQ ID NO: 1656 - protein, 11 aa, Artificial Sequence
  source: /note="Description of Artificial Sequence: Synthetic peptide"
TDGENNNSDFS

SEQ ID NO: 1657 - protein, 10 aa, Artificial Sequence
  source: /note="Description of Artificial Sequence: Synthetic peptide"
SEFSWPGATT

SEQ ID NO: 1658 - protein, 13 aa, Artificial Sequence
  source: /note="Description of Artificial Sequence: Synthetic peptide"
TSADNNNSDFSWT

SEQ ID NO: 1659 - protein, 8 aa, Artificial Sequence
  source: /note="Description of Artificial Sequence: Synthetic peptide"
SQSGASNY

SEQ ID NO: 1660 - protein, 15 aa, Artificial Sequence
  source: /note="Description of Artificial Sequence: Synthetic peptide"
NTPSGTTTQSRLQFS

SEQ ID NO: 1661 - protein, 19 aa, Artificial Sequence
  source: /note="Description of Artificial Sequence: Synthetic peptide"
TSADNNNSEYSWTGATKYH

SEQ ID NO: 1662 - protein, 8 aa, Artificial Sequence
  source: /note="Description of Artificial Sequence: Synthetic peptide"
SASGASNF

SEQ ID NO: 1663 - protein, 19 aa, Artificial Sequence
  source: /note="Description of Artificial Sequence: Synthetic peptide"
TDGENNNSDFSWTGATKYH

SEQ ID NO: 1664 - protein, 8 aa, Artificial Sequence
  source: /note="Description of Artificial Sequence: Synthetic peptide"
SASGASNY

SEQ ID NO: 1665 - protein, 19 aa, Artificial Sequence
  source: /note="Description of Artificial Sequence: Synthetic peptide"
TSADNNNSEFSWPGATTYH

SEQ ID NO: 1666 - protein, 15 aa, Artificial Sequence
  source: /note="Description of Artificial Sequence: Synthetic peptide"
NTPSGSLTQSSLGFS

SEQ ID NO: 1667 - protein, 19 aa, Artificial Sequence
  source: /note="Description of Artificial Sequence: Synthetic peptide"
TSADNNNSDFSWTGATKYH

SEQ ID NO: 1668 - protein, 8 aa, Artificial Sequence
  source: /note="Description of Artificial Sequence: Synthetic peptide"
SGAGASNF

SEQ ID NO: 1669 - DNA, 48 bp, Artificial Sequence
  source: /note="Description of Artificial Sequence: Synthetic oligonucleotide"
  modified_base (20)..(20): a, c, t, or g
  modified_base (35)..(35): a, c, t, or g
ctccagvvsvvsmrsrvcvnsgcagctdhcvvsrnsgtcvmsacacaa

SEQ ID NO: 1670 - DNA, 48 bp, Artificial Sequence
  source: /note="Description of Artificial Sequence: Synthetic oligonucleotide"
ctccagagaggcaacagacaagcagctaccgcagatgtcaacacacaa

SEQ ID NO: 1671 - protein, 7 aa, Artificial Sequence
  source: /note="Description of Artificial Sequence: Synthetic peptide"
SAAGASN

SEQ ID NO: 1672 - protein, 24 aa, Artificial Sequence
  source: /note="Description of Artificial Sequence: Synthetic peptide"
YFLSRTNTESGSTTQSTLRFSQAG

SEQ ID NO: 1673 - protein, 13 aa, Artificial Sequence
  source: /note="Description of Artificial Sequence: Synthetic peptide"
SKTSADNNNSDFS

SEQ ID NO: 1674 - protein, 14 aa, Artificial Sequence
  source: /note="Description of Artificial Sequence: Synthetic peptide"
KQGSEKTDVDIDKV

SEQ ID NO: 1675 - protein, 7 aa, Artificial Sequence
  source: /note="Description of Artificial Sequence: Synthetic peptide"
STAGASN

SEQ ID NO: 1676 - protein, 24 aa, Artificial Sequence
  source: /note="Description of Artificial Sequence: Synthetic peptide"
YFLSRTNTTSGIETQSTLRFSQAG

SEQ ID NO: 1677 - protein, 13 aa, Artificial Sequence
  source: /note="Description of Artificial Sequence: Synthetic peptide"
SKTDGENNNSDFS

SEQ ID NO: 1678 - protein, 14 aa, Artificial Sequence
  source: /note="Description of Artificial Sequence: Synthetic peptide"
KQGAAADDVEIDGV

SEQ ID NO: 1679 - protein, 7 aa, Artificial Sequence
  source: /note="Description of Artificial Sequence: Synthetic peptide"
SEAGASN

SEQ ID NO: 1680 - protein, 24 aa, Artificial Sequence
  source: /note="Description of Artificial Sequence: Synthetic peptide"
YYLSRTNTPSGTTTQSRLQFSQAG

SEQ ID NO: 1681 - protein, 13 aa, Artificial Sequence
  source: /note="Description of Artificial Sequence: Synthetic peptide"
SKTSADNNNSEYS

SEQ ID NO: 1682 - protein, 14 aa, Artificial Sequence
  source: /note="Description of Artificial Sequence: Synthetic peptide"
KQGSEKTNVDIEKV

SEQ ID NO: 1683 - protein, 24 aa, Artificial Sequence
  source: /note="Description of Artificial Sequence: Synthetic peptide"
YFLSRTNDASGSDTKSTLLFSQAG

SEQ ID NO: 1684 - protein, 13 aa, Artificial Sequence
  source: /note="Description of Artificial Sequence: Synthetic peptide"
STTPSENNNSEYS

SEQ ID NO: 1685 - protein, 7 aa, Artificial Sequence
  source: /note="Description of Artificial Sequence: Synthetic peptide"
SAAGATN

SEQ ID NO: 1686 - protein, 24 aa, Artificial Sequence
  source: /note="Description of Artificial Sequence: Synthetic peptide"
YFLSRTNGEAGSATLSELRFSQAG

SEQ ID NO: 1687 - protein, 8 aa, Artificial Sequence
  source: /note="Description of Artificial Sequence: Synthetic peptide"
HGDDADRF

SEQ ID NO: 1688 - protein, 14 aa, Artificial Sequence
  source: /note="Description of Artificial Sequence: Synthetic peptide"
KQGAEKSDVEVDRV

SEQ ID NO: 1689 - protein, 14 aa, Artificial Sequence
  source: /note="Description of Artificial Sequence: Synthetic peptide"
KQDSGGDNIDIDQV

SEQ ID NO: 1690 - protein, 7 aa, Artificial Sequence
  source: /note="Description of Artificial Sequence: Synthetic peptide"
SDAGASN

SEQ ID NO: 1691 - protein, 24 aa, Artificial Sequence
  source: /note="Description of Artificial Sequence: Synthetic peptide"
YFLSRTNTEGGHDTQSTLRFSQAG

SEQ ID NO: 1692 - protein, 14 aa, Artificial Sequence
  source: /note="Description of Artificial Sequence: Synthetic peptide"
KEDGGGSDVAIDEV

SEQ ID NO: 1693 - protein, 7 aa, Artificial Sequence
  source: /note="Description of Artificial Sequence: Synthetic peptide"
SNAGASN

SEQ ID NO: 1694 - protein, 24 aa, Artificial Sequence
  source: /note="Description of Artificial Sequence: Synthetic peptide"
YFLSRTNGEAGSATLSELRFSQPG

SEQ ID NO: 1695 - DNA, 21 bp, Artificial Sequence
  source: /note="Description of Artificial Sequence: Synthetic oligonucleotide"
agcvvmdcaggarscascaac

SEQ ID NO: 1696 - DNA, 18 bp, Artificial Sequence
  source: /note="Description of Artificial Sequence: Synthetic oligonucleotide"
aacracrrsmrsmaggca

SEQ ID NO: 1697 - DNA, 24 bp, Artificial Sequence
  source: /note="Description of Artificial Sequence: Synthetic oligonucleotide"
cacrrggacrrcrmsrrsarsttt

SEQ ID NO: 1698 - DNA, 75 bp, Artificial Sequence
  source: /note="Description of Artificial Sequence: Synthetic oligonucleotide"
  modified_base (35)..(35): a, c, t, or g
tatttcttgagcagaacaaacrvcvvsrscggamncvhsacgmhstcavvscttvdsttttctcagsbcrgsgcg

SEQ ID NO: 1699 - DNA, 48 bp, Artificial Sequence
  source: /note="Description of Artificial Sequence: Synthetic oligonucleotide"
  modified_base (11)..(11): a, c, t, or g
tcaamammavnsrvcsrsaacaacaacagtrasttctcgtggmmagga

SEQ ID NO: 1700 - DNA, 42 bp, Artificial Sequence
  source: /note="Description of Artificial Sequence: Synthetic oligonucleotide"
  modified_base (31)..(31): a, c, t, or g
aagsaarrcrscrvsrvarvcratrycgmsnhcrvmvrsgtc

SEQ ID NO: 1701 - DNA, 42 bp, Artificial Sequence
  source: /note="Description of Artificial Sequence: Synthetic oligonucleotide"
  modified_base (17)..(17): a, c, t, or g
  modified_base (32)..(32): a, c, t, or g
cagvvsvvsmrsrvcvnsgcagctdhcvvsrnsgtcvmsaca

SEQ ID NO: 1702 - DNA, 33 bp, Artificial Sequence
  source: /note="Description of Artificial Sequence: Synthetic oligonucleotide"
aactwcrvsvasmvsvhsddtgtgswstksact

SEQ ID NO: 1703 - DNA, 30 bp, Artificial Sequence
  source: /note="Description of Artificial Sequence: Synthetic oligonucleotide"
ttgttgaacatcaccacgtgacgcacgttc

SEQ ID NO: 1704 - DNA, 30 bp, Artificial Sequence
  source: /note="Description of Artificial Sequence: Synthetic oligonucleotide"
tccccgtggttctactacataatgtggccg

SEQ ID NO: 1705 - DNA, 30 bp, Artificial Sequence
  source: /note="Description of Artificial Sequence: Synthetic oligonucleotide"
ttccacactccgttttggataatgttgaac

SEQ ID NO: 1706 - DNA, 30 bp, Artificial Sequence
  source: /note="Description of Artificial Sequence: Synthetic oligonucleotide"
agggacatccccagctccatgctgtggtcg

SEQ ID NO: 1707 - DNA, 30 bp, Artificial Sequence
  source: /note="Description of Artificial Sequence: Synthetic oligonucleotide"
agggacaacccctccgactcgccctaatcc

SEQ ID NO: 1708 - DNA, 30 bp, Artificial Sequence
  source: /note="Description of Artificial Sequence: Synthetic oligonucleotide"
tcctagtagaagacaccctctcactgcccg

SEQ ID NO: 1709 - DNA, 30 bp, Artificial Sequence
  source: /note="Description of Artificial Sequence: Synthetic oligonucleotide"
agtaccatgtacacccactctcccagtgcc

SEQ ID NO: 1710 - DNA, 30 bp, Artificial Sequence
  source: /note="Description of Artificial Sequence: Synthetic oligonucleotide"
atatggacgttcatgctgatcaccataccg

SEQ ID NO: 1711 - DNA, 30 bp, Artificial Sequence
  source: /note="Description of Artificial Sequence: Synthetic oligonucleotide"
agcaggagctccttggcctcagcgtgcgag

SEQ ID NO: 1712 - DNA, 30 bp, Artificial Sequence
  source: /note="Description of Artificial Sequence: Synthetic oligonucleotide"
acaagcagcttcactatgacaaccactgac

SEQ ID NO: 1713 - DNA, 284 bp, Artificial Sequence
  source: /note="Description of Artificial Sequence: Synthetic polynucleotide"
  modified_base (59)..(59): a, c, t, or g
  modified_base (244)..(244): a, c, t, or g
cagcctaggaactggcttcctggaccctgttaccgccagcagagagtctcaamammavnsrvcsrsaacaacaacagtrasttctcctggmmaggagctaccaagtaccacctcaatggcagagactctctggtgaatcccggaccagctatggcaagccacrrggacrrcrmsrrsarsttttttcctcagagcggggttctcatctttgggaagsaarrcrscrvsrvarvcratrycgmsnhcrvmvrsgtcatgattacagacgaagaggagatctggac

SEQ ID NO: 1714 - DNA, 34 bp, Artificial Sequence
  source: /note="Description of Artificial Sequence: Synthetic oligonucleotide"
tgggacaatggcggtcgtctctcagagttktkkt

SEQ ID NO: 1715 - DNA, 35 bp, Artificial Sequence
  source: /note="Description of Artificial Sequence: Synthetic oligonucleotide"
agaggacckktcctcgatggttcatggtggagtta

SEQ ID NO: 1716 - DNA, 31 bp, Artificial Sequence
  source: /note="Description of Artificial Sequence: Synthetic oligonucleotide"
ccacttagggcctggtcgataccgttcggtg

SEQ ID NO: 1717 - DNA, 32 bp, Artificial Sequence
  source: /note="Description of Artificial Sequence: Synthetic oligonucleotide"
tctcgccccaagagtagaaacccttcsttyyg

SEQ ID NO: 1718 - protein, 735 aa, Adeno-associated virus 2 [sequence omitted]

SEQ ID NO: 1719 - protein, 736 aa, Adeno-associated virus 9; identical to SEQ ID NO: 134

SEQ ID NO: 1720 - protein, 7 aa, Artificial Sequence
  source: /note="Description of Artificial Sequence: Synthetic peptide"
GSTPPPM

SEQ ID NO: 1721 - protein, 7 aa, Artificial Sequence
  source: /note="Description of Artificial Sequence: Synthetic peptide"
GETRAPL

SEQ ID NO: 1722 - protein, 6 aa, Artificial Sequence
  source: /note="Description of Artificial Sequence: Synthetic peptide"
SPAKFA

SEQ ID NO: 1723 - protein, 6 aa, Artificial Sequence
  source: /note="Description of Artificial Sequence: Synthetic peptide"
NKDKLN

SEQ ID NO: 1724 - DNA, 12 bp, Artificial Sequence
  source: /note="Description of Artificial Sequence: Synthetic oligonucleotide"
agaaagaggcga

SEQ ID NO: 1725 - DNA, 12 bp, Artificial Sequence
  source: /note="Description of Artificial Sequence: Synthetic oligonucleotide"
cgggccaagcgg

SEQ ID NO: 1726 - DNA, 54 bp, Artificial Sequence
  source: /note="Description of Artificial Sequence: Synthetic oligonucleotide"
gagggcagaggaagtcttctaacatgcggtgacgtggaggagaatcccggccct

SEQ ID NO: 1727 - DNA, 75 bp, Artificial Sequence
  source: /note="Description of Artificial Sequence: Synthetic oligonucleotide"
ggaagcggagtgaaacagactttgaattttgaccttctcaagttggcgggagacgtggagtccaaccctggacct

SEQ ID NO: 1728 - DNA, 66 bp, Artificial Sequence
  source: /note="Description of Artificial Sequence: Synthetic oligonucleotide"
ggaagcggagctactaacttcagcctgctgaagcaggctggagacgtggaggagaaccctggacct

SEQ ID NO: 1729 - DNA, 18 bp, Artificial Sequence
  source: /note="Description of Artificial Sequence: Synthetic oligonucleotide"
tccggaggcggcggcagc

SEQ ID NO: 1730 - DNA, 45 bp, Artificial Sequence
  source: /note="Description of Artificial Sequence: Synthetic oligonucleotide"
ggtggtggtggtagcggcggcggcggctctggtggtggtggatcc

SEQ ID NO: 1731 - DNA, 75 bp, Artificial Sequence
  source: /note="Description of Artificial Sequence: Synthetic oligonucleotide"
ggcggaggtggctccggaggcggaggcagcggcggaggtgggtctggcggaggcgggtgcggcggaggtggctcc

SEQ ID NO: 1732 - DNA, 609 bp, Artificial Sequence
  source: /note="Description of Artificial Sequence: Synthetic polynucleotide"
aattccgcccctctcccccccccccctctccctcccccccccctaacgttactggccgaagccgcttggaataaggccggtgtgcgtttgtctatatgttattttccaccatattgccgtcttttggcaatgtgagggcccggaaacctggccctgtcttcttgacgagcattcctaggggtctttcccctctcgccaaaggaatgcaaggtctgttgaatgtcgtgaaggaagcagttcctctggaagcttcttgaagacaaacaacgtctgtagcgaccctttgcaggcagcggaaccccccacctggcgacaggtgcctctgcggccaaaagccacgtgtataagatacacctgcaaaggcggcacaaccccagtgccacgttgtgagttggatagttgtggaaagagtcaaatggctctcctcaagcgtattcaacaaggggctgaaggatgcccagaaggtaccccattgtatgggatctgatctggggcctcggtgcacatgctttacatgtgtttagtcgaggttaaaaaaacgtctaggccccccgaaccacggggacgtggttttcctttgaaaaacacgatgataatatggccacaacc

SEQ ID NO: 1733 - DNA, 623 bp, Artificial Sequence
  source: /note="Description of Artificial Sequence: Synthetic polynucleotide"
taacgaattccgcccctctcccccccccccctctccctcccccccccctaacgttactggccgaagccgcttggaataaggccggtgtgcgtttgtctatatgttattttccaccatattgccgtcttttggcaatgtgagggcccggaaacctggccctgtcttcttgacgagcattcctaggggtctttcccctctcgccaaaggaatgcaaggtctgttgaatgtcgtgaaggaagcagttcctctggaagcttcttgaagacaaacaacgtctgtagcgaccctttgcaggcagcggaaccccccacctggcgacaggtgcctctgcggccaaaagccacgtgtataagatacacctgcaaaggcggcacaaccccagtgccacgttgtgagttggatagttgtggaaagagtcaaatggctctcctcaagcgtattcaacaaggggctgaaggatgcccagaaggtaccccattgtatgggatctgatctggggcctcggtgcacatgctttacatgtgtttagtcgaggttaaaaaaacgtctaggccccccgaaccacggggacgtggttttcctttgaaaaacacgatgataatatggccacaaccgccgccacc

SEQ ID NO: 1734 - DNA, 54 bp, Artificial Sequence
  source: /note="Description of Artificial Sequence: Synthetic oligonucleotide"
gtggagaggaagtgctgcgtggagtgcccaccatgccctgcccctcctgtggcc

SEQ ID NO: 1735 - DNA, 108 bp, Artificial Sequence
  source: /note="Description of Artificial Sequence: Synthetic polynucleotide"
gagctcaaaaccccacttggtgacacaactcacacatgcccacggtgcccagagcccaaatcttgtgacacacctcccccgtgcccacggtgcccagcacctgaactc

SEQ ID NO: 1736 - DNA, 153 bp, Artificial Sequence
  source: /note="Description of Artificial Sequence: Synthetic polynucleotide"
gagctcaaaaccccacttggtgacacaactcacacatgcccacggtgcccagagcccaaatcttgtgacacacctcccccgtgcccacggtgcccagagcccaaatcttgtgacacacctcccccatgcccacggtgcccagcacctgaactc

SEQ ID NO: 1737 - DNA, 198 bp, Artificial Sequence
  source: /note="Description of Artificial Sequence: Synthetic polynucleotide"
gagctcaaaaccccacttggtgacacaactcacacatgcccacggtgcccagagcccaaatcttgtgacacacctcccccgtgcccacggtgcccagagcccaaatcttgtgacacacctcccccatgcccacggtgcccagagcccaaatcttgtgacacacctcccccgtgcccaaggtgcccagcacctgaactc

SEQ ID NO: 1738 - DNA, 45 bp, Artificial Sequence
  source: /note="Description of Artificial Sequence: Synthetic oligonucleotide"
gtgcccagggattgtggttgtaagccttgcatatgtacagtccca

SEQ ID NO: 1739 - DNA, 18 bp, Artificial Sequence
  source: /note="Description of Artificial Sequence: Synthetic oligonucleotide"
gtgcccagggattgtggt

SEQ ID NO: 1740 - DNA, 57 bp, Artificial Sequence
  source: /note="Description of Artificial Sequence: Synthetic oligonucleotide"
atgaacttcgggctcagcttgattttccttgtccttgttttaaaaggtgtccagtgt

SEQ ID NO: 1741 - DNA, 57 bp, Artificial Sequence
  source: /note="Description of Artificial Sequence: Synthetic oligonucleotide"
atgggatggagctggatctttctctttctcctgtcaggaactacaggtgtcctctct

SEQ ID NO: 1742 - DNA, 969 bp, Artificial Sequence
  source: /note="Description of Artificial Sequence: Synthetic polynucleotide"
gccaaaacgacacccccatctgtctatccactggcccctggatctgctgcccaaactaactccatggtgaccctgggatgcctggtcaagggctatttccctgagccagtgacagtgacctggaactctggatccctgtccagcggtgtgcacaccttcccagctgtcctgcagtctgacctctacactctgagcagctcagtgactgtcccctccagcacctggcccagcgagaccgtcacctgcaacgttgcccacccggccagcagcaccaaggtggacaagaaaattgtgcccagggattgtggttgtaagccttgcatatgtacagtcccagaagtatcatctgtcttcatcttccccccaaagcccaaggatgtgctcaccattactctgactcctaaggtcacgtgtgttgtggtagacatcagcaaggatgatcccgaggtccagttcagctggtttgtagatgatgtggaggtgcacacagctcagacgcaaccccgggaggagcagttcaacagcactttccgctcagtcagtgaacttcccatcatgcaccaggactggctcaatggcaaggagttcaaatgcagggtcaacagtgcagctttccctgcccccatcgagaaaaccatctccaaaaccaaaggcagaccgaaggctccacaggtgtacaccattccacctcccaaggagcagatggccaaggataaagtcagtctgacctgcatgataacagacttcttccctgaagacattactgtggagtggcagtggaatgggcagccagcggagaactacaagaacactcagcccatcatggacacagatggctcttacttcgtctacagcaagctcaatgtgcagaagagcaactgggaggcaggaaatactttcacctgctctgtgttacatgagggcctgcacaaccaccatactgagaagagcctctcccactctcctggt

SEQ ID NO: 1743 - DNA, 972 bp, Artificial Sequence
  source: /note="Description of Artificial Sequence: Synthetic polynucleotide"
gccaaaacgacacccccatctgtctatccactggcccctggatctgctgcccaaactaactccatggtgaccctgggatgcctggtcaagggctatttccctgagccagtgacagtgacctggaactctggatccctgtccagcggtgtgcacaccttcccagctgtcctgcagtctgacctctacactctgagcagctcagtgactgtcccctccagcacctggcccagcgagaccgtcacctgcaacgttgcccacccggccagcagcaccaaggtggacaagaaaattgtgcccagggattgtggttgtaagccttgcatatgtacagtcccagaagtatcatctgtcttcatcttccccccaaagcccaaggatgtgctcaccattactctgactcctaaggtcacgtgtgttgtggtagacatcagcaaggatgatcccgaggtccagttcagctggtttgtagatgatgtggaggtgcacacagctcagacgcaaccccgggaggagcagttcaacagcactttccgctcagtcagtgaacttcccatcatgcaccaggactggctcaatggcaaggagttcaaatgcagggtcaacagtgcagctttccctgcccccatcgagaaaaccatctccaaaaccaaaggcagaccgaaggctccacaggtgtacaccattccacctcccaaggagcagatggccaaggataaagtcagtctgacctgcatgataacagacttcttccctgaagacattactgtggagtggcagtggaatgggcagccagcggagaactacaagaacactcagcccatcatggacacagatggctcttacttcgtctacagcaagctcaatgtgcagaagagcaactgggaggcaggaaatactttcacctgctctgtgttacatgagggcctgcacaaccaccatactgagaagagcctctcccactctcctggtaag

SEQ ID NO: 1744 - protein, 10 aa, Artificial Sequence
  source: /note="Description of Artificial Sequence: Synthetic peptide"
GFNIKDYYIH

SEQ ID NO: 1745 - protein, 16 aa, Artificial Sequence
  source: /note="Description of Artificial Sequence: Synthetic peptide"
WIDPENGDTEYAPKFQ

SEQ ID NO: 1746 - protein, 4 aa, Artificial Sequence
  source: /note="Description of Artificial Sequence: Synthetic peptide"
APGY

SEQ ID NO: 1747 - protein, 16 aa, Artificial Sequence
  source: /note="Description of Artificial Sequence: Synthetic peptide"
NIDPSDSETHYNQKFK

SEQ ID NO: 1748 - protein, 11 aa, Artificial Sequence
  source: /note="Description of Artificial Sequence: Synthetic peptide"
SGFTFTDYYMS

SEQ ID NO: 1749 - protein, 16 aa, Artificial Sequence
  source: /note="Description of Artificial Sequence: Synthetic peptide"
NRNKTKGYTTEYSASV

SEQ ID NO: 1750 - protein, 4 aa, Artificial Sequence
  source: /note="Description of Artificial Sequence: Synthetic peptide"
GMDY

SEQ ID NO: 1751 - protein, 10 aa, Artificial Sequence
  source: /note="Description of Artificial Sequence: Synthetic peptide"
GFTFSTYPMS

SEQ ID NO: 1752 - protein, 14 aa, Artificial Sequence
  source: /note="Description of Artificial Sequence: Synthetic peptide"
SISNGGSTYYPDTV

SEQ ID NO: 1753 - protein, 8 aa, Artificial Sequence
  source: /note="Description of Artificial Sequence: Synthetic peptide"
GRDYHFDF

SEQ ID NO: 1754 - protein, 10 aa, Artificial Sequence
  source: /note="Description of Artificial Sequence: Synthetic peptide"
GYTFTNYWIN

SEQ ID NO: 1755 - protein, 16 aa, Artificial Sequence
  source: /note="Description of Artificial Sequence: Synthetic peptide"
IYPGSTRANYNEKFKS

SEQ ID NO: 1756 - protein, 4 aa, Artificial Sequence
  source: /note="Description of Artificial Sequence: Synthetic peptide"
THSI

SEQ ID NO: 1757 - protein, 10 aa, Artificial Sequence
  source: /note="Description of Artificial Sequence: Synthetic peptide"
GYTFISNWMH

SEQ ID NO: 1758 - protein, 16 aa, Artificial Sequence
  source: /note="Description of Artificial Sequence: Synthetic peptide"
IDPSDSETHYNQKFKD

SEQ ID NO: 1759 - protein, 10 aa, Artificial Sequence
  source: /note="Description of Artificial Sequence: Synthetic peptide"
RDRDGYYFDY

SEQ ID NO: 1760 - protein, 15 aa, Artificial Sequence
  source: /note="Description of Artificial Sequence: Synthetic peptide"
IYPGSTRANYNEKFK

SEQ ID NO: 1761 - protein, 13 aa, Artificial Sequence
  source: /note="Description of Artificial Sequence: Synthetic peptide"
KASGYTFTDRTIH

SEQ ID NO: 1762 - protein, 16 aa, Artificial Sequence
  source: /note="Description of Artificial Sequence: Synthetic peptide"
YIYPGDGSTKYNENFK

SEQ ID NO: 1763 - protein, 6 aa, Artificial Sequence
  source: /note="Description of Artificial Sequence: Synthetic peptide"
RGAMDY

SEQ ID NO: 1764 - protein, 16 aa, Artificial Sequence
  source: /note="Description of Artificial Sequence: Synthetic peptide"
YIYPGDDSTKYNDNFK

SEQ ID NO: 1765 - protein, 6 aa, Artificial Sequence
  source: /note="Description of Artificial Sequence: Synthetic peptide"
RGTMDY

SEQ ID NO: 1766 - protein, 13 aa, Artificial Sequence
  source: /note="Description of Artificial Sequence: Synthetic peptide"
KASGNTFTDYEIH

SEQ ID NO: 1767 - protein, 16 aa, Artificial Sequence
  source: /note="Description of Artificial Sequence: Synthetic peptide"
AIDPETGNTAYNQKFK

SEQ ID NO: 1768 - protein, 6 aa, Artificial Sequence
  source: /note="Description of Artificial Sequence: Synthetic peptide"
SRGFDY

SEQ ID NO: 1769 - protein, 5 aa, Artificial Sequence
  source: /note="Description of Artificial Sequence: Synthetic peptide"
SYGMS

SEQ ID NO: 1770 - protein, 5 aa, Artificial Sequence
  source: /note="Description of Artificial Sequence: Synthetic peptide"
KYGMS

SEQ ID NO: 1771 - protein, 17 aa, Artificial Sequence
  source: /note="Description of Artificial Sequence: Synthetic peptide"
TISSSGSRTYFPDSVKG

SEQ ID NO: 1772 - protein, 17 aa, Artificial Sequence
  source: /note="Description of Artificial Sequence: Synthetic peptide"
TISSSGSRTYYPDSVKG

SEQ ID NO: 1773 - protein, 32 aa, Artificial Sequence
  source: /note="Description of Artificial Sequence: Synthetic polypeptide"
  VARIANT (18)..(18): /replace="Asn"
  VARIANT (20)..(20): /replace="Leu"
  VARIANT (21)..(21): /replace="Arg"
  VARIANT (22)..(22): /replace="Ala"
  VARIANT (31)..(31): /replace="Ala"
  SITE (1)..(32): /note="Variant residues given in the sequence have no preference with respect to those in the annotations for variant positions"
RFTISRDNAKNTLYLQMSSSKSEDTAMYYCSI

SEQ ID NO: 1774 - protein, 8 aa, Artificial Sequence
  source: /note="Description of Artificial Sequence: Synthetic peptide"
TWDGAMDY

SEQ ID NO: 1775 - protein, 8 aa, Artificial Sequence
  source: /note="Description of Artificial Sequence: Synthetic peptide"
SWDGAMDY

SEQ ID NO: 1776 - protein, 11 aa, Artificial Sequence
  source: /note="Description of Artificial Sequence: Synthetic peptide"
  VARIANT (6)..(6): /replace="Thr"
  SITE (1)..(11): /note="Variant residues given in the sequence have no preference with respect to those in the annotations for variant positions"
WGQGTSVTVSS

SEQ ID NO: 1777 - protein, 14 aa, Artificial Sequence
  source: /note="Description of Artificial Sequence: Synthetic peptide"
WVRQAPGKGLEWVA

SEQ ID NO: 1778 - protein, 32 aa, Artificial Sequence; identical to SEQ ID NO: 1773
  source: /note="Description of Artificial Sequence: Synthetic polypeptide"
  VARIANT (18)..(18): /replace="Asn"
  VARIANT (20)..(20): /replace="Leu"
  VARIANT (21)..(21): /replace="Arg"
  VARIANT (22)..(22): /replace="Ala"
  VARIANT (31)..(31): /replace="Ala"
  SITE (1)..(32): /note="Variant residues given in the sequence have no preference with respect to those in the annotations for variant positions"

SEQ ID NO: 1779 - protein, 11 aa, Artificial Sequence
  source: /note="Description of Artificial Sequence: Synthetic peptide"
  VARIANT (6)..(6): /replace="Thr"
  SITE (1)..(11): /note="Variant residues given in the sequence have no preference with respect to those in the annotations for variant positions"
WGQGTSVTVSS

SEQ ID NO: 1780 - protein, 13 aa, Artificial Sequence
  source: /note="Description of Artificial Sequence: Synthetic peptide"
KGSGYTFSNYWIE

SEQ ID NO: 1781 - protein, 17 aa, Artificial Sequence
  source: /note="Description of Artificial Sequence: Synthetic peptide"
EILPGSDSIKYEKNFKG

SEQ ID NO: 1782 - protein, 9 aa, Artificial Sequence
  source: /note="Description of Artificial Sequence: Synthetic peptide"
ARRGNYVDD

SEQ ID NO: 1783 - protein, 7 aa, Mus musculus
GYTFSSS

SEQ ID NO: 1784 - protein, 5 aa, Mus musculus
SSWMG

SEQ ID NO: 1785 - protein, 6 aa, Mus musculus
LPGSGG

SEQ ID NO: 1786 - protein, 17 aa, Mus musculus
DILPGSGGTNYNERFKG

SEQ ID NO: 1787 - protein, 9 aa, Mus musculus
SYYDYDRFA

SEQ ID NO: 1788 - protein, 10 aa, Mus musculus
SYYDYDRFAN

SEQ ID NO: 1789 - protein, 7 aa, Mus musculus
GFTFSSY

SEQ ID NO: 1790 - protein, 5 aa, Mus musculus
SYAMS

SEQ ID NO: 1791 - protein, 5 aa, Mus musculus
SKGGN

SEQ ID NO: 1792 - protein, 16 aa, Mus musculus
SISKGGNTYYPNSVKG

SEQ ID NO: 1793 - protein, 9 aa, Mus musculus
GWGDYGWFA

SEQ ID NO: 1794 - protein, 10 aa, Mus musculus
GWGDYGWFAY

SEQ ID NO: 1795 - protein, 125 aa, Artificial Sequence
  source: /note="Description of Artificial Sequence: Synthetic polypeptide"
LPEVQLEESGAELVRSGASVTLSCTASGFNIKDYYIHWVKQRPEQGLEWIGWIDPENGDTEYAPKFQGKATMTADTSSNTAYLQLSSLTSEDTAVYYCNGAPGYWGPGTTLTVSSAKTTPPSVYS

SEQ ID NO: 1796 - protein, 131 aa, Artificial Sequence
  source: /note="Description of Artificial Sequence: Synthetic polypeptide"
LPEVQLEQSGAELVKPGASVKLSCKASGYTFISNWMHWVKQRPGQGLEWIGNIDPSDSETHYNQKFKDKATLTVDKSSSTAYMQLSSLTSEDSAVYYCARRDRDGYYFDYWGQGTTLTVSSAKTTPPSVYS

SEQ ID NO: 1797 - protein, 127 aa, Artificial Sequence
  source: /note="Description of Artificial Sequence: Synthetic polypeptide"
LPEVQLEESGGGLVQPGGSLSLSCAASGFTFTDYYMSWVRQPPGKALEWVALNRNKTKGYTTEYSASVKGRFTISRDNSQSILYLQMNALRAEDSATYYCARGMDYWGQGTSVTVSSAKTTPPSVYS

SEQ ID NO: 1798 - protein, 128 aa, Artificial Sequence
  source: /note="Description of Artificial Sequence: Synthetic polypeptide"
LPEVQLEESGGGLVKPGGSLKLSCAASGFTFSTYPMSWVRQTPEKRLEWVASISNGGSTYYPDTVKGRFTISRDNARNILYLQMSSLRSEDTAMYYCARGRDYHFDFWGQGTTLTVSSAKTTPPSVYS

SEQ ID NO: 1799 - protein, 125 aa, Artificial Sequence
  source: /note="Description of Artificial Sequence: Synthetic polypeptide"
LPQVQLEESGAELVKPGASVKLSCKASGYTFTNYWINWVKQRPGQGLEWIGNIYPGSTRANYNEKFKSKATLTVDTSSSTAYMQVSSLTSDDSAVYYCTRTHSIWGQGTQVTVSAAKTTPPSVYS

SEQ ID NO: 1800 - protein, 131 aa, Artificial Sequence
  source: /note="Description of Artificial Sequence: Synthetic polypeptide"
LPEVKLEESGAELVKPGASVKLSCKASGYTFISNWMHWVKQRPGQGLEWIGNIDPSDSETHYNQKFKDKATLTVDKSSSTAYMQLSSLTSEDSAVYYCARRDRDGYYFDYWGQGTTLTVSSAKTTPPSVYS

SEQ ID NO: 1801 - protein, 125 aa, Artificial Sequence
  source: /note="Description of Artificial Sequence: Synthetic polypeptide"
LPEVKLEQSGAELVKPGASVKLSCKASGYTFTNYWINWVKQRPGQGLEWIGNIYPGSTRANYNEKFKSKATLTVDTSSSTAYMQVSSLTSDDSAVYYCTRTHSIWGQGTQVTVSAAKTTPPSVYS

SEQ ID NO: 1802 - protein, 439 aa, Artificial Sequence
  source: /note="Description of Artificial Sequence: Synthetic polypeptide"
QVQLQQSDAELVKPGASVKISCKASGYTFTDRTIHWVKQRPEQGLEWIGYIYPGDGSTKYNENFKGKATLTADKSSSTAYMQLNSLTSEDSAVYFCARRGAMDYWGQGTSVTVSSAKTTPPSVYPLAPGSAAQTNSMVTLGCLVKGYFPEPVTVTWNSGSLSSGVHTFPAVLQSDLYTLSSSVTVPSSTWPSETVTCNVAHPASSTKVDKKIVPRDCGCKPCICTVPEVSSVFIFPPKPKDVLTITLTPKVTCVVVDISKDDPEVQFSWFVDDVEVHTAQTQPREEQFNSTFRSVSELPIMHQDWLNGKEFKCRVNSAAFPAPIEKTISKTKGRPKAPQVYTIPPPKEQMAKDKVSLTCMITDFFPEDITVEWQWNGQPAENYKNTQPIMDTDGSYFVYSKLNVQKSNWEAGNTFTCSVLHEGLHNHHTEKSLSHSPGK

SEQ ID NO: 1803 - protein, 115 aa, Artificial Sequence
  source: /note="Description of Artificial Sequence: Synthetic polypeptide"
QVQLQQSDAELVKPGASVKISCKASGYTFTDRTIHWVKQRPEQGLEWIGYIYPGDGSTKYNENFKGKATLTADKSSSTAYMQLNSLTSEDSAVYFCARRGAMDYWGQGTSVTVSS

SEQ ID NO: 1804 - DNA, 345 bp, Artificial Sequence
  source: /note="Description of Artificial Sequence: Synthetic polynucleotide"
caggtgcagctgcagcagagcgacgccgagctggtgaagcccggcgccagcgtgaagatcagctgcaaggccagcggctacaccttcaccgacaggaccatccactgggtgaagcagaggcccgagcagggcctggagtggatcggctacatctaccccggcgacggcagcaccaagtacaacgagaacttcaagggcaaggccaccctgaccgccgacaagagcagcagcaccgcctacatgcagctgaacagcctgaccagcgaggacagcgccgtgtacttctgcgccaggaggggcgcgatggactactggggccagggcaccagcgtgaccgtgagcagc

SEQ ID NO: 1805 - DNA, 345 bp, Artificial Sequence
  source: /note="Description of Artificial Sequence: Synthetic polynucleotide"
caggtgcagctgcagcagagcgacgccgagctggtgaagcccggcgccagcgtgaagatcagctgcaaggccagcggctacaccttcaccgaccggaccatccactgggtgaagcagcggcccgagcagggcctggagtggatcggctacatctaccccggcgacggcagcaccaagtacaacgagaacttcaagggcaaggccaccctgaccgccgacaagagcagcagcaccgcctacatgcagctgaacagcctgaccagcgaggacagcgccgtgtacttctgcgcccggcggggcgctatggactactggggccagggcaccagcgtgaccgtgagcagc

SEQ ID NO: 1806 - DNA, 345 bp, Artificial Sequence
  source: /note="Description of Artificial Sequence: Synthetic polynucleotide"
caggtgcagctgcagcagagcgacgccgagctggtgaagcccggcgccagcgtgaagatcagctgcaaggccagcggctacaccttcaccgaccgaaccatccactgggtgaagcagcgacccgagcagggcctggagtggatcggctacatctaccccggcgacggcagcaccaagtacaacgagaacttcaagggcaaggccaccctgaccgccgacaagagcagcagcaccgcctacatgcagctgaacagcctgaccagcgaggacagcgccgtgtacttctgcgcccgacgaggcgctatggactactggggccagggcaccagcgtgaccgtgagcagc

SEQ ID NO: 1807 - DNA, 345 bp, Artificial Sequence
  source: /note="Description of Artificial Sequence: Synthetic polynucleotide"
caggtgcagctgcagcagagcgatgccgagctggtgaaacctggggccagcgtcaagatcagctgcaaggcctccgggtacaccttcaccgaccgcaccatccactgggtgaagcagcggcccgagcaggggctggagtggatcggctacatctaccccggggacggcagcaccaagtacaacgagaacttcaagggcaaggccaccctgaccgccgacaagtccagcagcacggcctacatgcagctcaacagcctcaccagcgaggacagcgccgtgtacttctgcgcccggcggggcgcaatggactactggggccagggcacctccgtgaccgtgtcctcc

SEQ ID NO: 1808 - DNA, 345 bp, Artificial Sequence
  source: /note="Description of Artificial Sequence: Synthetic polynucleotide"
caggtgcagctgcagcagagcgatgccgagctggtgaaacccggggcctccgtcaagatcagctgcaaggccagcgggtacaccttcaccgaccgcaccatccactgggtgaagcagcggcccgagcagggcctggagtggatcggctacatctaccccggggacggcagcaccaagtacaacgagaacttcaagggcaaggccaccctgaccgccgacaagtccagcagcacagcctacatgcagctcaacagcctcacctctgaggacagcgccgtgtacttctgcgcccggcggggcgcgatggactactggggccaggggaccagcgtgaccgtgtcctcc

SEQ ID NO: 1809 - DNA, 345 bp, Artificial Sequence
  source: /note="Description of Artificial Sequence: Synthetic polynucleotide"
caggtgcagctgcagcagagcgacgccgagctggtgaaacctggggccagcgtcaagatcagctgcaaggcctccggctacaccttcaccgaccgcaccatccactgggtgaagcagcggcccgagcaggggctggagtggatcgggtacatctaccccggggacggctccaccaagtacaacgagaacttcaagggcaaagccaccctgacggccgacaagtccagcagcaccgcctacatgcagctgaacagcctgaccagcgaggacagcgccgtgtacttctgcgcccggcggggggctatggactactggggccagggcacctccgtgaccgtgtcctcc

SEQ ID NO: 1810 - DNA, 345 bp, Artificial Sequence
  source: /note="Description of Artificial Sequence: Synthetic polynucleotide"
caggtgcagctgcagcagtccgacgccgagctggtgaagcccggcgcctccgtgaagatctcctgcaaggcctccggctacaccttcaccgaccggaccatccactgggtgaagcagcggcccgagcagggcctggagtggatcggctacatctaccccggcgacggctccaccaagtacaacgagaacttcaagggcaaggccaccctgaccgccgacaagtcctcctccaccgcctacatgcagctgaactccctgacctccgaggactccgccgtgtacttctgcgcccggcggggcgctatggactactggggccagggcacctccgtgaccgtgtcctcc

SEQ ID NO: 1811 - DNA, 345 bp, Artificial Sequence
  source: /note="Description of Artificial Sequence: Synthetic polynucleotide"
caggtgcagctgcagcagtccgatgccgagctggtgaaaccgggggccagcgtcaagatctcatgcaaagcttccggctacaccttcaccgacagaaccatccactgggtgaagcagcggcccgagcaggggctggagtggatcgggtacatctaccccggggacggcagcaccaagtacaacgagaacttcaagggcaaggccaccctgacagccgacaagtccagctccaccgcctacatgcagctcaacagcctgacctccgaggacagcgccgtgtacttctgcgcccggcggggcgcaatggactactggggccagggcaccagcgtgaccgtgagcagc

SEQ ID NO: 1812 - DNA, 345 bp, Artificial Sequence
  source: /note="Description of Artificial Sequence: Synthetic polynucleotide"
caggtgcagctgcagcagagcgacgccgagctggtgaagcctggcgccagcgtgaagatcagctgcaaggccagcggctacaccttcaccgaccgtaccatccactgggtgaagcagcgacctgagcagggcctggagtggatcggctacatctaccctggcgacggcagcaccaagtacaacgagaacttcaagggcaaggccaccctgaccgccgacaagagcagcagcaccgcctacatgcagctgaacagcctgaccagcgaggacagcgccgtgtacttctgcgcccgtcgaggcgctatggactactggggccagggcaccagcgtgaccgtgagcagc

SEQ ID NO: 1813 - DNA, 345 bp, Artificial Sequence
  source: /note="Description of Artificial Sequence: Synthetic polynucleotide"
caggtgcagctgcagcagagcgacgccgagctggtgaagcctggcgccagcgtgaagatcagctgcaaggccagcggctacaccttcaccgaccgtaccatccactgggtgaagcagcgacctgagcagggcctggagtggatcggctacatctaccccggcgacggcagcaccaagtacaacgagaacttcaagggcaaggccaccctgaccgccgacaagagcagcagcaccgcctacatgcagctgaacagcctgaccagcgaggacagcgccgtgtacttctgcgcccggcggggcgctatggactactggggccagggcaccagcgtgaccgtgagcagc

SEQ ID NO: 1814 - protein, 439 aa, Artificial Sequence
  source: /note="Description of Artificial Sequence: Synthetic polypeptide"
QVQLQQSDAELVKPGASVKISCKASGYTFTDRTIHWVKQRPEQGLEWIGYIYPGDDSTKYNDMFKAKATLTADKSSNTAYMQLNSLTSDDSAVYFCARRGTMDYWGQGTSVTVSSAKTTPPSVYPLAPGSAAQTNSMVTLGCLVKGYFPEPVTVTWNSGSLSSGVHTFPAVLQSDLYTLSSSVTVPSSTWPSETVTCNVAHPASSTKVDKKIVPRDCGCKPCICTVPEVSSVFIFPPKPKDVLTITLTPKVTCVVVDISKDDPEVQFSWFVDDVEVHTAQTQPREEQFNSTFRSVSELPIMHQDWLNGKEFKCRVNSAAFPAPIEKTISKTKGRPKAPQVYTIPPPKEQMAKDKVSLTCMITDFFPEDITVEWQWNGQPAENYKNTQPIMDTDGSYFVYSKLNVQKSNWEAGNTFTCSVLHEGLHNHHTEKSLSHSPGK

SEQ ID NO: 1815 - protein, 439 aa, Artificial Sequence
  source: /note="Description of Artificial Sequence: Synthetic polypeptide"
QVQLQQSDAELVNPGASVKISCKASGYTFTDRTIHWVKQRPEQGLEWIGYIYPGDGSTKYNENFKGKATLTADKSSSTAYMQLNSLASEDSAVYFCARRGAMDYWGQGTSVTVSSAKTTPPSVYPLAPGSAAQTNSMVTLGCLVKGYFPEPVTVTWNSGSLSSGVHTFPAVLQSDLYTLSSSVTVPSSTWPSETVTCNVAHPASSTKVDKKIVPRDCGCKPCICTVPEVSSVFIFPPKPKDVLTITLTPKVTCVVVDISKDDPEVQFSWFVDDVEVHTAQTQPREEQFNSTFRSVSELPIMHQDWLNGKEFKCRVNSAAFPAPIEKTISKTKGRPKAPQVYTIPPPKEQMAKDKVSLTCMITDFFPEDITVEWQWNGQPAENYKNTQPIMDTDGSYFVYSKLNVQKSNWEAGNTFTCSVLHEGLHNHHTEKSLSHSPGK

SEQ ID NO: 1816 - protein, 451 aa, Artificial Sequence
  source: /note="Description of Artificial Sequence: Synthetic polypeptide"
QVQLQQSGAELVRPGASVTLSCKASGNTFTDYEIHWVKQTPVHGLEWIGAIDPETGNTAYNQKFKGKARLTADKSSSTAYMELRSLTSEDSAVYYCTRSRGFDYWGQGTTLTVSSAKTTPPSVYPLAPGCGDTTGSSVTLGCLVKGYFPESVTVTWNSGSLSSSVHTFPALLQSGLYTMSSSVTVPSSTWPSQTVTCSVAHPASSTTVDKKLEPSGPISTINPCPPCKECHKCPAPNLEGGPSVFIFPPNIKDVLMISLTPKVTCVVVDVSEDDPDVRISWFVNNVEVHTAQTQTHREDYNSTIRVVSALPIQHQDWMSGKEFKCKVNNKDLPSPIERTISKIKGLVRAPQVYILPPPAEQLSRKDVSLTCLVVGFNPGDISVEWTSNGHTEENYKDTAPVLDSDGSYFIYSKLDIKTSKWEKTDSFSCNVRHEGLKNYYLKKTISRSPGK

SEQ ID NO: 1817 - protein, 444 aa, Artificial Sequence
  source: /note="Description of Artificial Sequence: Synthetic polypeptide"
QVQLVQSGAEVVKPGASVKISCKASGYTFTDRTIHWVRQAPGQGLEWIGYIYPGDGSTKYSQKFQGRATLTADTSASTAYMELSSLRSEDTAVYYCARRGAMDYWGQGTSVTVSSASTKGPSVFPLAPSSKSTSGGTAALGCLVKDYFPEPVTVSWNSGALTSGVHTFPAVLQSSGLYSLSSVVTVPSSSLGTQTYICNVNHKPSNTKVDKRVEPKSCDKTHTCPPCPAPELLGGPSVFLFPPKPKDTLMISRTPEVTCVVVDVSHEDPEVKFNWYVDGVEVHNAKTKPREEQYNSTYRVVSVLTVLHQDWLNGKEYKCKVSNKALPAPIEKTISKAKGQPREPQVYTLPPSREEMTKNQVSLTCLVKGFYPSDIAVEWESNGQPENNYKTTPPVLDSDGSFFLYSKLTVDKSRWQQGNVFSCSVMHEALHNHYTQKSLSLSPG

SEQ ID NO: 1818 - DNA, 351 bp, Artificial Sequence
  source: /note="Description of Artificial Sequence: Synthetic polynucleotide"
gaggtgcagttggtggagtctggggaagacttagtgaagcctggagggtccctgaaactctcctgtgtcgcttctggattcgctttcagtagctatggcatgtcttgggttcgccagactccagacatgaggctggagtgggtcgcaacaattagtagcagtggtagtcgcacctactttccagacagtgtgaaggggcgactcaccatctccagagacaatgacaagaacatcctatacctacaaatgagcagtctgaggtctgaggacacagccatgtactattgtacgattacctgggacggtgctatggactactggggtcgtggaatatcagtcaccgtctcctca

SEQ ID NO: 1819 - protein, 117 aa, Artificial Sequence
  source: /note="Description of Artificial Sequence: Synthetic polypeptide"
EVQLVESGEDLVKPGGSLKLSCVASGFAFSSYGMSWVRQTPDMRLEWVATISSSGSRTYFPDSVKGRLTISRDNDKNILYLQMSSLRSEDTAMYYCTITWDGAMDYWGRGISVTVSS

SEQ ID NO: 1820 - DNA, 1377 bp, Artificial Sequence
  source: /note="Description of Artificial Sequence: Synthetic polynucleotide"
atgaacttcgggctcagcttgattttccttgtccttgttttaaaaggtgtccagtgtgaggttcatctggtggagtctgggggagccttagtgaagcctggagggtccctgaaactctcctgtgcagcctctggattcagtttcagtaaatatggcatgtcttgggttcgccagactccagacaagaggctggagtgggtcgcaaccattagtagtagtgggagtcgcacctactatccagacagtgtgaagggccaattcaccatctccagagacaatgccaagaacaccctgtacctgcaaatgagcagtctgaagtctgaggacacagccatgtattactgttcaattagctgggacggtgctatggactactggggtcaagggacctcagtcaccgtctcctcagccaaaacgacacccccatctgtctatccactggcccctggatctgctgcccaaactaactccatggtgaccctgggatgcctggtcaagggctatttccctgagccagtgacagtgacctggaactctggatccctgtccagcggtgtgcacaccttcccagctgtcctgcagtctgacctctacactctgagcagctcagtgactgtcccctccagcacctggcccagcgagaccgtcacctgcaacgttgcccacccggccagcagcaccaaggtggacaagaaaattgtgcccagggattgtggttgtaagccttgcatatgtacagtcccagaagtatcatctgtcttcatcttccccccaaagcccaaggatgtgctcaccattactctgactcctaaggtcacgtgtgttgtggtagacatcagcaaggatgatcccgaggtccagttcagctggtttgtagatgatgtggaggtgcacacagctcagacgcaaccccgggaggagcagttcaacagcactttccgctcagtcagtgaacttcccatcatgcaccaggactggctcaatggcaaggagttcaaatgcagggtcaacagtgcagctttccctgcccccatcgagaaaaccatctccaaaaccaaaggcagaccgaaggctccacaggtgtacaccattccacctcccaaggagcagatggccaaggataaagtcagtctgacctgcatgataacagacttcttccctgaagacattactgtggagtggcagtggaatgggcagccagcggagaactacaagaacactcagcccatcatggacacagatggctcttacttcgtctacagcaagctcaatgtgcagaagagcaactgggaggcaggaaatactttcacctgctctgtgttacatgagggcctgcacaaccaccatactgagaagagcctctcccactctcctggt

SEQ ID NO: 1821 - DNA, 351 bp, Artificial Sequence
  source: /note="Description of Artificial Sequence: Synthetic polynucleotide"
gaggttcatctggtggagtctgggggagccttagtgaagcctggagggtccctgaaactctcctgtgcagcctctggattcagtttcagtaaatatggcatgtcttgggttcgccagactccagacaagaggctggagtgggtcgcaaccattagtagtagtgggagtcgcacctactatccagacagtgtgaagggccaattcaccatctccagagacaatgccaagaacaccctgtacctgcaaatgagcagtctgaagtctgaggacacagccatgtattactgttcaattagctgggacggtgctatggactactggggtcaagggacctcagtcaccgtctcctca

SEQ ID NO: 1822 - protein, 117 aa, Artificial Sequence
  source: /note="Description of Artificial Sequence: Synthetic polypeptide"
EVHLVESGGALVKPGGSLKLSCAASGFSFSKYGMSWVRQTPDKRLEWVATISSSGSRTYYPDSVKGQFTISRDNAKNTLYLQMSSLKSEDTAMYYCSISWDGAMDYWGQGTSVTVSS

SEQ ID NO: 1823 - protein, 30 aa, Artificial Sequence
  source: /note="Description of Artificial Sequence: Synthetic polypeptide"
  VARIANT (3)..(3): /replace="Gln"
  SITE (1)..(30): /note="Variant residues given in the sequence have no preference with respect to those in the annotations for variant positions"
EVHLVESGGALVKPGGSLRLSCAASGFSFS

SEQ ID NO: 1824 - DNA, 351 bp, Artificial Sequence
  source: /note="Description of Artificial Sequence: Synthetic polynucleotide"
gaggttcatctggtggagtctgggggagccttagtgaagcctggagggtccctgagactctcctgtgcagcctctggattcagtttcagtaaatatggcatgtcttgggttcgccaggccccaggcaagggcctggagtgggtcgcaaccattagtagtagtgggagtcgcacctactatccagacagtgtgaagggcagattcaccatctccagagacaatgccaagaacaccctgtacctgcaaatgagcagtctgaagtctgaggacacagccatgtattactgttcaattagctgggacggtgctatggactactggggtcaagggacctcagtcaccgtctcctca

SEQ ID NO: 1825 - protein, 117 aa, Artificial Sequence
  source: /note="Description of Artificial Sequence: Synthetic polypeptide"
EVHLVESGGALVKPGGSLRLSCAASGFSFSKYGMSWVRQAPGKGLEWVATISSSGSRTYYPDSVKGRFTISRDNAKNTLYLQMSSLKSEDTAMYYCSISWDGAMDYWGQGTSVTVSS

SEQ ID NO: 1826 - DNA, 351 bp, Artificial Sequence
  source: /note="Description of Artificial Sequence: Synthetic polynucleotide"
gaggttcatctggtggagtctgggggagccttagtgaagcctggagggtccctgagactctcctgtgcagcctctggattcagtttcagtaaatatggcatgtcttgggttcgccaggccccaggcaagggcctggagtgggtcgcaaccattagtagtagtgggagtcgcacctactatccagacagtgtgaagggcagattcaccatctccagagacaatgccaagaacaccctgtacctgcaaatgaacagtctgagagccgaggacacagccatgtattactgttcaattagctgggacggtgctatggactactggggtcaagggaccaccgtcaccgtctcctca

SEQ ID NO: 1827 - protein, 117 aa, Artificial Sequence
  source: /note="Description of Artificial Sequence: Synthetic polypeptide"
EVHLVESGGALVKPGGSLRLSCAASGFSFSKYGMSWVRQAPGKGLEWVATISSSGSRTYYPDSVKGRFTISRDNAKNTLYLQMNSLRAEDTAMYYCSISWDGAMDYWGQGTTVTVSS

SEQ ID NO: 1828 - DNA, 351 bp, Artificial Sequence
  source: /note="Description of Artificial Sequence: Synthetic polynucleotide"
gaggttcagctggtggagtctgggggagccttagtgaagcctggagggtccctgagactctcctgtgcagcctctggattcagtttcagtaaatatggcatgtcttgggttcgccaggccccaggcaagggcctggagtgggtcgcaaccattagtagtagtgggagtcgcacctactatccagacagtgtgaagggcagattcaccatctccagagacaatgccaagaacaccctgtacctgcaaatgaacagtctgagagccgaggacacagccatgtattactgttcaattagctgggacggtgctatggactactggggtcaagggaccaccgtcaccgtctcctca

SEQ ID NO: 1829 - protein, 117 aa, Artificial Sequence
  source: /note="Description of Artificial Sequence: Synthetic polypeptide"
EVQLVESGGALVKPGGSLRLSCAASGFSFSKYGMSWVRQAPGKGLEWVATISSSGSRTYYPDSVKGRFTISRDNAKNTLYLQMNSLRAEDTAMYYCSISWDGAMDYWGQGTTVTVSS

SEQ ID NO: 1830 - DNA, 351 bp, Artificial Sequence
  source: /note="Description of Artificial Sequence: Synthetic polynucleotide"
gaggttcagctggtggagtctgggggagccttagtgaagcctggagggtccctgagactctcctgtgcagcctctggattcagtttcagtaaatatggcatgtcttgggttcgccaggccccaggcaagggcctggagtgggtcgcaaccattagtagtagtgggagtcgcacctactatccagacagtgtgaagggcagattcaccatctccagagacaatgccaagaacaccctgtacctgcaaatgaacagtctgagagccgaggacacagccatgtattactgtgccattagctgggacggtgctatggactactggggtcaagggaccaccgtcaccgtctcctca

SEQ ID NO: 1831 - protein, 117 aa, Artificial Sequence
  source: /note="Description of Artificial Sequence: Synthetic polypeptide"
EVQLVESGGALVKPGGSLRLSCAASGFSFSKYGMSWVRQAPGKGLEWVATISSSGSRTYYPDSVKGRFTISRDNAKNTLYLQMNSLRAEDTAMYYCAISWDGAMDYWGQGTTVTVSS

SEQ ID NO: 1832 - DNA, 1374 bp, Artificial Sequence
  source: /note="Description of Artificial Sequence: Synthetic polynucleotide"
atggaatggacctgggtctttctcttcctcctgtcagtaactgcaggtgtccactcccaggttcagctgcagcagtctggagctgagctgatgaagcctggggcctcagtgaagatatcctgcaaggctactggctacacattcagtaactactggatagagtgggtaaagcagaggcctggacatggccttgagtggattggagagattttacctggaagtgatagtattaagtacaatgagaatttcaagggcaaggccacattcactgcagatacatcctccaacacagcctacatgcaactcagcagcctgacatctgaggactctgccgtctattactgtgcaagaagggggaactacccagactactggggccaaggcaccactctcacagtctcctcagccaaaacgacacccccatctgtctatccactggcccctggatctgctgcccaaactaactccatggtgaccctgggatgcctggtcaagggctatttccctgagccagtgacagtgacctggaactctggatccctgtccagcggtgtgcacaccttcccagctgtcctgcagtctgacctctacactctgagcagctcagtgactgtcccctccagcacctggcccagcgagaccgtcacctgcaacgttgcccacccggccagcagcaccaaggtggacaagaaaattgtgcccagggattgtggttgtaagccttgcatatgtacagtcccagaagtatcatctgtcttcatcttccccccaaagcccaaggatgtgctcaccattactctgactcctaaggtcacgtgtgttgtggtagacatcagcaaggatgatcccgaggtccagttcagctggtttgtagatgatgtggaggtgcacacagctcagacgcaaccccgggaggagcagttcaacagcactttccgctcagtcagtgaacttcccatcatgcaccaggactggctcaatggcaaggagttcaaatgcagggtcaacagtgcagctttccctgcccccatcgagaaaaccatctccaaaaccaaaggcagaccgaaggctccacaggtgtacaccattccacctcccaaggagcagatggccaaggataaagtcagtctgacctgcatgataacagacttcttccctgaagacattactgtggagtggcagtggaatgggcagccagcggagaactacaagaacactcagcccatcatggacacagatggctcttacttcgtctacagcaagctcaatgtgcagaagagcaactgggaggcaggaaatactttcacctgctctgtgttacatgagggcctgcacaaccaccatactgagaagagcctctcccactctcctggt

SEQ ID NO: 1833 - DNA, 1326 bp, Artificial Sequence
  source: /note="Description of Artificial Sequence: Synthetic polynucleotide"
gaggtgcagctggtgcagtctggagcagaggtgaaaaagcccggggagtctctgaagatctcctgtaagggttctggctacacattcagtaactactggatagagtgggtgcgccagatgcccgggaaaggcctggagtggatgggggagattttacctggaagtgatagtattaagtacgaaaagaatttcaagggccaggtcaccatctcagccgacaagtccatcagcaccgcctacctgcagtggagcagcctgaaggcctcggacaccgccatgtattactgtgcgagaagggggaactacgtggacgactggggccagggcaccctggtcaccgtctcctcagcttctaccaagggcccatcggtcttcccgctagcgccctgctccaggagcacctccgagagcacagccgccctgggctgcctggtcaaggactacttccccgaaccggtgacggtgtcgtggaactcaggcgccctgaccagcggcgtgcacaccttcccggctgtcctacagtcctcaggactctactccctcagcagcgtggtgaccgtgccctccagcagcttgggcacgaagacctacacctgcaacgtagatcacaagcccagcaacaccaaggtggacaagagagttgagtccaaatatggtcccccatgcccaccctgcccagcacctgaggccgccgggggaccatcagtcttcctgttccccccaaaacccaaggacactctcatgatctcccggacccctgaggtcacgtgcgtggtggtggacgtgagccaggaagaccccgaggtccagttcaactggtacgtggatggcgtggaggtgcataatgccaagacaaagccgcgggaggagcagttcaacagcacgtaccgtgtggtcagcgtcctcaccgtcctgcaccaggactggctgaacggcaaggagtacaagtgcaaggtctccaacaaaggcctcccgtcctccatcgagaaaaccatctccaaagccaaagggcagccccgagagccacaggtgtacaccctgcccccatcccaggaggagatgaccaagaaccaggtcagcctgacctgcctggtcaaaggcttctaccccagcgacatcgccgtggagtgggaaagcaatgggcagccggagaacaactacaagaccacgcctcccgtgctggactccgacggctccttcttcctctacagcaggctaaccgtggacaagagcaggtggcaggaggggaatgtcttctcatgctccgtgatgcatgaggctctgcacaaccactacacacagaagagcctctccctgtctctgggt

SEQ ID NO: 1834 - protein, 458 aa, Artificial Sequence
  source: /note="Description of Artificial Sequence: Synthetic polypeptide"
MEWTWVFLFLLSVTAGVHSQVQLQQSGAELMKPGASVKISCKATGYTFSNYWIEWVKQRPGHGLEWIGEILPGSDSIKYNENFKGKATFTADTSSNTAYMQLSSLTSEDSAVYYCARRGNYPDYWGQGTTLTVSSAKTTPPSVYPLAPGSAAQTNSMVTLGCLVKGYFPEPVTVTWNSGSLSSGVHTFPAVLQSDLYTLSSSVTVPSSTWPSETVTCNVAHPASSTKVDKKIVPRDCGCKPCICTVPEVSSVFIFPPKPKDVLTITLTPKVTCVVVDISKDDPEVQFSWFVDDVEVHTAQTQPREEQFNSTFRSVSELPIMHQDWLNGKEFKCRVNSAAFPAPIEKTISKTKGRPKAPQVYTIPPPKEQMAKDKVSLTCMITDFFPEDITVEWQWNGQPAENYKNTQPIMDTDGSYFVYSKLNVQKSNWEAGNTFTCSVLHEGLHNHHTEKSLSHSPG

SEQ ID NO: 1835 - protein, 442 aa, Artificial Sequence
  source: /note="Description of Artificial Sequence: Synthetic polypeptide"
EVQLVQSGAEVKKPGESLKISCKGSGYTFSNYWIEWVRQMPGKGLEWMGEILPGSDSIKYEKNFKGQVTISADKSISTAYLQWSSLKASDTAMYYCARRGNYVDDWGQGTLVTVSSASTKGPSVFPLAPCSRSTSESTAALGCLVKDYFPEPVTVSWNSGALTSGVHTFPAVLQSSGLYSLSSVVTVPSSSLGTKTYTCNVDHKPSNTKVDKRVESKYGPPCPPCPAPEAAGGPSVFLFPPKPKDTLMISRTPEVTCVVVDVSQEDPEVQFNWYVDGVEVHNAKTKPREEQFNSTYRVVSVLTVLHQDWLNGKEYKCKVSNKGLPSSIEKTISKAKGQPREPQVYTLPPSQEEMTKNQVSLTCLVKGFYPSDIAVEWESNGQPENNYKTTPPVLDSDGSFFLYSRLTVDKSRWQEGNVFSCSVMHEALHNHYTQKSLSLSLG

SEQ ID NO: 1836 - protein, 116 aa, Artificial Sequence
  source: /note="Description of Artificial Sequence: Synthetic polypeptide"
EVQLVQSGAEVKKPGESLKISCKGSGYTFSNYWIEWVRQMPGKGLEWMGEILPGSDSIKYEKNFKGQVTISADKSISTAYLQWSSLKASDTAMYYCARRGNYVDDWGQGTLVTVSS

SEQ ID NO: 1837 - DNA, 1320 bp, Artificial Sequence
  source: /note="Description of Artificial Sequence: Synthetic polynucleotide"
gaggtccagctgcaacagtctggacctgagctggtgaagcctggggcttcagtgaagatatcctgcaagacttctggatacacattcactgaatacaccatacactgggtgaagcagagccatggagagagccttgagtggattggaggtattaatccaaacgatggtggtactatttacaaccagaagttcaagggcaaggccacattgactgtagacaagtcctccaaaacagcctacatggagctccgcagcctgacatctgaggattctgcagtcttttactgtgcaagagggccctccgccaggtttccttactggggccaagggactctggtcactgtctctgcagccaaaacgacacccccatctgtctatccactggcccctggatctgctgcccaaactaactccatggtgaccctgggatgcctggtcaagggctatttccctgagccagtgacagtgacctggaactctggatccctgtccagcggtgtgcacaccttcccagctgtcctgcagtctgacctctacactctgagcagctcagtgactgtcccctccagcacctggcccagcgagaccgtcacctgcaacgttgcccacccggccagcagcaccaaggtggacaagaaaattgtgcccagggattgtggttgtaagccttgcatatgtacagtcccagaagtatcatctgtcttcatcttccccccaaagcccaaggatgtgctcaccattactctgactcctaaggtcacgtgtgttgtggtagacatcagcaaggatgatcccgaggtccagttcagctggtttgtagatgatgtggaggtgcacacagctcagacgcaaccccgggaggagcagttcaacagcactttccgctcagtcagtgaacttcccatcatgcaccaggactggctcaatggcaaggagttcaaatgcagggtcaacagtgcagctttccctgcccccatcgagaaaaccatctccaaaaccaaaggcagaccgaaggctccacaggtgtacaccattccacctcccaaggagcagatggccaaggataaagtcagtctgacctgcatgataacagacttcttccctgaagacattactgtggagtggcagtggaatgggcagccagcggagaactacaagaacactcagcccatcatggacacagatggctcttacttcgtctacagcaagctcaatgtgcagaagagcaactgggaggcaggaaatactttcacctgctctgtgttacatgagggcctgcacaaccaccatactgagaagagcctctcccactctcctggt

SEQ ID NO: 1838 - DNA, 1377 bp, Artificial Sequence
  source: /note="Description of Artificial Sequence: Synthetic polynucleotide"
atgggatggagctggatctttctctttctcctgtcaggaactacaggtgtcctctctgaggtccagctgcaacagtctggacctgagctggtgaagcctggggcttcagtgaagatatcctgcaagacttctggatacacattcactgaatacaccatacactgggtgaagcagagccatggagagagccttgagtggattggaggtattaatccaaacgatggtggtactatttacaaccagaagttcaagggcaaggccacattgactgtagacaagtcctccaaaacagcctacatggagctccgcagcctgacatctgaggattctgcagtcttttactgtgcaagagggccctccgccaggtttccttactggggccaagggactctggtcactgtctctgcagccaaaacgacacccccatctgtctatccactggcccctggatctgctgcccaaactaactccatggtgaccctgggatgcctggtcaagggctatttccctgagccagtgacagtgacctggaactctggatccctgtccagcggtgtgcacaccttcccagctgtcctgcagtctgacctctacactctgagcagctcagtgactgtcccctccagcacctggcccagcgagaccgtcacctgcaacgttgcccacccggccagcagcaccaaggtggacaagaaaattgtgcccagggattgtggttgtaagccttgcatatgtacagtcccagaagtatcatctgtcttcatcttccccccaaagcccaaggatgtgctcaccattactctgactcctaaggtcacgtgtgttgtggtagacatcagcaaggatgatcccgaggtccagttcagctggtttgtagatgatgtggaggtgcacacagctcagacgcaaccccgggaggagcagttcaacagcactttccgctcagtcagtgaacttcccatcatgcaccaggactggctcaatggcaaggagttcaaatgcagggtcaacagtgcagctttccctgcccccatcgagaaaaccatctccaaaaccaaaggcagaccgaaggctccacaggtgtacaccattccacctcccaaggagcagatggccaaggataaagtcagtctgacctgcatgataacagacttcttccctgaagacattactgtggagtggcagtggaatgggcagccagcggagaactacaagaacactcagcccatcatggacacagatggctcttacttcgtctacagcaagctcaatgtgcagaagagcaactgggaggcaggaaatactttcacctgctctgtgttacatgagggcctgcacaaccaccatactgagaagagcctctcccactctcctggt

SEQ ID NO: 1839 - DNA, 351 bp, Artificial Sequence
  source: /note="Description of Artificial Sequence: Synthetic polynucleotide"
gaggtccagctgcaacagtctggacctgagctggtgaagcctggggcttcagtgaagatatcctgcaagacttctggatacacattcactgaatacaccatacactgggtgaagcagagccatggagagagccttgagtggattggaggtattaatccaaacgatggtggtactatttacaaccagaagttcaagggcaaggccacattgactgtagacaagtcctccaaaacagcctacatggagctccgcagcctgacatctgaggattctgcagtcttttactgtgcaagagggccctccgccaggtttccttactggggccaagggactctggtcactgtctctgca

SEQ ID NO: 1840 - DNA, 699 bp, Artificial Sequence
  source: /note="Description of Artificial Sequence: Synthetic polynucleotide"
atgggatggagctggatctttctctttctcctgtcaggaactacaggtgtcctctctgaggtccagctgcaacagtctggacctgagctggtgaagcctggggcttcagtgaagatatcctgcaagacttctggatacacattcactgaatacaccatacactgggtgaagcagagccatggagagagccttgagtggattggaggtattaatccaaacgatggtggtactatttacaaccagaagttcaagggcaaggccacattgactgtagacaagtcctccaaaacagcctacatggagctccgcagcctgacatctgaggattctgcagtcttttactgtgcaagagggccctccgccaggtttccttactggggccaagggactctggtcactgtctctgcagccaaaacgacacccccatctgtctatccactggcccctggatctgctgcccaaactaactccatggtgaccctgggatgcctggtcaagggctatttccctgagccagtgacagtgacctggaactctggatccctgtccagcggtgtgcacaccttcccagctgtcctgcagtctgacctctacactctgagcagctcagtgactgtcccctccagcacctggcccagcgagaccgtcacctgcaacgttgcccacccggccagcagcaccaaggtggacaagaaaatt

SEQ ID NO: 1841 - DNA, 717 bp, Artificial Sequence
  source: /note="Description of Artificial Sequence: Synthetic polynucleotide"
atgggatggagctggatctttctctttctcctgtcaggaactacaggtgtcctctctgaggtccagctgcaacagtctggacctgagctggtgaagcctggggcttcagtgaagatatcctgcaagacttctggatacacattcactgaatacaccatacactgggtgaagcagagccatggagagagccttgagtggattggaggtattaatccaaacgatggtggtactatttacaaccagaagttcaagggcaaggccacattgactgtagacaagtcctccaaaacagcctacatggagctccgcagcctgacatctgaggattctgcagtcttttactgtgcaagagggccctccgccaggtttccttactggggccaagggactctggtcactgtctctgcagccaaaacgacacccccatctgtctatccactggcccctggatctgctgcccaaactaactccatggtgaccctgggatgcctggtcaagggctatttccctgagccagtgacagtgacctggaactctggatccctgtccagcggtgtgcacaccttcccagctgtcctgcagtctgacctctacactctgagcagctcagtgactgtcccctccagcacctggcccagcgagaccgtcacctgcaacgttgcccacccggccagcagcaccaaggtggacaagaaaattgtgcccagggattgtggt

SEQ ID NO: 1842 - DNA, 744 bp, Artificial Sequence
  source: /note="Description of Artificial Sequence: Synthetic polynucleotide"
atgggatggagctggatctttctctttctcctgtcaggaactacaggtgtcctctctgaggtccagctgcaacagtctggacctgagctggtgaagcctggggcttcagtgaagatatcctgcaagacttctggatacacattcactgaatacaccatacactgggtgaagcagagccatggagagagccttgagtggattggaggtattaatccaaacgatggtggtactatttacaaccagaagttcaagggcaaggccacattgactgtagacaagtcctccaaaacagcctacatggagctccgcagcctgacatctgaggattctgcagtcttttactgtgcaagagggccctccgccaggtttccttactggggccaagggactctggtcactgtctctgcagccaaaacgacacccccatctgtctatccactggcccctggatctgctgcccaaactaactccatggtgaccctgggatgcctggtcaagggctatttccctgagccagtgacagtgacctggaactctggatccctgtccagcggtgtgcacaccttcccagctgtcctgcagtctgacctctacactctgagcagctcagtgactgtcccctccagcacctggcccagcgagaccgtcacctgcaacgttgcccacccggccagcagcaccaaggtggacaagaaaattgtgcccagggattgtggttgtaagccttgcatatgtacagtccca

SEQ ID NO: 1843 - DNA, 753 bp, Artificial Sequence
  source: /note="Description of Artificial Sequence: Synthetic polynucleotide"
atgggatggagctggatctttctctttctcctgtcaggaactacaggtgtcctctctgaggtccagctgcaacagtctggacctgagctggtgaagcctggggcttcagtgaagatatcctgcaagacttctggatacacattcactgaatacaccatacactgggtgaagcagagccatggagagagccttgagtggattggaggtattaatccaaacgatggtggtactatttacaaccagaagttcaagggcaaggccacattgactgtagacaagtcctccaaaacagcctacatggagctccgcagcctgacatctgaggattctgcagtcttttactgtgcaagagggccctccgccaggtttccttactggggccaagggactctggtcactgtctctgcagccaaaacgacacccccatctgtctatccactggcccctggatctgctgcccaaactaactccatggtgaccctgggatgcctggtcaagggctatttccctgagccagtgacagtgacctggaactctggatccctgtccagcggtgtgcacaccttcccagctgtcctgcagtctgacctctacactctgagcagctcagtgactgtcccctccagcacctggcccagcgagaccgtcacctgcaacgttgcccacccggccagcagcaccaaggtggacaagaaaattgtgcccagggattgtggttgtaagccttgcatatgtacagtcccagaagtatca

SEQ ID NO: 1844 - protein, 459 aa, Artificial Sequence
  source: /note="Description of Artificial Sequence: Synthetic polypeptide"
MGWSWIFLFLLSGTTGVLSEVQLQQSGPELVKPGASVKISCKTSGYTFTEYTIHWVKQSHGESLEWIGGINPNDGGTIYNQKFKGKATLTVDKSSKTAYMELRSLTSEDSAVFYCARGPSARFPYWGQGTLVTVSAAKTTPPSVYPLAPGSAAQTNSMVTLGCLVKGYFPEPVTVTWNSGSLSSGVHTFPAVLQSDLYTLSSSVTVPSSTWPSETVTCNVAHPASSTKVDKKIVPRDCGCKPCICTVPEVSSVFIFPPKPKDVLTITLTPKVTCVVVDISKDDPEVQFSWFVDDVEVHTAQTQPREEQFNSTFRSVSELPIMHQDWLNGKEFKCRVNSAAFPAPIEKTISKTKGRPKAPQVYTIPPPKEQMAKDKVSLTCMITDFFPEDITVEWQWNGQPAENYKNTQPIMDTDGSYFVYSKLNVQKSNWEAGNTFTCSVLHEGLHNHHTEKSLSHSPG

SEQ ID NO: 1845 - DNA, 1383 bp, Artificial Sequence
  source: /note="Description of Artificial Sequence: Synthetic polynucleotide"
atgggatggagctggatctttctctttctcctgtcaggaactacaggtgtcctctctgctgccgaggtccagctgcaacagtctggacctgagctggtgaagcctggggcttcagtgaagatatcctgcaagacttctggatacacattcactgaatacaccatacactgggtgaagcagagccatggagagagccttgagtggattggaggtattaatccaaacgatggtggtactatttacaaccagaagttcaagggcaaggccacattgactgtagacaagtcctccaaaacagcctacatggagctccgcagcctgacatctgaggattctgcagtcttttactgtgcaagagggccctccgccaggtttccttactggggccaagggactctggtcactgtctctgcagccaaaacgacacccccatctgtctatccactggcccctggatctgctgcccaaactaactccatggtgaccctgggatgcctggtcaagggctatttccctgagccagtgacagtgacctggaactctggatccctgtccagcggtgtgcacaccttcccagctgtcctgcagtctgacctctacactctgagcagctcagtgactgtcccctccagcacctggcccagcgagaccgtcacctgcaacgttgcccacccggccagcagcaccaaggtggacaagaaaattgtgcccagggattgtggttgtaagccttgcatatgtacagtcccagaagtatcatctgtcttcatcttccccccaaagcccaaggatgtgctcaccattactctgactcctaaggtcacgtgtgttgtggtagacatcagcaaggatgatcccgaggtccagttcagctggtttgtagatgatgtggaggtgcacacagctcagacgcaaccccgggaggagcagttcaacagcactttccgctcagtcagtgaacttcccatcatgcaccaggactggctcaatggcaaggagttcaaatgcagggtcaacagtgcagctttccctgcccccatcgagaaaaccatctccaaaaccaaaggcagaccgaaggctccacaggtgtacaccattccacctcccaaggagcagatggccaaggataaagtcagtctgacctgcatgataacagacttcttccctgaagacattactgtggagtggcagtggaatgggcagccagcggagaactacaagaacactcagcccatcatggacacagatggctcttacttcgtctacagcaagctcaatgtgcagaagagcaactgggaggcaggaaatactttcacctgctctgtgttacatgagggcctgcacaaccaccatactgagaagagcctctcccactctcctggt

SEQ ID NO: 1846 - DNA, 357 bp, Mus musculus
caggttcagctgcagcagtctggaactgagctgatgaagcctggggcctcagtgaagatatcctgcaaggctactggctacacattcagtagctcctggatggggtgggttaagcagaggcctggacatggccttgagtggattggagacattttacctggaagtggtggtactaactacaatgagaggttcaagggcaaggcctcattcactgcagaaacatcctccaacacagcctacatgcaactcagcagcctgacatctgaggactctgccgtctattactgtgtaagaagctactatgattacgaccgctttgctaactggggccaagggactctggtcactgtctctgca

SEQ ID NO: 1847 - protein, 119 aa, Mus musculus
QVQLQQSGTELMKPGASVKISCKATGYTFSSSWMGWVKQRPGHGLEWIGDILPGSGGTNYNERFKGKASFTAETSSNTAYMQLSSLTSEDSAVYYCVRSYYDYDRFANWGQGTLVTVSA

SEQ ID NO: 1848 - DNA, 354 bp, Mus musculus
gaagtgaagctggtggagtctgggggagacttagtgaagcctggagggtccctgaaactctcctgtgcagcctctggattcactttcagtagctatgccatgtcttgggttcgccagaatccagagaagaggctggagtgggtcgcatccattagtaagggtggtaacacctactatccaaacagcgtgaagggccgattcaccatctccagagataatgccaggaacatcctgtacctgcaaatgagcagtctgaggtctgaggacacggccctttattactgtgcaagaggctggggtgattacgggtggtttgcttactggggccaagtgactctggtcactgtctctgca

SEQ ID NO: 1849 - protein, 118 aa, Mus musculus
EVKLVESGGDLVKPGGSLKLSCAASGFTFSSYAMSWVRQNPEKRLEWVASISKGGNTYYPNSVKGRFTISRDNARNILYLQMSSLRSEDTALYYCARGWGDYGWFAYWGQVTLVTVSA

SEQ ID NO: 1850 - DNA, 354 bp, Artificial Sequence
  source: /note="Description of Artificial Sequence: Synthetic polynucleotide"
gaagtgaaactggtggaaagcggcggcgatctggtgaaaccgggcggcagcctgaaactgagctgcgcggcgagcggctttacctttagcagctatgcgatgagctgggtgcgccagaacccggaaaaacgcctggaatgggtggcgagcattagcaaaggcggcaacacctattatccgaacagcgtgaaaggccgctttaccattagccgcgataacgcgcgcaacattctgtatctgcagatgagcagcctgcgcagcgaagataccgcgctgtattattgcgcgcgcggctggggcgattatggctggtttgcgtattggggccaggtgaccctggtgaccgtgagcgcg

SEQ ID NO: 1851 - DNA, 354 bp, Artificial Sequence
  source: /note="Description of Artificial Sequence: Synthetic polynucleotide"
gaggtgaagctggtggagagcggaggagacctggtcaagcccgggggctccctgaagctcagctgtgccgccagcggcttcaccttctcctcctatgccatgtcctgggtccggcagaaccctgagaagaggctggagtgggtggcctccatctccaagggcggcaacacctactatcccaacagcgtgaaaggaagatttaccatcagccgggacaatgccaggaacatcctctacctgcagatgagcagcctgcggtctgaggacacagccctgtactactgcgcccggggctggggggactatggatggtttgcctactggggccaggtgaccctggttactgtgtctgcc

SEQ ID NO: 1852 - DNA, 354 bp, Artificial Sequence
  source: /note="Description of Artificial Sequence: Synthetic polynucleotide"
gaggtgaagctggtggagagcggcggcgacctggtgaagcccggcggcagcctgaagctgagctgcgccgccagcggcttcaccttcagcagctacgccatgagctgggtgaggcagaaccccgagaagaggctggagtgggtggccagcatcagcaagggcggcaacacctactaccccaacagcgtgaagggcaggttcaccatcagcagggacaacgccaggaacatcctgtacctgcagatgagcagcctgaggagcgaggacaccgccctgtactactgcgccaggggctggggcgactacggctggttcgcctactggggccaggtgaccctggtgaccgtgagcgcc

SEQ ID NO: 1853 - DNA, 354 bp, Artificial Sequence
  source: /note="Description of Artificial Sequence: Synthetic polynucleotide"
gaggtgaaacttgtggagagcggcggggacctggtcaagccaggcggcagcctgaagctgagctgtgccgcctccggcttcaccttcagcagctatgccatgtcctgggtccggcagaaccctgagaagaggctggagtgggtggccagcatcagcaaaggaggcaacacctactatcccaacagcgtgaagggccgcttcaccatctcccgggacaatgccaggaacatcctctacctgcagatgagctccctgcggtctgaggacacagccctgtactactgcgcccggggctggggagactatggatggtttgcctactggggccaggtgaccctggtgacagtgtctgcc

SEQ ID NO: 1854 - DNA, 354 bp, Artificial Sequence
  source: /note="Description of Artificial Sequence: Synthetic polynucleotide"
gaggtgaagctggtggagtctggcggagacctggtgaagccaggcggaagcctgaagctgtcctgcgccgcttctggcttcacctttagctcctacgccatgagctgggtgcggcagaacccagagaagcgcctggagtgggtggcttccatctctaagggcggaaacacctactaccctaacagcgtgaagggaaggttcacaatctccagggataacgccagaaacatcctgtacctgcagatgtctagcctgaggtccgaggacacagccctgtactactgtgctcggggctggggagattacggctggtttgcctactggggacaggtgaccctggtgacagtgtctgct

SEQ ID NO: 1855 - DNA, 354 bp, Artificial Sequence
  source: /note="Description of Artificial Sequence: Synthetic polynucleotide"
gaggtgaaacttgtggagagcggcggggacctggtgaagccaggcggcagcctgaagctgagctgtgccgcctccggcttcaccttcagcagctatgccatgtcctgggtccggcagaaccctgagaagaggctggagtgggtggccagcatcagcaaaggaggcaacacctactaccccaacagcgtcaagggccgcttcaccatctcccgggacaatgccaggaacatcctgtacctgcagatgagctccctgcggtctgaggacacagccctgtattactgcgcccggggctggggagactatggatggtttgcctactggggccaggtgaccctggtcaccgtgtctgcc

SEQ ID NO: 1856 - DNA, 354 bp, Artificial Sequence
  source: /note="Description of Artificial Sequence: Synthetic polynucleotide"
gaggtgaaacttgtggagtctggaggagacctggtgaagccaggaggcagcctgaagctgagctgtgctgccagtggcttcaccttcagcagctatgccatgtcctgggtccggcagaaccctgagaagaggctggagtgggtggccagcatctccaagggcggcaacacctactatcccaacagcgtcaaaggaagatttaccatcagccgggacaatgccaggaacatcctctacctgcagatgagctccctgcggtctgaggacacagccctgtactactgtgcccggggctggggagattatggatggtttgcctactggggccaggtgaccctggtcactgtgtctgct

SEQ ID NO: 1857 - DNA, 354 bp, Artificial Sequence
  source: /note="Description of Artificial Sequence: Synthetic polynucleotide"
gaggtgaaattagtggagtctggaggagacctggtgaagccaggaggcagcctgaagctgagctgtgctgcttctggcttcaccttcagcagctatgccatgtcctgggtcagacagaatcctgagaagagactggagtgggtggccagcatctccaaaggtggcaacacctactatcccaacagtgttaaaggaagatttaccatcagcagagataatgcaagaaacatcctctacctgcagatgtcttctttaagaagtgaagatacagccctgtactactgtgccagaggctggggagattatggatggtttgcctactggggccaggtgacattagttactgtgtctgct

SEQ ID NO: 1858 - DNA, 354 bp, Artificial Sequence
  source: /note="Description of Artificial Sequence: Synthetic polynucleotide"
gaggtgaagctggtggagagcggcggggacctggtcaagcccgggggcagcctgaagctcagctgtgccgcctccggcttcaccttcagcagctatgccatgtcctgggtccggcagaaccctgagaagaggctggagtgggtggccagcatcagcaagggcggcaacacctactatcccaacagcgtgaaaggccgcttcaccatctcccgggacaatgccaggaacatcctgtacctgcagatgagctccctgcgcagcgaggacacagccctctactactgcgcccggggctggggagactatggatggtttgcctactggggccaggtgaccctggttactgtgtctgcc

SEQ ID NO: 1859 - DNA, 354 bp, Artificial Sequence
  source: /note="Description of Artificial Sequence: Synthetic polynucleotide"
gaggtgaagctggtggagagcggcggcgacctggtgaagcctggcggcagcctgaagctgagctgcgccgccagcggcttcaccttcagcagctacgccatgagctgggtgagacagaaccctgagaagagactggagtgggtggccagcatcagcaagggcggcaacacctactaccctaacagcgtgaagggcagattcaccatcagcagagacaacgccagaaacatcctgtacctgcagatgagcagcctgagaagcgaggacaccgccctgtactactgcgccagaggctggggcgactacggctggttcgcctactggggccaggtgaccctggtgaccgtgagcgcc

SEQ ID NO: 1860 - protein, 30 aa, Artificial Sequence; identical to SEQ ID NO: 1823
  source: /note="Description of Artificial Sequence: Synthetic polypeptide"
  VARIANT (3)..(3): /replace="Gln"
  SITE (1)..(30): /note="Variant residues given in the sequence have no preference with respect to those in the annotations for variant positions"

SEQ ID NO: 1861 - DNA, 57 bp, Artificial Sequence
  source: /note="Description of Artificial Sequence: Synthetic oligonucleotide"
atgaagttgcctgttaggctgttggtgctgatgttctggattcctgcttccagcagt

SEQ ID NO: 1862 - DNA, 57 bp, Artificial Sequence
  source: /note="Description of Artificial Sequence: Synthetic oligonucleotide"
atgagtcctgcccagttcctgtttctgttagtgctctggattcgggaaaccaacggt

SEQ ID NO: 1863 - DNA, 72 bp, Artificial Sequence
  source: /note="Description of Artificial Sequence: Synthetic oligonucleotide"
gccgccaccatgagtcctgcccagttcctgtttctgttagtgctctggattcgggaaaccaacggtgctgcc

SEQ ID NO: 1864 - DNA, 321 bp, Artificial Sequence
  source: /note="Description of Artificial Sequence: Synthetic polynucleotide"
cgggctgatgctgcaccaactgtatccatcttcccaccatccagtgagcagttaacatctggaggtgcctcagtcgtgtgcttcttgaacaacttctaccccaaagacatcaatgtcaagtggaagattgatggcagtgaacgacaaaatggcgtcctgaacagttggactgatcaggacagcaaagacagcacctacagcatgagcagcaccctcacgttgaccaaggacgagtatgaacgacataacagctatacctgtgaggccactcacaagacatcaacttcacccattgtcaagagcttcaacaggaatgagtgt

SEQ ID NO: 1865 - protein, 16 aa, Artificial Sequence
  source: /note="Description of Artificial Sequence: Synthetic peptide"
RSSQTIVHSNGNTYLE

SEQ ID NO: 1866 - protein, 9 aa, Artificial Sequence
  source: /note="Description of Artificial Sequence: Synthetic peptide"
FQGSHVPFT

SEQ ID NO: 1867 - protein, 11 aa, Artificial Sequence
  source: /note="Description of Artificial Sequence: Synthetic peptide"
KASQDINKYIA

SEQ ID NO: 1868 - protein, 7 aa, Artificial Sequence
  source: /note="Description of Artificial Sequence: Synthetic peptide"
YTSTLQS

SEQ ID NO: 1869 - protein, 8 aa, Artificial Sequence
  source: /note="Description of Artificial Sequence: Synthetic peptide"
LQYDHLLT

SEQ ID NO: 1870 - protein, 15 aa, Artificial Sequence
  source: /note="Description of Artificial Sequence: Synthetic peptide"
RASKSVSTSDYSYMH

SEQ ID NO: 1871 - protein, 7 aa, Artificial Sequence
  source: /note="Description of Artificial Sequence: Synthetic peptide"
LASNLES

SEQ ID NO: 1872 - protein, 9 aa, Artificial Sequence
  source: /note="Description of Artificial Sequence: Synthetic peptide"
QHSRELPFT

SEQ ID NO: 1873 - protein, 16 aa, Artificial Sequence
  source: /note="Description of Artificial Sequence: Synthetic peptide"
KSSQSLLYSDGKTFLN

SEQ ID NO: 1874 - protein, 7 aa, Artificial Sequence
  source: /note="Description of Artificial Sequence: Synthetic peptide"
LVSKLQS

SEQ ID NO: 1875 - protein, 9 aa, Artificial Sequence
  source: /note="Description of Artificial Sequence: Synthetic peptide"
VQGTHFPYT

SEQ ID NO: 1876 - protein, 16 aa, Artificial Sequence
  source: /note="Description of Artificial Sequence: Synthetic peptide"
KSSQSLLYSDGKTYLN

SEQ ID NO: 1877 - protein, 7 aa, Artificial Sequence
  source: /note="Description of Artificial Sequence: Synthetic peptide"
QVSKLDP

SEQ ID NO: 1878 - protein, 9 aa, Artificial Sequence
  source: /note="Description of Artificial Sequence: Synthetic peptide"
LQGTYYPHT

SEQ ID NO: 1879 - protein, 8 aa, Artificial Sequence
  source: /note="Description of Artificial Sequence: Synthetic peptide"
LQGTYYPH

SEQ ID NO: 1880 - protein, 11 aa, Artificial Sequence
  source: /note="Description of Artificial Sequence: Synthetic peptide"
QASQGTSINLN

SEQ ID NO: 1881 - protein, 7 aa, Artificial Sequence
  source: /note="Description of Artificial Sequence: Synthetic peptide"
GASNLED

SEQ ID NO: 1882 - protein, 7 aa, Artificial Sequence
  source: /note="Description of Artificial Sequence: Synthetic peptide"
LQHTYLP

SEQ ID NO: 1883 - protein, 11 aa, Artificial Sequence
  source: /note="Description of Artificial Sequence: Synthetic peptide"
QASQDTSINLN

SEQ ID NO: 1884 - protein, 7 aa, Artificial Sequence
  source: /note="Description of Artificial Sequence: Synthetic peptide"
GSSNLED

SEQ ID NO: 1885 - protein, 7 aa, Artificial Sequence
  source: /note="Description of Artificial Sequence: Synthetic peptide"
LQHSYLP

SEQ ID NO: 1886 - protein, 16 aa, Artificial Sequence
  source: /note="Description of Artificial Sequence: Synthetic peptide"
RSSQSLVHSNGNTYLH

SEQ ID NO: 1887 - protein, 7 aa, Artificial Sequence
  source: /note="Description of Artificial Sequence: Synthetic peptide"
KVSNRFS

SEQ ID NO: 1888 - protein, 7 aa, Artificial Sequence
  source: /note="Description of Artificial Sequence: Synthetic peptide"
SQSTHVP

SEQ ID NO: 1889 - protein, 15 aa, Artificial Sequence
  source: /note="Description of Artificial Sequence: Synthetic peptide"
  VARIANT (14)..(14): /replace="Ile"
  SITE (1)..(15): /note="Variant residues given in the sequence have no preference with respect to those in the annotations for variant positions"
WYLQKPGQSPQLLVY

SEQ ID NO: 1890 - protein, 32 aa, Artificial Sequence
  source: /note="Description of Artificial Sequence: Synthetic polypeptide"
  VARIANT (29)..(29): /replace="Val"
  SITE (1)..(32): /note="Variant residues given in the sequence have no preference with respect to those in the annotations for variant positions"
GVPDRFSGSGSGTDFTLKISRVEAEDVGTYYC

SEQ ID NO: 1891 - protein, 10 aa, Artificial Sequence
  source: /note="Description of Artificial Sequence: Synthetic peptide"
FGGGTKVEIK

SEQ ID NO: 1892 - protein, 16 aa, Artificial Sequence
  source: /note="Description of Artificial Sequence: Synthetic peptide"
RSSQTILHSNGNTYLE

SEQ ID NO: 1893 - protein, 16 aa, Artificial Sequence
  source: /note="Description of Artificial Sequence: Synthetic peptide"
KSSQSIVHSNGNTYLE

SEQ ID NO: 1894 - protein, 15 aa, Artificial Sequence
  source: /note="Description of Artificial Sequence: Synthetic peptide"
  VARIANT (14)..(14): /replace="Ile"
  SITE (1)..(15): /note="Variant residues given in the sequence have no preference with respect to those in the annotations for variant positions"
WYLQKPGQSPQLLVY

SEQ ID NO: 1895 - protein, 7 aa, Artificial Sequence
  source: /note="Description of Artificial Sequence: Synthetic peptide"
KVSKRFS

SEQ ID NO: 1896 - protein, 32 aa, Artificial Sequence; identical to SEQ ID NO: 1890
  source: /note="Description of Artificial Sequence: Synthetic polypeptide"
  VARIANT (29)..(29): /replace="Val"
  SITE (1)..(32): /note="Variant residues given in the sequence have no preference with respect to those in the annotations for variant positions"

SEQ ID NO: 1897 - protein, 9 aa, Artificial Sequence
  source: /note="Description of Artificial Sequence: Synthetic peptide"
FQGSLVPWA

SEQ ID NO: 1898 - protein, 16 aa, Artificial Sequence
  source: /note="Description of Artificial Sequence: Synthetic peptide"
RSSQSLVHSNQNTYLH

SEQ ID NO: 1899 - protein, 8 aa, Artificial Sequence
  source: /note="Description of Artificial Sequence: Synthetic peptide"
YKVDNRFS

SEQ ID NO: 1900 - protein, 9 aa, Artificial Sequence
  source: /note="Description of Artificial Sequence: Synthetic peptide"
SQSTLVPLT

SEQ ID NO: 1901 - protein, 12 aa, Mus musculus
SESLLHSNGNTY

SEQ ID NO: 1902 - protein, 16 aa, Mus musculus
RSSESLLHSNGNTYLY

SEQ ID NO: 1903 - protein, 3 aa, Mus musculus
RMS

SEQ ID NO: 1904 - protein, 7 aa, Mus musculus
RMSNLAS

SEQ ID NO: 1905 - protein, 6 aa, Mus musculus
YLEYPL

SEQ ID NO: 1906 - protein, 9 aa, Mus musculus
MQYLEYPLT

SEQ ID NO: 1907 - protein, 7 aa, Mus musculus
SQDINRY

SEQ ID NO: 1908 - protein, 11 aa, Mus musculus
KASQDINRYLN

SEQ ID NO: 1909 - protein, 3 aa, Mus musculus
RAN

SEQ ID NO: 1910 - protein, 7 aa, Mus musculus
RANRLLD

SEQ ID NO: 1911 - protein, 6 aa, Mus musculus
YDEFPL

SEQ ID NO: 1912 - protein, 9 aa, Mus musculus
LQYDEFPLT

SEQ ID NO: 1913 - protein, 122 aa, Artificial Sequence
  source: /note="Description of Artificial Sequence: Synthetic polypeptide"
DIVLTQTPLSLPVSLGDPASISCRSSQTIVHSNGNTYLEWYLQKPGQSPKLLIYKVSNRFSGVPDRFSGSGSGTDFTLKISRVEAEDLGVYYCFQGSHVPFTFGSGTKLEIKRADAAPTVST

SEQ ID NO: 1914 - protein, 116 aa, Artificial Sequence
  source: /note="Description of Artificial Sequence: Synthetic polypeptide"
DIVLTQTPSSLSASLGGKVTITCKASQDINKYIAWYQHKPGKGPRLLIHYTSTLQSGIPSRFSGSGSGRDYSFSISNLEPEDIATYYCLQYDHLLTFGAGTKLELKRADAAPTVST

SEQ ID NO: 1915 - protein, 121 aa, Artificial Sequence
  source: /note="Description of Artificial Sequence: Synthetic polypeptide"
DIVLTQSPTSLAVSLGQRATISCRASKSVSTSDYSYMHWYQQKPGQPPKLLIYLASNLESGVPARFSGSGSGTDFTLNIHPVEEEDAATYYCQHSRELPFTFGGGTKLEIKRADAAPTVST

SEQ ID NO: 1916 - protein, 122 aa, Artificial Sequence
  source: /note="Description of Artificial Sequence: Synthetic polypeptide"
DIVLTQTPLTLSVTIGQPASISCKSSQSLLYSDGKTFLNWLLQSPGQSPRLLIYLVSKLQSGVPDRFSGSGSGTDFTLKISRVEAEDLGVYYCVQGTHFPYTFGGGTKLEIKRADAAPTVST

SEQ ID NO: 1917 - protein, 122 aa, Artificial Sequence
  source: /note="Description of Artificial Sequence: Synthetic polypeptide"
DIVMTQSPLSLSVTIGQPASISCKSSQSLLYSDGKTYLNWLQQRPGQSPKRLVYQVSKLDPGIPDRFSGSGSETDFTLKLSRVEAEDLGVYYCLQGTYYPHTFGGGTKLEIKRADAAPTVST

SEQ ID NO: 1918 - protein, 122 aa, Artificial Sequence
  source: /note="Description of Artificial Sequence: Synthetic polypeptide"
DIVITQSPLSLSVTIGQPASISCKSSQSLLYSDGKTYLNWLQQRPGQSPKRLVYQVSKLDPGIPDRFSGSGSETDFTLKLSRVEAEDLGVYYCLQGTYYPHTFGGGTKLEIKRADAAPTVST

SEQ ID NO: 1919 - protein, 107 aa, Artificial Sequence
  source: /note="Description of Artificial Sequence: Synthetic polypeptide"
DVQMIQSPSSLSASLGDIVTMTCQASQGTSINLNWFQQKPGKAPKLLIYGASNLEDGVPSRFSGSRYGTDFTLTISSLEDEDMATYFCLQHTYLPFTFGSGTKLEIK

SEQ ID NO: 1920 - protein, 214 aa, Artificial Sequence
  source: /note="Description of Artificial Sequence: Synthetic polypeptide"
DVQMIQSPSSLSASLGDIVTMTCQASQGTSINLNWFQQKPGKAPKLLIYGASNLEDGVPSRFSGSRYGTDFTLTISSLEDEDMATYFCLQHTYLPFTFGSGTKLEIKRADAAPTVSIFPPSSEQLTSGGASVVCFLNNFYPKDINVKWKIDGSERQNGVLNSWTDQDSKDSTYSMSSTLTLTKDEYERHNSYTCEATHKTSTSPIVKSFNRNEC

SEQ ID NO: 1921 - DNA, 321 bp, Artificial Sequence
  source: /note="Description of Artificial Sequence: Synthetic polynucleotide"
gacgtgcagatgatccagagccccagcagcctgagcgccagcctgggcgacatcgtgaccatgacctgccaggccagccagggcaccagcatcaacctgaactggttccagcagaagcccggcaaggcccccaagctgctgatctacggcgccagcaacctggaggacggcgtgcccagcaggttcagcggcagcaggtacggcaccgacttcaccctgaccatcagcagcctggaggacgaggacatggccacctacttctgcctgcagcacacctacctgcccttcaccttcggcagcggcaccaagctggagatcaag

SEQ ID NO: 1922 - DNA, 321 bp, Artificial Sequence
  source: /note="Description of Artificial Sequence: Synthetic polynucleotide"
gacgttcagatgatccagagccccagcagcctgagcgccagcctgggcgacatcgtgaccatgacctgccaggccagccagggcaccagcatcaacctgaactggttccagcagaagcccggcaaggcccccaagctgctgatctacggcgccagcaacctggaggacggcgtgcccagccggttcagcggcagccggtacggcaccgacttcaccctgaccatcagcagcctggaggacgaggacatggccacctacttctgcctgcagcacacctacctgcccttcaccttcggcagcggcaccaagctggagatcaag

SEQ ID NO: 1923 - DNA, 321 bp, Artificial Sequence
  source: /note="Description of Artificial Sequence: Synthetic polynucleotide"
gatgtgcagatgatccagagcccttcttccctctccgcctccctgggcgacatcgtgaccatgacctgccaggccagccagggcaccagcatcaacctgaactggttccagcagaagcccgggaaggcccccaagctcctcatctacggcgcctcaaatttggaagatggagtgcccagccgcttctccgggtcccgctatggaacagacttcacactgaccatcagcagcctggaggatgaggacatggccacctacttctgcctgcagcacacatacctgcccttcaccttcggcagcgggaccaagctggagatcaag

SEQ ID NO: 1924 - DNA, 321 bp, Artificial Sequence
  source: /note="Description of Artificial Sequence: Synthetic polynucleotide"
gacgtgcagatgatccagagcccctccagcctgagcgcctcgctgggggacatcgtgaccatgacctgccaggcctcccagggcaccagcatcaacctcaactggttccagcagaagcccggcaaggcccccaagctgctgatctacggggccagcaacctggaggacggcgtgcccagccgcttcagcggctcccgctacggcacggacttcacgctgaccatctcctccctggaggacgaggacatggccacctacttctgcctgcagcacacctacctgcccttcaccttcggcagcgggaccaagctggagatcaag

SEQ ID NO: 1925 - DNA, 321 bp, Artificial Sequence
  source: /note="Description of Artificial Sequence: Synthetic polynucleotide"
gacgtgcagatgatccagagccccagctccctcagcgcctccctgggggacatcgtgaccatgacctgccaggccagccagggcaccagcatcaacctcaactggttccagcagaagcccggcaaggcccccaagctgctgatctacggggcctccaacctggaggacggcgtgccctcccgcttcagcggcagccgctacggcacggacttcacgctgaccatcagcagcctggaggacgaggacatggccacctacttctgcctgcagcacacctacctgcccttcaccttcgggagcgggaccaagttggagatcaag

SEQ ID NO: 1926 - DNA, 321 bp, Artificial Sequence
  source: /note="Description of Artificial Sequence: Synthetic polynucleotide"
gacgtgcagatgatccagagccccagcagcctgagcgcctcgctgggggacatcgtgaccatgacctgccaggcctcccagggcaccagcatcaacctcaactggttccagcagaagcccggcaaggcccccaagctcctcatctacggggccagcaacctggaggacggcgtgccctcccgcttcagcggctcccgctacggcacggacttcacgctgaccatctcctccctggaggacgaggacatggccacctacttctgcctgcagcacacctacctgcccttcaccttcggcagcgggaccaagctggagatcaag

SEQ ID NO: 1927 - DNA, 321 bp, Artificial Sequence
  source: /note="Description of Artificial Sequence: Synthetic polynucleotide"
gacgttcagatgatccagtccccctcctccctgtccgcctccctgggcgacatcgtgaccatgacctgccaggcctcccagggcacctccatcaacctgaactggttccagcagaagcccggcaaggcccccaagctgctgatctacggcgcctccaacctggaggacggcgtgccctcccggttctccggctcccggtacggcaccgacttcaccctgaccatctcctccctggaggacgaggacatggccacctacttctgcctgcagcacacctacctgcccttcaccttcggctccggcaccaagctggagatcaag

SEQ ID NO: 1928 - DNA, 321 bp, Artificial Sequence
  source: /note="Description of Artificial Sequence: Synthetic polynucleotide"
gacgtgcagatgatccagagcccctcctccctgagcgccagcctgggggacatcgtgaccatgacctgccaggcctcccagggcaccagcatcaacctcaactggttccagcagaagcccggcaaggcccccaagctcctcatctacggggccagcaacctggaggacggcgtgcccagccgcttcagcggctcccgctacggcacggacttcacgctgaccatcagcagcctggaggacgaggacatggccacctacttctgcctgcagcacacctacctgcccttcaccttcggcagcgggaccaagctggagatcaag

SEQ ID NO: 1929 - DNA, 321 bp, Artificial Sequence
  source: /note="Description of Artificial Sequence: Synthetic polynucleotide"
gacgttcagatgatccagagccctagcagcctgagcgccagcctgggcgacatcgtgaccatgacctgccaggccagccagggcaccagcatcaacctgaactggttccagcagaagcctggcaaggcccctaagctgctgatctacggcgccagcaacctggaggacggcgtgcctagccgtttcagcggcagccgttacggcaccgacttcaccctgaccatcagcagcctggaggacgaggacatggccacctacttctgcctgcagcacacctacctgcctttcaccttcggcagcggcaccaagctggagatcaag

SEQ ID NO: 1930 - DNA, 321 bp, Artificial Sequence
  source: /note="Description of Artificial Sequence: Synthetic polynucleotide"
gacgttcagatgatccagagccctagcagcctgagcgccagcctgggcgacatcgtgaccatgacctgccaggccagccagggcaccagcatcaacctgaactggttccagcagaagcctggcaaggcccctaagctgctgatctacggcgccagcaacctggaggacggcgtgcccagccggttcagcggcagccggtacggcaccgacttcaccctgaccatcagcagcctggaggacgaggacatggccacctacttctgcctgcagcacacctacctgcccttcaccttcggcagcggcaccaagctggagatcaag

SEQ ID NO: 1931 - protein, 214 aa, Artificial Sequence
  source: /note="Description of Artificial Sequence: Synthetic polypeptide"
DVQMIQSPSSLSASLGDIVTMTCQASQDTSINLNWFQQKPGKAPKLLIYGASNLEDGVPSRFSGSRYGTDFTLTISSLEDEDMATYFCLQHTYLPFTFGSGTKLEIKRADAAPTVSIFPPSSEQLTSGGASVVCFLNNFYPKDINVKWKIDGSERQNGVLNSWTDQDSKDSTYSMSSTLTLTKDEYERHNSYTCEATHKTSTSPIVKSFNRNEC

SEQ ID NO: 1932 - protein, 214 aa, Artificial Sequence
  source: /note="Description of Artificial Sequence: Synthetic polypeptide"
DVQMIQSPSSLSASLGDIVTMTCQASQGTSINLNWFQQKPGKAPKLLIYGSSNLEDGVPSRFSGSRYGTDFTLTISSLEDEDMATYFCLQHSYLPFTFGSGTKLEIKRADAAPTVSIFPPSSEQLTSGGASVVCFLNNFYPKDINVKWKIDGSERQNGVLNSWTDQDSKDSTYSMSSTLTLTKDEYERHNSYTCEATHKTSTSPIVKSFNRNEC

SEQ ID NO: 1933 - protein, 219 aa, Artificial Sequence
  source: /note="Description of Artificial Sequence: Synthetic polypeptide"
DVMMTQTPLSLPVSLGDQASISCRSSQSLVHSNGNTYLHWHLQKPGQSPKFLIYKVSNRFSGVPDRFSGSGSGTDFTLKISRVEAEDLGVYFCSQSTHVPFTFGSGTKLEIKRADAAPTVSIFPPSSEQLTSGGASVVCFLNNFYPKDINVKWKIDGSERQNGVLNSWTDQDSKDSTYSMSSTLTLTKDEYERHNSYTCEATHKTSTSPIVKSFNRNEC

SEQ ID NO: 1934 - protein, 219 aa, Artificial Sequence
  source: /note="Description of Artificial Sequence: Synthetic polypeptide"
DVVMTQTPLSLPVSLGDQASISCRSSQSLVHSNGNTYLHWHLQKPGQSPKFLIYKVSNRFSGVPDRFSGSGSGTDFTLKISRVEAEDLGVYFCSQSTHVPFTFGSGTKLEIKRADAAPTVSIFPPSSEQLTSGGASVVCFLNNFYPKDINVKWKIDGSERQNGVLNSWTDQDSKDSTYSMSSTLTLTKDEYERHNSYTCEATHKTSTSPIVKSFNRNEC

SEQ ID NO: 1935 - protein, 214 aa, Artificial Sequence
  source: /note="Description of Artificial Sequence: Synthetic polypeptide"
DVQMTQSPSSLSASVGDRVTMTCQASQDTSINLNWFQQKPGKAPKLLIYGASNLETGVPSRFSGSRSGTDFTLTISSLQPEDMATYYCLQHTYLPFTFGSGTKLEIKRTVAAPSVFIFPPSDEQLKSGTASVVCLLNNFYPREAKVQWKVDNALQSGNSQESVTEQDSKDSTYSLSSTLTLSKADYEKHKVYACEVTHQGLSSPVTKSFNRGEC

SEQ ID NO: 1936 - DNA, 336 bp, Artificial Sequence
  source: /note="Description of Artificial Sequence: Synthetic polynucleotide"
gatgttttgatgacccaaactccgctctccctggcagtcaatcttggagatcaagcctccctctcttgcagatcgagtcagactattttacatagtaatggaaatacctatttagaatggtatttgcagaaaccaggccagtctccaagactcctgatctacaaagtttctaaacgattttctggggtcccagacaggttcagtggcagtggatcagggacagatttcacactcaagatcagcagagtggaggctgacgatctgggaatttattactgctttcaaggttcacttgttccttgggcgttcggtggaggcaccaagctggaaatcaaa

SEQ ID NO: 1937 - protein, 112 aa, Artificial Sequence
  source: /note="Description of Artificial Sequence: Synthetic polypeptide"
DVLMTQTPLSLAVNLGDQASLSCRSSQTILHSNGNTYLEWYLQKPGQSPRLLIYKVSKRFSGVPDRFSGSGSGTDFTLKISRVEADDLGIYYCFQGSLVPWAFGGGTKLEIK

SEQ ID NO: 1938 - protein, 23 aa, Artificial Sequence
  source: /note="Description of Artificial Sequence: Synthetic peptide"
  VARIANT (3)..(3): /replace="Val"
  SITE (1)..(23): /note="Variant residues given in the sequence have no preference with respect to those in the annotations for variant positions"
DVLMTQSPLSLPVTLGQPASISC

SEQ ID NO: 1939 - DNA, 336 bp, Artificial Sequence
  source: /note="Description of Artificial Sequence: Synthetic polynucleotide"
gatgttttgatgacccaaactccactctccctgcctgtcagtcttggagatcaagcctccatctcttgcaaatctagtcagagcattgtacatagtaatggaaacacctatttagaatggtacctgcagaaaccaggccagtctccaaagctcctggtctacaaagtttccaatcgattttctggggtcccagacaggttcagtggcagtggatcagggacagatttcacactcaagatcagcagagtggaggctgaggatctgggaacttattactgctttcaaggttcacttgttccttgggcgttcggtggaggcaccaagctggaaatcaaa

SEQ ID NO: 1940 - DNA, 714 bp, Artificial Sequence
  source: /note="Description of Artificial Sequence: Synthetic polynucleotide"
atgaagttgcctgttaggctgttggtgctgatgttctggattcctgcttccagcagtgatgttttgatgacccaaactccactctccctgcctgtcagtcttggagatcaagcctccatctcttgcaaatctagtcagagcattgtacatagtaatggaaacacctatttagaatggtacctgcagaaaccaggccagtctccaaagctcctggtctacaaagtttccaatcgattttctggggtcccagacaggttcagtggcagtggatcagggacagatttcacactcaagatcagcagagtggaggctgaggatctgggaacttattactgctttcaaggttcacttgttccttgggcgttcggtggaggcaccaagctggaaatcaaacgggctgatgctgcaccaactgtatccatcttcccaccatccagtgagcagttaacatctggaggtgcctcagtcgtgtgcttcttgaacaacttctaccccaaagacatcaatgtcaagtggaagattgatggcagtgaacgacaaaatggcgtcctgaacagttggactgatcaggacagcaaagacagcacctacagcatgagcagcaccctcacgttgaccaaggacgagtatgaacgacataacagctatacctgtgaggccactcacaagacatcaacttcacccattgtcaagagcttcaacaggaatgagtgt

SEQ ID NO: 1941 - protein, 112 aa, Artificial Sequence
  source: /note="Description of Artificial Sequence: Synthetic polypeptide"
DVLMTQTPLSLPVSLGDQASISCKSSQSIVHSNGNTYLEWYLQKPGQSPKLLVYKVSNRFSGVPDRFSGSGSGTDFTLKISRVEAEDLGTYYCFQGSLVPWAFGGGTKLEIK

SEQ ID NO: 1942 - DNA, 336 bp, Artificial Sequence
  source: /note="Description of Artificial Sequence: Synthetic polynucleotide"
gatgttttgatgacccaaagcccactctccctgcctgtcacccttggacagcccgcctccatctcttgcaaatctagtcagagcattgtacatagtaatggaaacacctatttagaatggtacctgcagaaaccaggccagtctccacagctcctggtctacaaagtttccaatcgattttctggggtcccagacagattcagtggcagtggatcagggacagatttcacactcaagatcagcagagtggaggctgaggatgtgggaacttattactgctttcaaggctcacttgttccttgggcgttcggtggaggcaccaaggtggaaatcaaa

SEQ ID NO: 1943 - protein, 112 aa, Artificial Sequence
  source: /note="Description of Artificial Sequence: Synthetic polypeptide"
DVLMTQSPLSLPVTLGQPASISCKSSQSIVHSNGNTYLEWYLQKPGQSPQLLVYKVSNRFSGVPDRFSGSGSGTDFTLKISRVEAEDVGTYYCFQGSLVPWAFGGGTKVEIK

SEQ ID NO: 1944 - DNA, 336 bp, Artificial Sequence
  source: /note="Description of Artificial Sequence: Synthetic polynucleotide"
gatgttgtgatgacccaaagcccactctccctgcctgtcacccttggacagcccgcctccatctcttgcaaatctagtcagagcattgtacatagtaatggaaacacctatttagaatggtacctgcagaaaccaggccagtctccacagctcctggtctacaaagtttccaatcgattttctggggtcccagacagattcagtggcagtggatcagggacagatttcacactcaagatcagcagagtggaggctgaggatgtgggaacttattactgctttcaaggctcacttgttccttgggcgttcggtggaggcaccaaggtggaaatcaaa

SEQ ID NO: 1945 - protein, 112 aa, Artificial Sequence
  source: /note="Description of Artificial Sequence: Synthetic polypeptide"
DVVMTQSPLSLPVTLGQPASISCKSSQSIVHSNGNTYLEWYLQKPGQSPQLLVYKVSNRFSGVPDRFSGSGSGTDFTLKISRVEAEDVGTYYCFQGSLVPWAFGGGTKVEIK

SEQ ID NO: 1946 - DNA, 336 bp, Artificial Sequence
  source: /note="Description of Artificial Sequence: Synthetic polynucleotide"
gatgttgtgatgacccaaagcccactctccctgcctgtcacccttggacagcccgcctccatctcttgcaaatctagtcagagcattgtacatagtaatggaaacacctatttagaatggtacctgcagaaaccaggccagtctccacagctcctggtctacaaagtttccaatcgattttctggggtcccagacagattcagtggcagtggatcagggacagatttcacactcaagatcagcagagtggaggctgaggatgtgggagtgtattactgctttcaaggctcacttgttccttgggcgttcggtggaggcaccaaggtggaaatcaaa

SEQ ID NO: 1947 - protein, 112 aa, Artificial Sequence
  source: /note="Description of Artificial Sequence: Synthetic polypeptide"
DVVMTQSPLSLPVTLGQPASISCKSSQSIVHSNGNTYLEWYLQKPGQSPQLLVYKVSNRFSGVPDRFSGSGSGTDFTLKISRVEAEDVGVYYCFQGSLVPWAFGGGTKVEIK

SEQ ID NO: 1948 - DNA, 336 bp, Artificial Sequence
  source: /note="Description of Artificial Sequence: Synthetic polynucleotide"
gatgttgtgatgacccaaagcccactctccctgcctgtcacccttggacagcccgcctccatctcttgcaaatctagtcagagcattgtacatagtaatggaaacacctatttagaatggtacctgcagaaaccaggccagtctccacagctcctgatctacaaagtttccaatcgattttctggggtcccagacagattcagtggcagtggatcagggacagatttcacactcaagatcagcagagtggaggctgaggatgtgggagtgtattactgctttcaaggctcacttgttccttgggcgttcggtggaggcaccaaggtggaaatcaaa

SEQ ID NO: 1949 - protein, 112 aa, Artificial Sequence
  source: /note="Description of Artificial Sequence: Synthetic polypeptide"
DVVMTQSPLSLPVTLGQPASISCKSSQSIVHSNGNTYLEWYLQKPGQSPQLLIYKVSNRFSGVPDRFSGSGSGTDFTLKISRVEAEDVGVYYCFQGSLVPWAFGGGTKVEIK

SEQ ID NO: 1950 - DNA, 714 bp, Artificial Sequence
  source: /note="Description of Artificial Sequence: Synthetic polynucleotide"
atgaagttgcctgttaggctgttggtgctgatgttctggattcctgcttccagcagtgatgttgtgatgacccaaactccactctccctgcctgtcagtcttggagatcaagcctccatctcttgcagatctagtcagagccttgtacacagtaatggaaacacctatttacattggtacctgcagaagccaggccagtctccaaagctcctgatctacaaagtttccaaccgattttctggggtcccagacaggttcagtggcagtggatcagggacagatttcacactcaagatcagcagagtggaggctgaggatctgggagtttatttctgctctcaaagtacacatgttccgctcacgttcggtgctgggaccaagctggagctgaaacgggctgatgctgcaccaactgtatccatcttcccaccatccagtgagcagttaacatctggaggtgcctcagtcgtgtgcttcttgaacaacttctaccccaaagacatcaatgtcaagtggaagattgatggcagtgaacgacaaaatggcgtcctgaacagttggactgatcaggacagcaaagacagcacctacagcatgagcagcaccctcacgttgaccaaggacgagtatgaacgacataacagctatacctgtgaggccactcacaagacatcaacttcacccattgtcaagagcttcaacaggaatgagtgt

SEQ ID NO: 1951 - DNA, 717 bp, Artificial Sequence
  source: /note="Description of Artificial Sequence: Synthetic polynucleotide"
atgaagttgcctgttaggctgttggtgctgatgttctggattcctgcttccagcagtgatgttgtgatgacccaaactccactctccctgcctgtcagtcttggagatcaagcctccatctcttgcagatctagtcagagccttgtacacagtaatggaaacacctatttacattggtacctgcagaagccaggccagtctccaaagctcctgatctacaaagtttccaaccgattttctggggtcccagacaggttcagtggcagtggatcagggacagatttcacactcaagatcagcagagtggaggctgaggatctgggagtttatttctgctctcaaagtacacatgttccgctcacgttcggtgctgggaccaagctggagctgaaacgggctgatgctgcaccaactgtatccatcttcccaccatccagtgagcagttaacatctggaggtgcctcagtcgtgtgcttcttgaacaacttctaccccaaagacatcaatgtcaagtggaagattgatggcagtgaacgacaaaatggcgtcctgaacagttggactgatcaggacagcaaagacagcacctacagcatgagcagcaccctcacgttgaccaaggacgagtatgaacgacataacagctatacctgtgaggccactcacaagacatcaacttcacccattgtcaagagcttcaacaggaatgagtgttag

SEQ ID NO: 1952 - DNA, 657 bp, Artificial Sequence
  source: /note="Description of Artificial Sequence: Synthetic polynucleotide"
gaaattgtgttgacgcagtctccaggcaccctgtctttgtctccaggggaaagagccaccctctcctgcagatctagtcagagccttgtacacagtaatcagaacacctatttacattggtaccagcagaaacctggccaggctcccaggctcctcatctataaagttgacaaccgattttctggcatcccagacaggttcagtggcagtgggtctgggacagacttcactctcaccatcagcagactggagcctgaagattttgcagtgtattactgttctcaaagtacactggttccgctcacgttcggcggagggaccaaggtggagatcaaacggaccgtggctgcaccatctgtcttcatcttcccgccatctgatgagcagttgaaatctggaactgcctctgttgtgtgcctgctgaataacttctatcccagagaggccaaagtacagtggaaggtggataacgccctccaatcgggtaactcccaggagagtgtcacagagcaggacagcaaggacagcacctacagcctcagcagcaccctgacgctgagcaaagcagactacgagaaacacaaagtctacgcctgcgaagtcacccatcagggcctgagctcgcccgtcacaaagagcttcaacaggggagagtgc

SEQ ID NO: 1953 - protein, 238 aa, Artificial Sequence
  source: /note="Description of Artificial Sequence: Synthetic polypeptide"
MKLPVRLLVLMFWIPASSSDVVMTQTPLSLPVSLGDQASISCRSSQSLVHSNGNTYLHWYLQKPGQSPKLLIYKVSNRFSGVPDRFSGSGSGTDFTLKISRVEAEDLGVYFCSQSTHVPLTFGAGTKLELKRADAAPTVSIFPPSSEQLTSGGASVVCFLNNFYPKDINVKWKIDGSERQNGVLNSWTDQDSKDSTYSMSSTLTLTKDEYERHNSYTCEATHKTSTSPIVKSFNRNEC

SEQ ID NO: 1954 - protein, 219 aa, Artificial Sequence
  source: /note="Description of Artificial Sequence: Synthetic polypeptide"
EIVLTQSPGTLSLSPGERATLSCRSSQSLVHSNQNTYLHWYQQKPGQAPRLLIYKVDNRFSGIPDRFSGSGSGTDFTLTISRLEPEDFAVYYCSQSTLVPLTFGGGTKVEIKRTVAAPSVFIFPPSDEQLKSGTASVVCLLNNFYPREAKVQWKVDNALQSGNSQESVTEQDSKDSTYSLSSTLTLSKADYEKHKVYACEVTHQGLSSPVTKSFNRGEC

SEQ ID NO: 1955 - protein, 112 aa, Artificial Sequence
  source: /note="Description of Artificial Sequence: Synthetic polypeptide"
EIVLTQSPGTLSLSPGERATLSCRSSQSLVHSNQNTYLHWYQQKPGQAPRLLIYKVDNRFSGIPDRFSGSGSGTDFTLTISRLEPEDFAVYYCSQSTLVPLTFGGGTKVEIK

SEQ ID NO: 1956 - DNA, 339 bp, Artificial Sequence
  source: /note="Description of Artificial Sequence: Synthetic polynucleotide"
gatgttgtgatgacccagactccactcactttgtcggttaccattggacaaccagcctccatctcttgcaagtcaagtcagagcctcttagatagtgatggaaagacatatttgaattggttgttacagaggccaggccagtctccaaagcgcctaatctatctggtgtctaaactggactctggagtccccgacagattcactggcagtggatcagggacagatttcacactgaaaattagcagagtggaggctgaggatttgggagtttattattgctggcaaggtacacattttcctcggacgttcggtggaggcaccaagctggaaatcaaacgg

SEQ ID NO: 1957 - DNA, 339 bp, Artificial Sequence
  source: /note="Description of Artificial Sequence: Synthetic polynucleotide"
gatgttgtgatgacccagactccactcactttgtcggttaccattggacaaccagcctccatctcttgcaagtcaagtcagagcctcttagatagtgatggaaagacatatttgaattggttgttacagaggccaggccagtctccaaagcgcctaatctatctggtgtctaaactggactctggagtccctgacagattcactggcagtggatcagggacagatttcacactgaaaattagcagagtggaggctgaggatttgggagtttattattgctggcaaggtacacattttcctcggacgttcggtggaggcaccaagctggaaatcaaacgg

SEQ ID NO: 1958 - DNA, 396 bp, Artificial Sequence
  source: /note="Description of Artificial Sequence: Synthetic polynucleotide"
atgagtcctgcccagttcctgtttctgttagtgctctggattcgggaaaccaacggtgatgttgtgatgacccagactccactcactttgtcggttaccattggacaaccagcctccatctcttgcaagtcaagtcagagcctcttagatagtgatggaaagacatatttgaattggttgttacagaggccaggccagtctccaaagcgcctaatctatctggtgtctaaactggactctggagtccccgacagattcactggcagtggatcagggacagatttcacactgaaaattagcagagtggaggctgaggatttgggagtttattattgctggcaaggtacacattttcctcggacgttcggtggaggcaccaagctggaaatcaaacgg

SEQ ID NO: 1959 - DNA, 657 bp, Artificial Sequence
  source: /note="Description of Artificial Sequence: Synthetic polynucleotide"
gatgttgtgatgacccagactccactcactttgtcggttaccattggacaaccagcctccatctcttgcaagtcaagtcagagcctcttagatagtgatggaaagacatatttgaattggttgttacagaggccaggccagtctccaaagcgcctaatctatctggtgtctaaactggactctggagtccctgacagattcactggcagtggatcagggacagatttcacactgaaaattagcagagtggaggctgaggatttgggagtttattattgctggcaaggtacacattttcctcggacgttcggtggaggcaccaagctggaaatcaaacgggctgatgctgcaccaactgtatccatcttcccaccatccagtgagcagttaacatctggaggtgcctcagtcgtgtgcttcttgaacaacttctaccccaaagacatcaatgtcaagtggaagattgatggcagtgaacgacaaaatggcgtcctgaacagttggactgatcaggacagcaaagacagcacctacagcatgagcagcaccctcacgttgaccaaggacgagtatgaacgacataacagctatacctgtgaggccactcacaagacatcaacttcacccattgtcaagagcttcaacaggaatgagtgt

SEQ ID NO: 1960 - DNA, 660 bp, Artificial Sequence
  source: /note="Description of Artificial Sequence: Synthetic polynucleotide"
gatgttgtgatgacccagactccactcactttgtcggttaccattggacaaccagcctccatctcttgcaagtcaagtcagagcctcttagatagtgatggaaagacatatttgaattggttgttacagaggccaggccagtctccaaagcgcctaatctatctggtgtctaaactggactctggagtccctgacagattcactggcagtggatcagggacagatttcacactgaaaattagcagagtggaggctgaggatttgggagtttattattgctggcaaggtacacattttcctcggacgttcggtggaggcaccaagctggaaatcaaacgggctgatgctgcaccaactgtatccatcttcccaccatccagtgagcagttaacatctggaggtgcctcagtcgtgtgcttcttgaacaacttctaccccaaagacatcaatgtcaagtggaagattgatggcagtgaacgacaaaatggcgtcctgaacagttggactgatcaggacagcaaagacagcacctacagcatgagcagcaccctcacgttgaccaaggacgagtatgaacgacataacagctatacctgtgaggccactcacaagacatcaacttcacccattgtcaagagcttcaacaggaatgagtgttag

SEQ ID NO: 1961 - DNA, 678 bp, Artificial Sequence
  source: /note="Description of Artificial Sequence: Synthetic polynucleotide"
gatgttgtgatgacccagactccactcactttgtcggttaccattggacaaccagcctccatctcttgcaagtcaagtcagagcctcttagatagtgatggaaagacatatttgaattggttgttacagaggccaggccagtctccaaagcgcctaatctatctggtgtctaaactggactctggagtccctgacagattcactggcagtggatcagggacagatttcacactgaaaattagcagagtggaggctgaggatttgggagtttattattgctggcaaggtacacattttcctcggacgttcggtggaggcaccaagctggaaatcaaacgggctgatgctgcaccaactgtatccatcttcccaccatccagtgagcagttaacatctggaggtgcctcagtcgtgtgcttcttgaacaacttctaccccaaagacatcaatgtcaagtggaagattgatggcagtgaacgacaaaatggcgtcctgaacagttggactgatcaggacagcaaagacagcacctacagcatgagcagcaccctcacgttgaccaaggacgagtatgaacgacataacagctatacctgtgaggccactcacaagacatcaacttcacccattgtcaagagcttcaacaggaatgagtgtagcgagaaggacgagctgtag

SEQ ID NO: 1962 - DNA, 714 bp, Artificial Sequence
  source: /note="Description of Artificial Sequence: Synthetic polynucleotide"
atgagtcctgcccagttcctgtttctgttagtgctctggattcgggaaaccaacggtgatgttgtgatgacccagactccactcactttgtcggttaccattggacaaccagcctccatctcttgcaagtcaagtcagagcctcttagatagtgatggaaagacatatttgaattggttgttacagaggccaggccagtctccaaagcgcctaatctatctggtgtctaaactggactctggagtccctgacagattcactggcagtggatcagggacagatttcacactgaaaattagcagagtggaggctgaggatttgggagtttattattgctggcaaggtacacattttcctcggacgttcggtggaggcaccaagctggaaatcaaacgggctgatgctgcaccaactgtatccatcttcccaccatccagtgagcagttaacatctggaggtgcctcagtcgtgtgcttcttgaacaacttctaccccaaagacatcaatgtcaagtggaagattgatggcagtgaacgacaaaatggcgtcctgaacagttggactgatcaggacagcaaagacagcacctacagcatgagcagcaccctcacgttgaccaaggacgagtatgaacgacataacagctatacctgtgaggccactcacaagacatcaacttcacccattgtcaagagcttcaacaggaatgagtgt

SEQ ID NO: 1963 - DNA, 720 bp, Artificial Sequence
  source: /note="Description of Artificial Sequence: Synthetic polynucleotide"
atgatgagtcctgcccagttcctgtttctgttagtgctctggattcgggaaaccaacggtgatgttgtgatgacccagactccactcactttgtcggttaccattggacaaccagcctccatctcttgcaagtcaagtcagagcctcttagatagtgatggaaagacatatttgaattggttgttacagaggccaggccagtctccaaagcgcctaatctatctggtgtctaaactggactctggagtccctgacagattcactggcagtggatcagggacagatttcacactgaaaattagcagagtggaggctgaggatttgggagtttattattgctggcaaggtacacattttcctcggacgttcggtggaggcaccaagctggaaatcaaacgggctgatgctgcaccaactgtatccatcttcccaccatccagtgagcagttaacatctggaggtgcctcagtcgtgtgcttcttgaacaacttctaccccaaagacatcaatgtcaagtggaagattgatggcagtgaacgacaaaatggcgtcctgaacagttggactgatcaggacagcaaagacagcacctacagcatgagcagcaccctcacgttgaccaaggacgagtatgaacgacataacagctatacctgtgaggccactcacaagacatcaacttcacccattgtcaagagcttcaacaggaatgagtgttag

SEQ ID NO: 1964 - protein, 239 aa, Artificial Sequence
  source: /note="Description of Artificial Sequence: Synthetic polypeptide"
MMSPAQFLFLLVLWIRETNGDVVMTQTPLTLSVTIGQPASISCKSSQSLLDSDGKTYLNWLLQRPGQSPKRLIYLVSKLDSGVPDRFTGSGSGTDFTLKISRVEAEDLGVYYCWQGTHFPRTFGGGTKLEIKRADAAPTVSIFPPSSEQLTSGGASVVCFLNNFYPKDINVKWKIDGSERQNGVLNSWTDQDSKDSTYSMSSTLTLTKDEYERHNSYTCEATHKTSTSPIVKSFNRNEC

SEQ ID NO: 1965 - DNA, 732 bp, Artificial Sequence
  source: /note="Description of Artificial Sequence: Synthetic polynucleotide"
gccgccaccatgggatggagctggatctttctctttctcctgtcaggaactacaggtgtcctctctgctgccgatgttgtgatgacccagactccactcactttgtcggttaccattggacaaccagcctccatctcttgcaagtcaagtcagagcctcttagatagtgatggaaagacatatttgaattggttgttacagaggccaggccagtctccaaagcgcctaatctatctggtgtctaaactggactctggagtccctgacagattcactggcagtggatcagggacagatttcacactgaaaattagcagagtggaggctgaggatttgggagtttattattgctggcaaggtacacattttcctcggacgttcggtggaggcaccaagctggaaatcaaacgggctgatgctgcaccaactgtatccatcttcccaccatccagtgagcagttaacatctggaggtgcctcagtcgtgtgcttcttgaacaacttctaccccaaagacatcaatgtcaagtggaagattgatggcagtgaacgacaaaatggcgtcctgaacagttggactgatcaggacagcaaagacagcacctacagcatgagcagcaccctcacgttgaccaaggacgagtatgaacgacataacagctatacctgtgaggccactcacaagacatcaacttcacccattgtcaagagcttcaacaggaatgagtgttag

SEQ ID NO: 1966 - DNA, 747 bp, Artificial Sequence
  source: /note="Description of Artificial Sequence: Synthetic polynucleotide"
atgatgagtcctgcccagttcctgtttctgttagtgctctggattcgggaaaccaacggtgatgttgtgatgacccagactccactcactttgtcggttaccattggacaaccagcctccatctcttgcaagtcaagtcagagcctcttagatagtgatggaaagacatatttgaattggttgttacagaggccaggccagtctccaaagcgcctaatctatctggtgtctaaactggactctggagtccctgacagattcactggcagtggatcagggacagatttcacactgaaaattagcagagtggaggctgaggatttgggagtttattattgctggcaaggtacacattttcctcggacgttcggtggaggcaccaagctggaaatcaaacgggctgatgctgcaccaactgtatccatcttcccaccatccagtgagcagttaacatctggaggtgcctcagtcgtgtgcttcttgaacaacttctaccccaaagacatcaatgtcaagtggaagattgatggcagtgaacgacaaaatggcgtcctgaacagttggactgatcaggacagcaaagacagcacctacagcatgagcagcaccctcacgttgaccaaggacgagtatgaacgacataacagctatacctgtgaggccactcacaagacatcaacttcacccattgtcaagagcttcaacaggaatgagtgttacccatacgatgttccagattacgcttag

SEQ ID NO: 1967 - DNA, 336 bp, Mus musculus
gatattgtgatgactcaggctgcaccctctgtacctgtcactcctggagagtcagtttccatctcctgcaggtctagtgagagtctcctgcatagtaatggcaacacttacttgtattggttcctgcagaggccaggccagtctcctcagctcctgatatatcggatgtccaaccttgcctcaggagtcccagacaggttcagtggcagtgggtcaggaactgctttcacactgagaatcagtagagtggaggctgaggatgtgggtgtttattactgtatgcaatatctagaatatccgctcacgttcggtgctgggaccaagctggagctgaaa

SEQ ID NO: 1968 - protein, 112 aa, Mus musculus
DIVMTQAAPSVPVTPGESVSISCRSSESLLHSNGNTYLYWFLQRPGQSPQLLIYRMSNLASGVPDRFSGSGSGTAFTLRISRVEAEDVGVYYCMQYLEYPLTFGAGTKLELK

SEQ ID NO: 1969 - DNA, 321 bp, Mus musculus
gacatcaagatgacccagtctccatcttccatgtatgcatctctaggagagagagtcactatcacttgcaaggcgagtcaggacattaataggtatttaaactggttccagcagaaaccagggaaatctcctaagaccctgatctatcgtgcaaacagattgctagatggggtcccatcaaggttcagtggcagtggatctgggcaagattactctctcaccatcagcagcctggattatgaagatatgggaatttattattgtctacagtatgatgagtttccgctcacgttcggtgatgggaccaagctggagctgaaa

SEQ ID NO: 1970 - protein, 107 aa, Mus musculus
DIKMTQSPSSMYASLGERVTITCKASQDINRYLNWFQQKPGKSPKTLIYRANRLLDGVPSRFSGSGSGQDYSLTISSLDYEDMGIYYCLQYDEFPLTFGDGTKLELK

SEQ ID NO: 1971 - DNA, 321 bp, Artificial Sequence
  source: /note="Description of Artificial Sequence: Synthetic polynucleotide"
gatattaaaatgacccagagcccgagcagcatgtatgcgagcctgggcgaacgcgtgaccattacctgcaaagcgagccaggatattaaccgctatctgaactggtttcagcagaaaccgggcaaaagcccgaaaaccctgatttatcgcgcgaaccgcctgctggatggcgtgccgagccgctttagcggcagcggcagcggccaggattatagcctgaccattagcagcctggattatgaagatatgggcatttattattgcctgcagtatgatgaatttccgctgacctttggcgatggcaccaaactggaactgaaa

SEQ ID NO: 1972 - DNA, 321 bp, Artificial Sequence
  source: /note="Description of Artificial Sequence: Synthetic polynucleotide"
gatatcaagatgacccagagccccagctccatgtatgccagcctgggggagcgggtgaccatcacctgcaaggcctcccaggacatcaaccgctacctgaactggttccagcagaagccaggcaagtcccccaagaccctcatctatcgggccaaccggctgctggatggagtgccctcccgcttctccggcagtggcagcggccaggattacagcctcaccatttcttccctggactatgaggacatgggcatctactactgcctgcagtatgatgagttccccctgacctttggagatggcaccaagctggagctgaag

SEQ ID NO: 1973 - DNA, 321 bp, Artificial Sequence
  source: /note="Description of Artificial Sequence: Synthetic polynucleotide"
gacatcaagatgacccagagccccagcagcatgtacgccagcctgggcgagagggtgaccatcacctgcaaggccagccaggacatcaacaggtacctgaactggttccagcagaagcccggcaagagccccaagaccctgatctacagggccaacaggctgctggacggcgtgcccagcaggttcagcggcagcggcagcggccaggactacagcctgaccatcagcagcctggactacgaggacatgggcatctactactgcctgcagtacgacgagttccccctgaccttcggcgacggcaccaagctggagctgaag

SEQ ID NO: 1974 - DNA, 321 bp, Artificial Sequence
  source: /note="Description of Artificial Sequence: Synthetic polynucleotide"
gacatcaagatgacccagagcccttcctccatgtatgcctccctgggggagcgggtgaccatcacctgcaaggccagccaggatatcaaccgctacctgaactggttccagcagaagccaggcaagagccccaagaccctcatctatcgggccaaccggctgctggatggagtgcccagccgcttctccggcagcggcagtggccaggactacagcctcaccatttccagcctggactatgaggacatgggcatctactactgcctgcagtatgatgagttccccctgacctttggagatggcaccaagctggagctgaag

SEQ ID NO: 1975 - DNA, 321 bp, Artificial Sequence
  source: /note="Description of Artificial Sequence: Synthetic polynucleotide"
gacatcaagatgacccagtcccccagctccatgtacgcctctctgggagagcgggtgaccatcacatgcaaggcttctcaggatatcaaccgctacctgaactggttccagcagaagcccggaaagagccctaagaccctgatctacagggccaacagactgctggacggcgtgccaagcaggttttccggctctggaagcggccaggattactccctgacaatctctagcctggactacgaggatatgggcatctactactgtctgcagtacgacgagttccccctgacctttggagatggcacaaagctggagctgaag

SEQ ID NO: 1976 - DNA, 321 bp, Artificial Sequence
  source: /note="Description of Artificial Sequence: Synthetic polynucleotide"
gacatcaagatgacccagagcccttcctccatgtatgcctccctgggggagcgggtgaccatcacctgcaaggccagccaggatatcaaccgctacctgaactggttccagcagaagcccggcaagagccccaagaccctcatctatcgggccaaccggctgctggatggagtgcccagccgcttctccggcagcggcagtggccaggactacagcctgaccatttcttctctggactatgaggacatgggcatctactactgcctgcagtatgatgagttccccctgacatttggagatggcaccaagctggagctgaag

SEQ ID NO: 1977 - DNA, 321 bp, Artificial Sequence
  source: /note="Description of Artificial Sequence: Synthetic polynucleotide"
cgggctgatgctgcaccaactgtatccatcttcccaccatccagtgagcagttaacatctggaggtgcctcagtcgtgtgcttcttgaacaacttctaccccaaagacatcaatgtcaagtggaagattgatggcagtgaacgacaaaatgacatcaagatgacccagagcccttcctccatgtatgcctccctgggggagcgggtgacaatcacctgcaaggccagccaggatatcaaccgctacctgaactggttccagcagaagccaggcaagagccccaagaccctcatctatagagccaaccggctgctggacggc

SEQ ID NO: 1978 - DNA, 321 bp, Artificial Sequence
  source: /note="Description of Artificial Sequence: Synthetic polynucleotide"
gacatcaagatgacccagagcccttcttccatgtatgcttctttaggagaaagagtgacaatcacctgcaaggccagccaggatatcaaccgctacctgaactggttccagcagaagccaggaaaatctcccaagaccctgatttatagagccaacagactgctggacggcgtgcccagccgcttcagtggatctggaagtggccaggactacagcctgaccatctcttctctggattatgaagacatgggcatctactactgcctgcagtatgatgaatttcctttaacatttggagatggcaccaagctggagctgaag

SEQ ID NO: 1979 - DNA, 321 bp, Artificial Sequence
  source: /note="Description of Artificial Sequence: Synthetic polynucleotide"
gatatcaagatgacccagagcccttcctccatgtatgcctccctgggggagcgggtgaccatcacctgcaaggccagccaggacatcaaccgctacctgaactggttccagcagaagcccggcaagagccccaagaccctcatctatcgggccaaccggctgctggatggagtgcccagccgcttctccggcagcggcagtggccaggattacagcctcaccatttccagcctggactatgaggacatgggcatctactactgcctgcagtatgatgagttccccctgacctttggagatggcaccaagctggagctgaag

SEQ ID NO: 1980 - DNA, 321 bp, Artificial Sequence
  source: /note="Description of Artificial Sequence: Synthetic polynucleotide"
gacatcaagatgacccagagccctagcagcatgtacgccagcctgggcgagagagtgaccatcacctgcaaggccagccaggacatcaacagatacctgaactggttccagcagaagcctggcaagagccctaagaccctgatctacagagccaacagactgctggacggcgtgcctagcagattcagcggcagcggcagcggccaggactacagcctgaccatcagcagcctggactacgaggacatgggcatctactactgcctgcagtacgacgagttccctctgaccttcggcgacggcaccaagctggagctgaag

SEQ ID NO: 1981 - protein, 23 aa, Artificial Sequence
  source: /note="Description of Artificial Sequence: Synthetic peptide"
  VARIANT (3)..(3): /replace="Val"
  SITE (1)..(23): /note="Variant residues given in the sequence have no preference with respect to those in the annotations for variant positions"
DVLMTQSPLSLPVTLGQPASISC

SEQ ID NO: 1982 - protein, 18 aa, Artificial Sequence
  source: /note="Description of Artificial Sequence: Synthetic peptide"
  MOD_RES (9)..(9): Any amino acid
  MOD_RES (12)..(12): Any amino acid
RSGYSSPGXPGXPGSRSR

SEQ ID NO: 1983 - protein, 18 aa, Artificial Sequence
  source: /note="Description of Artificial Sequence: Synthetic peptide"
  MOD_RES (9)..(9): Any amino acid
  MOD_RES (12)..(12): Any amino acid
  MOD_RES (15)..(15): Any amino acid
RSGYSSPGXPGXPGXRSR

SEQ ID NO: 1984 - DNA, 2168 bp, Artificial Sequence
  source: /note="Description of Artificial Sequence: Synthetic polynucleotide"
gaggagccaccatggaatggacctgggtctttctcttcctcctgtcagtaactgcaggtgtccactcccaggttcagctgcagcagtctggagctgagctgatgaagcctggggcctcagtgaagatatcctgcaaggctactggctacacattcagtaactactggatagagtgggtaaagcagaggcctggacatggccttgagtggattggagagattttacctggaagtgatagtattaagtacaatgagaatttcaagggcaaggccacattcactgcagatacatcctccaacacagcctacatgcaactcagcagcctgacatctgaggactctgccgtctattactgtgcaagaagggggaactacccagactactggggccaaggcaccactctcacagtctcctcagccaaaacgacacccccatctgtctatccactggcccctggatctgctgcccaaactaactccatggtgaccctgggatgcctggtcaagggctatttccctgagccagtgacagtgacctggaactctggatccctgtccagcggtgtgcacaccttcccagctgtcctgcagtctgacctctacactctgagcagctcagtgactgtcccctccagcacctggcccagcgagaccgtcacctgcaacgttgcccacccggccagcagcaccaaggtggacaagaaaattgtgcccagggattgtggttgtaagccttgcatatgtacagtcccagaagtatcatctgtcttcatcttccccccaaagcccaaggatgtgctcaccattactctgactcctaaggtcacgtgtgttgtggtagacatcagcaaggatgatcccgaggtccagttcagctggtttgtagatgatgtggaggtgcacacagctcagacgcaaccccgggaggagcagttcaacagcactttccgctcagtcagtgaacttcccatcatgcaccaggactggctcaatggcaaggagttcaaatgcagggtcaacagtgcagctttccctgcccccatcgagaaaaccatctccaaaaccaaaggcagaccgaaggctccacaggtgtacaccattccacctcccaaggagcagatggccaaggataaagtcagtctgacctgcatgataacagacttcttccctgaagacattactgtggagtggcagtggaatgggcagccagcggagaactacaagaacactcagcccatcatggacacagatggctcttacttcgtctacagcaagctcaatgtgcagaagagcaactgggaggcaggaaatactttcacctgctctgtgttacatgagggcctgcacaaccaccatactgagaagagcctctcccactctcctggtagaaagaggcgagagggcagaggaagtcttctaacatgcggtgacgtggaggagaatcccggccctatgaagttgcctgttaggctgttggtgctgatgttctggattcctgcttccagcagtgatgttgtgatgacccaaactccactctccctgcctgtcagtcttggagatcaagcctccatctcttgcagatctagtcagagccttgtacacagtaatggaaacacctatttacattggtacctgcagaagccaggccagtctccaaagctcctgatctacaaagtttccaaccgattttctggggtcccagacaggttcagtggcagtggatcagggacagatttcacactcaagatcagcagagtggaggctgaggatctgggagtttatttctgctctcaaagtacacatgttccgctcacgttcggtgctgggaccaagctggagctgaaacgggctgatgctgcaccaactgtatccatcttcccaccatccagtgagcagttaacatctggaggtgcctcagtcgtgtgcttcttgaacaacttctaccccaaagacatcaatgtcaagtggaagattgatggcagtgaacgacaaaatggcgtcctgaacagttggactgatcaggacagcaaagacagcacctacagcatgagcagcaccctcacgttgaccaaggacgagtatgaacgacataacagctatacctgtgaggccactcacaagacatcaacttcacccattgtcaagagcttcaacaggaatgagtgttag

SEQ ID NO: 1985 - protein, 718 aa, Artificial Sequence
  source: /note="Description of Artificial Sequence: Synthetic polypeptide"
MEWTWVFLFLLSVTAGVHSQVQLQQSGAELMKPGASVKISCKATGYTFSNYWIEWVKQRPGHGLEWIGEILPGSDSIKYNENFKGKATFTADTSSNTAYMQLSSLTSEDSAVYYCARRGNYPDYWGQGTTLTVSSAKTTPPSVYPLAPGSAAQTNSMVTLGCLVKGYFPEPVTVTWNSGSLSSGVHTFPAVLQSDLYTLSSSVTVPSSTWPSETVTCNVAHPASSTKVDKKIVPRDCGCKPCICTVPEVSSVFIFPPKPKDVLTITLTPKVTCVVVDISKDDPEVQFSWFVDDVEVHTAQTQPREEQFNSTFRSVSELPIMHQDWLNGKEFKCRVNSAAFPAPIEKTISKTKGRPKAPQVYTIPPPKEQMAKDKVSLTCMITDFFPEDITVEWQWNGQPAENYKNTQPIMDTDGSYFVYSKLNVQKSNWEAGNTFTCSVLHEGLHNHHTEKSLSHSPGRKRREGRGSLLTCGDVEENPGPMKLPVRLLVLMFWIPASSSDVVMTQTPLSLPVSLGDQASISCRSSQSLVHSNGNTYLHWYLQKPGQSPKLLIYKVSNRFSGVPDRFSGSGSGTDFTLKISRVEAEDLGVYFCSQSTHVPLTFGAGTKLELKRADAAPTVSIFPPSSEQLTSGGASVVCFLNNFYPKDINVKWKIDGSERQNGVLNSWTDQDSKDSTYSMSSTLTLTKDEYERHNSYTCEATHKTSTSPIVKSFNRNEC

SEQ ID NO: 1986 - DNA, 2168 bp, Artificial Sequence
  source: /note="Description of Artificial Sequence: Synthetic polynucleotide"
gaggagccaccatggagtggacctgggtgttcctgttcctgctgagcgtgaccgccggcgtgcactcccaagtccagctgcagcagagcggcgccgagctgatgaagcccggcgccagcgtgaagatcagctgcaaggccaccggctacaccttcagcaactactggatcgagtgggtgaagcagcggcccggccacggcctggagtggatcggcgagatcctgcccggcagcgacagcatcaagtacaacgagaacttcaagggcaaggccaccttcaccgccgacaccagcagcaacaccgcctacatgcagctgagcagcctgaccagcgaggacagcgccgtgtactactgcgcccggcggggcaactaccccgactactggggccagggcaccaccctgaccgtctccagcgccaagaccacaccacccagcgtgtacccactggctccaggcagcgctgcccagaccaacagcatggtgaccctgggctgcctggtgaagggctacttccccgagcccgtgaccgtgacctggaacagcggcagcctgagcagcggcgtgcacaccttcccagccgtgctccaaagcgacctgtacacactgagcagcagcgtgaccgtgcccagcagcacctggcccagcgagaccgtgacctgcaacgtggcccaccccgccagcagcaccaaggtggacaagaagatcgtgccccgggactgcggctgcaagccctgcatctgcaccgtgcccgaagtcagcagcgtgttcatcttcccacccaagcccaaggacgtgctgaccatcaccctgacacccaaagtcacctgcgtggtggtggacatcagcaaggacgaccccgaggtgcagttcagctggttcgtggacgacgtggaggtgcacaccgcccagacccagccccgggaggagcagttcaacagcaccttccggagcgtgagcgagctgcccatcatgcaccaggactggctgaacggcaaggagttcaagtgccgggtgaacagcgccgccttccccgcccccatcgagaagaccatcagcaagaccaagggacggcccaaggctccccaggtgtacaccatcccaccacccaaggagcagatggccaaggacaaagtcagcctgacctgcatgatcaccgacttcttccccgaggacatcaccgtggagtggcagtggaacggccagcccgccgagaactacaagaacacccagcccatcatggacaccgacggcagctacttcgtgtacagcaagctgaacgtgcagaagagcaactgggaggccggcaacaccttcacctgcagcgtgctgcacgagggcctgcacaaccatcacaccgagaagagcctgagccacagcccaggacggaagcgccgcgagggcaggggcagcctgctgacctgcggcgacgtggaggagaacccaggccccatgaagctgcccgtgcggctgctggtgctgatgttctggatccccgccagcagcagcgacgtggtgatgacccagaccccactgagcctgcccgtgagcctgggcgaccaggccagcatcagctgccggagcagccagagcctggtgcacagcaacggcaacacctacctgcactggtacctgcagaagcccggccagagccccaagctgctgatctacaaagtcagcaaccggttcagcggcgtgcccgaccggttcagcggcagcggcagcggcaccgacttcaccctgaagatcagccgggtggaggccgaggacctgggcgtgtacttctgcagccagagcacccacgtgcccctgaccttcggcgccggcaccaagctggagctgaagcgggccgacgccgctcccaccgtcagcatcttcccaccctcctccgagcagctgaccagcggaggcgccagcgtggtgtgcttcctgaacaacttctaccccaaggacatcaacgtgaagtggaagatcgacggcagcgagcggcagaacggcgtgctgaacagctggaccgaccaggacagcaaggacagcacctacagcatgagcagcaccctgaccctgaccaaggacgagtacgagcggcacaacagctacacctgcgaggccacccacaagaccagcaccagccccatcgtgaagagcttcaaccggaacgagtgctga

SEQ ID NO: 1987 - DNA, 2174 bp, Artificial Sequence
  source: /note="Description of Artificial Sequence: Synthetic polynucleotide"
gaggagccaccatgggatggagctggatctttctctttctcctgtcaggaactacaggtgtcctctctgaggtccagctgcaacagtctggacctgagctggtgaagcctggggcttcagtgaagatatcctgcaagacttctggatacacattcactgaatacaccatacactgggtgaagcagagccatggagagagccttgagtggattggaggtattaatccaaacgatggtggtactatttacaaccagaagttcaagggcaaggccacattgactgtagacaagtcctccaaaacagcctacatggagctccgcagcctgacatctgaggattctgcagtcttttactgtgcaagagggccctccgccaggtttccttactggggccaagggactctggtcactgtctctgcagccaaaacgacacccccatctgtctatccactggcccctggatctgctgcccaaactaactccatggtgaccctgggatgcctggtcaagggctatttccctgagccagtgacagtgacctggaactctggatccctgtccagcggtgtgcacaccttcccagctgtcctgcagtctgacctctacactctgagcagctcagtgactgtcccctccagcacctggcccagcgagaccgtcacctgcaacgttgcccacccggccagcagcaccaaggtggacaagaaaattgtgcccagggattgtggttgtaagccttgcatatgtacagtcccagaagtatcatctgtcttcatcttccccccaaagcccaaggatgtgctcaccattactctgactcctaaggtcacgtgtgttgtggtagacatcagcaaggatgatcccgaggtccagttcagctggtttgtagatgatgtggaggtgcacacagctcagacgcaaccccgggaggagcagttcaacagcactttccgctcagtcagtgaacttcccatcatgcaccaggactggctcaatggcaaggagttcaaatgcagggtcaacagtgcagctttccctgcccccatcgagaaaaccatctccaaaaccaaaggcagaccgaaggctccacaggtgtacaccattccacctcccaaggagcagatggccaaggataaagtcagtctgacctgcatgataacagacttcttccctgaagacattactgtggagtggcagtggaatgggcagccagcggagaactacaagaacactcagcccatcatggacacagatggctcttacttcgtctacagcaagctcaatgtgcagaagagcaactgggaggcaggaaatactttcacctgctctgtgttacatgagggcctgcacaaccaccatactgagaagagcctctcccactctcctggtagaaagaggcgagagggcagaggaagtcttctaacatgcggtgacgtggaggagaatcccggccctatgatgagtcctgcccagttcctgtttctgttagtgctctggattcgggaaaccaacggtgatgttgtgatgacccagactccactcactttgtcggttaccattggacaaccagcctccatctcttgcaagtcaagtcagagcctcttagatagtgatggaaagacatatttgaattggttgttacagaggccaggccagtctccaaagcgcctaatctatctggtgtctaaactggactctggagtccctgacagattcactggcagtggatcagggacagatttcacactgaaaattagcagagtggaggctgaggatttgggagtttattattgctggcaaggtacacattttcctcggacgttcggtggaggcaccaagctggaaatcaaacgggctgatgctgcaccaactgtatccatcttcccaccatccagtgagcagttaacatctggaggtgcctcagtcgtgtgcttcttgaacaacttctaccccaaagacatcaatgtcaagtggaagattgatggcagtgaacgacaaaatggcgtcctgaacagttggactgatcaggacagcaaagacagcacctacagcatgagcagcaccctcacgttgaccaaggacgagtatgaacgacataacagctatacctgtgaggccactcacaagacatcaacttcacccattgtcaagagcttcaacaggaatgagtgttag

SEQ ID NO: 1988 - protein, 720 aa, Artificial Sequence
  source: /note="Description of Artificial Sequence: Synthetic polypeptide"
MGWSWIFLFLLSGTTGVLSEVQLQQSGPELVKPGASVKISCKTSGYTFTEYTIHWVKQSHGESLEWIGGINPNDGGTIYNQKFKGKATLTVDKSSKTAYMELRSLTSEDSAVFYCARGPSARFPYWGQGTLVTVSAAKTTPPSVYPLAPGSAAQTNSMVTLGCLVKGYFPEPVTVTWNSGSLSSGVHTFPAVLQSDLYTLSSSVTVPSSTWPSETVTCNVAHPASSTKVDKKIVPRDCGCKPCICTVPEVSSVFIFPPKPKDVLTITLTPKVTCVVVDISKDDPEVQFSWFVDDVEVHTAQTQPREEQFNSTFRSVSELPIMHQDWLNGKEFKCRVNSAAFPAPIEKTISKTKGRPKAPQVYTIPPPKEQMAKDKVSLTCMITDFFPEDITVEWQWNGQPAENYKNTQPIMDTDGSYFVYSKLNVQKSNWEAGNTFTCSVLHEGLHNHHTEKSLSHSPGRKRREGRGSLLTCGDVEENPGPMMSPAQFLFLLVLWIRETNGDVVMTQTPLTLSVTIGQPASISCKSSQSLLDSDGKTYLNWLLQRPGQSPKRLIYLVSKLDSGVPDRFTGSGSGTDFTLKISRVEAEDLGVYYCWQGTHFPRTFGGGTKLEIKRADAAPTVSIFPPSSEQLTSGGASVVCFLNNFYPKDINVKWKIDGSERQNGVLNSWTDQDSKDSTYSMSSTLTLTKDEYERHNSYTCEATHKTSTSPIVKSFNRNEC

SEQ ID NO: 1989 - DNA, 2174 bp, Artificial Sequence
  source: /note="Description of Artificial Sequence: Synthetic polynucleotide"
gaggagccaccatgggctggagctggatcttcctgttcctgctgagcggcaccaccggcgtgctgagcgaggtgcagctgcagcagagcggccccgagctggtgaagcccggcgccagcgtgaagatcagctgcaagaccagcggctacaccttcaccgagtacaccatccactgggtgaagcagagccacggcgagagcctggagtggatcggcggcatcaaccccaacgacggcggcaccatctacaaccagaagttcaagggcaaggccaccctgaccgtggacaagagcagcaagaccgcctacatggagctgcggagcctgaccagcgaggacagcgccgtgttctactgcgctcggggccccagcgcccggttcccctactggggccagggcaccctggtgaccgtgagcgccgccaagaccacaccacccagcgtgtacccactggctccaggcagcgctgcccaaaccaacagcatggtgaccctgggctgcctggtgaagggctacttccccgagcccgtgaccgtgacctggaacagcggcagcctgagcagcggcgtgcacaccttcccagctgtgctccagtccgacctgtacaccctgagcagcagcgtgaccgtgcccagcagcacctggcccagcgagaccgtgacctgcaacgtggcccaccccgccagcagcaccaaggtggacaagaagatcgtgccccgggactgcggctgcaagccctgcatctgcaccgtgcctgaggtctccagcgtgttcatcttcccccccaagcccaaggacgtgctgaccatcaccctgacccctaaagtcacctgcgtggtggtggacatcagcaaggacgaccccgaggtgcagttcagctggttcgtggacgacgtggaggtgcacaccgcccagacccagccccgggaggagcagttcaacagcaccttccggagcgtgagcgagctgcccatcatgcaccaggactggctgaacggcaaggagttcaagtgccgggtgaacagcgccgccttccccgcccccatcgagaagaccatcagcaagaccaagggccgacccaaggccccacaggtgtacaccatcccaccacccaaggagcagatggccaaggacaaagtcagcctgacctgcatgatcaccgacttcttccccgaggacatcaccgtggagtggcagtggaacggccagccagccgagaactacaagaacacccagcccatcatggacaccgacggcagctacttcgtgtacagcaagctgaacgtgcagaagagcaactgggaggccggcaacaccttcacctgcagcgtgctgcacgagggcctgcacaaccaccacaccgagaagagcctgagccacagccccggacggaagcggcgcgagggacggggcagcctgctgacctgcggcgacgtggaggagaacccaggccccatgatgagcccagcccagttcctgttcctgctggtgctgtggatccgggagaccaacggcgacgtggtgatgacccagaccccactgaccctgagcgtgaccatcggccagcccgccagcatcagctgcaagagcagccagagcctgctggacagcgacggcaagacctacctgaactggctgctgcagcggccaggccagagccccaagcggctgatctatctcgtcagcaagctggacagcggcgtgcccgaccggttcaccggcagcggcagcggcaccgacttcaccctgaagatcagccgggtggaggccgaggacctgggcgtgtactactgctggcagggcacccactttccccggaccttcggcggcggcaccaagctggagatcaagcgggccgacgccgccccaacagtcagcatctttccaccatcctccgagcagctcaccagcggcggcgccagcgtggtgtgcttcctgaacaacttctaccccaaggacatcaacgtgaagtggaagatcgacggcagcgagcggcagaacggcgtgctgaacagctggaccgaccaggacagcaaggacagcacctacagcatgagcagcaccctgaccctgaccaaggacgagtacgagcggcacaacagctacacctgcgaggccacccacaagaccagcaccagccccatcgtgaagagcttcaaccggaacgagtgctga

SEQ ID NO: 1990 - DNA, 4450 bp, Artificial Sequence
  source: /note="Description of Artificial Sequence: Synthetic polynucleotide"
ctgcgcgctcgctcgctcactgaggccgcccgggcaaagcccgggcgtcgggcgacctttggtcgcccggcctcagtgagcgagcgagcgcgcagagagggagtggccaactccatcactaggggttccttgtagttaatgattaacccgccatgctacttatctaccagggtaatggggatcctctagaactatagctagtcgacataacgcgtctagttattaatagtaatcaattacggggtcattagttcatagcccatatatggagttccgcgttacataacttacggtaaatggcccgcctggctgaccgcccaacgacccccgcccattgacgtcaataatgacgtatgttcccatagtaacgccaatagggactttccattgacgtcaatgggtggagtatttacggtaaactgcccacttggcagtacatcaagtgtatcatatgccaagtacgccccctattgacgtcaatgacggtaaatggcccgcctggcattatgcccagtacatgaccttatgggactttcctacttggcagtacatctacgtattagtcatcgctattaccatggtcgaggtgagccccacgttctgcttcactctccccatctcccccccctccccacccccaattttgtatttatttattttttaattattttgtgcagcgatgggggcggggggggggggggggcgcgcgccaggcggggcggggcggggcgaggggcggggcggggcgaggcggagaggtgcggcggcagccaatcagagcggcgcgctccgaaagtttccttttatggcgaggcggcggcggcggcggccctataaaaagcgaagcgcgcggcgggcgggagtcgctgcgcgctgccttcgccccgtgccccgctccgccgccgcctcgcgccgcccgccccggctctgactgaccgcgttactcccacaggtgagcgggcgggacggcccttctcctccgggctgtaattagcgcttggtttaatgacggcttgtttcttttctgtggctgcgtgaaagccttgaggggctccgggagggccctttgtgcggggggagcggctcggggggtgcgtgcgtgtgtgtgtgcgtggggagcgccgcgtgcggctccgcgctgcccggcggctgtgagcgctgcgggcgcggcgcggggctttgtgcgctccgcagtgtgcgcgaggggagcgcggccgggggcggtgccccgcggtgcggggggggctgcgaggggaacaaaggctgcgtgcggggtgtgtgcgtgggggggtgagcagggggtgtgggcgcgtcggtcgggctgcaaccccccctgcacccccctccccgagttgctgagcacggcccggcttcgggtgcggggctccgtacggggcgtggcgcggggctcgccgtgccgggcggggggtggcggcaggtgggggtgccgggcggggcggggccgcctcgggccggggagggctcgggggaggggcgcggcggcccccggagcgccggcggctgtcgaggcgcggcgagccgcagccattgccttttatggtaatcgtgcgagagggcgcagggacttcctttgtcccaaatctgtgcggagccgaaatctgggaggcgccgccgcaccccctctagcgggcgcggggcgaagcggtgcggcgccggcaggaaggaaatgggcggggagggccttcgtgcgtcgccgcgccgccgtccccttctccctctccagcctcggggctgtccgcggggggacggctgccttcgggggggacggggcagggcggggttcggcttctggcgtgtgaccggcggctctagagcctctgctaaccatgttcatgccttcttctttttcctacagctcctgggcaacgtgctggttattgtgctgtctcatcattttggcaaagaattcgggattcgaaccggtgccgccaccatgaacttcgggctcagcttgattttccttgtccttgttttaaaaggtgtccagtgtgaggttcatctggtggagtctgggggagccttagtgaagcctggagggtccctgaaactctcctgtgcagcctctggattcagtttcagtaaatatggcatgtcttgggttcgccagactccagacaagaggctggagtgggtcgcaaccattagtagtagtgggagtcgcacctactatccagacagtgtgaagggccaattcaccatctccagagacaatgccaagaacaccctgtacctgcaaatgagcagtctgaagtctgaggacacagccatgtattactgttcaattagctgggacggtgctatggactactggggtcaagggacctcagtcaccgtctcctcagccaaaacgacacccccatctgtctatccactggcccctggatctgctgcccaaactaactccatggtgaccctgggatgcctggtcaagggctatttccctgagccagtgacagtgacctggaactctggatccctgtccagcggtgtgcacaccttcccagctgtcctgcagtctgacctctacactctgagcagctcagtgactgtcccctccagcacctggcccagcgagaccgtcacctgcaacgttgcccacccggccagcagcaccaaggtggacaagaaaattgtgcccagggattgtggttgtaagccttgcatatgtacagtcccagaagtatcatctgtcttcatcttccccccaaagcccaaggatgtgctcaccattactctgactcctaaggtcacgtgtgttgtggtagacatcagcaaggatgatcccgaggtccagttcagctggtttgtagatgatgtggaggtgcacacagctcagacgcaaccccgggaggagcagttcaacagcactttccgctcagtcagtgaacttcccatcatgcaccaggactggctcaatggcaaggagttcaaatgcagggtcaacagtgcagctttccctgcccccatcgagaaaaccatctccaaaaccaaaggcagaccgaaggctccacaggtgtacaccattccacctcccaaggagcagatggccaaggataaagtcagtctgacctgcatgataacagacttcttccctgaagacattactgtggagtggcagtggaatgggcagccagcggagaactacaagaacactcagcccatcatggacacagatggctcttacttcgtctacagcaagctcaatgtgcagaagagcaactgggaggcaggaaatactttcacctgctctgtgttacatgagggcctgcacaaccaccatactgagaagagcctctcccactctcctggtagaaagaggcgagagggcagaggaagtcttctaacatgcggtgacgtggaggagaatcccggccctatgaagttgcctgttaggctgttggtgctgatgttctggattcctgcttccagcagtgatgttttgatgacccaaactccactctccctgcctgtcagtcttggagatcaagcctccatctcttgcaaatctagtcagagcattgtacatagtaatggaaacacctatttagaatggtacctgcagaaaccaggccagtctccaaagctcctggtctacaaagtttccaatcgattttctggggtcccagacaggttcagtggcagtggatcagggacagatttcacactcaagatcagcagagtggaggctgaggatctgggaacttattactgctttcaaggttcacttgttccttgggcgttcggtggaggcaccaagctggaaatcaaacgggctgatgctgcaccaactgtatccatcttcccaccatccagtgagcagttaacatctggaggtgcctcagtcgtgtgcttcttgaacaacttctaccccaaagacatcaatgtcaagtggaagattgatggcagtgaacgacaaaatggcgtcctgaacagttggactgatcaggacagcaaagacagcacctacagcatgagcagcaccctcacgttgaccaaggacgagtatgaacgacataacagctatacctgtgaggccactcacaagacatcaacttcacccattgtcaagagcttcaacaggaatgagtgttagtaactcgaggacggggtgaactacgcctgaggatccgatctttttccctctgccaaaaattatggggacatcatgaagccccttgagcatctgacttctggctaataaaggaaatttattttcattgcaatagtgtgttggaattttttgtgtctctcactcggcctaggtagataagtagcatggcgggttaatcattaactacaaggaacccctagtgatggagttggccactccctctctgcgcgctcgctcgctcactgaggccgggcgaccaaaggtcgcccgacgcccgggctttgcccgggcggcctcagtgagcgagcgagcgcgcag

SEQ ID NO: 1991 - DNA, 4471 bp, Artificial Sequence
  source: /note="Description of Artificial Sequence: Synthetic polynucleotide"
ctgcgcgctcgctcgctcactgaggccgcccgggcaaagcccgggcgtcgggcgacctttggtcgcccggcctcagtgagcgagcgagcgcgcagagagggagtggccaactccatcactaggggttccttgtagttaatgattaacccgccatgctacttatctaccagggtaatggggatcctctagaactatagctagtcgacataacgcgtctagttattaatagtaatcaattacggggtcattagttcatagcccatatatggagttccgcgttacataacttacggtaaatggcccgcctggctgaccgcccaacgacccccgcccattgacgtcaataatgacgtatgttcccatagtaacgccaatagggactttccattgacgtcaatgggtggagtatttacggtaaactgcccacttggcagtacatcaagtgtatcatatgccaagtacgccccctattgacgtcaatgacggtaaatggcccgcctggcattatgcccagtacatgaccttatgggactttcctacttggcagtacatctacgtattagtcatcgctattaccatggtcgaggtgagccccacgttctgcttcactctccccatctcccccccctccccacccccaattttgtatttatttattttttaattattttgtgcagcgatgggggcggggggggggggggggcgcgcgccaggcggggcggggcggggcgaggggcggggcggggcgaggcggagaggtgcggcggcagccaatcagagcggcgcgctccgaaagtttccttttatggcgaggcggcggcggcggcggccctataaaaagcgaagcgcgcggcgggcgggagtcgctgcgcgctgccttcgccccgtgccccgctccgccgccgcctcgcgccgcccgccccggctctgactgaccgcgttactcccacaggtgagcgggcgggacggcccttctcctccgggctgtaattagcgcttggtttaatgacggcttgtttcttttctgtggctgcgtgaaagccttgaggggctccgggagggccctttgtgcggggggagcggctcggggggtgcgtgcgtgtgtgtgtgcgtggggagcgccgcgtgcggctccgcgctgcccggcggctgtgagcgctgcgggcgcggcgcggggctttgtgcgctccgcagtgtgcgcgaggggagcgcggccgggggcggtgccccgcggtgcggggggggctgcgaggggaacaaaggctgcgtgcggggtgtgtgcgtgggggggtgagcagggggtgtgggcgcgtcggtcgggctgcaaccccccctgcacccccctccccgagttgctgagcacggcccggcttcgggtgcggggctccgtacggggcgtggcgcggggctcgccgtgccgggcggggggtggcggcaggtgggggtgccgggcggggcggggccgcctcgggccggggagggctcgggggaggggcgcggcggcccccggagcgccggcggctgtcgaggcgcggcgagccgcagccattgccttttatggtaatcgtgcgagagggcgcagggacttcctttgtcccaaatctgtgcggagccgaaatctgggaggcgccgccgcaccccctctagcgggcgcggggcgaagcggtgcggcgccggcaggaaggaaatgggcggggagggccttcgtgcgtcgccgcgccgccgtccccttctccctctccagcctcggggctgtccgcggggggacggctgccttcgggggggacggggcagggcggggttcggcttctggcgtgtgaccggcggctctagagcctctgctaaccatgttcatgccttcttctttttcctacagctcctgggcaacgtgctggttattgtgctgtctcatcattttggcaaagaattcgggattcgaaccggtgccgccaccatgaacttcgggctcagcttgattttccttgtccttgttttaaaaggtgtccagtgtgaggttcatctggtggagtctgggggagccttagtgaagcctggagggtccctgaaactctcctgtgcagcctctggattcagtttcagtaaatatggcatgtcttgggttcgccagactccagacaagaggctggagtgggtcgcaaccattagtagtagtgggagtcgcacctactatccagacagtgtgaagggccaattcaccatctccagagacaatgccaagaacaccctgtacctgcaaatgagcagtctgaagtctgaggacacagccatgtattactgttcaattagctgggacggtgctatggactactggggtcaagggacctcagtcaccgtctcctcagccaaaacgacacccccatctgtctatccactggcccctggatctgctgcccaaactaactccatggtgaccctgggatgcctggtcaagggctatttccctgagccagtgacagtgacctggaactctggatccctgtccagcggtgtgcacaccttcccagctgtcctgcagtctgacctctacactctgagcagctcagtgactgtcccctccagcacctggcccagcgagaccgtcacctgcaacgttgcccacccggccagcagcaccaaggtggacaagaaaattgtgcccagggattgtggttgtaagccttgcatatgtacagtcccagaagtatcatctgtcttcatcttccccccaaagcccaaggatgtgctcaccattactctgactcctaaggtcacgtgtgttgtggtagacatcagcaaggatgatcccgaggtccagttcagctggtttgtagatgatgtggaggtgcacacagctcagacgcaaccccgggaggagcagttcaacagcactttccgctcagtcagtgaacttcccatcatgcaccaggactggctcaatggcaaggagttcaaatgcagggtcaacagtgcagctttccctgcccccatcgagaaaaccatctccaaaaccaaaggcagaccgaaggctccacaggtgtacaccattccacctcccaaggagcagatggccaaggataaagtcagtctgacctgcatgataacagacttcttccctgaagacattactgtggagtggcagtggaatgggcagccagcggagaactacaagaacactcagcccatcatggacacagatggctcttacttcgtctacagcaagctcaatgtgcagaagagcaactgggaggcaggaaatactttcacctgctctgtgttacatgagggcctgcacaaccaccatactgagaagagcctctcccactctcctggtcgggccaagcggggaagcggagtgaaacagactttgaattttgaccttctcaagttggcgggagacgtggagtccaaccctggacctatgaagttgcctgttaggctgttggtgctgatgttctggattcctgcttccagcagtgatgttttgatgacccaaactccactctccctgcctgtcagtcttggagatcaagcctccatctcttgcaaatctagtcagagcattgtacatagtaatggaaacacctatttagaatggtacctgcagaaaccaggccagtctccaaagctcctggtctacaaagtttccaatcgattttctggggtcccagacaggttcagtggcagtggatcagggacagatttcacactcaagatcagcagagtggaggctgaggatctgggaacttattactgctttcaaggttcacttgttccttgggcgttcggtggaggcaccaagctggaaatcaaacgggctgatgctgcaccaactgtatccatcttcccaccatccagtgagcagttaacatctggaggtgcctcagtcgtgtgcttcttgaacaacttctaccccaaagacatcaatgtcaagtggaagattgatggcagtgaacgacaaaatggcgtcctgaacagttggactgatcaggacagcaaagacagcacctacagcatgagcagcaccctcacgttgaccaaggacgagtatgaacgacataacagctatacctgtgaggccactcacaagacatcaacttcacccattgtcaagagcttcaacaggaatgagtgttagtaactcgaggacggggtgaactacgcctgaggatccgatctttttccctctgccaaaaattatggggacatcatgaagccccttgagcatctgacttctggctaataaaggaaatttattttcattgcaatagtgtgttggaattttttgtgtctctcactcggcctaggtagataagtagcatggcgggttaatcattaactacaaggaacccctagtgatggagttggccactccctctctgcgcgctcgctcgctcactgaggccgggcgaccaaaggtcgcccgacgcccgggctttgcccgggcggcctcagtgagcgagcgagcgcgcag

SEQ ID NO: 1992 - DNA, 3983 bp, Artificial Sequence
  source: /note="Description of Artificial Sequence: Synthetic polynucleotide"
ctgcgcgctcgctcgctcactgaggccgcccgggcaaagcccgggcgtcgggcgacctttggtcgcccggcctcagtgagcgagcgagcgcgcagagagggagtggccaactccatcactaggggttccttgtagttaatgattaacccgccatgctacttatctaccagggtaatggggatcctctagaactatagctagtcgacattgattattgactagttattaatagtaatcaattacggggtcattagttcatagcccatatatggagttccgcgttacataacttacggtaaatggcccgcctggctgaccgcccaacgacccccgcccattgacgtcaataatgacgtatgttcccatagtaacgccaatagggactttccattgacgtcaatgggtggagtatttacggtaaactgcccacttggcagtacatcaagtgtatcatatgccaagtacgccccctattgacgtcaatgacggtaaatggcccgcctggcattatgcccagtacatgaccttatgggactttcctacttggcagtacatctacgtattagtcatcgctattaccatgtcgaggccacgttctgcttcactctccccatctcccccccctccccacccccaattttgtatttatttattttttaattattttgtgcagcgatgggggcggggggggggggcgcgcgccaggcggggcggggcggggcgaggggcggggcggggcgaggcggagaggtgcggcggcagccaatcagagcggcgcgctccgaaagtttccttttatggcgaggcggcggcggcggcggccctataaaaagcgaagcgcgcggcgggcgggagcaagcttcgtttagtgaaccgtcagatcgcctggagacgccatccacgctgttttgacctccatagaagacaccgggaccgatccagcctccgcggattcgaatcccggccgggaacggtgcattggaacgcggattccccgtgccaagagtgacgtaagtaccgcctatagagtctataggcccacaaaaaatgctttcttcttttaatatacttttttgtttatcttatttctaatactttccctaatctctttctttcagggcaataatgatacaatgtatcatgcctctttgcaccattctaaagaataacagtgataatttctgggttaaggcaatagcaatatttctgcatataaatatttctgcatataaattgtaactgatgtaagaggtttcatattgctaatagcagctacaatccagctaccattctgcttttattttatggttgggataaggctggattattctgagtccaagctaggcccttttgctaatcatgttcatacctcttatcttcctcccacagctcctgggcaacgtgctggtctgtgtgctggcccatcactttggcaaagaattgggattcgaaccggtgccgccaccatgaacttcgggctcagcttgattttccttgtccttgttttaaaaggtgtccagtgtgaggttcatctggtggagtctgggggagccttagtgaagcctggagggtccctgaaactctcctgtgcagcctctggattcagtttcagtaaatatggcatgtcttgggttcgccagactccagacaagaggctggagtgggtcgcaaccattagtagtagtgggagtcgcacctactatccagacagtgtgaagggccaattcaccatctccagagacaatgccaagaacaccctgtacctgcaaatgagcagtctgaagtctgaggacacagccatgtattactgttcaattagctgggacggtgctatggactactggggtcaagggacctcagtcaccgtctcctcagccaaaacgacacccccatctgtctatccactggcccctggatctgctgcccaaactaactccatggtgaccctgggatgcctggtcaagggctatttccctgagccagtgacagtgacctggaactctggatccctgtccagcggtgtgcacaccttcccagctgtcctgcagtctgacctctacactctgagcagctcagtgactgtcccctccagcacctggcccagcgagaccgtcacctgcaacgttgcccacccggccagcagcaccaaggtggacaagaaaattgtgcccagggattgtggttgtaagccttgcatatgtacagtcccagaagtatcatctgtcttcatcttccccccaaagcccaaggatgtgctcaccattactctgactcctaaggtcacgtgtgttgtggtagacatcagcaaggatgatcccgaggtccagttcagctggtttgtagatgatgtggaggtgcacacagctcagacgcaaccccgggaggagcagttcaacagcactttccgctcagtcagtgaacttcccatcatgcaccaggactggctcaatggcaaggagttcaaatgcagggtcaacagtgcagctttccctgcccccatcgagaaaaccatctccaaaaccaaaggcagaccgaaggctccacaggtgtacaccattccacctcccaaggagcagatggccaaggataaagtcagtctgacctgcatgataacagacttcttccctgaagacattactgtggagtggcagtggaatgggcagccagcggagaactacaagaacactcagcccatcatggacacagatggctcttacttcgtctacagcaagctcaatgtgcagaagagcaactgggaggcaggaaatactttcacctgctctgtgttacatgagggcctgcacaaccaccatactgagaagagcctctcccactctcctggtcgggccaagcggggaagcggagtgaaacagactttgaattttgaccttctcaagttggcgggagacgtggagtccaaccctggacctatgaagttgcctgttaggctgttggtgctgatgttctggattcctgcttccagcagtgatgttttgatgacccaaactccactctccctgcctgtcagtcttggagatcaagcctccatctcttgcaaatctagtcagagcattgtacatagtaatggaaacacctatttagaatggtacctgcagaaaccaggccagtctccaaagctcctggtctacaaagtttccaatcgattttctggggtcccagacaggttcagtggcagtggatcagggacagatttcacactcaagatcagcagagtggaggctgaggatctgggaacttattactgctttcaaggttcacttgttccttgggcgttcggtggaggcaccaagctggaaatcaaacgggctgatgctgcaccaactgtatccatcttcccaccatccagtgagcagttaacatctggaggtgcctcagtcgtgtgcttcttgaacaacttctaccccaaagacatcaatgtcaagtggaagattgatggcagtgaacgacaaaatggcgtcctgaacagttggactgatcaggacagcaaagacagcacctacagcatgagcagcaccctcacgttgaccaaggacgagtatgaacgacataacagctatacctgtgaggccactcacaagacatcaacttcacccattgtcaagagcttcaacaggaatgagtgttagtaactcgaggacggggtgaactacgcctgaggatccgatctttttccctctgccaaaaattatggggacatcatgaagccccttgagcatctgacttctggctaataaaggaaatttattttcattgcaatagtgtgttggaattttttgtgtctctcactcggcctaggtagataagtagcatggcgggttaatcattaactacaaggaacccctagtgatggagttggccactccctctctgcgcgctcgctcgctcactgaggccgggcgaccaaaggtcgcccgacgcccgggctttgcccgggcggcctcagtgagcgagcgagcgcgcag

SEQ ID NO: 1993 - DNA, 3962 bp, Artificial Sequence
  source: /note="Description of Artificial Sequence: Synthetic polynucleotide"
ctgcgcgctcgctcgctcactgaggccgcccgggcaaagcccgggcgtcgggcgacctttggtcgcccggcctcagtgagcgagcgagcgcgcagagagggagtggccaactccatcactaggggttccttgtagttaatgattaacccgccatgctacttatctaccagggtaatggggatcctctagaactatagctagtcgacattgattattgactagttattaatagtaatcaattacggggtcattagttcatagcccatatatggagttccgcgttacataacttacggtaaatggcccgcctggctgaccgcccaacgacccccgcccattgacgtcaataatgacgtatgttcccatagtaacgccaatagggactttccattgacgtcaatgggtggagtatttacggtaaactgcccacttggcagtacatcaagtgtatcatatgccaagtacgccccctattgacgtcaatgacggtaaatggcccgcctggcattatgcccagtacatgaccttatgggactttcctacttggcagtacatctacgtattagtcatcgctattaccatgtcgaggccacgttctgcttcactctccccatctcccccccctccccacccccaattttgtatttatttattttttaattattttgtgcagcgatgggggcggggggggggggcgcgcgccaggcggggcggggcggggcgaggggcggggcggggcgaggcggagaggtgcggcggcagccaatcagagcggcgcgctccgaaagtttccttttatggcgaggcggcggcggcggcggccctataaaaagcgaagcgcgcggcgggcgggagcaagcttcgtttagtgaaccgtcagatcgcctggagacgccatccacgctgttttgacctccatagaagacaccgggaccgatccagcctccgcggattcgaatcccggccgggaacggtgcattggaacgcggattccccgtgccaagagtgacgtaagtaccgcctatagagtctataggcccacaaaaaatgctttcttcttttaatatacttttttgtttatcttatttctaatactttccctaatctctttctttcagggcaataatgatacaatgtatcatgcctctttgcaccattctaaagaataacagtgataatttctgggttaaggcaatagcaatatttctgcatataaatatttctgcatataaattgtaactgatgtaagaggtttcatattgctaatagcagctacaatccagctaccattctgcttttattttatggttgggataaggctggattattctgagtccaagctaggcccttttgctaatcatgttcatacctcttatcttcctcccacagctcctgggcaacgtgctggtctgtgtgctggcccatcactttggcaaagaattgggattcgaaccggtgccgccaccatgaacttcgggctcagcttgattttccttgtccttgttttaaaaggtgtccagtgtgaggttcatctggtggagtctgggggagccttagtgaagcctggagggtccctgaaactctcctgtgcagcctctggattcagtttcagtaaatatggcatgtcttgggttcgccagactccagacaagaggctggagtgggtcgcaaccattagtagtagtgggagtcgcacctactatccagacagtgtgaagggccaattcaccatctccagagacaatgccaagaacaccctgtacctgcaaatgagcagtctgaagtctgaggacacagccatgtattactgttcaattagctgggacggtgctatggactactggggtcaagggacctcagtcaccgtctcctcagccaaaacgacacccccatctgtctatccactggcccctggatctgctgcccaaactaactccatggtgaccctgggatgcctggtcaagggctatttccctgagccagtgacagtgacctggaactctggatccctgtccagcggtgtgcacaccttcccagctgtcctgcagtctgacctctacactctgagcagctcagtgactgtcccctccagcacctggcccagcgagaccgtcacctgcaacgttgcccacccggccagcagcaccaaggtggacaagaaaattgtgcccagggattgtggttgtaagccttgcatatgtacagtcccagaagtatcatctgtcttcatcttccccccaaagcccaaggatgtgctcaccattactctgactcctaaggtcacgtgtgttgtggtagacatcagcaaggatgatcccgaggtccagttcagctggtttgtagatgatgtggaggtgcacacagctcagacgcaaccccgggaggagcagttcaacagcactttccgctcagtcagtgaacttcccatcatgcaccaggactggctcaatggcaaggagttcaaatgcagggtcaacagtgcagctttccctgcccccatcgagaaaaccatctccaaaaccaaaggcagaccgaaggctccacaggtgtacaccattccacctcccaaggagcagatggccaaggataaagtcagtctgacctgcatgataacagacttcttccctgaagacattactgtggagtggcagtggaatgggcagccagcggagaactacaagaacactcagcccatcatggacacagatggctcttacttcgtctacagcaagctcaatgtgcagaagagcaactgggaggcaggaaatactttcacctgctctgtgttacatgagggcctgcacaaccaccatactgagaagagcctctcccactctcctggtagaaagaggcgagagggcagaggaagtcttctaacatgcggtgacgtggaggagaatcccggccctatgaagttgcctgttaggctgttggtgctgatgttctggattcctgcttccagcagtgatgttttgatgacccaaactccactctccctgcctgtcagtcttggagatcaagcctccatctcttgcaaatctagtcagagcattgtacatagtaatggaaacacctatttagaatggtacctgcagaaaccaggccagtctccaaagctcctggtctacaaagtttccaatcgattttctggggtcccagacaggttcagtggcagtggatcagggacagatttcacactcaagatcagcagagtggaggctgaggatctgggaacttattactgctttcaaggttcacttgttccttgggcgttcggtggaggcaccaagctggaaatcaaacgggctgatgctgcaccaactgtatccatcttcccaccatccagtgagcagttaacatctggaggtgcctcagtcgtgtgcttcttgaacaacttctaccccaaagacatcaatgtcaagtggaagattgatggcagtgaacgacaaaatggcgtcctgaacagttggactgatcaggacagcaaagacagcacctacagcatgagcagcaccctcacgttgaccaaggacgagtatgaacgacataacagctatacctgtgaggccactcacaagacatcaacttcacccattgtcaagagcttcaacaggaatgagtgttagtaactcgaggacggggtgaactacgcctgaggatccgatctttttccctctgccaaaaattatggggacatcatgaagccccttgagcatctgacttctggctaataaaggaaatttattttcattgcaatagtgtgttggaattttttgtgtctctcactcggcctaggtagataagtagcatggcgggttaatcattaactacaaggaacccctagtgatggagttggccactccctctctgcgcgctcgctcgctcactgaggccgggcgaccaaaggtcgcccgacgcccgggctttgcccgggcggcctcagtgagcgagcgagcgcgcag

SEQ ID NO: 1994 - DNA, 4041 bp, Artificial Sequence
  source: /note="Description of Artificial Sequence: Synthetic polynucleotide"
ctgcgcgctcgctcgctcactgaggccgcccgggcaaagcccgggcgtcgggcgacctttggtcgcccggcctcagtgagcgagcgagcgcgcagagagggagtggccaactccatcactaggggttccttgtagttaatgattaacccgccatgctacttatctaccagggtaatggggatcctctagaactatagctagtcgacataacgcgtgatctaacatatcctggtgtggagtagcggacgctgctatgacagaggctcgggggcctgagctggctctgtgagctggggaggaggcagacagccaggccttgtctgcaagcagacctggcagcattgggctggccgccccccagggcctcctcttcatgcccagtgaatgactcaccttggcacagacacaatgttcggggtgggcacagtgcctgcttcccgccgcaccccagcccccctcaaatgccttccgagaagcccattgagcagggggcttgcattgcaccccagcctgacagcctggcatcttgggataaaagcagcacagccccctaggggctgcccttgctgtgtggcgccaccggcggtggagaacaaggctctattcagcctgtgcccaggaaaggggatcaggggatgcccaggcatggacagtgggtggcagggggggagaggagggctgtctgcttcccagaagtccaaggacacaaatgggtgaggggagagctctccccatagctgggctgcggcccaaccccaccccctcaggctatgccagggggtgttgccaggggcacccgggcatcgccagtctagcccactccttcataaagccctcgcatcccaggagcgagcagagccagagcaggttggagaggagacgcatcacctccgctgctcgcggggatcctctagaagcttcgtttagtgaaccgtcagatcgcctggagacgccatccacgctgttttgacctccatagaagacaccgggaccgatccagcctccgcggattcgaatcccggccgggaacggtgcattggaacgcggattccccgtgccaagagtgacgtaagtaccgcctatagagtctataggcccacaaaaaatgctttcttcttttaatatacttttttgtttatcttatttctaatactttccctaatctctttctttcagggcaataatgatacaatgtatcatgcctctttgcaccattctaaagaataacagtgataatttctgggttaaggcaatagcaatatttctgcatataaatatttctgcatataaattgtaactgatgtaagaggtttcatattgctaatagcagctacaatccagctaccattctgcttttattttatggttgggataaggctggattattctgagtccaagctaggcccttttgctaatcatgttcatacctcttatcttcctcccacagctcctgggcaacgtgctggtctgtgtgctggcccatcactttggcaaagaattgggattcgaaccggtgccgccaccatgaacttcgggctcagcttgattttccttgtccttgttttaaaaggtgtccagtgtgaggttcatctggtggagtctgggggagccttagtgaagcctggagggtccctgaaactctcctgtgcagcctctggattcagtttcagtaaatatggcatgtcttgggttcgccagactccagacaagaggctggagtgggtcgcaaccattagtagtagtgggagtcgcacctactatccagacagtgtgaagggccaattcaccatctccagagacaatgccaagaacaccctgtacctgcaaatgagcagtctgaagtctgaggacacagccatgtattactgttcaattagctgggacggtgctatggactactggggtcaagggacctcagtcaccgtctcctcagccaaaacgacacccccatctgtctatccactggcccctggatctgctgcccaaactaactccatggtgaccctgggatgcctggtcaagggctatttccctgagccagtgacagtgacctggaactctggatccctgtccagcggtgtgcacaccttcccagctgtcctgcagtctgacctctacactctgagcagctcagtgactgtcccctccagcacctggcccagcgagaccgtcacctgcaacgttgcccacccggccagcagcaccaaggtggacaagaaaattgtgcccagggattgtggttgtaagccttgcatatgtacagtcccagaagtatcatctgtcttcatcttccccccaaagcccaaggatgtgctcaccattactctgactcctaaggtcacgtgtgttgtggtagacatcagcaaggatgatcccgaggtccagttcagctggtttgtagatgatgtggaggtgcacacagctcagacgcaaccccgggaggagcagttcaacagcactttccgctcagtcagtgaacttcccatcatgcaccaggactggctcaatggcaaggagttcaaatgcagggtcaacagtgcagctttccctgcccccatcgagaaaaccatctccaaaaccaaaggcagaccgaaggctccacaggtgtacaccattccacctcccaaggagcagatggccaaggataaagtcagtctgacctgcatgataacagacttcttccctgaagacattactgtggagtggcagtggaatgggcagccagcggagaactacaagaacactcagcccatcatggacacagatggctcttacttcgtctacagcaagctcaatgtgcagaagagcaactgggaggcaggaaatactttcacctgctctgtgttacatgagggcctgcacaaccaccatactgagaagagcctctcccactctcctggtcgggccaagcggggaagcggagtgaaacagactttgaattttgaccttctcaagttggcgggagacgtggagtccaaccctggacctatgaagttgcctgttaggctgttggtgctgatgttctggattcctgcttccagcagtgatgttttgatgacccaaactccactctccctgcctgtcagtcttggagatcaagcctccatctcttgcaaatctagtcagagcattgtacatagtaatggaaacacctatttagaatggtacctgcagaaaccaggccagtctccaaagctcctggtctacaaagtttccaatcgattttctggggtcccagacaggttcagtggcagtggatcagggacagatttcacactcaagatcagcagagtggaggctgaggatctgggaacttattactgctttcaaggttcacttgttccttgggcgttcggtggaggcaccaagctggaaatcaaacgggctgatgctgcaccaactgtatccatcttcccaccatccagtgagcagttaacatctggaggtgcctcagtcgtgtgcttcttgaacaacttctaccccaaagacatcaatgtcaagtggaagattgatggcagtgaacgacaaaatggcgtcctgaacagttggactgatcaggacagcaaagacagcacctacagcatgagcagcaccctcacgttgaccaaggacgagtatgaacgacataacagctatacctgtgaggccactcacaagacatcaacttcacccattgtcaagagcttcaacaggaatgagtgttagtaactcgaggacggggtgaactacgcctgaggatccgatctttttccctctgccaaaaattatggggacatcatgaagccccttgagcatctgacttctggctaataaaggaaatttattttcattgcaatagtgtgttggaattttttgtgtctctcactcggcctaggtagataagtagcatggcgggttaatcattaactacaaggaacccctagtgatggagttggccactccctctctgcgcgctcgctcgctcactgaggccgggcgaccaaaggtcgcccgacgcccgggctttgcccgggcggcctcagtgagcgagcgagcgcgcag

SEQ ID NO: 1995 - DNA, 4020 bp, Artificial Sequence
  source: /note="Description of Artificial Sequence: Synthetic polynucleotide"
ctgcgcgctcgctcgctcactgaggccgcccgggcaaagcccgggcgtcgggcgacctttggtcgcccggcctcagtgagcgagcgagcgcgcagagagggagtggccaactccatcactaggggttccttgtagttaatgattaacccgccatgctacttatctaccagggtaatggggatcctctagaactatagctagtcgacataacgcgtgatctaacatatcctggtgtggagtagcggacgctgctatgacagaggctcgggggcctgagctggctctgtgagctggggaggaggcagacagccaggccttgtctgcaagcagacctggcagcattgggctggccgccccccagggcctcctcttcatgcccagtgaatgactcaccttggcacagacacaatgttcggggtgggcacagtgcctgcttcccgccgcaccccagcccccctcaaatgccttccgagaagcccattgagcagggggcttgcattgcaccccagcctgacagcctggcatcttgggataaaagcagcacagccccctaggggctgcccttgctgtgtggcgccaccggcggtggagaacaaggctctattcagcctgtgcccaggaaaggggatcaggggatgcccaggcatggacagtgggtggcagggggggagaggagggctgtctgcttcccagaagtccaaggacacaaatgggtgaggggagagctctccccatagctgggctgcggcccaaccccaccccctcaggctatgccagggggtgttgccaggggcacccgggcatcgccagtctagcccactccttcataaagccctcgcatcccaggagcgagcagagccagagcaggttggagaggagacgcatcacctccgctgctcgcggggatcctctagaagcttcgtttagtgaaccgtcagatcgcctggagacgccatccacgctgttttgacctccatagaagacaccgggaccgatccagcctccgcggattcgaatcccggccgggaacggtgcattggaacgcggattccccgtgccaagagtgacgtaagtaccgcctatagagtctataggcccacaaaaaatgctttcttcttttaatatacttttttgtttatcttatttctaatactttccctaatctctttctttcagggcaataatgatacaatgtatcatgcctctttgcaccattctaaagaataacagtgataatttctgggttaaggcaatagcaatatttctgcatataaatatttctgcatataaattgtaactgatgtaagaggtttcatattgctaatagcagctacaatccagctaccattctgcttttattttatggttgggataaggctggattattctgagtccaagctaggcccttttgctaatcatgttcatacctcttatcttcctcccacagctcctgggcaacgtgctggtctgtgtgctggcccatcactttggcaaagaattgggattcgaaccggtgccgccaccatgaacttcgggctcagcttgattttccttgtccttgttttaaaaggtgtccagtgtgaggttcatctggtggagtctgggggagccttagtgaagcctggagggtccctgaaactctcctgtgcagcctctggattcagtttcagtaaatatggcatgtcttgggttcgccagactccagacaagaggctggagtgggtcgcaaccattagtagtagtgggagtcgcacctactatccagacagtgtgaagggccaattcaccatctccagagacaatgccaagaacaccctgtacctgcaaatgagcagtctgaagtctgaggacacagccatgtattactgttcaattagctgggacggtgctatggactactggggtcaagggacctcagtcaccgtctcctcagccaaaacgacacccccatctgtctatccactggcccctggatctgctgcccaaactaactccatggtgaccctgggatgcctggtcaagggctatttccctgagccagtgacagtgacctggaactctggatccctgtccagcggtgtgcacaccttcccagctgtcctgcagtctgacctctacactctgagcagctcagtgactgtcccctccagcacctggcccagcgagaccgtcacctgcaacgttgcccacccggccagcagcaccaaggtggacaagaaaattgtgcccagggattgtggttgtaagccttgcatatgtacagtcccagaagtatcatctgtcttcatcttccccccaaagcccaaggatgtgctcaccattactctgactcctaaggtcacgtgtgttgtggtagacatcagcaaggatgatcccgaggtccagttcagctggtttgtagatgatgtggaggtgcacacagctcagacgcaaccccgggaggagcagttcaacagcactttccgctcagtcagtgaacttcccatcatgcaccaggactggctcaatggcaaggagttcaaatgcagggtcaacagtgcagctttccctgcccccatcgagaaaaccatctccaaaaccaaaggcagaccgaaggctccacaggtgtacaccattccacctcccaaggagcagatggccaaggataaagtcagtctgacctgcatgataacagacttcttccctgaagacattactgtggagtggcagtggaatgggcagccagcggagaactacaagaacactcagcccatcatggacacagatggctcttacttcgtctacagcaagctcaatgtgcagaagagcaactgggaggcaggaaatactttcacctgctctgtgttacatgagggcctgcacaaccaccatactgagaagagcctctcccactctcctggtagaaagaggcgagagggcagaggaagtcttctaacatgcggtgacgtggaggagaatcccggccctatgaagttgcctgttaggctgttggtgctgatgttctggattcctgcttccagcagtgatgttttgatgacccaaactccactctccctgcctgtcagtcttggagatcaagcctccatctcttgcaaatctagtcagagcattgtacatagtaatggaaacacctatttagaatggtacctgcagaaaccaggccagtctccaaagctcctggtctacaaagtttccaatcgattttctggggtcccagacaggttcagtggcagtggatcagggacagatttcacactcaagatcagcagagtggaggctgaggatctgggaacttattactgctttcaaggttcacttgttccttgggcgttcggtggaggcaccaagctggaaatcaaacgggctgatgctgcaccaactgtatccatcttcccaccatccagtgagcagttaacatctggaggtgcctcagtcgtgtgcttcttgaacaacttctaccccaaagacatcaatgtcaagtggaagattgatggcagtgaacgacaaaatggcgtcctgaacagttggactgatcaggacagcaaagacagcacctacagcatgagcagcaccctcacgttgaccaaggacgagtatgaacgacataacagctatacctgtgaggccactcacaagacatcaacttcacccattgtcaagagcttcaacaggaatgagtgttagtaactcgaggacggggtgaactacgcctgaggatccgatctttttccctctgccaaaaattatggggacatcatgaagccccttgagcatctgacttctggctaataaaggaaatttattttcattgcaatagtgtgttggaattttttgtgtctctcactcggcctaggtagataagtagcatggcgggttaatcattaactacaaggaacccctagtgatggagttggccactccctctctgcgcgctcgctcgctcactgaggccgggcgaccaaaggtcgcccgacgcccgggctttgcccgggcggcctcagtgagcgagcgagcgcgcag

SEQ ID NO: 1996 - DNA, 3899 bp, Artificial Sequence
  source: /note="Description of Artificial Sequence: Synthetic polynucleotide"
ctgcgcgctcgctcgctcactgaggccgcccgggcaaagcccgggcgtcgggcgacctttggtcgcccggcctcagtgagcgagcgagcgcgcagagagggagtggccaactccatcactaggggttccttgtagttaatgattaacccgccatgctacttatctaccagggtaatggggatcctctagaactatagctagtcgacataacgcgttagtatctgcagagggccctgcgtatgagtgcaagtgggttttaggaccaggatgaggcggggtgggggtgcctacctgacgaccgaccccgacccactggacaagcacccaacccccattccccaaattgcgcatcccctatcagagagggggaggggaaacaggatgcggcgaggcgcgtgcgcactgccagcttcagcaccgcggacagtgccttcgcccccgcctggcggcgcgcgccaccgccgcctcagcactgaaggcgcgctgacgtcactcgccggtcccccgcaaactccccttcccggccaccttggtcgcgtccgcgccgccgccggcccagccggaccgcaccacgcgaggcgcgagataggggggcacgggcgcgaccatctgcgctgcggcgccggcgactcagcgctgcctcagtctgcggtgggcagcggaggagtcgtgtcgtgcctgagagcgcagctgtgctcctgggcaccgcgcagtccgcccccgcggctcctggccagaccacccctaggaccccctgccccaagtcgcagccaagcttcgtttagtgaaccgtcagatcgcctggagacgccatccacgctgttttgacctccatagaagacaccgggaccgatccagcctccgcggattcgaatcccggccgggaacggtgcattggaacgcggattccccgtgccaagagtgacgtaagtaccgcctatagagtctataggcccacaaaaaatgctttcttcttttaatatacttttttgtttatcttatttctaatactttccctaatctctttctttcagggcaataatgatacaatgtatcatgcctctttgcaccattctaaagaataacagtgataatttctgggttaaggcaatagcaatatttctgcatataaatatttctgcatataaattgtaactgatgtaagaggtttcatattgctaatagcagctacaatccagctaccattctgcttttattttatggttgggataaggctggattattctgagtccaagctaggcccttttgctaatcatgttcatacctcttatcttcctcccacagctcctgggcaacgtgctggtctgtgtgctggcccatcactttggcaaagaattgggattcgaaccggtgccgccaccatgaacttcgggctcagcttgattttccttgtccttgttttaaaaggtgtccagtgtgaggttcatctggtggagtctgggggagccttagtgaagcctggagggtccctgaaactctcctgtgcagcctctggattcagtttcagtaaatatggcatgtcttgggttcgccagactccagacaagaggctggagtgggtcgcaaccattagtagtagtgggagtcgcacctactatccagacagtgtgaagggccaattcaccatctccagagacaatgccaagaacaccctgtacctgcaaatgagcagtctgaagtctgaggacacagccatgtattactgttcaattagctgggacggtgctatggactactggggtcaagggacctcagtcaccgtctcctcagccaaaacgacacccccatctgtctatccactggcccctggatctgctgcccaaactaactccatggtgaccctgggatgcctggtcaagggctatttccctgagccagtgacagtgacctggaactctggatccctgtccagcggtgtgcacaccttcccagctgtcctgcagtctgacctctacactctgagcagctcagtgactgtcccctccagcacctggcccagcgagaccgtcacctgcaacgttgcccacccggccagcagcaccaaggtggacaagaaaattgtgcccagggattgtggttgtaagccttgcatatgtacagtcccagaagtatcatctgtcttcatcttccccccaaagcccaaggatgtgctcaccattactctgactcctaaggtcacgtgtgttgtggtagacatcagcaaggatgatcccgaggtccagttcagctggtttgtagatgatgtggaggtgcacacagctcagacgcaaccccgggaggagcagttcaacagcactttccgctcagtcagtgaacttcccatcatgcaccaggactggctcaatggcaaggagttcaaatgcagggtcaacagtgcagctttccctgcccccatcgagaaaaccatctccaaaaccaaaggcagaccgaaggctccacaggtgtacaccattccacctcccaaggagcagatggccaaggataaagtcagtctgacctgcatgataacagacttcttccctgaagacattactgtggagtggcagtggaatgggcagccagcggagaactacaagaacactcagcccatcatggacacagatggctcttacttcgtctacagcaagctcaatgtgcagaagagcaactgggaggcaggaaatactttcacctgctctgtgttacatgagggcctgcacaaccaccatactgagaagagcctctcccactctcctggtcgggccaagcggggaagcggagtgaaacagactttgaattttgaccttctcaagttggcgggagacgtggagtccaaccctggacctatgaagttgcctgttaggctgttggtgctgatgttctggattcctgcttccagcagtgatgttttgatgacccaaactccactctccctgcctgtcagtcttggagatcaagcctccatctcttgcaaatctagtcagagcattgtacatagtaatggaaacacctatttagaatggtacctgcagaaaccaggccagtctccaaagctcctggtctacaaagtttccaatcgattttctggggtcccagacaggttcagtggcagtggatcagggacagatttcacactcaagatcagcagagtggaggctgaggatctgggaacttattactgctttcaaggttcacttgttccttgggcgttcggtggaggcaccaagctggaaatcaaacgggctgatgctgcaccaactgtatccatcttcccaccatccagtgagcagttaacatctggaggtgcctcagtcgtgtgcttcttgaacaacttctaccccaaagacatcaatgtcaagtggaagattgatggcagtgaacgacaaaatggcgtcctgaacagttggactgatcaggacagcaaagacagcacctacagcatgagcagcaccctcacgttgaccaaggacgagtatgaacgacataacagctatacctgtgaggccactcacaagacatcaacttcacccattgtcaagagcttcaacaggaatgagtgttagtaactcgaggacggggtgaactacgcctgaggatccgatctttttccctctgccaaaaattatggggacatcatgaagccccttgagcatctgacttctggctaataaaggaaatttattttcattgcaatagtgtgttggaattttttgtgtctctcactcggcctaggtagataagtagcatggcgggttaatcattaactacaaggaacccctagtgatggagttggccactccctctctgcgcgctcgctcgctcactgaggccgggcgaccaaaggtcgcccgacgcccgggctttgcccgggcggcctcagtgagcgagcgagcgcgcag

SEQ ID NO: 1997 - DNA, 3878 bp, Artificial Sequence
  source: /note="Description of Artificial Sequence: Synthetic polynucleotide"
ctgcgcgctcgctcgctcactgaggccgcccgggcaaagcccgggcgtcgggcgacctttggtcgcccggcctcagtgagcgagcgagcgcgcagagagggagtggccaactccatcactaggggttccttgtagttaatgattaacccgccatgctacttatctaccagggtaatggggatcctctagaactatagctagtcgacataacgcgttagtatctgcagagggccctgcgtatgagtgcaagtgggttttaggaccaggatgaggcggggtgggggtgcctacctgacgaccgaccccgacccactggacaagcacccaacccccattccccaaattgcgcatcccctatcagagagggggaggggaaacaggatgcggcgaggcgcgtgcgcactgccagcttcagcaccgcggacagtgccttcgcccccgcctggcggcgcgcgccaccgccgcctcagcactgaaggcgcgctgacgtcactcgccggtcccccgcaaactccccttcccggccaccttggtcgcgtccgcgccgccgccggcccagccggaccgcaccacgcgaggcgcgagataggggggcacgggcgcgaccatctgcgctgcggcgccggcgactcagcgctgcctcagtctgcggtgggcagcggaggagtcgtgtcgtgcctgagagcgcagctgtgctcctgggcaccgcgcagtccgcccccgcggctcctggccagaccacccctaggaccccctgccccaagtcgcagccaagcttcgtttagtgaaccgtcagatcgcctggagacgccatccacgctgttttgacctccatagaagacaccgggaccgatccagcctccgcggattcgaatcccggccgggaacggtgcattggaacgcggattccccgtgccaagagtgacgtaagtaccgcctatagagtctataggcccacaaaaaatgctttcttcttttaatatacttttttgtttatcttatttctaatactttccctaatctctttctttcagggcaataatgatacaatgtatcatgcctctttgcaccattctaaagaataacagtgataatttctgggttaaggcaatagcaatatttctgcatataaatatttctgcatataaattgtaactgatgtaagaggtttcatattgctaatagcagctacaatccagctaccattctgcttttattttatggttgggataaggctggattattctgagtccaagctaggcccttttgctaatcatgttcatacctcttatcttcctcccacagctcctgggcaacgtgctggtctgtgtgctggcccatcactttggcaaagaattgggattcgaaccggtgccgccaccatgaacttcgggctcagcttgattttccttgtccttgttttaaaaggtgtccagtgtgaggttcatctggtggagtctgggggagccttagtgaagcctggagggtccctgaaactctcctgtgcagcctctggattcagtttcagtaaatatggcatgtcttgggttcgccagactccagacaagaggctggagtgggtcgcaaccattagtagtagtgggagtcgcacctactatccagacagtgtgaagggccaattcaccatctccagagacaatgccaagaacaccctgtacctgcaaatgagcagtctgaagtctgaggacacagccatgtattactgttcaattagctgggacggtgctatggactactggggtcaagggacctcagtcaccgtctcctcagccaaaacgacacccccatctgtctatccactggcccctggatctgctgcccaaactaactccatggtgaccctgggatgcctggtcaagggctatttccctgagccagtgacagtgacctggaactctggatccctgtccagcggtgtgcacaccttcccagctgtcctgcagtctgacctctacactctgagcagctcagtgactgtcccctccagcacctggcccagcgagaccgtcacctgcaacgttgcccacccggccagcagcaccaaggtggacaagaaaattgtgcccagggattgtggttgtaagccttgcatatgtacagtcccagaagtatcatctgtcttcatcttccccccaaagcccaaggatgtgctcaccattactctgactcctaaggtcacgtgtgttgtggtagacatcagcaaggatgatcccgaggtccagttcagctggtttgtagatgatgtggaggtgcacacagctcagacgcaaccccgggaggagcagttcaacagcactttccgctcagtcagtgaacttcccatcatgcaccaggactggctcaatggcaaggagttcaaatgcagggtcaacagtgcagctttccctgcccccatcgagaaaaccatctccaaaaccaaaggcagaccgaaggctccacaggtgtacaccattccacctcccaaggagcagatggccaaggataaagtcagtctgacctgcatgataacagacttcttccctgaagacattactgtggagtggcagtggaatgggcagccagcggagaactacaagaacactcagcccatcatggacacagatggctcttacttcgtctacagcaagctcaatgtgcagaagagcaactgggaggcaggaaatactttcacctgctctgtgttacatgagggcctgcacaaccaccatactgagaagagcctctcccactctcctggtagaaagaggcgagagggcagaggaagtcttctaacatgcggtgacgtggaggagaatcccggccctatgaagttgcctgttaggctgttggtgctgatgttctggattcctgcttccagcagtgatgttttgatgacccaaactccactctccctgcctgtcagtcttggagatcaagcctccatctcttgcaaatctagtcagagcattgtacatagtaatggaaacacctatttagaatggtacctgcagaaaccaggccagtctccaaagctcctggtctacaaagtttccaatcgattttctggggtcccagacaggttcagtggcagtggatcagggacagatttcacactcaagatcagcagagtggaggctgaggatctgggaacttattactgctttcaaggttcacttgttccttgggcgttcggtggaggcaccaagctggaaatcaaacgggctgatgctgcaccaactgtatccatcttcccaccatccagtgagcagttaacatctggaggtgcctcagtcgtgtgcttcttgaacaacttctaccccaaagacatcaatgtcaagtggaagattgatggcagtgaacgacaaaatggcgtcctgaacagttggactgatcaggacagcaaagacagcacctacagcatgagcagcaccctcacgttgaccaaggacgagtatgaacgacataacagctatacctgtgaggccactcacaagacatcaacttcacccattgtcaagagcttcaacaggaatgagtgttagtaactcgaggacggggtgaactacgcctgaggatccgatctttttccctctgccaaaaattatggggacatcatgaagccccttgagcatctgacttctggctaataaaggaaatttattttcattgcaatagtgtgttggaattttttgtgtctctcactcggcctaggtagataagtagcatggcgggttaatcattaactacaaggaacccctagtgatggagttggccactccctctctgcgcgctcgctcgctcactgaggccgggcgaccaaaggtcgcccgacgcccgggctttgcccgggcggcctcagtgagcgagcgagcgcgcag

SEQ ID NO: 1998 - DNA, 4459 bp, Artificial Sequence
  source: /note="Description of Artificial Sequence: Synthetic polynucleotide"
ctgcgcgctcgctcgctcactgaggccgcccgggcaaagcccgggcgtcgggcgacctttggtcgcccggcctcagtgagcgagcgagcgcgcagagagggagtggccaactccatcactaggggttccttgtagttaatgattaacccgccatgctacttatctaccagggtaatggggatcctctagaactatagctagtcgacataacgcgtctagttattaatagtaatcaattacggggtcattagttcatagcccatatatggagttccgcgttacataacttacggtaaatggcccgcctggctgaccgcccaacgacccccgcccattgacgtcaataatgacgtatgttcccatagtaacgccaatagggactttccattgacgtcaatgggtggagtatttacggtaaactgcccacttggcagtacatcaagtgtatcatatgccaagtacgccccctattgacgtcaatgacggtaaatggcccgcctggcattatgcccagtacatgaccttatgggactttcctacttggcagtacatctacgtattagtcatcgctattaccatggtcgaggtgagccccacgttctgcttcactctccccatctcccccccctccccacccccaattttgtatttatttattttttaattattttgtgcagcgatgggggcggggggggggggggggcgcgcgccaggcggggcggggcggggcgaggggcggggcggggcgaggcggagaggtgcggcggcagccaatcagagcggcgcgctccgaaagtttccttttatggcgaggcggcggcggcggcggccctataaaaagcgaagcgcgcggcgggcgggagtcgctgcgcgctgccttcgccccgtgccccgctccgccgccgcctcgcgccgcccgccccggctctgactgaccgcgttactcccacaggtgagcgggcgggacggcccttctcctccgggctgtaattagcgcttggtttaatgacggcttgtttcttttctgtggctgcgtgaaagccttgaggggctccgggagggccctttgtgcggggggagcggctcggggggtgcgtgcgtgtgtgtgtgcgtggggagcgccgcgtgcggctccgcgctgcccggcggctgtgagcgctgcgggcgcggcgcggggctttgtgcgctccgcagtgtgcgcgaggggagcgcggccgggggcggtgccccgcggtgcggggggggctgcgaggggaacaaaggctgcgtgcggggtgtgtgcgtgggggggtgagcagggggtgtgggcgcgtcggtcgggctgcaaccccccctgcacccccctccccgagttgctgagcacggcccggcttcgggtgcggggctccgtacggggcgtggcgcggggctcgccgtgccgggcggggggtggcggcaggtgggggtgccgggcggggcggggccgcctcgggccggggagggctcgggggaggggcgcggcggcccccggagcgccggcggctgtcgaggcgcggcgagccgcagccattgccttttatggtaatcgtgcgagagggcgcagggacttcctttgtcccaaatctgtgcggagccgaaatctgggaggcgccgccgcaccccctctagcgggcgcggggcgaagcggtgcggcgccggcaggaaggaaatgggcggggagggccttcgtgcgtcgccgcgccgccgtccccttctccctctccagcctcggggctgtccgcggggggacggctgccttcgggggggacggggcagggcggggttcggcttctggcgtgtgaccggcggctctagagcctctgctaaccatgttcatgccttcttctttttcctacagctcctgggcaacgtgctggttattgtgctgtctcatcattttggcaaagaattcgggattcgaaccggtgccgccaccatgaagttgcctgttaggctgttggtgctgatgttctggattcctgcttccagcagtgatgttttgatgacccaaactccactctccctgcctgtcagtcttggagatcaagcctccatctcttgcaaatctagtcagagcattgtacatagtaatggaaacacctatttagaatggtacctgcagaaaccaggccagtctccaaagctcctggtctacaaagtttccaatcgattttctggggtcccagacaggttcagtggcagtggatcagggacagatttcacactcaagatcagcagagtggaggctgaggatctgggaacttattactgctttcaaggttcacttgttccttgggcgttcggtggaggcaccaagctggaaatcaaacgggctgatgctgcaccaactgtatccatcttcccaccatccagtgagcagttaacatctggaggtgcctcagtcgtgtgcttcttgaacaacttctaccccaaagacatcaatgtcaagtggaagattgatggcagtgaacgacaaaatggcgtcctgaacagttggactgatcaggacagcaaagacagcacctacagcatgagcagcaccctcacgttgaccaaggacgagtatgaacgacataacagctatacctgtgaggccactcacaagacatcaacttcacccattgtcaagagcttcaacaggaatgagtgtggaagcggagtgaaacagactttgaattttgaccttctcaagttggcgggagacgtggagtccaaccctggacctatgaacttcgggctcagcttgattttccttgtccttgttttaaaaggtgtccagtgtgaggttcatctggtggagtctgggggagccttagtgaagcctggagggtccctgaaactctcctgtgcagcctctggattcagtttcagtaaatatggcatgtcttgggttcgccagactccagacaagaggctggagtgggtcgcaaccattagtagtagtgggagtcgcacctactatccagacagtgtgaagggccaattcaccatctccagagacaatgccaagaacaccctgtacctgcaaatgagcagtctgaagtctgaggacacagccatgtattactgttcaattagctgggacggtgctatggactactggggtcaagggacctcagtcaccgtctcctcagccaaaacgacacccccatctgtctatccactggcccctggatctgctgcccaaactaactccatggtgaccctgggatgcctggtcaagggctatttccctgagccagtgacagtgacctggaactctggatccctgtccagcggtgtgcacaccttcccagctgtcctgcagtctgacctctacactctgagcagctcagtgactgtcccctccagcacctggcccagcgagaccgtcacctgcaacgttgcccacccggccagcagcaccaaggtggacaagaaaattgtgcccagggattgtggttgtaagccttgcatatgtacagtcccagaagtatcatctgtcttcatcttccccccaaagcccaaggatgtgctcaccattactctgactcctaaggtcacgtgtgttgtggtagacatcagcaaggatgatcccgaggtccagttcagctggtttgtagatgatgtggaggtgcacacagctcagacgcaaccccgggaggagcagttcaacagcactttccgctcagtcagtgaacttcccatcatgcaccaggactggctcaatggcaaggagttcaaatgcagggtcaacagtgcagctttccctgcccccatcgagaaaaccatctccaaaaccaaaggcagaccgaaggctccacaggtgtacaccattccacctcccaaggagcagatggccaaggataaagtcagtctgacctgcatgataacagacttcttccctgaagacattactgtggagtggcagtggaatgggcagccagcggagaactacaagaacactcagcccatcatggacacagatggctcttacttcgtctacagcaagctcaatgtgcagaagagcaactgggaggcaggaaatactttcacctgctctgtgttacatgagggcctgcacaaccaccatactgagaagagcctctcccactctcctggttagtaactcgaggacggggtgaactacgcctgaggatccgatctttttccctctgccaaaaattatggggacatcatgaagccccttgagcatctgacttctggctaataaaggaaatttattttcattgcaatagtgtgttggaattttttgtgtctctcactcggcctaggtagataagtagcatggcgggttaatcattaactacaaggaacccctagtgatggagttggccactccctctctgcgcgctcgctcgctcactgaggccgggcgaccaaaggtcgcccgacgcccgggctttgcccgggcggcctcagtgagcgagcgagcgcgcag

SEQ ID NO: 1999 - DNA, 4438 bp, Artificial Sequence
  source: /note="Description of Artificial Sequence: Synthetic polynucleotide"
ctgcgcgctcgctcgctcactgaggccgcccgggcaaagcccgggcgtcgggcgacctttggtcgcccggcctcagtgagcgagcgagcgcgcagagagggagtggccaactccatcactaggggttccttgtagttaatgattaacccgccatgctacttatctaccagggtaatggggatcctctagaactatagctagtcgacataacgcgtctagttattaatagtaatcaattacggggtcattagttcatagcccatatatggagttccgcgttacataacttacggtaaatggcccgcctggctgaccgcccaacgacccccgcccattgacgtcaataatgacgtatgttcccatagtaacgccaatagggactttccattgacgtcaatgggtggagtatttacggtaaactgcccacttggcagtacatcaagtgtatcatatgccaagtacgccccctattgacgtcaatgacggtaaatggcccgcctggcattatgcccagtacatgaccttatgggactttcctacttggcagtacatctacgtattagtcatcgctattaccatggtcgaggtgagccccacgttctgcttcactctccccatctcccccccctccccacccccaattttgtatttatttattttttaattattttgtgcagcgatgggggcggggggggggggggggcgcgcgccaggcggggcggggcggggcgaggggcggggcggggcgaggcggagaggtgcggcggcagccaatcagagcggcgcgctccgaaagtttccttttatggcgaggcggcggcggcggcggccctataaaaagcgaagcgcgcggcgggcgggagtcgctgcgcgctgccttcgccccgtgccccgctccgccgccgcctcgcgccgcccgccccggctctgactgaccgcgttactcccacaggtgagcgggcgggacggcccttctcctccgggctgtaattagcgcttggtttaatgacggcttgtttcttttctgtggctgcgtgaaagccttgaggggctccgggagggccctttgtgcggggggagcggctcggggggtgcgtgcgtgtgtgtgtgcgtggggagcgccgcgtgcggctccgcgctgcccggcggctgtgagcgctgcgggcgcggcgcggggctttgtgcgctccgcagtgtgcgcgaggggagcgcggccgggggcggtgccccgcggtgcggggggggctgcgaggggaacaaaggctgcgtgcggggtgtgtgcgtgggggggtgagcagggggtgtgggcgcgtcggtcgggctgcaaccccccctgcacccccctccccgagttgctgagcacggcccggcttcgggtgcggggctccgtacggggcgtggcgcggggctcgccgtgccgggcggggggtggcggcaggtgggggtgccgggcggggcggggccgcctcgggccggggagggctcgggggaggggcgcggcggcccccggagcgccggcggctgtcgaggcgcggcgagccgcagccattgccttttatggtaatcgtgcgagagggcgcagggacttcctttgtcccaaatctgtgcggagccgaaatctgggaggcgccgccgcaccccctctagcgggcgcggggcgaagcggtgcggcgccggcaggaaggaaatgggcggggagggccttcgtgcgtcgccgcgccgccgtccccttctccctctccagcctcggggctgtccgcggggggacggctgccttcgggggggacggggcagggcggggttcggcttctggcgtgtgaccggcggctctagagcctctgctaaccatgttcatgccttcttctttttcctacagctcctgggcaacgtgctggttattgtgctgtctcatcattttggcaaagaattcgggattcgaaccggtgccgccaccatgaagttgcctgttaggctgttggtgctgatgttctggattcctgcttccagcagtgatgttttgatgacccaaactccactctccctgcctgtcagtcttggagatcaagcctccatctcttgcaaatctagtcagagcattgtacatagtaatggaaacacctatttagaatggtacctgcagaaaccaggccagtctccaaagctcctggtctacaaagtttccaatcgattttctggggtcccagacaggttcagtggcagtggatcagggacagatttcacactcaagatcagcagagtggaggctgaggatctgggaacttattactgctttcaaggttcacttgttccttgggcgttcggtggaggcaccaagctggaaatcaaacgggctgatgctgcaccaactgtatccatcttcccaccatccagtgagcagttaacatctggaggtgcctcagtcgtgtgcttcttgaacaacttctaccccaaagacatcaatgtcaagtggaagattgatggcagtgaacgacaaaatggcgtcctgaacagttggactgatcaggacagcaaagacagcacctacagcatgagcagcaccctcacgttgaccaaggacgagtatgaacgacataacagctatacctgtgaggccactcacaagacatcaacttcacccattgtcaagagcttcaacaggaatgagtgtgagggcagaggaagtcttctaacatgcggtgacgtggaggagaatcccggccctatgaacttcgggctcagcttgattttccttgtccttgttttaaaaggtgtccagtgtgaggttcatctggtggagtctgggggagccttagtgaagcctggagggtccctgaaactctcctgtgcagcctctggattcagtttcagtaaatatggcatgtcttgggttcgccagactccagacaagaggctggagtgggtcgcaaccattagtagtagtgggagtcgcacctactatccagacagtgtgaagggccaattcaccatctccagagacaatgccaagaacaccctgtacctgcaaatgagcagtctgaagtctgaggacacagccatgtattactgttcaattagctgggacggtgctatggactactggggtcaagggacctcagtcaccgtctcctcagccaaaacgacacccccatctgtctatccactggcccctggatctgctgcccaaactaactccatggtgaccctgggatgcctggtcaagggctatttccctgagccagtgacagtgacctggaactctggatccctgtccagcggtgtgcacaccttcccagctgtcctgcagtctgacctctacactctgagcagctcagtgactgtcccctccagcacctggcccagcgagaccgtcacctgcaacgttgcccacccggccagcagcaccaaggtggacaagaaaattgtgcccagggattgtggttgtaagccttgcatatgtacagtcccagaagtatcatctgtcttcatcttccccccaaagcccaaggatgtgctcaccattactctgactcctaaggtcacgtgtgttgtggtagacatcagcaaggatgatcccgaggtccagttcagctggtttgtagatgatgtggaggtgcacacagctcagacgcaaccccgggaggagcagttcaacagcactttccgctcagtcagtgaacttcccatcatgcaccaggactggctcaatggcaaggagttcaaatgcagggtcaacagtgcagctttccctgcccccatcgagaaaaccatctccaaaaccaaaggcagaccgaaggctccacaggtgtacaccattccacctcccaaggagcagatggccaaggataaagtcagtctgacctgcatgataacagacttcttccctgaagacattactgtggagtggcagtggaatgggcagccagcggagaactacaagaacactcagcccatcatggacacagatggctcttacttcgtctacagcaagctcaatgtgcagaagagcaactgggaggcaggaaatactttcacctgctctgtgttacatgagggcctgcacaaccaccatactgagaagagcctctcccactctcctggttagtaactcgaggacggggtgaactacgcctgaggatccgatctttttccctctgccaaaaattatggggacatcatgaagccccttgagcatctgacttctggctaataaaggaaatttattttcattgcaatagtgtgttggaattttttgtgtctctcactcggcctaggtagataagtagcatggcgggttaatcattaactacaaggaacccctagtgatggagttggccactccctctctgcgcgctcgctcgctcactgaggccgggcgaccaaaggtcgcccgacgcccgggctttgcccgggcggcctcagtgagcgagcgagcgcgcag

SEQ ID NO: 2000 - DNA, 3971 bp, Artificial Sequence
  source: /note="Description of Artificial Sequence: Synthetic polynucleotide"
ctgcgcgctcgctcgctcactgaggccgcccgggcaaagcccgggcgtcgggcgacctttggtcgcccggcctcagtgagcgagcgagcgcgcagagagggagtggccaactccatcactaggggttccttgtagttaatgattaacccgccatgctacttatctaccagggtaatggggatcctctagaactatagctagtcgacattgattattgactagttattaatagtaatcaattacggggtcattagttcatagcccatatatggagttccgcgttacataacttacggtaaatggcccgcctggctgaccgcccaacgacccccgcccattgacgtcaataatgacgtatgttcccatagtaacgccaatagggactttccattgacgtcaatgggtggagtatttacggtaaactgcccacttggcagtacatcaagtgtatcatatgccaagtacgccccctattgacgtcaatgacggtaaatggcccgcctggcattatgcccagtacatgaccttatgggactttcctacttggcagtacatctacgtattagtcatcgctattaccatgtcgaggccacgttctgcttcactctccccatctcccccccctccccacccccaattttgtatttatttattttttaattattttgtgcagcgatgggggcggggggggggggcgcgcgccaggcggggcggggcggggcgaggggcggggcggggcgaggcggagaggtgcggcggcagccaatcagagcggcgcgctccgaaagtttccttttatggcgaggcggcggcggcggcggccctataaaaagcgaagcgcgcggcgggcgggagcaagcttcgtttagtgaaccgtcagatcgcctggagacgccatccacgctgttttgacctccatagaagacaccgggaccgatccagcctccgcggattcgaatcccggccgggaacggtgcattggaacgcggattccccgtgccaagagtgacgtaagtaccgcctatagagtctataggcccacaaaaaatgctttcttcttttaatatacttttttgtttatcttatttctaatactttccctaatctctttctttcagggcaataatgatacaatgtatcatgcctctttgcaccattctaaagaataacagtgataatttctgggttaaggcaatagcaatatttctgcatataaatatttctgcatataaattgtaactgatgtaagaggtttcatattgctaatagcagctacaatccagctaccattctgcttttattttatggttgggataaggctggattattctgagtccaagctaggcccttttgctaatcatgttcatacctcttatcttcctcccacagctcctgggcaacgtgctggtctgtgtgctggcccatcactttggcaaagaattgggattcgaaccggtgccgccaccatgaagttgcctgttaggctgttggtgctgatgttctggattcctgcttccagcagtgatgttttgatgacccaaactccactctccctgcctgtcagtcttggagatcaagcctccatctcttgcaaatctagtcagagcattgtacatagtaatggaaacacctatttagaatggtacctgcagaaaccaggccagtctccaaagctcctggtctacaaagtttccaatcgattttctggggtcccagacaggttcagtggcagtggatcagggacagatttcacactcaagatcagcagagtggaggctgaggatctgggaacttattactgctttcaaggttcacttgttccttgggcgttcggtggaggcaccaagctggaaatcaaacgggctgatgctgcaccaactgtatccatcttcccaccatccagtgagcagttaacatctggaggtgcctcagtcgtgtgcttcttgaacaacttctaccccaaagacatcaatgtcaagtggaagattgatggcagtgaacgacaaaatggcgtcctgaacagttggactgatcaggacagcaaagacagcacctacagcatgagcagcaccctcacgttgaccaaggacgagtatgaacgacataacagctatacctgtgaggccactcacaagacatcaacttcacccattgtcaagagcttcaacaggaatgagtgtggaagcggagtgaaacagactttgaattttgaccttctcaagttggcgggagacgtggagtccaaccctggacctatgaacttcgggctcagcttgattttccttgtccttgttttaaaaggtgtccagtgtgaggttcatctggtggagtctgggggagccttagtgaagcctggagggtccctgaaactctcctgtgcagcctctggattcagtttcagtaaatatggcatgtcttgggttcgccagactccagacaagaggctggagtgggtcgcaaccattagtagtagtgggagtcgcacctactatccagacagtgtgaagggccaattcaccatctccagagacaatgccaagaacaccctgtacctgcaaatgagcagtctgaagtctgaggacacagccatgtattactgttcaattagctgggacggtgctatggactactggggtcaagggacctcagtcaccgtctcctcagccaaaacgacacccccatctgtctatccactggcccctggatctgctgcccaaactaactccatggtgaccctgggatgcctggtcaagggctatttccctgagccagtgacagtgacctggaactctggatccctgtccagcggtgtgcacaccttcccagctgtcctgcagtctgacctctacactctgagcagctcagtgactgtcccctccagcacctggcccagcgagaccgtcacctgcaacgttgcccacccggccagcagcaccaaggtggacaagaaaattgtgcccagggattgtggttgtaagccttgcatatgtacagtcccagaagtatcatctgtcttcatcttccccccaaagcccaaggatgtgctcaccattactctgactcctaaggtcacgtgtgttgtggtagacatcagcaaggatgatcccgaggtccagttcagctggtttgtagatgatgtggaggtgcacacagctcagacgcaaccccgggaggagcagttcaacagcactttccgctcagtcagtgaacttcccatcatgcaccaggactggctcaatggcaaggagttcaaatgcagggtcaacagtgcagctttccctgcccccatcgagaaaaccatctccaaaaccaaaggcagaccgaaggctccacaggtgtacaccattccacctcccaaggagcagatggccaaggataaagtcagtctgacctgcatgataacagacttcttccctgaagacattactgtggagtggcagtggaatgggcagccagcggagaactacaagaacactcagcccatcatggacacagatggctcttacttcgtctacagcaagctcaatgtgcagaagagcaactgggaggcaggaaatactttcacctgctctgtgttacatgagggcctgcacaaccaccatactgagaagagcctctcccactctcctggttagtaactcgaggacggggtgaactacgcctgaggatccgatctttttccctctgccaaaaattatggggacatcatgaagccccttgagcatctgacttctggctaataaaggaaatttattttcattgcaatagtgtgttggaattttttgtgtctctcactcggcctaggtagataagtagcatggcgggttaatcattaactacaaggaacccctagtgatggagttggccactccctctctgcgcgctcgctcgctcactgaggccgggcgaccaaaggtcgcccgacgcccgggctttgcccgggcggcctcagtgagcgagcgagcgcgcag

SEQ ID NO: 2001 - DNA, 4029 bp, Artificial Sequence
  source: /note="Description of Artificial Sequence: Synthetic polynucleotide"
ctgcgcgctcgctcgctcactgaggccgcccgggcaaagcccgggcgtcgggcgacctttggtcgcccggcctcagtgagcgagcgagcgcgcagagagggagtggccaactccatcactaggggttccttgtagttaatgattaacccgccatgctacttatctaccagggtaatggggatcctctagaactatagctagtcgacataacgcgtgatctaacatatcctggtgtggagtagcggacgctgctatgacagaggctcgggggcctgagctggctctgtgagctggggaggaggcagacagccaggccttgtctgcaagcagacctggcagcattgggctggccgccccccagggcctcctcttcatgcccagtgaatgactcaccttggcacagacacaatgttcggggtgggcacagtgcctgcttcccgccgcaccccagcccccctcaaatgccttccgagaagcccattgagcagggggcttgcattgcaccccagcctgacagcctggcatcttgggataaaagcagcacagccccctaggggctgcccttgctgtgtggcgccaccggcggtggagaacaaggctctattcagcctgtgcccaggaaaggggatcaggggatgcccaggcatggacagtgggtggcagggggggagaggagggctgtctgcttcccagaagtccaaggacacaaatgggtgaggggagagctctccccatagctgggctgcggcccaaccccaccccctcaggctatgccagggggtgttgccaggggcacccgggcatcgccagtctagcccactccttcataaagccctcgcatcccaggagcgagcagagccagagcaggttggagaggagacgcatcacctccgctgctcgcggggatcctctagaagcttcgtttagtgaaccgtcagatcgcctggagacgccatccacgctgttttgacctccatagaagacaccgggaccgatccagcctccgcggattcgaatcccggccgggaacggtgcattggaacgcggattccccgtgccaagagtgacgtaagtaccgcctatagagtctataggcccacaaaaaatgctttcttcttttaatatacttttttgtttatcttatttctaatactttccctaatctctttctttcagggcaataatgatacaatgtatcatgcctctttgcaccattctaaagaataacagtgataatttctgggttaaggcaatagcaatatttctgcatataaatatttctgcatataaattgtaactgatgtaagaggtttcatattgctaatagcagctacaatccagctaccattctgcttttattttatggttgggataaggctggattattctgagtccaagctaggcccttttgctaatcatgttcatacctcttatcttcctcccacagctcctgggcaacgtgctggtctgtgtgctggcccatcactttggcaaagaattgggattcgaaccggtgccgccaccatgaagttgcctgttaggctgttggtgctgatgttctggattcctgcttccagcagtgatgttttgatgacccaaactccactctccctgcctgtcagtcttggagatcaagcctccatctcttgcaaatctagtcagagcattgtacatagtaatggaaacacctatttagaatggtacctgcagaaaccaggccagtctccaaagctcctggtctacaaagtttccaatcgattttctggggtcccagacaggttcagtggcagtggatcagggacagatttcacactcaagatcagcagagtggaggctgaggatctgggaacttattactgctttcaaggttcacttgttccttgggcgttcggtggaggcaccaagctggaaatcaaacgggctgatgctgcaccaactgtatccatcttcccaccatccagtgagcagttaacatctggaggtgcctcagtcgtgtgcttcttgaacaacttctaccccaaagacatcaatgtcaagtggaagattgatggcagtgaacgacaaaatggcgtcctgaacagttggactgatcaggacagcaaagacagcacctacagcatgagcagcaccctcacgttgaccaaggacgagtatgaacgacataacagctatacctgtgaggccactcacaagacatcaacttcacccattgtcaagagcttcaacaggaatgagtgtggaagcggagtgaaacagactttgaattttgaccttctcaagttggcgggagacgtggagtccaaccctggacctatgaacttcgggctcagcttgattttccttgtccttgttttaaaaggtgtccagtgtgaggttcatctggtggagtctgggggagccttagtgaagcctggagggtccctgaaactctcctgtgcagcctctggattcagtttcagtaaatatggcatgtcttgggttcgccagactccagacaagaggctggagtgggtcgcaaccattagtagtagtgggagtcgcacctactatccagacagtgtgaagggccaattcaccatctccagagacaatgccaagaacaccctgtacctgcaaatgagcagtctgaagtctgaggacacagccatgtattactgttcaattagctgggacggtgctatggactactggggtcaagggacctcagtcaccgtctcctcagccaaaacgacacccccatctgtctatccactggcccctggatctgctgcccaaactaactccatggtgaccctgggatgcctggtcaagggctatttccctgagccagtgacagtgacctggaactctggatccctgtccagcggtgtgcacaccttcccagctgtcctgcagtctgacctctacactctgagcagctcagtgactgtcccctccagcacctggcccagcgagaccgtcacctgcaacgttgcccacccggccagcagcaccaaggtggacaagaaaattgtgcccagggattgtggttgtaagccttgcatatgtacagtcccagaagtatcatctgtcttcatcttccccccaaagcccaaggatgtgctcaccattactctgactcctaaggtcacgtgtgttgtggtagacatcagcaaggatgatcccgaggtccagttcagctggtttgtagatgatgtggaggtgcacacagctcagacgcaaccccgggaggagcagttcaacagcactttccgctcagtcagtgaacttcccatcatgcaccaggactggctcaatggcaaggagttcaaatgcagggtcaacagtgcagctttccctgcccccatcgagaaaaccatctccaaaaccaaaggcagaccgaaggctccacaggtgtacaccattccacctcccaaggagcagatggccaaggataaagtcagtctgacctgcatgataacagacttcttccctgaagacattactgtggagtggcagtggaatgggcagccagcggagaactacaagaacactcagcccatcatggacacagatggctcttacttcgtctacagcaagctcaatgtgcagaagagcaactgggaggcaggaaatactttcacctgctctgtgttacatgagggcctgcacaaccaccatactgagaagagcctctcccactctcctggttagtaactcgaggacggggtgaactacgcctgaggatccgatctttttccctctgccaaaaattatggggacatcatgaagccccttgagcatctgacttctggctaataaaggaaatttattttcattgcaatagtgtgttggaattttttgtgtctctcactcggcctaggtagataagtagcatggcgggttaatcattaactacaaggaacccctagtgatggagttggccactccctctctgcgcgctcgctcgctcactgaggccgggcgaccaaaggtcgcccgacgcccgggctttgcccgggcggcctcagtgagcgagcgagcgcgcag

SEQ ID NO: 2002 - DNA, 4008 bp, Artificial Sequence
  source: /note="Description of Artificial Sequence: Synthetic polynucleotide"
ctgcgcgctcgctcgctcactgaggccgcccgggcaaagcccgggcgtcgggcgacctttggtcgcccggcctcagtgagcgagcgagcgcgcagagagggagtggccaactccatcactaggggttccttgtagttaatgattaacccgccatgctacttatctaccagggtaatggggatcctctagaactatagctagtcgacataacgcgtgatctaacatatcctggtgtggagtagcggacgctgctatgacagaggctcgggggcctgagctggctctgtgagctggggaggaggcagacagccaggccttgtctgcaagcagacctggcagcattgggctggccgccccccagggcctcctcttcatgcccagtgaatgactcaccttggcacagacacaatgttcggggtgggcacagtgcctgcttcccgccgcaccccagcccccctcaaatgccttccgagaagcccattgagcagggggcttgcattgcaccccagcctgacagcctggcatcttgggataaaagcagcacagccccctaggggctgcccttgctgtgtggcgccaccggcggtggagaacaaggctctattcagcctgtgcccaggaaaggggatcaggggatgcccaggcatggacagtgggtggcagggggggagaggagggctgtctgcttcccagaagtccaaggacacaaatgggtgaggggagagctctccccatagctgggctgcggcccaaccccaccccctcaggctatgccagggggtgttgccaggggcacccgggcatcgccagtctagcccactccttcataaagccctcgcatcccaggagcgagcagagccagagcaggttggagaggagacgcatcacctccgctgctcgcggggatcctctagaagcttcgtttagtgaaccgtcagatcgcctggagacgccatccacgctgttttgacctccatagaagacaccgggaccgatccagcctccgcggattcgaatcccggccgggaacggtgcattggaacgcggattccccgtgccaagagtgacgtaagtaccgcctatagagtctataggcccacaaaaaatgctttcttcttttaatatacttttttgtttatcttatttctaatactttccctaatctctttctttcagggcaataatgatacaatgtatcatgcctctttgcaccattctaaagaataacagtgataatttctgggttaaggcaatagcaatatttctgcatataaatatttctgcatataaattgtaactgatgtaagaggtttcatattgctaatagcagctacaatccagctaccattctgcttttattttatggttgggataaggctggattattctgagtccaagctaggcccttttgctaatcatgttcatacctcttatcttcctcccacagctcctgggcaacgtgctggtctgtgtgctggcccatcactttggcaaagaattgggattcgaaccggtgccgccaccatgaagttgcctgttaggctgttggtgctgatgttctggattcctgcttccagcagtgatgttttgatgacccaaactccactctccctgcctgtcagtcttggagatcaagcctccatctcttgcaaatctagtcagagcattgtacatagtaatggaaacacctatttagaatggtacctgcagaaaccaggccagtctccaaagctcctggtctacaaagtttccaatcgattttctggggtcccagacaggttcagtggcagtggatcagggacagatttcacactcaagatcagcagagtggaggctgaggatctgggaacttattactgctttcaaggttcacttgttccttgggcgttcggtggaggcaccaagctggaaatcaaacgggctgatgctgcaccaactgtatccatcttcccaccatccagtgagcagttaacatctggaggtgcctcagtcgtgtgcttcttgaacaacttctaccccaaagacatcaatgtcaagtggaagattgatggcagtgaacgacaaaatggcgtcctgaacagttggactgatcaggacagcaaagacagcacctacagcatgagcagcaccctcacgttgaccaaggacgagtatgaacgacataacagctatacctgtgaggccactcacaagacatcaacttcacccattgtcaagagcttcaacaggaatgagtgtgagggcagaggaagtcttctaacatgcggtgacgtggaggagaatcccggccctatgaacttcgggctcagcttgattttccttgtccttgttttaaaaggtgtccagtgtgaggttcatctggtggagtctgggggagccttagtgaagcctggagggtccctgaaactctcctgtgcagcctctggattcagtttcagtaaatatggcatgtcttgggttcgccagactccagacaagaggctggagtgggtcgcaaccattagtagtagtgggagtcgcacctactatccagacagtgtgaagggccaattcaccatctccagagacaatgccaagaacaccctgtacctgcaaatgagcagtctgaagtctgaggacacagccatgtattactgttcaattagctgggacggtgctatggactactggggtcaagggacctcagtcaccgtctcctcagccaaaacgacacccccatctgtctatccactggcccctggatctgctgcccaaactaactccatggtgaccctgggatgcctggtcaagggctatttccctgagccagtgacagtgacctggaactctggatccctgtccagcggtgtgcacaccttcccagctgtcctgcagtctgacctctacactctgagcagctcagtgactgtcccctccagcacctggcccagcgagaccgtcacctgcaacgttgcccacccggccagcagcaccaaggtggacaagaaaattgtgcccagggattgtggttgtaagccttgcatatgtacagtcccagaagtatcatctgtcttcatcttccccccaaagcccaaggatgtgctcaccattactctgactcctaaggtcacgtgtgttgtggtagacatcagcaaggatgatcccgaggtccagttcagctggtttgtagatgatgtggaggtgcacacagctcagacgcaaccccgggaggagcagttcaacagcactttccgctcagtcagtgaacttcccatcatgcaccaggactggctcaatggcaaggagttcaaatgcagggtcaacagtgcagctttccctgcccccatcgagaaaaccatctccaaaaccaaaggcagaccgaaggctccacaggtgtacaccattccacctcccaaggagcagatggccaaggataaagtcagtctgacctgcatgataacagacttcttccctgaagacattactgtggagtggcagtggaatgggcagccagcggagaactacaagaacactcagcccatcatggacacagatggctcttacttcgtctacagcaagctcaatgtgcagaagagcaactgggaggcaggaaatactttcacctgctctgtgttacatgagggcctgcacaaccaccatactgagaagagcctctcccactctcctggttagtaactcgaggacggggtgaactacgcctgaggatccgatctttttccctctgccaaaaattatggggacatcatgaagccccttgagcatctgacttctggctaataaaggaaatttattttcattgcaatagtgtgttggaattttttgtgtctctcactcggcctaggtagataagtagcatggcgggttaatcattaactacaaggaacccctagtgatggagttggccactccctctctgcgcgctcgctcgctcactgaggccgggcgaccaaaggtcgcccgacgcccgggctttgcccgggcggcctcagtgagcgagcgagcgcgcag

SEQ ID NO: 2003 - DNA, 3887 bp, Artificial Sequence
  source: /note="Description of Artificial Sequence: Synthetic polynucleotide"
ctgcgcgctcgctcgctcactgaggccgcccgggcaaagcccgggcgtcgggcgacctttggtcgcccggcctcagtgagcgagcgagcgcgcagagagggagtggccaactccatcactaggggttccttgtagttaatgattaacccgccatgctacttatctaccagggtaatggggatcctctagaactatagctagtcgacataacgcgttagtatctgcagagggccctgcgtatgagtgcaagtgggttttaggaccaggatgaggcggggtgggggtgcctacctgacgaccgaccccgacccactggacaagcacccaacccccattccccaaattgcgcatcccctatcagagagggggaggggaaacaggatgcggcgaggcgcgtgcgcactgccagcttcagcaccgcggacagtgccttcgcccccgcctggcggcgcgcgccaccgccgcctcagcactgaaggcgcgctgacgtcactcgccggtcccccgcaaactccccttcccggccaccttggtcgcgtccgcgccgccgccggcccagccggaccgcaccacgcgaggcgcgagataggggggcacgggcgcgaccatctgcgctgcggcgccggcgactcagcgctgcctcagtctgcggtgggcagcggaggagtcgtgtcgtgcctgagagcgcagctgtgctcctgggcaccgcgcagtccgcccccgcggctcctggccagaccacccctaggaccccctgccccaagtcgcagccaagcttcgtttagtgaaccgtcagatcgcctggagacgccatccacgctgttttgacctccatagaagacaccgggaccgatccagcctccgcggattcgaatcccggccgggaacggtgcattggaacgcggattccccgtgccaagagtgacgtaagtaccgcctatagagtctataggcccacaaaaaatgctttcttcttttaatatacttttttgtttatcttatttctaatactttccctaatctctttctttcagggcaataatgatacaatgtatcatgcctctttgcaccattctaaagaataacagtgataatttctgggttaaggcaatagcaatatttctgcatataaatatttctgcatataaattgtaactgatgtaagaggtttcatattgctaatagcagctacaatccagctaccattctgcttttattttatggttgggataaggctggattattctgagtccaagctaggcccttttgctaatcatgttcatacctcttatcttcctcccacagctcctgggcaacgtgctggtctgtgtgctggcccatcactttggcaaagaattgggattcgaaccggtgccgccaccatgaagttgcctgttaggctgttggtgctgatgttctggattcctgcttccagcagtgatgttttgatgacccaaactccactctccctgcctgtcagtcttggagatcaagcctccatctcttgcaaatctagtcagagcattgtacatagtaatggaaacacctatttagaatggtacctgcagaaaccaggccagtctccaaagctcctggtctacaaagtttccaatcgattttctggggtcccagacaggttcagtggcagtggatcagggacagatttcacactcaagatcagcagagtggaggctgaggatctgggaacttattactgctttcaaggttcacttgttccttgggcgttcggtggaggcaccaagctggaaatcaaacgggctgatgctgcaccaactgtatccatcttcccaccatccagtgagcagttaacatctggaggtgcctcagtcgtgtgcttcttgaacaacttctaccccaaagacatcaatgtcaagtggaagattgatggcagtgaacgacaaaatggcgtcctgaacagttggactgatcaggacagcaaagacagcacctacagcatgagcagcaccctcacgttgaccaaggacgagtatgaacgacataacagctatacctgtgaggccactcacaagacatcaacttcacccattgtcaagagcttcaacaggaatgagtgtggaagcggagtgaaacagactttgaattttgaccttctcaagttggcgggagacgtggagtccaaccctggacctatgaacttcgggctcagcttgattttccttgtccttgttttaaaaggtgtccagtgtgaggttcatctggtggagtctgggggagccttagtgaagcctggagggtccctgaaactctcctgtgcagcctctggattcagtttcagtaaatatggcatgtcttgggttcgccagactccagacaagaggctggagtgggtcgcaaccattagtagtagtgggagtcgcacctactatccagacagtgtgaagggccaattcaccatctccagagacaatgccaagaacaccctgtacctgcaaatgagcagtctgaagtctgaggacacagccatgtattactgttcaattagctgggacggtgctatggactactggggtcaagggacctcagtcaccgtctcctcagccaaaacgacacccccatctgtctatccactggcccctggatctgctgcccaaactaactccatggtgaccctgggatgcctggtcaagggctatttccctgagccagtgacagtgacctggaactctggatccctgtccagcggtgtgcacaccttcccagctgtcctgcagtctgacctctacactctgagcagctcagtgactgtcccctccagcacctggcccagcgagaccgtcacctgcaacgttgcccacccggccagcagcaccaaggtggacaagaaaattgtgcccagggattgtggttgtaagccttgcatatgtacagtcccagaagtatcatctgtcttcatcttccccccaaagcccaaggatgtgctcaccattactctgactcctaaggtcacgtgtgttgtggtagacatcagcaaggatgatcccgaggtccagttcagctggtttgtagatgatgtggaggtgcacacagctcagacgcaaccccgggaggagcagttcaacagcactttccgctcagtcagtgaacttcccatcatgcaccaggactggctcaatggcaaggagttcaaatgcagggtcaacagtgcagctttccctgcccccatcgagaaaaccatctccaaaaccaaaggcagaccgaaggctccacaggtgtacaccattccacctcccaaggagcagatggccaaggataaagtcagtctgacctgcatgataacagacttcttccctgaagacattactgtggagtggcagtggaatgggcagccagcggagaactacaagaacactcagcccatcatggacacagatggctcttacttcgtctacagcaagctcaatgtgcagaagagcaactgggaggcaggaaatactttcacctgctctgtgttacatgagggcctgcacaaccaccatactgagaagagcctctcccactctcctggttagtaactcgaggacggggtgaactacgcctgaggatccgatctttttccctctgccaaaaattatggggacatcatgaagccccttgagcatctgacttctggctaataaaggaaatttattttcattgcaatagtgtgttggaattttttgtgtctctcactcggcctaggtagataagtagcatggcgggttaatcattaactacaaggaacccctagtgatggagttggccactccctctctgcgcgctcgctcgctcactgaggccgggcgaccaaaggtcgcccgacgcccgggctttgcccgggcggcctcagtgagcgagcgagcgcgcag

SEQ ID NO: 2004 - DNA, 3866 bp, Artificial Sequence
  source: /note="Description of Artificial Sequence: Synthetic polynucleotide"
ctgcgcgctcgctcgctcactgaggccgcccgggcaaagcccgggcgtcgggcgacctttggtcgcccggcctcagtgagcgagcgagcgcgcagagagggagtggccaactccatcactaggggttccttgtagttaatgattaacccgccatgctacttatctaccagggtaatggggatcctctagaactatagctagtcgacataacgcgttagtatctgcagagggccctgcgtatgagtgcaagtgggttttaggaccaggatgaggcggggtgggggtgcctacctgacgaccgaccccgacccactggacaagcacccaacccccattccccaaattgcgcatcccctatcagagagggggaggggaaacaggatgcggcgaggcgcgtgcgcactgccagcttcagcaccgcggacagtgccttcgcccccgcctggcggcgcgcgccaccgccgcctcagcactgaaggcgcgctgacgtcactcgccggtcccccgcaaactccccttcccggccaccttggtcgcgtccgcgccgccgccggcccagccggaccgcaccacgcgaggcgcgagataggggggcacgggcgcgaccatctgcgctgcggcgccggcgactcagcgctgcctcagtctgcggtgggcagcggaggagtcgtgtcgtgcctgagagcgcagctgtgctcctgggcaccgcgcagtccgcccccgcggctcctggccagaccacccctaggaccccctgccccaagtcgcagccaagcttcgtttagtgaaccgtcagatcgcctggagacgccatccacgctgttttgacctccatagaagacaccgggaccgatccagcctccgcggattcgaatcccggccgggaacggtgcattggaacgcggattccccgtgccaagagtgacgtaagtaccgcctatagagtctataggcccacaaaaaatgctttcttcttttaatatacttttttgtttatcttatttctaatactttccctaatctctttctttcagggcaataatgatacaatgtatcatgcctctttgcaccattctaaagaataacagtgataatttctgggttaaggcaatagcaatatttctgcatataaatatttctgcatataaattgtaactgatgtaagaggtttcatattgctaatagcagctacaatccagctaccattctgcttttattttatggttgggataaggctggattattctgagtccaagctaggcccttttgctaatcatgttcatacctcttatcttcctcccacagctcctgggcaacgtgctggtctgtgtgctggcccatcactttggcaaagaattgggattcgaaccggtgccgccaccatgaagttgcctgttaggctgttggtgctgatgttctggattcctgcttccagcagtgatgttttgatgacccaaactccactctccctgcctgtcagtcttggagatcaagcctccatctcttgcaaatctagtcagagcattgtacatagtaatggaaacacctatttagaatggtacctgcagaaaccaggccagtctccaaagctcctggtctacaaagtttccaatcgattttctggggtcccagacaggttcagtggcagtggatcagggacagatttcacactcaagatcagcagagtggaggctgaggatctgggaacttattactgctttcaaggttcacttgttccttgggcgttcggtggaggcaccaagctggaaatcaaacgggctgatgctgcaccaactgtatccatcttcccaccatccagtgagcagttaacatctggaggtgcctcagtcgtgtgcttcttgaacaacttctaccccaaagacatcaatgtcaagtggaagattgatggcagtgaacgacaaaatggcgtcctgaacagttggactgatcaggacagcaaagacagcacctacagcatgagcagcaccctcacgttgaccaaggacgagtatgaacgacataacagctatacctgtgaggccactcacaagacatcaacttcacccattgtcaagagcttcaacaggaatgagtgtgagggcagaggaagtcttctaacatgcggtgacgtggaggagaatcccggccctatgaacttcgggctcagcttgattttccttgtccttgttttaaaaggtgtccagtgtgaggttcatctggtggagtctgggggagccttagtgaagcctggagggtccctgaaactctcctgtgcagcctctggattcagtttcagtaaatatggcatgtcttgggttcgccagactccagacaagaggctggagtgggtcgcaaccattagtagtagtgggagtcgcacctactatccagacagtgtgaagggccaattcaccatctccagagacaatgccaagaacaccctgtacctgcaaatgagcagtctgaagtctgaggacacagccatgtattactgttcaattagctgggacggtgctatggactactggggtcaagggacctcagtcaccgtctcctcagccaaaacgacacccccatctgtctatccactggcccctggatctgctgcccaaactaactccatggtgaccctgggatgcctggtcaagggctatttccctgagccagtgacagtgacctggaactctggatccctgtccagcggtgtgcacaccttcccagctgtcctgcagtctgacctctacactctgagcagctcagtgactgtcccctccagcacctggcccagcgagaccgtcacctgcaacgttgcccacccggccagcagcaccaaggtggacaagaaaattgtgcccagggattgtggttgtaagccttgcatatgtacagtcccagaagtatcatctgtcttcatcttccccccaaagcccaaggatgtgctcaccattactctgactcctaaggtcacgtgtgttgtggtagacatcagcaaggatgatcccgaggtccagttcagctggtttgtagatgatgtggaggtgcacacagctcagacgcaaccccgggaggagcagttcaacagcactttccgctcagtcagtgaacttcccatcatgcaccaggactggctcaatggcaaggagttcaaatgcagggtcaacagtgcagctttccctgcccccatcgagaaaaccatctccaaaaccaaaggcagaccgaaggctccacaggtgtacaccattccacctcccaaggagcagatggccaaggataaagtcagtctgacctgcatgataacagacttcttccctgaagacattactgtggagtggcagtggaatgggcagccagcggagaactacaagaacactcagcccatcatggacacagatggctcttacttcgtctacagcaagctcaatgtgcagaagagcaactgggaggcaggaaatactttcacctgctctgtgttacatgagggcctgcacaaccaccatactgagaagagcctctcccactctcctggttagtaactcgaggacggggtgaactacgcctgaggatccgatctttttccctctgccaaaaattatggggacatcatgaagccccttgagcatctgacttctggctaataaaggaaatttattttcattgcaatagtgtgttggaattttttgtgtctctcactcggcctaggtagataagtagcatggcgggttaatcattaactacaaggaacccctagtgatggagttggccactccctctctgcgcgctcgctcgctcactgaggccgggcgaccaaaggtcgcccgacgcccgggctttgcccgggcggcctcagtgagcgagcgagcgcgcag

SEQ ID NO: 2005 - DNA, 3932 bp, Artificial Sequence
  source: /note="Description of Artificial Sequence: Synthetic polynucleotide"
ctgcgcgctcgctcgctcactgaggccgcccgggcaaagcccgggcgtcgggcgacctttggtcgcccggcctcagtgagcgagcgagcgcgcagagagggagtggccaactccatcactaggggttccttgtagttaatgattaacccgccatgctacttatctaccagggtaatggggatcctctagaactatagctagtcgacattgattattgactagttattaatagtaatcaattacggggtcattagttcatagcccatatatggagttccgcgttacataacttacggtaaatggcccgcctggctgaccgcccaacgacccccgcccattgacgtcaataatgacgtatgttcccatagtaacgccaatagggactttccattgacgtcaatgggtggagtatttacggtaaactgcccacttggcagtacatcaagtgtatcatatgccaagtacgccccctattgacgtcaatgacggtaaatggcccgcctggcattatgcccagtacatgaccttatgggactttcctacttggcagtacatctacgtattagtcatcgctattaccatgtcgaggccacgttctgcttcactctccccatctcccccccctccccacccccaattttgtatttatttattttttaattattttgtgcagcgatgggggcggggggggggggcgcgcgccaggcggggcggggcggggcgaggggcggggcggggcgaggcggagaggtgcggcggcagccaatcagagcggcgcgctccgaaagtttccttttatggcgaggcggcggcggcggcggccctataaaaagcgaagcgcgcggcgggcgggagcaagcttcgtttagtgaaccgtcagatcgcctggagacgccatccacgctgttttgacctccatagaagacaccgggaccgatccagcctccgcggattcgaatcccggccgggaacggtgcattggaacgcggattccccgtgccaagagtgacgtaagtaccgcctatagagtctataggcccacaaaaaatgctttcttcttttaatatacttttttgtttatcttatttctaatactttccctaatctctttctttcagggcaataatgatacaatgtatcatgcctctttgcaccattctaaagaataacagtgataatttctgggttaaggcaatagcaatatttctgcatataaatatttctgcatataaattgtaactgatgtaagaggtttcatattgctaatagcagctacaatccagctaccattctgcttttattttatggttgggataaggctggattattctgagtccaagctaggcccttttgctaatcatgttcatacctcttatcttcctcccacagctcctgggcaacgtgctggtctgtgtgctggcccatcactttggcaaagaattgggattcgaaccggtgccgccaccatgaagttgcctgttaggctgttggtgctgatgttctggattcctgcttccagcagtgacgtgcagatgatccagagccccagcagcctgagcgccagcctgggcgacatcgtgaccatgacctgccaggccagccagggcaccagcatcaacctgaactggttccagcagaagcccggcaaggcccccaagctgctgatctacggcgccagcaacctggaggacggcgtgcccagcaggttcagcggcagcaggtacggcaccgacttcaccctgaccatcagcagcctggaggacgaggacatggccacctacttctgcctgcagcacacctacctgcccttcaccttcggcagcggcaccaagctggagatcaagcgggctgatgctgcaccaactgtatccatcttcccaccatccagtgagcagttaacatctggaggtgcctcagtcgtgtgcttcttgaacaacttctaccccaaagacatcaatgtcaagtggaagattgatggcagtgaacgacaaaatggcgtcctgaacagttggactgatcaggacagcaaagacagcacctacagcatgagcagcaccctcacgttgaccaaggacgagtatgaacgacataacagctatacctgtgaggccactcacaagacatcaacttcacccattgtcaagagcttcaacaggaatgagtgtgagggcagaggaagtcttctaacatgcggtgacgtggaggagaatcccggccctatgaacttcgggctcagcttgattttccttgtccttgttttaaaaggtgtccagtgtcaggtgcagctgcagcagagcgacgccgagctggtgaagcccggcgccagcgtgaagatcagctgcaaggccagcggctacaccttcaccgacaggaccatccactgggtgaagcagaggcccgagcagggcctggagtggatcggctacatctaccccggcgacggcagcaccaagtacaacgagaacttcaagggcaaggccaccctgaccgccgacaagagcagcagcaccgcctacatgcagctgaacagcctgaccagcgaggacagcgccgtgtacttctgcgccaggaggggcgcgatggactactggggccagggcaccagcgtgaccgtgagcagcgccaaaacgacacccccatctgtctatccactggcccctggatctgctgcccaaactaactccatggtgaccctgggatgcctggtcaagggctatttccctgagccagtgacagtgacctggaactctggatccctgtccagcggtgtgcacaccttcccagctgtcctgcagtctgacctctacactctgagcagctcagtgactgtcccctccagcacctggcccagcgagaccgtcacctgcaacgttgcccacccggccagcagcaccaaggtggacaagaaaattgtgcccagggattgtggttgtaagccttgcatatgtacagtcccagaagtatcatctgtcttcatcttccccccaaagcccaaggatgtgctcaccattactctgactcctaaggtcacgtgtgttgtggtagacatcagcaaggatgatcccgaggtccagttcagctggtttgtagatgatgtggaggtgcacacagctcagacgcaaccccgggaggagcagttcaacagcactttccgctcagtcagtgaacttcccatcatgcaccaggactggctcaatggcaaggagttcaaatgcagggtcaacagtgcagctttccctgcccccatcgagaaaaccatctccaaaaccaaaggcagaccgaaggctccacaggtgtacaccattccacctcccaaggagcagatggccaaggataaagtcagtctgacctgcatgataacagacttcttccctgaagacattactgtggagtggcagtggaatgggcagccagcggagaactacaagaacactcagcccatcatggacacagatggctcttacttcgtctacagcaagctcaatgtgcagaagagcaactgggaggcaggaaatactttcacctgctctgtgttacatgagggcctgcacaaccaccatactgagaagagcctctcccactctcctggtaagtagtaactcgaggacggggtgaactacgcctgaggatccgatctttttccctctgccaaaaattatggggacatcatgaagccccttgagcatctgacttctggctaataaaggaaatttattttcattgcaatagtgtgttggaattttttgtgtctctcactcggcctaggtagataagtagcatggcgggttaatcattaactacaaggaacccctagtgatggagttggccactccctctctgcgcgctcgctcgctcactgaggccgggcgaccaaaggtcgcccgacgcccgggctttgcccgggcggcctcagtgagcgagcgagcgcgcag

SEQ ID NO: 2006 - DNA, 3932 bp, Artificial Sequence
  source: /note="Description of Artificial Sequence: Synthetic polynucleotide"
ctgcgcgctcgctcgctcactgaggccgcccgggcaaagcccgggcgtcgggcgacctttggtcgcccggcctcagtgagcgagcgagcgcgcagagagggagtggccaactccatcactaggggttccttgtagttaatgattaacccgccatgctacttatctaccagggtaatggggatcctctagaactatagctagtcgacattgattattgactagttattaatagtaatcaattacggggtcattagttcatagcccatatatggagttccgcgttacataacttacggtaaatggcccgcctggctgaccgcccaacgacccccgcccattgacgtcaataatgacgtatgttcccatagtaacgccaatagggactttccattgacgtcaatgggtggagtatttacggtaaactgcccacttggcagtacatcaagtgtatcatatgccaagtacgccccctattgacgtcaatgacggtaaatggcccgcctggcattatgcccagtacatgaccttatgggactttcctacttggcagtacatctacgtattagtcatcgctattaccatgtcgaggccacgttctgcttcactctccccatctcccccccctccccacccccaattttgtatttatttattttttaattattttgtgcagcgatgggggcggggggggggggcgcgcgccaggcggggcggggcggggcgaggggcggggcggggcgaggcggagaggtgcggcggcagccaatcagagcggcgcgctccgaaagtttccttttatggcgaggcggcggcggcggcggccctataaaaagcgaagcgcgcggcgggcgggagcaagcttcgtttagtgaaccgtcagatcgcctggagacgccatccacgctgttttgacctccatagaagacaccgggaccgatccagcctccgcggattcgaatcccggccgggaacggtgcattggaacgcggattccccgtgccaagagtgacgtaagtaccgcctatagagtctataggcccacaaaaaatgctttcttcttttaatatacttttttgtttatcttatttctaatactttccctaatctctttctttcagggcaataatgatacaatgtatcatgcctctttgcaccattctaaagaataacagtgataatttctgggttaaggcaatagcaatatttctgcatataaatatttctgcatataaattgtaactgatgtaagaggtttcatattgctaatagcagctacaatccagctaccattctgcttttattttatggttgggataaggctggattattctgagtccaagctaggcccttttgctaatcatgttcatacctcttatcttcctcccacagctcctgggcaacgtgctggtctgtgtgctggcccatcactttggcaaagaattgggattcgaaccggtgccgccaccatgaagttgcctgttaggctgttggtgctgatgttctggattcctgcttccagcagtgacgttcagatgatccagagccccagcagcctgagcgccagcctgggcgacatcgtgaccatgacctgccaggccagccagggcaccagcatcaacctgaactggttccagcagaagcccggcaaggcccccaagctgctgatctacggcgccagcaacctggaggacggcgtgcccagccggttcagcggcagccggtacggcaccgacttcaccctgaccatcagcagcctggaggacgaggacatggccacctacttctgcctgcagcacacctacctgcccttcaccttcggcagcggcaccaagctggagatcaagcgggctgatgctgcaccaactgtatccatcttcccaccatccagtgagcagttaacatctggaggtgcctcagtcgtgtgcttcttgaacaacttctaccccaaagacatcaatgtcaagtggaagattgatggcagtgaacgacaaaatggcgtcctgaacagttggactgatcaggacagcaaagacagcacctacagcatgagcagcaccctcacgttgaccaaggacgagtatgaacgacataacagctatacctgtgaggccactcacaagacatcaacttcacccattgtcaagagcttcaacaggaatgagtgtgagggcagaggaagtcttctaacatgcggtgacgtggaggagaatcccggccctatgaacttcgggctcagcttgattttccttgtccttgttttaaaaggtgtccagtgtcaggtgcagctgcagcagagcgacgccgagctggtgaagcccggcgccagcgtgaagatcagctgcaaggccagcggctacaccttcaccgaccggaccatccactgggtgaagcagcggcccgagcagggcctggagtggatcggctacatctaccccggcgacggcagcaccaagtacaacgagaacttcaagggcaaggccaccctgaccgccgacaagagcagcagcaccgcctacatgcagctgaacagcctgaccagcgaggacagcgccgtgtacttctgcgcccggcggggcgctatggactactggggccagggcaccagcgtgaccgtgagcagcgccaaaacgacacccccatctgtctatccactggcccctggatctgctgcccaaactaactccatggtgaccctgggatgcctggtcaagggctatttccctgagccagtgacagtgacctggaactctggatccctgtccagcggtgtgcacaccttcccagctgtcctgcagtctgacctctacactctgagcagctcagtgactgtcccctccagcacctggcccagcgagaccgtcacctgcaacgttgcccacccggccagcagcaccaaggtggacaagaaaattgtgcccagggattgtggttgtaagccttgcatatgtacagtcccagaagtatcatctgtcttcatcttccccccaaagcccaaggatgtgctcaccattactctgactcctaaggtcacgtgtgttgtggtagacatcagcaaggatgatcccgaggtccagttcagctggtttgtagatgatgtggaggtgcacacagctcagacgcaaccccgggaggagcagttcaacagcactttccgctcagtcagtgaacttcccatcatgcaccaggactggctcaatggcaaggagttcaaatgcagggtcaacagtgcagctttccctgcccccatcgagaaaaccatctccaaaaccaaaggcagaccgaaggctccacaggtgtacaccattccacctcccaaggagcagatggccaaggataaagtcagtctgacctgcatgataacagacttcttccctgaagacattactgtggagtggcagtggaatgggcagccagcggagaactacaagaacactcagcccatcatggacacagatggctcttacttcgtctacagcaagctcaatgtgcagaagagcaactgggaggcaggaaatactttcacctgctctgtgttacatgagggcctgcacaaccaccatactgagaagagcctctcccactctcctggtaagtagtaactcgaggacggggtgaactacgcctgaggatccgatctttttccctctgccaaaaattatggggacatcatgaagccccttgagcatctgacttctggctaataaaggaaatttattttcattgcaatagtgtgttggaattttttgtgtctctcactcggcctaggtagataagtagcatggcgggttaatcattaactacaaggaacccctagtgatggagttggccactccctctctgcgcgctcgctcgctcactgaggccgggcgaccaaaggtcgcccgacgcccgggctttgcccgggcggcctcagtgagcgagcgagcgcgcag

SEQ ID NO: 2007 - DNA, 3932 bp, Artificial Sequence
  source: /note="Description of Artificial Sequence: Synthetic polynucleotide"
ctgcgcgctcgctcgctcactgaggccgcccgggcaaagcccgggcgtcgggcgacctttggtcgcccggcctcagtgagcgagcgagcgcgcagagagggagtggccaactccatcactaggggttccttgtagttaatgattaacccgccatgctacttatctaccagggtaatggggatcctctagaactatagctagtcgacattgattattgactagttattaatagtaatcaattacggggtcattagttcatagcccatatatggagttccgcgttacataacttacggtaaatggcccgcctggctgaccgcccaacgacccccgcccattgacgtcaataatgacgtatgttcccatagtaacgccaatagggactttccattgacgtcaatgggtggagtatttacggtaaactgcccacttggcagtacatcaagtgtatcatatgccaagtacgccccctattgacgtcaatgacggtaaatggcccgcctggcattatgcccagtacatgaccttatgggactttcctacttggcagtacatctacgtattagtcatcgctattaccatgtcgaggccacgttctgcttcactctccccatctcccccccctccccacccccaattttgtatttatttattttttaattattttgtgcagcgatgggggcggggggggggggcgcgcgccaggcggggcggggcggggcgaggggcggggcggggcgaggcggagaggtgcggcggcagccaatcagagcggcgcgctccgaaagtttccttttatggcgaggcggcggcggcggcggccctataaaaagcgaagcgcgcggcgggcgggagcaagcttcgtttagtgaaccgtcagatcgcctggagacgccatccacgctgttttgacctccatagaagacaccgggaccgatccagcctccgcggattcgaatcccggccgggaacggtgcattggaacgcggattccccgtgccaagagtgacgtaagtaccgcctatagagtctataggcccacaaaaaatgctttcttcttttaatatacttttttgtttatcttatttctaatactttccctaatctctttctttcagggcaataatgatacaatgtatcatgcctctttgcaccattctaaagaataacagtgataatttctgggttaaggcaatagcaatatttctgcatataaatatttctgcatataaattgtaactgatgtaagaggtttcatattgctaatagcagctacaatccagctaccattctgcttttattttatggttgggataaggctggattattctgagtccaagctaggcccttttgctaatcatgttcatacctcttatcttcctcccacagctcctgggcaacgtgctggtctgtgtgctggcccatcactttggcaaagaattgggattcgaaccggtgccgccaccatgaagttgcctgttaggctgttggtgctgatgttctggattcctgcttccagcagtgatgtgcagatgatccagagcccttcttccctctccgcctccctgggcgacatcgtgaccatgacctgccaggccagccagggcaccagcatcaacctgaactggttccagcagaagcccgggaaggcccccaagctcctcatctacggcgcctcaaatttggaagatggagtgcccagccgcttctccgggtcccgctatggaacagacttcacactgaccatcagcagcctggaggatgaggacatggccacctacttctgcctgcagcacacatacctgcccttcaccttcggcagcgggaccaagctggagatcaagcgggctgatgctgcaccaactgtatccatcttcccaccatccagtgagcagttaacatctggaggtgcctcagtcgtgtgcttcttgaacaacttctaccccaaagacatcaatgtcaagtggaagattgatggcagtgaacgacaaaatggcgtcctgaacagttggactgatcaggacagcaaagacagcacctacagcatgagcagcaccctcacgttgaccaaggacgagtatgaacgacataacagctatacctgtgaggccactcacaagacatcaacttcacccattgtcaagagcttcaacaggaatgagtgtgagggcagaggaagtcttctaacatgcggtgacgtggaggagaatcccggccctatgaacttcgggctcagcttgattttccttgtccttgttttaaaaggtgtccagtgtcaggtgcagctgcagcagagcgacgccgagctggtgaagcccggcgccagcgtgaagatcagctgcaaggccagcggctacaccttcaccgaccgaaccatccactgggtgaagcagcgacccgagcagggcctggagtggatcggctacatctaccccggcgacggcagcaccaagtacaacgagaacttcaagggcaaggccaccctgaccgccgacaagagcagcagcaccgcctacatgcagctgaacagcctgaccagcgaggacagcgccgtgtacttctgcgcccgacgaggcgctatggactactggggccagggcaccagcgtgaccgtgagcagcgccaaaacgacacccccatctgtctatccactggcccctggatctgctgcccaaactaactccatggtgaccctgggatgcctggtcaagggctatttccctgagccagtgacagtgacctggaactctggatccctgtccagcggtgtgcacaccttcccagctgtcctgcagtctgacctctacactctgagcagctcagtgactgtcccctccagcacctggcccagcgagaccgtcacctgcaacgttgcccacccggccagcagcaccaaggtggacaagaaaattgtgcccagggattgtggttgtaagccttgcatatgtacagtcccagaagtatcatctgtcttcatcttccccccaaagcccaaggatgtgctcaccattactctgactcctaaggtcacgtgtgttgtggtagacatcagcaaggatgatcccgaggtccagttcagctggtttgtagatgatgtggaggtgcacacagctcagacgcaaccccgggaggagcagttcaacagcactttccgctcagtcagtgaacttcccatcatgcaccaggactggctcaatggcaaggagttcaaatgcagggtcaacagtgcagctttccctgcccccatcgagaaaaccatctccaaaaccaaaggcagaccgaaggctccacaggtgtacaccattccacctcccaaggagcagatggccaaggataaagtcagtctgacctgcatgataacagacttcttccctgaagacattactgtggagtggcagtggaatgggcagccagcggagaactacaagaacactcagcccatcatggacacagatggctcttacttcgtctacagcaagctcaatgtgcagaagagcaactgggaggcaggaaatactttcacctgctctgtgttacatgagggcctgcacaaccaccatactgagaagagcctctcccactctcctggtaagtagtaactcgaggacggggtgaactacgcctgaggatccgatctttttccctctgccaaaaattatggggacatcatgaagccccttgagcatctgacttctggctaataaaggaaatttattttcattgcaatagtgtgttggaattttttgtgtctctcactcggcctaggtagataagtagcatggcgggttaatcattaactacaaggaacccctagtgatggagttggccactccctctctgcgcgctcgctcgctcactgaggccgggcgaccaaaggtcgcccgacgcccgggctttgcccgggcggcctcagtgagcgagcgagcgcgcag

SEQ ID NO: 2008 - DNA, 3932 bp, Artificial Sequence
  source: /note="Description of Artificial Sequence: Synthetic polynucleotide"
ctgcgcgctcgctcgctcactgaggccgcccgggcaaagcccgggcgtcgggcgacctttggtcgcccggcctcagtgagcgagcgagcgcgcagagagggagtggccaactccatcactaggggttccttgtagttaatgattaacccgccatgctacttatctaccagggtaatggggatcctctagaactatagctagtcgacattgattattgactagttattaatagtaatcaattacggggtcattagttcatagcccatatatggagttccgcgttacataacttacggtaaatggcccgcctggctgaccgcccaacgacccccgcccattgacgtcaataatgacgtatgttcccatagtaacgccaatagggactttccattgacgtcaatgggtggagtatttacggtaaactgcccacttggcagtacatcaagtgtatcatatgccaagtacgccccctattgacgtcaatgacggtaaatggcccgcctggcattatgcccagtacatgaccttatgggactttcctacttggcagtacatctacgtattagtcatcgctattaccatgtcgaggccacgttctgcttcactctccccatctcccccccctccccacccccaattttgtatttatttattttttaattattttgtgcagcgatgggggcggggggggggggcgcgcgccaggcggggcggggcggggcgaggggcggggcggggcgaggcggagaggtgcggcggcagccaatcagagcggcgcgctccgaaagtttccttttatggcgaggcggcggcggcggcggccctataaaaagcgaagcgcgcggcgggcgggagcaagcttcgtttagtgaaccgtcagatcgcctggagacgccatccacgctgttttgacctccatagaagacaccgggaccgatccagcctccgcggattcgaatcccggccgggaacggtgcattggaacgcggattccccgtgccaagagtgacgtaagtaccgcctatagagtctataggcccacaaaaaatgctttcttcttttaatatacttttttgtttatcttatttctaatactttccctaatctctttctttcagggcaataatgatacaatgtatcatgcctctttgcaccattctaaagaataacagtgataatttctgggttaaggcaatagcaatatttctgcatataaatatttctgcatataaattgtaactgatgtaagaggtttcatattgctaatagcagctacaatccagctaccattctgcttttattttatggttgggataaggctggattattctgagtccaagctaggcccttttgctaatcatgttcatacctcttatcttcctcccacagctcctgggcaacgtgctggtctgtgtgctggcccatcactttggcaaagaattgggattcgaaccggtgccgccaccatgaagttgcctgttaggctgttggtgctgatgttctggattcctgcttccagcagtgacgtgcagatgatccagagcccctccagcctgagcgcctcgctgggggacatcgtgaccatgacctgccaggcctcccagggcaccagcatcaacctcaactggttccagcagaagcccggcaaggcccccaagctgctgatctacggggccagcaacctggaggacggcgtgcccagccgcttcagcggctcccgctacggcacggacttcacgctgaccatctcctccctggaggacgaggacatggccacctacttctgcctgcagcacacctacctgcccttcaccttcggcagcgggaccaagctggagatcaagcgggctgatgctgcaccaactgtatccatcttcccaccatccagtgagcagttaacatctggaggtgcctcagtcgtgtgcttcttgaacaacttctaccccaaagacatcaatgtcaagtggaagattgatggcagtgaacgacaaaatggcgtcctgaacagttggactgatcaggacagcaaagacagcacctacagcatgagcagcaccctcacgttgaccaaggacgagtatgaacgacataacagctatacctgtgaggccactcacaagacatcaacttcacccattgtcaagagcttcaacaggaatgagtgtgagggcagaggaagtcttctaacatgcggtgacgtggaggagaatcccggccctatgaacttcgggctcagcttgattttccttgtccttgttttaaaaggtgtccagtgtcaggtgcagctgcagcagagcgatgccgagctggtgaaacctggggccagcgtcaagatcagctgcaaggcctccgggtacaccttcaccgaccgcaccatccactgggtgaagcagcggcccgagcaggggctggagtggatcggctacatctaccccggggacggcagcaccaagtacaacgagaacttcaagggcaaggccaccctgaccgccgacaagtccagcagcacggcctacatgcagctcaacagcctcaccagcgaggacagcgccgtgtacttctgcgcccggcggggcgcaatggactactggggccagggcacctccgtgaccgtgtcctccgccaaaacgacacccccatctgtctatccactggcccctggatctgctgcccaaactaactccatggtgaccctgggatgcctggtcaagggctatttccctgagccagtgacagtgacctggaactctggatccctgtccagcggtgtgcacaccttcccagctgtcctgcagtctgacctctacactctgagcagctcagtgactgtcccctccagcacctggcccagcgagaccgtcacctgcaacgttgcccacccggccagcagcaccaaggtggacaagaaaattgtgcccagggattgtggttgtaagccttgcatatgtacagtcccagaagtatcatctgtcttcatcttccccccaaagcccaaggatgtgctcaccattactctgactcctaaggtcacgtgtgttgtggtagacatcagcaaggatgatcccgaggtccagttcagctggtttgtagatgatgtggaggtgcacacagctcagacgcaaccccgggaggagcagttcaacagcactttccgctcagtcagtgaacttcccatcatgcaccaggactggctcaatggcaaggagttcaaatgcagggtcaacagtgcagctttccctgcccccatcgagaaaaccatctccaaaaccaaaggcagaccgaaggctccacaggtgtacaccattccacctcccaaggagcagatggccaaggataaagtcagtctgacctgcatgataacagacttcttccctgaagacattactgtggagtggcagtggaatgggcagccagcggagaactacaagaacactcagcccatcatggacacagatggctcttacttcgtctacagcaagctcaatgtgcagaagagcaactgggaggcaggaaatactttcacctgctctgtgttacatgagggcctgcacaaccaccatactgagaagagcctctcccactctcctggtaagtagtaactcgaggacggggtgaactacgcctgaggatccgatctttttccctctgccaaaaattatggggacatcatgaagccccttgagcatctgacttctggctaataaaggaaatttattttcattgcaatagtgtgttggaattttttgtgtctctcactcggcctaggtagataagtagcatggcgggttaatcattaactacaaggaacccctagtgatggagttggccactccctctctgcgcgctcgctcgctcactgaggccgggcgaccaaaggtcgcccgacgcccgggctttgcccgggcggcctcagtgagcgagcgagcgcgcag

SEQ ID NO: 2009 - DNA, 3932 bp, Artificial Sequence
  source: /note="Description of Artificial Sequence: Synthetic polynucleotide"
ctgcgcgctcgctcgctcactgaggccgcccgggcaaagcccgggcgtcgggcgacctttggtcgcccggcctcagtgagcgagcgagcgcgcagagagggagtggccaactccatcactaggggttccttgtagttaatgattaacccgccatgctacttatctaccagggtaatggggatcctctagaactatagctagtcgacattgattattgactagttattaatagtaatcaattacggggtcattagttcatagcccatatatggagttccgcgttacataacttacggtaaatggcccgcctggctgaccgcccaacgacccccgcccattgacgtcaataatgacgtatgttcccatagtaacgccaatagggactttccattgacgtcaatgggtggagtatttacggtaaactgcccacttggcagtacatcaagtgtatcatatgccaagtacgccccctattgacgtcaatgacggtaaatggcccgcctggcattatgcccagtacatgaccttatgggactttcctacttggcagtacatctacgtattagtcatcgctattaccatgtcgaggccacgttctgcttcactctccccatctcccccccctccccacccccaattttgtatttatttattttttaattattttgtgcagcgatgggggcggggggggggggcgcgcgccaggcggggcggggcggggcgaggggcggggcggggcgaggcggagaggtgcggcggcagccaatcagagcggcgcgctccgaaagtttccttttatggcgaggcggcggcggcggcggccctataaaaagcgaagcgcgcggcgggcgggagcaagcttcgtttagtgaaccgtcagatcgcctggagacgccatccacgctgttttgacctccatagaagacaccgggaccgatccagcctccgcggattcgaatcccggccgggaacggtgcattggaacgcggattccccgtgccaagagtgacgtaagtaccgcctatagagtctataggcccacaaaaaatgctttcttcttttaatatacttttttgtttatcttatttctaatactttccctaatctctttctttcagggcaataatgatacaatgtatcatgcctctttgcaccattctaaagaataacagtgataatttctgggttaaggcaatagcaatatttctgcatataaatatttctgcatataaattgtaactgatgtaagaggtttcatattgctaatagcagctacaatccagctaccattctgcttttattttatggttgggataaggctggattattctgagtccaagctaggcccttttgctaatcatgttcatacctcttatcttcctcccacagctcctgggcaacgtgctggtctgtgtgctggcccatcactttggcaaagaattgggattcgaaccggtgccgccaccatgaagttgcctgttaggctgttggtgctgatgttctggattcctgcttccagcagtgacgtgcagatgatccagagccccagctccctcagcgcctccctgggggacatcgtgaccatgacctgccaggccagccagggcaccagcatcaacctcaactggttccagcagaagcccggcaaggcccccaagctgctgatctacggggcctccaacctggaggacggcgtgccctcccgcttcagcggcagccgctacggcacggacttcacgctgaccatcagcagcctggaggacgaggacatggccacctacttctgcctgcagcacacctacctgcccttcaccttcgggagcgggaccaagttggagatcaagcgggctgatgctgcaccaactgtatccatcttcccaccatccagtgagcagttaacatctggaggtgcctcagtcgtgtgcttcttgaacaacttctaccccaaagacatcaatgtcaagtggaagattgatggcagtgaacgacaaaatggcgtcctgaacagttggactgatcaggacagcaaagacagcacctacagcatgagcagcaccctcacgttgaccaaggacgagtatgaacgacataacagctatacctgtgaggccactcacaagacatcaacttcacccattgtcaagagcttcaacaggaatgagtgtgagggcagaggaagtcttctaacatgcggtgacgtggaggagaatcccggccctatgaacttcgggctcagcttgattttccttgtccttgttttaaaaggtgtccagtgtcaggtgcagctgcagcagagcgatgccgagctggtgaaacccggggcctccgtcaagatcagctgcaaggccagcgggtacaccttcaccgaccgcaccatccactgggtgaagcagcggcccgagcagggcctggagtggatcggctacatctaccccggggacggcagcaccaagtacaacgagaacttcaagggcaaggccaccctgaccgccgacaagtccagcagcacagcctacatgcagctcaacagcctcacctctgaggacagcgccgtgtacttctgcgcccggcggggcgcgatggactactggggccaggggaccagcgtgaccgtgtcctccgccaaaacgacacccccatctgtctatccactggcccctggatctgctgcccaaactaactccatggtgaccctgggatgcctggtcaagggctatttccctgagccagtgacagtgacctggaactctggatccctgtccagcggtgtgcacaccttcccagctgtcctgcagtctgacctctacactctgagcagctcagtgactgtcccctccagcacctggcccagcgagaccgtcacctgcaacgttgcccacccggccagcagcaccaaggtggacaagaaaattgtgcccagggattgtggttgtaagccttgcatatgtacagtcccagaagtatcatctgtcttcatcttccccccaaagcccaaggatgtgctcaccattactctgactcctaaggtcacgtgtgttgtggtagacatcagcaaggatgatcccgaggtccagttcagctggtttgtagatgatgtggaggtgcacacagctcagacgcaaccccgggaggagcagttcaacagcactttccgctcagtcagtgaacttcccatcatgcaccaggactggctcaatggcaaggagttcaaatgcagggtcaacagtgcagctttccctgcccccatcgagaaaaccatctccaaaaccaaaggcagaccgaaggctccacaggtgtacaccattccacctcccaaggagcagatggccaaggataaagtcagtctgacctgcatgataacagacttcttccctgaagacattactgtggagtggcagtggaatgggcagccagcggagaactacaagaacactcagcccatcatggacacagatggctcttacttcgtctacagcaagctcaatgtgcagaagagcaactgggaggcaggaaatactttcacctgctctgtgttacatgagggcctgcacaaccaccatactgagaagagcctctcccactctcctggtaagtagtaactcgaggacggggtgaactacgcctgaggatccgatctttttccctctgccaaaaattatggggacatcatgaagccccttgagcatctgacttctggctaataaaggaaatttattttcattgcaatagtgtgttggaattttttgtgtctctcactcggcctaggtagataagtagcatggcgggttaatcattaactacaaggaacccctagtgatggagttggccactccctctctgcgcgctcgctcgctcactgaggccgggcgaccaaaggtcgcccgacgcccgggctttgcccgggcggcctcagtgagcgagcgagcgcgcag

SEQ ID NO: 2010 - DNA, 3932 bp, Artificial Sequence
  source: /note="Description of Artificial Sequence: Synthetic polynucleotide"
ctgcgcgctcgctcgctcactgaggccgcccgggcaaagcccgggcgtcgggcgacctttggtcgcccggcctcagtgagcgagcgagcgcgcagagagggagtggccaactccatcactaggggttccttgtagttaatgattaacccgccatgctacttatctaccagggtaatggggatcctctagaactatagctagtcgacattgattattgactagttattaatagtaatcaattacggggtcattagttcatagcccatatatggagttccgcgttacataacttacggtaaatggcccgcctggctgaccgcccaacgacccccgcccattgacgtcaataatgacgtatgttcccatagtaacgccaatagggactttccattgacgtcaatgggtggagtatttacggtaaactgcccacttggcagtacatcaagtgtatcatatgccaagtacgccccctattgacgtcaatgacggtaaatggcccgcctggcattatgcccagtacatgaccttatgggactttcctacttggcagtacatctacgtattagtcatcgctattaccatgtcgaggccacgttctgcttcactctccccatctcccccccctccccacccccaattttgtatttatttattttttaattattttgtgcagcgatgggggcggggggggggggcgcgcgccaggcggggcggggcggggcgaggggcggggcggggcgaggcggagaggtgcggcggcagccaatcagagcggcgcgctccgaaagtttccttttatggcgaggcggcggcggcggcggccctataaaaagcgaagcgcgcggcgggcgggagcaagcttcgtttagtgaaccgtcagatcgcctggagacgccatccacgctgttttgacctccatagaagacaccgggaccgatccagcctccgcggattcgaatcccggccgggaacggtgcattggaacgcggattccccgtgccaagagtgacgtaagtaccgcctatagagtctataggcccacaaaaaatgctttcttcttttaatatacttttttgtttatcttatttctaatactttccctaatctctttctttcagggcaataatgatacaatgtatcatgcctctttgcaccattctaaagaataacagtgataatttctgggttaaggcaatagcaatatttctgcatataaatatttctgcatataaattgtaactgatgtaagaggtttcatattgctaatagcagctacaatccagctaccattctgcttttattttatggttgggataaggctggattattctgagtccaagctaggcccttttgctaatcatgttcatacctcttatcttcctcccacagctcctgggcaacgtgctggtctgtgtgctggcccatcactttggcaaagaattgggattcgaaccggtgccgccaccatgaagttgcctgttaggctgttggtgctgatgttctggattcctgcttccagcagtgacgtgcagatgatccagagccccagcagcctgagcgcctcgctgggggacatcgtgaccatgacctgccaggcctcccagggcaccagcatcaacctcaactggttccagcagaagcccggcaaggcccccaagctcctcatctacggggccagcaacctggaggacggcgtgccctcccgcttcagcggctcccgctacggcacggacttcacgctgaccatctcctccctggaggacgaggacatggccacctacttctgcctgcagcacacctacctgcccttcaccttcggcagcgggaccaagctggagatcaagcgggctgatgctgcaccaactgtatccatcttcccaccatccagtgagcagttaacatctggaggtgcctcagtcgtgtgcttcttgaacaacttctaccccaaagacatcaatgtcaagtggaagattgatggcagtgaacgacaaaatggcgtcctgaacagttggactgatcaggacagcaaagacagcacctacagcatgagcagcaccctcacgttgaccaaggacgagtatgaacgacataacagctatacctgtgaggccactcacaagacatcaacttcacccattgtcaagagcttcaacaggaatgagtgtgagggcagaggaagtcttctaacatgcggtgacgtggaggagaatcccggccctatgaacttcgggctcagcttgattttccttgtccttgttttaaaaggtgtccagtgtcaggtgcagctgcagcagagcgacgccgagctggtgaaacctggggccagcgtcaagatcagctgcaaggcctccggctacaccttcaccgaccgcaccatccactgggtgaagcagcggcccgagcaggggctggagtggatcgggtacatctaccccggggacggctccaccaagtacaacgagaacttcaagggcaaagccaccctgacggccgacaagtccagcagcaccgcctacatgcagctgaacagcctgaccagcgaggacagcgccgtgtacttctgcgcccggcggggggctatggactactggggccagggcacctccgtgaccgtgtcctccgccaaaacgacacccccatctgtctatccactggcccctggatctgctgcccaaactaactccatggtgaccctgggatgcctggtcaagggctatttccctgagccagtgacagtgacctggaactctggatccctgtccagcggtgtgcacaccttcccagctgtcctgcagtctgacctctacactctgagcagctcagtgactgtcccctccagcacctggcccagcgagaccgtcacctgcaacgttgcccacccggccagcagcaccaaggtggacaagaaaattgtgcccagggattgtggttgtaagccttgcatatgtacagtcccagaagtatcatctgtcttcatcttccccccaaagcccaaggatgtgctcaccattactctgactcctaaggtcacgtgtgttgtggtagacatcagcaaggatgatcccgaggtccagttcagctggtttgtagatgatgtggaggtgcacacagctcagacgcaaccccgggaggagcagttcaacagcactttccgctcagtcagtgaacttcccatcatgcaccaggactggctcaatggcaaggagttcaaatgcagggtcaacagtgcagctttccctgcccccatcgagaaaaccatctccaaaaccaaaggcagaccgaaggctccacaggtgtacaccattccacctcccaaggagcagatggccaaggataaagtcagtctgacctgcatgataacagacttcttccctgaagacattactgtggagtggcagtggaatgggcagccagcggagaactacaagaacactcagcccatcatggacacagatggctcttacttcgtctacagcaagctcaatgtgcagaagagcaactgggaggcaggaaatactttcacctgctctgtgttacatgagggcctgcacaaccaccatactgagaagagcctctcccactctcctggtaagtagtaactcgaggacggggtgaactacgcctgaggatccgatctttttccctctgccaaaaattatggggacatcatgaagccccttgagcatctgacttctggctaataaaggaaatttattttcattgcaatagtgtgttggaattttttgtgtctctcactcggcctaggtagataagtagcatggcgggttaatcattaactacaaggaacccctagtgatggagttggccactccctctctgcgcgctcgctcgctcactgaggccgggcgaccaaaggtcgcccgacgcccgggctttgcccgggcggcctcagtgagcgagcgagcgcgcag

SEQ ID NO: 2011 - DNA, 3932 bp, Artificial Sequence
  source: /note="Description of Artificial Sequence: Synthetic polynucleotide"
ctgcgcgctcgctcgctcactgaggccgcccgggcaaagcccgggcgtcgggcgacctttggtcgcccggcctcagtgagcgagcgagcgcgcagagagggagtggccaactccatcactaggggttccttgtagttaatgattaacccgccatgctacttatctaccagggtaatggggatcctctagaactatagctagtcgacattgattattgactagttattaatagtaatcaattacggggtcattagttcatagcccatatatggagttccgcgttacataacttacggtaaatggcccgcctggctgaccgcccaacgacccccgcccattgacgtcaataatgacgtatgttcccatagtaacgccaatagggactttccattgacgtcaatgggtggagtatttacggtaaactgcccacttggcagtacatcaagtgtatcatatgccaagtacgccccctattgacgtcaatgacggtaaatggcccgcctggcattatgcccagtacatgaccttatgggactttcctacttggcagtacatctacgtattagtcatcgctattaccatgtcgaggccacgttctgcttcactctccccatctcccccccctccccacccccaattttgtatttatttattttttaattattttgtgcagcgatgggggcggggggggggggcgcgcgccaggcggggcggggcggggcgaggggcggggcggggcgaggcggagaggtgcggcggcagccaatcagagcggcgcgctccgaaagtttccttttatggcgaggcggcggcggcggcggccctataaaaagcgaagcgcgcggcgggcgggagcaagcttcgtttagtgaaccgtcagatcgcctggagacgccatccacgctgttttgacctccatagaagacaccgggaccgatccagcctccgcggattcgaatcccggccgggaacggtgcattggaacgcggattccccgtgccaagagtgacgtaagtaccgcctatagagtctataggcccacaaaaaatgctttcttcttttaatatacttttttgtttatcttatttctaatactttccctaatctctttctttcagggcaataatgatacaatgtatcatgcctctttgcaccattctaaagaataacagtgataatttctgggttaaggcaatagcaatatttctgcatataaatatttctgcatataaattgtaactgatgtaagaggtttcatattgctaatagcagctacaatccagctaccattctgcttttattttatggttgggataaggctggattattctgagtccaagctaggcccttttgctaatcatgttcatacctcttatcttcctcccacagctcctgggcaacgtgctggtctgtgtgctggcccatcactttggcaaagaattgggattcgaaccggtgccgccaccatgaagttgcctgttaggctgttggtgctgatgttctggattcctgcttccagcagtgacgttcagatgatccagtccccctcctccctgtccgcctccctgggcgacatcgtgaccatgacctgccaggcctcccagggcacctccatcaacctgaactggttccagcagaagcccggcaaggcccccaagctgctgatctacggcgcctccaacctggaggacggcgtgccctcccggttctccggctcccggtacggcaccgacttcaccctgaccatctcctccctggaggacgaggacatggccacctacttctgcctgcagcacacctacctgcccttcaccttcggctccggcaccaagctggagatcaagcgggctgatgctgcaccaactgtatccatcttcccaccatccagtgagcagttaacatctggaggtgcctcagtcgtgtgcttcttgaacaacttctaccccaaagacatcaatgtcaagtggaagattgatggcagtgaacgacaaaatggcgtcctgaacagttggactgatcaggacagcaaagacagcacctacagcatgagcagcaccctcacgttgaccaaggacgagtatgaacgacataacagctatacctgtgaggccactcacaagacatcaacttcacccattgtcaagagcttcaacaggaatgagtgtgagggcagaggaagtcttctaacatgcggtgacgtggaggagaatcccggccctatgaacttcgggctcagcttgattttccttgtccttgttttaaaaggtgtccagtgtcaggtgcagctgcagcagtccgacgccgagctggtgaagcccggcgcctccgtgaagatctcctgcaaggcctccggctacaccttcaccgaccggaccatccactgggtgaagcagcggcccgagcagggcctggagtggatcggctacatctaccccggcgacggctccaccaagtacaacgagaacttcaagggcaaggccaccctgaccgccgacaagtcctcctccaccgcctacatgcagctgaactccctgacctccgaggactccgccgtgtacttctgcgcccggcggggcgctatggactactggggccagggcacctccgtgaccgtgtcctccgccaaaacgacacccccatctgtctatccactggcccctggatctgctgcccaaactaactccatggtgaccctgggatgcctggtcaagggctatttccctgagccagtgacagtgacctggaactctggatccctgtccagcggtgtgcacaccttcccagctgtcctgcagtctgacctctacactctgagcagctcagtgactgtcccctccagcacctggcccagcgagaccgtcacctgcaacgttgcccacccggccagcagcaccaaggtggacaagaaaattgtgcccagggattgtggttgtaagccttgcatatgtacagtcccagaagtatcatctgtcttcatcttccccccaaagcccaaggatgtgctcaccattactctgactcctaaggtcacgtgtgttgtggtagacatcagcaaggatgatcccgaggtccagttcagctggtttgtagatgatgtggaggtgcacacagctcagacgcaaccccgggaggagcagttcaacagcactttccgctcagtcagtgaacttcccatcatgcaccaggactggctcaatggcaaggagttcaaatgcagggtcaacagtgcagctttccctgcccccatcgagaaaaccatctccaaaaccaaaggcagaccgaaggctccacaggtgtacaccattccacctcccaaggagcagatggccaaggataaagtcagtctgacctgcatgataacagacttcttccctgaagacattactgtggagtggcagtggaatgggcagccagcggagaactacaagaacactcagcccatcatggacacagatggctcttacttcgtctacagcaagctcaatgtgcagaagagcaactgggaggcaggaaatactttcacctgctctgtgttacatgagggcctgcacaaccaccatactgagaagagcctctcccactctcctggtaagtagtaactcgaggacggggtgaactacgcctgaggatccgatctttttccctctgccaaaaattatggggacatcatgaagccccttgagcatctgacttctggctaataaaggaaatttattttcattgcaatagtgtgttggaattttttgtgtctctcactcggcctaggtagataagtagcatggcgggttaatcattaactacaaggaacccctagtgatggagttggccactccctctctgcgcgctcgctcgctcactgaggccgggcgaccaaaggtcgcccgacgcccgggctttgcccgggcggcctcagtgagcgagcgagcgcgcag

SEQ ID NO: 2012 - DNA, 3932 bp, Artificial Sequence
  source: /note="Description of Artificial Sequence: Synthetic polynucleotide"
ctgcgcgctcgctcgctcactgaggccgcccgggcaaagcccgggcgtcgggcgacctttggtcgcccggcctcagtgagcgagcgagcgcgcagagagggagtggccaactccatcactaggggttccttgtagttaatgattaacccgccatgctacttatctaccagggtaatggggatcctctagaactatagctagtcgacattgattattgactagttattaatagtaatcaattacggggtcattagttcatagcccatatatggagttccgcgttacataacttacggtaaatggcccgcctggctgaccgcccaacgacccccgcccattgacgtcaataatgacgtatgttcccatagtaacgccaatagggactttccattgacgtcaatgggtggagtatttacggtaaactgcccacttggcagtacatcaagtgtatcatatgccaagtacgccccctattgacgtcaatgacggtaaatggcccgcctggcattatgcccagtacatgaccttatgggactttcctacttggcagtacatctacgtattagtcatcgctattaccatgtcgaggccacgttctgcttcactctccccatctcccccccctccccacccccaattttgtatttatttattttttaattattttgtgcagcgatgggggcggggggggggggcgcgcgccaggcggggcggggcggggcgaggggcggggcggggcgaggcggagaggtgcggcggcagccaatcagagcggcgcgctccgaaagtttccttttatggcgaggcggcggcggcggcggccctataaaaagcgaagcgcgcggcgggcgggagcaagcttcgtttagtgaaccgtcagatcgcctggagacgccatccacgctgttttgacctccatagaagacaccgggaccgatccagcctccgcggattcgaatcccggccgggaacggtgcattggaacgcggattccccgtgccaagagtgacgtaagtaccgcctatagagtctataggcccacaaaaaatgctttcttcttttaatatacttttttgtttatcttatttctaatactttccctaatctctttctttcagggcaataatgatacaatgtatcatgcctctttgcaccattctaaagaataacagtgataatttctgggttaaggcaatagcaatatttctgcatataaatatttctgcatataaattgtaactgatgtaagaggtttcatattgctaatagcagctacaatccagctaccattctgcttttattttatggttgggataaggctggattattctgagtccaagctaggcccttttgctaatcatgttcatacctcttatcttcctcccacagctcctgggcaacgtgctggtctgtgtgctggcccatcactttggcaaagaattgggattcgaaccggtgccgccaccatgaagttgcctgttaggctgttggtgctgatgttctggattcctgcttccagcagtgacgtgcagatgatccagagcccctcctccctgagcgccagcctgggggacatcgtgaccatgacctgccaggcctcccagggcaccagcatcaacctcaactggttccagcagaagcccggcaaggcccccaagctcctcatctacggggccagcaacctggaggacggcgtgcccagccgcttcagcggctcccgctacggcacggacttcacgctgaccatcagcagcctggaggacgaggacatggccacctacttctgcctgcagcacacctacctgcccttcaccttcggcagcgggaccaagctggagatcaagcgggctgatgctgcaccaactgtatccatcttcccaccatccagtgagcagttaacatctggaggtgcctcagtcgtgtgcttcttgaacaacttctaccccaaagacatcaatgtcaagtggaagattgatggcagtgaacgacaaaatggcgtcctgaacagttggactgatcaggacagcaaagacagcacctacagcatgagcagcaccctcacgttgaccaaggacgagtatgaacgacataacagctatacctgtgaggccactcacaagacatcaacttcacccattgtcaagagcttcaacaggaatgagtgtgagggcagaggaagtcttctaacatgcggtgacgtggaggagaatcccggccctatgaacttcgggctcagcttgattttccttgtccttgttttaaaaggtgtccagtgtcaggtgcagctgcagcagtccgatgccgagctggtgaaaccgggggccagcgtcaagatctcatgcaaagcttccggctacaccttcaccgacagaaccatccactgggtgaagcagcggcccgagcaggggctggagtggatcgggtacatctaccccggggacggcagcaccaagtacaacgagaacttcaagggcaaggccaccctgacagccgacaagtccagctccaccgcctacatgcagctcaacagcctgacctccgaggacagcgccgtgtacttctgcgcccggcggggcgcaatggactactggggccagggcaccagcgtgaccgtgagcagcgccaaaacgacacccccatctgtctatccactggcccctggatctgctgcccaaactaactccatggtgaccctgggatgcctggtcaagggctatttccctgagccagtgacagtgacctggaactctggatccctgtccagcggtgtgcacaccttcccagctgtcctgcagtctgacctctacactctgagcagctcagtgactgtcccctccagcacctggcccagcgagaccgtcacctgcaacgttgcccacccggccagcagcaccaaggtggacaagaaaattgtgcccagggattgtggttgtaagccttgcatatgtacagtcccagaagtatcatctgtcttcatcttccccccaaagcccaaggatgtgctcaccattactctgactcctaaggtcacgtgtgttgtggtagacatcagcaaggatgatcccgaggtccagttcagctggtttgtagatgatgtggaggtgcacacagctcagacgcaaccccgggaggagcagttcaacagcactttccgctcagtcagtgaacttcccatcatgcaccaggactggctcaatggcaaggagttcaaatgcagggtcaacagtgcagctttccctgcccccatcgagaaaaccatctccaaaaccaaaggcagaccgaaggctccacaggtgtacaccattccacctcccaaggagcagatggccaaggataaagtcagtctgacctgcatgataacagacttcttccctgaagacattactgtggagtggcagtggaatgggcagccagcggagaactacaagaacactcagcccatcatggacacagatggctcttacttcgtctacagcaagctcaatgtgcagaagagcaactgggaggcaggaaatactttcacctgctctgtgttacatgagggcctgcacaaccaccatactgagaagagcctctcccactctcctggtaagtagtaactcgaggacggggtgaactacgcctgaggatccgatctttttccctctgccaaaaattatggggacatcatgaagccccttgagcatctgacttctggctaataaaggaaatttattttcattgcaatagtgtgttggaattttttgtgtctctcactcggcctaggtagataagtagcatggcgggttaatcattaactacaaggaacccctagtgatggagttggccactccctctctgcgcgctcgctcgctcactgaggccgggcgaccaaaggtcgcccgacgcccgggctttgcccgggcggcctcagtgagcgagcgagcgcgcag

SEQ ID NO: 2013 - DNA, 3932 bp, Artificial Sequence
  source: /note="Description of Artificial Sequence: Synthetic polynucleotide"
ctgcgcgctcgctcgctcactgaggccgcccgggcaaagcccgggcgtcgggcgacctttggtcgcccggcctcagtgagcgagcgagcgcgcagagagggagtggccaactccatcactaggggttccttgtagttaatgattaacccgccatgctacttatctaccagggtaatggggatcctctagaactatagctagtcgacattgattattgactagttattaatagtaatcaattacggggtcattagttcatagcccatatatggagttccgcgttacataacttacggtaaatggcccgcctggctgaccgcccaacgacccccgcccattgacgtcaataatgacgtatgttcccatagtaacgccaatagggactttccattgacgtcaatgggtggagtatttacggtaaactgcccacttggcagtacatcaagtgtatcatatgccaagtacgccccctattgacgtcaatgacggtaaatggcccgcctggcattatgcccagtacatgaccttatgggactttcctacttggcagtacatctacgtattagtcatcgctattaccatgtcgaggccacgttctgcttcactctccccatctcccccccctccccacccccaattttgtatttatttattttttaattattttgtgcagcgatgggggcggggggggggggcgcgcgccaggcggggcggggcggggcgaggggcggggcggggcgaggcggagaggtgcggcggcagccaatcagagcggcgcgctccgaaagtttccttttatggcgaggcggcggcggcggcggccctataaaaagcgaagcgcgcggcgggcgggagcaagcttcgtttagtgaaccgtcagatcgcctggagacgccatccacgctgttttgacctccatagaagacaccgggaccgatccagcctccgcggattcgaatcccggccgggaacggtgcattggaacgcggattccccgtgccaagagtgacgtaagtaccgcctatagagtctataggcccacaaaaaatgctttcttcttttaatatacttttttgtttatcttatttctaatactttccctaatctctttctttcagggcaataatgatacaatgtatcatgcctctttgcaccattctaaagaataacagtgataatttctgggttaaggcaatagcaatatttctgcatataaatatttctgcatataaattgtaactgatgtaagaggtttcatattgctaatagcagctacaatccagctaccattctgcttttattttatggttgggataaggctggattattctgagtccaagctaggcccttttgctaatcatgttcatacctcttatcttcctcccacagctcctgggcaacgtgctggtctgtgtgctggcccatcactttggcaaagaattgggattcgaaccggtgccgccaccatgaagttgcctgttaggctgttggtgctgatgttctggattcctgcttccagcagtgacgttcagatgatccagagccctagcagcctgagcgccagcctgggcgacatcgtgaccatgacctgccaggccagccagggcaccagcatcaacctgaactggttccagcagaagcctggcaaggcccctaagctgctgatctacggcgccagcaacctggaggacggcgtgcctagccgtttcagcggcagccgttacggcaccgacttcaccctgaccatcagcagcctggaggacgaggacatggccacctacttctgcctgcagcacacctacctgcctttcaccttcggcagcggcaccaagctggagatcaagcgggctgatgctgcaccaactgtatccatcttcccaccatccagtgagcagttaacatctggaggtgcctcagtcgtgtgcttcttgaacaacttctaccccaaagacatcaatgtcaagtggaagattgatggcagtgaacgacaaaatggcgtcctgaacagttggactgatcaggacagcaaagacagcacctacagcatgagcagcaccctcacgttgaccaaggacgagtatgaacgacataacagctatacctgtgaggccactcacaagacatcaacttcacccattgtcaagagcttcaacaggaatgagtgtgagggcagaggaagtcttctaacatgcggtgacgtggaggagaatcccggccctatgaacttcgggctcagcttgattttccttgtccttgttttaaaaggtgtccagtgtcaggtgcagctgcagcagagcgacgccgagctggtgaagcctggcgccagcgtgaagatcagctgcaaggccagcggctacaccttcaccgaccgtaccatccactgggtgaagcagcgacctgagcagggcctggagtggatcggctacatctaccctggcgacggcagcaccaagtacaacgagaacttcaagggcaaggccaccctgaccgccgacaagagcagcagcaccgcctacatgcagctgaacagcctgaccagcgaggacagcgccgtgtacttctgcgcccgtcgaggcgctatggactactggggccagggcaccagcgtgaccgtgagcagcgccaaaacgacacccccatctgtctatccactggcccctggatctgctgcccaaactaactccatggtgaccctgggatgcctggtcaagggctatttccctgagccagtgacagtgacctggaactctggatccctgtccagcggtgtgcacaccttcccagctgtcctgcagtctgacctctacactctgagcagctcagtgactgtcccctccagcacctggcccagcgagaccgtcacctgcaacgttgcccacccggccagcagcaccaaggtggacaagaaaattgtgcccagggattgtggttgtaagccttgcatatgtacagtcccagaagtatcatctgtcttcatcttccccccaaagcccaaggatgtgctcaccattactctgactcctaaggtcacgtgtgttgtggtagacatcagcaaggatgatcccgaggtccagttcagctggtttgtagatgatgtggaggtgcacacagctcagacgcaaccccgggaggagcagttcaacagcactttccgctcagtcagtgaacttcccatcatgcaccaggactggctcaatggcaaggagttcaaatgcagggtcaacagtgcagctttccctgcccccatcgagaaaaccatctccaaaaccaaaggcagaccgaaggctccacaggtgtacaccattccacctcccaaggagcagatggccaaggataaagtcagtctgacctgcatgataacagacttcttccctgaagacattactgtggagtggcagtggaatgggcagccagcggagaactacaagaacactcagcccatcatggacacagatggctcttacttcgtctacagcaagctcaatgtgcagaagagcaactgggaggcaggaaatactttcacctgctctgtgttacatgagggcctgcacaaccaccatactgagaagagcctctcccactctcctggtaagtagtaactcgaggacggggtgaactacgcctgaggatccgatctttttccctctgccaaaaattatggggacatcatgaagccccttgagcatctgacttctggctaataaaggaaatttattttcattgcaatagtgtgttggaattttttgtgtctctcactcggcctaggtagataagtagcatggcgggttaatcattaactacaaggaacccctagtgatggagttggccactccctctctgcgcgctcgctcgctcactgaggccgggcgaccaaaggtcgcccgacgcccgggctttgcccgggcggcctcagtgagcgagcgagcgcgcag

SEQ ID NO: 2014 - DNA, 3932 bp, Artificial Sequence
  source: /note="Description of Artificial Sequence: Synthetic polynucleotide"
ctgcgcgctcgctcgctcactgaggccgcccgggcaaagcccgggcgtcgggcgacctttggtcgcccggcctcagtgagcgagcgagcgcgcagagagggagtggccaactccatcactaggggttccttgtagttaatgattaacccgccatgctacttatctaccagggtaatggggatcctctagaactatagctagtcgacattgattattgactagttattaatagtaatcaattacggggtcattagttcatagcccatatatggagttccgcgttacataacttacggtaaatggcccgcctggctgaccgcccaacgacccccgcccattgacgtcaataatgacgtatgttcccatagtaacgccaatagggactttccattgacgtcaatgggtggagtatttacggtaaactgcccacttggcagtacatcaagtgtatcatatgccaagtacgccccctattgacgtcaatgacggtaaatggcccgcctggcattatgcccagtacatgaccttatgggactttcctacttggcagtacatctacgtattagtcatcgctattaccatgtcgaggccacgttctgcttcactctccccatctcccccccctccccacccccaattttgtatttatttattttttaattattttgtgcagcgatgggggcggggggggggggcgcgcgccaggcggggcggggcggggcgaggggcggggcggggcgaggcggagaggtgcggcggcagccaatcagagcggcgcgctccgaaagtttccttttatggcgaggcggcggcggcggcggccctataaaaagcgaagcgcgcggcgggcgggagcaagcttcgtttagtgaaccgtcagatcgcctggagacgccatccacgctgttttgacctccatagaagacaccgggaccgatccagcctccgcggattcgaatcccggccgggaacggtgcattggaacgcggattccccgtgccaagagtgacgtaagtaccgcctatagagtctataggcccacaaaaaatgctttcttcttttaatatacttttttgtttatcttatttctaatactttccctaatctctttctttcagggcaataatgatacaatgtatcatgcctctttgcaccattctaaagaataacagtgataatttctgggttaaggcaatagcaatatttctgcatataaatatttctgcatataaattgtaactgatgtaagaggtttcatattgctaatagcagctacaatccagctaccattctgcttttattttatggttgggataaggctggattattctgagtccaagctaggcccttttgctaatcatgttcatacctcttatcttcctcccacagctcctgggcaacgtgctggtctgtgtgctggcccatcactttggcaaagaattgggattcgaaccggtgccgccaccatgaagttgcctgttaggctgttggtgctgatgttctggattcctgcttccagcagtgacgttcagatgatccagagccctagcagcctgagcgccagcctgggcgacatcgtgaccatgacctgccaggccagccagggcaccagcatcaacctgaactggttccagcagaagcctggcaaggcccctaagctgctgatctacggcgccagcaacctggaggacggcgtgcccagccggttcagcggcagccggtacggcaccgacttcaccctgaccatcagcagcctggaggacgaggacatggccacctacttctgcctgcagcacacctacctgcccttcaccttcggcagcggcaccaagctggagatcaagcgggctgatgctgcaccaactgtatccatcttcccaccatccagtgagcagttaacatctggaggtgcctcagtcgtgtgcttcttgaacaacttctaccccaaagacatcaatgtcaagtggaagattgatggcagtgaacgacaaaatggcgtcctgaacagttggactgatcaggacagcaaagacagcacctacagcatgagcagcaccctcacgttgaccaaggacgagtatgaacgacataacagctatacctgtgaggccactcacaagacatcaacttcacccattgtcaagagcttcaacaggaatgagtgtgagggcagaggaagtcttctaacatgcggtgacgtggaggagaatcccggccctatgaacttcgggctcagcttgattttccttgtccttgttttaaaaggtgtccagtgtcaggtgcagctgcagcagagcgacgccgagctggtgaagcctggcgccagcgtgaagatcagctgcaaggccagcggctacaccttcaccgaccgtaccatccactgggtgaagcagcgacctgagcagggcctggagtggatcggctacatctaccccggcgacggcagcaccaagtacaacgagaacttcaagggcaaggccaccctgaccgccgacaagagcagcagcaccgcctacatgcagctgaacagcctgaccagcgaggacagcgccgtgtacttctgcgcccggcggggcgctatggactactggggccagggcaccagcgtgaccgtgagcagcgccaaaacgacacccccatctgtctatccactggcccctggatctgctgcccaaactaactccatggtgaccctgggatgcctggtcaagggctatttccctgagccagtgacagtgacctggaactctggatccctgtccagcggtgtgcacaccttcccagctgtcctgcagtctgacctctacactctgagcagctcagtgactgtcccctccagcacctggcccagcgagaccgtcacctgcaacgttgcccacccggccagcagcaccaaggtggacaagaaaattgtgcccagggattgtggttgtaagccttgcatatgtacagtcccagaagtatcatctgtcttcatcttccccccaaagcccaaggatgtgctcaccattactctgactcctaaggtcacgtgtgttgtggtagacatcagcaaggatgatcccgaggtccagttcagctggtttgtagatgatgtggaggtgcacacagctcagacgcaaccccgggaggagcagttcaacagcactttccgctcagtcagtgaacttcccatcatgcaccaggactggctcaatggcaaggagttcaaatgcagggtcaacagtgcagctttccctgcccccatcgagaaaaccatctccaaaaccaaaggcagaccgaaggctccacaggtgtacaccattccacctcccaaggagcagatggccaaggataaagtcagtctgacctgcatgataacagacttcttccctgaagacattactgtggagtggcagtggaatgggcagccagcggagaactacaagaacactcagcccatcatggacacagatggctcttacttcgtctacagcaagctcaatgtgcagaagagcaactgggaggcaggaaatactttcacctgctctgtgttacatgagggcctgcacaaccaccatactgagaagagcctctcccactctcctggtaagtagtaactcgaggacggggtgaactacgcctgaggatccgatctttttccctctgccaaaaattatggggacatcatgaagccccttgagcatctgacttctggctaataaaggaaatttattttcattgcaatagtgtgttggaattttttgtgtctctcactcggcctaggtagataagtagcatggcgggttaatcattaactacaaggaacccctagtgatggagttggccactccctctctgcgcgctcgctcgctcactgaggccgggcgaccaaaggtcgcccgacgcccgggctttgcccgggcggcctcagtgagcgagcgagcgcgcag

SEQ ID NO: 2015 - DNA, 4309 bp, Artificial Sequence
  source: /note="Description of Artificial Sequence: Synthetic polynucleotide"
cctgcaggcagctgcgcgctcgctcgctcactgaggccgcccgggcaaagcccgggcgtcgggcgacctttggtcgcccggcctcagtgagcgagcgagcgcgcagagagggagtggccaactccatcactaggggttccttgtagttaatgattaacccgccatgctacttatctacgtagccatgcgtcgacataacgcgtcgacattgattattgactagttattaatagtaatcaattacggggtcattagttcatagcccatatatggagttccgcgttacataacttacggtaaatggcccgcctggctgaccgcccaacgacccccgcccattgacgtcaataatgacgtatgttcccatagtaacgccaatagggactttccattgacgtcaatgggtggagtatttacggtaaactgcccacttggcagtacatcaagtgtatcatatgccaagtacgccccctattgacgtcaatgacggtaaatggcccgcctggcattatgcccagtacatgaccttatgggactttcctacttggcagtacatctacgtattagtcatcgctattaccatgtcgaggccacgttctgcttcactctccccatctcccccccctccccacccccaattttgtatttatttattttttaattattttgtgcagcgatgggggcggggggggggggcgcgcgccaggcggggcggggcggggcgaggggcggggcggggcgaggcggagaggtgcggcggcagccaatcagagcggcgcgctccgaaagtttccttttatggcgaggcggcggcggcggcggccctataaaaagcgaagcgcgcggcgggcgggagcaagcttcgtttagtgaaccgtcagatcgcctggagacgccatccacgctgttttgacctccatagaagacaccgggaccgatccagcctccgcggattcgaatcccggccgggaacggtgcattggaacgcggattccccgtgccaagagtgacgtaagtaccgcctatagagtctataggcccacaaaaaatgctttcttcttttaatatacttttttgtttatcttatttctaatactttccctaatctctttctttcagggcaataatgatacaatgtatcatgcctctttgcaccattctaaagaataacagtgataatttctgggttaaggcaatagcaatatttctgcatataaatatttctgcatataaattgtaactgatgtaagaggtttcatattgctaatagcagctacaatccagctaccattctgcttttattttatggttgggataaggctggattattctgagtccaagctaggcccttttgctaatcatgttcatacctcttatcttcctcccacagctcctgggcaacgtgctggtctgtgtgctggcccatcactttggcaaagaattgggattcgaaccggtgccgccaccatgaacttcgggctcagcttgattttccttgtccttgttttaaaaggtgtccagtgtgaggtgaagctggtggagtctggcggagacctggtgaagccaggcggaagcctgaagctgtcctgcgccgcttctggcttcacctttagctcctacgccatgagctgggtgcggcagaacccagagaagcgcctggagtgggtggcttccatctctaagggcggaaacacctactaccctaacagcgtgaagggaaggttcacaatctccagggataacgccagaaacatcctgtacctgcagatgtctagcctgaggtccgaggacacagccctgtactactgtgctcggggctggggagattacggctggtttgcctactggggacaggtgaccctggtgacagtgtctgctgccaaaacgacacccccatctgtctatccactggcccctggatctgctgcccaaactaactccatggtgaccctgggatgcctggtcaagggctatttccctgagccagtgacagtgacctggaactctggatccctgtccagcggtgtgcacaccttcccagctgtcctgcagtctgacctctacactctgagcagctcagtgactgtcccctccagcacctggcccagcgagaccgtcacctgcaacgttgcccacccggccagcagcaccaaggtggacaagaaaattgtgcccagggattgtggttgtaagccttgcatatgtacagtcccagaagtatcatctgtcttcatcttccccccaaagcccaaggatgtgctcaccattactctgactcctaaggtcacgtgtgttgtggtagacatcagcaaggatgatcccgaggtccagttcagctggtttgtagatgatgtggaggtgcacacagctcagacgcaaccccgggaggagcagttcaacagcactttccgctcagtcagtgaacttcccatcatgcaccaggactggctcaatggcaaggagttcaaatgcagggtcaacagtgcagctttccctgcccccatcgagaaaaccatctccaaaaccaaaggcagaccgaaggctccacaggtgtacaccattccacctcccaaggagcagatggccaaggataaagtcagtctgacctgcatgataacagacttcttccctgaagacattactgtggagtggcagtggaatgggcagccagcggagaactacaagaacactcagcccatcatggacacagatggctcttacttcgtctacagcaagctcaatgtgcagaagagcaactgggaggcaggaaatactttcacctgctctgtgttacatgagggcctgcacaaccaccatactgagaagagcctctcccactctcctggtagaaagaggcgagagggcagaggaagtcttctaacatgcggtgacgtggaggagaatcccggccctatgaagttgcctgttaggctgttggtgctgatgttctggattcctgcttccagcagtgacatcaagatgacccagtcccccagctccatgtacgcctctctgggagagcgggtgaccatcacatgcaaggcttctcaggatatcaaccgctacctgaactggttccagcagaagcccggaaagagccctaagaccctgatctacagggccaacagactgctggacggcgtgccaagcaggttttccggctctggaagcggccaggattactccctgacaatctctagcctggactacgaggatatgggcatctactactgtctgcagtacgacgagttccccctgacctttggagatggcacaaagctggagctgaagcgggctgatgctgcaccaactgtatccatcttcccaccatccagtgagcagttaacatctggaggtgcctcagtcgtgtgcttcttgaacaacttctaccccaaagacatcaatgtcaagtggaagattgatggcagtgaacgacaaaatggcgtcctgaacagttggactgatcaggacagcaaagacagcacctacagcatgagcagcaccctcacgttgaccaaggacgagtatgaacgacataacagctatacctgtgaggccactcacaagacatcaacttcacccattgtcaagagcttcaacaggaatgagtgttagtaactcgagcctgaggatgggtggcatccctgtgacccctccccagtgcctctcctggccctggaagttgccactccagtgcccaccagccttgtcctaataaaattaagttgcatcattttgtctgactaggtgtccttctataatattatggggtggaggggggtggtatggagcaaggggcaagttgggaagacaacctgtagggcctgcggggtctattgggaaccaagctggagtgcagtggcacaatcttggctcactgcaatctccgcctcctgggttcaagcgattctcctgcctcagcctcccgagttgttgggattccaggcatgcatgaccaggctcagctaatttttgtttttttggtagagacggggtttcaccatattggccaggctggtctccaactcctaatctcaggtgatctacccaccttggcctcccaaattgctgggattacaggcgtgaaccactgctcccttccctgtccttggcctaggtatcgatgctacgtagataagtagcatggcgggttaatcattaactacagaggaacccctagtgatggagttggccactccctctctgcgcgctcgctcgctcactgaggccgggcgaccaaaggtcgcccgacgcccgggctttgcccgggcggcctcagtgagcgagcgagcgcgcagctgcctgcagg

SEQ ID NO: 2016 - DNA, 4309 bp, Artificial Sequence
  source: /note="Description of Artificial Sequence: Synthetic polynucleotide"
cctgcaggcagctgcgcgctcgctcgctcactgaggccgcccgggcaaagcccgggcgtcgggcgacctttggtcgcccggcctcagtgagcgagcgagcgcgcagagagggagtggccaactccatcactaggggttccttgtagttaatgattaacccgccatgctacttatctacgtagccatgcgtcgacataacgcgtcgacattgattattgactagttattaatagtaatcaattacggggtcattagttcatagcccatatatggagttccgcgttacataacttacggtaaatggcccgcctggctgaccgcccaacgacccccgcccattgacgtcaataatgacgtatgttcccatagtaacgccaatagggactttccattgacgtcaatgggtggagtatttacggtaaactgcccacttggcagtacatcaagtgtatcatatgccaagtacgccccctattgacgtcaatgacggtaaatggcccgcctggcattatgcccagtacatgaccttatgggactttcctacttggcagtacatctacgtattagtcatcgctattaccatgtcgaggccacgttctgcttcactctccccatctcccccccctccccacccccaattttgtatttatttattttttaattattttgtgcagcgatgggggcggggggggggggcgcgcgccaggcggggcggggcggggcgaggggcggggcggggcgaggcggagaggtgcggcggcagccaatcagagcggcgcgctccgaaagtttccttttatggcgaggcggcggcggcggcggccctataaaaagcgaagcgcgcggcgggcgggagcaagcttcgtttagtgaaccgtcagatcgcctggagacgccatccacgctgttttgacctccatagaagacaccgggaccgatccagcctccgcggattcgaatcccggccgggaacggtgcattggaacgcggattccccgtgccaagagtgacgtaagtaccgcctatagagtctataggcccacaaaaaatgctttcttcttttaatatacttttttgtttatcttatttctaatactttccctaatctctttctttcagggcaataatgatacaatgtatcatgcctctttgcaccattctaaagaataacagtgataatttctgggttaaggcaatagcaatatttctgcatataaatatttctgcatataaattgtaactgatgtaagaggtttcatattgctaatagcagctacaatccagctaccattctgcttttattttatggttgggataaggctggattattctgagtccaagctaggcccttttgctaatcatgttcatacctcttatcttcctcccacagctcctgggcaacgtgctggtctgtgtgctggcccatcactttggcaaagaattgggattcgaaccggtgccgccaccatgaacttcgggctcaggaggtgaagctggtggagagcggcggcgacctggtgaagcctggcggcagcctgaagctgagctgcgccgccagcggcttcaccttcagcagctacgccatgagctgggtgagacagaaccctgagaagagactggagtgggtggccagcatcagcaagggcggcaacacctactaccctaacagcgtgaagggcagattcaccatcagcagagacaacgccagaaacatcctgtacctgcagatgagcagcctgagaagcgaggacaccgccctgtactactgcgccagaggctggggcgactacggctggttcgcctactggggccaggtgaccctggtgaccgtgagcgcccttgattttccttgtccttgttttaaaaggtgtccagtgtgccaaaacgacacccccatctgtctatccactggcccctggatctgctgcccaaactaactccatggtgaccctgggatgcctggtcaagggctatttccctgagccagtgacagtgacctggaactctggatccctgtccagcggtgtgcacaccttcccagctgtcctgcagtctgacctctacactctgagcagctcagtgactgtcccctccagcacctggcccagcgagaccgtcacctgcaacgttgcccacccggccagcagcaccaaggtggacaagaaaattgtgcccagggattgtggttgtaagccttgcatatgtacagtcccagaagtatcatctgtcttcatcttccccccaaagcccaaggatgtgctcaccattactctgactcctaaggtcacgtgtgttgtggtagacatcagcaaggatgatcccgaggtccagttcagctggtttgtagatgatgtggaggtgcacacagctcagacgcaaccccgggaggagcagttcaacagcactttccgctcagtcagtgaacttcccatcatgcaccaggactggctcaatggcaaggagttcaaatgcagggtcaacagtgcagctttccctgcccccatcgagaaaaccatctccaaaaccaaaggcagaccgaaggctccacaggtgtacaccattccacctcccaaggagcagatggccaaggataaagtcagtctgacctgcatgataacagacttcttccctgaagacattactgtggagtggcagtggaatgggcagccagcggagaactacaagaacactcagcccatcatggacacagatggctcttacttcgtctacagcaagctcaatgtgcagaagagcaactgggaggcaggaaatactttcacctgctctgtgttacatgagggcctgcacaaccaccatactgagaagagcctctcccactctcctggtagaaagaggcgagagggcagaggaagtcttctaacatgcggtgacgtggaggagaatcccggccctatgaagttgcctgttaggctgttggtgctgatgttctggattcctgcttccagcagtgacatcaagatgacccagagccctagcagcatgtacgccagcctgggcgagagagtgaccatcacctgcaaggccagccaggacatcaacagatacctgaactggttccagcagaagcctggcaagagccctaagaccctgatctacagagccaacagactgctggacggcgtgcctagcagattcagcggcagcggcagcggccaggactacagcctgaccatcagcagcctggactacgaggacatgggcatctactactgcctgcagtacgacgagttccctctgaccttcggcgacggcaccaagctggagctgaagcgggctgatgctgcaccaactgtatccatcttcccaccatccagtgagcagttaacatctggaggtgcctcagtcgtgtgcttcttgaacaacttctaccccaaagacatcaatgtcaagtggaagattgatggcagtgaacgacaaaatggcgtcctgaacagttggactgatcaggacagcaaagacagcacctacagcatgagcagcaccctcacgttgaccaaggacgagtatgaacgacataacagctatacctgtgaggccactcacaagacatcaacttcacccattgtcaagagcttcaacaggaatgagtgttagtaactcgagcctgaggatgggtggcatccctgtgacccctccccagtgcctctcctggccctggaagttgccactccagtgcccaccagccttgtcctaataaaattaagttgcatcattttgtctgactaggtgtccttctataatattatggggtggaggggggtggtatggagcaaggggcaagttgggaagacaacctgtagggcctgcggggtctattgggaaccaagctggagtgcagtggcacaatcttggctcactgcaatctccgcctcctgggttcaagcgattctcctgcctcagcctcccgagttgttgggattccaggcatgcatgaccaggctcagctaatttttgtttttttggtagagacggggtttcaccatattggccaggctggtctccaactcctaatctcaggtgatctacccaccttggcctcccaaattgctgggattacaggcgtgaaccactgctcccttccctgtccttggcctaggtatcgatgctacgtagataagtagcatggcgggttaatcattaactacagaggaacccctagtgatggagttggccactccctctctgcgcgctcgctcgctcactgaggccgggcgaccaaaggtcgcccgacgcccgggctttgcccgggcggcctcagtgagcgagcgagcgcgcagctgcctgcagg

SEQ ID NO: 2017 - DNA, 4309 bp, Artificial Sequence
  source: /note="Description of Artificial Sequence: Synthetic polynucleotide"
cctgcaggcagctgcgcgctcgctcgctcactgaggccgcccgggcaaagcccgggcgtcgggcgacctttggtcgcccggcctcagtgagcgagcgagcgcgcagagagggagtggccaactccatcactaggggttccttgtagttaatgattaacccgccatgctacttatctacgtagccatgcgtcgacataacgcgtcgacattgattattgactagttattaatagtaatcaattacggggtcattagttcatagcccatatatggagttccgcgttacataacttacggtaaatggcccgcctggctgaccgcccaacgacccccgcccattgacgtcaataatgacgtatgttcccatagtaacgccaatagggactttccattgacgtcaatgggtggagtatttacggtaaactgcccacttggcagtacatcaagtgtatcatatgccaagtacgccccctattgacgtcaatgacggtaaatggcccgcctggcattatgcccagtacatgaccttatgggactttcctacttggcagtacatctacgtattagtcatcgctattaccatgtcgaggccacgttctgcttcactctccccatctcccccccctccccacccccaattttgtatttatttattttttaattattttgtgcagcgatgggggcggggggggggggcgcgcgccaggcggggcggggcggggcgaggggcggggcggggcgaggcggagaggtgcggcggcagccaatcagagcggcgcgctccgaaagtttccttttatggcgaggcggcggcggcggcggccctataaaaagcgaagcgcgcggcgggcgggagcaagcttcgtttagtgaaccgtcagatcgcctggagacgccatccacgctgttttgacctccatagaagacaccgggaccgatccagcctccgcggattcgaatcccggccgggaacggtgcattggaacgcggattccccgtgccaagagtgacgtaagtaccgcctatagagtctataggcccacaaaaaatgctttcttcttttaatatacttttttgtttatcttatttctaatactttccctaatctctttctttcagggcaataatgatacaatgtatcatgcctctttgcaccattctaaagaataacagtgataatttctgggttaaggcaatagcaatatttctgcatataaatatttctgcatataaattgtaactgatgtaagaggtttcatattgctaatagcagctacaatccagctaccattctgcttttattttatggttgggataaggctggattattctgagtccaagctaggcccttttgctaatcatgttcatacctcttatcttcctcccacagctcctgggcaacgtgctggtctgtgtgctggcccatcactttggcaaagaattgggattcgaaccggtgccgccaccatgaacttcgggctcagcttgattttccttgtccttgttttaaaaggtgtccagtgtgaggtgaagctggtggagagcggcggcgacctggtgaagcccggcggcagcctgaagctgagctgcgccgccagcggcttcaccttcagcagctacgccatgagctgggtgaggcagaaccccgagaagaggctggagtgggtggccagcatcagcaagggcggcaacacctactaccccaacagcgtgaagggcaggttcaccatcagcagggacaacgccaggaacatcctgtacctgcagatgagcagcctgaggagcgaggacaccgccctgtactactgcgccaggggctggggcgactacggctggttcgcctactggggccaggtgaccctggtgaccgtgagcgccgccaaaacgacacccccatctgtctatccactggcccctggatctgctgcccaaactaactccatggtgaccctgggatgcctggtcaagggctatttccctgagccagtgacagtgacctggaactctggatccctgtccagcggtgtgcacaccttcccagctgtcctgcagtctgacctctacactctgagcagctcagtgactgtcccctccagcacctggcccagcgagaccgtcacctgcaacgttgcccacccggccagcagcaccaaggtggacaagaaaattgtgcccagggattgtggttgtaagccttgcatatgtacagtcccagaagtatcatctgtcttcatcttccccccaaagcccaaggatgtgctcaccattactctgactcctaaggtcacgtgtgttgtggtagacatcagcaaggatgatcccgaggtccagttcagctggtttgtagatgatgtggaggtgcacacagctcagacgcaaccccgggaggagcagttcaacagcactttccgctcagtcagtgaacttcccatcatgcaccaggactggctcaatggcaaggagttcaaatgcagggtcaacagtgcagctttccctgcccccatcgagaaaaccatctccaaaaccaaaggcagaccgaaggctccacaggtgtacaccattccacctcccaaggagcagatggccaaggataaagtcagtctgacctgcatgataacagacttcttccctgaagacattactgtggagtggcagtggaatgggcagccagcggagaactacaagaacactcagcccatcatggacacagatggctcttacttcgtctacagcaagctcaatgtgcagaagagcaactgggaggcaggaaatactttcacctgctctgtgttacatgagggcctgcacaaccaccatactgagaagagcctctcccactctcctggtagaaagaggcgagagggcagaggaagtcttctaacatgcggtgacgtggaggagaatcccggccctatgaagttgcctgttaggctgttggtgctgatgttctggattcctgcttccagcagtgacatcaagatgacccagagccccagcagcatgtacgccagcctgggcgagagggtgaccatcacctgcaaggccagccaggacatcaacaggtacctgaactggttccagcagaagcccggcaagagccccaagaccctgatctacagggccaacaggctgctggacggcgtgcccagcaggttcagcggcagcggcagcggccaggactacagcctgaccatcagcagcctggactacgaggacatgggcatctactactgcctgcagtacgacgagttccccctgaccttcggcgacggcaccaagctggagctgaagcgggctgatgctgcaccaactgtatccatcttcccaccatccagtgagcagttaacatctggaggtgcctcagtcgtgtgcttcttgaacaacttctaccccaaagacatcaatgtcaagtggaagattgatggcagtgaacgacaaaatggcgtcctgaacagttggactgatcaggacagcaaagacagcacctacagcatgagcagcaccctcacgttgaccaaggacgagtatgaacgacataacagctatacctgtgaggccactcacaagacatcaacttcacccattgtcaagagcttcaacaggaatgagtgttagtaactcgagcctgaggatgggtggcatccctgtgacccctccccagtgcctctcctggccctggaagttgccactccagtgcccaccagccttgtcctaataaaattaagttgcatcattttgtctgactaggtgtccttctataatattatggggtggaggggggtggtatggagcaaggggcaagttgggaagacaacctgtagggcctgcggggtctattgggaaccaagctggagtgcagtggcacaatcttggctcactgcaatctccgcctcctgggttcaagcgattctcctgcctcagcctcccgagttgttgggattccaggcatgcatgaccaggctcagctaatttttgtttttttggtagagacggggtttcaccatattggccaggctggtctccaactcctaatctcaggtgatctacccaccttggcctcccaaattgctgggattacaggcgtgaaccactgctcccttccctgtccttggcctaggtatcgatgctacgtagataagtagcatggcgggttaatcattaactacagaggaacccctagtgatggagttggccactccctctctgcgcgctcgctcgctcactgaggccgggcgaccaaaggtcgcccgacgcccgggctttgcccgggcggcctcagtgagcgagcgagcgcgcagctgcctgcagg

SEQ ID NO: 2018 - DNA, 4309 bp, Artificial Sequence
  source: /note="Description of Artificial Sequence: Synthetic polynucleotide"
cctgcaggcagctgcgcgctcgctcgctcactgaggccgcccgggcaaagcccgggcgtcgggcgacctttggtcgcccggcctcagtgagcgagcgagcgcgcagagagggagtggccaactccatcactaggggttccttgtagttaatgattaacccgccatgctacttatctacgtagccatgcgtcgacataacgcgtcgacattgattattgactagttattaatagtaatcaattacggggtcattagttcatagcccatatatggagttccgcgttacataacttacggtaaatggcccgcctggctgaccgcccaacgacccccgcccattgacgtcaataatgacgtatgttcccatagtaacgccaatagggactttccattgacgtcaatgggtggagtatttacggtaaactgcccacttggcagtacatcaagtgtatcatatgccaagtacgccccctattgacgtcaatgacggtaaatggcccgcctggcattatgcccagtacatgaccttatgggactttcctacttggcagtacatctacgtattagtcatcgctattaccatgtcgaggccacgttctgcttcactctccccatctcccccccctccccacccccaattttgtatttatttattttttaattattttgtgcagcgatgggggcggggggggggggcgcgcgccaggcggggcggggcggggcgaggggcggggcggggcgaggcggagaggtgcggcggcagccaatcagagcggcgcgctccgaaagtttccttttatggcgaggcggcggcggcggcggccctataaaaagcgaagcgcgcggcgggcgggagcaagcttcgtttagtgaaccgtcagatcgcctggagacgccatccacgctgttttgacctccatagaagacaccgggaccgatccagcctccgcggattcgaatcccggccgggaacggtgcattggaacgcggattccccgtgccaagagtgacgtaagtaccgcctatagagtctataggcccacaaaaaatgctttcttcttttaatatacttttttgtttatcttatttctaatactttccctaatctctttctttcagggcaataatgatacaatgtatcatgcctctttgcaccattctaaagaataacagtgataatttctgggttaaggcaatagcaatatttctgcatataaatatttctgcatataaattgtaactgatgtaagaggtttcatattgctaatagcagctacaatccagctaccattctgcttttattttatggttgggataaggctggattattctgagtccaagctaggcccttttgctaatcatgttcatacctcttatcttcctcccacagctcctgggcaacgtgctggtctgtgtgctggcccatcactttggcaaagaattgggattcgaaccggtgccgccaccatgaacttcgggctcagcttgattttccttgtccttgttttaaaaggtgtccagtgtgaagtgaaactggtggaaagcggcggcgatctggtgaaaccgggcggcagcctgaaactgagctgcgcggcgagcggctttacctttagcagctatgcgatgagctgggtgcgccagaacccggaaaaacgcctggaatgggtggcgagcattagcaaaggcggcaacacctattatccgaacagcgtgaaaggccgctttaccattagccgcgataacgcgcgcaacattctgtatctgcagatgagcagcctgcgcagcgaagataccgcgctgtattattgcgcgcgcggctggggcgattatggctggtttgcgtattggggccaggtgaccctggtgaccgtgagcgcggccaaaacgacacccccatctgtctatccactggcccctggatctgctgcccaaactaactccatggtgaccctgggatgcctggtcaagggctatttccctgagccagtgacagtgacctggaactctggatccctgtccagcggtgtgcacaccttcccagctgtcctgcagtctgacctctacactctgagcagctcagtgactgtcccctccagcacctggcccagcgagaccgtcacctgcaacgttgcccacccggccagcagcaccaaggtggacaagaaaattgtgcccagggattgtggttgtaagccttgcatatgtacagtcccagaagtatcatctgtcttcatcttccccccaaagcccaaggatgtgctcaccattactctgactcctaaggtcacgtgtgttgtggtagacatcagcaaggatgatcccgaggtccagttcagctggtttgtagatgatgtggaggtgcacacagctcagacgcaaccccgggaggagcagttcaacagcactttccgctcagtcagtgaacttcccatcatgcaccaggactggctcaatggcaaggagttcaaatgcagggtcaacagtgcagctttccctgcccccatcgagaaaaccatctccaaaaccaaaggcagaccgaaggctccacaggtgtacaccattccacctcccaaggagcagatggccaaggataaagtcagtctgacctgcatgataacagacttcttccctgaagacattactgtggagtggcagtggaatgggcagccagcggagaactacaagaacactcagcccatcatggacacagatggctcttacttcgtctacagcaagctcaatgtgcagaagagcaactgggaggcaggaaatactttcacctgctctgtgttacatgagggcctgcacaaccaccatactgagaagagcctctcccactctcctggtagaaagaggcgagagggcagaggaagtcttctaacatgcggtgacgtggaggagaatcccggccctatgaagttgcctgttaggctgttggtgctgatgttctggattcctgcttccagcagtgatattaaaatgacccagagcccgagcagcatgtatgcgagcctgggcgaacgcgtgaccattacctgcaaagcgagccaggatattaaccgctatctgaactggtttcagcagaaaccgggcaaaagcccgaaaaccctgatttatcgcgcgaaccgcctgctggatggcgtgccgagccgctttagcggcagcggcagcggccaggattatagcctgaccattagcagcctggattatgaagatatgggcatttattattgcctgcagtatgatgaatttccgctgacctttggcgatggcaccaaactggaactgaaacgggctgatgctgcaccaactgtatccatcttcccaccatccagtgagcagttaacatctggaggtgcctcagtcgtgtgcttcttgaacaacttctaccccaaagacatcaatgtcaagtggaagattgatggcagtgaacgacaaaatggcgtcctgaacagttggactgatcaggacagcaaagacagcacctacagcatgagcagcaccctcacgttgaccaaggacgagtatgaacgacataacagctatacctgtgaggccactcacaagacatcaacttcacccattgtcaagagcttcaacaggaatgagtgttagtaactcgagcctgaggatgggtggcatccctgtgacccctccccagtgcctctcctggccctggaagttgccactccagtgcccaccagccttgtcctaataaaattaagttgcatcattttgtctgactaggtgtccttctataatattatggggtggaggggggtggtatggagcaaggggcaagttgggaagacaacctgtagggcctgcggggtctattgggaaccaagctggagtgcagtggcacaatcttggctcactgcaatctccgcctcctgggttcaagcgattctcctgcctcagcctcccgagttgttgggattccaggcatgcatgaccaggctcagctaatttttgtttttttggtagagacggggtttcaccatattggccaggctggtctccaactcctaatctcaggtgatctacccaccttggcctcccaaattgctgggattacaggcgtgaaccactgctcccttccctgtccttggcctaggtatcgatgctacgtagataagtagcatggcgggttaatcattaactacagaggaacccctagtgatggagttggccactccctctctgcgcgctcgctcgctcactgaggccgggcgaccaaaggtcgcccgacgcccgggctttgcccgggcggcctcagtgagcgagcgagcgcgcagctgcctgcagg

SEQ ID NO: 2019 - DNA, 4309 bp, Artificial Sequence
  source: /note="Description of Artificial Sequence: Synthetic polynucleotide"
cctgcaggcagctgcgcgctcgctcgctcactgaggccgcccgggcaaagcccgggcgtcgggcgacctttggtcgcccggcctcagtgagcgagcgagcgcgcagagagggagtggccaactccatcactaggggttccttgtagttaatgattaacccgccatgctacttatctacgtagccatgcgtcgacataacgcgtcgacattgattattgactagttattaatagtaatcaattacggggtcattagttcatagcccatatatggagttccgcgttacataacttacggtaaatggcccgcctggctgaccgcccaacgacccccgcccattgacgtcaataatgacgtatgttcccatagtaacgccaatagggactttccattgacgtcaatgggtggagtatttacggtaaactgcccacttggcagtacatcaagtgtatcatatgccaagtacgccccctattgacgtcaatgacggtaaatggcccgcctggcattatgcccagtacatgaccttatgggactttcctacttggcagtacatctacgtattagtcatcgctattaccatgtcgaggccacgttctgcttcactctccccatctcccccccctccccacccccaattttgtatttatttattttttaattattttgtgcagcgatgggggcggggggggggggcgcgcgccaggcggggcggggcggggcgaggggcggggcggggcgaggcggagaggtgcggcggcagccaatcagagcggcgcgctccgaaagtttccttttatggcgaggcggcggcggcggcggccctataaaaagcgaagcgcgcggcgggcgggagcaagcttcgtttagtgaaccgtcagatcgcctggagacgccatccacgctgttttgacctccatagaagacaccgggaccgatccagcctccgcggattcgaatcccggccgggaacggtgcattggaacgcggattccccgtgccaagagtgacgtaagtaccgcctatagagtctataggcccacaaaaaatgctttcttcttttaatatacttttttgtttatcttatttctaatactttccctaatctctttctttcagggcaataatgatacaatgtatcatgcctctttgcaccattctaaagaataacagtgataatttctgggttaaggcaatagcaatatttctgcatataaatatttctgcatataaattgtaactgatgtaagaggtttcatattgctaatagcagctacaatccagctaccattctgcttttattttatggttgggataaggctggattattctgagtccaagctaggcccttttgctaatcatgttcatacctcttatcttcctcccacagctcctgggcaacgtgctggtctgtgtgctggcccatcactttggcaaagaattgggattcgaaccggtgccgccaccatgaacttcgggctcagcttgattttccttgtccttgttttaaaaggtgtccagtgtgaggtgaaacttgtggagtctggaggagacctggtgaagccaggaggcagcctgaagctgagctgtgctgccagtggcttcaccttcagcagctatgccatgtcctgggtccggcagaaccctgagaagaggctggagtgggtggccagcatctccaagggcggcaacacctactatcccaacagcgtcaaaggaagatttaccatcagccgggacaatgccaggaacatcctctacctgcagatgagctccctgcggtctgaggacacagccctgtactactgtgcccggggctggggagattatggatggtttgcctactggggccaggtgaccctggtcactgtgtctgctgccaaaacgacacccccatctgtctatccactggcccctggatctgctgcccaaactaactccatggtgaccctgggatgcctggtcaagggctatttccctgagccagtgacagtgacctggaactctggatccctgtccagcggtgtgcacaccttcccagctgtcctgcagtctgacctctacactctgagcagctcagtgactgtcccctccagcacctggcccagcgagaccgtcacctgcaacgttgcccacccggccagcagcaccaaggtggacaagaaaattgtgcccagggattgtggttgtaagccttgcatatgtacagtcccagaagtatcatctgtcttcatcttccccccaaagcccaaggatgtgctcaccattactctgactcctaaggtcacgtgtgttgtggtagacatcagcaaggatgatcccgaggtccagttcagctggtttgtagatgatgtggaggtgcacacagctcagacgcaaccccgggaggagcagttcaacagcactttccgctcagtcagtgaacttcccatcatgcaccaggactggctcaatggcaaggagttcaaatgcagggtcaacagtgcagctttccctgcccccatcgagaaaaccatctccaaaaccaaaggcagaccgaaggctccacaggtgtacaccattccacctcccaaggagcagatggccaaggataaagtcagtctgacctgcatgataacagacttcttccctgaagacattactgtggagtggcagtggaatgggcagccagcggagaactacaagaacactcagcccatcatggacacagatggctcttacttcgtctacagcaagctcaatgtgcagaagagcaactgggaggcaggaaatactttcacctgctctgtgttacatgagggcctgcacaaccaccatactgagaagagcctctcccactctcctggtagaaagaggcgagagggcagaggaagtcttctaacatgcggtgacgtggaggagaatcccggccctatgaagttgcctgttaggctgttggtgctgatgttctggattcctgcttccagcagtcgggctgatgctgcaccaactgtatccatcttcccaccatccagtgagcagttaacatctggaggtgcctcagtcgtgtgcttcttgaacaacttctaccccaaagacatcaatgtcaagtggaagattgatggcagtgaacgacaaaatgacatcaagatgacccagagcccttcctccatgtatgcctccctgggggagcgggtgacaatcacctgcaaggccagccaggatatcaaccgctacctgaactggttccagcagaagccaggcaagagccccaagaccctcatctatagagccaaccggctgctggacggccgggctgatgctgcaccaactgtatccatcttcccaccatccagtgagcagttaacatctggaggtgcctcagtcgtgtgcttcttgaacaacttctaccccaaagacatcaatgtcaagtggaagattgatggcagtgaacgacaaaatggcgtcctgaacagttggactgatcaggacagcaaagacagcacctacagcatgagcagcaccctcacgttgaccaaggacgagtatgaacgacataacagctatacctgtgaggccactcacaagacatcaacttcacccattgtcaagagcttcaacaggaatgagtgttagtaactcgagcctgaggatgggtggcatccctgtgacccctccccagtgcctctcctggccctggaagttgccactccagtgcccaccagccttgtcctaataaaattaagttgcatcattttgtctgactaggtgtccttctataatattatggggtggaggggggtggtatggagcaaggggcaagttgggaagacaacctgtagggcctgcggggtctattgggaaccaagctggagtgcagtggcacaatcttggctcactgcaatctccgcctcctgggttcaagcgattctcctgcctcagcctcccgagttgttgggattccaggcatgcatgaccaggctcagctaatttttgtttttttggtagagacggggtttcaccatattggccaggctggtctccaactcctaatctcaggtgatctacccaccttggcctcccaaattgctgggattacaggcgtgaaccactgctcccttccctgtccttggcctaggtatcgatgctacgtagataagtagcatggcgggttaatcattaactacagaggaacccctagtgatggagttggccactccctctctgcgcgctcgctcgctcactgaggccgggcgaccaaaggtcgcccgacgcccgggctttgcccgggcggcctcagtgagcgagcgagcgcgcagctgcctgcagg

SEQ ID NO: 2020 - DNA, 4309 bp, Artificial Sequence
  source: /note="Description of Artificial Sequence: Synthetic polynucleotide"
cctgcaggcagctgcgcgctcgctcgctcactgaggccgcccgggcaaagcccgggcgtcgggcgacctttggtcgcccggcctcagtgagcgagcgagcgcgcagagagggagtggccaactccatcactaggggttccttgtagttaatgattaacccgccatgctacttatctacgtagccatgcgtcgacataacgcgtcgacattgattattgactagttattaatagtaatcaattacggggtcattagttcatagcccatatatggagttccgcgttacataacttacggtaaatggcccgcctggctgaccgcccaacgacccccgcccattgacgtcaataatgacgtatgttcccatagtaacgccaatagggactttccattgacgtcaatgggtggagtatttacggtaaactgcccacttggcagtacatcaagtgtatcatatgccaagtacgccccctattgacgtcaatgacggtaaatggcccgcctggcattatgcccagtacatgaccttatgggactttcctacttggcagtacatctacgtattagtcatcgctattaccatgtcgaggccacgttctgcttcactctccccatctcccccccctccccacccccaattttgtatttatttattttttaattattttgtgcagcgatgggggcggggggggggggcgcgcgccaggcggggcggggcggggcgaggggcggggcggggcgaggcggagaggtgcggcggcagccaatcagagcggcgcgctccgaaagtttccttttatggcgaggcggcggcggcggcggccctataaaaagcgaagcgcgcggcgggcgggagcaagcttcgtttagtgaaccgtcagatcgcctggagacgccatccacgctgttttgacctccatagaagacaccgggaccgatccagcctccgcggattcgaatcccggccgggaacggtgcattggaacgcggattccccgtgccaagagtgacgtaagtaccgcctatagagtctataggcccacaaaaaatgctttcttcttttaatatacttttttgtttatcttatttctaatactttccctaatctctttctttcagggcaataatgatacaatgtatcatgcctctttgcaccattctaaagaataacagtgataatttctgggttaaggcaatagcaatatttctgcatataaatatttctgcatataaattgtaactgatgtaagaggtttcatattgctaatagcagctacaatccagctaccattctgcttttattttatggttgggataaggctggattattctgagtccaagctaggcccttttgctaatcatgttcatacctcttatcttcctcccacagctcctgggcaacgtgctggtctgtgtgctggcccatcactttggcaaagaattgggattcgaaccggtgccgccaccatgaacttcgggctcagcttgattttccttgtccttgttttaaaaggtgtccagtgtgaggtgaaattagtggagtctggaggagacctggtgaagccaggaggcagcctgaagctgagctgtgctgcttctggcttcaccttcagcagctatgccatgtcctgggtcagacagaatcctgagaagagactggagtgggtggccagcatctccaaaggtggcaacacctactatcccaacagtgttaaaggaagatttaccatcagcagagataatgcaagaaacatcctctacctgcagatgtcttctttaagaagtgaagatacagccctgtactactgtgccagaggctggggagattatggatggtttgcctactggggccaggtgacattagttactgtgtctgctgccaaaacgacacccccatctgtctatccactggcccctggatctgctgcccaaactaactccatggtgaccctgggatgcctggtcaagggctatttccctgagccagtgacagtgacctggaactctggatccctgtccagcggtgtgcacaccttcccagctgtcctgcagtctgacctctacactctgagcagctcagtgactgtcccctccagcacctggcccagcgagaccgtcacctgcaacgttgcccacccggccagcagcaccaaggtggacaagaaaattgtgcccagggattgtggttgtaagccttgcatatgtacagtcccagaagtatcatctgtcttcatcttccccccaaagcccaaggatgtgctcaccattactctgactcctaaggtcacgtgtgttgtggtagacatcagcaaggatgatcccgaggtccagttcagctggtttgtagatgatgtggaggtgcacacagctcagacgcaaccccgggaggagcagttcaacagcactttccgctcagtcagtgaacttcccatcatgcaccaggactggctcaatggcaaggagttcaaatgcagggtcaacagtgcagctttccctgcccccatcgagaaaaccatctccaaaaccaaaggcagaccgaaggctccacaggtgtacaccattccacctcccaaggagcagatggccaaggataaagtcagtctgacctgcatgataacagacttcttccctgaagacattactgtggagtggcagtggaatgggcagccagcggagaactacaagaacactcagcccatcatggacacagatggctcttacttcgtctacagcaagctcaatgtgcagaagagcaactgggaggcaggaaatactttcacctgctctgtgttacatgagggcctgcacaaccaccatactgagaagagcctctcccactctcctggtagaaagaggcgagagggcagaggaagtcttctaacatgcggtgacgtggaggagaatcccggccctatgaagttgcctgttaggctgttggtgctgatgttctggattcctgcttccagcagtgacatcaagatgacccagagcccttcttccatgtatgcttctttaggagaaagagtgacaatcacctgcaaggccagccaggatatcaaccgctacctgaactggttccagcagaagccaggaaaatctcccaagaccctgatttatagagccaacagactgctggacggcgtgcccagccgcttcagtggatctggaagtggccaggactacagcctgaccatctcttctctggattatgaagacatgggcatctactactgcctgcagtatgatgaatttcctttaacatttggagatggcaccaagctggagctgaagcgggctgatgctgcaccaactgtatccatcttcccaccatccagtgagcagttaacatctggaggtgcctcagtcgtgtgcttcttgaacaacttctaccccaaagacatcaatgtcaagtggaagattgatggcagtgaacgacaaaatggcgtcctgaacagttggactgatcaggacagcaaagacagcacctacagcatgagcagcaccctcacgttgaccaaggacgagtatgaacgacataacagctatacctgtgaggccactcacaagacatcaacttcacccattgtcaagagcttcaacaggaatgagtgttagtaactcgagcctgaggatgggtggcatccctgtgacccctccccagtgcctctcctggccctggaagttgccactccagtgcccaccagccttgtcctaataaaattaagttgcatcattttgtctgactaggtgtccttctataatattatggggtggaggggggtggtatggagcaaggggcaagttgggaagacaacctgtagggcctgcggggtctattgggaaccaagctggagtgcagtggcacaatcttggctcactgcaatctccgcctcctgggttcaagcgattctcctgcctcagcctcccgagttgttgggattccaggcatgcatgaccaggctcagctaatttttgtttttttggtagagacggggtttcaccatattggccaggctggtctccaactcctaatctcaggtgatctacccaccttggcctcccaaattgctgggattacaggcgtgaaccactgctcccttccctgtccttggcctaggtatcgatgctacgtagataagtagcatggcgggttaatcattaactacagaggaacccctagtgatggagttggccactccctctctgcgcgctcgctcgctcactgaggccgggcgaccaaaggtcgcccgacgcccgggctttgcccgggcggcctcagtgagcgagcgagcgcgcagctgcctgcagg

SEQ ID NO: 2021 - DNA, 4309 bp, Artificial Sequence
  source: /note="Description of Artificial Sequence: Synthetic polynucleotide"
cctgcaggcagctgcgcgctcgctcgctcactgaggccgcccgggcaaagcccgggcgtcgggcgacctttggtcgcccggcctcagtgagcgagcgagcgcgcagagagggagtggccaactccatcactaggggttccttgtagttaatgattaacccgccatgctacttatctacgtagccatgcgtcgacataacgcgtcgacattgattattgactagttattaatagtaatcaattacggggtcattagttcatagcccatatatggagttccgcgttacataacttacggtaaatggcccgcctggctgaccgcccaacgacccccgcccattgacgtcaataatgacgtatgttcccatagtaacgccaatagggactttccattgacgtcaatgggtggagtatttacggtaaactgcccacttggcagtacatcaagtgtatcatatgccaagtacgccccctattgacgtcaatgacggtaaatggcccgcctggcattatgcccagtacatgaccttatgggactttcctacttggcagtacatctacgtattagtcatcgctattaccatgtcgaggccacgttctgcttcactctccccatctcccccccctccccacccccaattttgtatttatttattttttaattattttgtgcagcgatgggggcggggggggggggcgcgcgccaggcggggcggggcggggcgaggggcggggcggggcgaggcggagaggtgcggcggcagccaatcagagcggcgcgctccgaaagtttccttttatggcgaggcggcggcggcggcggccctataaaaagcgaagcgcgcggcgggcgggagcaagcttcgtttagtgaaccgtcagatcgcctggagacgccatccacgctgttttgacctccatagaagacaccgggaccgatccagcctccgcggattcgaatcccggccgggaacggtgcattggaacgcggattccccgtgccaagagtgacgtaagtaccgcctatagagtctataggcccacaaaaaatgctttcttcttttaatatacttttttgtttatcttatttctaatactttccctaatctctttctttcagggcaataatgatacaatgtatcatgcctctttgcaccattctaaagaataacagtgataatttctgggttaaggcaatagcaatatttctgcatataaatatttctgcatataaattgtaactgatgtaagaggtttcatattgctaatagcagctacaatccagctaccattctgcttttattttatggttgggataaggctggattattctgagtccaagctaggcccttttgctaatcatgttcatacctcttatcttcctcccacagctcctgggcaacgtgctggtctgtgtgctggcccatcactttggcaaagaattgggattcgaaccggtgccgccaccatgaacttcgggctcagcttgattttccttgtccttgttttaaaaggtgtccagtgtgaggtgaaacttgtggagagcggcggggacctggtcaagccaggcggcagcctgaagctgagctgtgccgcctccggcttcaccttcagcagctatgccatgtcctgggtccggcagaaccctgagaagaggctggagtgggtggccagcatcagcaaaggaggcaacacctactatcccaacagcgtgaagggccgcttcaccatctcccgggacaatgccaggaacatcctctacctgcagatgagctccctgcggtctgaggacacagccctgtactactgcgcccggggctggggagactatggatggtttgcctactggggccaggtgaccctggtgacagtgtctgccgccaaaacgacacccccatctgtctatccactggcccctggatctgctgcccaaactaactccatggtgaccctgggatgcctggtcaagggctatttccctgagccagtgacagtgacctggaactctggatccctgtccagcggtgtgcacaccttcccagctgtcctgcagtctgacctctacactctgagcagctcagtgactgtcccctccagcacctggcccagcgagaccgtcacctgcaacgttgcccacccggccagcagcaccaaggtggacaagaaaattgtgcccagggattgtggttgtaagccttgcatatgtacagtcccagaagtatcatctgtcttcatcttccccccaaagcccaaggatgtgctcaccattactctgactcctaaggtcacgtgtgttgtggtagacatcagcaaggatgatcccgaggtccagttcagctggtttgtagatgatgtggaggtgcacacagctcagacgcaaccccgggaggagcagttcaacagcactttccgctcagtcagtgaacttcccatcatgcaccaggactggctcaatggcaaggagttcaaatgcagggtcaacagtgcagctttccctgcccccatcgagaaaaccatctccaaaaccaaaggcagaccgaaggctccacaggtgtacaccattccacctcccaaggagcagatggccaaggataaagtcagtctgacctgcatgataacagacttcttccctgaagacattactgtggagtggcagtggaatgggcagccagcggagaactacaagaacactcagcccatcatggacacagatggctcttacttcgtctacagcaagctcaatgtgcagaagagcaactgggaggcaggaaatactttcacctgctctgtgttacatgagggcctgcacaaccaccatactgagaagagcctctcccactctcctggtagaaagaggcgagagggcagaggaagtcttctaacatgcggtgacgtggaggagaatcccggccctatgaagttgcctgttaggctgttggtgctgatgttctggattcctgcttccagcagtgacatcaagatgacccagagcccttcctccatgtatgcctccctgggggagcgggtgaccatcacctgcaaggccagccaggatatcaaccgctacctgaactggttccagcagaagccaggcaagagccccaagaccctcatctatcgggccaaccggctgctggatggagtgcccagccgcttctccggcagcggcagtggccaggactacagcctcaccatttccagcctggactatgaggacatgggcatctactactgcctgcagtatgatgagttccccctgacctttggagatggcaccaagctggagctgaagcgggctgatgctgcaccaactgtatccatcttcccaccatccagtgagcagttaacatctggaggtgcctcagtcgtgtgcttcttgaacaacttctaccccaaagacatcaatgtcaagtggaagattgatggcagtgaacgacaaaatggcgtcctgaacagttggactgatcaggacagcaaagacagcacctacagcatgagcagcaccctcacgttgaccaaggacgagtatgaacgacataacagctatacctgtgaggccactcacaagacatcaacttcacccattgtcaagagcttcaacaggaatgagtgttagtaactcgagcctgaggatgggtggcatccctgtgacccctccccagtgcctctcctggccctggaagttgccactccagtgcccaccagccttgtcctaataaaattaagttgcatcattttgtctgactaggtgtccttctataatattatggggtggaggggggtggtatggagcaaggggcaagttgggaagacaacctgtagggcctgcggggtctattgggaaccaagctggagtgcagtggcacaatcttggctcactgcaatctccgcctcctgggttcaagcgattctcctgcctcagcctcccgagttgttgggattccaggcatgcatgaccaggctcagctaatttttgtttttttggtagagacggggtttcaccatattggccaggctggtctccaactcctaatctcaggtgatctacccaccttggcctcccaaattgctgggattacaggcgtgaaccactgctcccttccctgtccttggcctaggtatcgatgctacgtagataagtagcatggcgggttaatcattaactacagaggaacccctagtgatggagttggccactccctctctgcgcgctcgctcgctcactgaggccgggcgaccaaaggtcgcccgacgcccgggctttgcccgggcggcctcagtgagcgagcgagcgcgcagctgcctgcagg

SEQ ID NO: 2022 - DNA, 4309 bp, Artificial Sequence
  source: /note="Description of Artificial Sequence: Synthetic polynucleotide"
cctgcaggcagctgcgcgctcgctcgctcactgaggccgcccgggcaaagcccgggcgtcgggcgacctttggtcgcccggcctcagtgagcgagcgagcgcgcagagagggagtggccaactccatcactaggggttccttgtagttaatgattaacccgccatgctacttatctacgtagccatgcgtcgacataacgcgtcgacattgattattgactagttattaatagtaatcaattacggggtcattagttcatagcccatatatggagttccgcgttacataacttacggtaaatggcccgcctggctgaccgcccaacgacccccgcccattgacgtcaataatgacgtatgttcccatagtaacgccaatagggactttccattgacgtcaatgggtggagtatttacggtaaactgcccacttggcagtacatcaagtgtatcatatgccaagtacgccccctattgacgtcaatgacggtaaatggcccgcctggcattatgcccagtacatgaccttatgggactttcctacttggcagtacatctacgtattagtcatcgctattaccatgtcgaggccacgttctgcttcactctccccatctcccccccctccccacccccaattttgtatttatttattttttaattattttgtgcagcgatgggggcggggggggggggcgcgcgccaggcggggcggggcggggcgaggggcggggcggggcgaggcggagaggtgcggcggcagccaatcagagcggcgcgctccgaaagtttccttttatggcgaggcggcggcggcggcggccctataaaaagcgaagcgcgcggcgggcgggagcaagcttcgtttagtgaaccgtcagatcgcctggagacgccatccacgctgttttgacctccatagaagacaccgggaccgatccagcctccgcggattcgaatcccggccgggaacggtgcattggaacgcggattccccgtgccaagagtgacgtaagtaccgcctatagagtctataggcccacaaaaaatgctttcttcttttaatatacttttttgtttatcttatttctaatactttccctaatctctttctttcagggcaataatgatacaatgtatcatgcctctttgcaccattctaaagaataacagtgataatttctgggttaaggcaatagcaatatttctgcatataaatatttctgcatataaattgtaactgatgtaagaggtttcatattgctaatagcagctacaatccagctaccattctgcttttattttatggttgggataaggctggattattctgagtccaagctaggcccttttgctaatcatgttcatacctcttatcttcctcccacagctcctgggcaacgtgctggtctgtgtgctggcccatcactttggcaaagaattgggattcgaaccggtgccgccaccatgaacttcgggctcagcttgattttccttgtccttgttttaaaaggtgtccagtgtgaggtgaaacttgtggagagcggcggggacctggtgaagccaggcggcagcctgaagctgagctgtgccgcctccggcttcaccttcagcagctatgccatgtcctgggtccggcagaaccctgagaagaggctggagtgggtggccagcatcagcaaaggaggcaacacctactaccccaacagcgtcaagggccgcttcaccatctcccgggacaatgccaggaacatcctgtacctgcagatgagctccctgcggtctgaggacacagccctgtattactgcgcccggggctggggagactatggatggtttgcctactggggccaggtgaccctggtcaccgtgtctgccgccaaaacgacacccccatctgtctatccactggcccctggatctgctgcccaaactaactccatggtgaccctgggatgcctggtcaagggctatttccctgagccagtgacagtgacctggaactctggatccctgtccagcggtgtgcacaccttcccagctgtcctgcagtctgacctctacactctgagcagctcagtgactgtcccctccagcacctggcccagcgagaccgtcacctgcaacgttgcccacccggccagcagcaccaaggtggacaagaaaattgtgcccagggattgtggttgtaagccttgcatatgtacagtcccagaagtatcatctgtcttcatcttccccccaaagcccaaggatgtgctcaccattactctgactcctaaggtcacgtgtgttgtggtagacatcagcaaggatgatcccgaggtccagttcagctggtttgtagatgatgtggaggtgcacacagctcagacgcaaccccgggaggagcagttcaacagcactttccgctcagtcagtgaacttcccatcatgcaccaggactggctcaatggcaaggagttcaaatgcagggtcaacagtgcagctttccctgcccccatcgagaaaaccatctccaaaaccaaaggcagaccgaaggctccacaggtgtacaccattccacctcccaaggagcagatggccaaggataaagtcagtctgacctgcatgataacagacttcttccctgaagacattactgtggagtggcagtggaatgggcagccagcggagaactacaagaacactcagcccatcatggacacagatggctcttacttcgtctacagcaagctcaatgtgcagaagagcaactgggaggcaggaaatactttcacctgctctgtgttacatgagggcctgcacaaccaccatactgagaagagcctctcccactctcctggtagaaagaggcgagagggcagaggaagtcttctaacatgcggtgacgtggaggagaatcccggccctatgaagttgcctgttaggctgttggtgctgatgttctggattcctgcttccagcagtgacatcaagatgacccagagcccttcctccatgtatgcctccctgggggagcgggtgaccatcacctgcaaggccagccaggatatcaaccgctacctgaactggttccagcagaagcccggcaagagccccaagaccctcatctatcgggccaaccggctgctggatggagtgcccagccgcttctccggcagcggcagtggccaggactacagcctgaccatttcttctctggactatgaggacatgggcatctactactgcctgcagtatgatgagttccccctgacatttggagatggcaccaagctggagctgaagcgggctgatgctgcaccaactgtatccatcttcccaccatccagtgagcagttaacatctggaggtgcctcagtcgtgtgcttcttgaacaacttctaccccaaagacatcaatgtcaagtggaagattgatggcagtgaacgacaaaatggcgtcctgaacagttggactgatcaggacagcaaagacagcacctacagcatgagcagcaccctcacgttgaccaaggacgagtatgaacgacataacagctatacctgtgaggccactcacaagacatcaacttcacccattgtcaagagcttcaacaggaatgagtgttagtaactcgagcctgaggatgggtggcatccctgtgacccctccccagtgcctctcctggccctggaagttgccactccagtgcccaccagccttgtcctaataaaattaagttgcatcattttgtctgactaggtgtccttctataatattatggggtggaggggggtggtatggagcaaggggcaagttgggaagacaacctgtagggcctgcggggtctattgggaaccaagctggagtgcagtggcacaatcttggctcactgcaatctccgcctcctgggttcaagcgattctcctgcctcagcctcccgagttgttgggattccaggcatgcatgaccaggctcagctaatttttgtttttttggtagagacggggtttcaccatattggccaggctggtctccaactcctaatctcaggtgatctacccaccttggcctcccaaattgctgggattacaggcgtgaaccactgctcccttccctgtccttggcctaggtatcgatgctacgtagataagtagcatggcgggttaatcattaactacagaggaacccctagtgatggagttggccactccctctctgcgcgctcgctcgctcactgaggccgggcgaccaaaggtcgcccgacgcccgggctttgcccgggcggcctcagtgagcgagcgagcgcgcagctgcctgcagg

SEQ ID NO: 2023 - DNA, 4309 bp, Artificial Sequence
  source: /note="Description of Artificial Sequence: Synthetic polynucleotide"
cctgcaggcagctgcgcgctcgctcgctcactgaggccgcccgggcaaagcccgggcgtcgggcgacctttggtcgcccggcctcagtgagcgagcgagcgcgcagagagggagtggccaactccatcactaggggttccttgtagttaatgattaacccgccatgctacttatctacgtagccatgcgtcgacataacgcgtcgacattgattattgactagttattaatagtaatcaattacggggtcattagttcatagcccatatatggagttccgcgttacataacttacggtaaatggcccgcctggctgaccgcccaacgacccccgcccattgacgtcaataatgacgtatgttcccatagtaacgccaatagggactttccattgacgtcaatgggtggagtatttacggtaaactgcccacttggcagtacatcaagtgtatcatatgccaagtacgccccctattgacgtcaatgacggtaaatggcccgcctggcattatgcccagtacatgaccttatgggactttcctacttggcagtacatctacgtattagtcatcgctattaccatgtcgaggccacgttctgcttcactctccccatctcccccccctccccacccccaattttgtatttatttattttttaattattttgtgcagcgatgggggcggggggggggggcgcgcgccaggcggggcggggcggggcgaggggcggggcggggcgaggcggagaggtgcggcggcagccaatcagagcggcgcgctccgaaagtttccttttatggcgaggcggcggcggcggcggccctataaaaagcgaagcgcgcggcgggcgggagcaagcttcgtttagtgaaccgtcagatcgcctggagacgccatccacgctgttttgacctccatagaagacaccgggaccgatccagcctccgcggattcgaatcccggccgggaacggtgcattggaacgcggattccccgtgccaagagtgacgtaagtaccgcctatagagtctataggcccacaaaaaatgctttcttcttttaatatacttttttgtttatcttatttctaatactttccctaatctctttctttcagggcaataatgatacaatgtatcatgcctctttgcaccattctaaagaataacagtgataatttctgggttaaggcaatagcaatatttctgcatataaatatttctgcatataaattgtaactgatgtaagaggtttcatattgctaatagcagctacaatccagctaccattctgcttttattttatggttgggataaggctggattattctgagtccaagctaggcccttttgctaatcatgttcatacctcttatcttcctcccacagctcctgggcaacgtgctggtctgtgtgctggcccatcactttggcaaagaattgggattcgaaccggtgccgccaccatgaacttcgggctcagcttgattttccttgtccttgttttaaaaggtgtccagtgtgaggtgaagctggtggagagcggaggagacctggtcaagcccgggggctccctgaagctcagctgtgccgccagcggcttcaccttctcctcctatgccatgtcctgggtccggcagaaccctgagaagaggctggagtgggtggcctccatctccaagggcggcaacacctactatcccaacagcgtgaaaggaagatttaccatcagccgggacaatgccaggaacatcctctacctgcagatgagcagcctgcggtctgaggacacagccctgtactactgcgcccggggctggggggactatggatggtttgcctactggggccaggtgaccctggttactgtgtctgccgccaaaacgacacccccatctgtctatccactggcccctggatctgctgcccaaactaactccatggtgaccctgggatgcctggtcaagggctatttccctgagccagtgacagtgacctggaactctggatccctgtccagcggtgtgcacaccttcccagctgtcctgcagtctgacctctacactctgagcagctcagtgactgtcccctccagcacctggcccagcgagaccgtcacctgcaacgttgcccacccggccagcagcaccaaggtggacaagaaaattgtgcccagggattgtggttgtaagccttgcatatgtacagtcccagaagtatcatctgtcttcatcttccccccaaagcccaaggatgtgctcaccattactctgactcctaaggtcacgtgtgttgtggtagacatcagcaaggatgatcccgaggtccagttcagctggtttgtagatgatgtggaggtgcacacagctcagacgcaaccccgggaggagcagttcaacagcactttccgctcagtcagtgaacttcccatcatgcaccaggactggctcaatggcaaggagttcaaatgcagggtcaacagtgcagctttccctgcccccatcgagaaaaccatctccaaaaccaaaggcagaccgaaggctccacaggtgtacaccattccacctcccaaggagcagatggccaaggataaagtcagtctgacctgcatgataacagacttcttccctgaagacattactgtggagtggcagtggaatgggcagccagcggagaactacaagaacactcagcccatcatggacacagatggctcttacttcgtctacagcaagctcaatgtgcagaagagcaactgggaggcaggaaatactttcacctgctctgtgttacatgagggcctgcacaaccaccatactgagaagagcctctcccactctcctggtagaaagaggcgagagggcagaggaagtcttctaacatgcggtgacgtggaggagaatcccggccctatgaagttgcctgttaggctgttggtgctgatgttctggattcctgcttccagcagtgatatcaagatgacccagagccccagctccatgtatgccagcctgggggagcgggtgaccatcacctgcaaggcctcccaggacatcaaccgctacctgaactggttccagcagaagccaggcaagtcccccaagaccctcatctatcgggccaaccggctgctggatggagtgccctcccgcttctccggcagtggcagcggccaggattacagcctcaccatttcttccctggactatgaggacatgggcatctactactgcctgcagtatgatgagttccccctgacctttggagatggcaccaagctggagctgaagcgggctgatgctgcaccaactgtatccatcttcccaccatccagtgagcagttaacatctggaggtgcctcagtcgtgtgcttcttgaacaacttctaccccaaagacatcaatgtcaagtggaagattgatggcagtgaacgacaaaatggcgtcctgaacagttggactgatcaggacagcaaagacagcacctacagcatgagcagcaccctcacgttgaccaaggacgagtatgaacgacataacagctatacctgtgaggccactcacaagacatcaacttcacccattgtcaagagcttcaacaggaatgagtgttagtaactcgagcctgaggatgggtggcatccctgtgacccctccccagtgcctctcctggccctggaagttgccactccagtgcccaccagccttgtcctaataaaattaagttgcatcattttgtctgactaggtgtccttctataatattatggggtggaggggggtggtatggagcaaggggcaagttgggaagacaacctgtagggcctgcggggtctattgggaaccaagctggagtgcagtggcacaatcttggctcactgcaatctccgcctcctgggttcaagcgattctcctgcctcagcctcccgagttgttgggattccaggcatgcatgaccaggctcagctaatttttgtttttttggtagagacggggtttcaccatattggccaggctggtctccaactcctaatctcaggtgatctacccaccttggcctcccaaattgctgggattacaggcgtgaaccactgctcccttccctgtccttggcctaggtatcgatgctacgtagataagtagcatggcgggttaatcattaactacagaggaacccctagtgatggagttggccactccctctctgcgcgctcgctcgctcactgaggccgggcgaccaaaggtcgcccgacgcccgggctttgcccgggcggcctcagtgagcgagcgagcgcgcagctgcctgcagg

SEQ ID NO: 2024 - DNA, 4309 bp, Artificial Sequence
  source: /note="Description of Artificial Sequence: Synthetic polynucleotide"
cctgcaggcagctgcgcgctcgctcgctcactgaggccgcccgggcaaagcccgggcgtcgggcgacctttggtcgcccggcctcagtgagcgagcgagcgcgcagagagggagtggccaactccatcactaggggttccttgtagttaatgattaacccgccatgctacttatctacgtagccatgcgtcgacataacgcgtcgacattgattattgactagttattaatagtaatcaattacggggtcattagttcatagcccatatatggagttccgcgttacataacttacggtaaatggcccgcctggctgaccgcccaacgacccccgcccattgacgtcaataatgacgtatgttcccatagtaacgccaatagggactttccattgacgtcaatgggtggagtatttacggtaaactgcccacttggcagtacatcaagtgtatcatatgccaagtacgccccctattgacgtcaatgacggtaaatggcccgcctggcattatgcccagtacatgaccttatgggactttcctacttggcagtacatctacgtattagtcatcgctattaccatgtcgaggccacgttctgcttcactctccccatctcccccccctccccacccccaattttgtatttatttattttttaattattttgtgcagcgatgggggcggggggggggggcgcgcgccaggcggggcggggcggggcgaggggcggggcggggcgaggcggagaggtgcggcggcagccaatcagagcggcgcgctccgaaagtttccttttatggcgaggcggcggcggcggcggccctataaaaagcgaagcgcgcggcgggcgggagcaagcttcgtttagtgaaccgtcagatcgcctggagacgccatccacgctgttttgacctccatagaagacaccgggaccgatccagcctccgcggattcgaatcccggccgggaacggtgcattggaacgcggattccccgtgccaagagtgacgtaagtaccgcctatagagtctataggcccacaaaaaatgctttcttcttttaatatacttttttgtttatcttatttctaatactttccctaatctctttctttcagggcaataatgatacaatgtatcatgcctctttgcaccattctaaagaataacagtgataatttctgggttaaggcaatagcaatatttctgcatataaatatttctgcatataaattgtaactgatgtaagaggtttcatattgctaatagcagctacaatccagctaccattctgcttttattttatggttgggataaggctggattattctgagtccaagctaggcccttttgctaatcatgttcatacctcttatcttcctcccacagctcctgggcaacgtgctggtctgtgtgctggcccatcactttggcaaagaattgggattcgaaccggtgccgccaccatgaacttcgggctcagcttgattttccttgtccttgttttaaaaggtgtccagtgtgaggtgaagctggtggagagcggcggggacctggtcaagcccgggggcagcctgaagctcagctgtgccgcctccggcttcaccttcagcagctatgccatgtcctgggtccggcagaaccctgagaagaggctggagtgggtggccagcatcagcaagggcggcaacacctactatcccaacagcgtgaaaggccgcttcaccatctcccgggacaatgccaggaacatcctgtacctgcagatgagctccctgcgcagcgaggacacagccctctactactgcgcccggggctggggagactatggatggtttgcctactggggccaggtgaccctggttactgtgtctgccgccaaaacgacacccccatctgtctatccactggcccctggatctgctgcccaaactaactccatggtgaccctgggatgcctggtcaagggctatttccctgagccagtgacagtgacctggaactctggatccctgtccagcggtgtgcacaccttcccagctgtcctgcagtctgacctctacactctgagcagctcagtgactgtcccctccagcacctggcccagcgagaccgtcacctgcaacgttgcccacccggccagcagcaccaaggtggacaagaaaattgtgcccagggattgtggttgtaagccttgcatatgtacagtcccagaagtatcatctgtcttcatcttccccccaaagcccaaggatgtgctcaccattactctgactcctaaggtcacgtgtgttgtggtagacatcagcaaggatgatcccgaggtccagttcagctggtttgtagatgatgtggaggtgcacacagctcagacgcaaccccgggaggagcagttcaacagcactttccgctcagtcagtgaacttcccatcatgcaccaggactggctcaatggcaaggagttcaaatgcagggtcaacagtgcagctttccctgcccccatcgagaaaaccatctccaaaaccaaaggcagaccgaaggctccacaggtgtacaccattccacctcccaaggagcagatggccaaggataaagtcagtctgacctgcatgataacagacttcttccctgaagacattactgtggagtggcagtggaatgggcagccagcggagaactacaagaacactcagcccatcatggacacagatggctcttacttcgtctacagcaagctcaatgtgcagaagagcaactgggaggcaggaaatactttcacctgctctgtgttacatgagggcctgcacaaccaccatactgagaagagcctctcccactctcctggtagaaagaggcgagagggcagaggaagtcttctaacatgcggtgacgtggaggagaatcccggccctatgaagttgcctgttaggctgttggtgctgatgttctggattcctgcttccagcagtgatatcaagatgacccagagcccttcctccatgtatgcctccctgggggagcgggtgaccatcacctgcaaggccagccaggacatcaaccgctacctgaactggttccagcagaagcccggcaagagccccaagaccctcatctatcgggccaaccggctgctggatggagtgcccagccgcttctccggcagcggcagtggccaggattacagcctcaccatttccagcctggactatgaggacatgggcatctactactgcctgcagtatgatgagttccccctgacctttggagatggcaccaagctggagctgaagcgggctgatgctgcaccaactgtatccatcttcccaccatccagtgagcagttaacatctggaggtgcctcagtcgtgtgcttcttgaacaacttctaccccaaagacatcaatgtcaagtggaagattgatggcagtgaacgacaaaatggcgtcctgaacagttggactgatcaggacagcaaagacagcacctacagcatgagcagcaccctcacgttgaccaaggacgagtatgaacgacataacagctatacctgtgaggccactcacaagacatcaacttcacccattgtcaagagcttcaacaggaatgagtgttagtaactcgagcctgaggatgggtggcatccctgtgacccctccccagtgcctctcctggccctggaagttgccactccagtgcccaccagccttgtcctaataaaattaagttgcatcattttgtctgactaggtgtccttctataatattatggggtggaggggggtggtatggagcaaggggcaagttgggaagacaacctgtagggcctgcggggtctattgggaaccaagctggagtgcagtggcacaatcttggctcactgcaatctccgcctcctgggttcaagcgattctcctgcctcagcctcccgagttgttgggattccaggcatgcatgaccaggctcagctaatttttgtttttttggtagagacggggtttcaccatattggccaggctggtctccaactcctaatctcaggtgatctacccaccttggcctcccaaattgctgggattacaggcgtgaaccactgctcccttccctgtccttggcctaggtatcgatgctacgtagataagtagcatggcgggttaatcattaactacagaggaacccctagtgatggagttggccactccctctctgcgcgctcgctcgctcactgaggccgggcgaccaaaggtcgcccgacgcccgggctttgcccgggcggcctcagtgagcgagcgagcgcgcagctgcctgcagg

SEQ ID NO: 2025 - DNA, 4253 bp, Artificial Sequence
  source: /note="Description of Artificial Sequence: Synthetic polynucleotide"
cctgcaggcagctgcgcgctcgctcgctcactgaggccgcccgggcaaagcccgggcgtcgggcgacctttggtcgcccggcctcagtgagcgagcgagcgcgcagagagggagtggccaactccatcactaggggttccttgtagttaatgattaacccgccatgctacttatctacgtagccatgcgtcgacataacgcgtctagttattaatagtaatcaattacggggtcattagttcatagcccatatatggagttccgcgttacataacttacggtaaatggcccgcctggctgaccgcccaacgacccccgcccattgacgtcaataatgacgtatgttcccatagtaacgccaatagggactttccattgacgtcaatgggtggagtatttacggtaaactgcccacttggcagtacatcaagtgtatcatatgccaagtacgccccctattgacgtcaatgacggtaaatggcccgcctggcattatgcccagtacatgaccttatgggactttcctacttggcagtacatctacgtattagtcatcgctattaccatggtcgaggtgagccccacgttctgcttcactctccccatctcccccccctccccacccccaattttgtatttatttattttttaattattttgtgcagcgatgggggcggggggggggggggggcgcgcgccaggcggggcggggcggggcgaggggcggggcggggcgaggcggagaggtgcggcggcagccaatcagagcggcgcgctccgaaagtttccttttatggcgaggcggcggcggcggcggccctataaaaagcgaagcgcgcggcgggcgggagtcgctgcgcgctgccttcgccccgtgccccgctccgccgccgcctcgcgccgcccgccccggctctgactgaccgcgttactcccacaggtgagcgggcgggacggcccttctcctccgggctgtaattagcgcttggtttaatgacggcttgtttcttttctgtggctgcgtgaaagccttgaggggctccgggagggccctttgtgcggggggagcggctcggggggtgcgtgcgtgtgtgtgtgcgtggggagcgccgcgtgcggctccgcgctgcccggcggctgtgagcgctgcgggcgcggcgcggggctttgtgcgctccgcagtgtgcgcgaggggagcgcggccgggggcggtgccccgcggtgcggggggggctgcgaggggaacaaaggctgcgtgcggggtgtgtgcgtgggggggtgagcagggggtgtgggcgcgtcggtcgggctgcaaccccccctgcacccccctccccgagttgctgagcacggcccggcttcgggtgcggggctccgtacggggcgtggcgcggggctcgccgtgccgggcggggggtggcggcaggtgggggtgccgggcggggcggggccgcctcgggccggggagggctcgggggaggggcgcggcggcccccggagcgccggcggctgtcgaggcgcggcgagccgcagccattgccttttatggtaatcgtgcgagagggcgcagggacttcctttgtcccaaatctgtgcggagccgaaatctgggaggcgccgccgcaccccctctagcgggcgcggggcgaagcggtgcggcgccggcaggaaggaaatgggcggggagggccttcgtgcgtcgccgcgccgccgtccccttctccctctccagcctcggggctgtccgcggggggacggctgccttcgggggggacggggcagggcggggttcggcttctggcgtgtgaccggcggctctagagcctctgctaaccatgttcatgccttcttctttttcctacagctcctgggcaacgtgctggttattgtgctgtctcatcattttggcaaagaattcgggattcgaaccggtgccgccaccatgggatggagctggatctttctctttctcctgtcaggaactacaggtgtcctctctgaggtccagctgcaacagtctggacctgagctggtgaagcctggggcttcagtgaagatatcctgcaagacttctggatacacattcactgaatacaccatacactgggtgaagcagagccatggagagagccttgagtggattggaggtattaatccaaacgatggtggtactatttacaaccagaagttcaagggcaaggccacattgactgtagacaagtcctccaaaacagcctacatggagctccgcagcctgacatctgaggattctgcagtcttttactgtgcaagagggccctccgccaggtttccttactggggccaagggactctggtcactgtctctgcaggtggtggtggtagcggcggcggcggctctggtggtggtggatccgatgttgtgatgacccagactccactcactttgtcggttaccattggacaaccagcctccatctcttgcaagtcaagtcagagcctcttagatagtgatggaaagacatatttgaattggttgttacagaggccaggccagtctccaaagcgcctaatctatctggtgtctaaactggactctggagtccctgacagattcactggcagtggatcagggacagatttcacactgaaaattagcagagtggaggctgaggatttgggagtttattattgctggcaaggtacacattttcctcggacgttcggtggaggcaccaagctggaaatcaaacggtacccatacgatgttccagattacgcttagtgacctgaggatgatctttttccctctgccaaaaattatggggacatcatgaagccccttgagcatctgacttctggctaataaaggaaatttattttcattgcaatagtgtgttggaattttttgtgtctctcactcgcctaggtttcttgagacctctacaagagttggagttgacacttggggtactttcttggtgtaacgaactaatagcctgaaaaaaagaagtcatgtgttttcagcaaggcaagaaactgtctaacatagtagataaaacagagaacacttggccggaatcaactaagatgttgctatgttccattcatcatattatctccatctgcagagtagtgggttagtggagggtagaaaacattctcctgaacaactagttaaacttggctttgagttccacctgtaccacttgcataatcttgggaaagtgagttgcctaattcagtgacattaataaatttattaatttcttctttcaataaaacctggagagagcttcatatgtatcagcatatgctaaacttgaaagatacaagtagaaaatggaaggaaatatatctgactcaatagggatagttcaagggttaaattaaaagtagtaaagtattataattaatctgacatggtacctaatatataataatcatgtattaagaatgccagtcaccattaaaagtcaatgtatgactttaatctactcgaggaaagaaactatgtcttgttcactgttattatctctaaaatccataatcagaagagcaccatgtgtatgagccacacaataaatatctactgtataatatgtctcttcttgtttttaaccttcatagataagactctattgaattgggacattagtccagcaagccattctgtctctgtctcttctatggagggaaaggtttaaccatcaaagactaggtgcatctcccaaacaacctgaatttaatattcaaatatgtatctaaattcatttgttacatttttgtgttcagcttacatattactttttgagcgacatctattcaaggcctactacttgctgctctacaaaatattgccatgctctatttgcccattaactatttcttaaccttcaagggacatgctcagttctgatataccaagatttggtatttaccctcccagcctacatacttccaatcttaagagaacaatttttagactacattcaaatatagacctctccaccccatcaactattttatctctcctctcctatctttcttgacaaagagtgattagaaatatgcaattctaggtatcgatgctacgtagataagtagcatggcgggttaatcattaactacagaggaacccctagtgatggagttggccactccctctctgcgcgctcgctcgctcactgaggccgggcgaccaaaggtcgcccgacgcccgggctttgcccgggcggcctcagtgagcgagcgagcgcgcagctgcctgcagg

SEQ ID NO: 2026 - DNA, 4716 bp, Artificial Sequence
  source: /note="Description of Artificial Sequence: Synthetic polynucleotide"
cctgcaggcagctgcgcgctcgctcgctcactgaggccgcccgggcaaagcccgggcgtcgggcgacctttggtcgcccggcctcagtgagcgagcgagcgcgcagagagggagtggccaactccatcactaggggttccttgtagttaatgattaacccgccatgctacttatctacgtagccatgcgtcgacataacgcgtctagttattaatagtaatcaattacggggtcattagttcatagcccatatatggagttccgcgttacataacttacggtaaatggcccgcctggctgaccgcccaacgacccccgcccattgacgtcaataatgacgtatgttcccatagtaacgccaatagggactttccattgacgtcaatgggtggagtatttacggtaaactgcccacttggcagtacatcaagtgtatcatatgccaagtacgccccctattgacgtcaatgacggtaaatggcccgcctggcattatgcccagtacatgaccttatgggactttcctacttggcagtacatctacgtattagtcatcgctattaccatggtcgaggtgagccccacgttctgcttcactctccccatctcccccccctccccacccccaattttgtatttatttattttttaattattttgtgcagcgatgggggcggggggggggggggggcgcgcgccaggcggggcggggcggggcgaggggcggggcggggcgaggcggagaggtgcggcggcagccaatcagagcggcgcgctccgaaagtttccttttatggcgaggcggcggcggcggcggccctataaaaagcgaagcgcgcggcgggcgggagtcgctgcgcgctgccttcgccccgtgccccgctccgccgccgcctcgcgccgcccgccccggctctgactgaccgcgttactcccacaggtgagcgggcgggacggcccttctcctccgggctgtaattagcgcttggtttaatgacggcttgtttcttttctgtggctgcgtgaaagccttgaggggctccgggagggccctttgtgcggggggagcggctcggggggtgcgtgcgtgtgtgtgtgcgtggggagcgccgcgtgcggctccgcgctgcccggcggctgtgagcgctgcgggcgcggcgcggggctttgtgcgctccgcagtgtgcgcgaggggagcgcggccgggggcggtgccccgcggtgcggggggggctgcgaggggaacaaaggctgcgtgcggggtgtgtgcgtgggggggtgagcagggggtgtgggcgcgtcggtcgggctgcaaccccccctgcacccccctccccgagttgctgagcacggcccggcttcgggtgcggggctccgtacggggcgtggcgcggggctcgccgtgccgggcggggggtggcggcaggtgggggtgccgggcggggcggggccgcctcgggccggggagggctcgggggaggggcgcggcggcccccggagcgccggcggctgtcgaggcgcggcgagccgcagccattgccttttatggtaatcgtgcgagagggcgcagggacttcctttgtcccaaatctgtgcggagccgaaatctgggaggcgccgccgcaccccctctagcgggcgcggggcgaagcggtgcggcgccggcaggaaggaaatgggcggggagggccttcgtgcgtcgccgcgccgccgtccccttctccctctccagcctcggggctgtccgcggggggacggctgccttcgggggggacggggcagggcggggttcggcttctggcgtgtgaccggcggctctagagcctctgctaaccatgttcatgccttcttctttttcctacagctcctgggcaacgtgctggttattgtgctgtctcatcattttggcaaagaattcgggattcgaaccggtgccgccaccatggcgacgggttcaagaacttccctacttcttgcatttggcctgctttgtttgccgtggttacaggagggctcggcagctgccgaggtccagctgcaacagtctggacctgagctggtgaagcctggggcttcagtgaagatatcctgcaagacttctggatacacattcactgaatacaccatacactgggtgaagcagagccatggagagagccttgagtggattggaggtattaatccaaacgatggtggtactatttacaaccagaagttcaagggcaaggccacattgactgtagacaagtcctccaaaacagcctacatggagctccgcagcctgacatctgaggattctgcagtcttttactgtgcaagagggccctccgccaggtttccttactggggccaagggactctggtcactgtctctgcaggtggtggtggtagcggcggcggcggctctggtggtggtggatccgatgttgtgatgacccagactccactcactttgtcggttaccattggacaaccagcctccatctcttgcaagtcaagtcagagcctcttagatagtgatggaaagacatatttgaattggttgttacagaggccaggccagtctccaaagcgcctaatctatctggtgtctaaactggactctggagtccctgacagattcactggcagtggatcagggacagatttcacactgaaaattagcagagtggaggctgaggatttgggagtttattattgctggcaaggtacacattttcctcggacgttcggtggaggcaccaagctggaaatcaaacggagcgagaaggacgagctgtagtgacctgaggatgggtggcatccctgtgacccctccccagtgcctctcctggccctggaagttgccactccagtgcccaccagccttgtcctaataaaattaagttgcatcattttgtctgactaggtgtccttctataatattatggggtggaggggggtggtatggagcaaggggcaagttgggaagacaacctgtagggcctgcggggtctattgggaaccaagctggagtgcagtggcacaatcttggctcactgcaatctccgcctcctgggttcaagcgattctcctgcctcagcctcccgagttgttgggattccaggcatgcatgaccaggctcagctaatttttgtttttttggtagagacggggtttcaccatattggccaggctggtctccaactcctaatctcaggtgatctacccaccttggcctcccaaattgctgggattacaggcgtgaaccactgctcccttccctgtccttggcctagaattatatttttttaaagactcacatagtcttctgcacagggcattctttttgcttcaggatgtttacaacatttgctgcccacttttcctaggtttcttgagacctctacaagagttggagttgacacttggggtactttcttggtgtaacgaactaatagcctgaaaaaaagaagtcatgtgttttcagcaaggcaagaaactgtctaacatagtagataaaacagagaacacttggccggaatcaactaagatgttgctatgttccattcatcatattatctccatctgcagagtagtgggttagtggagggtagaaaacattctcctgaacaactagttaaacttggctttgagttccacctgtaccacttgcataatcttgggaaagtgagttgcctaattcagtgacattaataaatttattaatttcttctttcaataaaacctggagagagcttcatatgtatcagcatatgctaaacttgaaagatacaagtagaaaatggaaggaaatatatctgactcaatagggatagttcaagggttaaattaaaagtagtaaagtattataattaatctgacatggtacctaatatataataatcatgtattaagaatgccagtcaccattaaaagtcaatgtatgactttaatctactcgaggaaagaaactatgtcttgttcactgttattatctctaaaatccataatcagaagagcaccatgtgtatgagccacacaataaatatctactgtataatatgtctcttcttgtttttaaccttcatagataagactctattgaattgggacattagtccagcaagccattctgtctctgtctcttctatggagggaaaggtttaaccatcaaagactaggtgcatctcccaaacaacctgaatttaatattcaaatatgtatctaaattcatttgttacatttttgtgttcagcttacatattactttttgagcgacatctattcaaggcctactacttgctgctctacaaaatattgccatgctctatttgcccattaactatttcttaaccttcaagggacatgctcagttctgatataccaagatttggtatttaccctcccagcctacatacttccaatcttaagagaacaatttttagactacattcaaatatagacctctccaccccatcaactattttatctctcctctcctatctttcttgacaaagagtgattagaaatatgcaattctaggtatcgatgctacgtagataagtagcatggcgggttaatcattaactacagaggaacccctagtgatggagttggccactccctctctgcgcgctcgctcgctcactgaggccgggcgaccaaaggtcgcccgacgcccgggctttgcccgggcggcctcagtgagcgagcgagcgcgcagctgcctgcagg

SEQ ID NO: 2027 - DNA, 4716 bp, Artificial Sequence
  source: /note="Description of Artificial Sequence: Synthetic polynucleotide"
cctgcaggcagctgcgcgctcgctcgctcactgaggccgcccgggcaaagcccgggcgtcgggcgacctttggtcgcccggcctcagtgagcgagcgagcgcgcagagagggagtggccaactccatcactaggggttccttgtagttaatgattaacccgccatgctacttatctacgtagccatgcgtcgacataacgcgtctagttattaatagtaatcaattacggggtcattagttcatagcccatatatggagttccgcgttacataacttacggtaaatggcccgcctggctgaccgcccaacgacccccgcccattgacgtcaataatgacgtatgttcccatagtaacgccaatagggactttccattgacgtcaatgggtggagtatttacggtaaactgcccacttggcagtacatcaagtgtatcatatgccaagtacgccccctattgacgtcaatgacggtaaatggcccgcctggcattatgcccagtacatgaccttatgggactttcctacttggcagtacatctacgtattagtcatcgctattaccatggtcgaggtgagccccacgttctgcttcactctccccatctcccccccctccccacccccaattttgtatttatttattttttaattattttgtgcagcgatgggggcggggggggggggggggcgcgcgccaggcggggcggggcggggcgaggggcggggcggggcgaggcggagaggtgcggcggcagccaatcagagcggcgcgctccgaaagtttccttttatggcgaggcggcggcggcggcggccctataaaaagcgaagcgcgcggcgggcgggagtcgctgcgcgctgccttcgccccgtgccccgctccgccgccgcctcgcgccgcccgccccggctctgactgaccgcgttactcccacaggtgagcgggcgggacggcccttctcctccgggctgtaattagcgcttggtttaatgacggcttgtttcttttctgtggctgcgtgaaagccttgaggggctccgggagggccctttgtgcggggggagcggctcggggggtgcgtgcgtgtgtgtgtgcgtggggagcgccgcgtgcggctccgcgctgcccggcggctgtgagcgctgcgggcgcggcgcggggctttgtgcgctccgcagtgtgcgcgaggggagcgcggccgggggcggtgccccgcggtgcggggggggctgcgaggggaacaaaggctgcgtgcggggtgtgtgcgtgggggggtgagcagggggtgtgggcgcgtcggtcgggctgcaaccccccctgcacccccctccccgagttgctgagcacggcccggcttcgggtgcggggctccgtacggggcgtggcgcggggctcgccgtgccgggcggggggtggcggcaggtgggggtgccgggcggggcggggccgcctcgggccggggagggctcgggggaggggcgcggcggcccccggagcgccggcggctgtcgaggcgcggcgagccgcagccattgccttttatggtaatcgtgcgagagggcgcagggacttcctttgtcccaaatctgtgcggagccgaaatctgggaggcgccgccgcaccccctctagcgggcgcggggcgaagcggtgcggcgccggcaggaaggaaatgggcggggagggccttcgtgcgtcgccgcgccgccgtccccttctccctctccagcctcggggctgtccgcggggggacggctgccttcgggggggacggggcagggcggggttcggcttctggcgtgtgaccggcggctctagagcctctgctaaccatgttcatgccttcttctttttcctacagctcctgggcaacgtgctggttattgtgctgtctcatcattttggcaaagaattcgggattcgaaccggtgccgccaccatggcgacgggttcaagaacttccctacttcttgcatttggcctgctttgtttgccgtggttacaggagggctcggcagctgccgaggtccagctgcaacagtctggacctgagctggtgaagcctggggcttcagtgaagatatcctgcaagacttctggatacacattcactgaatacaccatacactgggtgaagcagagccatggagagagccttgagtggattggaggtattaatccaaacgatggtggtactatttacaaccagaagttcaagggcaaggccacattgactgtagacaagtcctccaaaacagcctacatggagctccgcagcctgacatctgaggattctgcagtcttttactgtgcaagagggccctccgccaggtttccttactggggccaagggactctggtcactgtctctgcaggtggtggtggtagcggcggcggcggctctggtggtggtggatccgatgttgtgatgacccagactccactcactttgtcggttaccattggacaaccagcctccatctcttgcaagtcaagtcagagcctcttagatagtgatggaaagacatatttgaattggttgttacagaggccaggccagtctccaaagcgcctaatctatctggtgtctaaactggactctggagtccctgacagattcactggcagtggatcagggacagatttcacactgaaaattagcagagtggaggctgaggatttgggagtttattattgctggcaaggtacacattttcctcggacgttcggtggaggcaccaagctggaaatcaaacggcatcaccatcaccatcactagtgacctgaggatgggtggcatccctgtgacccctccccagtgcctctcctggccctggaagttgccactccagtgcccaccagccttgtcctaataaaattaagttgcatcattttgtctgactaggtgtccttctataatattatggggtggaggggggtggtatggagcaaggggcaagttgggaagacaacctgtagggcctgcggggtctattgggaaccaagctggagtgcagtggcacaatcttggctcactgcaatctccgcctcctgggttcaagcgattctcctgcctcagcctcccgagttgttgggattccaggcatgcatgaccaggctcagctaatttttgtttttttggtagagacggggtttcaccatattggccaggctggtctccaactcctaatctcaggtgatctacccaccttggcctcccaaattgctgggattacaggcgtgaaccactgctcccttccctgtccttggcctagaattatatttttttaaagactcacatagtcttctgcacagggcattctttttgcttcaggatgtttacaacatttgctgcccacttttcctaggtttcttgagacctctacaagagttggagttgacacttggggtactttcttggtgtaacgaactaatagcctgaaaaaaagaagtcatgtgttttcagcaaggcaagaaactgtctaacatagtagataaaacagagaacacttggccggaatcaactaagatgttgctatgttccattcatcatattatctccatctgcagagtagtgggttagtggagggtagaaaacattctcctgaacaactagttaaacttggctttgagttccacctgtaccacttgcataatcttgggaaagtgagttgcctaattcagtgacattaataaatttattaatttcttctttcaataaaacctggagagagcttcatatgtatcagcatatgctaaacttgaaagatacaagtagaaaatggaaggaaatatatctgactcaatagggatagttcaagggttaaattaaaagtagtaaagtattataattaatctgacatggtacctaatatataataatcatgtattaagaatgccagtcaccattaaaagtcaatgtatgactttaatctactcgaggaaagaaactatgtcttgttcactgttattatctctaaaatccataatcagaagagcaccatgtgtatgagccacacaataaatatctactgtataatatgtctcttcttgtttttaaccttcatagataagactctattgaattgggacattagtccagcaagccattctgtctctgtctcttctatggagggaaaggtttaaccatcaaagactaggtgcatctcccaaacaacctgaatttaatattcaaatatgtatctaaattcatttgttacatttttgtgttcagcttacatattactttttgagcgacatctattcaaggcctactacttgctgctctacaaaatattgccatgctctatttgcccattaactatttcttaaccttcaagggacatgctcagttctgatataccaagatttggtatttaccctcccagcctacatacttccaatcttaagagaacaatttttagactacattcaaatatagacctctccaccccatcaactattttatctctcctctcctatctttcttgacaaagagtgattagaaatatgcaattctaggtatcgatgctacgtagataagtagcatggcgggttaatcattaactacagaggaacccctagtgatggagttggccactccctctctgcgcgctcgctcgctcactgaggccgggcgaccaaaggtcgcccgacgcccgggctttgcccgggcggcctcagtgagcgagcgagcgcgcagctgcctgcagg

SEQ ID NO: 2028 - DNA, 4698 bp, Artificial Sequence
  source: /note="Description of Artificial Sequence: Synthetic polynucleotide"
cctgcaggcagctgcgcgctcgctcgctcactgaggccgcccgggcaaagcccgggcgtcgggcgacctttggtcgcccggcctcagtgagcgagcgagcgcgcagagagggagtggccaactccatcactaggggttccttgtagttaatgattaacccgccatgctacttatctacgtagccatgcgtcgacataacgcgtctagttattaatagtaatcaattacggggtcattagttcatagcccatatatggagttccgcgttacataacttacggtaaatggcccgcctggctgaccgcccaacgacccccgcccattgacgtcaataatgacgtatgttcccatagtaacgccaatagggactttccattgacgtcaatgggtggagtatttacggtaaactgcccacttggcagtacatcaagtgtatcatatgccaagtacgccccctattgacgtcaatgacggtaaatggcccgcctggcattatgcccagtacatgaccttatgggactttcctacttggcagtacatctacgtattagtcatcgctattaccatggtcgaggtgagccccacgttctgcttcactctccccatctcccccccctccccacccccaattttgtatttatttattttttaattattttgtgcagcgatgggggcggggggggggggggggcgcgcgccaggcggggcggggcggggcgaggggcggggcggggcgaggcggagaggtgcggcggcagccaatcagagcggcgcgctccgaaagtttccttttatggcgaggcggcggcggcggcggccctataaaaagcgaagcgcgcggcgggcgggagtcgctgcgcgctgccttcgccccgtgccccgctccgccgccgcctcgcgccgcccgccccggctctgactgaccgcgttactcccacaggtgagcgggcgggacggcccttctcctccgggctgtaattagcgcttggtttaatgacggcttgtttcttttctgtggctgcgtgaaagccttgaggggctccgggagggccctttgtgcggggggagcggctcggggggtgcgtgcgtgtgtgtgtgcgtggggagcgccgcgtgcggctccgcgctgcccggcggctgtgagcgctgcgggcgcggcgcggggctttgtgcgctccgcagtgtgcgcgaggggagcgcggccgggggcggtgccccgcggtgcggggggggctgcgaggggaacaaaggctgcgtgcggggtgtgtgcgtgggggggtgagcagggggtgtgggcgcgtcggtcgggctgcaaccccccctgcacccccctccccgagttgctgagcacggcccggcttcgggtgcggggctccgtacggggcgtggcgcggggctcgccgtgccgggcggggggtggcggcaggtgggggtgccgggcggggcggggccgcctcgggccggggagggctcgggggaggggcgcggcggcccccggagcgccggcggctgtcgaggcgcggcgagccgcagccattgccttttatggtaatcgtgcgagagggcgcagggacttcctttgtcccaaatctgtgcggagccgaaatctgggaggcgccgccgcaccccctctagcgggcgcggggcgaagcggtgcggcgccggcaggaaggaaatgggcggggagggccttcgtgcgtcgccgcgccgccgtccccttctccctctccagcctcggggctgtccgcggggggacggctgccttcgggggggacggggcagggcggggttcggcttctggcgtgtgaccggcggctctagagcctctgctaaccatgttcatgccttcttctttttcctacagctcctgggcaacgtgctggttattgtgctgtctcatcattttggcaaagaattcgggattcgaaccggtgccgccaccatgggatggagctggatctttctctttctcctgtcaggaactacaggtgtcctctctgaggtccagctgcaacagtctggacctgagctggtgaagcctggggcttcagtgaagatatcctgcaagacttctggatacacattcactgaatacaccatacactgggtgaagcagagccatggagagagccttgagtggattggaggtattaatccaaacgatggtggtactatttacaaccagaagttcaagggcaaggccacattgactgtagacaagtcctccaaaacagcctacatggagctccgcagcctgacatctgaggattctgcagtcttttactgtgcaagagggccctccgccaggtttccttactggggccaagggactctggtcactgtctctgcaggtggtggtggtagcggcggcggcggctctggtggtggtggatccgatgttgtgatgacccagactccactcactttgtcggttaccattggacaaccagcctccatctcttgcaagtcaagtcagagcctcttagatagtgatggaaagacatatttgaattggttgttacagaggccaggccagtctccaaagcgcctaatctatctggtgtctaaactggactctggagtccctgacagattcactggcagtggatcagggacagatttcacactgaaaattagcagagtggaggctgaggatttgggagtttattattgctggcaaggtacacattttcctcggacgttcggtggaggcaccaagctggaaatcaaacggtacccatacgatgttccagattacgcttagtgacctgaggatgggtggcatccctgtgacccctccccagtgcctctcctggccctggaagttgccactccagtgcccaccagccttgtcctaataaaattaagttgcatcattttgtctgactaggtgtccttctataatattatggggtggaggggggtggtatggagcaaggggcaagttgggaagacaacctgtagggcctgcggggtctattgggaaccaagctggagtgcagtggcacaatcttggctcactgcaatctccgcctcctgggttcaagcgattctcctgcctcagcctcccgagttgttgggattccaggcatgcatgaccaggctcagctaatttttgtttttttggtagagacggggtttcaccatattggccaggctggtctccaactcctaatctcaggtgatctacccaccttggcctcccaaattgctgggattacaggcgtgaaccactgctcccttccctgtccttggcctagaattatatttttttaaagactcacatagtcttctgcacagggcattctttttgcttcaggatgtttacaacatttgctgcccacttttcctaggtttcttgagacctctacaagagttggagttgacacttggggtactttcttggtgtaacgaactaatagcctgaaaaaaagaagtcatgtgttttcagcaaggcaagaaactgtctaacatagtagataaaacagagaacacttggccggaatcaactaagatgttgctatgttccattcatcatattatctccatctgcagagtagtgggttagtggagggtagaaaacattctcctgaacaactagttaaacttggctttgagttccacctgtaccacttgcataatcttgggaaagtgagttgcctaattcagtgacattaataaatttattaatttcttctttcaataaaacctggagagagcttcatatgtatcagcatatgctaaacttgaaagatacaagtagaaaatggaaggaaatatatctgactcaatagggatagttcaagggttaaattaaaagtagtaaagtattataattaatctgacatggtacctaatatataataatcatgtattaagaatgccagtcaccattaaaagtcaatgtatgactttaatctactcgaggaaagaaactatgtcttgttcactgttattatctctaaaatccataatcagaagagcaccatgtgtatgagccacacaataaatatctactgtataatatgtctcttcttgtttttaaccttcatagataagactctattgaattgggacattagtccagcaagccattctgtctctgtctcttctatggagggaaaggtttaaccatcaaagactaggtgcatctcccaaacaacctgaatttaatattcaaatatgtatctaaattcatttgttacatttttgtgttcagcttacatattactttttgagcgacatctattcaaggcctactacttgctgctctacaaaatattgccatgctctatttgcccattaactatttcttaaccttcaagggacatgctcagttctgatataccaagatttggtatttaccctcccagcctacatacttccaatcttaagagaacaatttttagactacattcaaatatagacctctccaccccatcaactattttatctctcctctcctatctttcttgacaaagagtgattagaaatatgcaattctaggtatcgatgctacgtagataagtagcatggcgggttaatcattaactacagaggaacccctagtgatggagttggccactccctctctgcgcgctcgctcgctcactgaggccgggcgaccaaaggtcgcccgacgcccgggctttgcccgggcggcctcagtgagcgagcgagcgcgcagctgcctgcagg

SEQ ID NO: 2029 - DNA, 4689 bp, Artificial Sequence
  source: /note="Description of Artificial Sequence: Synthetic polynucleotide"
cctgcaggcagctgcgcgctcgctcgctcactgaggccgcccgggcaaagcccgggcgtcgggcgacctttggtcgcccggcctcagtgagcgagcgagcgcgcagagagggagtggccaactccatcactaggggttccttgtagttaatgattaacccgccatgctacttatctacgtagccatgcgtcgacataacgcgtctagttattaatagtaatcaattacggggtcattagttcatagcccatatatggagttccgcgttacataacttacggtaaatggcccgcctggctgaccgcccaacgacccccgcccattgacgtcaataatgacgtatgttcccatagtaacgccaatagggactttccattgacgtcaatgggtggagtatttacggtaaactgcccacttggcagtacatcaagtgtatcatatgccaagtacgccccctattgacgtcaatgacggtaaatggcccgcctggcattatgcccagtacatgaccttatgggactttcctacttggcagtacatctacgtattagtcatcgctattaccatggtcgaggtgagccccacgttctgcttcactctccccatctcccccccctccccacccccaattttgtatttatttattttttaattattttgtgcagcgatgggggcggggggggggggggggcgcgcgccaggcggggcggggcggggcgaggggcggggcggggcgaggcggagaggtgcggcggcagccaatcagagcggcgcgctccgaaagtttccttttatggcgaggcggcggcggcggcggccctataaaaagcgaagcgcgcggcgggcgggagtcgctgcgcgctgccttcgccccgtgccccgctccgccgccgcctcgcgccgcccgccccggctctgactgaccgcgttactcccacaggtgagcgggcgggacggcccttctcctccgggctgtaattagcgcttggtttaatgacggcttgtttcttttctgtggctgcgtgaaagccttgaggggctccgggagggccctttgtgcggggggagcggctcggggggtgcgtgcgtgtgtgtgtgcgtggggagcgccgcgtgcggctccgcgctgcccggcggctgtgagcgctgcgggcgcggcgcggggctttgtgcgctccgcagtgtgcgcgaggggagcgcggccgggggcggtgccccgcggtgcggggggggctgcgaggggaacaaaggctgcgtgcggggtgtgtgcgtgggggggtgagcagggggtgtgggcgcgtcggtcgggctgcaaccccccctgcacccccctccccgagttgctgagcacggcccggcttcgggtgcggggctccgtacggggcgtggcgcggggctcgccgtgccgggcggggggtggcggcaggtgggggtgccgggcggggcggggccgcctcgggccggggagggctcgggggaggggcgcggcggcccccggagcgccggcggctgtcgaggcgcggcgagccgcagccattgccttttatggtaatcgtgcgagagggcgcagggacttcctttgtcccaaatctgtgcggagccgaaatctgggaggcgccgccgcaccccctctagcgggcgcggggcgaagcggtgcggcgccggcaggaaggaaatgggcggggagggccttcgtgcgtcgccgcgccgccgtccccttctccctctccagcctcggggctgtccgcggggggacggctgccttcgggggggacggggcagggcggggttcggcttctggcgtgtgaccggcggctctagagcctctgctaaccatgttcatgccttcttctttttcctacagctcctgggcaacgtgctggttattgtgctgtctcatcattttggcaaagaattcgggattcgaaccggtgccgccaccatgggatggagctggatctttctctttctcctgtcaggaactacaggtgtcctctctgaggtccagctgcaacagtctggacctgagctggtgaagcctggggcttcagtgaagatatcctgcaagacttctggatacacattcactgaatacaccatacactgggtgaagcagagccatggagagagccttgagtggattggaggtattaatccaaacgatggtggtactatttacaaccagaagttcaagggcaaggccacattgactgtagacaagtcctccaaaacagcctacatggagctccgcagcctgacatctgaggattctgcagtcttttactgtgcaagagggccctccgccaggtttccttactggggccaagggactctggtcactgtctctgcaggtggtggtggtagcggcggcggcggctctggtggtggtggatccgatgttgtgatgacccagactccactcactttgtcggttaccattggacaaccagcctccatctcttgcaagtcaagtcagagcctcttagatagtgatggaaagacatatttgaattggttgttacagaggccaggccagtctccaaagcgcctaatctatctggtgtctaaactggactctggagtccctgacagattcactggcagtggatcagggacagatttcacactgaaaattagcagagtggaggctgaggatttgggagtttattattgctggcaaggtacacattttcctcggacgttcggtggaggcaccaagctggaaatcaaacggcatcaccatcaccatcactagtgacctgaggatgggtggcatccctgtgacccctccccagtgcctctcctggccctggaagttgccactccagtgcccaccagccttgtcctaataaaattaagttgcatcattttgtctgactaggtgtccttctataatattatggggtggaggggggtggtatggagcaaggggcaagttgggaagacaacctgtagggcctgcggggtctattgggaaccaagctggagtgcagtggcacaatcttggctcactgcaatctccgcctcctgggttcaagcgattctcctgcctcagcctcccgagttgttgggattccaggcatgcatgaccaggctcagctaatttttgtttttttggtagagacggggtttcaccatattggccaggctggtctccaactcctaatctcaggtgatctacccaccttggcctcccaaattgctgggattacaggcgtgaaccactgctcccttccctgtccttggcctagaattatatttttttaaagactcacatagtcttctgcacagggcattctttttgcttcaggatgtttacaacatttgctgcccacttttcctaggtttcttgagacctctacaagagttggagttgacacttggggtactttcttggtgtaacgaactaatagcctgaaaaaaagaagtcatgtgttttcagcaaggcaagaaactgtctaacatagtagataaaacagagaacacttggccggaatcaactaagatgttgctatgttccattcatcatattatctccatctgcagagtagtgggttagtggagggtagaaaacattctcctgaacaactagttaaacttggctttgagttccacctgtaccacttgcataatcttgggaaagtgagttgcctaattcagtgacattaataaatttattaatttcttctttcaataaaacctggagagagcttcatatgtatcagcatatgctaaacttgaaagatacaagtagaaaatggaaggaaatatatctgactcaatagggatagttcaagggttaaattaaaagtagtaaagtattataattaatctgacatggtacctaatatataataatcatgtattaagaatgccagtcaccattaaaagtcaatgtatgactttaatctactcgaggaaagaaactatgtcttgttcactgttattatctctaaaatccataatcagaagagcaccatgtgtatgagccacacaataaatatctactgtataatatgtctcttcttgtttttaaccttcatagataagactctattgaattgggacattagtccagcaagccattctgtctctgtctcttctatggagggaaaggtttaaccatcaaagactaggtgcatctcccaaacaacctgaatttaatattcaaatatgtatctaaattcatttgttacatttttgtgttcagcttacatattactttttgagcgacatctattcaaggcctactacttgctgctctacaaaatattgccatgctctatttgcccattaactatttcttaaccttcaagggacatgctcagttctgatataccaagatttggtatttaccctcccagcctacatacttccaatcttaagagaacaatttttagactacattcaaatatagacctctccaccccatcaactattttatctctcctctcctatctttcttgacaaagagtgattagaaatatgcaattctaggtatcgatgctacgtagataagtagcatggcgggttaatcattaactacagaggaacccctagtgatggagttggccactccctctctgcgcgctcgctcgctcactgaggccgggcgaccaaaggtcgcccgacgcccgggctttgcccgggcggcctcagtgagcgagcgagcgcgcagctgcctgcagg

SEQ ID NO: 2030 - DNA, 4716 bp, Artificial Sequence
  source: /note="Description of Artificial Sequence: Synthetic polynucleotide"
cctgcaggcagctgcgcgctcgctcgctcactgaggccgcccgggcaaagcccgggcgtcgggcgacctttggtcgcccggcctcagtgagcgagcgagcgcgcagagagggagtggccaactccatcactaggggttccttgtagttaatgattaacccgccatgctacttatctacgtagccatgcgtcgacataacgcgtctagttattaatagtaatcaattacggggtcattagttcatagcccatatatggagttccgcgttacataacttacggtaaatggcccgcctggctgaccgcccaacgacccccgcccattgacgtcaataatgacgtatgttcccatagtaacgccaatagggactttccattgacgtcaatgggtggagtatttacggtaaactgcccacttggcagtacatcaagtgtatcatatgccaagtacgccccctattgacgtcaatgacggtaaatggcccgcctggcattatgcccagtacatgaccttatgggactttcctacttggcagtacatctacgtattagtcatcgctattaccatggtcgaggtgagccccacgttctgcttcactctccccatctcccccccctccccacccccaattttgtatttatttattttttaattattttgtgcagcgatgggggcggggggggggggggggcgcgcgccaggcggggcggggcggggcgaggggcggggcggggcgaggcggagaggtgcggcggcagccaatcagagcggcgcgctccgaaagtttccttttatggcgaggcggcggcggcggcggccctataaaaagcgaagcgcgcggcgggcgggagtcgctgcgcgctgccttcgccccgtgccccgctccgccgccgcctcgcgccgcccgccccggctctgactgaccgcgttactcccacaggtgagcgggcgggacggcccttctcctccgggctgtaattagcgcttggtttaatgacggcttgtttcttttctgtggctgcgtgaaagccttgaggggctccgggagggccctttgtgcggggggagcggctcggggggtgcgtgcgtgtgtgtgtgcgtggggagcgccgcgtgcggctccgcgctgcccggcggctgtgagcgctgcgggcgcggcgcggggctttgtgcgctccgcagtgtgcgcgaggggagcgcggccgggggcggtgccccgcggtgcggggggggctgcgaggggaacaaaggctgcgtgcggggtgtgtgcgtgggggggtgagcagggggtgtgggcgcgtcggtcgggctgcaaccccccctgcacccccctccccgagttgctgagcacggcccggcttcgggtgcggggctccgtacggggcgtggcgcggggctcgccgtgccgggcggggggtggcggcaggtgggggtgccgggcggggcggggccgcctcgggccggggagggctcgggggaggggcgcggcggcccccggagcgccggcggctgtcgaggcgcggcgagccgcagccattgccttttatggtaatcgtgcgagagggcgcagggacttcctttgtcccaaatctgtgcggagccgaaatctgggaggcgccgccgcaccccctctagcgggcgcggggcgaagcggtgcggcgccggcaggaaggaaatgggcggggagggccttcgtgcgtcgccgcgccgccgtccccttctccctctccagcctcggggctgtccgcggggggacggctgccttcgggggggacggggcagggcggggttcggcttctggcgtgtgaccggcggctctagagcctctgctaaccatgttcatgccttcttctttttcctacagctcctgggcaacgtgctggttattgtgctgtctcatcattttggcaaagaattcgggattcgaaccggtgccgccaccatggcgacgggttcaagaacttccctacttcttgcatttggcctgctttgtttgccgtggttacaggagggctcggcagctgccgatgttgtgatgacccagactccactcactttgtcggttaccattggacaaccagcctccatctcttgcaagtcaagtcagagcctcttagatagtgatggaaagacatatttgaattggttgttacagaggccaggccagtctccaaagcgcctaatctatctggtgtctaaactggactctggagtccctgacagattcactggcagtggatcagggacagatttcacactgaaaattagcagagtggaggctgaggatttgggagtttattattgctggcaaggtacacattttcctcggacgttcggtggaggcaccaagctggaaatcaaacggggtggtggtggtagcggcggcggcggctctggtggtggtggatccgaggtccagctgcaacagtctggacctgagctggtgaagcctggggcttcagtgaagatatcctgcaagacttctggatacacattcactgaatacaccatacactgggtgaagcagagccatggagagagccttgagtggattggaggtattaatccaaacgatggtggtactatttacaaccagaagttcaagggcaaggccacattgactgtagacaagtcctccaaaacagcctacatggagctccgcagcctgacatctgaggattctgcagtcttttactgtgcaagagggccctccgccaggtttccttactggggccaagggactctggtcactgtctctgcaagcgagaaggacgagctgtagtgacctgaggatgggtggcatccctgtgacccctccccagtgcctctcctggccctggaagttgccactccagtgcccaccagccttgtcctaataaaattaagttgcatcattttgtctgactaggtgtccttctataatattatggggtggaggggggtggtatggagcaaggggcaagttgggaagacaacctgtagggcctgcggggtctattgggaaccaagctggagtgcagtggcacaatcttggctcactgcaatctccgcctcctgggttcaagcgattctcctgcctcagcctcccgagttgttgggattccaggcatgcatgaccaggctcagctaatttttgtttttttggtagagacggggtttcaccatattggccaggctggtctccaactcctaatctcaggtgatctacccaccttggcctcccaaattgctgggattacaggcgtgaaccactgctcccttccctgtccttggcctagaattatatttttttaaagactcacatagtcttctgcacagggcattctttttgcttcaggatgtttacaacatttgctgcccacttttcctaggtttcttgagacctctacaagagttggagttgacacttggggtactttcttggtgtaacgaactaatagcctgaaaaaaagaagtcatgtgttttcagcaaggcaagaaactgtctaacatagtagataaaacagagaacacttggccggaatcaactaagatgttgctatgttccattcatcatattatctccatctgcagagtagtgggttagtggagggtagaaaacattctcctgaacaactagttaaacttggctttgagttccacctgtaccacttgcataatcttgggaaagtgagttgcctaattcagtgacattaataaatttattaatttcttctttcaataaaacctggagagagcttcatatgtatcagcatatgctaaacttgaaagatacaagtagaaaatggaaggaaatatatctgactcaatagggatagttcaagggttaaattaaaagtagtaaagtattataattaatctgacatggtacctaatatataataatcatgtattaagaatgccagtcaccattaaaagtcaatgtatgactttaatctactcgaggaaagaaactatgtcttgttcactgttattatctctaaaatccataatcagaagagcaccatgtgtatgagccacacaataaatatctactgtataatatgtctcttcttgtttttaaccttcatagataagactctattgaattgggacattagtccagcaagccattctgtctctgtctcttctatggagggaaaggtttaaccatcaaagactaggtgcatctcccaaacaacctgaatttaatattcaaatatgtatctaaattcatttgttacatttttgtgttcagcttacatattactttttgagcgacatctattcaaggcctactacttgctgctctacaaaatattgccatgctctatttgcccattaactatttcttaaccttcaagggacatgctcagttctgatataccaagatttggtatttaccctcccagcctacatacttccaatcttaagagaacaatttttagactacattcaaatatagacctctccaccccatcaactattttatctctcctctcctatctttcttgacaaagagtgattagaaatatgcaattctaggtatcgatgctacgtagataagtagcatggcgggttaatcattaactacagaggaacccctagtgatggagttggccactccctctctgcgcgctcgctcgctcactgaggccgggcgaccaaaggtcgcccgacgcccgggctttgcccgggcggcctcagtgagcgagcgagcgcgcagctgcctgcagg

SEQ ID NO: 2031 - DNA, 4716 bp, Artificial Sequence
  source: /note="Description of Artificial Sequence: Synthetic polynucleotide"
cctgcaggcagctgcgcgctcgctcgctcactgaggccgcccgggcaaagcccgggcgtcgggcgacctttggtcgcccggcctcagtgagcgagcgagcgcgcagagagggagtggccaactccatcactaggggttccttgtagttaatgattaacccgccatgctacttatctacgtagccatgcgtcgacataacgcgtctagttattaatagtaatcaattacggggtcattagttcatagcccatatatggagttccgcgttacataacttacggtaaatggcccgcctggctgaccgcccaacgacccccgcccattgacgtcaataatgacgtatgttcccatagtaacgccaatagggactttccattgacgtcaatgggtggagtatttacggtaaactgcccacttggcagtacatcaagtgtatcatatgccaagtacgccccctattgacgtcaatgacggtaaatggcccgcctggcattatgcccagtacatgaccttatgggactttcctacttggcagtacatctacgtattagtcatcgctattaccatggtcgaggtgagccccacgttctgcttcactctccccatctcccccccctccccacccccaattttgtatttatttattttttaattattttgtgcagcgatgggggcggggggggggggggggcgcgcgccaggcggggcggggcggggcgaggggcggggcggggcgaggcggagaggtgcggcggcagccaatcagagcggcgcgctccgaaagtttccttttatggcgaggcggcggcggcggcggccctataaaaagcgaagcgcgcggcgggcgggagtcgctgcgcgctgccttcgccccgtgccccgctccgccgccgcctcgcgccgcccgccccggctctgactgaccgcgttactcccacaggtgagcgggcgggacggcccttctcctccgggctgtaattagcgcttggtttaatgacggcttgtttcttttctgtggctgcgtgaaagccttgaggggctccgggagggccctttgtgcggggggagcggctcggggggtgcgtgcgtgtgtgtgtgcgtggggagcgccgcgtgcggctccgcgctgcccggcggctgtgagcgctgcgggcgcggcgcggggctttgtgcgctccgcagtgtgcgcgaggggagcgcggccgggggcggtgccccgcggtgcggggggggctgcgaggggaacaaaggctgcgtgcggggtgtgtgcgtgggggggtgagcagggggtgtgggcgcgtcggtcgggctgcaaccccccctgcacccccctccccgagttgctgagcacggcccggcttcgggtgcggggctccgtacggggcgtggcgcggggctcgccgtgccgggcggggggtggcggcaggtgggggtgccgggcggggcggggccgcctcgggccggggagggctcgggggaggggcgcggcggcccccggagcgccggcggctgtcgaggcgcggcgagccgcagccattgccttttatggtaatcgtgcgagagggcgcagggacttcctttgtcccaaatctgtgcggagccgaaatctgggaggcgccgccgcaccccctctagcgggcgcggggcgaagcggtgcggcgccggcaggaaggaaatgggcggggagggccttcgtgcgtcgccgcgccgccgtccccttctccctctccagcctcggggctgtccgcggggggacggctgccttcgggggggacggggcagggcggggttcggcttctggcgtgtgaccggcggctctagagcctctgctaaccatgttcatgccttcttctttttcctacagctcctgggcaacgtgctggttattgtgctgtctcatcattttggcaaagaattcgggattcgaaccggtgccgccaccatggcgacgggttcaagaacttccctacttcttgcatttggcctgctttgtttgccgtggttacaggagggctcggcagctgccgatgttgtgatgacccagactccactcactttgtcggttaccattggacaaccagcctccatctcttgcaagtcaagtcagagcctcttagatagtgatggaaagacatatttgaattggttgttacagaggccaggccagtctccaaagcgcctaatctatctggtgtctaaactggactctggagtccctgacagattcactggcagtggatcagggacagatttcacactgaaaattagcagagtggaggctgaggatttgggagtttattattgctggcaaggtacacattttcctcggacgttcggtggaggcaccaagctggaaatcaaacggggtggtggtggtagcggcggcggcggctctggtggtggtggatccgaggtccagctgcaacagtctggacctgagctggtgaagcctggggcttcagtgaagatatcctgcaagacttctggatacacattcactgaatacaccatacactgggtgaagcagagccatggagagagccttgagtggattggaggtattaatccaaacgatggtggtactatttacaaccagaagttcaagggcaaggccacattgactgtagacaagtcctccaaaacagcctacatggagctccgcagcctgacatctgaggattctgcagtcttttactgtgcaagagggccctccgccaggtttccttactggggccaagggactctggtcactgtctctgcacatcaccatcaccatcactagtgacctgaggatgggtggcatccctgtgacccctccccagtgcctctcctggccctggaagttgccactccagtgcccaccagccttgtcctaataaaattaagttgcatcattttgtctgactaggtgtccttctataatattatggggtggaggggggtggtatggagcaaggggcaagttgggaagacaacctgtagggcctgcggggtctattgggaaccaagctggagtgcagtggcacaatcttggctcactgcaatctccgcctcctgggttcaagcgattctcctgcctcagcctcccgagttgttgggattccaggcatgcatgaccaggctcagctaatttttgtttttttggtagagacggggtttcaccatattggccaggctggtctccaactcctaatctcaggtgatctacccaccttggcctcccaaattgctgggattacaggcgtgaaccactgctcccttccctgtccttggcctagaattatatttttttaaagactcacatagtcttctgcacagggcattctttttgcttcaggatgtttacaacatttgctgcccacttttcctaggtttcttgagacctctacaagagttggagttgacacttggggtactttcttggtgtaacgaactaatagcctgaaaaaaagaagtcatgtgttttcagcaaggcaagaaactgtctaacatagtagataaaacagagaacacttggccggaatcaactaagatgttgctatgttccattcatcatattatctccatctgcagagtagtgggttagtggagggtagaaaacattctcctgaacaactagttaaacttggctttgagttccacctgtaccacttgcataatcttgggaaagtgagttgcctaattcagtgacattaataaatttattaatttcttctttcaataaaacctggagagagcttcatatgtatcagcatatgctaaacttgaaagatacaagtagaaaatggaaggaaatatatctgactcaatagggatagttcaagggttaaattaaaagtagtaaagtattataattaatctgacatggtacctaatatataataatcatgtattaagaatgccagtcaccattaaaagtcaatgtatgactttaatctactcgaggaaagaaactatgtcttgttcactgttattatctctaaaatccataatcagaagagcaccatgtgtatgagccacacaataaatatctactgtataatatgtctcttcttgtttttaaccttcatagataagactctattgaattgggacattagtccagcaagccattctgtctctgtctcttctatggagggaaaggtttaaccatcaaagactaggtgcatctcccaaacaacctgaatttaatattcaaatatgtatctaaattcatttgttacatttttgtgttcagcttacatattactttttgagcgacatctattcaaggcctactacttgctgctctacaaaatattgccatgctctatttgcccattaactatttcttaaccttcaagggacatgctcagttctgatataccaagatttggtatttaccctcccagcctacatacttccaatcttaagagaacaatttttagactacattcaaatatagacctctccaccccatcaactattttatctctcctctcctatctttcttgacaaagagtgattagaaatatgcaattctaggtatcgatgctacgtagataagtagcatggcgggttaatcattaactacagaggaacccctagtgatggagttggccactccctctctgcgcgctcgctcgctcactgaggccgggcgaccaaaggtcgcccgacgcccgggctttgcccgggcggcctcagtgagcgagcgagcgcgcagctgcctgcagg

SEQ ID NO: 2032 - DNA, 4698 bp, Artificial Sequence
  source: /note="Description of Artificial Sequence: Synthetic polynucleotide"
cctgcaggcagctgcgcgctcgctcgctcactgaggccgcccgggcaaagcccgggcgtcgggcgacctttggtcgcccggcctcagtgagcgagcgagcgcgcagagagggagtggccaactccatcactaggggttccttgtagttaatgattaacccgccatgctacttatctacgtagccatgcgtcgacataacgcgtctagttattaatagtaatcaattacggggtcattagttcatagcccatatatggagttccgcgttacataacttacggtaaatggcccgcctggctgaccgcccaacgacccccgcccattgacgtcaataatgacgtatgttcccatagtaacgccaatagggactttccattgacgtcaatgggtggagtatttacggtaaactgcccacttggcagtacatcaagtgtatcatatgccaagtacgccccctattgacgtcaatgacggtaaatggcccgcctggcattatgcccagtacatgaccttatgggactttcctacttggcagtacatctacgtattagtcatcgctattaccatggtcgaggtgagccccacgttctgcttcactctccccatctcccccccctccccacccccaattttgtatttatttattttttaattattttgtgcagcgatgggggcggggggggggggggggcgcgcgccaggcggggcggggcggggcgaggggcggggcggggcgaggcggagaggtgcggcggcagccaatcagagcggcgcgctccgaaagtttccttttatggcgaggcggcggcggcggcggccctataaaaagcgaagcgcgcggcgggcgggagtcgctgcgcgctgccttcgccccgtgccccgctccgccgccgcctcgcgccgcccgccccggctctgactgaccgcgttactcccacaggtgagcgggcgggacggcccttctcctccgggctgtaattagcgcttggtttaatgacggcttgtttcttttctgtggctgcgtgaaagccttgaggggctccgggagggccctttgtgcggggggagcggctcggggggtgcgtgcgtgtgtgtgtgcgtggggagcgccgcgtgcggctccgcgctgcccggcggctgtgagcgctgcgggcgcggcgcggggctttgtgcgctccgcagtgtgcgcgaggggagcgcggccgggggcggtgccccgcggtgcggggggggctgcgaggggaacaaaggctgcgtgcggggtgtgtgcgtgggggggtgagcagggggtgtgggcgcgtcggtcgggctgcaaccccccctgcacccccctccccgagttgctgagcacggcccggcttcgggtgcggggctccgtacggggcgtggcgcggggctcgccgtgccgggcggggggtggcggcaggtgggggtgccgggcggggcggggccgcctcgggccggggagggctcgggggaggggcgcggcggcccccggagcgccggcggctgtcgaggcgcggcgagccgcagccattgccttttatggtaatcgtgcgagagggcgcagggacttcctttgtcccaaatctgtgcggagccgaaatctgggaggcgccgccgcaccccctctagcgggcgcggggcgaagcggtgcggcgccggcaggaaggaaatgggcggggagggccttcgtgcgtcgccgcgccgccgtccccttctccctctccagcctcggggctgtccgcggggggacggctgccttcgggggggacggggcagggcggggttcggcttctggcgtgtgaccggcggctctagagcctctgctaaccatgttcatgccttcttctttttcctacagctcctgggcaacgtgctggttattgtgctgtctcatcattttggcaaagaattcgggattcgaaccggtgccgccaccatgagtcctgcccagttcctgtttctgttagtgctctggattcgggaaaccaacggtgatgttgtgatgacccagactccactcactttgtcggttaccattggacaaccagcctccatctcttgcaagtcaagtcagagcctcttagatagtgatggaaagacatatttgaattggttgttacagaggccaggccagtctccaaagcgcctaatctatctggtgtctaaactggactctggagtccctgacagattcactggcagtggatcagggacagatttcacactgaaaattagcagagtggaggctgaggatttgggagtttattattgctggcaaggtacacattttcctcggacgttcggtggaggcaccaagctggaaatcaaacggggtggtggtggtagcggcggcggcggctctggtggtggtggatccgaggtccagctgcaacagtctggacctgagctggtgaagcctggggcttcagtgaagatatcctgcaagacttctggatacacattcactgaatacaccatacactgggtgaagcagagccatggagagagccttgagtggattggaggtattaatccaaacgatggtggtactatttacaaccagaagttcaagggcaaggccacattgactgtagacaagtcctccaaaacagcctacatggagctccgcagcctgacatctgaggattctgcagtcttttactgtgcaagagggccctccgccaggtttccttactggggccaagggactctggtcactgtctctgcatacccatacgatgttccagattacgcttagtgacctgaggatgggtggcatccctgtgacccctccccagtgcctctcctggccctggaagttgccactccagtgcccaccagccttgtcctaataaaattaagttgcatcattttgtctgactaggtgtccttctataatattatggggtggaggggggtggtatggagcaaggggcaagttgggaagacaacctgtagggcctgcggggtctattgggaaccaagctggagtgcagtggcacaatcttggctcactgcaatctccgcctcctgggttcaagcgattctcctgcctcagcctcccgagttgttgggattccaggcatgcatgaccaggctcagctaatttttgtttttttggtagagacggggtttcaccatattggccaggctggtctccaactcctaatctcaggtgatctacccaccttggcctcccaaattgctgggattacaggcgtgaaccactgctcccttccctgtccttggcctagaattatatttttttaaagactcacatagtcttctgcacagggcattctttttgcttcaggatgtttacaacatttgctgcccacttttcctaggtttcttgagacctctacaagagttggagttgacacttggggtactttcttggtgtaacgaactaatagcctgaaaaaaagaagtcatgtgttttcagcaaggcaagaaactgtctaacatagtagataaaacagagaacacttggccggaatcaactaagatgttgctatgttccattcatcatattatctccatctgcagagtagtgggttagtggagggtagaaaacattctcctgaacaactagttaaacttggctttgagttccacctgtaccacttgcataatcttgggaaagtgagttgcctaattcagtgacattaataaatttattaatttcttctttcaataaaacctggagagagcttcatatgtatcagcatatgctaaacttgaaagatacaagtagaaaatggaaggaaatatatctgactcaatagggatagttcaagggttaaattaaaagtagtaaagtattataattaatctgacatggtacctaatatataataatcatgtattaagaatgccagtcaccattaaaagtcaatgtatgactttaatctactcgaggaaagaaactatgtcttgttcactgttattatctctaaaatccataatcagaagagcaccatgtgtatgagccacacaataaatatctactgtataatatgtctcttcttgtttttaaccttcatagataagactctattgaattgggacattagtccagcaagccattctgtctctgtctcttctatggagggaaaggtttaaccatcaaagactaggtgcatctcccaaacaacctgaatttaatattcaaatatgtatctaaattcatttgttacatttttgtgttcagcttacatattactttttgagcgacatctattcaaggcctactacttgctgctctacaaaatattgccatgctctatttgcccattaactatttcttaaccttcaagggacatgctcagttctgatataccaagatttggtatttaccctcccagcctacatacttccaatcttaagagaacaatttttagactacattcaaatatagacctctccaccccatcaactattttatctctcctctcctatctttcttgacaaagagtgattagaaatatgcaattctaggtatcgatgctacgtagataagtagcatggcgggttaatcattaactacagaggaacccctagtgatggagttggccactccctctctgcgcgctcgctcgctcactgaggccgggcgaccaaaggtcgcccgacgcccgggctttgcccgggcggcctcagtgagcgagcgagcgcgcagctgcctgcagg

SEQ ID NO: 2033 - DNA, 4689 bp, Artificial Sequence
  source: /note="Description of Artificial Sequence: Synthetic polynucleotide"
cctgcaggcagctgcgcgctcgctcgctcactgaggccgcccgggcaaagcccgggcgtcgggcgacctttggtcgcccggcctcagtgagcgagcgagcgcgcagagagggagtggccaactccatcactaggggttccttgtagttaatgattaacccgccatgctacttatctacgtagccatgcgtcgacataacgcgtctagttattaatagtaatcaattacggggtcattagttcatagcccatatatggagttccgcgttacataacttacggtaaatggcccgcctggctgaccgcccaacgacccccgcccattgacgtcaataatgacgtatgttcccatagtaacgccaatagggactttccattgacgtcaatgggtggagtatttacggtaaactgcccacttggcagtacatcaagtgtatcatatgccaagtacgccccctattgacgtcaatgacggtaaatggcccgcctggcattatgcccagtacatgaccttatgggactttcctacttggcagtacatctacgtattagtcatcgctattaccatggtcgaggtgagccccacgttctgcttcactctccccatctcccccccctccccacccccaattttgtatttatttattttttaattattttgtgcagcgatgggggcggggggggggggggggcgcgcgccaggcggggcggggcggggcgaggggcggggcggggcgaggcggagaggtgcggcggcagccaatcagagcggcgcgctccgaaagtttccttttatggcgaggcggcggcggcggcggccctataaaaagcgaagcgcgcggcgggcgggagtcgctgcgcgctgccttcgccccgtgccccgctccgccgccgcctcgcgccgcccgccccggctctgactgaccgcgttactcccacaggtgagcgggcgggacggcccttctcctccgggctgtaattagcgcttggtttaatgacggcttgtttcttttctgtggctgcgtgaaagccttgaggggctccgggagggccctttgtgcggggggagcggctcggggggtgcgtgcgtgtgtgtgtgcgtggggagcgccgcgtgcggctccgcgctgcccggcggctgtgagcgctgcgggcgcggcgcggggctttgtgcgctccgcagtgtgcgcgaggggagcgcggccgggggcggtgccccgcggtgcggggggggctgcgaggggaacaaaggctgcgtgcggggtgtgtgcgtgggggggtgagcagggggtgtgggcgcgtcggtcgggctgcaaccccccctgcacccccctccccgagttgctgagcacggcccggcttcgggtgcggggctccgtacggggcgtggcgcggggctcgccgtgccgggcggggggtggcggcaggtgggggtgccgggcggggcggggccgcctcgggccggggagggctcgggggaggggcgcggcggcccccggagcgccggcggctgtcgaggcgcggcgagccgcagccattgccttttatggtaatcgtgcgagagggcgcagggacttcctttgtcccaaatctgtgcggagccgaaatctgggaggcgccgccgcaccccctctagcgggcgcggggcgaagcggtgcggcgccggcaggaaggaaatgggcggggagggccttcgtgcgtcgccgcgccgccgtccccttctccctctccagcctcggggctgtccgcggggggacggctgccttcgggggggacggggcagggcggggttcggcttctggcgtgtgaccggcggctctagagcctctgctaaccatgttcatgccttcttctttttcctacagctcctgggcaacgtgctggttattgtgctgtctcatcattttggcaaagaattcgggattcgaaccggtgccgccaccatgagtcctgcccagttcctgtttctgttagtgctctggattcgggaaaccaacggtgatgttgtgatgacccagactccactcactttgtcggttaccattggacaaccagcctccatctcttgcaagtcaagtcagagcctcttagatagtgatggaaagacatatttgaattggttgttacagaggccaggccagtctccaaagcgcctaatctatctggtgtctaaactggactctggagtccctgacagattcactggcagtggatcagggacagatttcacactgaaaattagcagagtggaggctgaggatttgggagtttattattgctggcaaggtacacattttcctcggacgttcggtggaggcaccaagctggaaatcaaacggggtggtggtggtagcggcggcggcggctctggtggtggtggatccgaggtccagctgcaacagtctggacctgagctggtgaagcctggggcttcagtgaagatatcctgcaagacttctggatacacattcactgaatacaccatacactgggtgaagcagagccatggagagagccttgagtggattggaggtattaatccaaacgatggtggtactatttacaaccagaagttcaagggcaaggccacattgactgtagacaagtcctccaaaacagcctacatggagctccgcagcctgacatctgaggattctgcagtcttttactgtgcaagagggccctccgccaggtttccttactggggccaagggactctggtcactgtctctgcacatcaccatcaccatcactagtgacctgaggatgggtggcatccctgtgacccctccccagtgcctctcctggccctggaagttgccactccagtgcccaccagccttgtcctaataaaattaagttgcatcattttgtctgactaggtgtccttctataatattatggggtggaggggggtggtatggagcaaggggcaagttgggaagacaacctgtagggcctgcggggtctattgggaaccaagctggagtgcagtggcacaatcttggctcactgcaatctccgcctcctgggttcaagcgattctcctgcctcagcctcccgagttgttgggattccaggcatgcatgaccaggctcagctaatttttgtttttttggtagagacggggtttcaccatattggccaggctggtctccaactcctaatctcaggtgatctacccaccttggcctcccaaattgctgggattacaggcgtgaaccactgctcccttccctgtccttggcctagaattatatttttttaaagactcacatagtcttctgcacagggcattctttttgcttcaggatgtttacaacatttgctgcccacttttcctaggtttcttgagacctctacaagagttggagttgacacttggggtactttcttggtgtaacgaactaatagcctgaaaaaaagaagtcatgtgttttcagcaaggcaagaaactgtctaacatagtagataaaacagagaacacttggccggaatcaactaagatgttgctatgttccattcatcatattatctccatctgcagagtagtgggttagtggagggtagaaaacattctcctgaacaactagttaaacttggctttgagttccacctgtaccacttgcataatcttgggaaagtgagttgcctaattcagtgacattaataaatttattaatttcttctttcaataaaacctggagagagcttcatatgtatcagcatatgctaaacttgaaagatacaagtagaaaatggaaggaaatatatctgactcaatagggatagttcaagggttaaattaaaagtagtaaagtattataattaatctgacatggtacctaatatataataatcatgtattaagaatgccagtcaccattaaaagtcaatgtatgactttaatctactcgaggaaagaaactatgtcttgttcactgttattatctctaaaatccataatcagaagagcaccatgtgtatgagccacacaataaatatctactgtataatatgtctcttcttgtttttaaccttcatagataagactctattgaattgggacattagtccagcaagccattctgtctctgtctcttctatggagggaaaggtttaaccatcaaagactaggtgcatctcccaaacaacctgaatttaatattcaaatatgtatctaaattcatttgttacatttttgtgttcagcttacatattactttttgagcgacatctattcaaggcctactacttgctgctctacaaaatattgccatgctctatttgcccattaactatttcttaaccttcaagggacatgctcagttctgatataccaagatttggtatttaccctcccagcctacatacttccaatcttaagagaacaatttttagactacattcaaatatagacctctccaccccatcaactattttatctctcctctcctatctttcttgacaaagagtgattagaaatatgcaattctaggtatcgatgctacgtagataagtagcatggcgggttaatcattaactacagaggaacccctagtgatggagttggccactccctctctgcgcgctcgctcgctcactgaggccgggcgaccaaaggtcgcccgacgcccgggctttgcccgggcggcctcagtgagcgagcgagcgcgcagctgcctgcagg

SEQ ID NO: 2034 - DNA, 4253 bp, Artificial Sequence
  source: /note="Description of Artificial Sequence: Synthetic polynucleotide"
cctgcaggcagctgcgcgctcgctcgctcactgaggccgcccgggcaaagcccgggcgtcgggcgacctttggtcgcccggcctcagtgagcgagcgagcgcgcagagagggagtggccaactccatcactaggggttccttgtagttaatgattaacccgccatgctacttatctacgtagccatgcgtcgacataacgcgtctagttattaatagtaatcaattacggggtcattagttcatagcccatatatggagttccgcgttacataacttacggtaaatggcccgcctggctgaccgcccaacgacccccgcccattgacgtcaataatgacgtatgttcccatagtaacgccaatagggactttccattgacgtcaatgggtggagtatttacggtaaactgcccacttggcagtacatcaagtgtatcatatgccaagtacgccccctattgacgtcaatgacggtaaatggcccgcctggcattatgcccagtacatgaccttatgggactttcctacttggcagtacatctacgtattagtcatcgctattaccatggtcgaggtgagccccacgttctgcttcactctccccatctcccccccctccccacccccaattttgtatttatttattttttaattattttgtgcagcgatgggggcggggggggggggggggcgcgcgccaggcggggcggggcggggcgaggggcggggcggggcgaggcggagaggtgcggcggcagccaatcagagcggcgcgctccgaaagtttccttttatggcgaggcggcggcggcggcggccctataaaaagcgaagcgcgcggcgggcgggagtcgctgcgcgctgccttcgccccgtgccccgctccgccgccgcctcgcgccgcccgccccggctctgactgaccgcgttactcccacaggtgagcgggcgggacggcccttctcctccgggctgtaattagcgcttggtttaatgacggcttgtttcttttctgtggctgcgtgaaagccttgaggggctccgggagggccctttgtgcggggggagcggctcggggggtgcgtgcgtgtgtgtgtgcgtggggagcgccgcgtgcggctccgcgctgcccggcggctgtgagcgctgcgggcgcggcgcggggctttgtgcgctccgcagtgtgcgcgaggggagcgcggccgggggcggtgccccgcggtgcggggggggctgcgaggggaacaaaggctgcgtgcggggtgtgtgcgtgggggggtgagcagggggtgtgggcgcgtcggtcgggctgcaaccccccctgcacccccctccccgagttgctgagcacggcccggcttcgggtgcggggctccgtacggggcgtggcgcggggctcgccgtgccgggcggggggtggcggcaggtgggggtgccgggcggggcggggccgcctcgggccggggagggctcgggggaggggcgcggcggcccccggagcgccggcggctgtcgaggcgcggcgagccgcagccattgccttttatggtaatcgtgcgagagggcgcagggacttcctttgtcccaaatctgtgcggagccgaaatctgggaggcgccgccgcaccccctctagcgggcgcggggcgaagcggtgcggcgccggcaggaaggaaatgggcggggagggccttcgtgcgtcgccgcgccgccgtccccttctccctctccagcctcggggctgtccgcggggggacggctgccttcgggggggacggggcagggcggggttcggcttctggcgtgtgaccggcggctctagagcctctgctaaccatgttcatgccttcttctttttcctacagctcctgggcaacgtgctggttattgtgctgtctcatcattttggcaaagaattcgggattcgaaccggtgccgccaccatgagtcctgcccagttcctgtttctgttagtgctctggattcgggaaaccaacggtgatgttgtgatgacccagactccactcactttgtcggttaccattggacaaccagcctccatctcttgcaagtcaagtcagagcctcttagatagtgatggaaagacatatttgaattggttgttacagaggccaggccagtctccaaagcgcctaatctatctggtgtctaaactggactctggagtccctgacagattcactggcagtggatcagggacagatttcacactgaaaattagcagagtggaggctgaggatttgggagtttattattgctggcaaggtacacattttcctcggacgttcggtggaggcaccaagctggaaatcaaacggggtggtggtggtagcggcggcggcggctctggtggtggtggatccgaggtccagctgcaacagtctggacctgagctggtgaagcctggggcttcagtgaagatatcctgcaagacttctggatacacattcactgaatacaccatacactgggtgaagcagagccatggagagagccttgagtggattggaggtattaatccaaacgatggtggtactatttacaaccagaagttcaagggcaaggccacattgactgtagacaagtcctccaaaacagcctacatggagctccgcagcctgacatctgaggattctgcagtcttttactgtgcaagagggccctccgccaggtttccttactggggccaagggactctggtcactgtctctgcatacccatacgatgttccagattacgcttagtgacctgaggatgatctttttccctctgccaaaaattatggggacatcatgaagccccttgagcatctgacttctggctaataaaggaaatttattttcattgcaatagtgtgttggaattttttgtgtctctcactcgcctaggtttcttgagacctctacaagagttggagttgacacttggggtactttcttggtgtaacgaactaatagcctgaaaaaaagaagtcatgtgttttcagcaaggcaagaaactgtctaacatagtagataaaacagagaacacttggccggaatcaactaagatgttgctatgttccattcatcatattatctccatctgcagagtagtgggttagtggagggtagaaaacattctcctgaacaactagttaaacttggctttgagttccacctgtaccacttgcataatcttgggaaagtgagttgcctaattcagtgacattaataaatttattaatttcttctttcaataaaacctggagagagcttcatatgtatcagcatatgctaaacttgaaagatacaagtagaaaatggaaggaaatatatctgactcaatagggatagttcaagggttaaattaaaagtagtaaagtattataattaatctgacatggtacctaatatataataatcatgtattaagaatgccagtcaccattaaaagtcaatgtatgactttaatctactcgaggaaagaaactatgtcttgttcactgttattatctctaaaatccataatcagaagagcaccatgtgtatgagccacacaataaatatctactgtataatatgtctcttcttgtttttaaccttcatagataagactctattgaattgggacattagtccagcaagccattctgtctctgtctcttctatggagggaaaggtttaaccatcaaagactaggtgcatctcccaaacaacctgaatttaatattcaaatatgtatctaaattcatttgttacatttttgtgttcagcttacatattactttttgagcgacatctattcaaggcctactacttgctgctctacaaaatattgccatgctctatttgcccattaactatttcttaaccttcaagggacatgctcagttctgatataccaagatttggtatttaccctcccagcctacatacttccaatcttaagagaacaatttttagactacattcaaatatagacctctccaccccatcaactattttatctctcctctcctatctttcttgacaaagagtgattagaaatatgcaattctaggtatcgatgctacgtagataagtagcatggcgggttaatcattaactacagaggaacccctagtgatggagttggccactccctctctgcgcgctcgctcgctcactgaggccgggcgaccaaaggtcgcccgacgcccgggctttgcccgggcggcctcagtgagcgagcgagcgcgcagctgcctgcagg

SEQ ID NO: 2035 - DNA, 2350 bp, Artificial Sequence
  source: /note="Description of Artificial Sequence: Synthetic polynucleotide"
cctgcaggcagctgcgcgctcgctcgctcactgaggccgcccgggcaaagcccgggcgtcgggcgacctttggtcgcccggcctcagtgagcgagcgagcgcgcagagagggagtggccaactccatcactaggggttccttgtagttaatgattaacccgccatgctacttatctacgtagccatgcgtcgacataacgcgtcgacattgattattgactagttattaatagtaatcaattacggggtcattagttcatagcccatatatggagttccgcgttacataacttacggtaaatggcccgcctggctgaccgcccaacgacccccgcccattgacgtcaataatgacgtatgttcccatagtaacgccaatagggactttccattgacgtcaatgggtggagtatttacggtaaactgcccacttggcagtacatcaagtgtatcatatgccaagtacgccccctattgacgtcaatgacggtaaatggcccgcctggcattatgcccagtacatgaccttatgggactttcctacttggcagtacatctacgtattagtcatcgctattaccatgtcgaggccacgttctgcttcactctccccatctcccccccctccccacccccaattttgtatttatttattttttaattattttgtgcagcgatgggggcggggggggggggcgcgcgccaggcggggcggggcggggcgaggggcggggcggggcgaggcggagaggtgcggcggcagccaatcagagcggcgcgctccgaaagtttccttttatggcgaggcggcggcggcggcggccctataaaaagcgaagcgcgcggcgggcgggagcaagcttcgtttagtgaaccgtcagatcgcctggagacgccatccacgctgttttgacctccatagaagacaccgggaccgatccagcctccgcggattcgaatcccggccgggaacggtgcattggaacgcggattccccgtgccaagagtgacgtaagtaccgcctatagagtctataggcccacaaaaaatgctttcttcttttaatatacttttcttttgctaatcatgttcatacctcttatcttcctcccacagctcctgggcaacgtgctggtctgtgtgctggcccatcactttggcaaagaattgggattcgaaccggtgccgccaccatgggatggagctggatctttctctttctcctgtcaggaactacaggtgtcctctctgaggtccagctgcaacagtctggacctgagctggtgaagcctggggcttcagtgaagatatcctgcaagacttctggatacacattcactgaatacaccatacactgggtgaagcagagccatggagagagccttgagtggattggaggtattaatccaaacgatggtggtactatttacaaccagaagttcaagggcaaggccacattgactgtagacaagtcctccaaaacagcctacatggagctccgcagcctgacatctgaggattctgcagtcttttactgtgcaagagggccctccgccaggtttccttactggggccaagggactctggtcactgtctctgcaggtggtggtggtagcggcggcggcggctctggtggtggtggatccgatgttgtgatgacccagactccactcactttgtcggttaccattggacaaccagcctccatctcttgcaagtcaagtcagagcctcttagatagtgatggaaagacatatttgaattggttgttacagaggccaggccagtctccaaagcgcctaatctatctggtgtctaaactggactctggagtccctgacagattcactggcagtggatcagggacagatttcacactgaaaattagcagagtggaggctgaggatttgggagtttattattgctggcaaggtacacattttcctcggacgttcggtggaggcaccaagctggaaatcaaacggtacccatacgatgttccagattacgcttagtgacctgaggatgatctttttccctctgccaaaaattatggggacatcatgaagccccttgagcatctgacttctggctaataaaggaaatttattttcattgcaatagtgtgttggaattttttgtgtctctcactcgcctaggatcgatgctacgtagataagtagcatggcgggttaatcattaactacagaggaacccctagtgatggagttggccactccctctctgcgcgctcgctcgctcactgaggccgggcgaccaaaggtcgcccgacgcccgggctttgcccgggcggcctcagtgagcgagcgagcgcgcagctgcctgcagg

SEQ ID NO: 2036 - DNA, 2370 bp, Artificial Sequence
  source: /note="Description of Artificial Sequence: Synthetic polynucleotide"
cctgcaggcagctgcgcgctcgctcgctcactgaggccgcccgggcaaagcccgggcgtcgggcgacctttggtcgcccggcctcagtgagcgagcgagcgcgcagagagggagtggccaactccatcactaggggttccttgtagttaatgattaacccgccatgctacttatctacgtagccatgcgtcgacataacgcgtcgacattgattattgactagttattaatagtaatcaattacggggtcattagttcatagcccatatatggagttccgcgttacataacttacggtaaatggcccgcctggctgaccgcccaacgacccccgcccattgacgtcaataatgacgtatgttcccatagtaacgccaatagggactttccattgacgtcaatgggtggagtatttacggtaaactgcccacttggcagtacatcaagtgtatcatatgccaagtacgccccctattgacgtcaatgacggtaaatggcccgcctggcattatgcccagtacatgaccttatgggactttcctacttggcagtacatctacgtattagtcatcgctattaccatgtcgaggccacgttctgcttcactctccccatctcccccccctccccacccccaattttgtatttatttattttttaattattttgtgcagcgatgggggcggggggggggggcgcgcgccaggcggggcggggcggggcgaggggcggggcggggcgaggcggagaggtgcggcggcagccaatcagagcggcgcgctccgaaagtttccttttatggcgaggcggcggcggcggcggccctataaaaagcgaagcgcgcggcgggcgggagcaagcttcgtttagtgaaccgattcgaatcccggccgggaacggtgcattggaacgcggattccccgtgccaagagtgacgtaagtaccgcctatagagtctataggcccactctgcatataaattgtaactgatgtaagaggtttcatattgctaatagcagctacaatccagctaccattctgcttttattttatggttgggataaggctggattattctgagtccaagctaggcccttttgctaatcatgttcatacctcttatcttcctcccacagctcctgggcaacgtgctggtctgtgtgctggcccatcactttggcaaagaattgggattcgaaccggtgccgccaccatgggatggagctggatctttctctttctcctgtcaggaactacaggtgtcctctctgaggtccagctgcaacagtctggacctgagctggtgaagcctggggcttcagtgaagatatcctgcaagacttctggatacacattcactgaatacaccatacactgggtgaagcagagccatggagagagccttgagtggattggaggtattaatccaaacgatggtggtactatttacaaccagaagttcaagggcaaggccacattgactgtagacaagtcctccaaaacagcctacatggagctccgcagcctgacatctgaggattctgcagtcttttactgtgcaagagggccctccgccaggtttccttactggggccaagggactctggtcactgtctctgcaggtggtggtggtagcggcggcggcggctctggtggtggtggatccgatgttgtgatgacccagactccactcactttgtcggttaccattggacaaccagcctccatctcttgcaagtcaagtcagagcctcttagatagtgatggaaagacatatttgaattggttgttacagaggccaggccagtctccaaagcgcctaatctatctggtgtctaaactggactctggagtccctgacagattcactggcagtggatcagggacagatttcacactgaaaattagcagagtggaggctgaggatttgggagtttattattgctggcaaggtacacattttcctcggacgttcggtggaggcaccaagctggaaatcaaacggtacccatacgatgttccagattacgcttagtgacctgaggatgatctttttccctctgccaaaaattatggggacatcatgaagccccttgagcatctgacttctggctaataaaggaaatttattttcattgcaatagtgtgttggaattttttgtgtctctcactcgcctaggatcgatgctacgtagataagtagcatggcgggttaatcattaactacagaggaacccctagtgatggagttggccactccctctctgcgcgctcgctcgctcactgaggccgggcgaccaaaggtcgcccgacgcccgggctttgcccgggcggcctcagtgagcgagcgagcgcgcagctgcctgcagg

SEQ ID NO: 2037 - DNA, 2282 bp, Artificial Sequence
  source: /note="Description of Artificial Sequence: Synthetic polynucleotide"
cctgcaggcagctgcgcgctcgctcgctcactgaggccgcccgggcaaagcccgggcgtcgggcgacctttggtcgcccggcctcagtgagcgagcgagcgcgcagagagggagtggccaactccatcactaggggttccttgtagttaatgattaacccgccatgctacttatctacgtagccatgcgtcgacataacgcgtcgacattgattattgactagttattaatagtaatcaattacggggtcattagttcatagcccatatatggagttccgcgttacataacttacggtaaatggcccgcctggctgaccgcccaacgacccccgcccattgacgtcaataatgacgtatgttcccatagtaacgccaatagggactttccattgacgtcaatgggtggagtatttacggtaaactgcccacttggcagtacatcaagtgtatcatatgccaagtacgccccctattgacgtcaatgacggtaaatggcccgcctggcattatgcccagtacatgaccttatgggactttcctacttggcagtacatctacgtattagtcatcgctattaccatgtcgaggccacgttctgcttcactctccccatctcccccccctccccacccccaattttgtatttatttattttttaattattttgtgcagcgatgggggcggggggggggggcgcgcgccaggcggggcggggcggggcgaggggcggggcggggcgaggcggagaggtgcggcggcagccaatcagagcggcgcgctccgaaagtttccttttatggcgaggcggcggcggcggcggccctataaaaagcgaagcgcgcggcgggcgggagcaagcttcgtttagtgaaccgttgacctccatagaagacaccgggaccgatccagcctccgcggattcgaatcccggccgggaacggtgcattggaacgcggattccccgtgccaagagtgacgtaagtaccgcctatacaagctaggcccttttgctaatcatgttcatacctcttatcttcctcccacagctcctgggcaacgtgctggtctgtgtgctggcccatcactttggcaaagaattgggattcgaaccggtgccgccaccatgggatggagctggatctttctctttctcctgtcaggaactacaggtgtcctctctgaggtccagctgcaacagtctggacctgagctggtgaagcctggggcttcagtgaagatatcctgcaagacttctggatacacattcactgaatacaccatacactgggtgaagcagagccatggagagagccttgagtggattggaggtattaatccaaacgatggtggtactatttacaaccagaagttcaagggcaaggccacattgactgtagacaagtcctccaaaacagcctacatggagctccgcagcctgacatctgaggattctgcagtcttttactgtgcaagagggccctccgccaggtttccttactggggccaagggactctggtcactgtctctgcaggtggtggtggtagcggcggcggcggctctggtggtggtggatccgatgttgtgatgacccagactccactcactttgtcggttaccattggacaaccagcctccatctcttgcaagtcaagtcagagcctcttagatagtgatggaaagacatatttgaattggttgttacagaggccaggccagtctccaaagcgcctaatctatctggtgtctaaactggactctggagtccctgacagattcactggcagtggatcagggacagatttcacactgaaaattagcagagtggaggctgaggatttgggagtttattattgctggcaaggtacacattttcctcggacgttcggtggaggcaccaagctggaaatcaaacggtacccatacgatgttccagattacgcttagtgacctgaggatgatctttttccctctgccaaaaattatggggacatcatgaagccccttgagcatctgacttctggctaataaaggaaatttattttcattgcaatagtgtgttggaattttttgtgtctctcactcgcctaggatcgatgctacgtagataagtagcatggcgggttaatcattaactacagaggaacccctagtgatggagttggccactccctctctgcgcgctcgctcgctcactgaggccgggcgaccaaaggtcgcccgacgcccgggctttgcccgggcggcctcagtgagcgagcgagcgcgcagctgcctgcagg

SEQ ID NO: 2038 - DNA, 2314 bp, Artificial Sequence
  source: /note="Description of Artificial Sequence: Synthetic polynucleotide"
cctgcaggcagctgcgcgctcgctcgctcactgaggccgcccgggcaaagcccgggcgtcgggcgacctttggtcgcccggcctcagtgagcgagcgagcgcgcagagagggagtggccaactccatcactaggggttccttgtagttaatgattaacccgccatgctacttatctacgtagccatgcgtcgacataacgcgtcgacattgattattgactagttattaatagtaatcaattacggggtcattagttcatagcccatatatggagttccgcgttacataacttacggtaaatggcccgcctggctgaccgcccaacgacccccgcccattgacgtcaataatgacgtatgttcccatagtaacgccaatagggactttccattgacgtcaatgggtggagtatttacggtaaactgcccacttggcagtacatcaagtgtatcatatgccaagtacgccccctattgacgtcaatgacggtaaatggcccgcctggcattatgcccagtacatgaccttatgggactttcctacttggcagtacatctacgtattagtcatcgctattaccatgtcgaggccacgttctgcttcactctccccatctcccccccctccccacccccaattttgtatttatttattttttaattattttgtgcagcgatgggggcggggggggggggcgcgcgccaggcggggcggggcggggcgaggggcggggcggggcgaggcggagaggtgcggcggcagccaatcagagcggcgcgctccgaaagtttccttttatggcgaggcggcggcggcggcggccctataaaaagcgaagcgcgcggcgggcgggagcaagcttcgtttagtgaaccgtcagatcgcctggagacgccatccacgctgttttgacctccatagaagacaccgggaccgatccagcctccgcggattcgaatcccggccgggaacggtgcattggaacgcggattccccgtgccaagagtgacgtaagtaccgcctatacaagctaggcccttttgctaatcatgttcatacctcttatcttcctcccacagctcctgggcaacgtgctggtctgtgtgctggcccatcactttggcaaagaattgggattcgaaccggtgccgccaccatgggatggagctggatctttctctttctcctgtcaggaactacaggtgtcctctctgaggtccagctgcaacagtctggacctgagctggtgaagcctggggcttcagtgaagatatcctgcaagacttctggatacacattcactgaatacaccatacactgggtgaagcagagccatggagagagccttgagtggattggaggtattaatccaaacgatggtggtactatttacaaccagaagttcaagggcaaggccacattgactgtagacaagtcctccaaaacagcctacatggagctccgcagcctgacatctgaggattctgcagtcttttactgtgcaagagggccctccgccaggtttccttactggggccaagggactctggtcactgtctctgcaggtggtggtggtagcggcggcggcggctctggtggtggtggatccgatgttgtgatgacccagactccactcactttgtcggttaccattggacaaccagcctccatctcttgcaagtcaagtcagagcctcttagatagtgatggaaagacatatttgaattggttgttacagaggccaggccagtctccaaagcgcctaatctatctggtgtctaaactggactctggagtccctgacagattcactggcagtggatcagggacagatttcacactgaaaattagcagagtggaggctgaggatttgggagtttattattgctggcaaggtacacattttcctcggacgttcggtggaggcaccaagctggaaatcaaacggtacccatacgatgttccagattacgcttagtgacctgaggatgatctttttccctctgccaaaaattatggggacatcatgaagccccttgagcatctgacttctggctaataaaggaaatttattttcattgcaatagtgtgttggaattttttgtgtctctcactcgcctaggatcgatgctacgtagataagtagcatggcgggttaatcattaactacagaggaacccctagtgatggagttggccactccctctctgcgcgctcgctcgctcactgaggccgggcgaccaaaggtcgcccgacgcccgggctttgcccgggcggcctcagtgagcgagcgagcgcgcagctgcctgcagg

SEQ ID NO: 2039 - DNA, 2350 bp, Artificial Sequence
  source: /note="Description of Artificial Sequence: Synthetic polynucleotide"
cctgcaggcagctgcgcgctcgctcgctcactgaggccgcccgggcaaagcccgggcgtcgggcgacctttggtcgcccggcctcagtgagcgagcgagcgcgcagagagggagtggccaactccatcactaggggttccttgtagttaatgattaacccgccatgctacttatctacgtagccatgcgtcgacataacgcgtcgacattgattattgactagttattaatagtaatcaattacggggtcattagttcatagcccatatatggagttccgcgttacataacttacggtaaatggcccgcctggctgaccgcccaacgacccccgcccattgacgtcaataatgacgtatgttcccatagtaacgccaatagggactttccattgacgtcaatgggtggagtatttacggtaaactgcccacttggcagtacatcaagtgtatcatatgccaagtacgccccctattgacgtcaatgacggtaaatggcccgcctggcattatgcccagtacatgaccttatgggactttcctacttggcagtacatctacgtattagtcatcgctattaccatgtcgaggccacgttctgcttcactctccccatctcccccccctccccacccccaattttgtatttatttattttttaattattttgtgcagcgatgggggcggggggggggggcgcgcgccaggcggggcggggcggggcgaggggcggggcggggcgaggcggagaggtgcggcggcagccaatcagagcggcgcgctccgaaagtttccttttatggcgaggcggcggcggcggcggccctataaaaagcgaagcgcgcggcgggcgggagcaagcttcgtttagtgaaccgtcagatcgcctggagacgccatccacgctgttttgacctccatagaagacaccgggaccgatccagcctccgcggattcgaatcccggccgggaacggtgcattggaacgcggattccccgtgccaagagtgacgtaagtaccgcctatagagtctataggcccacaggctggattattctgagtccaagctaggcccttttgctaatcatgttcatacctcttatcttcctcccacagctcctgggcaacgtgctggtctgtgtgctggcccatcactttggcaaagaattgggattcgaaccggtgccgccaccatgggatggagctggatctttctctttctcctgtcaggaactacaggtgtcctctctgaggtccagctgcaacagtctggacctgagctggtgaagcctggggcttcagtgaagatatcctgcaagacttctggatacacattcactgaatacaccatacactgggtgaagcagagccatggagagagccttgagtggattggaggtattaatccaaacgatggtggtactatttacaaccagaagttcaagggcaaggccacattgactgtagacaagtcctccaaaacagcctacatggagctccgcagcctgacatctgaggattctgcagtcttttactgtgcaagagggccctccgccaggtttccttactggggccaagggactctggtcactgtctctgcaggtggtggtggtagcggcggcggcggctctggtggtggtggatccgatgttgtgatgacccagactccactcactttgtcggttaccattggacaaccagcctccatctcttgcaagtcaagtcagagcctcttagatagtgatggaaagacatatttgaattggttgttacagaggccaggccagtctccaaagcgcctaatctatctggtgtctaaactggactctggagtccctgacagattcactggcagtggatcagggacagatttcacactgaaaattagcagagtggaggctgaggatttgggagtttattattgctggcaaggtacacattttcctcggacgttcggtggaggcaccaagctggaaatcaaacggtacccatacgatgttccagattacgcttagtgacctgaggatgatctttttccctctgccaaaaattatggggacatcatgaagccccttgagcatctgacttctggctaataaaggaaatttattttcattgcaatagtgtgttggaattttttgtgtctctcactcgcctaggatcgatgctacgtagataagtagcatggcgggttaatcattaactacagaggaacccctagtgatggagttggccactccctctctgcgcgctcgctcgctcactgaggccgggcgaccaaaggtcgcccgacgcccgggctttgcccgggcggcctcagtgagcgagcgagcgcgcagctgcctgcagg

SEQ ID NO: 2040 - DNA, 2370 bp, Artificial Sequence
  source: /note="Description of Artificial Sequence: Synthetic polynucleotide"
cctgcaggcagctgcgcgctcgctcgctcactgaggccgcccgggcaaagcccgggcgtcgggcgacctttggtcgcccggcctcagtgagcgagcgagcgcgcagagagggagtggccaactccatcactaggggttccttgtagttaatgattaacccgccatgctacttatctacgtagccatgcgtcgacataacgcgtcgacattgattattgactagttattaatagtaatcaattacggggtcattagttcatagcccatatatggagttccgcgttacataacttacggtaaatggcccgcctggctgaccgcccaacgacccccgcccattgacgtcaataatgacgtatgttcccatagtaacgccaatagggactttccattgacgtcaatgggtggagtatttacggtaaactgcccacttggcagtacatcaagtgtatcatatgccaagtacgccccctattgacgtcaatgacggtaaatggcccgcctggcattatgcccagtacatgaccttatgggactttcctacttggcagtacatctacgtattagtcatcgctattaccatgtcgaggccacgttctgcttcactctccccatctcccccccctccccacccccaattttgtatttatttattttttaattattttgtgcagcgatgggggcggggggggggggcgcgcgccaggcggggcggggcggggcgaggggcggggcggggcgaggcggagaggtgcggcggcagccaatcagagcggcgcgctccgaaagtttccttttatggcgaggcggcggcggcggcggccctataaaaagcgaagcgcgcggcgggcgggagcaagcttcgtttagtgaaccgattcgaatcccggccgggaacggtgcattggaacgcggattccccgtgccaagagtgacgtaagtaccgcctatagagtctataggcccactctgcatataaattgtaactgatgtaagaggtttcatattgctaatagcagctacaatccagctaccattctgcttttattttatggttgggataaggctggattattctgagtccaagctaggcccttttgctaatcatgttcatacctcttatcttcctcccacagctcctgggcaacgtgctggtctgtgtgctggcccatcactttggcaaagaattgggattcgaaccggtgccgccaccatgagtcctgcccagttcctgtttctgttagtgctctggattcgggaaaccaacggtgatgttgtgatgacccagactccactcactttgtcggttaccattggacaaccagcctccatctcttgcaagtcaagtcagagcctcttagatagtgatggaaagacatatttgaattggttgttacagaggccaggccagtctccaaagcgcctaatctatctggtgtctaaactggactctggagtccctgacagattcactggcagtggatcagggacagatttcacactgaaaattagcagagtggaggctgaggatttgggagtttattattgctggcaaggtacacattttcctcggacgttcggtggaggcaccaagctggaaatcaaacggggtggtggtggtagcggcggcggcggctctggtggtggtggatccgaggtccagctgcaacagtctggacctgagctggtgaagcctggggcttcagtgaagatatcctgcaagacttctggatacacattcactgaatacaccatacactgggtgaagcagagccatggagagagccttgagtggattggaggtattaatccaaacgatggtggtactatttacaaccagaagttcaagggcaaggccacattgactgtagacaagtcctccaaaacagcctacatggagctccgcagcctgacatctgaggattctgcagtcttttactgtgcaagagggccctccgccaggtttccttactggggccaagggactctggtcactgtctctgcatacccatacgatgttccagattacgcttagtgacctgaggatgatctttttccctctgccaaaaattatggggacatcatgaagccccttgagcatctgacttctggctaataaaggaaatttattttcattgcaatagtgtgttggaattttttgtgtctctcactcgcctaggatcgatgctacgtagataagtagcatggcgggttaatcattaactacagaggaacccctagtgatggagttggccactccctctctgcgcgctcgctcgctcactgaggccgggcgaccaaaggtcgcccgacgcccgggctttgcccgggcggcctcagtgagcgagcgagcgcgcagctgcctgcagg

SEQ ID NO: 2041 - DNA, 2624 bp, Artificial Sequence
  source: /note="Description of Artificial Sequence: Synthetic polynucleotide"
cctgcaggcagctgcgcgctcgctcgctcactgaggccgcccgggcaaagcccgggcgtcgggcgacctttggtcgcccggcctcagtgagcgagcgagcgcgcagagagggagtggccaactccatcactaggggttccttgtagttaatgattaacccgccatgctacttatctacgtagccatgcgtcgacataacgcgtcgacattgattattgactagttattaatagtaatcaattacggggtcattagttcatagcccatatatggagttccgcgttacataacttacggtaaatggcccgcctggctgaccgcccaacgacccccgcccattgacgtcaataatgacgtatgttcccatagtaacgccaatagggactttccattgacgtcaatgggtggagtatttacggtaaactgcccacttggcagtacatcaagtgtatcatatgccaagtacgccccctattgacgtcaatgacggtaaatggcccgcctggcattatgcccagtacatgaccttatgggactttcctacttggcagtacatctacgtattagtcatcgctattaccatgtcgaggccacgttctgcttcactctccccatctcccccccctccccacccccaattttgtatttatttattttttaattattttgtgcagcgatgggggcggggggggggggcgcgcgccaggcggggcggggcggggcgaggggcggggcggggcgaggcggagaggtgcggcggcagccaatcagagcggcgcgctccgaaagtttccttttatggcgaggcggcggcggcggcggccctataaaaagcgaagcgcgcggcgggcgggagcaagcttcgtttagtgaaccgtcagatcgcctggagacgccatccacgctgttttgacctccatagaagacaccgggaccgatccagcctccgcggattcgaatcccggccgggaacggtgcattggaacgcggattccccgtgccaagagtgacgtaagtaccgcctatagagtctataggcccacaaaaaatgctttcttcttttaatatacttttttgtttatcttatttctaatactttccctaatctctttctttcagggcaataatgatacaatgtatcatgcctctttgcaccattctaaagaataacagtgataatttctgggttaaggcaatagcaatatttctgcatataaatatttctgcatataaattgtaactgatgtaagaggtttcatattgctaatagcagctacaatccagctaccattctgcttttattttatggttgggataaggctggattattctgagtccaagctaggcccttttgctaatcatgttcatacctcttatcttcctcccacagctcctgggcaacgtgctggtctgtgtgctggcccatcactttggcaaagaattgggattcgaaccggtgccgccaccatgagtcctgcccagttcctgtttctgttagtgctctggattcgggaaaccaacggtgatgttgtgatgacccagactccactcactttgtcggttaccattggacaaccagcctccatctcttgcaagtcaagtcagagcctcttagatagtgatggaaagacatatttgaattggttgttacagaggccaggccagtctccaaagcgcctaatctatctggtgtctaaactggactctggagtccctgacagattcactggcagtggatcagggacagatttcacactgaaaattagcagagtggaggctgaggatttgggagtttattattgctggcaaggtacacattttcctcggacgttcggtggaggcaccaagctggaaatcaaacggggtggtggtggtagcggcggcggcggctctggtggtggtggatccgaggtccagctgcaacagtctggacctgagctggtgaagcctggggcttcagtgaagatatcctgcaagacttctggatacacattcactgaatacaccatacactgggtgaagcagagccatggagagagccttgagtggattggaggtattaatccaaacgatggtggtactatttacaaccagaagttcaagggcaaggccacattgactgtagacaagtcctccaaaacagcctacatggagctccgcagcctgacatctgaggattctgcagtcttttactgtgcaagagggccctccgccaggtttccttactggggccaagggactctggtcactgtctctgcatacccatacgatgttccagattacgcttagtgacctgaggatgatctttttccctctgccaaaaattatggggacatcatgaagccccttgagcatctgacttctggctaataaaggaaatttattttcattgcaatagtgtgttggaattttttgtgtctctcactcgcctaggatcgatgctacgtagataagtagcatggcgggttaatcattaactacagaggaacccctagtgatggagttggccactccctctctgcgcgctcgctcgctcactgaggccgggcgaccaaaggtcgcccgacgcccgggctttgcccgggcggcctcagtgagcgagcgagcgcgcagctgcctgcagg

SEQ ID NO: 2042 - DNA, 3778 bp, Artificial Sequence
  source: /note="Description of Artificial Sequence: Synthetic polynucleotide"
cctgcaggcagctgcgcgctcgctcgctcactgaggccgcccgggcaaagcccgggcgtcgggcgacctttggtcgcccggcctcagtgagcgagcgagcgcgcagagagggagtggccaactccatcactaggggttccttgtagttaatgattaacccgccatgctacttatctacgtagccatgcgtcgacataacgcgtcgacattgattattgactagttattaatagtaatcaattacggggtcattagttcatagcccatatatggagttccgcgttacataacttacggtaaatggcccgcctggctgaccgcccaacgacccccgcccattgacgtcaataatgacgtatgttcccatagtaacgccaatagggactttccattgacgtcaatgggtggagtatttacggtaaactgcccacttggcagtacatcaagtgtatcatatgccaagtacgccccctattgacgtcaatgacggtaaatggcccgcctggcattatgcccagtacatgaccttatgggactttcctacttggcagtacatctacgtattagtcatcgctattaccatgtcgaggccacgttctgcttcactctccccatctcccccccctccccacccccaattttgtatttatttattttttaattattttgtgcagcgatgggggcggggggggggggcgcgcgccaggcggggcggggcggggcgaggggcggggcggggcgaggcggagaggtgcggcggcagccaatcagagcggcgcgctccgaaagtttccttttatggcgaggcggcggcggcggcggccctataaaaagcgaagcgcgcggcgggcgggagcaagcttcgtttagtgaaccgtcagatcgcctggagacgccatccacgctgttttgacctccatagaagacaccgggaccgatccagcctccgcggattcgaatcccggccgggaacggtgcattggaacgcggattccccgtgccaagagtgacgtaagtaccgcctatagagtctataggcccacaaaaaatgctttcttcttttaatatacttttttgtttatcttatttctaatactttccctaatctctttctttcagggcaataatgatacaatgtatcatgcctctttgcaccattctaaagaataacagtgataatttctgggttaaggcaatagcaatatttctgcatataaatatttctgcatataaattgtaactgatgtaagaggtttcatattgctaatagcagctacaatccagctaccattctgcttttattttatggttgggataaggctggattattctgagtccaagctaggcccttttgctaatcatgttcatacctcttatcttcctcccacagctcctgggcaacgtgctggtctgtgtgctggcccatcactttggcaaagaattgggattcgaaccggtgccgccaccatgagtcctgcccagttcctgtttctgttagtgctctggattcgggaaaccaacggtgatgttgtgatgacccagactccactcactttgtcggttaccattggacaaccagcctccatctcttgcaagtcaagtcagagcctcttagatagtgatggaaagacatatttgaattggttgttacagaggccaggccagtctccaaagcgcctaatctatctggtgtctaaactggactctggagtccctgacagattcactggcagtggatcagggacagatttcacactgaaaattagcagagtggaggctgaggatttgggagtttattattgctggcaaggtacacattttcctcggacgttcggtggaggcaccaagctggaaatcaaacggggtggtggtggtagcggcggcggcggctctggtggtggtggatccgaggtccagctgcaacagtctggacctgagctggtgaagcctggggcttcagtgaagatatcctgcaagacttctggatacacattcactgaatacaccatacactgggtgaagcagagccatggagagagccttgagtggattggaggtattaatccaaacgatggtggtactatttacaaccagaagttcaagggcaaggccacattgactgtagacaagtcctccaaaacagcctacatggagctccgcagcctgacatctgaggattctgcagtcttttactgtgcaagagggccctccgccaggtttccttactggggccaagggactctggtcactgtctctgcatacccatacgatgttccagattacgcttagtgacctgaggatgatctttttccctctgccaaaaattatggggacatcatgaagccccttgagcatctgacttctggctaataaaggaaatttattttcattgcaatagtgtgttggaattttttgtgtctctcactcgcctaggtttcttgagacctctacaagagttggagttgacacttggggtactttcttggtgtaacgaactaatagcctgaaaaaaagaagtcatgtgttttcagcaaggcaagaaactgtctaacatagtagataaaacagagaacacttggccggaatcaactaagatgttgctatgttccattcatcatattatctccatctgcagagtagtgggttagtggagggtagaaaacattctcctgaacaactagttaaacttggctttgagttccacctgtaccacttgcataatcttgggaaagtgagttgcctaattcagtgacattaataaatttattaatttcttctttcaataaaacctggagagagcttcatatgtatcagcatatgctaaacttgaaagatacaagtagaaaatggaaggaaatatatctgactcaatagggatagttcaagggttaaattaaaagtagtaaagtattataattaatctgacatggtacctaatatataataatcatgtattaagaatgccagtcaccattaaaagtcaatgtatgactttaatctactcgaggaaagaaactatgtcttgttcactgttattatctctaaaatccataatcagaagagcaccatgtgtatgagccacacaataaatatctactgtataatatgtctcttcttgtttttaaccttcatagataagactctattgaattgggacattagtccagcaagccattctgtctctgtctcttctatggagggaaaggtttaaccatcaaagactaggtgcatctcccaaacaacctgaatttaatattcaaatatgtatctaaattcatttgttacatttttgtgttcagcttacatattactttttgagcgacatctattcaaggcctactacttgctgctctacaaaatattgccatgctctatttgcccattaactatttcttaaccttcaagggacatgctcagttctgatataccaagatttggtatttaccctcccagcctacatacttccaatcttaagagaacaatttttagactacattcaaatatagacctctccaccccatcaactattttatctctcctctcctatctttcttgacaaagagtgattagaaatatgcaattctaggtatcgatgctacgtagataagtagcatggcgggttaatcattaactacagaggaacccctagtgatggagttggccactccctctctgcgcgctcgctcgctcactgaggccgggcgaccaaaggtcgcccgacgcccgggctttgcccgggcggcctcagtgagcgagcgagcgcgcagctgcctgcagg

SEQ ID NO: 2043 - DNA, 2029 bp, Artificial Sequence
  source: /note="Description of Artificial Sequence: Synthetic polynucleotide"
cctgcaggcagctgcgcgctcgctcgctcactgaggccgcccgggcaaagcccgggcgtcgggcgacctttggtcgcccggcctcagtgagcgagcgagcgcgcagagagggagtggccaactccatcactaggggttccttgtagttaatgattaacccgccatgctacttatctacgtagccatgcgtcgacataacgcgtcgacattgattattgactagttattaatagtaatcaattacggggtcattagttcatagcccatatatggagttccgcgttacataacttacggtaaatggcccgcctggctgaccgcccaacgacccccgcccattgacgtcaataatgacgtatgttcccatagtaacgccaatagggactttccattgacgtcaatgggtggagtatttacggtaaactgcccacttggcagtacatcaagtgtatcatatgccaagtacgccccctattgacgtcaatgacggtaaatggcccgcctggcattatgcccagtacatgaccttatgggactttcctacttggcagtacatctacgtattagtcatcgctattaccatgtcgaggccacgttctgcttcactctccccatctcccccccctccccacccccaattttgtatttatttattttttaattattttgtgcagcgatgggggcggggggggggggcgcgcgccaggcggggcggggcggggcgaggggcggggcggggcgaggcggagaggtgcggcggcagccaatcagagcggcgcgctccgaaagtttccttttatggcgaggcggcggcggcggcggccctataaaaagcgaagcgcgcggcgggcgggagcaccggtgccgccaccatgagtcctgcccagttcctgtttctgttagtgctctggattcgggaaaccaacggtgatgttgtgatgacccagactccactcactttgtcggttaccattggacaaccagcctccatctcttgcaagtcaagtcagagcctcttagatagtgatggaaagacatatttgaattggttgttacagaggccaggccagtctccaaagcgcctaatctatctggtgtctaaactggactctggagtccctgacagattcactggcagtggatcagggacagatttcacactgaaaattagcagagtggaggctgaggatttgggagtttattattgctggcaaggtacacattttcctcggacgttcggtggaggcaccaagctggaaatcaaacggggtggtggtggtagcggcggcggcggctctggtggtggtggatccgaggtccagctgcaacagtctggacctgagctggtgaagcctggggcttcagtgaagatatcctgcaagacttctggatacacattcactgaatacaccatacactgggtgaagcagagccatggagagagccttgagtggattggaggtattaatccaaacgatggtggtactatttacaaccagaagttcaagggcaaggccacattgactgtagacaagtcctccaaaacagcctacatggagctccgcagcctgacatctgaggattctgcagtcttttactgtgcaagagggccctccgccaggtttccttactggggccaagggactctggtcactgtctctgcatacccatacgatgttccagattacgcttagtgacctgaggatgatctttttccctctgccaaaaattatggggacatcatgaagccccttgagcatctgacttctggctaataaaggaaatttattttcattgcaatagtgtgttggaattttttgtgtctctcactcgcctaggatcgatgctacgtagataagtagcatggcgggttaatcattaactacagaggaacccctagtgatggagttggccactccctctctgcgcgctcgctcgctcactgaggccgggcgaccaaaggtcgcccgacgcccgggctttgcccgggcggcctcagtgagcgagcgagcgcgcagctgcctgcagg

SEQ ID NO: 2044 - DNA, 2218 bp, Artificial Sequence
  source: /note="Description of Artificial Sequence: Synthetic polynucleotide"
cctgcaggcagctgcgcgctcgctcgctcactgaggccgcccgggcaaagcccgggcgtcgggcgacctttggtcgcccggcctcagtgagcgagcgagcgcgcagagagggagtggccaactccatcactaggggttccttgtagttaatgattaacccgccatgctacttatctacgtagccatgcgtcgacataacgcgtcgacattgattattgactagttattaatagtaatcaattacggggtcattagttcatagcccatatatggagttccgcgttacataacttacggtaaatggcccgcctggctgaccgcccaacgacccccgcccattgacgtcaataatgacgtatgttcccatagtaacgccaatagggactttccattgacgtcaatgggtggagtatttacggtaaactgcccacttggcagtacatcaagtgtatcatatgccaagtacgccccctattgacgtcaatgacggtaaatggcccgcctggcattatgcccagtacatgaccttatgggactttcctacttggcagtacatctacgtattagtcatcgctattaccatgtcgaggccacgttctgcttcactctccccatctcccccccctccccacccccaattttgtatttatttattttttaattattttgtgcagcgatgggggcggggggggggggcgcgcgccaggcggggcggggcggggcgaggggcggggcggggcgaggcggagaggtgcggcggcagccaatcagagcggcgcgctccgaaagtttccttttatggcgaggcggcggcggcggcggccctataaaaagcgaagcgcgcggcgggcgggagcaagcttgaactgaaaaaccagaaagttaactggtaagtttagtctttttgtcttttatttcaggtcccggatccggtggtggtgcaaatcaaagaactgctcctcagtggatgttgcctttacttctaggcctgtacggaagtgttacttctgctctaaaagctgcggaattgtacccgcggccgatccaccggtgccgccaccatgagtcctgcccagttcctgtttctgttagtgctctggattcgggaaaccaacggtgatgttgtgatgacccagactccactcactttgtcggttaccattggacaaccagcctccatctcttgcaagtcaagtcagagcctcttagatagtgatggaaagacatatttgaattggttgttacagaggccaggccagtctccaaagcgcctaatctatctggtgtctaaactggactctggagtccctgacagattcactggcagtggatcagggacagatttcacactgaaaattagcagagtggaggctgaggatttgggagtttattattgctggcaaggtacacattttcctcggacgttcggtggaggcaccaagctggaaatcaaacggggtggtggtggtagcggcggcggcggctctggtggtggtggatccgaggtccagctgcaacagtctggacctgagctggtgaagcctggggcttcagtgaagatatcctgcaagacttctggatacacattcactgaatacaccatacactgggtgaagcagagccatggagagagccttgagtggattggaggtattaatccaaacgatggtggtactatttacaaccagaagttcaagggcaaggccacattgactgtagacaagtcctccaaaacagcctacatggagctccgcagcctgacatctgaggattctgcagtcttttactgtgcaagagggccctccgccaggtttccttactggggccaagggactctggtcactgtctctgcatacccatacgatgttccagattacgcttagtgacctgaggatgatctttttccctctgccaaaaattatggggacatcatgaagccccttgagcatctgacttctggctaataaaggaaatttattttcattgcaatagtgtgttggaattttttgtgtctctcactcgcctaggatcgatgctacgtagataagtagcatggcgggttaatcattaactacagaggaacccctagtgatggagttggccactccctctctgcgcgctcgctcgctcactgaggccgggcgaccaaaggtcgcccgacgcccgggctttgcccgggcggcctcagtgagcgagcgagcgcgcagctgcctgcagg

SEQ ID NO: 2045 - DNA, 3778 bp, Artificial Sequence
  source: /note="Description of Artificial Sequence: Synthetic polynucleotide"
cctgcaggcagctgcgcgctcgctcgctcactgaggccgcccgggcaaagcccgggcgtcgggcgacctttggtcgcccggcctcagtgagcgagcgagcgcgcagagagggagtggccaactccatcactaggggttccttgtagttaatgattaacccgccatgctacttatctacgtagccatgcgtcgacataacgcgtcgacattgattattgactagttattaatagtaatcaattacggggtcattagttcatagcccatatatggagttccgcgttacataacttacggtaaatggcccgcctggctgaccgcccaacgacccccgcccattgacgtcaataatgacgtatgttcccatagtaacgccaatagggactttccattgacgtcaatgggtggagtatttacggtaaactgcccacttggcagtacatcaagtgtatcatatgccaagtacgccccctattgacgtcaatgacggtaaatggcccgcctggcattatgcccagtacatgaccttatgggactttcctacttggcagtacatctacgtattagtcatcgctattaccatgtcgaggccacgttctgcttcactctccccatctcccccccctccccacccccaattttgtatttatttattttttaattattttgtgcagcgatgggggcggggggggggggcgcgcgccaggcggggcggggcggggcgaggggcggggcggggcgaggcggagaggtgcggcggcagccaatcagagcggcgcgctccgaaagtttccttttatggcgaggcggcggcggcggcggccctataaaaagcgaagcgcgcggcgggcgggagcaagcttcgtttagtgaaccgtcagatcgcctggagacgccatccacgctgttttgacctccatagaagacaccgggaccgatccagcctccgcggattcgaatcccggccgggaacggtgcattggaacgcggattccccgtgccaagagtgacgtaagtaccgcctatagagtctataggcccacaaaaaatgctttcttcttttaatatacttttttgtttatcttatttctaatactttccctaatctctttctttcagggcaataatgatacaatgtatcatgcctctttgcaccattctaaagaataacagtgataatttctgggttaaggcaatagcaatatttctgcatataaatatttctgcatataaattgtaactgatgtaagaggtttcatattgctaatagcagctacaatccagctaccattctgcttttattttatggttgggataaggctggattattctgagtccaagctaggcccttttgctaatcatgttcatacctcttatcttcctcccacagctcctgggcaacgtgctggtctgtgtgctggcccatcactttggcaaagaattgggattcgaaccggtgccgccaccatgggatggagctggatctttctctttctcctgtcaggaactacaggtgtcctctctgaggtccagctgcaacagtctggacctgagctggtgaagcctggggcttcagtgaagatatcctgcaagacttctggatacacattcactgaatacaccatacactgggtgaagcagagccatggagagagccttgagtggattggaggtattaatccaaacgatggtggtactatttacaaccagaagttcaagggcaaggccacattgactgtagacaagtcctccaaaacagcctacatggagctccgcagcctgacatctgaggattctgcagtcttttactgtgcaagagggccctccgccaggtttccttactggggccaagggactctggtcactgtctctgcaggtggtggtggtagcggcggcggcggctctggtggtggtggatccgatgttgtgatgacccagactccactcactttgtcggttaccattggacaaccagcctccatctcttgcaagtcaagtcagagcctcttagatagtgatggaaagacatatttgaattggttgttacagaggccaggccagtctccaaagcgcctaatctatctggtgtctaaactggactctggagtccctgacagattcactggcagtggatcagggacagatttcacactgaaaattagcagagtggaggctgaggatttgggagtttattattgctggcaaggtacacattttcctcggacgttcggtggaggcaccaagctggaaatcaaacggtacccatacgatgttccagattacgcttagtgacctgaggatgatctttttccctctgccaaaaattatggggacatcatgaagccccttgagcatctgacttctggctaataaaggaaatttattttcattgcaatagtgtgttggaattttttgtgtctctcactcgcctaggtttcttgagacctctacaagagttggagttgacacttggggtactttcttggtgtaacgaactaatagcctgaaaaaaagaagtcatgtgttttcagcaaggcaagaaactgtctaacatagtagataaaacagagaacacttggccggaatcaactaagatgttgctatgttccattcatcatattatctccatctgcagagtagtgggttagtggagggtagaaaacattctcctgaacaactagttaaacttggctttgagttccacctgtaccacttgcataatcttgggaaagtgagttgcctaattcagtgacattaataaatttattaatttcttctttcaataaaacctggagagagcttcatatgtatcagcatatgctaaacttgaaagatacaagtagaaaatggaaggaaatatatctgactcaatagggatagttcaagggttaaattaaaagtagtaaagtattataattaatctgacatggtacctaatatataataatcatgtattaagaatgccagtcaccattaaaagtcaatgtatgactttaatctactcgaggaaagaaactatgtcttgttcactgttattatctctaaaatccataatcagaagagcaccatgtgtatgagccacacaataaatatctactgtataatatgtctcttcttgtttttaaccttcatagataagactctattgaattgggacattagtccagcaagccattctgtctctgtctcttctatggagggaaaggtttaaccatcaaagactaggtgcatctcccaaacaacctgaatttaatattcaaatatgtatctaaattcatttgttacatttttgtgttcagcttacatattactttttgagcgacatctattcaaggcctactacttgctgctctacaaaatattgccatgctctatttgcccattaactatttcttaaccttcaagggacatgctcagttctgatataccaagatttggtatttaccctcccagcctacatacttccaatcttaagagaacaatttttagactacattcaaatatagacctctccaccccatcaactattttatctctcctctcctatctttcttgacaaagagtgattagaaatatgcaattctaggtatcgatgctacgtagataagtagcatggcgggttaatcattaactacagaggaacccctagtgatggagttggccactccctctctgcgcgctcgctcgctcactgaggccgggcgaccaaaggtcgcccgacgcccgggctttgcccgggcggcctcagtgagcgagcgagcgcgcagctgcctgcagg

SEQ ID NO: 2046 - DNA, 2624 bp, Artificial Sequence
  source: /note="Description of Artificial Sequence: Synthetic polynucleotide"
cctgcaggcagctgcgcgctcgctcgctcactgaggccgcccgggcaaagcccgggcgtcgggcgacctttggtcgcccggcctcagtgagcgagcgagcgcgcagagagggagtggccaactccatcactaggggttccttgtagttaatgattaacccgccatgctacttatctacgtagccatgcgtcgacataacgcgtcgacattgattattgactagttattaatagtaatcaattacggggtcattagttcatagcccatatatggagttccgcgttacataacttacggtaaatggcccgcctggctgaccgcccaacgacccccgcccattgacgtcaataatgacgtatgttcccatagtaacgccaatagggactttccattgacgtcaatgggtggagtatttacggtaaactgcccacttggcagtacatcaagtgtatcatatgccaagtacgccccctattgacgtcaatgacggtaaatggcccgcctggcattatgcccagtacatgaccttatgggactttcctacttggcagtacatctacgtattagtcatcgctattaccatgtcgaggccacgttctgcttcactctccccatctcccccccctccccacccccaattttgtatttatttattttttaattattttgtgcagcgatgggggcggggggggggggcgcgcgccaggcggggcggggcggggcgaggggcggggcggggcgaggcggagaggtgcggcggcagccaatcagagcggcgcgctccgaaagtttccttttatggcgaggcggcggcggcggcggccctataaaaagcgaagcgcgcggcgggcgggagcaagcttcgtttagtgaaccgtcagatcgcctggagacgccatccacgctgttttgacctccatagaagacaccgggaccgatccagcctccgcggattcgaatcccggccgggaacggtgcattggaacgcggattccccgtgccaagagtgacgtaagtaccgcctatagagtctataggcccacaaaaaatgctttcttcttttaatatacttttttgtttatcttatttctaatactttccctaatctctttctttcagggcaataatgatacaatgtatcatgcctctttgcaccattctaaagaataacagtgataatttctgggttaaggcaatagcaatatttctgcatataaatatttctgcatataaattgtaactgatgtaagaggtttcatattgctaatagcagctacaatccagctaccattctgcttttattttatggttgggataaggctggattattctgagtccaagctaggcccttttgctaatcatgttcatacctcttatcttcctcccacagctcctgggcaacgtgctggtctgtgtgctggcccatcactttggcaaagaattgggattcgaaccggtgccgccaccatgggatggagctggatctttctctttctcctgtcaggaactacaggtgtcctctctgaggtccagctgcaacagtctggacctgagctggtgaagcctggggcttcagtgaagatatcctgcaagacttctggatacacattcactgaatacaccatacactgggtgaagcagagccatggagagagccttgagtggattggaggtattaatccaaacgatggtggtactatttacaaccagaagttcaagggcaaggccacattgactgtagacaagtcctccaaaacagcctacatggagctccgcagcctgacatctgaggattctgcagtcttttactgtgcaagagggccctccgccaggtttccttactggggccaagggactctggtcactgtctctgcaggtggtggtggtagcggcggcggcggctctggtggtggtggatccgatgttgtgatgacccagactccactcactttgtcggttaccattggacaaccagcctccatctcttgcaagtcaagtcagagcctcttagatagtgatggaaagacatatttgaattggttgttacagaggccaggccagtctccaaagcgcctaatctatctggtgtctaaactggactctggagtccctgacagattcactggcagtggatcagggacagatttcacactgaaaattagcagagtggaggctgaggatttgggagtttattattgctggcaaggtacacattttcctcggacgttcggtggaggcaccaagctggaaatcaaacggtacccatacgatgttccagattacgcttagtgacctgaggatgatctttttccctctgccaaaaattatggggacatcatgaagccccttgagcatctgacttctggctaataaaggaaatttattttcattgcaatagtgtgttggaattttttgtgtctctcactcgcctaggatcgatgctacgtagataagtagcatggcgggttaatcattaactacagaggaacccctagtgatggagttggccactccctctctgcgcgctcgctcgctcactgaggccgggcgaccaaaggtcgcccgacgcccgggctttgcccgggcggcctcagtgagcgagcgagcgcgcagctgcctgcagg

SEQ ID NO: 2047 - DNA, 2350 bp, Artificial Sequence
  source: /note="Description of Artificial Sequence: Synthetic polynucleotide"
cctgcaggcagctgcgcgctcgctcgctcactgaggccgcccgggcaaagcccgggcgtcgggcgacctttggtcgcccggcctcagtgagcgagcgagcgcgcagagagggagtggccaactccatcactaggggttccttgtagttaatgattaacccgccatgctacttatctacgtagccatgcgtcgacataacgcgtcgacattgattattgactagttattaatagtaatcaattacggggtcattagttcatagcccatatatggagttccgcgttacataacttacggtaaatggcccgcctggctgaccgcccaacgacccccgcccattgacgtcaataatgacgtatgttcccatagtaacgccaatagggactttccattgacgtcaatgggtggagtatttacggtaaactgcccacttggcagtacatcaagtgtatcatatgccaagtacgccccctattgacgtcaatgacggtaaatggcccgcctggcattatgcccagtacatgaccttatgggactttcctacttggcagtacatctacgtattagtcatcgctattaccatgtcgaggccacgttctgcttcactctccccatctcccccccctccccacccccaattttgtatttatttattttttaattattttgtgcagcgatgggggcggggggggggggcgcgcgccaggcggggcggggcggggcgaggggcggggcggggcgaggcggagaggtgcggcggcagccaatcagagcggcgcgctccgaaagtttccttttatggcgaggcggcggcggcggcggccctataaaaagcgaagcgcgcggcgggcgggagcaagcttcgtttagtgaaccgtcagatcgcctggagacgccatccacgctgttttgacctccatagaagacaccgggaccgatccagcctccgcggattcgaatcccggccgggaacggtgcattggaacgcggattccccgtgccaagagtgacgtaagtaccgcctatagagtctataggcccacaaaaaatgctttcttcttttcaagctaggcccttttgctaatcatgttcatacctcttatcttcctcccacagctcctgggcaacgtgctggtctgtgtgctggcccatcactttggcaaagaattgggattcgaaccggtgccgccaccatgggatggagctggatctttctctttctcctgtcaggaactacaggtgtcctctctgaggtccagctgcaacagtctggacctgagctggtgaagcctggggcttcagtgaagatatcctgcaagacttctggatacacattcactgaatacaccatacactgggtgaagcagagccatggagagagccttgagtggattggaggtattaatccaaacgatggtggtactatttacaaccagaagttcaagggcaaggccacattgactgtagacaagtcctccaaaacagcctacatggagctccgcagcctgacatctgaggattctgcagtcttttactgtgcaagagggccctccgccaggtttccttactggggccaagggactctggtcactgtctctgcaggtggtggtggtagcggcggcggcggctctggtggtggtggatccgatgttgtgatgacccagactccactcactttgtcggttaccattggacaaccagcctccatctcttgcaagtcaagtcagagcctcttagatagtgatggaaagacatatttgaattggttgttacagaggccaggccagtctccaaagcgcctaatctatctggtgtctaaactggactctggagtccctgacagattcactggcagtggatcagggacagatttcacactgaaaattagcagagtggaggctgaggatttgggagtttattattgctggcaaggtacacattttcctcggacgttcggtggaggcaccaagctggaaatcaaacggtacccatacgatgttccagattacgcttagtgacctgaggatgatctttttccctctgccaaaaattatggggacatcatgaagccccttgagcatctgacttctggctaataaaggaaatttattttcattgcaatagtgtgttggaattttttgtgtctctcactcgcctaggatcgatgctacgtagataagtagcatggcgggttaatcattaactacagaggaacccctagtgatggagttggccactccctctctgcgcgctcgctcgctcactgaggccgggcgaccaaaggtcgcccgacgcccgggctttgcccgggcggcctcagtgagcgagcgagcgcgcagctgcctgcagg

SEQ ID NO: 2048 - DNA, 2029 bp, Artificial Sequence
  source: /note="Description of Artificial Sequence: Synthetic polynucleotide"
cctgcaggcagctgcgcgctcgctcgctcactgaggccgcccgggcaaagcccgggcgtcgggcgacctttggtcgcccggcctcagtgagcgagcgagcgcgcagagagggagtggccaactccatcactaggggttccttgtagttaatgattaacccgccatgctacttatctacgtagccatgcgtcgacataacgcgtcgacattgattattgactagttattaatagtaatcaattacggggtcattagttcatagcccatatatggagttccgcgttacataacttacggtaaatggcccgcctggctgaccgcccaacgacccccgcccattgacgtcaataatgacgtatgttcccatagtaacgccaatagggactttccattgacgtcaatgggtggagtatttacggtaaactgcccacttggcagtacatcaagtgtatcatatgccaagtacgccccctattgacgtcaatgacggtaaatggcccgcctggcattatgcccagtacatgaccttatgggactttcctacttggcagtacatctacgtattagtcatcgctattaccatgtcgaggccacgttctgcttcactctccccatctcccccccctccccacccccaattttgtatttatttattttttaattattttgtgcagcgatgggggcggggggggggggcgcgcgccaggcggggcggggcggggcgaggggcggggcggggcgaggcggagaggtgcggcggcagccaatcagagcggcgcgctccgaaagtttccttttatggcgaggcggcggcggcggcggccctataaaaagcgaagcgcgcggcgggcgggagcaccggtgccgccaccatgggatggagctggatctttctctttctcctgtcaggaactacaggtgtcctctctgaggtccagctgcaacagtctggacctgagctggtgaagcctggggcttcagtgaagatatcctgcaagacttctggatacacattcactgaatacaccatacactgggtgaagcagagccatggagagagccttgagtggattggaggtattaatccaaacgatggtggtactatttacaaccagaagttcaagggcaaggccacattgactgtagacaagtcctccaaaacagcctacatggagctccgcagcctgacatctgaggattctgcagtcttttactgtgcaagagggccctccgccaggtttccttactggggccaagggactctggtcactgtctctgcaggtggtggtggtagcggcggcggcggctctggtggtggtggatccgatgttgtgatgacccagactccactcactttgtcggttaccattggacaaccagcctccatctcttgcaagtcaagtcagagcctcttagatagtgatggaaagacatatttgaattggttgttacagaggccaggccagtctccaaagcgcctaatctatctggtgtctaaactggactctggagtccctgacagattcactggcagtggatcagggacagatttcacactgaaaattagcagagtggaggctgaggatttgggagtttattattgctggcaaggtacacattttcctcggacgttcggtggaggcaccaagctggaaatcaaacggtacccatacgatgttccagattacgcttagtgacctgaggatgatctttttccctctgccaaaaattatggggacatcatgaagccccttgagcatctgacttctggctaataaaggaaatttattttcattgcaatagtgtgttggaattttttgtgtctctcactcgcctaggatcgatgctacgtagataagtagcatggcgggttaatcattaactacagaggaacccctagtgatggagttggccactccctctctgcgcgctcgctcgctcactgaggccgggcgaccaaaggtcgcccgacgcccgggctttgcccgggcggcctcagtgagcgagcgagcgcgcagctgcctgcagg

SEQ ID NO: 2049 - DNA, 2218 bp, Artificial Sequence
  source: /note="Description of Artificial Sequence: Synthetic polynucleotide"
cctgcaggcagctgcgcgctcgctcgctcactgaggccgcccgggcaaagcccgggcgtcgggcgacctttggtcgcccggcctcagtgagcgagcgagcgcgcagagagggagtggccaactccatcactaggggttccttgtagttaatgattaacccgccatgctacttatctacgtagccatgcgtcgacataacgcgtcgacattgattattgactagttattaatagtaatcaattacggggtcattagttcatagcccatatatggagttccgcgttacataacttacggtaaatggcccgcctggctgaccgcccaacgacccccgcccattgacgtcaataatgacgtatgttcccatagtaacgccaatagggactttccattgacgtcaatgggtggagtatttacggtaaactgcccacttggcagtacatcaagtgtatcatatgccaagtacgccccctattgacgtcaatgacggtaaatggcccgcctggcattatgcccagtacatgaccttatgggactttcctacttggcagtacatctacgtattagtcatcgctattaccatgtcgaggccacgttctgcttcactctccccatctcccccccctccccacccccaattttgtatttatttattttttaattattttgtgcagcgatgggggcggggggggggggcgcgcgccaggcggggcggggcggggcgaggggcggggcggggcgaggcggagaggtgcggcggcagccaatcagagcggcgcgctccgaaagtttccttttatggcgaggcggcggcggcggcggccctataaaaagcgaagcgcgcggcgggcgggagcaagcttgaactgaaaaaccagaaagttaactggtaagtttagtctttttgtcttttatttcaggtcccggatccggtggtggtgcaaatcaaagaactgctcctcagtggatgttgcctttacttctaggcctgtacggaagtgttacttctgctctaaaagctgcggaattgtacccgcggccgatccaccggtgccgccaccatgggatggagctggatctttctctttctcctgtcaggaactacaggtgtcctctctgaggtccagctgcaacagtctggacctgagctggtgaagcctggggcttcagtgaagatatcctgcaagacttctggatacacattcactgaatacaccatacactgggtgaagcagagccatggagagagccttgagtggattggaggtattaatccaaacgatggtggtactatttacaaccagaagttcaagggcaaggccacattgactgtagacaagtcctccaaaacagcctacatggagctccgcagcctgacatctgaggattctgcagtcttttactgtgcaagagggccctccgccaggtttccttactggggccaagggactctggtcactgtctctgcaggtggtggtggtagcggcggcggcggctctggtggtggtggatccgatgttgtgatgacccagactccactcactttgtcggttaccattggacaaccagcctccatctcttgcaagtcaagtcagagcctcttagatagtgatggaaagacatatttgaattggttgttacagaggccaggccagtctccaaagcgcctaatctatctggtgtctaaactggactctggagtccctgacagattcactggcagtggatcagggacagatttcacactgaaaattagcagagtggaggctgaggatttgggagtttattattgctggcaaggtacacattttcctcggacgttcggtggaggcaccaagctggaaatcaaacggtacccatacgatgttccagattacgcttagtgacctgaggatgatctttttccctctgccaaaaattatggggacatcatgaagccccttgagcatctgacttctggctaataaaggaaatttattttcattgcaatagtgtgttggaattttttgtgtctctcactcgcctaggatcgatgctacgtagataagtagcatggcgggttaatcattaactacagaggaacccctagtgatggagttggccactccctctctgcgcgctcgctcgctcactgaggccgggcgaccaaaggtcgcccgacgcccgggctttgcccgggcggcctcagtgagcgagcgagcgcgcagctgcctgcagg

SEQ ID NO: 2050 - DNA, 4188 bp, Artificial Sequence
  source: /note="Description of Artificial Sequence: Synthetic polynucleotide"
cctgcaggcagctgcgcgctcgctcgctcactgaggccgcccgggcaaagcccgggcgtcgggcgacctttggtcgcccggcctcagtgagcgagcgagcgcgcagagagggagtggccaactccatcactaggggttccttgtagttaatgattaacccgccatgctacttatctacgtagccatgcgtcgacataacgcgtcgacattgattattgactagttattaatagtaatcaattacggggtcattagttcatagcccatatatggagttccgcgttacataacttacggtaaatggcccgcctggctgaccgcccaacgacccccgcccattgacgtcaataatgacgtatgttcccatagtaacgccaatagggactttccattgacgtcaatgggtggagtatttacggtaaactgcccacttggcagtacatcaagtgtatcatatgccaagtacgccccctattgacgtcaatgacggtaaatggcccgcctggcattatgcccagtacatgaccttatgggactttcctacttggcagtacatctacgtattagtcatcgctattaccatgtcgaggccacgttctgcttcactctccccatctcccccccctccccacccccaattttgtatttatttattttttaattattttgtgcagcgatgggggcggggggggggggcgcgcgccaggcggggcggggcggggcgaggggcggggcggggcgaggcggagaggtgcggcggcagccaatcagagcggcgcgctccgaaagtttccttttatggcgaggcggcggcggcggcggccctataaaaagcgaagcgcgcggcgggcgggagcaagcttcgtttagtgaaccgtcagatcgcctggagacgccatccacgctgttttgacctccatagaagacaccgggaccgatccagcctccgcggattcgaatcccggccgggaacggtgcattggaacgcggattccccgtgccaagagtgacgtaagtaccgcctatagagtctataggcccacaaaaaatgctttcttcttttaatatacttttttgtttatcttatttctaatactttccctaatctctttctttcagggcaataatgatacaatgtatcatgcctctttgcaccattctaaagaataacagtgataatttctgggttaaggcaatagcaatatttctgcatataaatatttctgcatataaattgtaactgatgtaagaggtttcatattgctaatagcagctacaatccagctaccattctgcttttattttatggttgggataaggctggattattctgagtccaagctaggcccttttgctaatcatgttcatacctcttatcttcctcccacagctcctgggcaacgtgctggtctgtgtgctggcccatcactttggcaaagaattgggattcgaaccggtgccgccaccatgggatggagctggatctttctctttctcctgtcaggaactacaggtgtcctctctgaggtccagctgcaacagtctggacctgagctggtgaagcctggggcttcagtgaagatatcctgcaagacttctggatacacattcactgaatacaccatacactgggtgaagcagagccatggagagagccttgagtggattggaggtattaatccaaacgatggtggtactatttacaaccagaagttcaagggcaaggccacattgactgtagacaagtcctccaaaacagcctacatggagctccgcagcctgacatctgaggattctgcagtcttttactgtgcaagagggccctccgccaggtttccttactggggccaagggactctggtcactgtctctgcaggtggtggtggtagcggcggcggcggctctggtggtggtggatccgatgttgtgatgacccagactccactcactttgtcggttaccattggacaaccagcctccatctcttgcaagtcaagtcagagcctcttagatagtgatggaaagacatatttgaattggttgttacagaggccaggccagtctccaaagcgcctaatctatctggtgtctaaactggactctggagtccctgacagattcactggcagtggatcagggacagatttcacactgaaaattagcagagtggaggctgaggatttgggagtttattattgctggcaaggtacacattttcctcggacgttcggtggaggcaccaagctggaaatcaaacggtccggaggcggcggcagcatgggatggagctggatctttctctttctcctgtcaggaactacaggtgtcctctctgaggtccagctgcaacagtctggacctgagctggtgaagcctggggcttcagtgaagatatcctgcaagacttctggatacacattcactgaatacaccatacactgggtgaagcagagccatggagagagccttgagtggattggaggtattaatccaaacgatggtggtactatttacaaccagaagttcaagggcaaggccacattgactgtagacaagtcctccaaaacagcctacatggagctccgcagcctgacatctgaggattctgcagtcttttactgtgcaagagggccctccgccaggtttccttactggggccaagggactctggtcactgtctctgcaggtggtggtggtagcggcggcggcggctctggtggtggtggatccgatgttgtgatgacccagactccactcactttgtcggttaccattggacaaccagcctccatctcttgcaagtcaagtcagagcctcttagatagtgatggaaagacatatttgaattggttgttacagaggccaggccagtctccaaagcgcctaatctatctggtgtctaaactggactctggagtccctgacagattcactggcagtggatcagggacagatttcacactgaaaattagcagagtggaggctgaggatttgggagtttattattgctggcaaggtacacattttcctcggacgttcggtggaggcaccaagctggaaatcaaacggtccggaggcggcggcagcgaggtccagctgcaacagtctggacctgagctggtgaagcctggggcttcagtgaagatatcctgcaagacttctggatacacattcactgaatacaccatacactgggtgaagcagagccatggagagagccttgagtggattggaggtattaatccaaacgatggtggtactatttacaaccagaagttcaagggcaaggccacattgactgtagacaagtcctccaaaacagcctacatggagctccgcagcctgacatctgaggattctgcagtcttttactgtgcaagagggccctccgccaggtttccttactggggccaagggactctggtcactgtctctgcaggtggtggtggtagcggcggcggcggctctggtggtggtggatccgatgttgtgatgacccagactccactcactttgtcggttaccattggacaaccagcctccatctcttgcaagtcaagtcagagcctcttagatagtgatggaaagacatatttgaattggttgttacagaggccaggccagtctccaaagcgcctaatctatctggtgtctaaactggactctggagtccctgacagattcactggcagtggatcagggacagatttcacactgaaaattagcagagtggaggctgaggatttgggagtttattattgctggcaaggtacacattttcctcggacgttcggtggaggcaccaagctggaaatcaaacggtacccatacgatgttccagattacgcttagtgacctgaggatgatctttttccctctgccaaaaattatggggacatcatgaagccccttgagcatctgacttctggctaataaaggaaatttattttcattgcaatagtgtgttggaattttttgtgtctctcactcgtcctaggatcgatgctacgtagataagtagcatggcgggttaatcattaactacagaggaacccctagtgatggagttggccactccctctctgcgcgctcgctcgctcactgaggccgggcgaccaaaggtcgcccgacgcccgggctttgcccgggcggcctcagtgagcgagcgagcgcgcagctgcctgcagg

SEQ ID NO: 2051 - DNA, 3435 bp, Artificial Sequence
  source: /note="Description of Artificial Sequence: Synthetic polynucleotide"
cctgcaggcagctgcgcgctcgctcgctcactgaggccgcccgggcaaagcccgggcgtcgggcgacctttggtcgcccggcctcagtgagcgagcgagcgcgcagagagggagtggccaactccatcactaggggttccttgtagttaatgattaacccgccatgctacttatctacgtagccatgcgtcgacataacgcgtcgacattgattattgactagttattaatagtaatcaattacggggtcattagttcatagcccatatatggagttccgcgttacataacttacggtaaatggcccgcctggctgaccgcccaacgacccccgcccattgacgtcaataatgacgtatgttcccatagtaacgccaatagggactttccattgacgtcaatgggtggagtatttacggtaaactgcccacttggcagtacatcaagtgtatcatatgccaagtacgccccctattgacgtcaatgacggtaaatggcccgcctggcattatgcccagtacatgaccttatgggactttcctacttggcagtacatctacgtattagtcatcgctattaccatgtcgaggccacgttctgcttcactctccccatctcccccccctccccacccccaattttgtatttatttattttttaattattttgtgcagcgatgggggcggggggggggggcgcgcgccaggcggggcggggcggggcgaggggcggggcggggcgaggcggagaggtgcggcggcagccaatcagagcggcgcgctccgaaagtttccttttatggcgaggcggcggcggcggcggccctataaaaagcgaagcgcgcggcgggcgggagcaagcttcgtttagtgaaccgtcagatcgcctggagacgccatccacgctgttttgacctccatagaagacaccgggaccgatccagcctccgcggattcgaatcccggccgggaacggtgcattggaacgcggattccccgtgccaagagtgacgtaagtaccgcctatagagtctataggcccacaaaaaatgctttcttcttttaatatacttttttgtttatcttatttctaatactttccctaatctctttctttcagggcaataatgatacaatgtatcatgcctctttgcaccattctaaagaataacagtgataatttctgggttaaggcaatagcaatatttctgcatataaatatttctgcatataaattgtaactgatgtaagaggtttcatattgctaatagcagctacaatccagctaccattctgcttttattttatggttgggataaggctggattattctgagtccaagctaggcccttttgctaatcatgttcatacctcttatcttcctcccacagctcctgggcaacgtgctggtctgtgtgctggcccatcactttggcaaagaattgggattcgaaccggtgccgccaccatgggatggagctggatctttctctttctcctgtcaggaactacaggtgtcctctctgaggtccagctgcaacagtctggacctgagctggtgaagcctggggcttcagtgaagatatcctgcaagacttctggatacacattcactgaatacaccatacactgggtgaagcagagccatggagagagccttgagtggattggaggtattaatccaaacgatggtggtactatttacaaccagaagttcaagggcaaggccacattgactgtagacaagtcctccaaaacagcctacatggagctccgcagcctgacatctgaggattctgcagtcttttactgtgcaagagggccctccgccaggtttccttactggggccaagggactctggtcactgtctctgcaggtggtggtggtagcggcggcggcggctctggtggtggtggatccgatgttgtgatgacccagactccactcactttgtcggttaccattggacaaccagcctccatctcttgcaagtcaagtcagagcctcttagatagtgatggaaagacatatttgaattggttgttacagaggccaggccagtctccaaagcgcctaatctatctggtgtctaaactggactctggagtccctgacagattcactggcagtggatcagggacagatttcacactgaaaattagcagagtggaggctgaggatttgggagtttattattgctggcaaggtacacattttcctcggacgttcggtggaggcaccaagctggaaatcaaacggtccggaggcggcggcagcatgggatggagctggatctttctctttctcctgtcaggaactacaggtgtcctctctgaggtccagctgcaacagtctggacctgagctggtgaagcctggggcttcagtgaagatatcctgcaagacttctggatacacattcactgaatacaccatacactgggtgaagcagagccatggagagagccttgagtggattggaggtattaatccaaacgatggtggtactatttacaaccagaagttcaagggcaaggccacattgactgtagacaagtcctccaaaacagcctacatggagctccgcagcctgacatctgaggattctgcagtcttttactgtgcaagagggccctccgccaggtttccttactggggccaagggactctggtcactgtctctgcaggtggtggtggtagcggcggcggcggctctggtggtggtggatccgatgttgtgatgacccagactccactcactttgtcggttaccattggacaaccagcctccatctcttgcaagtcaagtcagagcctcttagatagtgatggaaagacatatttgaattggttgttacagaggccaggccagtctccaaagcgcctaatctatctggtgtctaaactggactctggagtccctgacagattcactggcagtggatcagggacagatttcacactgaaaattagcagagtggaggctgaggatttgggagtttattattgctggcaaggtacacattttcctcggacgttcggtggaggcaccaagctggaaatcaaacggtacccatacgatgttccagattacgcttagtgacctgaggatgatctttttccctctgccaaaaattatggggacatcatgaagccccttgagcatctgacttctggctaataaaggaaatttattttcattgcaatagtgtgttggaattttttgtgtctctcactcgtcctaggatcgatgctacgtagataagtagcatggcgggttaatcattaactacagaggaacccctagtgatggagttggccactccctctctgcgcgctcgctcgctcactgaggccgggcgaccaaaggtcgcccgacgcccgggctttgcccgggcggcctcagtgagcgagcgagcgcgcagctgcctgcagg

SEQ ID NO: 2052 - DNA, 4395 bp, Artificial Sequence
  source: /note="Description of Artificial Sequence: Synthetic polynucleotide"
cctgcaggcagctgcgcgctcgctcgctcactgaggccgcccgggcaaagcccgggcgtcgggcgacctttggtcgcccggcctcagtgagcgagcgagcgcgcagagagggagtggccaactccatcactaggggttccttgtagttaatgattaacccgccatgctacttatctacgtagccatgcgtcgacataacgcgtcgacattgattattgactagttattaatagtaatcaattacggggtcattagttcatagcccatatatggagttccgcgttacataacttacggtaaatggcccgcctggctgaccgcccaacgacccccgcccattgacgtcaataatgacgtatgttcccatagtaacgccaatagggactttccattgacgtcaatgggtggagtatttacggtaaactgcccacttggcagtacatcaagtgtatcatatgccaagtacgccccctattgacgtcaatgacggtaaatggcccgcctggcattatgcccagtacatgaccttatgggactttcctacttggcagtacatctacgtattagtcatcgctattaccatgtcgaggccacgttctgcttcactctccccatctcccccccctccccacccccaattttgtatttatttattttttaattattttgtgcagcgatgggggcggggggggggggcgcgcgccaggcggggcggggcggggcgaggggcggggcggggcgaggcggagaggtgcggcggcagccaatcagagcggcgcgctccgaaagtttccttttatggcgaggcggcggcggcggcggccctataaaaagcgaagcgcgcggcgggcgggagcaagcttcgtttagtgaaccgtcagatcgcctggagacgccatccacgctgttttgacctccatagaagacaccgggaccgatccagcctccgcggattcgaatcccggccgggaacggtgcattggaacgcggattccccgtgccaagagtgacgtaagtaccgcctatagagtctataggcccacaaaaaatgctttcttcttttaatatacttttttgtttatcttatttctaatactttccctaatctctttctttcagggcaataatgatacaatgtatcatgcctctttgcaccattctaaagaataacagtgataatttctgggttaaggcaatagcaatatttctgcatataaatatttctgcatataaattgtaactgatgtaagaggtttcatattgctaatagcagctacaatccagctaccattctgcttttattttatggttgggataaggctggattattctgagtccaagctaggcccttttgctaatcatgttcatacctcttatcttcctcccacagctcctgggcaacgtgctggtctgtgtgctggcccatcactttggcaaagaattgggattcgaaccggtgccgccaccatgggatggagctggatctttctctttctcctgtcaggaactacaggtgtcctctctgaggtccagctgcaacagtctggacctgagctggtgaagcctggggcttcagtgaagatatcctgcaagacttctggatacacattcactgaatacaccatacactgggtgaagcagagccatggagagagccttgagtggattggaggtattaatccaaacgatggtggtactatttacaaccagaagttcaagggcaaggccacattgactgtagacaagtcctccaaaacagcctacatggagctccgcagcctgacatctgaggattctgcagtcttttactgtgcaagagggccctccgccaggtttccttactggggccaagggactctggtcactgtctctgcaggtggtggtggtagcggcggcggcggctctggtggtggtggatccgatgttgtgatgacccagactccactcactttgtcggttaccattggacaaccagcctccatctcttgcaagtcaagtcagagcctcttagatagtgatggaaagacatatttgaattggttgttacagaggccaggccagtctccaaagcgcctaatctatctggtgtctaaactggactctggagtccctgacagattcactggcagtggatcagggacagatttcacactgaaaattagcagagtggaggctgaggatttgggagtttattattgctggcaaggtacacattttcctcggacgttcggtggaggcaccaagctggaaatcaaacggtacccatacgatgttccagattacgctagaaagaggcgagagggcagaggaagtcttctaacatgcggtgacgtggaggagaatcccggccctatgggatggagctggatctttctctttctcctgtcaggaactacaggtgtcctctctgaggtccagctgcaacagtctggacctgagctggtgaagcctggggcttcagtgaagatatcctgcaagacttctggatacacattcactgaatacaccatacactgggtgaagcagagccatggagagagccttgagtggattggaggtattaatccaaacgatggtggtactatttacaaccagaagttcaagggcaaggccacattgactgtagacaagtcctccaaaacagcctacatggagctccgcagcctgacatctgaggattctgcagtcttttactgtgcaagagggccctccgccaggtttccttactggggccaagggactctggtcactgtctctgcaggtggtggtggtagcggcggcggcggctctggtggtggtggatccgatgttgtgatgacccagactccactcactttgtcggttaccattggacaaccagcctccatctcttgcaagtcaagtcagagcctcttagatagtgatggaaagacatatttgaattggttgttacagaggccaggccagtctccaaagcgcctaatctatctggtgtctaaactggactctggagtccctgacagattcactggcagtggatcagggacagatttcacactgaaaattagcagagtggaggctgaggatttgggagtttattattgctggcaaggtacacattttcctcggacgttcggtggaggcaccaagctggaaatcaaacggtacccatacgatgttccagattacgctagaaagaggcgagagggcagaggaagtcttctaacatgcggtgacgtggaggagaatcccggccctatgggatggagctggatctttctctttctcctgtcaggaactacaggtgtcctctctgaggtccagctgcaacagtctggacctgagctggtgaagcctggggcttcagtgaagatatcctgcaagacttctggatacacattcactgaatacaccatacactgggtgaagcagagccatggagagagccttgagtggattggaggtattaatccaaacgatggtggtactatttacaaccagaagttcaagggcaaggccacattgactgtagacaagtcctccaaaacagcctacatggagctccgcagcctgacatctgaggattctgcagtcttttactgtgcaagagggccctccgccaggtttccttactggggccaagggactctggtcactgtctctgcaggtggtggtggtagcggcggcggcggctctggtggtggtggatccgatgttgtgatgacccagactccactcactttgtcggttaccattggacaaccagcctccatctcttgcaagtcaagtcagagcctcttagatagtgatggaaagacatatttgaattggttgttacagaggccaggccagtctccaaagcgcctaatctatctggtgtctaaactggactctggagtccctgacagattcactggcagtggatcagggacagatttcacactgaaaattagcagagtggaggctgaggatttgggagtttattattgctggcaaggtacacattttcctcggacgttcggtggaggcaccaagctggaaatcaaacggtacccatacgatgttccagattacgcttagtgacctgaggatgatctttttccctctgccaaaaattatggggacatcatgaagccccttgagcatctgacttctggctaataaaggaaatttattttcattgcaatagtgtgttggaattttttgtgtctctcactcgtcctaggatcgatgctacgtagataagtagcatggcgggttaatcattaactacagaggaacccctagtgatggagttggccactccctctctgcgcgctcgctcgctcactgaggccgggcgaccaaaggtcgcccgacgcccgggctttgcccgggcggcctcagtgagcgagcgagcgcgcagctgcctgcagg

SEQ ID NO: 2053 - DNA, 3510 bp, Artificial Sequence
  source: /note="Description of Artificial Sequence: Synthetic polynucleotide"
cctgcaggcagctgcgcgctcgctcgctcactgaggccgcccgggcaaagcccgggcgtcgggcgacctttggtcgcccggcctcagtgagcgagcgagcgcgcagagagggagtggccaactccatcactaggggttccttgtagttaatgattaacccgccatgctacttatctacgtagccatgcgtcgacataacgcgtcgacattgattattgactagttattaatagtaatcaattacggggtcattagttcatagcccatatatggagttccgcgttacataacttacggtaaatggcccgcctggctgaccgcccaacgacccccgcccattgacgtcaataatgacgtatgttcccatagtaacgccaatagggactttccattgacgtcaatgggtggagtatttacggtaaactgcccacttggcagtacatcaagtgtatcatatgccaagtacgccccctattgacgtcaatgacggtaaatggcccgcctggcattatgcccagtacatgaccttatgggactttcctacttggcagtacatctacgtattagtcatcgctattaccatgtcgaggccacgttctgcttcactctccccatctcccccccctccccacccccaattttgtatttatttattttttaattattttgtgcagcgatgggggcggggggggggggcgcgcgccaggcggggcggggcggggcgaggggcggggcggggcgaggcggagaggtgcggcggcagccaatcagagcggcgcgctccgaaagtttccttttatggcgaggcggcggcggcggcggccctataaaaagcgaagcgcgcggcgggcgggagcaagcttcgtttagtgaaccgtcagatcgcctggagacgccatccacgctgttttgacctccatagaagacaccgggaccgatccagcctccgcggattcgaatcccggccgggaacggtgcattggaacgcggattccccgtgccaagagtgacgtaagtaccgcctatagagtctataggcccacaaaaaatgctttcttcttttaatatacttttttgtttatcttatttctaatactttccctaatctctttctttcagggcaataatgatacaatgtatcatgcctctttgcaccattctaaagaataacagtgataatttctgggttaaggcaatagcaatatttctgcatataaatatttctgcatataaattgtaactgatgtaagaggtttcatattgctaatagcagctacaatccagctaccattctgcttttattttatggttgggataaggctggattattctgagtccaagctaggcccttttgctaatcatgttcatacctcttatcttcctcccacagctcctgggcaacgtgctggtctgtgtgctggcccatcactttggcaaagaattgggattcgaaccggtgccgccaccatgggatggagctggatctttctctttctcctgtcaggaactacaggtgtcctctctgaggtccagctgcaacagtctggacctgagctggtgaagcctggggcttcagtgaagatatcctgcaagacttctggatacacattcactgaatacaccatacactgggtgaagcagagccatggagagagccttgagtggattggaggtattaatccaaacgatggtggtactatttacaaccagaagttcaagggcaaggccacattgactgtagacaagtcctccaaaacagcctacatggagctccgcagcctgacatctgaggattctgcagtcttttactgtgcaagagggccctccgccaggtttccttactggggccaagggactctggtcactgtctctgcaggtggtggtggtagcggcggcggcggctctggtggtggtggatccgatgttgtgatgacccagactccactcactttgtcggttaccattggacaaccagcctccatctcttgcaagtcaagtcagagcctcttagatagtgatggaaagacatatttgaattggttgttacagaggccaggccagtctccaaagcgcctaatctatctggtgtctaaactggactctggagtccctgacagattcactggcagtggatcagggacagatttcacactgaaaattagcagagtggaggctgaggatttgggagtttattattgctggcaaggtacacattttcctcggacgttcggtggaggcaccaagctggaaatcaaacggtacccatacgatgttccagattacgctagaaagaggcgagagggcagaggaagtcttctaacatgcggtgacgtggaggagaatcccggccctatgggatggagctggatctttctctttctcctgtcaggaactacaggtgtcctctctgaggtccagctgcaacagtctggacctgagctggtgaagcctggggcttcagtgaagatatcctgcaagacttctggatacacattcactgaatacaccatacactgggtgaagcagagccatggagagagccttgagtggattggaggtattaatccaaacgatggtggtactatttacaaccagaagttcaagggcaaggccacattgactgtagacaagtcctccaaaacagcctacatggagctccgcagcctgacatctgaggattctgcagtcttttactgtgcaagagggccctccgccaggtttccttactggggccaagggactctggtcactgtctctgcaggtggtggtggtagcggcggcggcggctctggtggtggtggatccgatgttgtgatgacccagactccactcactttgtcggttaccattggacaaccagcctccatctcttgcaagtcaagtcagagcctcttagatagtgatggaaagacatatttgaattggttgttacagaggccaggccagtctccaaagcgcctaatctatctggtgtctaaactggactctggagtccctgacagattcactggcagtggatcagggacagatttcacactgaaaattagcagagtggaggctgaggatttgggagtttattattgctggcaaggtacacattttcctcggacgttcggtggaggcaccaagctggaaatcaaacggtacccatacgatgttccagattacgcttagtgacctgaggatgatctttttccctctgccaaaaattatggggacatcatgaagccccttgagcatctgacttctggctaataaaggaaatttattttcattgcaatagtgtgttggaattttttgtgtctctcactcgtcctaggatcgatgctacgtagataagtagcatggcgggttaatcattaactacagaggaacccctagtgatggagttggccactccctctctgcgcgctcgctcgctcactgaggccgggcgaccaaaggtcgcccgacgcccgggctttgcccgggcggcctcagtgagcgagcgagcgcgcagctgcctgcagg

SEQ ID NO: 2054 - DNA, 4131 bp, Artificial Sequence
  source: /note="Description of Artificial Sequence: Synthetic polynucleotide"
cctgcaggcagctgcgcgctcgctcgctcactgaggccgcccgggcaaagcccgggcgtcgggcgacctttggtcgcccggcctcagtgagcgagcgagcgcgcagagagggagtggccaactccatcactaggggttccttgtagttaatgattaacccgccatgctacttatctacgtagccatgcgtcgacataacgcgtcgacattgattattgactagttattaatagtaatcaattacggggtcattagttcatagcccatatatggagttccgcgttacataacttacggtaaatggcccgcctggctgaccgcccaacgacccccgcccattgacgtcaataatgacgtatgttcccatagtaacgccaatagggactttccattgacgtcaatgggtggagtatttacggtaaactgcccacttggcagtacatcaagtgtatcatatgccaagtacgccccctattgacgtcaatgacggtaaatggcccgcctggcattatgcccagtacatgaccttatgggactttcctacttggcagtacatctacgtattagtcatcgctattaccatgtcgaggccacgttctgcttcactctccccatctcccccccctccccacccccaattttgtatttatttattttttaattattttgtgcagcgatgggggcggggggggggggcgcgcgccaggcggggcggggcggggcgaggggcggggcggggcgaggcggagaggtgcggcggcagccaatcagagcggcgcgctccgaaagtttccttttatggcgaggcggcggcggcggcggccctataaaaagcgaagcgcgcggcgggcgggagcaagcttcgtttagtgaaccgtcagatcgcctggagacgccatccacgctgttttgacctccatagaagacaccgggaccgatccagcctccgcggattcgaatcccggccgggaacggtgcattggaacgcggattccccgtgccaagagtgacgtaagtaccgcctatagagtctataggcccacaaaaaatgctttcttcttttaatatacttttttgtttatcttatttctaatactttccctaatctctttctttcagggcaataatgatacaatgtatcatgcctctttgcaccattctaaagaataacagtgataatttctgggttaaggcaatagcaatatttctgcatataaatatttctgcatataaattgtaactgatgtaagaggtttcatattgctaatagcagctacaatccagctaccattctgcttttattttatggttgggataaggctggattattctgagtccaagctaggcccttttgctaatcatgttcatacctcttatcttcctcccacagctcctgggcaacgtgctggtctgtgtgctggcccatcactttggcaaagaattgggattcgaaccggtgccgccaccatgagtcctgcccagttcctgtttctgttagtgctctggattcgggaaaccaacggtgatgttgtgatgacccagactccactcactttgtcggttaccattggacaaccagcctccatctcttgcaagtcaagtcagagcctcttagatagtgatggaaagacatatttgaattggttgttacagaggccaggccagtctccaaagcgcctaatctatctggtgtctaaactggactctggagtccccgacagattcactggcagtggatcagggacagatttcacactgaaaattagcagagtggaggctgaggatttgggagtttattattgctggcaaggtacacattttcctcggacgttcggtggaggcaccaagctggaaatcaaacggggtggtggtggtagcggcggcggcggctctggtggtggtggatccgaggtccagctgcaacagtctggacctgagctggtgaagcctggggcttcagtgaagatatcctgcaagacttctggatacacattcactgaatacaccatacactgggtgaagcagagccatggagagagccttgagtggattggaggtattaatccaaacgatggtggtactatttacaaccagaagttcaagggcaaggccacattgactgtagacaagtcctccaaaacagcctacatggagctccgcagcctgacatctgaggattctgcagtcttttactgtgcaagagggccctccgccaggtttccttactggggccaagggactctggtcactgtctctgcatccggaggcggcggcagcgatgttgtgatgacccagactccactcactttgtcggttaccattggacaaccagcctccatctcttgcaagtcaagtcagagcctcttagatagtgatggaaagacatatttgaattggttgttacagaggccaggccagtctccaaagcgcctaatctatctggtgtctaaactggactctggagtccccgacagattcactggcagtggatcagggacagatttcacactgaaaattagcagagtggaggctgaggatttgggagtttattattgctggcaaggtacacattttcctcggacgttcggtggaggcaccaagctggaaatcaaacggggtggtggtggtagcggcggcggcggctctggtggtggtggatccgaggtccagctgcaacagtctggacctgagctggtgaagcctggggcttcagtgaagatatcctgcaagacttctggatacacattcactgaatacaccatacactgggtgaagcagagccatggagagagccttgagtggattggaggtattaatccaaacgatggtggtactatttacaaccagaagttcaagggcaaggccacattgactgtagacaagtcctccaaaacagcctacatggagctccgcagcctgacatctgaggattctgcagtcttttactgtgcaagagggccctccgccaggtttccttactggggccaagggactctggtcactgtctctgcatccggaggcggcggcagcgatgttgtgatgacccagactccactcactttgtcggttaccattggacaaccagcctccatctcttgcaagtcaagtcagagcctcttagatagtgatggaaagacatatttgaattggttgttacagaggccaggccagtctccaaagcgcctaatctatctggtgtctaaactggactctggagtccccgacagattcactggcagtggatcagggacagatttcacactgaaaattagcagagtggaggctgaggatttgggagtttattattgctggcaaggtacacattttcctcggacgttcggtggaggcaccaagctggaaatcaaacggggtggtggtggtagcggcggcggcggctctggtggtggtggatccgaggtccagctgcaacagtctggacctgagctggtgaagcctggggcttcagtgaagatatcctgcaagacttctggatacacattcactgaatacaccatacactgggtgaagcagagccatggagagagccttgagtggattggaggtattaatccaaacgatggtggtactatttacaaccagaagttcaagggcaaggccacattgactgtagacaagtcctccaaaacagcctacatggagctccgcagcctgacatctgaggattctgcagtcttttactgtgcaagagggccctccgccaggtttccttactggggccaagggactctggtcactgtctctgcatacccatacgatgttccagattacgcttagtgacctgaggatgatctttttccctctgccaaaaattatggggacatcatgaagccccttgagcatctgacttctggctaataaaggaaatttattttcattgcaatagtgtgttggaattttttgtgtctctcactcgtcctaggatcgatgctacgtagataagtagcatggcgggttaatcattaactacagaggaacccctagtgatggagttggccactccctctctgcgcgctcgctcgctcactgaggccgggcgaccaaaggtcgcccgacgcccgggctttgcccgggcggcctcagtgagcgagcgagcgcgcagctgcctgcagg

SEQ ID NO: 2055 - DNA, 3378 bp, Artificial Sequence
  source: /note="Description of Artificial Sequence: Synthetic polynucleotide"
cctgcaggcagctgcgcgctcgctcgctcactgaggccgcccgggcaaagcccgggcgtcgggcgacctttggtcgcccggcctcagtgagcgagcgagcgcgcagagagggagtggccaactccatcactaggggttccttgtagttaatgattaacccgccatgctacttatctacgtagccatgcgtcgacataacgcgtcgacattgattattgactagttattaatagtaatcaattacggggtcattagttcatagcccatatatggagttccgcgttacataacttacggtaaatggcccgcctggctgaccgcccaacgacccccgcccattgacgtcaataatgacgtatgttcccatagtaacgccaatagggactttccattgacgtcaatgggtggagtatttacggtaaactgcccacttggcagtacatcaagtgtatcatatgccaagtacgccccctattgacgtcaatgacggtaaatggcccgcctggcattatgcccagtacatgaccttatgggactttcctacttggcagtacatctacgtattagtcatcgctattaccatgtcgaggccacgttctgcttcactctccccatctcccccccctccccacccccaattttgtatttatttattttttaattattttgtgcagcgatgggggcggggggggggggcgcgcgccaggcggggcggggcggggcgaggggcggggcggggcgaggcggagaggtgcggcggcagccaatcagagcggcgcgctccgaaagtttccttttatggcgaggcggcggcggcggcggccctataaaaagcgaagcgcgcggcgggcgggagcaagcttcgtttagtgaaccgtcagatcgcctggagacgccatccacgctgttttgacctccatagaagacaccgggaccgatccagcctccgcggattcgaatcccggccgggaacggtgcattggaacgcggattccccgtgccaagagtgacgtaagtaccgcctatagagtctataggcccacaaaaaatgctttcttcttttaatatacttttttgtttatcttatttctaatactttccctaatctctttctttcagggcaataatgatacaatgtatcatgcctctttgcaccattctaaagaataacagtgataatttctgggttaaggcaatagcaatatttctgcatataaatatttctgcatataaattgtaactgatgtaagaggtttcatattgctaatagcagctacaatccagctaccattctgcttttattttatggttgggataaggctggattattctgagtccaagctaggcccttttgctaatcatgttcatacctcttatcttcctcccacagctcctgggcaacgtgctggtctgtgtgctggcccatcactttggcaaagaattgggattcgaaccggtgccgccaccatgagtcctgcccagttcctgtttctgttagtgctctggattcgggaaaccaacggtgatgttgtgatgacccagactccactcactttgtcggttaccattggacaaccagcctccatctcttgcaagtcaagtcagagcctcttagatagtgatggaaagacatatttgaattggttgttacagaggccaggccagtctccaaagcgcctaatctatctggtgtctaaactggactctggagtccccgacagattcactggcagtggatcagggacagatttcacactgaaaattagcagagtggaggctgaggatttgggagtttattattgctggcaaggtacacattttcctcggacgttcggtggaggcaccaagctggaaatcaaacggggtggtggtggtagcggcggcggcggctctggtggtggtggatccgaggtccagctgcaacagtctggacctgagctggtgaagcctggggcttcagtgaagatatcctgcaagacttctggatacacattcactgaatacaccatacactgggtgaagcagagccatggagagagccttgagtggattggaggtattaatccaaacgatggtggtactatttacaaccagaagttcaagggcaaggccacattgactgtagacaagtcctccaaaacagcctacatggagctccgcagcctgacatctgaggattctgcagtcttttactgtgcaagagggccctccgccaggtttccttactggggccaagggactctggtcactgtctctgcatccggaggcggcggcagcgatgttgtgatgacccagactccactcactttgtcggttaccattggacaaccagcctccatctcttgcaagtcaagtcagagcctcttagatagtgatggaaagacatatttgaattggttgttacagaggccaggccagtctccaaagcgcctaatctatctggtgtctaaactggactctggagtccccgacagattcactggcagtggatcagggacagatttcacactgaaaattagcagagtggaggctgaggatttgggagtttattattgctggcaaggtacacattttcctcggacgttcggtggaggcaccaagctggaaatcaaacggggtggtggtggtagcggcggcggcggctctggtggtggtggatccgaggtccagctgcaacagtctggacctgagctggtgaagcctggggcttcagtgaagatatcctgcaagacttctggatacacattcactgaatacaccatacactgggtgaagcagagccatggagagagccttgagtggattggaggtattaatccaaacgatggtggtactatttacaaccagaagttcaagggcaaggccacattgactgtagacaagtcctccaaaacagcctacatggagctccgcagcctgacatctgaggattctgcagtcttttactgtgcaagagggccctccgccaggtttccttactggggccaagggactctggtcactgtctctgcatacccatacgatgttccagattacgcttagtgacctgaggatgatctttttccctctgccaaaaattatggggacatcatgaagccccttgagcatctgacttctggctaataaaggaaatttattttcattgcaatagtgtgttggaattttttgtgtctctcactcgtcctaggatcgatgctacgtagataagtagcatggcgggttaatcattaactacagaggaacccctagtgatggagttggccactccctctctgcgcgctcgctcgctcactgaggccgggcgaccaaaggtcgcccgacgcccgggctttgcccgggcggcctcagtgagcgagcgagcgcgcagctgcctgcagg

SEQ ID NO: 2056 - DNA, 4395 bp, Artificial Sequence
  source: /note="Description of Artificial Sequence: Synthetic polynucleotide"
cctgcaggcagctgcgcgctcgctcgctcactgaggccgcccgggcaaagcccgggcgtcgggcgacctttggtcgcccggcctcagtgagcgagcgagcgcgcagagagggagtggccaactccatcactaggggttccttgtagttaatgattaacccgccatgctacttatctacgtagccatgcgtcgacataacgcgtcgacattgattattgactagttattaatagtaatcaattacggggtcattagttcatagcccatatatggagttccgcgttacataacttacggtaaatggcccgcctggctgaccgcccaacgacccccgcccattgacgtcaataatgacgtatgttcccatagtaacgccaatagggactttccattgacgtcaatgggtggagtatttacggtaaactgcccacttggcagtacatcaagtgtatcatatgccaagtacgccccctattgacgtcaatgacggtaaatggcccgcctggcattatgcccagtacatgaccttatgggactttcctacttggcagtacatctacgtattagtcatcgctattaccatgtcgaggccacgttctgcttcactctccccatctcccccccctccccacccccaattttgtatttatttattttttaattattttgtgcagcgatgggggcggggggggggggcgcgcgccaggcggggcggggcggggcgaggggcggggcggggcgaggcggagaggtgcggcggcagccaatcagagcggcgcgctccgaaagtttccttttatggcgaggcggcggcggcggcggccctataaaaagcgaagcgcgcggcgggcgggagcaagcttcgtttagtgaaccgtcagatcgcctggagacgccatccacgctgttttgacctccatagaagacaccgggaccgatccagcctccgcggattcgaatcccggccgggaacggtgcattggaacgcggattccccgtgccaagagtgacgtaagtaccgcctatagagtctataggcccacaaaaaatgctttcttcttttaatatacttttttgtttatcttatttctaatactttccctaatctctttctttcagggcaataatgatacaatgtatcatgcctctttgcaccattctaaagaataacagtgataatttctgggttaaggcaatagcaatatttctgcatataaatatttctgcatataaattgtaactgatgtaagaggtttcatattgctaatagcagctacaatccagctaccattctgcttttattttatggttgggataaggctggattattctgagtccaagctaggcccttttgctaatcatgttcatacctcttatcttcctcccacagctcctgggcaacgtgctggtctgtgtgctggcccatcactttggcaaagaattgggattcgaaccggtgccgccaccatgagtcctgcccagttcctgtttctgttagtgctctggattcgggaaaccaacggtgatgttgtgatgacccagactccactcactttgtcggttaccattggacaaccagcctccatctcttgcaagtcaagtcagagcctcttagatagtgatggaaagacatatttgaattggttgttacagaggccaggccagtctccaaagcgcctaatctatctggtgtctaaactggactctggagtccccgacagattcactggcagtggatcagggacagatttcacactgaaaattagcagagtggaggctgaggatttgggagtttattattgctggcaaggtacacattttcctcggacgttcggtggaggcaccaagctggaaatcaaacggggtggtggtggtagcggcggcggcggctctggtggtggtggatccgaggtccagctgcaacagtctggacctgagctggtgaagcctggggcttcagtgaagatatcctgcaagacttctggatacacattcactgaatacaccatacactgggtgaagcagagccatggagagagccttgagtggattggaggtattaatccaaacgatggtggtactatttacaaccagaagttcaagggcaaggccacattgactgtagacaagtcctccaaaacagcctacatggagctccgcagcctgacatctgaggattctgcagtcttttactgtgcaagagggccctccgccaggtttccttactggggccaagggactctggtcactgtctctgcatacccatacgatgttccagattacgctagaaagaggcgagagggcagaggaagtcttctaacatgcggtgacgtggaggagaatcccggccctatgagtcctgcccagttcctgtttctgttagtgctctggattcgggaaaccaacggtgatgttgtgatgacccagactccactcactttgtcggttaccattggacaaccagcctccatctcttgcaagtcaagtcagagcctcttagatagtgatggaaagacatatttgaattggttgttacagaggccaggccagtctccaaagcgcctaatctatctggtgtctaaactggactctggagtccccgacagattcactggcagtggatcagggacagatttcacactgaaaattagcagagtggaggctgaggatttgggagtttattattgctggcaaggtacacattttcctcggacgttcggtggaggcaccaagctggaaatcaaacggggtggtggtggtagcggcggcggcggctctggtggtggtggatccgaggtccagctgcaacagtctggacctgagctggtgaagcctggggcttcagtgaagatatcctgcaagacttctggatacacattcactgaatacaccatacactgggtgaagcagagccatggagagagccttgagtggattggaggtattaatccaaacgatggtggtactatttacaaccagaagttcaagggcaaggccacattgactgtagacaagtcctccaaaacagcctacatggagctccgcagcctgacatctgaggattctgcagtcttttactgtgcaagagggccctccgccaggtttccttactggggccaagggactctggtcactgtctctgcatacccatacgatgttccagattacgctagaaagaggcgagagggcagaggaagtcttctaacatgcggtgacgtggaggagaatcccggccctatgagtcctgcccagttcctgtttctgttagtgctctggattcgggaaaccaacggtgatgttgtgatgacccagactccactcactttgtcggttaccattggacaaccagcctccatctcttgcaagtcaagtcagagcctcttagatagtgatggaaagacatatttgaattggttgttacagaggccaggccagtctccaaagcgcctaatctatctggtgtctaaactggactctggagtccccgacagattcactggcagtggatcagggacagatttcacactgaaaattagcagagtggaggctgaggatttgggagtttattattgctggcaaggtacacattttcctcggacgttcggtggaggcaccaagctggaaatcaaacggggtggtggtggtagcggcggcggcggctctggtggtggtggatccgaggtccagctgcaacagtctggacctgagctggtgaagcctggggcttcagtgaagatatcctgcaagacttctggatacacattcactgaatacaccatacactgggtgaagcagagccatggagagagccttgagtggattggaggtattaatccaaacgatggtggtactatttacaaccagaagttcaagggcaaggccacattgactgtagacaagtcctccaaaacagcctacatggagctccgcagcctgacatctgaggattctgcagtcttttactgtgcaagagggccctccgccaggtttccttactggggccaagggactctggtcactgtctctgcatacccatacgatgttccagattacgcttagtgacctgaggatgatctttttccctctgccaaaaattatggggacatcatgaagccccttgagcatctgacttctggctaataaaggaaatttattttcattgcaatagtgtgttggaattttttgtgtctctcactcgtcctaggatcgatgctacgtagataagtagcatggcgggttaatcattaactacagaggaacccctagtgatggagttggccactccctctctgcgcgctcgctcgctcactgaggccgggcgaccaaaggtcgcccgacgcccgggctttgcccgggcggcctcagtgagcgagcgagcgcgcagctgcctgcagg

SEQ ID NO: 2057 - DNA, 3510 bp, Artificial Sequence
  source: /note="Description of Artificial Sequence: Synthetic polynucleotide"
cctgcaggcagctgcgcgctcgctcgctcactgaggccgcccgggcaaagcccgggcgtcgggcgacctttggtcgcccggcctcagtgagcgagcgagcgcgcagagagggagtggccaactccatcactaggggttccttgtagttaatgattaacccgccatgctacttatctacgtagccatgcgtcgacataacgcgtcgacattgattattgactagttattaatagtaatcaattacggggtcattagttcatagcccatatatggagttccgcgttacataacttacggtaaatggcccgcctggctgaccgcccaacgacccccgcccattgacgtcaataatgacgtatgttcccatagtaacgccaatagggactttccattgacgtcaatgggtggagtatttacggtaaactgcccacttggcagtacatcaagtgtatcatatgccaagtacgccccctattgacgtcaatgacggtaaatggcccgcctggcattatgcccagtacatgaccttatgggactttcctacttggcagtacatctacgtattagtcatcgctattaccatgtcgaggccacgttctgcttcactctccccatctcccccccctccccacccccaattttgtatttatttattttttaattattttgtgcagcgatgggggcggggggggggggcgcgcgccaggcggggcggggcggggcgaggggcggggcggggcgaggcggagaggtgcggcggcagccaatcagagcggcgcgctccgaaagtttccttttatggcgaggcggcggcggcggcggccctataaaaagcgaagcgcgcggcgggcgggagcaagcttcgtttagtgaaccgtcagatcgcctggagacgccatccacgctgttttgacctccatagaagacaccgggaccgatccagcctccgcggattcgaatcccggccgggaacggtgcattggaacgcggattccccgtgccaagagtgacgtaagtaccgcctatagagtctataggcccacaaaaaatgctttcttcttttaatatacttttttgtttatcttatttctaatactttccctaatctctttctttcagggcaataatgatacaatgtatcatgcctctttgcaccattctaaagaataacagtgataatttctgggttaaggcaatagcaatatttctgcatataaatatttctgcatataaattgtaactgatgtaagaggtttcatattgctaatagcagctacaatccagctaccattctgcttttattttatggttgggataaggctggattattctgagtccaagctaggcccttttgctaatcatgttcatacctcttatcttcctcccacagctcctgggcaacgtgctggtctgtgtgctggcccatcactttggcaaagaattgggattcgaaccggtgccgccaccatgagtcctgcccagttcctgtttctgttagtgctctggattcgggaaaccaacggtgatgttgtgatgacccagactccactcactttgtcggttaccattggacaaccagcctccatctcttgcaagtcaagtcagagcctcttagatagtgatggaaagacatatttgaattggttgttacagaggccaggccagtctccaaagcgcctaatctatctggtgtctaaactggactctggagtccccgacagattcactggcagtggatcagggacagatttcacactgaaaattagcagagtggaggctgaggatttgggagtttattattgctggcaaggtacacattttcctcggacgttcggtggaggcaccaagctggaaatcaaacggggtggtggtggtagcggcggcggcggctctggtggtggtggatccgaggtccagctgcaacagtctggacctgagctggtgaagcctggggcttcagtgaagatatcctgcaagacttctggatacacattcactgaatacaccatacactgggtgaagcagagccatggagagagccttgagtggattggaggtattaatccaaacgatggtggtactatttacaaccagaagttcaagggcaaggccacattgactgtagacaagtcctccaaaacagcctacatggagctccgcagcctgacatctgaggattctgcagtcttttactgtgcaagagggccctccgccaggtttccttactggggccaagggactctggtcactgtctctgcatacccatacgatgttccagattacgctagaaagaggcgagagggcagaggaagtcttctaacatgcggtgacgtggaggagaatcccggccctatgagtcctgcccagttcctgtttctgttagtgctctggattcgggaaaccaacggtgatgttgtgatgacccagactccactcactttgtcggttaccattggacaaccagcctccatctcttgcaagtcaagtcagagcctcttagatagtgatggaaagacatatttgaattggttgttacagaggccaggccagtctccaaagcgcctaatctatctggtgtctaaactggactctggagtccccgacagattcactggcagtggatcagggacagatttcacactgaaaattagcagagtggaggctgaggatttgggagtttattattgctggcaaggtacacattttcctcggacgttcggtggaggcaccaagctggaaatcaaacggggtggtggtggtagcggcggcggcggctctggtggtggtggatccgaggtccagctgcaacagtctggacctgagctggtgaagcctggggcttcagtgaagatatcctgcaagacttctggatacacattcactgaatacaccatacactgggtgaagcagagccatggagagagccttgagtggattggaggtattaatccaaacgatggtggtactatttacaaccagaagttcaagggcaaggccacattgactgtagacaagtcctccaaaacagcctacatggagctccgcagcctgacatctgaggattctgcagtcttttactgtgcaagagggccctccgccaggtttccttactggggccaagggactctggtcactgtctctgcatacccatacgatgttccagattacgcttagtgacctgaggatgatctttttccctctgccaaaaattatggggacatcatgaagccccttgagcatctgacttctggctaataaaggaaatttattttcattgcaatagtgtgttggaattttttgtgtctctcactcgtcctaggatcgatgctacgtagataagtagcatggcgggttaatcattaactacagaggaacccctagtgatggagttggccactccctctctgcgcgctcgctcgctcactgaggccgggcgaccaaaggtcgcccgacgcccgggctttgcccgggcggcctcagtgagcgagcgagcgcgcagctgcctgcagg

SEQ ID NO: 2058 - DNA, 4016 bp, Artificial Sequence
  source: /note="Description of Artificial Sequence: Synthetic polynucleotide"
ctgcgcgctcgctcgctcactgaggccgcccgggcaaagcccgggcgtcgggcgacctttggtcgcccggcctcagtgagcgagcgagcgcgcagagagggagtggccaactccatcactaggggttccttgtagttaatgattaacccgccatgctacttatctaccagggtaatggggatcctctagaactatagctagtcgacattgattattgactagttattaatagtaatcaattacggggtcattagttcatagcccatatatggagttccgcgttacataacttacggtaaatggcccgcctggctgaccgcccaacgacccccgcccattgacgtcaataatgacgtatgttcccatagtaacgccaatagggactttccattgacgtcaatgggtggagtatttacggtaaactgcccacttggcagtacatcaagtgtatcatatgccaagtacgccccctattgacgtcaatgacggtaaatggcccgcctggcattatgcccagtacatgaccttatgggactttcctacttggcagtacatctacgtattagtcatcgctattaccatgtcgaggccacgttctgcttcactctccccatctcccccccctccccacccccaattttgtatttatttattttttaattattttgtgcagcgatgggggcggggggggggggcgcgcgccaggcggggcggggcggggcgaggggcggggcggggcgaggcggagaggtgcggcggcagccaatcagagcggcgcgctccgaaagtttccttttatggcgaggcggcggcggcggcggccctataaaaagcgaagcgcgcggcgggcgggagcaagcttcgtttagtgaaccgtcagatcgcctggagacgccatccacgctgttttgacctccatagaagacaccgggaccgatccagcctccgcggattcgaatcccggccgggaacggtgcattggaacgcggattccccgtgccaagagtgacgtaagtaccgcctatagagtctataggcccacaaaaaatgctttcttcttttaatatacttttttgtttatcttatttctaatactttccctaatctctttctttcagggcaataatgatacaatgtatcatgcctctttgcaccattctaaagaataacagtgataatttctgggttaaggcaatagcaatatttctgcatataaatatttctgcatataaattgtaactgatgtaagaggtttcatattgctaatagcagctacaatccagctaccattctgcttttattttatggttgggataaggctggattattctgagtccaagctaggcccttttgctaatcatgttcatacctcttatcttcctcccacagctcctgggcaacgtgctggtctgtgtgctggcccatcactttggcaaagaattgggattcgaaccggtgccgccaccatgggatggagctggatctttctctttctcctgtcaggaactacaggtgtcctctctgaggtccagctgcaacagtctggacctgagctggtgaagcctggggcttcagtgaagatatcctgcaagacttctggatacacattcactgaatacaccatacactgggtgaagcagagccatggagagagccttgagtggattggaggtattaatccaaacgatggtggtactatttacaaccagaagttcaagggcaaggccacattgactgtagacaagtcctccaaaacagcctacatggagctccgcagcctgacatctgaggattctgcagtcttttactgtgcaagagggccctccgccaggtttccttactggggccaagggactctggtcactgtctctgcagccaaaacgacacccccatctgtctatccactggcccctggatctgctgcccaaactaactccatggtgaccctgggatgcctggtcaagggctatttccctgagccagtgacagtgacctggaactctggatccctgtccagcggtgtgcacaccttcccagctgtcctgcagtctgacctctacactctgagcagctcagtgactgtcccctccagcacctggcccagcgagaccgtcacctgcaacgttgcccacccggccagcagcaccaaggtggacaagaaaattgtgcccagggattgtggttgtaagccttgcatatgtacagtcccagaagtatcatctgtcttcatcttccccccaaagcccaaggatgtgctcaccattactctgactcctaaggtcacgtgtgttgtggtagacatcagcaaggatgatcccgaggtccagttcagctggtttgtagatgatgtggaggtgcacacagctcagacgcaaccccgggaggagcagttcaacagcactttccgctcagtcagtgaacttcccatcatgcaccaggactggctcaatggcaaggagttcaaatgcagggtcaacagtgcagctttccctgcccccatcgagaaaaccatctccaaaaccaaaggcagaccgaaggctccacaggtgtacaccattccacctcccaaggagcagatggccaaggataaagtcagtctgacctgcatgataacagacttcttccctgaagacattactgtggagtggcagtggaatgggcagccagcggagaactacaagaacactcagcccatcatggacacagatggctcttacttcgtctacagcaagctcaatgtgcagaagagcaactgggaggcaggaaatactttcacctgctctgtgttacatgagggcctgcacaaccaccatactgagaagagcctctcccactctcctggtggaagcggagtgaaacagactttgaattttgaccttctcaagttggcgggagacgtggagtccaaccctggacctatgagtcctgcccagttcctgtttctgttagtgctctggattcgggaaaccaacggtgatgttgtgatgacccagactccactcactttgtcggttaccattggacaaccagcctccatctcttgcaagtcaagtcagagcctcttagatagtgatggaaagacatatttgaattggttgttacagaggccaggccagtctccaaagcgcctaatctatctggtgtctaaactggactctggagtccctgacagattcactggcagtggatcagggacagatttcacactgaaaattagcagagtggaggctgaggatttgggagtttattattgctggcaaggtacacattttcctcggacgttcggtggaggcaccaagctggaaatcaaacgggctgatgctgcaccaactgtatccatcttcccaccatccagtgagcagttaacatctggaggtgcctcagtcgtgtgcttcttgaacaacttctaccccaaagacatcaatgtcaagtggaagattgatggcagtgaacgacaaaatggcgtcctgaacagttggactgatcaggacagcaaagacagcacctacagcatgagcagcaccctcacgttgaccaaggacgagtatgaacgacataacagctatacctgtgaggccactcacaagacatcaacttcacccattgtcaagagcttcaacaggaatgagtgttagtaactcgaggacggggtgaactacgcctgaggatccgatctttttccctctgccaaaaattatggggacatcatgaagccccttgagcatctgacttctggctaataaaggaaatttattttcattgcaatagtgtgttggaattttttgtgtctctcactcggaagcaattcgttgatctgaatttcgaccacccataatacccattaccctggtagataagtagcatggcgggttaatcattaactacaaggaacccctagtgatggagttggccactccctctctgcgcgctcgctcgctcactgaggccgggcgaccaaaggtcgcccgacgcccgggctttgcccgggcggcctcagtgagcgagcgagcgcgcag

SEQ ID NO: 2059 - DNA, 4016 bp, Artificial Sequence
  source: /note="Description of Artificial Sequence: Synthetic polynucleotide"
ctgcgcgctcgctcgctcactgaggccgcccgggcaaagcccgggcgtcgggcgacctttggtcgcccggcctcagtgagcgagcgagcgcgcagagagggagtggccaactccatcactaggggttccttgtagttaatgattaacccgccatgctacttatctaccagggtaatggggatcctctagaactatagctagtcgacattgattattgactagttattaatagtaatcaattacggggtcattagttcatagcccatatatggagttccgcgttacataacttacggtaaatggcccgcctggctgaccgcccaacgacccccgcccattgacgtcaataatgacgtatgttcccatagtaacgccaatagggactttccattgacgtcaatgggtggagtatttacggtaaactgcccacttggcagtacatcaagtgtatcatatgccaagtacgccccctattgacgtcaatgacggtaaatggcccgcctggcattatgcccagtacatgaccttatgggactttcctacttggcagtacatctacgtattagtcatcgctattaccatgtcgaggccacgttctgcttcactctccccatctcccccccctccccacccccaattttgtatttatttattttttaattattttgtgcagcgatgggggcggggggggggggcgcgcgccaggcggggcggggcggggcgaggggcggggcggggcgaggcggagaggtgcggcggcagccaatcagagcggcgcgctccgaaagtttccttttatggcgaggcggcggcggcggcggccctataaaaagcgaagcgcgcggcgggcgggagcaagcttcgtttagtgaaccgtcagatcgcctggagacgccatccacgctgttttgacctccatagaagacaccgggaccgatccagcctccgcggattcgaatcccggccgggaacggtgcattggaacgcggattccccgtgccaagagtgacgtaagtaccgcctatagagtctataggcccacaaaaaatgctttcttcttttaatatacttttttgtttatcttatttctaatactttccctaatctctttctttcagggcaataatgatacaatgtatcatgcctctttgcaccattctaaagaataacagtgataatttctgggttaaggcaatagcaatatttctgcatataaatatttctgcatataaattgtaactgatgtaagaggtttcatattgctaatagcagctacaatccagctaccattctgcttttattttatggttgggataaggctggattattctgagtccaagctaggcccttttgctaatcatgttcatacctcttatcttcctcccacagctcctgggcaacgtgctggtctgtgtgctggcccatcactttggcaaagaattgggattcgaaccggtgccgccaccatgagtcctgcccagttcctgtttctgttagtgctctggattcgggaaaccaacggtgatgttgtgatgacccagactccactcactttgtcggttaccattggacaaccagcctccatctcttgcaagtcaagtcagagcctcttagatagtgatggaaagacatatttgaattggttgttacagaggccaggccagtctccaaagcgcctaatctatctggtgtctaaactggactctggagtccctgacagattcactggcagtggatcagggacagatttcacactgaaaattagcagagtggaggctgaggatttgggagtttattattgctggcaaggtacacattttcctcggacgttcggtggaggcaccaagctggaaatcaaacgggctgatgctgcaccaactgtatccatcttcccaccatccagtgagcagttaacatctggaggtgcctcagtcgtgtgcttcttgaacaacttctaccccaaagacatcaatgtcaagtggaagattgatggcagtgaacgacaaaatggcgtcctgaacagttggactgatcaggacagcaaagacagcacctacagcatgagcagcaccctcacgttgaccaaggacgagtatgaacgacataacagctatacctgtgaggccactcacaagacatcaacttcacccattgtcaagagcttcaacaggaatgagtgtggaagcggagtgaaacagactttgaattttgaccttctcaagttggcgggagacgtggagtccaaccctggacctatgggatggagctggatctttctctttctcctgtcaggaactacaggtgtcctctctgaggtccagctgcaacagtctggacctgagctggtgaagcctggggcttcagtgaagatatcctgcaagacttctggatacacattcactgaatacaccatacactgggtgaagcagagccatggagagagccttgagtggattggaggtattaatccaaacgatggtggtactatttacaaccagaagttcaagggcaaggccacattgactgtagacaagtcctccaaaacagcctacatggagctccgcagcctgacatctgaggattctgcagtcttttactgtgcaagagggccctccgccaggtttccttactggggccaagggactctggtcactgtctctgcagccaaaacgacacccccatctgtctatccactggcccctggatctgctgcccaaactaactccatggtgaccctgggatgcctggtcaagggctatttccctgagccagtgacagtgacctggaactctggatccctgtccagcggtgtgcacaccttcccagctgtcctgcagtctgacctctacactctgagcagctcagtgactgtcccctccagcacctggcccagcgagaccgtcacctgcaacgttgcccacccggccagcagcaccaaggtggacaagaaaattgtgcccagggattgtggttgtaagccttgcatatgtacagtcccagaagtatcatctgtcttcatcttccccccaaagcccaaggatgtgctcaccattactctgactcctaaggtcacgtgtgttgtggtagacatcagcaaggatgatcccgaggtccagttcagctggtttgtagatgatgtggaggtgcacacagctcagacgcaaccccgggaggagcagttcaacagcactttccgctcagtcagtgaacttcccatcatgcaccaggactggctcaatggcaaggagttcaaatgcagggtcaacagtgcagctttccctgcccccatcgagaaaaccatctccaaaaccaaaggcagaccgaaggctccacaggtgtacaccattccacctcccaaggagcagatggccaaggataaagtcagtctgacctgcatgataacagacttcttccctgaagacattactgtggagtggcagtggaatgggcagccagcggagaactacaagaacactcagcccatcatggacacagatggctcttacttcgtctacagcaagctcaatgtgcagaagagcaactgggaggcaggaaatactttcacctgctctgtgttacatgagggcctgcacaaccaccatactgagaagagcctctcccactctcctggttagtaactcgaggacggggtgaactacgcctgaggatccgatctttttccctctgccaaaaattatggggacatcatgaagccccttgagcatctgacttctggctaataaaggaaatttattttcattgcaatagtgtgttggaattttttgtgtctctcactcggaagcaattcgttgatctgaatttcgaccacccataatacccattaccctggtagataagtagcatggcgggttaatcattaactacaaggaacccctagtgatggagttggccactccctctctgcgcgctcgctcgctcactgaggccgggcgaccaaaggtcgcccgacgcccgggctttgcccgggcggcctcagtgagcgagcgagcgcgcag

SEQ ID NO: 2060 - DNA, 3608 bp, Artificial Sequence
  source: /note="Description of Artificial Sequence: Synthetic polynucleotide"
ctgcgcgctcgctcgctcactgaggccgcccgggcaaagcccgggcgtcgggcgacctttggtcgcccggcctcagtgagcgagcgagcgcgcagagagggagtggccaactccatcactaggggttccttgtagttaatgattaacccgccatgctacttatctaccagggtaatggggacgcgtactataggatctaacatatcctggtgtggagtagcggacgctgctatgacagaggctcgggggcctgagctggctctgtgagctggggaggaggcagacagccaggccttgtctgcaagcagacctggcagcattgggctggccgccccccagggcctcctcttcatgcccagtgaatgactcaccttggcacagacacaatgttcggggtgggcacagtgcctgcttcccgccgcaccccagcccccctcaaatgccttccgagaagcccattgagcagggggcttgcattgcaccccagcctgacagcctggcatcttgggataaaagcagcacagccccctaggggctgcccttgctgtgtggcgccaccggcggtggagaacaaggctctattcagcctgtgcccaggaaaggggatcaggggatgcccaggcatggacagtgggtggcagggggggagaggagggctgtctgcttcccagaagtccaaggacacaaatgggtgaggggagagctctccccatagctgggctgcggcccaaccccaccccctcaggctatgccagggggtgttgccaggggcacccgggcatcgccagtctagcccactccttcataaagccctcgcatcccaggagcgagcagagccagagcaggttggagaggagacgcatcacctccgctgctcgcggggatcctctagcgggagcaagcttgaactgaaaaaccagaaagttaactggtaagtttagtctttttgtcttttatttcaggtcccggatccggtggtggtgcaaatcaaagaactgctcctcagtggatgttgcctttacttctaggcctgtacggaagtgttacttctgctctaaaagctgcggaattgtacccgcggccgatccaccggtgccgccaccatgagtcctgcccagttcctgtttctgttagtgctctggattcgggaaaccaacggtgatgttgtgatgacccagactccactcactttgtcggttaccattggacaaccagcctccatctcttgcaagtcaagtcagagcctcttagatagtgatggaaagacatatttgaattggttgttacagaggccaggccagtctccaaagcgcctaatctatctggtgtctaaactggactctggagtccctgacagattcactggcagtggatcagggacagatttcacactgaaaattagcagagtggaggctgaggatttgggagtttattattgctggcaaggtacacattttcctcggacgttcggtggaggcaccaagctggaaatcaaacgggctgatgctgcaccaactgtatccatcttcccaccatccagtgagcagttaacatctggaggtgcctcagtcgtgtgcttcttgaacaacttctaccccaaagacatcaatgtcaagtggaagattgatggcagtgaacgacaaaatggcgtcctgaacagttggactgatcaggacagcaaagacagcacctacagcatgagcagcaccctcacgttgaccaaggacgagtatgaacgacataacagctatacctgtgaggccactcacaagacatcaacttcacccattgtcaagagcttcaacaggaatgagtgtggaagcggagtgaaacagactttgaattttgaccttctcaagttggcgggagacgtggagtccaaccctggacctatgggatggagctggatctttctctttctcctgtcaggaactacaggtgtcctctctgaggtccagctgcaacagtctggacctgagctggtgaagcctggggcttcagtgaagatatcctgcaagacttctggatacacattcactgaatacaccatacactgggtgaagcagagccatggagagagccttgagtggattggaggtattaatccaaacgatggtggtactatttacaaccagaagttcaagggcaaggccacattgactgtagacaagtcctccaaaacagcctacatggagctccgcagcctgacatctgaggattctgcagtcttttactgtgcaagagggccctccgccaggtttccttactggggccaagggactctggtcactgtctctgcagccaaaacgacacccccatctgtctatccactggcccctggatctgctgcccaaactaactccatggtgaccctgggatgcctggtcaagggctatttccctgagccagtgacagtgacctggaactctggatccctgtccagcggtgtgcacaccttcccagctgtcctgcagtctgacctctacactctgagcagctcagtgactgtcccctccagcacctggcccagcgagaccgtcacctgcaacgttgcccacccggccagcagcaccaaggtggacaagaaaattgtgcccagggattgtggttgtaagccttgcatatgtacagtcccagaagtatcatctgtcttcatcttccccccaaagcccaaggatgtgctcaccattactctgactcctaaggtcacgtgtgttgtggtagacatcagcaaggatgatcccgaggtccagttcagctggtttgtagatgatgtggaggtgcacacagctcagacgcaaccccgggaggagcagttcaacagcactttccgctcagtcagtgaacttcccatcatgcaccaggactggctcaatggcaaggagttcaaatgcagggtcaacagtgcagctttccctgcccccatcgagaaaaccatctccaaaaccaaaggcagaccgaaggctccacaggtgtacaccattccacctcccaaggagcagatggccaaggataaagtcagtctgacctgcatgataacagacttcttccctgaagacattactgtggagtggcagtggaatgggcagccagcggagaactacaagaacactcagcccatcatggacacagatggctcttacttcgtctacagcaagctcaatgtgcagaagagcaactgggaggcaggaaatactttcacctgctctgtgttacatgagggcctgcacaaccaccatactgagaagagcctctcccactctcctggttagtaactcgaggacggggtgaactacgcctgaggatccgatctttttccctctgccaaaaattatggggacatcatgaagccccttgagcatctgacttctggctaataaaggaaatttattttcattgcaatagtgtgttggaattttttgtgtctctcactcggcctaggtagataagtagcatggcgggttaatcattaactacaaggaacccctagtgatggagttggccactccctctctgcgcgctcgctcgctcactgaggccgggcgaccaaaggtcgcccgacgcccgggctttgcccgggcggcctcagtgagcgagcgagcgcgcag

SEQ ID NO: 2061 - DNA, 3619 bp, Artificial Sequence
  source: /note="Description of Artificial Sequence: Synthetic polynucleotide"
ctgcgcgctcgctcgctcactgaggccgcccgggcaaagcccgggcgtcgggcgacctttggtcgcccggcctcagtgagcgagcgagcgcgcagagagggagtggccaactccatcactaggggttccttgtagttaatgattaacccgccatgctacttatctaccagggtaatggggatcctctagaactatagctagtcgacattgattattgactagttattaatagtaatcaattacggggtcattagttcatagcccatatatggagttccgcgttacataacttacggtaaatggcccgcctggctgaccgcccaacgacccccgcccattgacgtcaataatgacgtatgttcccatagtaacgccaatagggactttccattgacgtcaatgggtggagtatttacggtaaactgcccacttggcagtacatcaagtgtatcatatgccaagtacgccccctattgacgtcaatgacggtaaatggcccgcctggcattatgcccagtacatgaccttatgggactttcctacttggcagtacatctacgtattagtcatcgctattaccatgtcgaggccacgttctgcttcactctccccatctcccccccctccccacccccaattttgtatttatttattttttaattattttgtgcagcgatgggggcggggggggggggcgcgcgccaggcggggcggggcggggcgaggggcggggcggggcgaggcggagaggtgcggcggcagccaatcagagcggcgcgctccgaaagtttccttttatggcgaggcggcggcggcggcggccctataaaaagcgaagcgcgcggcgggcgggagcaagcttgaactgaaaaaccagaaagttaactggtaagtttagtctttttgtcttttatttcaggtcccggatccggtggtggtgcaaatcaaagaactgctcctcagtggatgttgcctttacttctaggcctgtacggaagtgttacttctgctctaaaagctgcggaattgtacccgcggccgatccaccggtgccgccaccatggaatggacctgggtctttctcttcctcctgtcagtaactgcaggtgtccactcccaggttcagctgcagcagtctggagctgagctgatgaagcctggggcctcagtgaagatatcctgcaaggctactggctacacattcagtaactactggatagagtgggtaaagcagaggcctggacatggccttgagtggattggagagattttacctggaagtgatagtattaagtacaatgagaatttcaagggcaaggccacattcactgcagatacatcctccaacacagcctacatgcaactcagcagcctgacatctgaggactctgccgtctattactgtgcaagaagggggaactacccagactactggggccaaggcaccactctcacagtctcctcagccaaaacgacacccccatctgtctatccactggcccctggatctgctgcccaaactaactccatggtgaccctgggatgcctggtcaagggctatttccctgagccagtgacagtgacctggaactctggatccctgtccagcggtgtgcacaccttcccagctgtcctgcagtctgacctctacactctgagcagctcagtgactgtcccctccagcacctggcccagcgagaccgtcacctgcaacgttgcccacccggccagcagcaccaaggtggacaagaaaattgtgcccagggattgtggttgtaagccttgcatatgtacagtcccagaagtatcatctgtcttcatcttccccccaaagcccaaggatgtgctcaccattactctgactcctaaggtcacgtgtgttgtggtagacatcagcaaggatgatcccgaggtccagttcagctggtttgtagatgatgtggaggtgcacacagctcagacgcaaccccgggaggagcagttcaacagcactttccgctcagtcagtgaacttcccatcatgcaccaggactggctcaatggcaaggagttcaaatgcagggtcaacagtgcagctttccctgcccccatcgagaaaaccatctccaaaaccaaaggcagaccgaaggctccacaggtgtacaccattccacctcccaaggagcagatggccaaggataaagtcagtctgacctgcatgataacagacttcttccctgaagacattactgtggagtggcagtggaatgggcagccagcggagaactacaagaacactcagcccatcatggacacagatggctcttacttcgtctacagcaagctcaatgtgcagaagagcaactgggaggcaggaaatactttcacctgctctgtgttacatgagggcctgcacaaccaccatactgagaagagcctctcccactctcctggtcgggccaagcggggaagcggagtgaaacagactttgaattttgaccttctcaagttggcgggagacgtggagtccaaccctggacctatgaagttgcctgttaggctgttggtgctgatgttctggattcctgcttccagcagtgatgttgtgatgacccaaactccactctccctgcctgtcagtcttggagatcaagcctccatctcttgcagatctagtcagagccttgtacacagtaatggaaacacctatttacattggtacctgcagaagccaggccagtctccaaagctcctgatctacaaagtttccaaccgattttctggggtcccagacaggttcagtggcagtggatcagggacagatttcacactcaagatcagcagagtggaggctgaggatctgggagtttatttctgctctcaaagtacacatgttccgctcacgttcggtgctgggaccaagctggagctgaaacgggctgatgctgcaccaactgtatccatcttcccaccatccagtgagcagttaacatctggaggtgcctcagtcgtgtgcttcttgaacaacttctaccccaaagacatcaatgtcaagtggaagattgatggcagtgaacgacaaaatggcgtcctgaacagttggactgatcaggacagcaaagacagcacctacagcatgagcagcaccctcacgttgaccaaggacgagtatgaacgacataacagctatacctgtgaggccactcacaagacatcaacttcacccattgtcaagagcttcaacaggaatgagtgttagtaactcgaggacggggtgaactacgcctgaggatccgatctttttccctctgccaaaaattatggggacatcatgaagccccttgagcatctgacttctggctaataaaggaaatttattttcattgcaatagtgtgttggaattttttgtgtctctcactcggaagcaattcgttgatctgaatttcgaccacccataatacccattaccctggtagataagtagcatggcgggttaatcattaactacaaggaacccctagtgatggagttggccactccctctctgcgcgctcgctcgctcactgaggccgggcgaccaaaggtcgcccgacgcccgggctttgcccgggcggcctcagtgagcgagcgagcgcgcag

SEQ ID NO: 2062 - DNA, 3610 bp, Artificial Sequence
  source: /note="Description of Artificial Sequence: Synthetic polynucleotide"
ctgcgcgctcgctcgctcactgaggccgcccgggcaaagcccgggcgtcgggcgacctttggtcgcccggcctcagtgagcgagcgagcgcgcagagagggagtggccaactccatcactaggggttccttgtagttaatgattaacccgccatgctacttatctaccagggtaatggggatcctctagaactatagctagtcgacattgattattgactagttattaatagtaatcaattacggggtcattagttcatagcccatatatggagttccgcgttacataacttacggtaaatggcccgcctggctgaccgcccaacgacccccgcccattgacgtcaataatgacgtatgttcccatagtaacgccaatagggactttccattgacgtcaatgggtggagtatttacggtaaactgcccacttggcagtacatcaagtgtatcatatgccaagtacgccccctattgacgtcaatgacggtaaatggcccgcctggcattatgcccagtacatgaccttatgggactttcctacttggcagtacatctacgtattagtcatcgctattaccatgtcgaggccacgttctgcttcactctccccatctcccccccctccccacccccaattttgtatttatttattttttaattattttgtgcagcgatgggggcggggggggggggcgcgcgccaggcggggcggggcggggcgaggggcggggcggggcgaggcggagaggtgcggcggcagccaatcagagcggcgcgctccgaaagtttccttttatggcgaggcggcggcggcggcggccctataaaaagcgaagcgcgcggcgggcgggagcaagcttgaactgaaaaaccagaaagttaactggtaagtttagtctttttgtcttttatttcaggtcccggatccggtggtggtgcaaatcaaagaactgctcctcagtggatgttgcctttacttctaggcctgtacggaagtgttacttctgctctaaaagctgcggaattgtacccgcggccgatccaccggtgccgccaccatggaatggacctgggtctttctcttcctcctgtcagtaactgcaggtgtccactcccaggttcagctgcagcagtctggagctgagctgatgaagcctggggcctcagtgaagatatcctgcaaggctactggctacacattcagtaactactggatagagtgggtaaagcagaggcctggacatggccttgagtggattggagagattttacctggaagtgatagtattaagtacaatgagaatttcaagggcaaggccacattcactgcagatacatcctccaacacagcctacatgcaactcagcagcctgacatctgaggactctgccgtctattactgtgcaagaagggggaactacccagactactggggccaaggcaccactctcacagtctcctcagccaaaacgacacccccatctgtctatccactggcccctggatctgctgcccaaactaactccatggtgaccctgggatgcctggtcaagggctatttccctgagccagtgacagtgacctggaactctggatccctgtccagcggtgtgcacaccttcccagctgtcctgcagtctgacctctacactctgagcagctcagtgactgtcccctccagcacctggcccagcgagaccgtcacctgcaacgttgcccacccggccagcagcaccaaggtggacaagaaaattgtgcccagggattgtggttgtaagccttgcatatgtacagtcccagaagtatcatctgtcttcatcttccccccaaagcccaaggatgtgctcaccattactctgactcctaaggtcacgtgtgttgtggtagacatcagcaaggatgatcccgaggtccagttcagctggtttgtagatgatgtggaggtgcacacagctcagacgcaaccccgggaggagcagttcaacagcactttccgctcagtcagtgaacttcccatcatgcaccaggactggctcaatggcaaggagttcaaatgcagggtcaacagtgcagctttccctgcccccatcgagaaaaccatctccaaaaccaaaggcagaccgaaggctccacaggtgtacaccattccacctcccaaggagcagatggccaaggataaagtcagtctgacctgcatgataacagacttcttccctgaagacattactgtggagtggcagtggaatgggcagccagcggagaactacaagaacactcagcccatcatggacacagatggctcttacttcgtctacagcaagctcaatgtgcagaagagcaactgggaggcaggaaatactttcacctgctctgtgttacatgagggcctgcacaaccaccatactgagaagagcctctcccactctcctggtcgggccaagcggggaagcggagctactaacttcagcctgctgaagcaggctggagacgtggaggagaaccctggacctatgaagttgcctgttaggctgttggtgctgatgttctggattcctgcttccagcagtgatgttgtgatgacccaaactccactctccctgcctgtcagtcttggagatcaagcctccatctcttgcagatctagtcagagccttgtacacagtaatggaaacacctatttacattggtacctgcagaagccaggccagtctccaaagctcctgatctacaaagtttccaaccgattttctggggtcccagacaggttcagtggcagtggatcagggacagatttcacactcaagatcagcagagtggaggctgaggatctgggagtttatttctgctctcaaagtacacatgttccgctcacgttcggtgctgggaccaagctggagctgaaacgggctgatgctgcaccaactgtatccatcttcccaccatccagtgagcagttaacatctggaggtgcctcagtcgtgtgcttcttgaacaacttctaccccaaagacatcaatgtcaagtggaagattgatggcagtgaacgacaaaatggcgtcctgaacagttggactgatcaggacagcaaagacagcacctacagcatgagcagcaccctcacgttgaccaaggacgagtatgaacgacataacagctatacctgtgaggccactcacaagacatcaacttcacccattgtcaagagcttcaacaggaatgagtgttagtaactcgaggacggggtgaactacgcctgaggatccgatctttttccctctgccaaaaattatggggacatcatgaagccccttgagcatctgacttctggctaataaaggaaatttattttcattgcaatagtgtgttggaattttttgtgtctctcactcggaagcaattcgttgatctgaatttcgaccacccataatacccattaccctggtagataagtagcatggcgggttaatcattaactacaaggaacccctagtgatggagttggccactccctctctgcgcgctcgctcgctcactgaggccgggcgaccaaaggtcgcccgacgcccgggctttgcccgggcggcctcagtgagcgagcgagcgcgcag

SEQ ID NO: 2063 - DNA, 3607 bp, Artificial Sequence
  source: /note="Description of Artificial Sequence: Synthetic polynucleotide"
ctgcgcgctcgctcgctcactgaggccgcccgggcaaagcccgggcgtcgggcgacctttggtcgcccggcctcagtgagcgagcgagcgcgcagagagggagtggccaactccatcactaggggttccttgtagttaatgattaacccgccatgctacttatctaccagggtaatggggatcctctagaactatagctagtcgacattgattattgactagttattaatagtaatcaattacggggtcattagttcatagcccatatatggagttccgcgttacataacttacggtaaatggcccgcctggctgaccgcccaacgacccccgcccattgacgtcaataatgacgtatgttcccatagtaacgccaatagggactttccattgacgtcaatgggtggagtatttacggtaaactgcccacttggcagtacatcaagtgtatcatatgccaagtacgccccctattgacgtcaatgacggtaaatggcccgcctggcattatgcccagtacatgaccttatgggactttcctacttggcagtacatctacgtattagtcatcgctattaccatgtcgaggccacgttctgcttcactctccccatctcccccccctccccacccccaattttgtatttatttattttttaattattttgtgcagcgatgggggcggggggggggggcgcgcgccaggcggggcggggcggggcgaggggcggggcggggcgaggcggagaggtgcggcggcagccaatcagagcggcgcgctccgaaagtttccttttatggcgaggcggcggcggcggcggccctataaaaagcgaagcgcgcggcgggcgggagcaagcttgaactgaaaaaccagaaagttaactggtaagtttagtctttttgtcttttatttcaggtcccggatccggtggtggtgcaaatcaaagaactgctcctcagtggatgttgcctttacttctaggcctgtacggaagtgttacttctgctctaaaagctgcggaattgtacccgcggccgatccaccggtgccgccaccatggaatggacctgggtctttctcttcctcctgtcagtaactgcaggtgtccactcccaggttcagctgcagcagtctggagctgagctgatgaagcctggggcctcagtgaagatatcctgcaaggctactggctacacattcagtaactactggatagagtgggtaaagcagaggcctggacatggccttgagtggattggagagattttacctggaagtgatagtattaagtacaatgagaatttcaagggcaaggccacattcactgcagatacatcctccaacacagcctacatgcaactcagcagcctgacatctgaggactctgccgtctattactgtgcaagaagggggaactacccagactactggggccaaggcaccactctcacagtctcctcagccaaaacgacacccccatctgtctatccactggcccctggatctgctgcccaaactaactccatggtgaccctgggatgcctggtcaagggctatttccctgagccagtgacagtgacctggaactctggatccctgtccagcggtgtgcacaccttcccagctgtcctgcagtctgacctctacactctgagcagctcagtgactgtcccctccagcacctggcccagcgagaccgtcacctgcaacgttgcccacccggccagcagcaccaaggtggacaagaaaattgtgcccagggattgtggttgtaagccttgcatatgtacagtcccagaagtatcatctgtcttcatcttccccccaaagcccaaggatgtgctcaccattactctgactcctaaggtcacgtgtgttgtggtagacatcagcaaggatgatcccgaggtccagttcagctggtttgtagatgatgtggaggtgcacacagctcagacgcaaccccgggaggagcagttcaacagcactttccgctcagtcagtgaacttcccatcatgcaccaggactggctcaatggcaaggagttcaaatgcagggtcaacagtgcagctttccctgcccccatcgagaaaaccatctccaaaaccaaaggcagaccgaaggctccacaggtgtacaccattccacctcccaaggagcagatggccaaggataaagtcagtctgacctgcatgataacagacttcttccctgaagacattactgtggagtggcagtggaatgggcagccagcggagaactacaagaacactcagcccatcatggacacagatggctcttacttcgtctacagcaagctcaatgtgcagaagagcaactgggaggcaggaaatactttcacctgctctgtgttacatgagggcctgcacaaccaccatactgagaagagcctctcccactctcctggtggaagcggagtgaaacagactttgaattttgaccttctcaagttggcgggagacgtggagtccaaccctggacctatgaagttgcctgttaggctgttggtgctgatgttctggattcctgcttccagcagtgatgttgtgatgacccaaactccactctccctgcctgtcagtcttggagatcaagcctccatctcttgcagatctagtcagagccttgtacacagtaatggaaacacctatttacattggtacctgcagaagccaggccagtctccaaagctcctgatctacaaagtttccaaccgattttctggggtcccagacaggttcagtggcagtggatcagggacagatttcacactcaagatcagcagagtggaggctgaggatctgggagtttatttctgctctcaaagtacacatgttccgctcacgttcggtgctgggaccaagctggagctgaaacgggctgatgctgcaccaactgtatccatcttcccaccatccagtgagcagttaacatctggaggtgcctcagtcgtgtgcttcttgaacaacttctaccccaaagacatcaatgtcaagtggaagattgatggcagtgaacgacaaaatggcgtcctgaacagttggactgatcaggacagcaaagacagcacctacagcatgagcagcaccctcacgttgaccaaggacgagtatgaacgacataacagctatacctgtgaggccactcacaagacatcaacttcacccattgtcaagagcttcaacaggaatgagtgttagtaactcgaggacggggtgaactacgcctgaggatccgatctttttccctctgccaaaaattatggggacatcatgaagccccttgagcatctgacttctggctaataaaggaaatttattttcattgcaatagtgtgttggaattttttgtgtctctcactcggaagcaattcgttgatctgaatttcgaccacccataatacccattaccctggtagataagtagcatggcgggttaatcattaactacaaggaacccctagtgatggagttggccactccctctctgcgcgctcgctcgctcactgaggccgggcgaccaaaggtcgcccgacgcccgggctttgcccgggcggcctcagtgagcgagcgagcgcgcag

SEQ ID NO: 2064 - DNA, 4158 bp, Artificial Sequence
  source: /note="Description of Artificial Sequence: Synthetic polynucleotide"
ctgcgcgctcgctcgctcactgaggccgcccgggcaaagcccgggcgtcgggcgacctttggtcgcccggcctcagtgagcgagcgagcgcgcagagagggagtggccaactccatcactaggggttccttgtagttaatgattaacccgccatgctacttatctaccagggtaatggggatcctctagaactatagctagtcgacattgattattgactagttattaatagtaatcaattacggggtcattagttcatagcccatatatggagttccgcgttacataacttacggtaaatggcccgcctggctgaccgcccaacgacccccgcccattgacgtcaataatgacgtatgttcccatagtaacgccaatagggactttccattgacgtcaatgggtggagtatttacggtaaactgcccacttggcagtacatcaagtgtatcatatgccaagtacgccccctattgacgtcaatgacggtaaatggcccgcctggcattatgcccagtacatgaccttatgggactttcctacttggcagtacatctacgtattagtcatcgctattaccatgtcgaggccacgttctgcttcactctccccatctcccccccctccccacccccaattttgtatttatttattttttaattattttgtgcagcgatgggggcggggggggggggcgcgcgccaggcggggcggggcggggcgaggggcggggcggggcgaggcggagaggtgcggcggcagccaatcagagcggcgcgctccgaaagtttccttttatggcgaggcggcggcggcggcggccctataaaaagcgaagcgcgcggcgggcgggagcaagcttgaactgaaaaaccagaaagttaactggtaagtttagtctttttgtcttttatttcaggtcccggatccggtggtggtgcaaatcaaagaactgctcctcagtggatgttgcctttacttctaggcctgtacggaagtgttacttctgctctaaaagctgcggaattgtacccgcggccgatccaccggtgccgccaccatggaatggacctgggtctttctcttcctcctgtcagtaactgcaggtgtccactcccaggttcagctgcagcagtctggagctgagctgatgaagcctggggcctcagtgaagatatcctgcaaggctactggctacacattcagtaactactggatagagtgggtaaagcagaggcctggacatggccttgagtggattggagagattttacctggaagtgatagtattaagtacaatgagaatttcaagggcaaggccacattcactgcagatacatcctccaacacagcctacatgcaactcagcagcctgacatctgaggactctgccgtctattactgtgcaagaagggggaactacccagactactggggccaaggcaccactctcacagtctcctcagccaaaacgacacccccatctgtctatccactggcccctggatctgctgcccaaactaactccatggtgaccctgggatgcctggtcaagggctatttccctgagccagtgacagtgacctggaactctggatccctgtccagcggtgtgcacaccttcccagctgtcctgcagtctgacctctacactctgagcagctcagtgactgtcccctccagcacctggcccagcgagaccgtcacctgcaacgttgcccacccggccagcagcaccaaggtggacaagaaaattgtgcccagggattgtggttgtaagccttgcatatgtacagtcccagaagtatcatctgtcttcatcttccccccaaagcccaaggatgtgctcaccattactctgactcctaaggtcacgtgtgttgtggtagacatcagcaaggatgatcccgaggtccagttcagctggtttgtagatgatgtggaggtgcacacagctcagacgcaaccccgggaggagcagttcaacagcactttccgctcagtcagtgaacttcccatcatgcaccaggactggctcaatggcaaggagttcaaatgcagggtcaacagtgcagctttccctgcccccatcgagaaaaccatctccaaaaccaaaggcagaccgaaggctccacaggtgtacaccattccacctcccaaggagcagatggccaaggataaagtcagtctgacctgcatgataacagacttcttccctgaagacattactgtggagtggcagtggaatgggcagccagcggagaactacaagaacactcagcccatcatggacacagatggctcttacttcgtctacagcaagctcaatgtgcagaagagcaactgggaggcaggaaatactttcacctgctctgtgttacatgagggcctgcacaaccaccatactgagaagagcctctcccactctcctggttagtaacgaattccgcccctctcccccccccccctctccctcccccccccctaacgttactggccgaagccgcttggaataaggccggtgtgcgtttgtctatatgttattttccaccatattgccgtcttttggcaatgtgagggcccggaaacctggccctgtcttcttgacgagcattcctaggggtctttcccctctcgccaaaggaatgcaaggtctgttgaatgtcgtgaaggaagcagttcctctggaagcttcttgaagacaaacaacgtctgtagcgaccctttgcaggcagcggaaccccccacctggcgacaggtgcctctgcggccaaaagccacgtgtataagatacacctgcaaaggcggcacaaccccagtgccacgttgtgagttggatagttgtggaaagagtcaaatggctctcctcaagcgtattcaacaaggggctgaaggatgcccagaaggtaccccattgtatgggatctgatctggggcctcggtgcacatgctttacatgtgtttagtcgaggttaaaaaaacgtctaggccccccgaaccacggggacgtggttttcctttgaaaaacacgatgataatatggccacaaccgccgccaccatgaagttgcctgttaggctgttggtgctgatgttctggattcctgcttccagcagtgatgttgtgatgacccaaactccactctccctgcctgtcagtcttggagatcaagcctccatctcttgcagatctagtcagagccttgtacacagtaatggaaacacctatttacattggtacctgcagaagccaggccagtctccaaagctcctgatctacaaagtttccaaccgattttctggggtcccagacaggttcagtggcagtggatcagggacagatttcacactcaagatcagcagagtggaggctgaggatctgggagtttatttctgctctcaaagtacacatgttccgctcacgttcggtgctgggaccaagctggagctgaaacgggctgatgctgcaccaactgtatccatcttcccaccatccagtgagcagttaacatctggaggtgcctcagtcgtgtgcttcttgaacaacttctaccccaaagacatcaatgtcaagtggaagattgatggcagtgaacgacaaaatggcgtcctgaacagttggactgatcaggacagcaaagacagcacctacagcatgagcagcaccctcacgttgaccaaggacgagtatgaacgacataacagctatacctgtgaggccactcacaagacatcaacttcacccattgtcaagagcttcaacaggaatgagtgttagtaactcgaggacggggtgaactacgcctgaggatccgatctttttccctctgccaaaaattatggggacatcatgaagccccttgagcatctgacttctggctaataaaggaaatttattttcattgcaatagtgtgttggaattttttgtgtctctcactcggaagcaattcgttgatctgaatttcgaccacccataatacccattaccctggtagataagtagcatggcgggttaatcattaactacaaggaacccctagtgatggagttggccactccctctctgcgcgctcgctcgctcactgaggccgggcgaccaaaggtcgcccgacgcccgggctttgcccgggcggcctcagtgagcgagcgagcgcgcag

SEQ ID NO: 2065 - DNA, 3598 bp, Artificial Sequence
  source: /note="Description of Artificial Sequence: Synthetic polynucleotide"
ctgcgcgctcgctcgctcactgaggccgcccgggcaaagcccgggcgtcgggcgacctttggtcgcccggcctcagtgagcgagcgagcgcgcagagagggagtggccaactccatcactaggggttccttgtagttaatgattaacccgccatgctacttatctaccagggtaatggggatcctctagaactatagctagtcgacattgattattgactagttattaatagtaatcaattacggggtcattagttcatagcccatatatggagttccgcgttacataacttacggtaaatggcccgcctggctgaccgcccaacgacccccgcccattgacgtcaataatgacgtatgttcccatagtaacgccaatagggactttccattgacgtcaatgggtggagtatttacggtaaactgcccacttggcagtacatcaagtgtatcatatgccaagtacgccccctattgacgtcaatgacggtaaatggcccgcctggcattatgcccagtacatgaccttatgggactttcctacttggcagtacatctacgtattagtcatcgctattaccatgtcgaggccacgttctgcttcactctccccatctcccccccctccccacccccaattttgtatttatttattttttaattattttgtgcagcgatgggggcggggggggggggcgcgcgccaggcggggcggggcggggcgaggggcggggcggggcgaggcggagaggtgcggcggcagccaatcagagcggcgcgctccgaaagtttccttttatggcgaggcggcggcggcggcggccctataaaaagcgaagcgcgcggcgggcgggagcaagcttgaactgaaaaaccagaaagttaactggtaagtttagtctttttgtcttttatttcaggtcccggatccggtggtggtgcaaatcaaagaactgctcctcagtggatgttgcctttacttctaggcctgtacggaagtgttacttctgctctaaaagctgcggaattgtacccgcggccgatccaccggtgccgccaccatggaatggacctgggtctttctcttcctcctgtcagtaactgcaggtgtccactcccaggttcagctgcagcagtctggagctgagctgatgaagcctggggcctcagtgaagatatcctgcaaggctactggctacacattcagtaactactggatagagtgggtaaagcagaggcctggacatggccttgagtggattggagagattttacctggaagtgatagtattaagtacaatgagaatttcaagggcaaggccacattcactgcagatacatcctccaacacagcctacatgcaactcagcagcctgacatctgaggactctgccgtctattactgtgcaagaagggggaactacccagactactggggccaaggcaccactctcacagtctcctcagccaaaacgacacccccatctgtctatccactggcccctggatctgctgcccaaactaactccatggtgaccctgggatgcctggtcaagggctatttccctgagccagtgacagtgacctggaactctggatccctgtccagcggtgtgcacaccttcccagctgtcctgcagtctgacctctacactctgagcagctcagtgactgtcccctccagcacctggcccagcgagaccgtcacctgcaacgttgcccacccggccagcagcaccaaggtggacaagaaaattgtgcccagggattgtggttgtaagccttgcatatgtacagtcccagaagtatcatctgtcttcatcttccccccaaagcccaaggatgtgctcaccattactctgactcctaaggtcacgtgtgttgtggtagacatcagcaaggatgatcccgaggtccagttcagctggtttgtagatgatgtggaggtgcacacagctcagacgcaaccccgggaggagcagttcaacagcactttccgctcagtcagtgaacttcccatcatgcaccaggactggctcaatggcaaggagttcaaatgcagggtcaacagtgcagctttccctgcccccatcgagaaaaccatctccaaaaccaaaggcagaccgaaggctccacaggtgtacaccattccacctcccaaggagcagatggccaaggataaagtcagtctgacctgcatgataacagacttcttccctgaagacattactgtggagtggcagtggaatgggcagccagcggagaactacaagaacactcagcccatcatggacacagatggctcttacttcgtctacagcaagctcaatgtgcagaagagcaactgggaggcaggaaatactttcacctgctctgtgttacatgagggcctgcacaaccaccatactgagaagagcctctcccactctcctggtggaagcggagctactaacttcagcctgctgaagcaggctggagacgtggaggagaaccctggacctatgaagttgcctgttaggctgttggtgctgatgttctggattcctgcttccagcagtgatgttgtgatgacccaaactccactctccctgcctgtcagtcttggagatcaagcctccatctcttgcagatctagtcagagccttgtacacagtaatggaaacacctatttacattggtacctgcagaagccaggccagtctccaaagctcctgatctacaaagtttccaaccgattttctggggtcccagacaggttcagtggcagtggatcagggacagatttcacactcaagatcagcagagtggaggctgaggatctgggagtttatttctgctctcaaagtacacatgttccgctcacgttcggtgctgggaccaagctggagctgaaacgggctgatgctgcaccaactgtatccatcttcccaccatccagtgagcagttaacatctggaggtgcctcagtcgtgtgcttcttgaacaacttctaccccaaagacatcaatgtcaagtggaagattgatggcagtgaacgacaaaatggcgtcctgaacagttggactgatcaggacagcaaagacagcacctacagcatgagcagcaccctcacgttgaccaaggacgagtatgaacgacataacagctatacctgtgaggccactcacaagacatcaacttcacccattgtcaagagcttcaacaggaatgagtgttagtaactcgaggacggggtgaactacgcctgaggatccgatctttttccctctgccaaaaattatggggacatcatgaagccccttgagcatctgacttctggctaataaaggaaatttattttcattgcaatagtgtgttggaattttttgtgtctctcactcggaagcaattcgttgatctgaatttcgaccacccataatacccattaccctggtagataagtagcatggcgggttaatcattaactacaaggaacccctagtgatggagttggccactccctctctgcgcgctcgctcgctcactgaggccgggcgaccaaaggtcgcccgacgcccgggctttgcccgggcggcctcagtgagcgagcgagcgcgcag

SEQ ID NO: 2066 - DNA, 3622 bp, Artificial Sequence
  source: /note="Description of Artificial Sequence: Synthetic polynucleotide"
ctgcgcgctcgctcgctcactgaggccgcccgggcaaagcccgggcgtcgggcgacctttggtcgcccggcctcagtgagcgagcgagcgcgcagagagggagtggccaactccatcactaggggttccttgtagttaatgattaacccgccatgctacttatctaccagggtaatggggatcctctagaactatagctagtcgacattgattattgactagttattaatagtaatcaattacggggtcattagttcatagcccatatatggagttccgcgttacataacttacggtaaatggcccgcctggctgaccgcccaacgacccccgcccattgacgtcaataatgacgtatgttcccatagtaacgccaatagggactttccattgacgtcaatgggtggagtatttacggtaaactgcccacttggcagtacatcaagtgtatcatatgccaagtacgccccctattgacgtcaatgacggtaaatggcccgcctggcattatgcccagtacatgaccttatgggactttcctacttggcagtacatctacgtattagtcatcgctattaccatgtcgaggccacgttctgcttcactctccccatctcccccccctccccacccccaattttgtatttatttattttttaattattttgtgcagcgatgggggcggggggggggggcgcgcgccaggcggggcggggcggggcgaggggcggggcggggcgaggcggagaggtgcggcggcagccaatcagagcggcgcgctccgaaagtttccttttatggcgaggcggcggcggcggcggccctataaaaagcgaagcgcgcggcgggcgggagcaagcttgaactgaaaaaccagaaagttaactggtaagtttagtctttttgtcttttatttcaggtcccggatccggtggtggtgcaaatcaaagaactgctcctcagtggatgttgcctttacttctaggcctgtacggaagtgttacttctgctctaaaagctgcggaattgtacccgcggccgatccaccggtgccgccaccatgaacttcgggctcagcttgattttccttgtccttgttttaaaaggtgtccagtgtgaggttcatctggtggagtctgggggagccttagtgaagcctggagggtccctgaaactctcctgtgcagcctctggattcagtttcagtaaatatggcatgtcttgggttcgccagactccagacaagaggctggagtgggtcgcaaccattagtagtagtgggagtcgcacctactatccagacagtgtgaagggccaattcaccatctccagagacaatgccaagaacaccctgtacctgcaaatgagcagtctgaagtctgaggacacagccatgtattactgttcaattagctgggacggtgctatggactactggggtcaagggacctcagtcaccgtctcctcagccaaaacgacacccccatctgtctatccactggcccctggatctgctgcccaaactaactccatggtgaccctgggatgcctggtcaagggctatttccctgagccagtgacagtgacctggaactctggatccctgtccagcggtgtgcacaccttcccagctgtcctgcagtctgacctctacactctgagcagctcagtgactgtcccctccagcacctggcccagcgagaccgtcacctgcaacgttgcccacccggccagcagcaccaaggtggacaagaaaattgtgcccagggattgtggttgtaagccttgcatatgtacagtcccagaagtatcatctgtcttcatcttccccccaaagcccaaggatgtgctcaccattactctgactcctaaggtcacgtgtgttgtggtagacatcagcaaggatgatcccgaggtccagttcagctggtttgtagatgatgtggaggtgcacacagctcagacgcaaccccgggaggagcagttcaacagcactttccgctcagtcagtgaacttcccatcatgcaccaggactggctcaatggcaaggagttcaaatgcagggtcaacagtgcagctttccctgcccccatcgagaaaaccatctccaaaaccaaaggcagaccgaaggctccacaggtgtacaccattccacctcccaaggagcagatggccaaggataaagtcagtctgacctgcatgataacagacttcttccctgaagacattactgtggagtggcagtggaatgggcagccagcggagaactacaagaacactcagcccatcatggacacagatggctcttacttcgtctacagcaagctcaatgtgcagaagagcaactgggaggcaggaaatactttcacctgctctgtgttacatgagggcctgcacaaccaccatactgagaagagcctctcccactctcctggtcgggccaagcggggaagcggagtgaaacagactttgaattttgaccttctcaagttggcgggagacgtggagtccaaccctggacctatgaagttgcctgttaggctgttggtgctgatgttctggattcctgcttccagcagtgatgttttgatgacccaaactccactctccctgcctgtcagtcttggagatcaagcctccatctcttgcaaatctagtcagagcattgtacatagtaatggaaacacctatttagaatggtacctgcagaaaccaggccagtctccaaagctcctggtctacaaagtttccaatcgattttctggggtcccagacaggttcagtggcagtggatcagggacagatttcacactcaagatcagcagagtggaggctgaggatctgggaacttattactgctttcaaggttcacttgttccttgggcgttcggtggaggcaccaagctggaaatcaaacgggctgatgctgcaccaactgtatccatcttcccaccatccagtgagcagttaacatctggaggtgcctcagtcgtgtgcttcttgaacaacttctaccccaaagacatcaatgtcaagtggaagattgatggcagtgaacgacaaaatggcgtcctgaacagttggactgatcaggacagcaaagacagcacctacagcatgagcagcaccctcacgttgaccaaggacgagtatgaacgacataacagctatacctgtgaggccactcacaagacatcaacttcacccattgtcaagagcttcaacaggaatgagtgttagtaactcgaggacggggtgaactacgcctgaggatccgatctttttccctctgccaaaaattatggggacatcatgaagccccttgagcatctgacttctggctaataaaggaaatttattttcattgcaatagtgtgttggaattttttgtgtctctcactcggaagcaattcgttgatctgaatttcgaccacccataatacccattaccctggtagataagtagcatggcgggttaatcattaactacaaggaacccctagtgatggagttggccactccctctctgcgcgctcgctcgctcactgaggccgggcgaccaaaggtcgcccgacgcccgggctttgcccgggcggcctcagtgagcgagcgagcgcgcag

SEQ ID NO: 2067 - DNA, 3619 bp, Artificial Sequence
  source: /note="Description of Artificial Sequence: Synthetic polynucleotide"
ctgcgcgctcgctcgctcactgaggccgcccgggcaaagcccgggcgtcgggcgacctttggtcgcccggcctcagtgagcgagcgagcgcgcagagagggagtggccaactccatcactaggggttccttgtagttaatgattaacccgccatgctacttatctaccagggtaatggggatcctctagaactatagctagtcgacattgattattgactagttattaatagtaatcaattacggggtcattagttcatagcccatatatggagttccgcgttacataacttacggtaaatggcccgcctggctgaccgcccaacgacccccgcccattgacgtcaataatgacgtatgttcccatagtaacgccaatagggactttccattgacgtcaatgggtggagtatttacggtaaactgcccacttggcagtacatcaagtgtatcatatgccaagtacgccccctattgacgtcaatgacggtaaatggcccgcctggcattatgcccagtacatgaccttatgggactttcctacttggcagtacatctacgtattagtcatcgctattaccatgtcgaggccacgttctgcttcactctccccatctcccccccctccccacccccaattttgtatttatttattttttaattattttgtgcagcgatgggggcggggggggggggcgcgcgccaggcggggcggggcggggcgaggggcggggcggggcgaggcggagaggtgcggcggcagccaatcagagcggcgcgctccgaaagtttccttttatggcgaggcggcggcggcggcggccctataaaaagcgaagcgcgcggcgggcgggagcaagcttgaactgaaaaaccagaaagttaactggtaagtttagtctttttgtcttttatttcaggtcccggatccggtggtggtgcaaatcaaagaactgctcctcagtggatgttgcctttacttctaggcctgtacggaagtgttacttctgctctaaaagctgcggaattgtacccgcggccgatccaccggtgccgccaccatgaagttgcctgttaggctgttggtgctgatgttctggattcctgcttccagcagtgatgttgtgatgacccaaactccactctccctgcctgtcagtcttggagatcaagcctccatctcttgcagatctagtcagagccttgtacacagtaatggaaacacctatttacattggtacctgcagaagccaggccagtctccaaagctcctgatctacaaagtttccaaccgattttctggggtcccagacaggttcagtggcagtggatcagggacagatttcacactcaagatcagcagagtggaggctgaggatctgggagtttatttctgctctcaaagtacacatgttccgctcacgttcggtgctgggaccaagctggagctgaaacgggctgatgctgcaccaactgtatccatcttcccaccatccagtgagcagttaacatctggaggtgcctcagtcgtgtgcttcttgaacaacttctaccccaaagacatcaatgtcaagtggaagattgatggcagtgaacgacaaaatggcgtcctgaacagttggactgatcaggacagcaaagacagcacctacagcatgagcagcaccctcacgttgaccaaggacgagtatgaacgacataacagctatacctgtgaggccactcacaagacatcaacttcacccattgtcaagagcttcaacaggaatgagtgtcgggccaagcggggaagcggagtgaaacagactttgaattttgaccttctcaagttggcgggagacgtggagtccaaccctggacctatggaatggacctgggtctttctcttcctcctgtcagtaactgcaggtgtccactcccaggttcagctgcagcagtctggagctgagctgatgaagcctggggcctcagtgaagatatcctgcaaggctactggctacacattcagtaactactggatagagtgggtaaagcagaggcctggacatggccttgagtggattggagagattttacctggaagtgatagtattaagtacaatgagaatttcaagggcaaggccacattcactgcagatacatcctccaacacagcctacatgcaactcagcagcctgacatctgaggactctgccgtctattactgtgcaagaagggggaactacccagactactggggccaaggcaccactctcacagtctcctcagccaaaacgacacccccatctgtctatccactggcccctggatctgctgcccaaactaactccatggtgaccctgggatgcctggtcaagggctatttccctgagccagtgacagtgacctggaactctggatccctgtccagcggtgtgcacaccttcccagctgtcctgcagtctgacctctacactctgagcagctcagtgactgtcccctccagcacctggcccagcgagaccgtcacctgcaacgttgcccacccggccagcagcaccaaggtggacaagaaaattgtgcccagggattgtggttgtaagccttgcatatgtacagtcccagaagtatcatctgtcttcatcttccccccaaagcccaaggatgtgctcaccattactctgactcctaaggtcacgtgtgttgtggtagacatcagcaaggatgatcccgaggtccagttcagctggtttgtagatgatgtggaggtgcacacagctcagacgcaaccccgggaggagcagttcaacagcactttccgctcagtcagtgaacttcccatcatgcaccaggactggctcaatggcaaggagttcaaatgcagggtcaacagtgcagctttccctgcccccatcgagaaaaccatctccaaaaccaaaggcagaccgaaggctccacaggtgtacaccattccacctcccaaggagcagatggccaaggataaagtcagtctgacctgcatgataacagacttcttccctgaagacattactgtggagtggcagtggaatgggcagccagcggagaactacaagaacactcagcccatcatggacacagatggctcttacttcgtctacagcaagctcaatgtgcagaagagcaactgggaggcaggaaatactttcacctgctctgtgttacatgagggcctgcacaaccaccatactgagaagagcctctcccactctcctggttagtaactcgaggacggggtgaactacgcctgaggatccgatctttttccctctgccaaaaattatggggacatcatgaagccccttgagcatctgacttctggctaataaaggaaatttattttcattgcaatagtgtgttggaattttttgtgtctctcactcggaagcaattcgttgatctgaatttcgaccacccataatacccattaccctggtagataagtagcatggcgggttaatcattaactacaaggaacccctagtgatggagttggccactccctctctgcgcgctcgctcgctcactgaggccgggcgaccaaaggtcgcccgacgcccgggctttgcccgggcggcctcagtgagcgagcgagcgcgcag

SEQ ID NO: 2068 - DNA, 3607 bp, Artificial Sequence
  source: /note="Description of Artificial Sequence: Synthetic polynucleotide"
ctgcgcgctcgctcgctcactgaggccgcccgggcaaagcccgggcgtcgggcgacctttggtcgcccggcctcagtgagcgagcgagcgcgcagagagggagtggccaactccatcactaggggttccttgtagttaatgattaacccgccatgctacttatctaccagggtaatggggatcctctagaactatagctagtcgacattgattattgactagttattaatagtaatcaattacggggtcattagttcatagcccatatatggagttccgcgttacataacttacggtaaatggcccgcctggctgaccgcccaacgacccccgcccattgacgtcaataatgacgtatgttcccatagtaacgccaatagggactttccattgacgtcaatgggtggagtatttacggtaaactgcccacttggcagtacatcaagtgtatcatatgccaagtacgccccctattgacgtcaatgacggtaaatggcccgcctggcattatgcccagtacatgaccttatgggactttcctacttggcagtacatctacgtattagtcatcgctattaccatgtcgaggccacgttctgcttcactctccccatctcccccccctccccacccccaattttgtatttatttattttttaattattttgtgcagcgatgggggcggggggggggggcgcgcgccaggcggggcggggcggggcgaggggcggggcggggcgaggcggagaggtgcggcggcagccaatcagagcggcgcgctccgaaagtttccttttatggcgaggcggcggcggcggcggccctataaaaagcgaagcgcgcggcgggcgggagcaagcttgaactgaaaaaccagaaagttaactggtaagtttagtctttttgtcttttatttcaggtcccggatccggtggtggtgcaaatcaaagaactgctcctcagtggatgttgcctttacttctaggcctgtacggaagtgttacttctgctctaaaagctgcggaattgtacccgcggccgatccaccggtgccgccaccatgaagttgcctgttaggctgttggtgctgatgttctggattcctgcttccagcagtgatgttgtgatgacccaaactccactctccctgcctgtcagtcttggagatcaagcctccatctcttgcagatctagtcagagccttgtacacagtaatggaaacacctatttacattggtacctgcagaagccaggccagtctccaaagctcctgatctacaaagtttccaaccgattttctggggtcccagacaggttcagtggcagtggatcagggacagatttcacactcaagatcagcagagtggaggctgaggatctgggagtttatttctgctctcaaagtacacatgttccgctcacgttcggtgctgggaccaagctggagctgaaacgggctgatgctgcaccaactgtatccatcttcccaccatccagtgagcagttaacatctggaggtgcctcagtcgtgtgcttcttgaacaacttctaccccaaagacatcaatgtcaagtggaagattgatggcagtgaacgacaaaatggcgtcctgaacagttggactgatcaggacagcaaagacagcacctacagcatgagcagcaccctcacgttgaccaaggacgagtatgaacgacataacagctatacctgtgaggccactcacaagacatcaacttcacccattgtcaagagcttcaacaggaatgagtgtggaagcggagtgaaacagactttgaattttgaccttctcaagttggcgggagacgtggagtccaaccctggacctatggaatggacctgggtctttctcttcctcctgtcagtaactgcaggtgtccactcccaggttcagctgcagcagtctggagctgagctgatgaagcctggggcctcagtgaagatatcctgcaaggctactggctacacattcagtaactactggatagagtgggtaaagcagaggcctggacatggccttgagtggattggagagattttacctggaagtgatagtattaagtacaatgagaatttcaagggcaaggccacattcactgcagatacatcctccaacacagcctacatgcaactcagcagcctgacatctgaggactctgccgtctattactgtgcaagaagggggaactacccagactactggggccaaggcaccactctcacagtctcctcagccaaaacgacacccccatctgtctatccactggcccctggatctgctgcccaaactaactccatggtgaccctgggatgcctggtcaagggctatttccctgagccagtgacagtgacctggaactctggatccctgtccagcggtgtgcacaccttcccagctgtcctgcagtctgacctctacactctgagcagctcagtgactgtcccctccagcacctggcccagcgagaccgtcacctgcaacgttgcccacccggccagcagcaccaaggtggacaagaaaattgtgcccagggattgtggttgtaagccttgcatatgtacagtcccagaagtatcatctgtcttcatcttccccccaaagcccaaggatgtgctcaccattactctgactcctaaggtcacgtgtgttgtggtagacatcagcaaggatgatcccgaggtccagttcagctggtttgtagatgatgtggaggtgcacacagctcagacgcaaccccgggaggagcagttcaacagcactttccgctcagtcagtgaacttcccatcatgcaccaggactggctcaatggcaaggagttcaaatgcagggtcaacagtgcagctttccctgcccccatcgagaaaaccatctccaaaaccaaaggcagaccgaaggctccacaggtgtacaccattccacctcccaaggagcagatggccaaggataaagtcagtctgacctgcatgataacagacttcttccctgaagacattactgtggagtggcagtggaatgggcagccagcggagaactacaagaacactcagcccatcatggacacagatggctcttacttcgtctacagcaagctcaatgtgcagaagagcaactgggaggcaggaaatactttcacctgctctgtgttacatgagggcctgcacaaccaccatactgagaagagcctctcccactctcctggttagtaactcgaggacggggtgaactacgcctgaggatccgatctttttccctctgccaaaaattatggggacatcatgaagccccttgagcatctgacttctggctaataaaggaaatttattttcattgcaatagtgtgttggaattttttgtgtctctcactcggaagcaattcgttgatctgaatttcgaccacccataatacccattaccctggtagataagtagcatggcgggttaatcattaactacaaggaacccctagtgatggagttggccactccctctctgcgcgctcgctcgctcactgaggccgggcgaccaaaggtcgcccgacgcccgggctttgcccgggcggcctcagtgagcgagcgagcgcgcag

SEQ ID NO: 2069 - DNA, 4158 bp, Artificial Sequence
  source: /note="Description of Artificial Sequence: Synthetic polynucleotide"
ctgcgcgctcgctcgctcactgaggccgcccgggcaaagcccgggcgtcgggcgacctttggtcgcccggcctcagtgagcgagcgagcgcgcagagagggagtggccaactccatcactaggggttccttgtagttaatgattaacccgccatgctacttatctaccagggtaatggggatcctctagaactatagctagtcgacattgattattgactagttattaatagtaatcaattacggggtcattagttcatagcccatatatggagttccgcgttacataacttacggtaaatggcccgcctggctgaccgcccaacgacccccgcccattgacgtcaataatgacgtatgttcccatagtaacgccaatagggactttccattgacgtcaatgggtggagtatttacggtaaactgcccacttggcagtacatcaagtgtatcatatgccaagtacgccccctattgacgtcaatgacggtaaatggcccgcctggcattatgcccagtacatgaccttatgggactttcctacttggcagtacatctacgtattagtcatcgctattaccatgtcgaggccacgttctgcttcactctccccatctcccccccctccccacccccaattttgtatttatttattttttaattattttgtgcagcgatgggggcggggggggggggcgcgcgccaggcggggcggggcggggcgaggggcggggcggggcgaggcggagaggtgcggcggcagccaatcagagcggcgcgctccgaaagtttccttttatggcgaggcggcggcggcggcggccctataaaaagcgaagcgcgcggcgggcgggagcaagcttgaactgaaaaaccagaaagttaactggtaagtttagtctttttgtcttttatttcaggtcccggatccggtggtggtgcaaatcaaagaactgctcctcagtggatgttgcctttacttctaggcctgtacggaagtgttacttctgctctaaaagctgcggaattgtacccgcggccgatccaccggtgccgccaccatgaagttgcctgttaggctgttggtgctgatgttctggattcctgcttccagcagtgatgttgtgatgacccaaactccactctccctgcctgtcagtcttggagatcaagcctccatctcttgcagatctagtcagagccttgtacacagtaatggaaacacctatttacattggtacctgcagaagccaggccagtctccaaagctcctgatctacaaagtttccaaccgattttctggggtcccagacaggttcagtggcagtggatcagggacagatttcacactcaagatcagcagagtggaggctgaggatctgggagtttatttctgctctcaaagtacacatgttccgctcacgttcggtgctgggaccaagctggagctgaaacgggctgatgctgcaccaactgtatccatcttcccaccatccagtgagcagttaacatctggaggtgcctcagtcgtgtgcttcttgaacaacttctaccccaaagacatcaatgtcaagtggaagattgatggcagtgaacgacaaaatggcgtcctgaacagttggactgatcaggacagcaaagacagcacctacagcatgagcagcaccctcacgttgaccaaggacgagtatgaacgacataacagctatacctgtgaggccactcacaagacatcaacttcacccattgtcaagagcttcaacaggaatgagtgttagtaacgaattccgcccctctcccccccccccctctccctcccccccccctaacgttactggccgaagccgcttggaataaggccggtgtgcgtttgtctatatgttattttccaccatattgccgtcttttggcaatgtgagggcccggaaacctggccctgtcttcttgacgagcattcctaggggtctttcccctctcgccaaaggaatgcaaggtctgttgaatgtcgtgaaggaagcagttcctctggaagcttcttgaagacaaacaacgtctgtagcgaccctttgcaggcagcggaaccccccacctggcgacaggtgcctctgcggccaaaagccacgtgtataagatacacctgcaaaggcggcacaaccccagtgccacgttgtgagttggatagttgtggaaagagtcaaatggctctcctcaagcgtattcaacaaggggctgaaggatgcccagaaggtaccccattgtatgggatctgatctggggcctcggtgcacatgctttacatgtgtttagtcgaggttaaaaaaacgtctaggccccccgaaccacggggacgtggttttcctttgaaaaacacgatgataatatggccacaaccgccgccaccatggaatggacctgggtctttctcttcctcctgtcagtaactgcaggtgtccactcccaggttcagctgcagcagtctggagctgagctgatgaagcctggggcctcagtgaagatatcctgcaaggctactggctacacattcagtaactactggatagagtgggtaaagcagaggcctggacatggccttgagtggattggagagattttacctggaagtgatagtattaagtacaatgagaatttcaagggcaaggccacattcactgcagatacatcctccaacacagcctacatgcaactcagcagcctgacatctgaggactctgccgtctattactgtgcaagaagggggaactacccagactactggggccaaggcaccactctcacagtctcctcagccaaaacgacacccccatctgtctatccactggcccctggatctgctgcccaaactaactccatggtgaccctgggatgcctggtcaagggctatttccctgagccagtgacagtgacctggaactctggatccctgtccagcggtgtgcacaccttcccagctgtcctgcagtctgacctctacactctgagcagctcagtgactgtcccctccagcacctggcccagcgagaccgtcacctgcaacgttgcccacccggccagcagcaccaaggtggacaagaaaattgtgcccagggattgtggttgtaagccttgcatatgtacagtcccagaagtatcatctgtcttcatcttccccccaaagcccaaggatgtgctcaccattactctgactcctaaggtcacgtgtgttgtggtagacatcagcaaggatgatcccgaggtccagttcagctggtttgtagatgatgtggaggtgcacacagctcagacgcaaccccgggaggagcagttcaacagcactttccgctcagtcagtgaacttcccatcatgcaccaggactggctcaatggcaaggagttcaaatgcagggtcaacagtgcagctttccctgcccccatcgagaaaaccatctccaaaaccaaaggcagaccgaaggctccacaggtgtacaccattccacctcccaaggagcagatggccaaggataaagtcagtctgacctgcatgataacagacttcttccctgaagacattactgtggagtggcagtggaatgggcagccagcggagaactacaagaacactcagcccatcatggacacagatggctcttacttcgtctacagcaagctcaatgtgcagaagagcaactgggaggcaggaaatactttcacctgctctgtgttacatgagggcctgcacaaccaccatactgagaagagcctctcccactctcctggttagtaactcgaggacggggtgaactacgcctgaggatccgatctttttccctctgccaaaaattatggggacatcatgaagccccttgagcatctgacttctggctaataaaggaaatttattttcattgcaatagtgtgttggaattttttgtgtctctcactcggaagcaattcgttgatctgaatttcgaccacccataatacccattaccctggtagataagtagcatggcgggttaatcattaactacaaggaacccctagtgatggagttggccactccctctctgcgcgctcgctcgctcactgaggccgggcgaccaaaggtcgcccgacgcccgggctttgcccgggcggcctcagtgagcgagcgagcgcgcag

SEQ ID NO: 2070 - DNA, 3607 bp, Artificial Sequence
  source: /note="Description of Artificial Sequence: Synthetic polynucleotide"
ctgcgcgctcgctcgctcactgaggccgcccgggcaaagcccgggcgtcgggcgacctttggtcgcccggcctcagtgagcgagcgagcgcgcagagagggagtggccaactccatcactaggggttccttgtagttaatgattaacccgccatgctacttatctaccagggtaatggggatcctctagaactatagctagtcgacattgattattgactagttattaatagtaatcaattacggggtcattagttcatagcccatatatggagttccgcgttacataacttacggtaaatggcccgcctggctgaccgcccaacgacccccgcccattgacgtcaataatgacgtatgttcccatagtaacgccaatagggactttccattgacgtcaatgggtggagtatttacggtaaactgcccacttggcagtacatcaagtgtatcatatgccaagtacgccccctattgacgtcaatgacggtaaatggcccgcctggcattatgcccagtacatgaccttatgggactttcctacttggcagtacatctacgtattagtcatcgctattaccatgtcgaggccacgttctgcttcactctccccatctcccccccctccccacccccaattttgtatttatttattttttaattattttgtgcagcgatgggggcggggggggggggcgcgcgccaggcggggcggggcggggcgaggggcggggcggggcgaggcggagaggtgcggcggcagccaatcagagcggcgcgctccgaaagtttccttttatggcgaggcggcggcggcggcggccctataaaaagcgaagcgcgcggcgggcgggagcaagcttgaactgaaaaaccagaaagttaactggtaagtttagtctttttgtcttttatttcaggtcccggatccggtggtggtgcaaatcaaagaactgctcctcagtggatgttgcctttacttctaggcctgtacggaagtgttacttctgctctaaaagctgcggaattgtacccgcggccgatccaccggtgccgccaccatgaagttgcctgttaggctgttggtgctgatgttctggattcctgcttccagcagtgatgttgtgatgacccaaactccactctccctgcctgtcagtcttggagatcaagcctccatctcttgcagatctagtcagagccttgtacacagtaatggaaacacctatttacattggtacctgcagaagccaggccagtctccaaagctcctgatctacaaagtttccaaccgattttctggggtcccagacaggttcagtggcagtggatcagggacagatttcacactcaagatcagcagagtggaggctgaggatctgggagtttatttctgctctcaaagtacacatgttccgctcacgttcggtgctgggaccaagctggagctgaaacgggctgatgctgcaccaactgtatccatcttcccaccatccagtgagcagttaacatctggaggtgcctcagtcgtgtgcttcttgaacaacttctaccccaaagacatcaatgtcaagtggaagattgatggcagtgaacgacaaaatggcgtcctgaacagttggactgatcaggacagcaaagacagcacctacagcatgagcagcaccctcacgttgaccaaggacgagtatgaacgacataacagctatacctgtgaggccactcacaagacatcaacttcacccattgtcaagagcttcaacaggaatgagtgtggcggaggtggctccggaggcggaggcagcggcggaggtgggtctggcggaggcgggtgcggcggaggtggctccatggaatggacctgggtctttctcttcctcctgtcagtaactgcaggtgtccactcccaggttcagctgcagcagtctggagctgagctgatgaagcctggggcctcagtgaagatatcctgcaaggctactggctacacattcagtaactactggatagagtgggtaaagcagaggcctggacatggccttgagtggattggagagattttacctggaagtgatagtattaagtacaatgagaatttcaagggcaaggccacattcactgcagatacatcctccaacacagcctacatgcaactcagcagcctgacatctgaggactctgccgtctattactgtgcaagaagggggaactacccagactactggggccaaggcaccactctcacagtctcctcagccaaaacgacacccccatctgtctatccactggcccctggatctgctgcccaaactaactccatggtgaccctgggatgcctggtcaagggctatttccctgagccagtgacagtgacctggaactctggatccctgtccagcggtgtgcacaccttcccagctgtcctgcagtctgacctctacactctgagcagctcagtgactgtcccctccagcacctggcccagcgagaccgtcacctgcaacgttgcccacccggccagcagcaccaaggtggacaagaaaattgtgcccagggattgtggttgtaagccttgcatatgtacagtcccagaagtatcatctgtcttcatcttccccccaaagcccaaggatgtgctcaccattactctgactcctaaggtcacgtgtgttgtggtagacatcagcaaggatgatcccgaggtccagttcagctggtttgtagatgatgtggaggtgcacacagctcagacgcaaccccgggaggagcagttcaacagcactttccgctcagtcagtgaacttcccatcatgcaccaggactggctcaatggcaaggagttcaaatgcagggtcaacagtgcagctttccctgcccccatcgagaaaaccatctccaaaaccaaaggcagaccgaaggctccacaggtgtacaccattccacctcccaaggagcagatggccaaggataaagtcagtctgacctgcatgataacagacttcttccctgaagacattactgtggagtggcagtggaatgggcagccagcggagaactacaagaacactcagcccatcatggacacagatggctcttacttcgtctacagcaagctcaatgtgcagaagagcaactgggaggcaggaaatactttcacctgctctgtgttacatgagggcctgcacaaccaccatactgagaagagcctctcccactctcctggttagtaactcgaggacggggtgaactacgcctgaggatccgatctttttccctctgccaaaaattatggggacatcatgaagccccttgagcatctgacttctggctaataaaggaaatttattttcattgcaatagtgtgttggaattttttgtgtctctcactcggaagcaattcgttgatctgaatttcgaccacccataatacccattaccctggtagataagtagcatggcgggttaatcattaactacaaggaacccctagtgatggagttggccactccctctctgcgcgctcgctcgctcactgaggccgggcgaccaaaggtcgcccgacgcccgggctttgcccgggcggcctcagtgagcgagcgagcgcgcag

SEQ ID NO: 2071 - DNA, 3598 bp, Artificial Sequence
  source: /note="Description of Artificial Sequence: Synthetic polynucleotide"
ctgcgcgctcgctcgctcactgaggccgcccgggcaaagcccgggcgtcgggcgacctttggtcgcccggcctcagtgagcgagcgagcgcgcagagagggagtggccaactccatcactaggggttccttgtagttaatgattaacccgccatgctacttatctaccagggtaatggggatcctctagaactatagctagtcgacattgattattgactagttattaatagtaatcaattacggggtcattagttcatagcccatatatggagttccgcgttacataacttacggtaaatggcccgcctggctgaccgcccaacgacccccgcccattgacgtcaataatgacgtatgttcccatagtaacgccaatagggactttccattgacgtcaatgggtggagtatttacggtaaactgcccacttggcagtacatcaagtgtatcatatgccaagtacgccccctattgacgtcaatgacggtaaatggcccgcctggcattatgcccagtacatgaccttatgggactttcctacttggcagtacatctacgtattagtcatcgctattaccatgtcgaggccacgttctgcttcactctccccatctcccccccctccccacccccaattttgtatttatttattttttaattattttgtgcagcgatgggggcggggggggggggcgcgcgccaggcggggcggggcggggcgaggggcggggcggggcgaggcggagaggtgcggcggcagccaatcagagcggcgcgctccgaaagtttccttttatggcgaggcggcggcggcggcggccctataaaaagcgaagcgcgcggcgggcgggagcaagcttgaactgaaaaaccagaaagttaactggtaagtttagtctttttgtcttttatttcaggtcccggatccggtggtggtgcaaatcaaagaactgctcctcagtggatgttgcctttacttctaggcctgtacggaagtgttacttctgctctaaaagctgcggaattgtacccgcggccgatccaccggtgccgccaccatgaagttgcctgttaggctgttggtgctgatgttctggattcctgcttccagcagtgatgttgtgatgacccaaactccactctccctgcctgtcagtcttggagatcaagcctccatctcttgcagatctagtcagagccttgtacacagtaatggaaacacctatttacattggtacctgcagaagccaggccagtctccaaagctcctgatctacaaagtttccaaccgattttctggggtcccagacaggttcagtggcagtggatcagggacagatttcacactcaagatcagcagagtggaggctgaggatctgggagtttatttctgctctcaaagtacacatgttccgctcacgttcggtgctgggaccaagctggagctgaaacgggctgatgctgcaccaactgtatccatcttcccaccatccagtgagcagttaacatctggaggtgcctcagtcgtgtgcttcttgaacaacttctaccccaaagacatcaatgtcaagtggaagattgatggcagtgaacgacaaaatggcgtcctgaacagttggactgatcaggacagcaaagacagcacctacagcatgagcagcaccctcacgttgaccaaggacgagtatgaacgacataacagctatacctgtgaggccactcacaagacatcaacttcacccattgtcaagagcttcaacaggaatgagtgtggaagcggagctactaacttcagcctgctgaagcaggctggagacgtggaggagaaccctggacctatggaatggacctgggtctttctcttcctcctgtcagtaactgcaggtgtccactcccaggttcagctgcagcagtctggagctgagctgatgaagcctggggcctcagtgaagatatcctgcaaggctactggctacacattcagtaactactggatagagtgggtaaagcagaggcctggacatggccttgagtggattggagagattttacctggaagtgatagtattaagtacaatgagaatttcaagggcaaggccacattcactgcagatacatcctccaacacagcctacatgcaactcagcagcctgacatctgaggactctgccgtctattactgtgcaagaagggggaactacccagactactggggccaaggcaccactctcacagtctcctcagccaaaacgacacccccatctgtctatccactggcccctggatctgctgcccaaactaactccatggtgaccctgggatgcctggtcaagggctatttccctgagccagtgacagtgacctggaactctggatccctgtccagcggtgtgcacaccttcccagctgtcctgcagtctgacctctacactctgagcagctcagtgactgtcccctccagcacctggcccagcgagaccgtcacctgcaacgttgcccacccggccagcagcaccaaggtggacaagaaaattgtgcccagggattgtggttgtaagccttgcatatgtacagtcccagaagtatcatctgtcttcatcttccccccaaagcccaaggatgtgctcaccattactctgactcctaaggtcacgtgtgttgtggtagacatcagcaaggatgatcccgaggtccagttcagctggtttgtagatgatgtggaggtgcacacagctcagacgcaaccccgggaggagcagttcaacagcactttccgctcagtcagtgaacttcccatcatgcaccaggactggctcaatggcaaggagttcaaatgcagggtcaacagtgcagctttccctgcccccatcgagaaaaccatctccaaaaccaaaggcagaccgaaggctccacaggtgtacaccattccacctcccaaggagcagatggccaaggataaagtcagtctgacctgcatgataacagacttcttccctgaagacattactgtggagtggcagtggaatgggcagccagcggagaactacaagaacactcagcccatcatggacacagatggctcttacttcgtctacagcaagctcaatgtgcagaagagcaactgggaggcaggaaatactttcacctgctctgtgttacatgagggcctgcacaaccaccatactgagaagagcctctcccactctcctggttagtaactcgaggacggggtgaactacgcctgaggatccgatctttttccctctgccaaaaattatggggacatcatgaagccccttgagcatctgacttctggctaataaaggaaatttattttcattgcaatagtgtgttggaattttttgtgtctctcactcggaagcaattcgttgatctgaatttcgaccacccataatacccattaccctggtagataagtagcatggcgggttaatcattaactacaaggaacccctagtgatggagttggccactccctctctgcgcgctcgctcgctcactgaggccgggcgaccaaaggtcgcccgacgcccgggctttgcccgggcggcctcagtgagcgagcgagcgcgcag

SEQ ID NO: 2072 - DNA, 3610 bp, Artificial Sequence
  source: /note="Description of Artificial Sequence: Synthetic polynucleotide"
ctgcgcgctcgctcgctcactgaggccgcccgggcaaagcccgggcgtcgggcgacctttggtcgcccggcctcagtgagcgagcgagcgcgcagagagggagtggccaactccatcactaggggttccttgtagttaatgattaacccgccatgctacttatctaccagggtaatggggatcctctagaactatagctagtcgacattgattattgactagttattaatagtaatcaattacggggtcattagttcatagcccatatatggagttccgcgttacataacttacggtaaatggcccgcctggctgaccgcccaacgacccccgcccattgacgtcaataatgacgtatgttcccatagtaacgccaatagggactttccattgacgtcaatgggtggagtatttacggtaaactgcccacttggcagtacatcaagtgtatcatatgccaagtacgccccctattgacgtcaatgacggtaaatggcccgcctggcattatgcccagtacatgaccttatgggactttcctacttggcagtacatctacgtattagtcatcgctattaccatgtcgaggccacgttctgcttcactctccccatctcccccccctccccacccccaattttgtatttatttattttttaattattttgtgcagcgatgggggcggggggggggggcgcgcgccaggcggggcggggcggggcgaggggcggggcggggcgaggcggagaggtgcggcggcagccaatcagagcggcgcgctccgaaagtttccttttatggcgaggcggcggcggcggcggccctataaaaagcgaagcgcgcggcgggcgggagcaagcttgaactgaaaaaccagaaagttaactggtaagtttagtctttttgtcttttatttcaggtcccggatccggtggtggtgcaaatcaaagaactgctcctcagtggatgttgcctttacttctaggcctgtacggaagtgttacttctgctctaaaagctgcggaattgtacccgcggccgatccaccggtgccgccaccatgaagttgcctgttaggctgttggtgctgatgttctggattcctgcttccagcagtgatgttgtgatgacccaaactccactctccctgcctgtcagtcttggagatcaagcctccatctcttgcagatctagtcagagccttgtacacagtaatggaaacacctatttacattggtacctgcagaagccaggccagtctccaaagctcctgatctacaaagtttccaaccgattttctggggtcccagacaggttcagtggcagtggatcagggacagatttcacactcaagatcagcagagtggaggctgaggatctgggagtttatttctgctctcaaagtacacatgttccgctcacgttcggtgctgggaccaagctggagctgaaacgggctgatgctgcaccaactgtatccatcttcccaccatccagtgagcagttaacatctggaggtgcctcagtcgtgtgcttcttgaacaacttctaccccaaagacatcaatgtcaagtggaagattgatggcagtgaacgacaaaatggcgtcctgaacagttggactgatcaggacagcaaagacagcacctacagcatgagcagcaccctcacgttgaccaaggacgagtatgaacgacataacagctatacctgtgaggccactcacaagacatcaacttcacccattgtcaagagcttcaacaggaatgagtgtcgggccaagcggggaagcggagctactaacttcagcctgctgaagcaggctggagacgtggaggagaaccctggacctatggaatggacctgggtctttctcttcctcctgtcagtaactgcaggtgtccactcccaggttcagctgcagcagtctggagctgagctgatgaagcctggggcctcagtgaagatatcctgcaaggctactggctacacattcagtaactactggatagagtgggtaaagcagaggcctggacatggccttgagtggattggagagattttacctggaagtgatagtattaagtacaatgagaatttcaagggcaaggccacattcactgcagatacatcctccaacacagcctacatgcaactcagcagcctgacatctgaggactctgccgtctattactgtgcaagaagggggaactacccagactactggggccaaggcaccactctcacagtctcctcagccaaaacgacacccccatctgtctatccactggcccctggatctgctgcccaaactaactccatggtgaccctgggatgcctggtcaagggctatttccctgagccagtgacagtgacctggaactctggatccctgtccagcggtgtgcacaccttcccagctgtcctgcagtctgacctctacactctgagcagctcagtgactgtcccctccagcacctggcccagcgagaccgtcacctgcaacgttgcccacccggccagcagcaccaaggtggacaagaaaattgtgcccagggattgtggttgtaagccttgcatatgtacagtcccagaagtatcatctgtcttcatcttccccccaaagcccaaggatgtgctcaccattactctgactcctaaggtcacgtgtgttgtggtagacatcagcaaggatgatcccgaggtccagttcagctggtttgtagatgatgtggaggtgcacacagctcagacgcaaccccgggaggagcagttcaacagcactttccgctcagtcagtgaacttcccatcatgcaccaggactggctcaatggcaaggagttcaaatgcagggtcaacagtgcagctttccctgcccccatcgagaaaaccatctccaaaaccaaaggcagaccgaaggctccacaggtgtacaccattccacctcccaaggagcagatggccaaggataaagtcagtctgacctgcatgataacagacttcttccctgaagacattactgtggagtggcagtggaatgggcagccagcggagaactacaagaacactcagcccatcatggacacagatggctcttacttcgtctacagcaagctcaatgtgcagaagagcaactgggaggcaggaaatactttcacctgctctgtgttacatgagggcctgcacaaccaccatactgagaagagcctctcccactctcctggttagtaactcgaggacggggtgaactacgcctgaggatccgatctttttccctctgccaaaaattatggggacatcatgaagccccttgagcatctgacttctggctaataaaggaaatttattttcattgcaatagtgtgttggaattttttgtgtctctcactcggaagcaattcgttgatctgaatttcgaccacccataatacccattaccctggtagataagtagcatggcgggttaatcattaactacaaggaacccctagtgatggagttggccactccctctctgcgcgctcgctcgctcactgaggccgggcgaccaaaggtcgcccgacgcccgggctttgcccgggcggcctcagtgagcgagcgagcgcgcag

SEQ ID NO: 2073 - DNA, 3610 bp, Artificial Sequence
  source: /note="Description of Artificial Sequence: Synthetic polynucleotide"
ctgcgcgctcgctcgctcactgaggccgcccgggcaaagcccgggcgtcgggcgacctttggtcgcccggcctcagtgagcgagcgagcgcgcagagagggagtggccaactccatcactaggggttccttgtagttaatgattaacccgccatgctacttatctaccagggtaatggggatcctctagaactatagctagtcgacattgattattgactagttattaatagtaatcaattacggggtcattagttcatagcccatatatggagttccgcgttacataacttacggtaaatggcccgcctggctgaccgcccaacgacccccgcccattgacgtcaataatgacgtatgttcccatagtaacgccaatagggactttccattgacgtcaatgggtggagtatttacggtaaactgcccacttggcagtacatcaagtgtatcatatgccaagtacgccccctattgacgtcaatgacggtaaatggcccgcctggcattatgcccagtacatgaccttatgggactttcctacttggcagtacatctacgtattagtcatcgctattaccatgtcgaggccacgttctgcttcactctccccatctcccccccctccccacccccaattttgtatttatttattttttaattattttgtgcagcgatgggggcggggggggggggcgcgcgccaggcggggcggggcggggcgaggggcggggcggggcgaggcggagaggtgcggcggcagccaatcagagcggcgcgctccgaaagtttccttttatggcgaggcggcggcggcggcggccctataaaaagcgaagcgcgcggcgggcgggagcaagcttgaactgaaaaaccagaaagttaactggtaagtttagtctttttgtcttttatttcaggtcccggatccggtggtggtgcaaatcaaagaactgctcctcagtggatgttgcctttacttctaggcctgtacggaagtgttacttctgctctaaaagctgcggaattgtacccgcggccgatccaccggtgccgccaccatgaagttgcctgttaggctgttggtgctgatgttctggattcctgcttccagcagtgatgttttgatgacccaaactccactctccctgcctgtcagtcttggagatcaagcctccatctcttgcaaatctagtcagagcattgtacatagtaatggaaacacctatttagaatggtacctgcagaaaccaggccagtctccaaagctcctggtctacaaagtttccaatcgattttctggggtcccagacaggttcagtggcagtggatcagggacagatttcacactcaagatcagcagagtggaggctgaggatctgggaacttattactgctttcaaggttcacttgttccttgggcgttcggtggaggcaccaagctggaaatcaaacgggctgatgctgcaccaactgtatccatcttcccaccatccagtgagcagttaacatctggaggtgcctcagtcgtgtgcttcttgaacaacttctaccccaaagacatcaatgtcaagtggaagattgatggcagtgaacgacaaaatggcgtcctgaacagttggactgatcaggacagcaaagacagcacctacagcatgagcagcaccctcacgttgaccaaggacgagtatgaacgacataacagctatacctgtgaggccactcacaagacatcaacttcacccattgtcaagagcttcaacaggaatgagtgtggaagcggagtgaaacagactttgaattttgaccttctcaagttggcgggagacgtggagtccaaccctggacctatgaacttcgggctcagcttgattttccttgtccttgttttaaaaggtgtccagtgtgaggttcatctggtggagtctgggggagccttagtgaagcctggagggtccctgaaactctcctgtgcagcctctggattcagtttcagtaaatatggcatgtcttgggttcgccagactccagacaagaggctggagtgggtcgcaaccattagtagtagtgggagtcgcacctactatccagacagtgtgaagggccaattcaccatctccagagacaatgccaagaacaccctgtacctgcaaatgagcagtctgaagtctgaggacacagccatgtattactgttcaattagctgggacggtgctatggactactggggtcaagggacctcagtcaccgtctcctcagccaaaacgacacccccatctgtctatccactggcccctggatctgctgcccaaactaactccatggtgaccctgggatgcctggtcaagggctatttccctgagccagtgacagtgacctggaactctggatccctgtccagcggtgtgcacaccttcccagctgtcctgcagtctgacctctacactctgagcagctcagtgactgtcccctccagcacctggcccagcgagaccgtcacctgcaacgttgcccacccggccagcagcaccaaggtggacaagaaaattgtgcccagggattgtggttgtaagccttgcatatgtacagtcccagaagtatcatctgtcttcatcttccccccaaagcccaaggatgtgctcaccattactctgactcctaaggtcacgtgtgttgtggtagacatcagcaaggatgatcccgaggtccagttcagctggtttgtagatgatgtggaggtgcacacagctcagacgcaaccccgggaggagcagttcaacagcactttccgctcagtcagtgaacttcccatcatgcaccaggactggctcaatggcaaggagttcaaatgcagggtcaacagtgcagctttccctgcccccatcgagaaaaccatctccaaaaccaaaggcagaccgaaggctccacaggtgtacaccattccacctcccaaggagcagatggccaaggataaagtcagtctgacctgcatgataacagacttcttccctgaagacattactgtggagtggcagtggaatgggcagccagcggagaactacaagaacactcagcccatcatggacacagatggctcttacttcgtctacagcaagctcaatgtgcagaagagcaactgggaggcaggaaatactttcacctgctctgtgttacatgagggcctgcacaaccaccatactgagaagagcctctcccactctcctggttagtaactcgaggacggggtgaactacgcctgaggatccgatctttttccctctgccaaaaattatggggacatcatgaagccccttgagcatctgacttctggctaataaaggaaatttattttcattgcaatagtgtgttggaattttttgtgtctctcactcggaagcaattcgttgatctgaatttcgaccacccataatacccattaccctggtagataagtagcatggcgggttaatcattaactacaaggaacccctagtgatggagttggccactccctctctgcgcgctcgctcgctcactgaggccgggcgaccaaaggtcgcccgacgcccgggctttgcccgggcggcctcagtgagcgagcgagcgcgcag

SEQ ID NO: 2074 - DNA, 3622 bp, Artificial Sequence
  source: /note="Description of Artificial Sequence: Synthetic polynucleotide"
ctgcgcgctcgctcgctcactgaggccgcccgggcaaagcccgggcgtcgggcgacctttggtcgcccggcctcagtgagcgagcgagcgcgcagagagggagtggccaactccatcactaggggttccttgtagttaatgattaacccgccatgctacttatctaccagggtaatggggatcctctagaactatagctagtcgacattgattattgactagttattaatagtaatcaattacggggtcattagttcatagcccatatatggagttccgcgttacataacttacggtaaatggcccgcctggctgaccgcccaacgacccccgcccattgacgtcaataatgacgtatgttcccatagtaacgccaatagggactttccattgacgtcaatgggtggagtatttacggtaaactgcccacttggcagtacatcaagtgtatcatatgccaagtacgccccctattgacgtcaatgacggtaaatggcccgcctggcattatgcccagtacatgaccttatgggactttcctacttggcagtacatctacgtattagtcatcgctattaccatgtcgaggccacgttctgcttcactctccccatctcccccccctccccacccccaattttgtatttatttattttttaattattttgtgcagcgatgggggcggggggggggggcgcgcgccaggcggggcggggcggggcgaggggcggggcggggcgaggcggagaggtgcggcggcagccaatcagagcggcgcgctccgaaagtttccttttatggcgaggcggcggcggcggcggccctataaaaagcgaagcgcgcggcgggcgggagcaagcttgaactgaaaaaccagaaagttaactggtaagtttagtctttttgtcttttatttcaggtcccggatccggtggtggtgcaaatcaaagaactgctcctcagtggatgttgcctttacttctaggcctgtacggaagtgttacttctgctctaaaagctgcggaattgtacccgcggccgatccaccggtgccgccaccatgggatggagctggatctttctctttctcctgtcaggaactacaggtgtcctctctgaggtccagctgcaacagtctggacctgagctggtgaagcctggggcttcagtgaagatatcctgcaagacttctggatacacattcactgaatacaccatacactgggtgaagcagagccatggagagagccttgagtggattggaggtattaatccaaacgatggtggtactatttacaaccagaagttcaagggcaaggccacattgactgtagacaagtcctccaaaacagcctacatggagctccgcagcctgacatctgaggattctgcagtcttttactgtgcaagagggccctccgccaggtttccttactggggccaagggactctggtcactgtctctgcagccaaaacgacacccccatctgtctatccactggcccctggatctgctgcccaaactaactccatggtgaccctgggatgcctggtcaagggctatttccctgagccagtgacagtgacctggaactctggatccctgtccagcggtgtgcacaccttcccagctgtcctgcagtctgacctctacactctgagcagctcagtgactgtcccctccagcacctggcccagcgagaccgtcacctgcaacgttgcccacccggccagcagcaccaaggtggacaagaaaattgtgcccagggattgtggttgtaagccttgcatatgtacagtcccagaagtatcatctgtcttcatcttccccccaaagcccaaggatgtgctcaccattactctgactcctaaggtcacgtgtgttgtggtagacatcagcaaggatgatcccgaggtccagttcagctggtttgtagatgatgtggaggtgcacacagctcagacgcaaccccgggaggagcagttcaacagcactttccgctcagtcagtgaacttcccatcatgcaccaggactggctcaatggcaaggagttcaaatgcagggtcaacagtgcagctttccctgcccccatcgagaaaaccatctccaaaaccaaaggcagaccgaaggctccacaggtgtacaccattccacctcccaaggagcagatggccaaggataaagtcagtctgacctgcatgataacagacttcttccctgaagacattactgtggagtggcagtggaatgggcagccagcggagaactacaagaacactcagcccatcatggacacagatggctcttacttcgtctacagcaagctcaatgtgcagaagagcaactgggaggcaggaaatactttcacctgctctgtgttacatgagggcctgcacaaccaccatactgagaagagcctctcccactctcctggtcgggccaagcggggaagcggagtgaaacagactttgaattttgaccttctcaagttggcgggagacgtggagtccaaccctggacctatgagtcctgcccagttcctgtttctgttagtgctctggattcgggaaaccaacggtgatgttgtgatgacccagactccactcactttgtcggttaccattggacaaccagcctccatctcttgcaagtcaagtcagagcctcttagatagtgatggaaagacatatttgaattggttgttacagaggccaggccagtctccaaagcgcctaatctatctggtgtctaaactggactctggagtccctgacagattcactggcagtggatcagggacagatttcacactgaaaattagcagagtggaggctgaggatttgggagtttattattgctggcaaggtacacattttcctcggacgttcggtggaggcaccaagctggaaatcaaacgggctgatgctgcaccaactgtatccatcttcccaccatccagtgagcagttaacatctggaggtgcctcagtcgtgtgcttcttgaacaacttctaccccaaagacatcaatgtcaagtggaagattgatggcagtgaacgacaaaatggcgtcctgaacagttggactgatcaggacagcaaagacagcacctacagcatgagcagcaccctcacgttgaccaaggacgagtatgaacgacataacagctatacctgtgaggccactcacaagacatcaacttcacccattgtcaagagcttcaacaggaatgagtgttagtaactcgaggacggggtgaactacgcctgaggatccgatctttttccctctgccaaaaattatggggacatcatgaagccccttgagcatctgacttctggctaataaaggaaatttattttcattgcaatagtgtgttggaattttttgtgtctctcactcggaagcaattcgttgatctgaatttcgaccacccataatacccattaccctggtagataagtagcatggcgggttaatcattaactacaaggaacccctagtgatggagttggccactccctctctgcgcgctcgctcgctcactgaggccgggcgaccaaaggtcgcccgacgcccgggctttgcccgggcggcctcagtgagcgagcgagcgcgcag

SEQ ID NO: 2075 - DNA, 3610 bp, Artificial Sequence
  source: /note="Description of Artificial Sequence: Synthetic polynucleotide"
ctgcgcgctcgctcgctcactgaggccgcccgggcaaagcccgggcgtcgggcgacctttggtcgcccggcctcagtgagcgagcgagcgcgcagagagggagtggccaactccatcactaggggttccttgtagttaatgattaacccgccatgctacttatctaccagggtaatggggatcctctagaactatagctagtcgacattgattattgactagttattaatagtaatcaattacggggtcattagttcatagcccatatatggagttccgcgttacataacttacggtaaatggcccgcctggctgaccgcccaacgacccccgcccattgacgtcaataatgacgtatgttcccatagtaacgccaatagggactttccattgacgtcaatgggtggagtatttacggtaaactgcccacttggcagtacatcaagtgtatcatatgccaagtacgccccctattgacgtcaatgacggtaaatggcccgcctggcattatgcccagtacatgaccttatgggactttcctacttggcagtacatctacgtattagtcatcgctattaccatgtcgaggccacgttctgcttcactctccccatctcccccccctccccacccccaattttgtatttatttattttttaattattttgtgcagcgatgggggcggggggggggggcgcgcgccaggcggggcggggcggggcgaggggcggggcggggcgaggcggagaggtgcggcggcagccaatcagagcggcgcgctccgaaagtttccttttatggcgaggcggcggcggcggcggccctataaaaagcgaagcgcgcggcgggcgggagcaagcttgaactgaaaaaccagaaagttaactggtaagtttagtctttttgtcttttatttcaggtcccggatccggtggtggtgcaaatcaaagaactgctcctcagtggatgttgcctttacttctaggcctgtacggaagtgttacttctgctctaaaagctgcggaattgtacccgcggccgatccaccggtgccgccaccatgagtcctgcccagttcctgtttctgttagtgctctggattcgggaaaccaacggtgatgttgtgatgacccagactccactcactttgtcggttaccattggacaaccagcctccatctcttgcaagtcaagtcagagcctcttagatagtgatggaaagacatatttgaattggttgttacagaggccaggccagtctccaaagcgcctaatctatctggtgtctaaactggactctggagtccctgacagattcactggcagtggatcagggacagatttcacactgaaaattagcagagtggaggctgaggatttgggagtttattattgctggcaaggtacacattttcctcggacgttcggtggaggcaccaagctggaaatcaaacgggctgatgctgcaccaactgtatccatcttcccaccatccagtgagcagttaacatctggaggtgcctcagtcgtgtgcttcttgaacaacttctaccccaaagacatcaatgtcaagtggaagattgatggcagtgaacgacaaaatggcgtcctgaacagttggactgatcaggacagcaaagacagcacctacagcatgagcagcaccctcacgttgaccaaggacgagtatgaacgacataacagctatacctgtgaggccactcacaagacatcaacttcacccattgtcaagagcttcaacaggaatgagtgtggaagcggagtgaaacagactttgaattttgaccttctcaagttggcgggagacgtggagtccaaccctggacctatgggatggagctggatctttctctttctcctgtcaggaactacaggtgtcctctctgaggtccagctgcaacagtctggacctgagctggtgaagcctggggcttcagtgaagatatcctgcaagacttctggatacacattcactgaatacaccatacactgggtgaagcagagccatggagagagccttgagtggattggaggtattaatccaaacgatggtggtactatttacaaccagaagttcaagggcaaggccacattgactgtagacaagtcctccaaaacagcctacatggagctccgcagcctgacatctgaggattctgcagtcttttactgtgcaagagggccctccgccaggtttccttactggggccaagggactctggtcactgtctctgcagccaaaacgacacccccatctgtctatccactggcccctggatctgctgcccaaactaactccatggtgaccctgggatgcctggtcaagggctatttccctgagccagtgacagtgacctggaactctggatccctgtccagcggtgtgcacaccttcccagctgtcctgcagtctgacctctacactctgagcagctcagtgactgtcccctccagcacctggcccagcgagaccgtcacctgcaacgttgcccacccggccagcagcaccaaggtggacaagaaaattgtgcccagggattgtggttgtaagccttgcatatgtacagtcccagaagtatcatctgtcttcatcttccccccaaagcccaaggatgtgctcaccattactctgactcctaaggtcacgtgtgttgtggtagacatcagcaaggatgatcccgaggtccagttcagctggtttgtagatgatgtggaggtgcacacagctcagacgcaaccccgggaggagcagttcaacagcactttccgctcagtcagtgaacttcccatcatgcaccaggactggctcaatggcaaggagttcaaatgcagggtcaacagtgcagctttccctgcccccatcgagaaaaccatctccaaaaccaaaggcagaccgaaggctccacaggtgtacaccattccacctcccaaggagcagatggccaaggataaagtcagtctgacctgcatgataacagacttcttccctgaagacattactgtggagtggcagtggaatgggcagccagcggagaactacaagaacactcagcccatcatggacacagatggctcttacttcgtctacagcaagctcaatgtgcagaagagcaactgggaggcaggaaatactttcacctgctctgtgttacatgagggcctgcacaaccaccatactgagaagagcctctcccactctcctggttagtaactcgaggacggggtgaactacgcctgaggatccgatctttttccctctgccaaaaattatggggacatcatgaagccccttgagcatctgacttctggctaataaaggaaatttattttcattgcaatagtgtgttggaattttttgtgtctctcactcggaagcaattcgttgatctgaatttcgaccacccataatacccattaccctggtagataagtagcatggcgggttaatcattaactacaaggaacccctagtgatggagttggccactccctctctgcgcgctcgctcgctcactgaggccgggcgaccaaaggtcgcccgacgcccgggctttgcccgggcggcctcagtgagcgagcgagcgcgcag

SEQ ID NO: 2076 - DNA, 130 bp, Artificial Sequence
  source: /note="Description of Artificial Sequence: Synthetic polynucleotide"
ctgcgcgctcgctcgctcactgaggccgcccgggcaaagcccgggcgtcgggcgacctttggtcgcccggcctcagtgagcgagcgagcgcgcagagagggagtggccaactccatcactaggggttcct

SEQ ID NO: 2077 - DNA, 141 bp, Artificial Sequence
  source: /note="Description of Artificial Sequence: Synthetic polynucleotide"
cctgcaggcagctgcgcgctcgctcgctcactgaggccgcccgggcaaagcccgggcgtcgggcgacctttggtcgcccggcctcagtgagcgagcgagcgcgcagagagggagtggccaactccatcactaggggttcct

SEQ ID NO: 2078 - DNA, 130 bp, Artificial Sequence
  source: /note="Description of Artificial Sequence: Synthetic polynucleotide"
aggaacccctagtgatggagttggccactccctctctgcgcgctcgctcgctcactgaggccgggcgaccaaaggtcgcccgacgcccgggctttgcccgggcggcctcagtgagcgagcgagcgcgcag

SEQ ID NO: 2079 - DNA, 141 bp, Artificial Sequence
  source: /note="Description of Artificial Sequence: Synthetic polynucleotide"
aggaacccctagtgatggagttggccactccctctctgcgcgctcgctcgctcactgaggccgggcgaccaaaggtcgcccgacgcccgggctttgcccgggcggcctcagtgagcgagcgagcgcgcagctgcctgcagg

SEQ ID NO: 2080 - DNA, 1715 bp, Artificial Sequence
  source: /note="Description of Artificial Sequence: Synthetic polynucleotide"
ctagttattaatagtaatcaattacggggtcattagttcatagcccatatatggagttccgcgttacataacttacggtaaatggcccgcctggctgaccgcccaacgacccccgcccattgacgtcaataatgacgtatgttcccatagtaacgccaatagggactttccattgacgtcaatgggtggagtatttacggtaaactgcccacttggcagtacatcaagtgtatcatatgccaagtacgccccctattgacgtcaatgacggtaaatggcccgcctggcattatgcccagtacatgaccttatgggactttcctacttggcagtacatctacgtattagtcatcgctattaccatggtcgaggtgagccccacgttctgcttcactctccccatctcccccccctccccacccccaattttgtatttatttattttttaattattttgtgcagcgatgggggcggggggggggggggggcgcgcgccaggcggggcggggcggggcgaggggcggggcggggcgaggcggagaggtgcggcggcagccaatcagagcggcgcgctccgaaagtttccttttatggcgaggcggcggcggcggcggccctataaaaagcgaagcgcgcggcgggcgggagtcgctgcgcgctgccttcgccccgtgccccgctccgccgccgcctcgcgccgcccgccccggctctgactgaccgcgttactcccacaggtgagcgggcgggacggcccttctcctccgggctgtaattagcgcttggtttaatgacggcttgtttcttttctgtggctgcgtgaaagccttgaggggctccgggagggccctttgtgcggggggagcggctcggggggtgcgtgcgtgtgtgtgtgcgtggggagcgccgcgtgcggctccgcgctgcccggcggctgtgagcgctgcgggcgcggcgcggggctttgtgcgctccgcagtgtgcgcgaggggagcgcggccgggggcggtgccccgcggtgcggggggggctgcgaggggaacaaaggctgcgtgcggggtgtgtgcgtgggggggtgagcagggggtgtgggcgcgtcggtcgggctgcaaccccccctgcacccccctccccgagttgctgagcacggcccggcttcgggtgcggggctccgtacggggcgtggcgcggggctcgccgtgccgggcggggggtggcggcaggtgggggtgccgggcggggcggggccgcctcgggccggggagggctcgggggaggggcgcggcggcccccggagcgccggcggctgtcgaggcgcggcgagccgcagccattgccttttatggtaatcgtgcgagagggcgcagggacttcctttgtcccaaatctgtgcggagccgaaatctgggaggcgccgccgcaccccctctagcgggcgcggggcgaagcggtgcggcgccggcaggaaggaaatgggcggggagggccttcgtgcgtcgccgcgccgccgtccccttctccctctccagcctcggggctgtccgcggggggacggctgccttcgggggggacggggcagggcggggttcggcttctggcgtgtgaccggcggctctagagcctctgctaaccatgttcatgccttcttctttttcctacagctcctgggcaacgtgctggttattgtgctgtctcatcattttggcaaagaattc

SEQ ID NO: 2081 - DNA, 299 bp, Artificial Sequence
  source: /note="Description of Artificial Sequence: Synthetic polynucleotide"
tagcccatatatggagttccgcgttacataacttacggtaaatggcccgcctggctgaccgcccaacgacccccgcccattgacgtcaataatgacgtatgttcccatagtaacgccaatagggactttccattgacgtcaatgggtggagtatttacggtaaactgcccacttggcagtacatcaagtgtatcatatgccaagtacgccccctattgacgtcaatgacggtaaatggcccgcctggcattatgcccagtacatgaccttatgggactttcctacttggcagtacatct

SEQ ID NO: 2082 - DNA, 283 bp, Artificial Sequence
  source: /note="Description of Artificial Sequence: Synthetic polynucleotide"
catggtcgaggtgagccccacgttctgcttcactctccccatctcccccccctccccacccccaattttgtatttatttattttttaattattttgtgcagcgatgggggcggggggggggggggggcgcgcgccaggcggggcggggcggggcgaggggcggggcggggcgaggcggagaggtgcggcggcagccaatcagagcggcgcgctccgaaagtttccttttatggcgaggcggcggcggcggcggccctataaaaagcgaagcgcgcggcgggcg

SEQ ID NO: 2083 - DNA, 260 bp, Artificial Sequence
  source: /note="Description of Artificial Sequence: Synthetic polynucleotide"
ccacgttctgcttcactctccccatctcccccccctccccacccccaattttgtatttatttattttttaattattttgtgcagcgatgggggcggggggggggggcgcgcgccaggcggggcggggcggggcgaggggcggggcggggcgaggcggagaggtgcggcggcagccaatcagagcggcgcgctccgaaagtttccttttatggcgaggcggcggcggcggcggccctataaaaagcgaagcgcgcggcggg

SEQ ID NO: 2084 - DNA, 654 bp, Artificial Sequence
  source: /note="Description of Artificial Sequence: Synthetic polynucleotide"
cgacattgattattgactagttattaatagtaatcaattacggggtcattagttcatagcccatatatggagttccgcgttacataacttacggtaaatggcccgcctggctgaccgcccaacgacccccgcccattgacgtcaataatgacgtatgttcccatagtaacgccaatagggactttccattgacgtcaatgggtggagtatttacggtaaactgcccacttggcagtacatcaagtgtatcatatgccaagtacgccccctattgacgtcaatgacggtaaatggcccgcctggcattatgcccagtacatgaccttatgggactttcctacttggcagtacatctacgtattagtcatcgctattaccatgtcgaggccacgttctgcttcactctccccatctcccccccctccccacccccaattttgtatttatttattttttaattattttgtgcagcgatgggggcggggggggggggcgcgcgccaggcggggcggggcggggcgaggggcggggcggggcgaggcggagaggtgcggcggcagccaatcagagcggcgcgctccgaaagtttccttttatggcgaggcggcggcggcggcggccctataaaaagcgaagcgcgcggcgggcgggagc

SEQ ID NO: 2085 - DNA, 699 bp, Artificial Sequence
  source: /note="Description of Artificial Sequence: Synthetic polynucleotide"
gatctaacatatcctggtgtggagtagcggacgctgctatgacagaggctcgggggcctgagctggctctgtgagctggggaggaggcagacagccaggccttgtctgcaagcagacctggcagcattgggctggccgccccccagggcctcctcttcatgcccagtgaatgactcaccttggcacagacacaatgttcggggtgggcacagtgcctgcttcccgccgcaccccagcccccctcaaatgccttccgagaagcccattgagcagggggcttgcattgcaccccagcctgacagcctggcatcttgggataaaagcagcacagccccctaggggctgcccttgctgtgtggcgccaccggcggtggagaacaaggctctattcagcctgtgcccaggaaaggggatcaggggatgcccaggcatggacagtgggtggcagggggggagaggagggctgtctgcttcccagaagtccaaggacacaaatgggtgaggggagagctctccccatagctgggctgcggcccaaccccaccccctcaggctatgccagggggtgttgccaggggcacccgggcatcgccagtctagcccactccttcataaagccctcgcatcccaggagcgagcagagccagagcaggttggagaggagacgcatcacctccgctgctcgcggggatcctctag

SEQ ID NO: 2086 - DNA, 557 bp, Artificial Sequence
  source: /note="Description of Artificial Sequence: Synthetic polynucleotide"
tagtatctgcagagggccctgcgtatgagtgcaagtgggttttaggaccaggatgaggcggggtgggggtgcctacctgacgaccgaccccgacccactggacaagcacccaacccccattccccaaattgcgcatcccctatcagagagggggaggggaaacaggatgcggcgaggcgcgtgcgcactgccagcttcagcaccgcggacagtgccttcgcccccgcctggcggcgcgcgccaccgccgcctcagcactgaaggcgcgctgacgtcactcgccggtcccccgcaaactccccttcccggccaccttggtcgcgtccgcgccgccgccggcccagccggaccgcaccacgcgaggcgcgagataggggggcacgggcgcgaccatctgcgctgcggcgccggcgactcagcgctgcctcagtctgcggtgggcagcggaggagtcgtgtcgtgcctgagagcgcagctgtgctcctgggcaccgcgcagtccgcccccgcggctcctggccagaccacccctaggaccccctgccccaagtcgcagcc

SEQ ID NO: 2087 - DNA, 382 bp, Artificial Sequence
  source: /note="Description of Artificial Sequence: Synthetic polynucleotide"
ctagtcgacattgattattgactagttattaatagtaatcaattacggggtcattagttcatagcccatatatggagttccgcgttacataacttacggtaaatggcccgcctggctgaccgcccaacgacccccgcccattgacgtcaataatgacgtatgttcccatagtaacgccaatagggactttccattgacgtcaatgggtggagtatttacggtaaactgcccacttggcagtacatcaagtgtatcatatgccaagtacgccccctattgacgtcaatgacggtaaatggcccgcctggcattatgcccagtacatgaccttatgggactttcctacttggcagtacatctacgtattagtcatcgctattac

SEQ ID NO: 2088 - DNA, 1736 bp, Artificial Sequence
  source: /note="Description of Artificial Sequence: Synthetic polynucleotide"
ctagtcgacattgattattgactagttattaatagtaatcaattacggggtcattagttcatagcccatatatggagttccgcgttacataacttacggtaaatggcccgcctggctgaccgcccaacgacccccgcccattgacgtcaataatgacgtatgttcccatagtaacgccaatagggactttccattgacgtcaatgggtggagtatttacggtaaactgcccacttggcagtacatcaagtgtatcatatgccaagtacgccccctattgacgtcaatgacggtaaatggcccgcctggcattatgcccagtacatgaccttatgggactttcctacttggcagtacatctacgtattagtcatcgctattaccatggtcgaggtgagccccacgttctgcttcactctccccatctcccccccctccccacccccaattttgtatttatttattttttaattattttgtgcagcgatgggggcggggggggggggggggcgcgcgccaggcggggcggggcggggcgaggggcggggcggggcgaggcggagaggtgcggcggcagccaatcagagcggcgcgctccgaaagtttccttttatggcgaggcggcggcggcggcggccctataaaaagcgaagcgcgcggcgggcgggagtcgctgcgcgctgccttcgccccgtgccccgctccgccgccgcctcgcgccgcccgccccggctctgactgaccgcgttactcccacaggtgagcgggcgggacggcccttctcctccgggctgtaattagcgcttggtttaatgacggcttgtttcttttctgtggctgcgtgaaagccttgaggggctccgggagggccctttgtgcggggggagcggctcggggggtgcgtgcgtgtgtgtgtgcgtggggagcgccgcgtgcggctccgcgctgcccggcggctgtgagcgctgcgggcgcggcgcggggctttgtgcgctccgcagtgtgcgcgaggggagcgcggccgggggcggtgccccgcggtgcggggggggctgcgaggggaacaaaggctgcgtgcggggtgtgtgcgtgggggggtgagcagggggtgtgggcgcgtcggtcgggctgcaaccccccctgcacccccctccccgagttgctgagcacggcccggcttcgggtgcggggctccgtacggggcgtggcgcggggctcgccgtgccgggcggggggtggcggcaggtgggggtgccgggcggggcggggccgcctcgggccggggagggctcgggggaggggcgcggcggcccccggagcgccggcggctgtcgaggcgcggcgagccgcagccattgccttttatggtaatcgtgcgagagggcgcagggacttcctttgtcccaaatctgtgcggagccgaaatctgggaggcgccgccgcaccccctctagcgggcgcggggcgaagcggtgcggcgccggcaggaaggaaatgggcggggagggccttcgtgcgtcgccgcgccgccgtccccttctccctctccagcctcggggctgtccgcggggggacggctgccttcgggggggacggggcagggcggggttcggcttctggcgtgtgaccggcggctctagagcctctgctaaccatgttcatgccttcttctttttcctacagctcctgggcaacgtgctggttattgtgctgtctcatcattttggcaaagaattc

SEQ ID NO: 2089 - DNA, 365 bp, Artificial Sequence
  source: /note="Description of Artificial Sequence: Synthetic polynucleotide"
ctagtcgacattgattattgactagttattaatagtaatcaattacggggtcattagttcatagcccatatatggagttccgcgttacataacttacggtaaatggcccgcctggctgaccgcccaacgacccccgcccattgacgtcaataatgacgtatgttcccatagtaacgccaatagggactttccattgacgtcaatgggtggagtatttacggtaaactgcccacttggcagtacatcaagtgtatcatatgccaagtacgccccctattgacgtcaatgacggtaaatggcccgcctggcattatgcccagtacatgaccttatgggactttcctacttggcagtacatctacgta

SEQ ID NO: 2090 - DNA, 134 bp, Artificial Sequence
  source: /note="Description of Artificial Sequence: Synthetic polynucleotide"
tcagatcgcctggagacgccatccacgctgttttgacctccatagaagacaccgggaccgatccagcctccgcggattcgaatcccggccgggaacggtgcattggaacgcggattccccgtgccaagagtgac

SEQ ID NO: 2091 - DNA, 102 bp, Artificial Sequence
  source: /note="Description of Artificial Sequence: Synthetic polynucleotide"
ttgacctccatagaagacaccgggaccgatccagcctccgcggattcgaatcccggccgggaacggtgcattggaacgcggattccccgtgccaagagtgac

SEQ ID NO: 2092 - DNA, 59 bp, Artificial Sequence
  source: /note="Description of Artificial Sequence: Synthetic oligonucleotide"
attcgaatcccggccgggaacggtgcattggaacgcggattccccgtgccaagagtgac

SEQ ID NO: 2093 - DNA, 53 bp, Artificial Sequence
  source: /note="Description of Artificial Sequence: Synthetic oligonucleotide"
ctcctgggcaacgtgctggtctgtgtgctggcccatcactttggcaaagaatt

SEQ ID NO: 2094 - DNA, 54 bp, Artificial Sequence
  source: /note="Description of Artificial Sequence: Synthetic oligonucleotide"
ctcctgggcaacgtgctggttattgtgctgtctcatcattttggcaaagaattc

SEQ ID NO: 2095 - DNA, 32 bp, Artificial Sequence
  source: /note="Description of Artificial Sequence: Synthetic oligonucleotide"
gtaagtaccgcctatagagtctataggcccac

SEQ ID NO: 2096 - DNA, 15 bp, Artificial Sequence
  source: /note="Description of Artificial Sequence: Synthetic oligonucleotide"
gtaagtaccgcctat

SEQ ID NO: 2097 - DNA, 347 bp, Artificial Sequence
  source: /note="Description of Artificial Sequence: Synthetic polynucleotide"
aaaaaatgctttcttcttttaatatacttttttgtttatcttatttctaatactttccctaatctctttctttcagggcaataatgatacaatgtatcatgcctctttgcaccattctaaagaataacagtgataatttctgggttaaggcaatagcaatatttctgcatataaatatttctgcatataaattgtaactgatgtaagaggtttcatattgctaatagcagctacaatccagctaccattctgcttttattttatggttgggataaggctggattattctgagtccaagctaggcccttttgctaatcatgttcatacctcttatcttcctcccacag

SEQ ID NO: 2098 - DNA, 168 bp, Artificial Sequence
  source: /note="Description of Artificial Sequence: Synthetic polynucleotide"
tctgcatataaattgtaactgatgtaagaggtttcatattgctaatagcagctacaatccagctaccattctgcttttattttatggttgggataaggctggattattctgagtccaagctaggcccttttgctaatcatgttcatacctcttatcttcctcccacag

SEQ ID NO: 2099 - DNA, 73 bp, Artificial Sequence
  source: /note="Description of Artificial Sequence: Synthetic oligonucleotide"
aaaaaatgctttcttcttttaatatacttttcttttgctaatcatgttcatacctcttatcttcctcccacag

SEQ ID NO: 2100 - DNA, 73 bp, Artificial Sequence
  source: /note="Description of Artificial Sequence: Synthetic oligonucleotide"
aggctggattattctgagtccaagctaggcccttttgctaatcatgttcatacctcttatcttcctcccacag

SEQ ID NO: 2101 - DNA, 73 bp, Artificial Sequence
  source: /note="Description of Artificial Sequence: Synthetic oligonucleotide"
aaaaaatgctttcttcttttcaagctaggcccttttgctaatcatgttcatacctcttatcttcctcccacag

SEQ ID NO: 2102 - DNA, 53 bp, Artificial Sequence
  source: /note="Description of Artificial Sequence: Synthetic oligonucleotide"
caagctaggcccttttgctaatcatgttcatacctcttatcttcctcccacag

SEQ ID NO: 2103 - DNA, 172 bp, Artificial Sequence
  source: /note="Description of Artificial Sequence: Synthetic polynucleotide"
gaactgaaaaaccagaaagttaactggtaagtttagtctttttgtcttttatttcaggtcccggatccggtggtggtgcaaatcaaagaactgctcctcagtggatgttgcctttacttctaggcctgtacggaagtgttacttctgctctaaaagctgcggaattgtaccc

SEQ ID NO: 2104 - DNA, 1074 bp, Artificial Sequence
  source: /note="Description of Artificial Sequence: Synthetic polynucleotide"
ggagtcgctgcgcgctgccttcgccccgtgccccgctccgccgccgcctcgcgccgcccgccccggctctgactgaccgcgttactcccacaggtgagcgggcgggacggcccttctcctccgggctgtaattagcgcttggtttaatgacggcttgtttcttttctgtggctgcgtgaaagccttgaggggctccgggagggccctttgtgcggggggagcggctcggggggtgcgtgcgtgtgtgtgtgcgtggggagcgccgcgtgcggctccgcgctgcccggcggctgtgagcgctgcgggcgcggcgcggggctttgtgcgctccgcagtgtgcgcgaggggagcgcggccgggggcggtgccccgcggtgcggggggggctgcgaggggaacaaaggctgcgtgcggggtgtgtgcgtgggggggtgagcagggggtgtgggcgcgtcggtcgggctgcaaccccccctgcacccccctccccgagttgctgagcacggcccggcttcgggtgcggggctccgtacggggcgtggcgcggggctcgccgtgccgggcggggggtggcggcaggtgggggtgccgggcggggcggggccgcctcgggccggggagggctcgggggaggggcgcggcggcccccggagcgccggcggctgtcgaggcgcggcgagccgcagccattgccttttatggtaatcgtgcgagagggcgcagggacttcctttgtcccaaatctgtgcggagccgaaatctgggaggcgccgccgcaccccctctagcgggcgcggggcgaagcggtgcggcgccggcaggaaggaaatgggcggggagggccttcgtgcgtcgccgcgccgccgtccccttctccctctccagcctcggggctgtccgcggggggacggctgccttcgggggggacggggcagggcggggttcggcttctggcgtgtgaccggcggctctagagcctctgctaaccatgttcatgccttcttctttttcctacagctcctgggcaacgtgctggttattgtgctgtctcatcattttggcaaagaattcgag

SEQ ID NO: 2105 - DNA, 41 bp, Artificial Sequence
  source: /note="Description of Artificial Sequence: Synthetic oligonucleotide"
cctctgctaaccatgttcatgccttcttctttttcctacag

SEQ ID NO: 2106 - DNA, 84 bp, Artificial Sequence
  source: /note="Description of Artificial Sequence: Synthetic oligonucleotide"
atggcgacgggttcaagaacttccctacttcttgcatttggcctgctttgtttgccgtggttacaggagggctcggcagctgcc

SEQ ID NO: 2107 - DNA, 93 bp, Artificial Sequence
  source: /note="Description of Artificial Sequence: Synthetic oligonucleotide"
gccgccaccatggcgacgggttcaagaacttccctacttcttgcatttggcctgctttgtttgccgtggttacaggagggctcggcagctgcc

SEQ ID NO: 2108 - DNA, 96 bp, Artificial Sequence
  source: /note="Description of Artificial Sequence: Synthetic oligonucleotide"
gccgccaccatgggggtgcacgaatgtcctgcctggctgtggcttctcctgtccctgctgtcgctccctctgggcctcccagtcctgggcgctgcc

SEQ ID NO: 2109 - DNA, 66 bp, Artificial Sequence
  source: /note="Description of Artificial Sequence: Synthetic oligonucleotide"
gccgccaccatgggagtcaaagttctgtttgccctgatctgcatcgctgtggccgaggccgctgcc

SEQ ID NO: 2110 - DNA, 72 bp, Artificial Sequence
  source: /note="Description of Artificial Sequence: Synthetic oligonucleotide"
gccgccaccatgaaacacctgtggttcttcctcctgctggtggcagctcccagatgggtcctgtccgctgcc

SEQ ID NO: 2111 - DNA, 93 bp, Artificial Sequence
  source: /note="Description of Artificial Sequence: Synthetic oligonucleotide"
gccgccaccatggacctcctgcacaagaacatgaaacacctgtggttcttcctcctcctggtggcagctcccagatgggtgctgtccgctgcc

SEQ ID NO: 2112 - DNA, 69 bp, Artificial Sequence
  source: /note="Description of Artificial Sequence: Synthetic oligonucleotide"
gccgccaccatggctttcctctggctcctctcctgctgggccctcctgggtaccaccttcggcgctgcc

SEQ ID NO: 2113 - DNA, 81 bp, Artificial Sequence
  source: /note="Description of Artificial Sequence: Synthetic oligonucleotide"
gccgccaccatgccccccaagaagtgcctgctgctgctgctgaccctgctgctgctgatctccaccaccttcggcgctgcc

SEQ ID NO: 2114 - DNA, 12 bp, Artificial Sequence
  source: /note="Description of Artificial Sequence: Synthetic oligonucleotide"
gccgccaccatg

SEQ ID NO: 2115 - DNA, 81 bp, Artificial Sequence
  source: /note="Description of Artificial Sequence: Synthetic oligonucleotide"
gccgccaccatggacatgagggtccctgctcagctcctggggctcctgctgctctggctctcaggtgccagatgtgctgcc

SEQ ID NO: 2116 - DNA, 66 bp, Artificial Sequence
  source: /note="Description of Artificial Sequence: Synthetic oligonucleotide"
gccgccaccatggaaatcaaggtgctgtttgccctcatctgtattgctgttgctgaggcagctgcc

SEQ ID NO: 2117 - DNA, 78 bp, Artificial Sequence
  source: /note="Description of Artificial Sequence: Synthetic oligonucleotide"
gccgccaccatggagacagacacactcctgctatgggtactgctgctctgggttccaggttccactggtgacgctgcc

SEQ ID NO: 2118 - DNA, 27 bp, Artificial Sequence
  source: /note="Description of Artificial Sequence: Synthetic oligonucleotide"
tacccatacgatgttccagattacgct

SEQ ID NO: 2119 - DNA, 21 bp, Artificial Sequence
  source: /note="Description of Artificial Sequence: Synthetic oligonucleotide"
agcgagaaggacgagctgtag

SEQ ID NO: 2120 - DNA, 18 bp, Artificial Sequence
  source: /note="Description of Artificial Sequence: Synthetic oligonucleotide"
agcgagaaggacgagctg

SEQ ID NO: 2121 - DNA, 18 bp, Artificial Sequence
  source: /note="Description of Artificial Sequence: Synthetic oligonucleotide"
catcaccatcaccatcac

SEQ ID NO: 2122 - DNA, 127 bp, Artificial Sequence
  source: /note="Description of Artificial Sequence: Synthetic polynucleotide"
gatctttttccctctgccaaaaattatggggacatcatgaagccccttgagcatctgacttctggctaataaaggaaatttattttcattgcaatagtgtgttggaattttttgtgtctctcactcg

SEQ ID NO: 2123 - DNA, 477 bp, Artificial Sequence
  source: /note="Description of Artificial Sequence: Synthetic polynucleotide"
gggtggcatccctgtgacccctccccagtgcctctcctggccctggaagttgccactccagtgcccaccagccttgtcctaataaaattaagttgcatcattttgtctgactaggtgtccttctataatattatggggtggaggggggtggtatggagcaaggggcaagttgggaagacaacctgtagggcctgcggggtctattgggaaccaagctggagtgcagtggcacaatcttggctcactgcaatctccgcctcctgggttcaagcgattctcctgcctcagcctcccgagttgttgggattccaggcatgcatgaccaggctcagctaatttttgtttttttggtagagacggggtttcaccatattggccaggctggtctccaactcctaatctcaggtgatctacccaccttggcctcccaaattgctgggattacaggcgtgaaccactgctcccttccctgtcctt

SEQ ID NO: 2124 - DNA, 552 bp, Artificial Sequence
  source: /note="Description of Artificial Sequence: Synthetic polynucleotide"
gaattcactcctcaggtgcaggctgcctatcagaaggtggtggctggtgtggccaatgccctggctcacaaataccactgagatctttttccctctgccaaaaattatggggacatcatgaagccccttgagcatctgacttctggctaataaaggaaatttattttcattgcaatagtgtgttggaattttttgtgtctctcactcggaaggacatatgggagggcaaatcatttaaaacatcagaatgagtatttggtttagagtttggcaacatatgcccatatgctggctgccatgaacaaaggttggctataaagaggtcatcagtatatgaaacagccccctgctgtccattccttattccatagaaaagccttgacttgaggttagattttttttatattttgttttgtgttatttttttctttaacatccctaaaattttccttacatgttttactagccagatttttcctcctctcctgactactcccagtcatagctgtccctcttctcttatggagatccctcgacctgcagcccaagctt

SEQ ID NO: 2125 - DNA, 1153 bp, Artificial Sequence
  source: /note="Description of Artificial Sequence: Synthetic polynucleotide"
cctaggtttcttgagacctctacaagagttggagttgacacttggggtactttcttggtgtaacgaactaatagcctgaaaaaaagaagtcatgtgttttcagcaaggcaagaaactgtctaacatagtagataaaacagagaacacttggccggaatcaactaagatgttgctatgttccattcatcatattatctccatctgcagagtagtgggttagtggagggtagaaaacattctcctgaacaactagttaaacttggctttgagttccacctgtaccacttgcataatcttgggaaagtgagttgcctaattcagtgacattaataaatttattaatttcttctttcaataaaacctggagagagcttcatatgtatcagcatatgctaaacttgaaagatacaagtagaaaatggaaggaaatatatctgactcaatagggatagttcaagggttaaattaaaagtagtaaagtattataattaatctgacatggtacctaatatataataatcatgtattaagaatgccagtcaccattaaaagtcaatgtatgactttaatctactcgaggaaagaaactatgtcttgttcactgttattatctctaaaatccataatcagaagagcaccatgtgtatgagccacacaataaatatctactgtataatatgtctcttcttgtttttaaccttcatagataagactctattgaattgggacattagtccagcaagccattctgtctctgtctcttctatggagggaaaggtttaaccatcaaagactaggtgcatctcccaaacaacctgaatttaatattcaaatatgtatctaaattcatttgttacatttttgtgttcagcttacatattactttttgagcgacatctattcaaggcctactacttgctgctctacaaaatattgccatgctctatttgcccattaactatttcttaaccttcaagggacatgctcagttctgatataccaagatttggtatttaccctcccagcctacatacttccaatcttaagagaacaatttttagactacattcaaatatagacctctccaccccatcaactattttatctctcctctcctatctttcttgacaaagagtgattagaaatatgcaat

SEQ ID NO: 2126 - DNA, 1240 bp, Artificial Sequence
  source: /note="Description of Artificial Sequence: Synthetic polynucleotide"
attatatttttttaaagactcacatagtcttctgcacagggcattctttttgcttcaggatgtttacaacatttgctgcccacttttcctaggtttcttgagacctctacaagagttggagttgacacttggggtactttcttggtgtaacgaactaatagcctgaaaaaaagaagtcatgtgttttcagcaaggcaagaaactgtctaacatagtagataaaacagagaacacttggccggaatcaactaagatgttgctatgttccattcatcatattatctccatctgcagagtagtgggttagtggagggtagaaaacattctcctgaacaactagttaaacttggctttgagttccacctgtaccacttgcataatcttgggaaagtgagttgcctaattcagtgacattaataaatttattaatttcttctttcaataaaacctggagagagcttcatatgtatcagcatatgctaaacttgaaagatacaagtagaaaatggaaggaaatatatctgactcaatagggatagttcaagggttaaattaaaagtagtaaagtattataattaatctgacatggtacctaatatataataatcatgtattaagaatgccagtcaccattaaaagtcaatgtatgactttaatctactcgaggaaagaaactatgtcttgttcactgttattatctctaaaatccataatcagaagagcaccatgtgtatgagccacacaataaatatctactgtataatatgtctcttcttgtttttaaccttcatagataagactctattgaattgggacattagtccagcaagccattctgtctctgtctcttctatggagggaaaggtttaaccatcaaagactaggtgcatctcccaaacaacctgaatttaatattcaaatatgtatctaaattcatttgttacatttttgtgttcagcttacatattactttttgagcgacatctattcaaggcctactacttgctgctctacaaaatattgccatgctctatttgcccattaactatttcttaaccttcaagggacatgctcagttctgatataccaagatttggtatttaccctcccagcctacatacttccaatcttaagagaacaatttttagactacattcaaatatagacctctccaccccatcaactattttatctctcctctcctatctttcttgacaaagagtgattagaaatatgcaat

SEQ ID NO: 2127 - protein, 441 aa, Homo sapiens
MAEPRQEFEVMEDHAGTYGLGDRKDQGGYTMHQDQEGDTDAGLKESPLQTPTEDGSEEPGSETSDAKSTPTAEDVTAPLVDEGAPGKQAAAQPHTEIPEGTTAEEAGIGDTPSLEDEAAGHVTQARMVSKSKDGTGSDDKKAKGADGKTKIATPRGAAPPGQKGQANATRIPAKTPPAPKTPPSSGEPPKSGDRSGYSSPGSPGTPGSRSRTPSLPTPPTREPKKVAVVRTPPKSPSSAKSRLQTAPVPMPDLKNVKSKIGSTENLKHQPGGGKVQIINKKLDLSNVQSKCGSKDNIKHVPGGGSVQIVYKPVDLSKVTSKCGSLGNIHHKPGGGQVEVKSEKLDFKDRVQSKIGSLDNITHVPGGGNKKIETHKLTFRENAKAKTDHGAEIVYKSPVVSGDTSPRHLSNVSSTGSIDMVDSPQLATLADEVSASLAKQGL

SEQ ID NO: 2128 - protein, 18 aa, Artificial Sequence
  source: /note="Description of Artificial Sequence: Synthetic peptide"
  MOD_RES (11)..(11): phosphoThr
SPGTPGSRSRXPSLPTPP

SEQ ID NO: 2129 - protein, 15 aa, Artificial Sequence
  source: /note="Description of Artificial Sequence: Synthetic peptide"
  MOD_RES (8)..(8): phosphoThr
SRTPSLPXPPTREPK

SEQ ID NO: 2130 - protein, 15 aa, Artificial Sequence
  source: /note="Description of Artificial Sequence: Synthetic peptide"
  MOD_RES (8)..(8): phosphoThr
KKVAVVRXPPKSPSS

SEQ ID NO: 2131 - protein, 20 aa, Artificial Sequence
  source: /note="Description of Artificial Sequence: Synthetic peptide"
  MOD_RES (8)..(8): phosphoThr
  MOD_RES (13)..(13): phosphoThr
TPGSRSRXPSLPXPPTREPK

SEQ ID NO: 2132 - protein, 29 aa, Artificial Sequence
  source: /note="Description of Artificial Sequence: Synthetic peptide"
  MOD_RES (8)..(8): phosphoThr
  MOD_RES (22)..(22): phosphoThr
SRTPSLPXPPTREPKKVAVVRXPPKSPSS

SEQ ID NO: 2133 - protein, 34 aa, Artificial Sequence
  source: /note="Description of Artificial Sequence: Synthetic polypeptide"
  MOD_RES (8)..(8): phosphoThr
  MOD_RES (13)..(13): phosphoThr
  MOD_RES (27)..(27): phosphoThr
TPGSRSRXPSLPXPPTREPKKVAVVRXPPKSPSS

SEQ ID NO: 2134 - protein, 34 aa, Artificial Sequence
  source: /note="Description of Artificial Sequence: Synthetic polypeptide"
TPGSRSRTPSLPTPPTREPKKVAVVRTPPKSPSS

SEQ ID NO: 2135 - protein, 34 aa, Artificial Sequence
  source: /note="Description of Artificial Sequence: Synthetic polypeptide"
  MOD_RES (8)..(8): phosphoThr
  MOD_RES (27)..(27): phosphoThr
TPGSRSRXPSLPTPPTREPKKVAVVRXPPKSPSS

SEQ ID NO: 2136 - protein, 49 aa, Artificial Sequence
  source: /note="Description of Artificial Sequence: Synthetic polypeptide"
TPPSSGEPPKSGDRSGYSSPGSPGTPGSRSRTPSLPTPPTREPKKVAVV

SEQ ID NO: 2137 - DNA, 3950 bp, Artificial Sequence
  source: /note="Description of Artificial Sequence: Synthetic polynucleotide"
ctgcgcgctcgctcgctcactgaggccgcccgggcaaagcccgggcgtcgggcgacctttggtcgcccggcctcagtgagcgagcgagcgcgcagagagggagtggccaactccatcactaggggttccttgtagttaatgattaacccgccatgctacttatctaccagggtaatggggatcctctagaactatagctagtcgacattgattattgactagttattaatagtaatcaattacggggtcattagttcatagcccatatatggagttccgcgttacataacttacggtaaatggcccgcctggctgaccgcccaacgacccccgcccattgacgtcaataatgacgtatgttcccatagtaacgccaatagggactttccattgacgtcaatgggtggagtatttacggtaaactgcccacttggcagtacatcaagtgtatcatatgccaagtacgccccctattgacgtcaatgacggtaaatggcccgcctggcattatgcccagtacatgaccttatgggactttcctacttggcagtacatctacgtattagtcatcgctattaccatgtcgaggccacgttctgcttcactctccccatctcccccccctccccacccccaattttgtatttatttattttttaattattttgtgcagcgatgggggcggggggggggggcgcgcgccaggcggggcggggcggggcgaggggcggggcggggcgaggcggagaggtgcggcggcagccaatcagagcggcgcgctccgaaagtttccttttatggcgaggcggcggcggcggcggccctataaaaagcgaagcgcgcggcgggcgggagcaagcttcgtttagtgaaccgtcagatcgcctggagacgccatccacgctgttttgacctccatagaagacaccgggaccgatccagcctccgcggattcgaatcccggccgggaacggtgcattggaacgcggattccccgtgccaagagtgacgtaagtaccgcctatagagtctataggcccacaaaaaatgctttcttcttttaatatacttttttgtttatcttatttctaatactttccctaatctctttctttcagggcaataatgatacaatgtatcatgcctctttgcaccattctaaagaataacagtgataatttctgggttaaggcaatagcaatatttctgcatataaatatttctgcatataaattgtaactgatgtaagaggtttcatattgctaatagcagctacaatccagctaccattctgcttttattttatggttgggataaggctggattattctgagtccaagctaggcccttttgctaatcatgttcatacctcttatcttcctcccacagctcctgggcaacgtgctggtctgtgtgctggcccatcactttggcaaagaattgggattcgaaccggtgccgccaccatgaagttgcctgttaggctgttggtgctgatgttctggattcctgcttccagcagtgatgttttgatgacccaaactccactctccctgcctgtcagtcttggagatcaagcctccatctcttgcaaatctagtcagagcattgtacatagtaatggaaacacctatttagaatggtacctgcagaaaccaggccagtctccaaagctcctggtctacaaagtttccaatcgattttctggggtcccagacaggttcagtggcagtggatcagggacagatttcacactcaagatcagcagagtggaggctgaggatctgggaacttattactgctttcaaggttcacttgttccttgggcgttcggtggaggcaccaagctggaaatcaaacgggctgatgctgcaccaactgtatccatcttcccaccatccagtgagcagttaacatctggaggtgcctcagtcgtgtgcttcttgaacaacttctaccccaaagacatcaatgtcaagtggaagattgatggcagtgaacgacaaaatggcgtcctgaacagttggactgatcaggacagcaaagacagcacctacagcatgagcagcaccctcacgttgaccaaggacgagtatgaacgacataacagctatacctgtgaggccactcacaagacatcaacttcacccattgtcaagagcttcaacaggaatgagtgtgagggcagaggaagtcttctaacatgcggtgacgtggaggagaatcccggccctatgaacttcgggctcagcttgattttccttgtccttgttttaaaaggtgtccagtgtgaggttcatctggtggagtctgggggagccttagtgaagcctggagggtccctgaaactctcctgtgcagcctctggattcagtttcagtaaatatggcatgtcttgggttcgccagactccagacaagaggctggagtgggtcgcaaccattagtagtagtgggagtcgcacctactatccagacagtgtgaagggccaattcaccatctccagagacaatgccaagaacaccctgtacctgcaaatgagcagtctgaagtctgaggacacagccatgtattactgttcaattagctgggacggtgctatggactactggggtcaagggacctcagtcaccgtctcctcagccaaaacgacacccccatctgtctatccactggcccctggatctgctgcccaaactaactccatggtgaccctgggatgcctggtcaagggctatttccctgagccagtgacagtgacctggaactctggatccctgtccagcggtgtgcacaccttcccagctgtcctgcagtctgacctctacactctgagcagctcagtgactgtcccctccagcacctggcccagcgagaccgtcacctgcaacgttgcccacccggccagcagcaccaaggtggacaagaaaattgtgcccagggattgtggttgtaagccttgcatatgtacagtcccagaagtatcatctgtcttcatcttccccccaaagcccaaggatgtgctcaccattactctgactcctaaggtcacgtgtgttgtggtagacatcagcaaggatgatcccgaggtccagttcagctggtttgtagatgatgtggaggtgcacacagctcagacgcaaccccgggaggagcagttcaacagcactttccgctcagtcagtgaacttcccatcatgcaccaggactggctcaatggcaaggagttcaaatgcagggtcaacagtgcagctttccctgcccccatcgagaaaaccatctccaaaaccaaaggcagaccgaaggctccacaggtgtacaccattccacctcccaaggagcagatggccaaggataaagtcagtctgacctgcatgataacagacttcttccctgaagacattactgtggagtggcagtggaatgggcagccagcggagaactacaagaacactcagcccatcatggacacagatggctcttacttcgtctacagcaagctcaatgtgcagaagagcaactgggaggcaggaaatactttcacctgctctgtgttacatgagggcctgcacaaccaccatactgagaagagcctctcccactctcctggttagtaactcgaggacggggtgaactacgcctgaggatccgatctttttccctctgccaaaaattatggggacatcatgaagccccttgagcatctgacttctggctaataaaggaaatttattttcattgcaatagtgtgttggaattttttgtgtctctcactcggcctaggtagataagtagcatggcgggttaatcattaactacaaggaacccctagtgatggagttggccactccctctctgcgcgctcgctcgctcactgaggccgggcgaccaaaggtcgcccgacgcccgggctttgcccgggcggcctcagtgagcgagcgagcgcgcag

SEQ ID NO: 2138 - DNA, 3962 bp, Artificial Sequence
  source: /note="Description of Artificial Sequence: Synthetic polynucleotide"
ctgcgcgctcgctcgctcactgaggccgcccgggcaaagcccgggcgtcgggcgacctttggtcgcccggcctcagtgagcgagcgagcgcgcagagagggagtggccaactccatcactaggggttccttgtagttaatgattaacccgccatgctacttatctaccagggtaatggggatcctctagaactatagctagtcgacattgattattgactagttattaatagtaatcaattacggggtcattagttcatagcccatatatggagttccgcgttacataacttacggtaaatggcccgcctggctgaccgcccaacgacccccgcccattgacgtcaataatgacgtatgttcccatagtaacgccaatagggactttccattgacgtcaatgggtggagtatttacggtaaactgcccacttggcagtacatcaagtgtatcatatgccaagtacgccccctattgacgtcaatgacggtaaatggcccgcctggcattatgcccagtacatgaccttatgggactttcctacttggcagtacatctacgtattagtcatcgctattaccatgtcgaggccacgttctgcttcactctccccatctcccccccctccccacccccaattttgtatttatttattttttaattattttgtgcagcgatgggggcggggggggggggcgcgcgccaggcggggcggggcggggcgaggggcggggcggggcgaggcggagaggtgcggcggcagccaatcagagcggcgcgctccgaaagtttccttttatggcgaggcggcggcggcggcggccctataaaaagcgaagcgcgcggcgggcgggagcaagcttcgtttagtgaaccgtcagatcgcctggagacgccatccacgctgttttgacctccatagaagacaccgggaccgatccagcctccgcggattcgaatcccggccgggaacggtgcattggaacgcggattccccgtgccaagagtgacgtaagtaccgcctatagagtctataggcccacaaaaaatgctttcttcttttaatatacttttttgtttatcttatttctaatactttccctaatctctttctttcagggcaataatgatacaatgtatcatgcctctttgcaccattctaaagaataacagtgataatttctgggttaaggcaatagcaatatttctgcatataaatatttctgcatataaattgtaactgatgtaagaggtttcatattgctaatagcagctacaatccagctaccattctgcttttattttatggttgggataaggctggattattctgagtccaagctaggcccttttgctaatcatgttcatacctcttatcttcctcccacagctcctgggcaacgtgctggtctgtgtgctggcccatcactttggcaaagaattgggattcgaaccggtgccgccaccatgaacttcgggctcagcttgattttccttgtccttgttttaaaaggtgtccagtgtcaggtgcagctgcagcagagcgacgccgagctggtgaaacctggggccagcgtcaagatcagctgcaaggcctccggctacaccttcaccgaccgcaccatccactgggtgaagcagcggcccgagcaggggctggagtggatcgggtacatctaccccggggacggctccaccaagtacaacgagaacttcaagggcaaagccaccctgacggccgacaagtccagcagcaccgcctacatgcagctgaacagcctgaccagcgaggacagcgccgtgtacttctgcgcccggcggggggctatggactactggggccagggcacctccgtgaccgtgtcctccgccaaaacgacacccccatctgtctatccactggcccctggatctgctgcccaaactaactccatggtgaccctgggatgcctggtcaagggctatttccctgagccagtgacagtgacctggaactctggatccctgtccagcggtgtgcacaccttcccagctgtcctgcagtctgacctctacactctgagcagctcagtgactgtcccctccagcacctggcccagcgagaccgtcacctgcaacgttgcccacccggccagcagcaccaaggtggacaagaaaattgtgcccagggattgtggttgtaagccttgcatatgtacagtcccagaagtatcatctgtcttcatcttccccccaaagcccaaggatgtgctcaccattactctgactcctaaggtcacgtgtgttgtggtagacatcagcaaggatgatcccgaggtccagttcagctggtttgtagatgatgtggaggtgcacacagctcagacgcaaccccgggaggagcagttcaacagcactttccgctcagtcagtgaacttcccatcatgcaccaggactggctcaatggcaaggagttcaaatgcagggtcaacagtgcagctttccctgcccccatcgagaaaaccatctccaaaaccaaaggcagaccgaaggctccacaggtgtacaccattccacctcccaaggagcagatggccaaggataaagtcagtctgacctgcatgataacagacttcttccctgaagacattactgtggagtggcagtggaatgggcagccagcggagaactacaagaacactcagcccatcatggacacagatggctcttacttcgtctacagcaagctcaatgtgcagaagagcaactgggaggcaggaaatactttcacctgctctgtgttacatgagggcctgcacaaccaccatactgagaagagcctctcccactctcctggtcgggccaagcggggaagcggagtgaaacagactttgaattttgaccttctcaagttggcgggagacgtggagtccaaccctggacctatgaagttgcctgttaggctgttggtgctgatgttctggattcctgcttccagcagtgacgtgcagatgatccagagccccagcagcctgagcgcctcgctgggggacatcgtgaccatgacctgccaggcctcccagggcaccagcatcaacctcaactggttccagcagaagcccggcaaggcccccaagctcctcatctacggggccagcaacctggaggacggcgtgccctcccgcttcagcggctcccgctacggcacggacttcacgctgaccatctcctccctggaggacgaggacatggccacctacttctgcctgcagcacacctacctgcccttcaccttcggcagcgggaccaagctggagatcaagcgggctgatgctgcaccaactgtatccatcttcccaccatccagtgagcagttaacatctggaggtgcctcagtcgtgtgcttcttgaacaacttctaccccaaagacatcaatgtcaagtggaagattgatggcagtgaacgacaaaatggcgtcctgaacagttggactgatcaggacagcaaagacagcacctacagcatgagcagcaccctcacgttgaccaaggacgagtatgaacgacataacagctatacctgtgaggccactcacaagacatcaacttcacccattgtcaagagcttcaacaggaatgagtgttagtaactcgaggacggggtgaactacgcctgaggatccgatctttttccctctgccaaaaattatggggacatcatgaagccccttgagcatctgacttctggctaataaaggaaatttattttcattgcaatagtgtgttggaattttttgtgtctctcactcggcctaggtagataagtagcatggcgggttaatcattaactacaaggaacccctagtgatggagttggccactccctctctgcgcgctcgctcgctcactgaggccgggcgaccaaaggtcgcccgacgcccgggctttgcccgggcggcctcagtgagcgagcgagcgcgcag

SEQ ID NO: 2139 - DNA, 4450 bp, Artificial Sequence
  source: /note="Description of Artificial Sequence: Synthetic polynucleotide"
ctgcgcgctcgctcgctcactgaggccgcccgggcaaagcccgggcgtcgggcgacctttggtcgcccggcctcagtgagcgagcgagcgcgcagagagggagtggccaactccatcactaggggttccttgtagttaatgattaacccgccatgctacttatctaccagggtaatggggatcctctagaactatagctagtcgacataacgcgtctagttattaatagtaatcaattacggggtcattagttcatagcccatatatggagttccgcgttacataacttacggtaaatggcccgcctggctgaccgcccaacgacccccgcccattgacgtcaataatgacgtatgttcccatagtaacgccaatagggactttccattgacgtcaatgggtggagtatttacggtaaactgcccacttggcagtacatcaagtgtatcatatgccaagtacgccccctattgacgtcaatgacggtaaatggcccgcctggcattatgcccagtacatgaccttatgggactttcctacttggcagtacatctacgtattagtcatcgctattaccatggtcgaggtgagccccacgttctgcttcactctccccatctcccccccctccccacccccaattttgtatttatttattttttaattattttgtgcagcgatgggggcggggggggggggggggcgcgcgccaggcggggcggggcggggcgaggggcggggcggggcgaggcggagaggtgcggcggcagccaatcagagcggcgcgctccgaaagtttccttttatggcgaggcggcggcggcggcggccctataaaaagcgaagcgcgcggcgggcgggagtcgctgcgcgctgccttcgccccgtgccccgctccgccgccgcctcgcgccgcccgccccggctctgactgaccgcgttactcccacaggtgagcgggcgggacggcccttctcctccgggctgtaattagcgcttggtttaatgacggcttgtttcttttctgtggctgcgtgaaagccttgaggggctccgggagggccctttgtgcggggggagcggctcggggggtgcgtgcgtgtgtgtgtgcgtggggagcgccgcgtgcggctccgcgctgcccggcggctgtgagcgctgcgggcgcggcgcggggctttgtgcgctccgcagtgtgcgcgaggggagcgcggccgggggcggtgccccgcggtgcggggggggctgcgaggggaacaaaggctgcgtgcggggtgtgtgcgtgggggggtgagcagggggtgtgggcgcgtcggtcgggctgcaaccccccctgcacccccctccccgagttgctgagcacggcccggcttcgggtgcggggctccgtacggggcgtggcgcggggctcgccgtgccgggcggggggtggcggcaggtgggggtgccgggcggggcggggccgcctcgggccggggagggctcgggggaggggcgcggcggcccccggagcgccggcggctgtcgaggcgcggcgagccgcagccattgccttttatggtaatcgtgcgagagggcgcagggacttcctttgtcccaaatctgtgcggagccgaaatctgggaggcgccgccgcaccccctctagcgggcgcggggcgaagcggtgcggcgccggcaggaaggaaatgggcggggagggccttcgtgcgtcgccgcgccgccgtccccttctccctctccagcctcggggctgtccgcggggggacggctgccttcgggggggacggggcagggcggggttcggcttctggcgtgtgaccggcggctctagagcctctgctaaccatgttcatgccttcttctttttcctacagctcctgggcaacgtgctggttattgtgctgtctcatcattttggcaaagaattcgggattcgaaccggtgccgccaccatgaacttcgggctcagcttgattttccttgtccttgttttaaaaggtgtccagtgtcaggtgcagctgcagcagagcgacgccgagctggtgaaacctggggccagcgtcaagatcagctgcaaggcctccggctacaccttcaccgaccgcaccatccactgggtgaagcagcggcccgagcaggggctggagtggatcgggtacatctaccccggggacggctccaccaagtacaacgagaacttcaagggcaaagccaccctgacggccgacaagtccagcagcaccgcctacatgcagctgaacagcctgaccagcgaggacagcgccgtgtacttctgcgcccggcggggggctatggactactggggccagggcacctccgtgaccgtgtcctccgccaaaacgacacccccatctgtctatccactggcccctggatctgctgcccaaactaactccatggtgaccctgggatgcctggtcaagggctatttccctgagccagtgacagtgacctggaactctggatccctgtccagcggtgtgcacaccttcccagctgtcctgcagtctgacctctacactctgagcagctcagtgactgtcccctccagcacctggcccagcgagaccgtcacctgcaacgttgcccacccggccagcagcaccaaggtggacaagaaaattgtgcccagggattgtggttgtaagccttgcatatgtacagtcccagaagtatcatctgtcttcatcttccccccaaagcccaaggatgtgctcaccattactctgactcctaaggtcacgtgtgttgtggtagacatcagcaaggatgatcccgaggtccagttcagctggtttgtagatgatgtggaggtgcacacagctcagacgcaaccccgggaggagcagttcaacagcactttccgctcagtcagtgaacttcccatcatgcaccaggactggctcaatggcaaggagttcaaatgcagggtcaacagtgcagctttccctgcccccatcgagaaaaccatctccaaaaccaaaggcagaccgaaggctccacaggtgtacaccattccacctcccaaggagcagatggccaaggataaagtcagtctgacctgcatgataacagacttcttccctgaagacattactgtggagtggcagtggaatgggcagccagcggagaactacaagaacactcagcccatcatggacacagatggctcttacttcgtctacagcaagctcaatgtgcagaagagcaactgggaggcaggaaatactttcacctgctctgtgttacatgagggcctgcacaaccaccatactgagaagagcctctcccactctcctggtcgggccaagcggggaagcggagtgaaacagactttgaattttgaccttctcaagttggcgggagacgtggagtccaaccctggacctatgaagttgcctgttaggctgttggtgctgatgttctggattcctgcttccagcagtgacgtgcagatgatccagagccccagcagcctgagcgcctcgctgggggacatcgtgaccatgacctgccaggcctcccagggcaccagcatcaacctcaactggttccagcagaagcccggcaaggcccccaagctcctcatctacggggccagcaacctggaggacggcgtgccctcccgcttcagcggctcccgctacggcacggacttcacgctgaccatctcctccctggaggacgaggacatggccacctacttctgcctgcagcacacctacctgcccttcaccttcggcagcgggaccaagctggagatcaagcgggctgatgctgcaccaactgtatccatcttcccaccatccagtgagcagttaacatctggaggtgcctcagtcgtgtgcttcttgaacaacttctaccccaaagacatcaatgtcaagtggaagattgatggcagtgaacgacaaaatggcgtcctgaacagttggactgatcaggacagcaaagacagcacctacagcatgagcagcaccctcacgttgaccaaggacgagtatgaacgacataacagctatacctgtgaggccactcacaagacatcaacttcacccattgtcaagagcttcaacaggaatgagtgttagtaactcgaggacggggtgaactacgcctgaggatccgatctttttccctctgccaaaaattatggggacatcatgaagccccttgagcatctgacttctggctaataaaggaaatttattttcattgcaatagtgtgttggaattttttgtgtctctcactcggcctaggtagataagtagcatggcgggttaatcattaactacaaggaacccctagtgatggagttggccactccctctctgcgcgctcgctcgctcactgaggccgggcgaccaaaggtcgcccgacgcccgggctttgcccgggcggcctcagtgagcgagcgagcgcgcag

SEQ ID NO: 2140 - DNA, 4020 bp, Artificial Sequence
  source: /note="Description of Artificial Sequence: Synthetic polynucleotide"
ctgcgcgctcgctcgctcactgaggccgcccgggcaaagcccgggcgtcgggcgacctttggtcgcccggcctcagtgagcgagcgagcgcgcagagagggagtggccaactccatcactaggggttccttgtagttaatgattaacccgccatgctacttatctaccagggtaatggggatcctctagaactatagctagtcgacataacgcgtgatctaacatatcctggtgtggagtagcggacgctgctatgacagaggctcgggggcctgagctggctctgtgagctggggaggaggcagacagccaggccttgtctgcaagcagacctggcagcattgggctggccgccccccagggcctcctcttcatgcccagtgaatgactcaccttggcacagacacaatgttcggggtgggcacagtgcctgcttcccgccgcaccccagcccccctcaaatgccttccgagaagcccattgagcagggggcttgcattgcaccccagcctgacagcctggcatcttgggataaaagcagcacagccccctaggggctgcccttgctgtgtggcgccaccggcggtggagaacaaggctctattcagcctgtgcccaggaaaggggatcaggggatgcccaggcatggacagtgggtggcagggggggagaggagggctgtctgcttcccagaagtccaaggacacaaatgggtgaggggagagctctccccatagctgggctgcggcccaaccccaccccctcaggctatgccagggggtgttgccaggggcacccgggcatcgccagtctagcccactccttcataaagccctcgcatcccaggagcgagcagagccagagcaggttggagaggagacgcatcacctccgctgctcgcggggatcctctagaagcttcgtttagtgaaccgtcagatcgcctggagacgccatccacgctgttttgacctccatagaagacaccgggaccgatccagcctccgcggattcgaatcccggccgggaacggtgcattggaacgcggattccccgtgccaagagtgacgtaagtaccgcctatagagtctataggcccacaaaaaatgctttcttcttttaatatacttttttgtttatcttatttctaatactttccctaatctctttctttcagggcaataatgatacaatgtatcatgcctctttgcaccattctaaagaataacagtgataatttctgggttaaggcaatagcaatatttctgcatataaatatttctgcatataaattgtaactgatgtaagaggtttcatattgctaatagcagctacaatccagctaccattctgcttttattttatggttgggataaggctggattattctgagtccaagctaggcccttttgctaatcatgttcatacctcttatcttcctcccacagctcctgggcaacgtgctggtctgtgtgctggcccatcactttggcaaagaattgggattcgaaccggtgccgccaccatgaacttcgggctcagcttgattttccttgtccttgttttaaaaggtgtccagtgtcaggtgcagctgcagcagagcgacgccgagctggtgaaacctggggccagcgtcaagatcagctgcaaggcctccggctacaccttcaccgaccgcaccatccactgggtgaagcagcggcccgagcaggggctggagtggatcgggtacatctaccccggggacggctccaccaagtacaacgagaacttcaagggcaaagccaccctgacggccgacaagtccagcagcaccgcctacatgcagctgaacagcctgaccagcgaggacagcgccgtgtacttctgcgcccggcggggggctatggactactggggccagggcacctccgtgaccgtgtcctccgccaaaacgacacccccatctgtctatccactggcccctggatctgctgcccaaactaactccatggtgaccctgggatgcctggtcaagggctatttccctgagccagtgacagtgacctggaactctggatccctgtccagcggtgtgcacaccttcccagctgtcctgcagtctgacctctacactctgagcagctcagtgactgtcccctccagcacctggcccagcgagaccgtcacctgcaacgttgcccacccggccagcagcaccaaggtggacaagaaaattgtgcccagggattgtggttgtaagccttgcatatgtacagtcccagaagtatcatctgtcttcatcttccccccaaagcccaaggatgtgctcaccattactctgactcctaaggtcacgtgtgttgtggtagacatcagcaaggatgatcccgaggtccagttcagctggtttgtagatgatgtggaggtgcacacagctcagacgcaaccccgggaggagcagttcaacagcactttccgctcagtcagtgaacttcccatcatgcaccaggactggctcaatggcaaggagttcaaatgcagggtcaacagtgcagctttccctgcccccatcgagaaaaccatctccaaaaccaaaggcagaccgaaggctccacaggtgtacaccattccacctcccaaggagcagatggccaaggataaagtcagtctgacctgcatgataacagacttcttccctgaagacattactgtggagtggcagtggaatgggcagccagcggagaactacaagaacactcagcccatcatggacacagatggctcttacttcgtctacagcaagctcaatgtgcagaagagcaactgggaggcaggaaatactttcacctgctctgtgttacatgagggcctgcacaaccaccatactgagaagagcctctcccactctcctggtcgggccaagcggggaagcggagtgaaacagactttgaattttgaccttctcaagttggcgggagacgtggagtccaaccctggacctatgaagttgcctgttaggctgttggtgctgatgttctggattcctgcttccagcagtgacgtgcagatgatccagagccccagcagcctgagcgcctcgctgggggacatcgtgaccatgacctgccaggcctcccagggcaccagcatcaacctcaactggttccagcagaagcccggcaaggcccccaagctcctcatctacggggccagcaacctggaggacggcgtgccctcccgcttcagcggctcccgctacggcacggacttcacgctgaccatctcctccctggaggacgaggacatggccacctacttctgcctgcagcacacctacctgcccttcaccttcggcagcgggaccaagctggagatcaagcgggctgatgctgcaccaactgtatccatcttcccaccatccagtgagcagttaacatctggaggtgcctcagtcgtgtgcttcttgaacaacttctaccccaaagacatcaatgtcaagtggaagattgatggcagtgaacgacaaaatggcgtcctgaacagttggactgatcaggacagcaaagacagcacctacagcatgagcagcaccctcacgttgaccaaggacgagtatgaacgacataacagctatacctgtgaggccactcacaagacatcaacttcacccattgtcaagagcttcaacaggaatgagtgttagtaactcgaggacggggtgaactacgcctgaggatccgatctttttccctctgccaaaaattatggggacatcatgaagccccttgagcatctgacttctggctaataaaggaaatttattttcattgcaatagtgtgttggaattttttgtgtctctcactcggcctaggtagataagtagcatggcgggttaatcattaactacaaggaacccctagtgatggagttggccactccctctctgcgcgctcgctcgctcactgaggccgggcgaccaaaggtcgcccgacgcccgggctttgcccgggcggcctcagtgagcgagcgagcgcgcag

SEQ ID NO: 2141 - DNA, 3878 bp, Artificial Sequence
  source: /note="Description of Artificial Sequence: Synthetic polynucleotide"
ctgcgcgctcgctcgctcactgaggccgcccgggcaaagcccgggcgtcgggcgacctttggtcgcccggcctcagtgagcgagcgagcgcgcagagagggagtggccaactccatcactaggggttccttgtagttaatgattaacccgccatgctacttatctaccagggtaatggggatcctctagaactatagctagtcgacataacgcgttagtatctgcagagggccctgcgtatgagtgcaagtgggttttaggaccaggatgaggcggggtgggggtgcctacctgacgaccgaccccgacccactggacaagcacccaacccccattccccaaattgcgcatcccctatcagagagggggaggggaaacaggatgcggcgaggcgcgtgcgcactgccagcttcagcaccgcggacagtgccttcgcccccgcctggcggcgcgcgccaccgccgcctcagcactgaaggcgcgctgacgtcactcgccggtcccccgcaaactccccttcccggccaccttggtcgcgtccgcgccgccgccggcccagccggaccgcaccacgcgaggcgcgagataggggggcacgggcgcgaccatctgcgctgcggcgccggcgactcagcgctgcctcagtctgcggtgggcagcggaggagtcgtgtcgtgcctgagagcgcagctgtgctcctgggcaccgcgcagtccgcccccgcggctcctggccagaccacccctaggaccccctgccccaagtcgcagccaagcttcgtttagtgaaccgtcagatcgcctggagacgccatccacgctgttttgacctccatagaagacaccgggaccgatccagcctccgcggattcgaatcccggccgggaacggtgcattggaacgcggattccccgtgccaagagtgacgtaagtaccgcctatagagtctataggcccacaaaaaatgctttcttcttttaatatacttttttgtttatcttatttctaatactttccctaatctctttctttcagggcaataatgatacaatgtatcatgcctctttgcaccattctaaagaataacagtgataatttctgggttaaggcaatagcaatatttctgcatataaatatttctgcatataaattgtaactgatgtaagaggtttcatattgctaatagcagctacaatccagctaccattctgcttttattttatggttgggataaggctggattattctgagtccaagctaggcccttttgctaatcatgttcatacctcttatcttcctcccacagctcctgggcaacgtgctggtctgtgtgctggcccatcactttggcaaagaattgggattcgaaccggtgccgccaccatgaacttcgggctcagcttgattttccttgtccttgttttaaaaggtgtccagtgtcaggtgcagctgcagcagagcgacgccgagctggtgaaacctggggccagcgtcaagatcagctgcaaggcctccggctacaccttcaccgaccgcaccatccactgggtgaagcagcggcccgagcaggggctggagtggatcgggtacatctaccccggggacggctccaccaagtacaacgagaacttcaagggcaaagccaccctgacggccgacaagtccagcagcaccgcctacatgcagctgaacagcctgaccagcgaggacagcgccgtgtacttctgcgcccggcggggggctatggactactggggccagggcacctccgtgaccgtgtcctccgccaaaacgacacccccatctgtctatccactggcccctggatctgctgcccaaactaactccatggtgaccctgggatgcctggtcaagggctatttccctgagccagtgacagtgacctggaactctggatccctgtccagcggtgtgcacaccttcccagctgtcctgcagtctgacctctacactctgagcagctcagtgactgtcccctccagcacctggcccagcgagaccgtcacctgcaacgttgcccacccggccagcagcaccaaggtggacaagaaaattgtgcccagggattgtggttgtaagccttgcatatgtacagtcccagaagtatcatctgtcttcatcttccccccaaagcccaaggatgtgctcaccattactctgactcctaaggtcacgtgtgttgtggtagacatcagcaaggatgatcccgaggtccagttcagctggtttgtagatgatgtggaggtgcacacagctcagacgcaaccccgggaggagcagttcaacagcactttccgctcagtcagtgaacttcccatcatgcaccaggactggctcaatggcaaggagttcaaatgcagggtcaacagtgcagctttccctgcccccatcgagaaaaccatctccaaaaccaaaggcagaccgaaggctccacaggtgtacaccattccacctcccaaggagcagatggccaaggataaagtcagtctgacctgcatgataacagacttcttccctgaagacattactgtggagtggcagtggaatgggcagccagcggagaactacaagaacactcagcccatcatggacacagatggctcttacttcgtctacagcaagctcaatgtgcagaagagcaactgggaggcaggaaatactttcacctgctctgtgttacatgagggcctgcacaaccaccatactgagaagagcctctcccactctcctggtcgggccaagcggggaagcggagtgaaacagactttgaattttgaccttctcaagttggcgggagacgtggagtccaaccctggacctatgaagttgcctgttaggctgttggtgctgatgttctggattcctgcttccagcagtgacgtgcagatgatccagagccccagcagcctgagcgcctcgctgggggacatcgtgaccatgacctgccaggcctcccagggcaccagcatcaacctcaactggttccagcagaagcccggcaaggcccccaagctcctcatctacggggccagcaacctggaggacggcgtgccctcccgcttcagcggctcccgctacggcacggacttcacgctgaccatctcctccctggaggacgaggacatggccacctacttctgcctgcagcacacctacctgcccttcaccttcggcagcgggaccaagctggagatcaagcgggctgatgctgcaccaactgtatccatcttcccaccatccagtgagcagttaacatctggaggtgcctcagtcgtgtgcttcttgaacaacttctaccccaaagacatcaatgtcaagtggaagattgatggcagtgaacgacaaaatggcgtcctgaacagttggactgatcaggacagcaaagacagcacctacagcatgagcagcaccctcacgttgaccaaggacgagtatgaacgacataacagctatacctgtgaggccactcacaagacatcaacttcacccattgtcaagagcttcaacaggaatgagtgttagtaactcgaggacggggtgaactacgcctgaggatccgatctttttccctctgccaaaaattatggggacatcatgaagccccttgagcatctgacttctggctaataaaggaaatttattttcattgcaatagtgtgttggaattttttgtgtctctcactcggcctaggtagataagtagcatggcgggttaatcattaactacaaggaacccctagtgatggagttggccactccctctctgcgcgctcgctcgctcactgaggccgggcgaccaaaggtcgcccgacgcccgggctttgcccgggcggcctcagtgagcgagcgagcgcgcag

SEQ ID NO: 2142 - DNA, 3950 bp, Artificial Sequence
  source: /note="Description of Artificial Sequence: Synthetic polynucleotide"
ctgcgcgctcgctcgctcactgaggccgcccgggcaaagcccgggcgtcgggcgacctttggtcgcccggcctcagtgagcgagcgagcgcgcagagagggagtggccaactccatcactaggggttccttgtagttaatgattaacccgccatgctacttatctaccagggtaatggggatcctctagaactatagctagtcgacattgattattgactagttattaatagtaatcaattacggggtcattagttcatagcccatatatggagttccgcgttacataacttacggtaaatggcccgcctggctgaccgcccaacgacccccgcccattgacgtcaataatgacgtatgttcccatagtaacgccaatagggactttccattgacgtcaatgggtggagtatttacggtaaactgcccacttggcagtacatcaagtgtatcatatgccaagtacgccccctattgacgtcaatgacggtaaatggcccgcctggcattatgcccagtacatgaccttatgggactttcctacttggcagtacatctacgtattagtcatcgctattaccatgtcgaggccacgttctgcttcactctccccatctcccccccctccccacccccaattttgtatttatttattttttaattattttgtgcagcgatgggggcggggggggggggcgcgcgccaggcggggcggggcggggcgaggggcggggcggggcgaggcggagaggtgcggcggcagccaatcagagcggcgcgctccgaaagtttccttttatggcgaggcggcggcggcggcggccctataaaaagcgaagcgcgcggcgggcgggagcaagcttcgtttagtgaaccgtcagatcgcctggagacgccatccacgctgttttgacctccatagaagacaccgggaccgatccagcctccgcggattcgaatcccggccgggaacggtgcattggaacgcggattccccgtgccaagagtgacgtaagtaccgcctatagagtctataggcccacaaaaaatgctttcttcttttaatatacttttttgtttatcttatttctaatactttccctaatctctttctttcagggcaataatgatacaatgtatcatgcctctttgcaccattctaaagaataacagtgataatttctgggttaaggcaatagcaatatttctgcatataaatatttctgcatataaattgtaactgatgtaagaggtttcatattgctaatagcagctacaatccagctaccattctgcttttattttatggttgggataaggctggattattctgagtccaagctaggcccttttgctaatcatgttcatacctcttatcttcctcccacagctcctgggcaacgtgctggtctgtgtgctggcccatcactttggcaaagaattgggattcgaaccggtgccgccaccatgaagttgcctgttaggctgttggtgctgatgttctggattcctgcttccagcagtgacgtgcagatgatccagagccccagcagcctgagcgcctcgctgggggacatcgtgaccatgacctgccaggcctcccagggcaccagcatcaacctcaactggttccagcagaagcccggcaaggcccccaagctcctcatctacggggccagcaacctggaggacggcgtgccctcccgcttcagcggctcccgctacggcacggacttcacgctgaccatctcctccctggaggacgaggacatggccacctacttctgcctgcagcacacctacctgcccttcaccttcggcagcgggaccaagctggagatcaagcgggctgatgctgcaccaactgtatccatcttcccaccatccagtgagcagttaacatctggaggtgcctcagtcgtgtgcttcttgaacaacttctaccccaaagacatcaatgtcaagtggaagattgatggcagtgaacgacaaaatggcgtcctgaacagttggactgatcaggacagcaaagacagcacctacagcatgagcagcaccctcacgttgaccaaggacgagtatgaacgacataacagctatacctgtgaggccactcacaagacatcaacttcacccattgtcaagagcttcaacaggaatgagtgtggaagcggagtgaaacagactttgaattttgaccttctcaagttggcgggagacgtggagtccaaccctggacctatgaacttcgggctcagcttgattttccttgtccttgttttaaaaggtgtccagtgtcaggtgcagctgcagcagagcgacgccgagctggtgaaacctggggccagcgtcaagatcagctgcaaggcctccggctacaccttcaccgaccgcaccatccactgggtgaagcagcggcccgagcaggggctggagtggatcgggtacatctaccccggggacggctccaccaagtacaacgagaacttcaagggcaaagccaccctgacggccgacaagtccagcagcaccgcctacatgcagctgaacagcctgaccagcgaggacagcgccgtgtacttctgcgcccggcggggggctatggactactggggccagggcacctccgtgaccgtgtcctccgccaaaacgacacccccatctgtctatccactggcccctggatctgctgcccaaactaactccatggtgaccctgggatgcctggtcaagggctatttccctgagccagtgacagtgacctggaactctggatccctgtccagcggtgtgcacaccttcccagctgtcctgcagtctgacctctacactctgagcagctcagtgactgtcccctccagcacctggcccagcgagaccgtcacctgcaacgttgcccacccggccagcagcaccaaggtggacaagaaaattgtgcccagggattgtggttgtaagccttgcatatgtacagtcccagaagtatcatctgtcttcatcttccccccaaagcccaaggatgtgctcaccattactctgactcctaaggtcacgtgtgttgtggtagacatcagcaaggatgatcccgaggtccagttcagctggtttgtagatgatgtggaggtgcacacagctcagacgcaaccccgggaggagcagttcaacagcactttccgctcagtcagtgaacttcccatcatgcaccaggactggctcaatggcaaggagttcaaatgcagggtcaacagtgcagctttccctgcccccatcgagaaaaccatctccaaaaccaaaggcagaccgaaggctccacaggtgtacaccattccacctcccaaggagcagatggccaaggataaagtcagtctgacctgcatgataacagacttcttccctgaagacattactgtggagtggcagtggaatgggcagccagcggagaactacaagaacactcagcccatcatggacacagatggctcttacttcgtctacagcaagctcaatgtgcagaagagcaactgggaggcaggaaatactttcacctgctctgtgttacatgagggcctgcacaaccaccatactgagaagagcctctcccactctcctggttagtaactcgaggacggggtgaactacgcctgaggatccgatctttttccctctgccaaaaattatggggacatcatgaagccccttgagcatctgacttctggctaataaaggaaatttattttcattgcaatagtgtgttggaattttttgtgtctctcactcggcctaggtagataagtagcatggcgggttaatcattaactacaaggaacccctagtgatggagttggccactccctctctgcgcgctcgctcgctcactgaggccgggcgaccaaaggtcgcccgacgcccgggctttgcccgggcggcctcagtgagcgagcgagcgcgcag

SEQ ID NO: 2143 - DNA, 4438 bp, Artificial Sequence
  source: /note="Description of Artificial Sequence: Synthetic polynucleotide"
ctgcgcgctcgctcgctcactgaggccgcccgggcaaagcccgggcgtcgggcgacctttggtcgcccggcctcagtgagcgagcgagcgcgcagagagggagtggccaactccatcactaggggttccttgtagttaatgattaacccgccatgctacttatctaccagggtaatggggatcctctagaactatagctagtcgacataacgcgtctagttattaatagtaatcaattacggggtcattagttcatagcccatatatggagttccgcgttacataacttacggtaaatggcccgcctggctgaccgcccaacgacccccgcccattgacgtcaataatgacgtatgttcccatagtaacgccaatagggactttccattgacgtcaatgggtggagtatttacggtaaactgcccacttggcagtacatcaagtgtatcatatgccaagtacgccccctattgacgtcaatgacggtaaatggcccgcctggcattatgcccagtacatgaccttatgggactttcctacttggcagtacatctacgtattagtcatcgctattaccatggtcgaggtgagccccacgttctgcttcactctccccatctcccccccctccccacccccaattttgtatttatttattttttaattattttgtgcagcgatgggggcggggggggggggggggcgcgcgccaggcggggcggggcggggcgaggggcggggcggggcgaggcggagaggtgcggcggcagccaatcagagcggcgcgctccgaaagtttccttttatggcgaggcggcggcggcggcggccctataaaaagcgaagcgcgcggcgggcgggagtcgctgcgcgctgccttcgccccgtgccccgctccgccgccgcctcgcgccgcccgccccggctctgactgaccgcgttactcccacaggtgagcgggcgggacggcccttctcctccgggctgtaattagcgcttggtttaatgacggcttgtttcttttctgtggctgcgtgaaagccttgaggggctccgggagggccctttgtgcggggggagcggctcggggggtgcgtgcgtgtgtgtgtgcgtggggagcgccgcgtgcggctccgcgctgcccggcggctgtgagcgctgcgggcgcggcgcggggctttgtgcgctccgcagtgtgcgcgaggggagcgcggccgggggcggtgccccgcggtgcggggggggctgcgaggggaacaaaggctgcgtgcggggtgtgtgcgtgggggggtgagcagggggtgtgggcgcgtcggtcgggctgcaaccccccctgcacccccctccccgagttgctgagcacggcccggcttcgggtgcggggctccgtacggggcgtggcgcggggctcgccgtgccgggcggggggtggcggcaggtgggggtgccgggcggggcggggccgcctcgggccggggagggctcgggggaggggcgcggcggcccccggagcgccggcggctgtcgaggcgcggcgagccgcagccattgccttttatggtaatcgtgcgagagggcgcagggacttcctttgtcccaaatctgtgcggagccgaaatctgggaggcgccgccgcaccccctctagcgggcgcggggcgaagcggtgcggcgccggcaggaaggaaatgggcggggagggccttcgtgcgtcgccgcgccgccgtccccttctccctctccagcctcggggctgtccgcggggggacggctgccttcgggggggacggggcagggcggggttcggcttctggcgtgtgaccggcggctctagagcctctgctaaccatgttcatgccttcttctttttcctacagctcctgggcaacgtgctggttattgtgctgtctcatcattttggcaaagaattcgggattcgaaccggtgccgccaccatgaagttgcctgttaggctgttggtgctgatgttctggattcctgcttccagcagtgacgtgcagatgatccagagccccagcagcctgagcgcctcgctgggggacatcgtgaccatgacctgccaggcctcccagggcaccagcatcaacctcaactggttccagcagaagcccggcaaggcccccaagctcctcatctacggggccagcaacctggaggacggcgtgccctcccgcttcagcggctcccgctacggcacggacttcacgctgaccatctcctccctggaggacgaggacatggccacctacttctgcctgcagcacacctacctgcccttcaccttcggcagcgggaccaagctggagatcaagcgggctgatgctgcaccaactgtatccatcttcccaccatccagtgagcagttaacatctggaggtgcctcagtcgtgtgcttcttgaacaacttctaccccaaagacatcaatgtcaagtggaagattgatggcagtgaacgacaaaatggcgtcctgaacagttggactgatcaggacagcaaagacagcacctacagcatgagcagcaccctcacgttgaccaaggacgagtatgaacgacataacagctatacctgtgaggccactcacaagacatcaacttcacccattgtcaagagcttcaacaggaatgagtgtggaagcggagtgaaacagactttgaattttgaccttctcaagttggcgggagacgtggagtccaaccctggacctatgaacttcgggctcagcttgattttccttgtccttgttttaaaaggtgtccagtgtcaggtgcagctgcagcagagcgacgccgagctggtgaaacctggggccagcgtcaagatcagctgcaaggcctccggctacaccttcaccgaccgcaccatccactgggtgaagcagcggcccgagcaggggctggagtggatcgggtacatctaccccggggacggctccaccaagtacaacgagaacttcaagggcaaagccaccctgacggccgacaagtccagcagcaccgcctacatgcagctgaacagcctgaccagcgaggacagcgccgtgtacttctgcgcccggcggggggctatggactactggggccagggcacctccgtgaccgtgtcctccgccaaaacgacacccccatctgtctatccactggcccctggatctgctgcccaaactaactccatggtgaccctgggatgcctggtcaagggctatttccctgagccagtgacagtgacctggaactctggatccctgtccagcggtgtgcacaccttcccagctgtcctgcagtctgacctctacactctgagcagctcagtgactgtcccctccagcacctggcccagcgagaccgtcacctgcaacgttgcccacccggccagcagcaccaaggtggacaagaaaattgtgcccagggattgtggttgtaagccttgcatatgtacagtcccagaagtatcatctgtcttcatcttccccccaaagcccaaggatgtgctcaccattactctgactcctaaggtcacgtgtgttgtggtagacatcagcaaggatgatcccgaggtccagttcagctggtttgtagatgatgtggaggtgcacacagctcagacgcaaccccgggaggagcagttcaacagcactttccgctcagtcagtgaacttcccatcatgcaccaggactggctcaatggcaaggagttcaaatgcagggtcaacagtgcagctttccctgcccccatcgagaaaaccatctccaaaaccaaaggcagaccgaaggctccacaggtgtacaccattccacctcccaaggagcagatggccaaggataaagtcagtctgacctgcatgataacagacttcttccctgaagacattactgtggagtggcagtggaatgggcagccagcggagaactacaagaacactcagcccatcatggacacagatggctcttacttcgtctacagcaagctcaatgtgcagaagagcaactgggaggcaggaaatactttcacctgctctgtgttacatgagggcctgcacaaccaccatactgagaagagcctctcccactctcctggttagtaactcgaggacggggtgaactacgcctgaggatccgatctttttccctctgccaaaaattatggggacatcatgaagccccttgagcatctgacttctggctaataaaggaaatttattttcattgcaatagtgtgttggaattttttgtgtctctcactcggcctaggtagataagtagcatggcgggttaatcattaactacaaggaacccctagtgatggagttggccactccctctctgcgcgctcgctcgctcactgaggccgggcgaccaaaggtcgcccgacgcccgggctttgcccgggcggcctcagtgagcgagcgagcgcgcag

SEQ ID NO: 2144 - DNA, 4008 bp, Artificial Sequence
  source: /note="Description of Artificial Sequence: Synthetic polynucleotide"
ctgcgcgctcgctcgctcactgaggccgcccgggcaaagcccgggcgtcgggcgacctttggtcgcccggcctcagtgagcgagcgagcgcgcagagagggagtggccaactccatcactaggggttccttgtagttaatgattaacccgccatgctacttatctaccagggtaatggggatcctctagaactatagctagtcgacataacgcgtgatctaacatatcctggtgtggagtagcggacgctgctatgacagaggctcgggggcctgagctggctctgtgagctggggaggaggcagacagccaggccttgtctgcaagcagacctggcagcattgggctggccgccccccagggcctcctcttcatgcccagtgaatgactcaccttggcacagacacaatgttcggggtgggcacagtgcctgcttcccgccgcaccccagcccccctcaaatgccttccgagaagcccattgagcagggggcttgcattgcaccccagcctgacagcctggcatcttgggataaaagcagcacagccccctaggggctgcccttgctgtgtggcgccaccggcggtggagaacaaggctctattcagcctgtgcccaggaaaggggatcaggggatgcccaggcatggacagtgggtggcagggggggagaggagggctgtctgcttcccagaagtccaaggacacaaatgggtgaggggagagctctccccatagctgggctgcggcccaaccccaccccctcaggctatgccagggggtgttgccaggggcacccgggcatcgccagtctagcccactccttcataaagccctcgcatcccaggagcgagcagagccagagcaggttggagaggagacgcatcacctccgctgctcgcggggatcctctagaagcttcgtttagtgaaccgtcagatcgcctggagacgccatccacgctgttttgacctccatagaagacaccgggaccgatccagcctccgcggattcgaatcccggccgggaacggtgcattggaacgcggattccccgtgccaagagtgacgtaagtaccgcctatagagtctataggcccacaaaaaatgctttcttcttttaatatacttttttgtttatcttatttctaatactttccctaatctctttctttcagggcaataatgatacaatgtatcatgcctctttgcaccattctaaagaataacagtgataatttctgggttaaggcaatagcaatatttctgcatataaatatttctgcatataaattgtaactgatgtaagaggtttcatattgctaatagcagctacaatccagctaccattctgcttttattttatggttgggataaggctggattattctgagtccaagctaggcccttttgctaatcatgttcatacctcttatcttcctcccacagctcctgggcaacgtgctggtctgtgtgctggcccatcactttggcaaagaattgggattcgaaccggtgccgccaccatgaagttgcctgttaggctgttggtgctgatgttctggattcctgcttccagcagtgacgtgcagatgatccagagccccagcagcctgagcgcctcgctgggggacatcgtgaccatgacctgccaggcctcccagggcaccagcatcaacctcaactggttccagcagaagcccggcaaggcccccaagctcctcatctacggggccagcaacctggaggacggcgtgccctcccgcttcagcggctcccgctacggcacggacttcacgctgaccatctcctccctggaggacgaggacatggccacctacttctgcctgcagcacacctacctgcccttcaccttcggcagcgggaccaagctggagatcaagcgggctgatgctgcaccaactgtatccatcttcccaccatccagtgagcagttaacatctggaggtgcctcagtcgtgtgcttcttgaacaacttctaccccaaagacatcaatgtcaagtggaagattgatggcagtgaacgacaaaatggcgtcctgaacagttggactgatcaggacagcaaagacagcacctacagcatgagcagcaccctcacgttgaccaaggacgagtatgaacgacataacagctatacctgtgaggccactcacaagacatcaacttcacccattgtcaagagcttcaacaggaatgagtgtggaagcggagtgaaacagactttgaattttgaccttctcaagttggcgggagacgtggagtccaaccctggacctatgaacttcgggctcagcttgattttccttgtccttgttttaaaaggtgtccagtgtcaggtgcagctgcagcagagcgacgccgagctggtgaaacctggggccagcgtcaagatcagctgcaaggcctccggctacaccttcaccgaccgcaccatccactgggtgaagcagcggcccgagcaggggctggagtggatcgggtacatctaccccggggacggctccaccaagtacaacgagaacttcaagggcaaagccaccctgacggccgacaagtccagcagcaccgcctacatgcagctgaacagcctgaccagcgaggacagcgccgtgtacttctgcgcccggcggggggctatggactactggggccagggcacctccgtgaccgtgtcctccgccaaaacgacacccccatctgtctatccactggcccctggatctgctgcccaaactaactccatggtgaccctgggatgcctggtcaagggctatttccctgagccagtgacagtgacctggaactctggatccctgtccagcggtgtgcacaccttcccagctgtcctgcagtctgacctctacactctgagcagctcagtgactgtcccctccagcacctggcccagcgagaccgtcacctgcaacgttgcccacccggccagcagcaccaaggtggacaagaaaattgtgcccagggattgtggttgtaagccttgcatatgtacagtcccagaagtatcatctgtcttcatcttccccccaaagcccaaggatgtgctcaccattactctgactcctaaggtcacgtgtgttgtggtagacatcagcaaggatgatcccgaggtccagttcagctggtttgtagatgatgtggaggtgcacacagctcagacgcaaccccgggaggagcagttcaacagcactttccgctcagtcagtgaacttcccatcatgcaccaggactggctcaatggcaaggagttcaaatgcagggtcaacagtgcagctttccctgcccccatcgagaaaaccatctccaaaaccaaaggcagaccgaaggctccacaggtgtacaccattccacctcccaaggagcagatggccaaggataaagtcagtctgacctgcatgataacagacttcttccctgaagacattactgtggagtggcagtggaatgggcagccagcggagaactacaagaacactcagcccatcatggacacagatggctcttacttcgtctacagcaagctcaatgtgcagaagagcaactgggaggcaggaaatactttcacctgctctgtgttacatgagggcctgcacaaccaccatactgagaagagcctctcccactctcctggttagtaactcgaggacggggtgaactacgcctgaggatccgatctttttccctctgccaaaaattatggggacatcatgaagccccttgagcatctgacttctggctaataaaggaaatttattttcattgcaatagtgtgttggaattttttgtgtctctcactcggcctaggtagataagtagcatggcgggttaatcattaactacaaggaacccctagtgatggagttggccactccctctctgcgcgctcgctcgctcactgaggccgggcgaccaaaggtcgcccgacgcccgggctttgcccgggcggcctcagtgagcgagcgagcgcgcag

SEQ ID NO: 2145 - DNA, 3866 bp, Artificial Sequence
  source: /note="Description of Artificial Sequence: Synthetic polynucleotide"
ctgcgcgctcgctcgctcactgaggccgcccgggcaaagcccgggcgtcgggcgacctttggtcgcccggcctcagtgagcgagcgagcgcgcagagagggagtggccaactccatcactaggggttccttgtagttaatgattaacccgccatgctacttatctaccagggtaatggggatcctctagaactatagctagtcgacataacgcgttagtatctgcagagggccctgcgtatgagtgcaagtgggttttaggaccaggatgaggcggggtgggggtgcctacctgacgaccgaccccgacccactggacaagcacccaacccccattccccaaattgcgcatcccctatcagagagggggaggggaaacaggatgcggcgaggcgcgtgcgcactgccagcttcagcaccgcggacagtgccttcgcccccgcctggcggcgcgcgccaccgccgcctcagcactgaaggcgcgctgacgtcactcgccggtcccccgcaaactccccttcccggccaccttggtcgcgtccgcgccgccgccggcccagccggaccgcaccacgcgaggcgcgagataggggggcacgggcgcgaccatctgcgctgcggcgccggcgactcagcgctgcctcagtctgcggtgggcagcggaggagtcgtgtcgtgcctgagagcgcagctgtgctcctgggcaccgcgcagtccgcccccgcggctcctggccagaccacccctaggaccccctgccccaagtcgcagccaagcttcgtttagtgaaccgtcagatcgcctggagacgccatccacgctgttttgacctccatagaagacaccgggaccgatccagcctccgcggattcgaatcccggccgggaacggtgcattggaacgcggattccccgtgccaagagtgacgtaagtaccgcctatagagtctataggcccacaaaaaatgctttcttcttttaatatacttttttgtttatcttatttctaatactttccctaatctctttctttcagggcaataatgatacaatgtatcatgcctctttgcaccattctaaagaataacagtgataatttctgggttaaggcaatagcaatatttctgcatataaatatttctgcatataaattgtaactgatgtaagaggtttcatattgctaatagcagctacaatccagctaccattctgcttttattttatggttgggataaggctggattattctgagtccaagctaggcccttttgctaatcatgttcatacctcttatcttcctcccacagctcctgggcaacgtgctggtctgtgtgctggcccatcactttggcaaagaattgggattcgaaccggtgccgccaccatgaagttgcctgttaggctgttggtgctgatgttctggattcctgcttccagcagtgacgtgcagatgatccagagccccagcagcctgagcgcctcgctgggggacatcgtgaccatgacctgccaggcctcccagggcaccagcatcaacctcaactggttccagcagaagcccggcaaggcccccaagctcctcatctacggggccagcaacctggaggacggcgtgccctcccgcttcagcggctcccgctacggcacggacttcacgctgaccatctcctccctggaggacgaggacatggccacctacttctgcctgcagcacacctacctgcccttcaccttcggcagcgggaccaagctggagatcaagcgggctgatgctgcaccaactgtatccatcttcccaccatccagtgagcagttaacatctggaggtgcctcagtcgtgtgcttcttgaacaacttctaccccaaagacatcaatgtcaagtggaagattgatggcagtgaacgacaaaatggcgtcctgaacagttggactgatcaggacagcaaagacagcacctacagcatgagcagcaccctcacgttgaccaaggacgagtatgaacgacataacagctatacctgtgaggccactcacaagacatcaacttcacccattgtcaagagcttcaacaggaatgagtgtggaagcggagtgaaacagactttgaattttgaccttctcaagttggcgggagacgtggagtccaaccctggacctatgaacttcgggctcagcttgattttccttgtccttgttttaaaaggtgtccagtgtcaggtgcagctgcagcagagcgacgccgagctggtgaaacctggggccagcgtcaagatcagctgcaaggcctccggctacaccttcaccgaccgcaccatccactgggtgaagcagcggcccgagcaggggctggagtggatcgggtacatctaccccggggacggctccaccaagtacaacgagaacttcaagggcaaagccaccctgacggccgacaagtccagcagcaccgcctacatgcagctgaacagcctgaccagcgaggacagcgccgtgtacttctgcgcccggcggggggctatggactactggggccagggcacctccgtgaccgtgtcctccgccaaaacgacacccccatctgtctatccactggcccctggatctgctgcccaaactaactccatggtgaccctgggatgcctggtcaagggctatttccctgagccagtgacagtgacctggaactctggatccctgtccagcggtgtgcacaccttcccagctgtcctgcagtctgacctctacactctgagcagctcagtgactgtcccctccagcacctggcccagcgagaccgtcacctgcaacgttgcccacccggccagcagcaccaaggtggacaagaaaattgtgcccagggattgtggttgtaagccttgcatatgtacagtcccagaagtatcatctgtcttcatcttccccccaaagcccaaggatgtgctcaccattactctgactcctaaggtcacgtgtgttgtggtagacatcagcaaggatgatcccgaggtccagttcagctggtttgtagatgatgtggaggtgcacacagctcagacgcaaccccgggaggagcagttcaacagcactttccgctcagtcagtgaacttcccatcatgcaccaggactggctcaatggcaaggagttcaaatgcagggtcaacagtgcagctttccctgcccccatcgagaaaaccatctccaaaaccaaaggcagaccgaaggctccacaggtgtacaccattccacctcccaaggagcagatggccaaggataaagtcagtctgacctgcatgataacagacttcttccctgaagacattactgtggagtggcagtggaatgggcagccagcggagaactacaagaacactcagcccatcatggacacagatggctcttacttcgtctacagcaagctcaatgtgcagaagagcaactgggaggcaggaaatactttcacctgctctgtgttacatgagggcctgcacaaccaccatactgagaagagcctctcccactctcctggttagtaactcgaggacggggtgaactacgcctgaggatccgatctttttccctctgccaaaaattatggggacatcatgaagccccttgagcatctgacttctggctaataaaggaaatttattttcattgcaatagtgtgttggaattttttgtgtctctcactcggcctaggtagataagtagcatggcgggttaatcattaactacaaggaacccctagtgatggagttggccactccctctctgcgcgctcgctcgctcactgaggccgggcgaccaaaggtcgcccgacgcccgggctttgcccgggcggcctcagtgagcgagcgagcgcgcag

SEQ ID NO: 2146 - DNA, 3941 bp, Artificial Sequence
  source: /note="Description of Artificial Sequence: Synthetic polynucleotide"
ctgcgcgctcgctcgctcactgaggccgcccgggcaaagcccgggcgtcgggcgacctttggtcgcccggcctcagtgagcgagcgagcgcgcagagagggagtggccaactccatcactaggggttccttgtagttaatgattaacccgccatgctacttatctaccagggtaatggggatcctctagaactatagctagtcgacattgattattgactagttattaatagtaatcaattacggggtcattagttcatagcccatatatggagttccgcgttacataacttacggtaaatggcccgcctggctgaccgcccaacgacccccgcccattgacgtcaataatgacgtatgttcccatagtaacgccaatagggactttccattgacgtcaatgggtggagtatttacggtaaactgcccacttggcagtacatcaagtgtatcatatgccaagtacgccccctattgacgtcaatgacggtaaatggcccgcctggcattatgcccagtacatgaccttatgggactttcctacttggcagtacatctacgtattagtcatcgctattaccatgtcgaggccacgttctgcttcactctccccatctcccccccctccccacccccaattttgtatttatttattttttaattattttgtgcagcgatgggggcggggggggggggcgcgcgccaggcggggcggggcggggcgaggggcggggcggggcgaggcggagaggtgcggcggcagccaatcagagcggcgcgctccgaaagtttccttttatggcgaggcggcggcggcggcggccctataaaaagcgaagcgcgcggcgggcgggagcaagcttcgtttagtgaaccgtcagatcgcctggagacgccatccacgctgttttgacctccatagaagacaccgggaccgatccagcctccgcggattcgaatcccggccgggaacggtgcattggaacgcggattccccgtgccaagagtgacgtaagtaccgcctatagagtctataggcccacaaaaaatgctttcttcttttaatatacttttttgtttatcttatttctaatactttccctaatctctttctttcagggcaataatgatacaatgtatcatgcctctttgcaccattctaaagaataacagtgataatttctgggttaaggcaatagcaatatttctgcatataaatatttctgcatataaattgtaactgatgtaagaggtttcatattgctaatagcagctacaatccagctaccattctgcttttattttatggttgggataaggctggattattctgagtccaagctaggcccttttgctaatcatgttcatacctcttatcttcctcccacagctcctgggcaacgtgctggtctgtgtgctggcccatcactttggcaaagaattgggattcgaaccggtgccgccaccatgaacttcgggctcagcttgattttccttgtccttgttttaaaaggtgtccagtgtcaggtgcagctgcagcagagcgacgccgagctggtgaaacctggggccagcgtcaagatcagctgcaaggcctccggctacaccttcaccgaccgcaccatccactgggtgaagcagcggcccgagcaggggctggagtggatcgggtacatctaccccggggacggctccaccaagtacaacgagaacttcaagggcaaagccaccctgacggccgacaagtccagcagcaccgcctacatgcagctgaacagcctgaccagcgaggacagcgccgtgtacttctgcgcccggcggggggctatggactactggggccagggcacctccgtgaccgtgtcctccgccaaaacgacacccccatctgtctatccactggcccctggatctgctgcccaaactaactccatggtgaccctgggatgcctggtcaagggctatttccctgagccagtgacagtgacctggaactctggatccctgtccagcggtgtgcacaccttcccagctgtcctgcagtctgacctctacactctgagcagctcagtgactgtcccctccagcacctggcccagcgagaccgtcacctgcaacgttgcccacccggccagcagcaccaaggtggacaagaaaattgtgcccagggattgtggttgtaagccttgcatatgtacagtcccagaagtatcatctgtcttcatcttccccccaaagcccaaggatgtgctcaccattactctgactcctaaggtcacgtgtgttgtggtagacatcagcaaggatgatcccgaggtccagttcagctggtttgtagatgatgtggaggtgcacacagctcagacgcaaccccgggaggagcagttcaacagcactttccgctcagtcagtgaacttcccatcatgcaccaggactggctcaatggcaaggagttcaaatgcagggtcaacagtgcagctttccctgcccccatcgagaaaaccatctccaaaaccaaaggcagaccgaaggctccacaggtgtacaccattccacctcccaaggagcagatggccaaggataaagtcagtctgacctgcatgataacagacttcttccctgaagacattactgtggagtggcagtggaatgggcagccagcggagaactacaagaacactcagcccatcatggacacagatggctcttacttcgtctacagcaagctcaatgtgcagaagagcaactgggaggcaggaaatactttcacctgctctgtgttacatgagggcctgcacaaccaccatactgagaagagcctctcccactctcctggtagaaagaggcgagagggcagaggaagtcttctaacatgcggtgacgtggaggagaatcccggccctatgaagttgcctgttaggctgttggtgctgatgttctggattcctgcttccagcagtgacgtgcagatgatccagagccccagcagcctgagcgcctcgctgggggacatcgtgaccatgacctgccaggcctcccagggcaccagcatcaacctcaactggttccagcagaagcccggcaaggcccccaagctcctcatctacggggccagcaacctggaggacggcgtgccctcccgcttcagcggctcccgctacggcacggacttcacgctgaccatctcctccctggaggacgaggacatggccacctacttctgcctgcagcacacctacctgcccttcaccttcggcagcgggaccaagctggagatcaagcgggctgatgctgcaccaactgtatccatcttcccaccatccagtgagcagttaacatctggaggtgcctcagtcgtgtgcttcttgaacaacttctaccccaaagacatcaatgtcaagtggaagattgatggcagtgaacgacaaaatggcgtcctgaacagttggactgatcaggacagcaaagacagcacctacagcatgagcagcaccctcacgttgaccaaggacgagtatgaacgacataacagctatacctgtgaggccactcacaagacatcaacttcacccattgtcaagagcttcaacaggaatgagtgttagtaactcgaggacggggtgaactacgcctgaggatccgatctttttccctctgccaaaaattatggggacatcatgaagccccttgagcatctgacttctggctaataaaggaaatttattttcattgcaatagtgtgttggaattttttgtgtctctcactcggcctaggtagataagtagcatggcgggttaatcattaactacaaggaacccctagtgatggagttggccactccctctctgcgcgctcgctcgctcactgaggccgggcgaccaaaggtcgcccgacgcccgggctttgcccgggcggcctcagtgagcgagcgagcgcgcag

SEQ ID NO: 2147 - DNA, 4429 bp, Artificial Sequence
  source: /note="Description of Artificial Sequence: Synthetic polynucleotide"
ctgcgcgctcgctcgctcactgaggccgcccgggcaaagcccgggcgtcgggcgacctttggtcgcccggcctcagtgagcgagcgagcgcgcagagagggagtggccaactccatcactaggggttccttgtagttaatgattaacccgccatgctacttatctaccagggtaatggggatcctctagaactatagctagtcgacataacgcgtctagttattaatagtaatcaattacggggtcattagttcatagcccatatatggagttccgcgttacataacttacggtaaatggcccgcctggctgaccgcccaacgacccccgcccattgacgtcaataatgacgtatgttcccatagtaacgccaatagggactttccattgacgtcaatgggtggagtatttacggtaaactgcccacttggcagtacatcaagtgtatcatatgccaagtacgccccctattgacgtcaatgacggtaaatggcccgcctggcattatgcccagtacatgaccttatgggactttcctacttggcagtacatctacgtattagtcatcgctattaccatggtcgaggtgagccccacgttctgcttcactctccccatctcccccccctccccacccccaattttgtatttatttattttttaattattttgtgcagcgatgggggcggggggggggggggggcgcgcgccaggcggggcggggcggggcgaggggcggggcggggcgaggcggagaggtgcggcggcagccaatcagagcggcgcgctccgaaagtttccttttatggcgaggcggcggcggcggcggccctataaaaagcgaagcgcgcggcgggcgggagtcgctgcgcgctgccttcgccccgtgccccgctccgccgccgcctcgcgccgcccgccccggctctgactgaccgcgttactcccacaggtgagcgggcgggacggcccttctcctccgggctgtaattagcgcttggtttaatgacggcttgtttcttttctgtggctgcgtgaaagccttgaggggctccgggagggccctttgtgcggggggagcggctcggggggtgcgtgcgtgtgtgtgtgcgtggggagcgccgcgtgcggctccgcgctgcccggcggctgtgagcgctgcgggcgcggcgcggggctttgtgcgctccgcagtgtgcgcgaggggagcgcggccgggggcggtgccccgcggtgcggggggggctgcgaggggaacaaaggctgcgtgcggggtgtgtgcgtgggggggtgagcagggggtgtgggcgcgtcggtcgggctgcaaccccccctgcacccccctccccgagttgctgagcacggcccggcttcgggtgcggggctccgtacggggcgtggcgcggggctcgccgtgccgggcggggggtggcggcaggtgggggtgccgggcggggcggggccgcctcgggccggggagggctcgggggaggggcgcggcggcccccggagcgccggcggctgtcgaggcgcggcgagccgcagccattgccttttatggtaatcgtgcgagagggcgcagggacttcctttgtcccaaatctgtgcggagccgaaatctgggaggcgccgccgcaccccctctagcgggcgcggggcgaagcggtgcggcgccggcaggaaggaaatgggcggggagggccttcgtgcgtcgccgcgccgccgtccccttctccctctccagcctcggggctgtccgcggggggacggctgccttcgggggggacggggcagggcggggttcggcttctggcgtgtgaccggcggctctagagcctctgctaaccatgttcatgccttcttctttttcctacagctcctgggcaacgtgctggttattgtgctgtctcatcattttggcaaagaattcgggattcgaaccggtgccgccaccatgaacttcgggctcagcttgattttccttgtccttgttttaaaaggtgtccagtgtcaggtgcagctgcagcagagcgacgccgagctggtgaaacctggggccagcgtcaagatcagctgcaaggcctccggctacaccttcaccgaccgcaccatccactgggtgaagcagcggcccgagcaggggctggagtggatcgggtacatctaccccggggacggctccaccaagtacaacgagaacttcaagggcaaagccaccctgacggccgacaagtccagcagcaccgcctacatgcagctgaacagcctgaccagcgaggacagcgccgtgtacttctgcgcccggcggggggctatggactactggggccagggcacctccgtgaccgtgtcctccgccaaaacgacacccccatctgtctatccactggcccctggatctgctgcccaaactaactccatggtgaccctgggatgcctggtcaagggctatttccctgagccagtgacagtgacctggaactctggatccctgtccagcggtgtgcacaccttcccagctgtcctgcagtctgacctctacactctgagcagctcagtgactgtcccctccagcacctggcccagcgagaccgtcacctgcaacgttgcccacccggccagcagcaccaaggtggacaagaaaattgtgcccagggattgtggttgtaagccttgcatatgtacagtcccagaagtatcatctgtcttcatcttccccccaaagcccaaggatgtgctcaccattactctgactcctaaggtcacgtgtgttgtggtagacatcagcaaggatgatcccgaggtccagttcagctggtttgtagatgatgtggaggtgcacacagctcagacgcaaccccgggaggagcagttcaacagcactttccgctcagtcagtgaacttcccatcatgcaccaggactggctcaatggcaaggagttcaaatgcagggtcaacagtgcagctttccctgcccccatcgagaaaaccatctccaaaaccaaaggcagaccgaaggctccacaggtgtacaccattccacctcccaaggagcagatggccaaggataaagtcagtctgacctgcatgataacagacttcttccctgaagacattactgtggagtggcagtggaatgggcagccagcggagaactacaagaacactcagcccatcatggacacagatggctcttacttcgtctacagcaagctcaatgtgcagaagagcaactgggaggcaggaaatactttcacctgctctgtgttacatgagggcctgcacaaccaccatactgagaagagcctctcccactctcctggtagaaagaggcgagagggcagaggaagtcttctaacatgcggtgacgtggaggagaatcccggccctatgaagttgcctgttaggctgttggtgctgatgttctggattcctgcttccagcagtgacgtgcagatgatccagagccccagcagcctgagcgcctcgctgggggacatcgtgaccatgacctgccaggcctcccagggcaccagcatcaacctcaactggttccagcagaagcccggcaaggcccccaagctcctcatctacggggccagcaacctggaggacggcgtgccctcccgcttcagcggctcccgctacggcacggacttcacgctgaccatctcctccctggaggacgaggacatggccacctacttctgcctgcagcacacctacctgcccttcaccttcggcagcgggaccaagctggagatcaagcgggctgatgctgcaccaactgtatccatcttcccaccatccagtgagcagttaacatctggaggtgcctcagtcgtgtgcttcttgaacaacttctaccccaaagacatcaatgtcaagtggaagattgatggcagtgaacgacaaaatggcgtcctgaacagttggactgatcaggacagcaaagacagcacctacagcatgagcagcaccctcacgttgaccaaggacgagtatgaacgacataacagctatacctgtgaggccactcacaagacatcaacttcacccattgtcaagagcttcaacaggaatgagtgttagtaactcgaggacggggtgaactacgcctgaggatccgatctttttccctctgccaaaaattatggggacatcatgaagccccttgagcatctgacttctggctaataaaggaaatttattttcattgcaatagtgtgttggaattttttgtgtctctcactcggcctaggtagataagtagcatggcgggttaatcattaactacaaggaacccctagtgatggagttggccactccctctctgcgcgctcgctcgctcactgaggccgggcgaccaaaggtcgcccgacgcccgggctttgcccgggcggcctcagtgagcgagcgagcgcgcag

SEQ ID NO: 2148 - DNA, 3999 bp, Artificial Sequence
  source: /note="Description of Artificial Sequence: Synthetic polynucleotide"
ctgcgcgctcgctcgctcactgaggccgcccgggcaaagcccgggcgtcgggcgacctttggtcgcccggcctcagtgagcgagcgagcgcgcagagagggagtggccaactccatcactaggggttccttgtagttaatgattaacccgccatgctacttatctaccagggtaatggggatcctctagaactatagctagtcgacataacgcgtgatctaacatatcctggtgtggagtagcggacgctgctatgacagaggctcgggggcctgagctggctctgtgagctggggaggaggcagacagccaggccttgtctgcaagcagacctggcagcattgggctggccgccccccagggcctcctcttcatgcccagtgaatgactcaccttggcacagacacaatgttcggggtgggcacagtgcctgcttcccgccgcaccccagcccccctcaaatgccttccgagaagcccattgagcagggggcttgcattgcaccccagcctgacagcctggcatcttgggataaaagcagcacagccccctaggggctgcccttgctgtgtggcgccaccggcggtggagaacaaggctctattcagcctgtgcccaggaaaggggatcaggggatgcccaggcatggacagtgggtggcagggggggagaggagggctgtctgcttcccagaagtccaaggacacaaatgggtgaggggagagctctccccatagctgggctgcggcccaaccccaccccctcaggctatgccagggggtgttgccaggggcacccgggcatcgccagtctagcccactccttcataaagccctcgcatcccaggagcgagcagagccagagcaggttggagaggagacgcatcacctccgctgctcgcggggatcctctagaagcttcgtttagtgaaccgtcagatcgcctggagacgccatccacgctgttttgacctccatagaagacaccgggaccgatccagcctccgcggattcgaatcccggccgggaacggtgcattggaacgcggattccccgtgccaagagtgacgtaagtaccgcctatagagtctataggcccacaaaaaatgctttcttcttttaatatacttttttgtttatcttatttctaatactttccctaatctctttctttcagggcaataatgatacaatgtatcatgcctctttgcaccattctaaagaataacagtgataatttctgggttaaggcaatagcaatatttctgcatataaatatttctgcatataaattgtaactgatgtaagaggtttcatattgctaatagcagctacaatccagctaccattctgcttttattttatggttgggataaggctggattattctgagtccaagctaggcccttttgctaatcatgttcatacctcttatcttcctcccacagctcctgggcaacgtgctggtctgtgtgctggcccatcactttggcaaagaattgggattcgaaccggtgccgccaccatgaacttcgggctcagcttgattttccttgtccttgttttaaaaggtgtccagtgtcaggtgcagctgcagcagagcgacgccgagctggtgaaacctggggccagcgtcaagatcagctgcaaggcctccggctacaccttcaccgaccgcaccatccactgggtgaagcagcggcccgagcaggggctggagtggatcgggtacatctaccccggggacggctccaccaagtacaacgagaacttcaagggcaaagccaccctgacggccgacaagtccagcagcaccgcctacatgcagctgaacagcctgaccagcgaggacagcgccgtgtacttctgcgcccggcggggggctatggactactggggccagggcacctccgtgaccgtgtcctccgccaaaacgacacccccatctgtctatccactggcccctggatctgctgcccaaactaactccatggtgaccctgggatgcctggtcaagggctatttccctgagccagtgacagtgacctggaactctggatccctgtccagcggtgtgcacaccttcccagctgtcctgcagtctgacctctacactctgagcagctcagtgactgtcccctccagcacctggcccagcgagaccgtcacctgcaacgttgcccacccggccagcagcaccaaggtggacaagaaaattgtgcccagggattgtggttgtaagccttgcatatgtacagtcccagaagtatcatctgtcttcatcttccccccaaagcccaaggatgtgctcaccattactctgactcctaaggtcacgtgtgttgtggtagacatcagcaaggatgatcccgaggtccagttcagctggtttgtagatgatgtggaggtgcacacagctcagacgcaaccccgggaggagcagttcaacagcactttccgctcagtcagtgaacttcccatcatgcaccaggactggctcaatggcaaggagttcaaatgcagggtcaacagtgcagctttccctgcccccatcgagaaaaccatctccaaaaccaaaggcagaccgaaggctccacaggtgtacaccattccacctcccaaggagcagatggccaaggataaagtcagtctgacctgcatgataacagacttcttccctgaagacattactgtggagtggcagtggaatgggcagccagcggagaactacaagaacactcagcccatcatggacacagatggctcttacttcgtctacagcaagctcaatgtgcagaagagcaactgggaggcaggaaatactttcacctgctctgtgttacatgagggcctgcacaaccaccatactgagaagagcctctcccactctcctggtagaaagaggcgagagggcagaggaagtcttctaacatgcggtgacgtggaggagaatcccggccctatgaagttgcctgttaggctgttggtgctgatgttctggattcctgcttccagcagtgacgtgcagatgatccagagccccagcagcctgagcgcctcgctgggggacatcgtgaccatgacctgccaggcctcccagggcaccagcatcaacctcaactggttccagcagaagcccggcaaggcccccaagctcctcatctacggggccagcaacctggaggacggcgtgccctcccgcttcagcggctcccgctacggcacggacttcacgctgaccatctcctccctggaggacgaggacatggccacctacttctgcctgcagcacacctacctgcccttcaccttcggcagcgggaccaagctggagatcaagcgggctgatgctgcaccaactgtatccatcttcccaccatccagtgagcagttaacatctggaggtgcctcagtcgtgtgcttcttgaacaacttctaccccaaagacatcaatgtcaagtggaagattgatggcagtgaacgacaaaatggcgtcctgaacagttggactgatcaggacagcaaagacagcacctacagcatgagcagcaccctcacgttgaccaaggacgagtatgaacgacataacagctatacctgtgaggccactcacaagacatcaacttcacccattgtcaagagcttcaacaggaatgagtgttagtaactcgaggacggggtgaactacgcctgaggatccgatctttttccctctgccaaaaattatggggacatcatgaagccccttgagcatctgacttctggctaataaaggaaatttattttcattgcaatagtgtgttggaattttttgtgtctctcactcggcctaggtagataagtagcatggcgggttaatcattaactacaaggaacccctagtgatggagttggccactccctctctgcgcgctcgctcgctcactgaggccgggcgaccaaaggtcgcccgacgcccgggctttgcccgggcggcctcagtgagcgagcgagcgcgcag

SEQ ID NO: 2149 - DNA, 3857 bp, Artificial Sequence
  source: /note="Description of Artificial Sequence: Synthetic polynucleotide"
ctgcgcgctcgctcgctcactgaggccgcccgggcaaagcccgggcgtcgggcgacctttggtcgcccggcctcagtgagcgagcgagcgcgcagagagggagtggccaactccatcactaggggttccttgtagttaatgattaacccgccatgctacttatctaccagggtaatggggatcctctagaactatagctagtcgacataacgcgttagtatctgcagagggccctgcgtatgagtgcaagtgggttttaggaccaggatgaggcggggtgggggtgcctacctgacgaccgaccccgacccactggacaagcacccaacccccattccccaaattgcgcatcccctatcagagagggggaggggaaacaggatgcggcgaggcgcgtgcgcactgccagcttcagcaccgcggacagtgccttcgcccccgcctggcggcgcgcgccaccgccgcctcagcactgaaggcgcgctgacgtcactcgccggtcccccgcaaactccccttcccggccaccttggtcgcgtccgcgccgccgccggcccagccggaccgcaccacgcgaggcgcgagataggggggcacgggcgcgaccatctgcgctgcggcgccggcgactcagcgctgcctcagtctgcggtgggcagcggaggagtcgtgtcgtgcctgagagcgcagctgtgctcctgggcaccgcgcagtccgcccccgcggctcctggccagaccacccctaggaccccctgccccaagtcgcagccaagcttcgtttagtgaaccgtcagatcgcctggagacgccatccacgctgttttgacctccatagaagacaccgggaccgatccagcctccgcggattcgaatcccggccgggaacggtgcattggaacgcggattccccgtgccaagagtgacgtaagtaccgcctatagagtctataggcccacaaaaaatgctttcttcttttaatatacttttttgtttatcttatttctaatactttccctaatctctttctttcagggcaataatgatacaatgtatcatgcctctttgcaccattctaaagaataacagtgataatttctgggttaaggcaatagcaatatttctgcatataaatatttctgcatataaattgtaactgatgtaagaggtttcatattgctaatagcagctacaatccagctaccattctgcttttattttatggttgggataaggctggattattctgagtccaagctaggcccttttgctaatcatgttcatacctcttatcttcctcccacagctcctgggcaacgtgctggtctgtgtgctggcccatcactttggcaaagaattgggattcgaaccggtgccgccaccatgaacttcgggctcagcttgattttccttgtccttgttttaaaaggtgtccagtgtcaggtgcagctgcagcagagcgacgccgagctggtgaaacctggggccagcgtcaagatcagctgcaaggcctccggctacaccttcaccgaccgcaccatccactgggtgaagcagcggcccgagcaggggctggagtggatcgggtacatctaccccggggacggctccaccaagtacaacgagaacttcaagggcaaagccaccctgacggccgacaagtccagcagcaccgcctacatgcagctgaacagcctgaccagcgaggacagcgccgtgtacttctgcgcccggcggggggctatggactactggggccagggcacctccgtgaccgtgtcctccgccaaaacgacacccccatctgtctatccactggcccctggatctgctgcccaaactaactccatggtgaccctgggatgcctggtcaagggctatttccctgagccagtgacagtgacctggaactctggatccctgtccagcggtgtgcacaccttcccagctgtcctgcagtctgacctctacactctgagcagctcagtgactgtcccctccagcacctggcccagcgagaccgtcacctgcaacgttgcccacccggccagcagcaccaaggtggacaagaaaattgtgcccagggattgtggttgtaagccttgcatatgtacagtcccagaagtatcatctgtcttcatcttccccccaaagcccaaggatgtgctcaccattactctgactcctaaggtcacgtgtgttgtggtagacatcagcaaggatgatcccgaggtccagttcagctggtttgtagatgatgtggaggtgcacacagctcagacgcaaccccgggaggagcagttcaacagcactttccgctcagtcagtgaacttcccatcatgcaccaggactggctcaatggcaaggagttcaaatgcagggtcaacagtgcagctttccctgcccccatcgagaaaaccatctccaaaaccaaaggcagaccgaaggctccacaggtgtacaccattccacctcccaaggagcagatggccaaggataaagtcagtctgacctgcatgataacagacttcttccctgaagacattactgtggagtggcagtggaatgggcagccagcggagaactacaagaacactcagcccatcatggacacagatggctcttacttcgtctacagcaagctcaatgtgcagaagagcaactgggaggcaggaaatactttcacctgctctgtgttacatgagggcctgcacaaccaccatactgagaagagcctctcccactctcctggtagaaagaggcgagagggcagaggaagtcttctaacatgcggtgacgtggaggagaatcccggccctatgaagttgcctgttaggctgttggtgctgatgttctggattcctgcttccagcagtgacgtgcagatgatccagagccccagcagcctgagcgcctcgctgggggacatcgtgaccatgacctgccaggcctcccagggcaccagcatcaacctcaactggttccagcagaagcccggcaaggcccccaagctcctcatctacggggccagcaacctggaggacggcgtgccctcccgcttcagcggctcccgctacggcacggacttcacgctgaccatctcctccctggaggacgaggacatggccacctacttctgcctgcagcacacctacctgcccttcaccttcggcagcgggaccaagctggagatcaagcgggctgatgctgcaccaactgtatccatcttcccaccatccagtgagcagttaacatctggaggtgcctcagtcgtgtgcttcttgaacaacttctaccccaaagacatcaatgtcaagtggaagattgatggcagtgaacgacaaaatggcgtcctgaacagttggactgatcaggacagcaaagacagcacctacagcatgagcagcaccctcacgttgaccaaggacgagtatgaacgacataacagctatacctgtgaggccactcacaagacatcaacttcacccattgtcaagagcttcaacaggaatgagtgttagtaactcgaggacggggtgaactacgcctgaggatccgatctttttccctctgccaaaaattatggggacatcatgaagccccttgagcatctgacttctggctaataaaggaaatttattttcattgcaatagtgtgttggaattttttgtgtctctcactcggcctaggtagataagtagcatggcgggttaatcattaactacaaggaacccctagtgatggagttggccactccctctctgcgcgctcgctcgctcactgaggccgggcgaccaaaggtcgcccgacgcccgggctttgcccgggcggcctcagtgagcgagcgagcgcgcag

SEQ ID NO: 2150 - DNA, 4420 bp, Artificial Sequence
  source: /note="Description of Artificial Sequence: Synthetic polynucleotide"
ctgcgcgctcgctcgctcactgaggccgcccgggcaaagcccgggcgtcgggcgacctttggtcgcccggcctcagtgagcgagcgagcgcgcagagagggagtggccaactccatcactaggggttccttgtagttaatgattaacccgccatgctacttatctaccagggtaatggggatcctctagaactatagctagtcgacataacgcgtctagttattaatagtaatcaattacggggtcattagttcatagcccatatatggagttccgcgttacataacttacggtaaatggcccgcctggctgaccgcccaacgacccccgcccattgacgtcaataatgacgtatgttcccatagtaacgccaatagggactttccattgacgtcaatgggtggagtatttacggtaaactgcccacttggcagtacatcaagtgtatcatatgccaagtacgccccctattgacgtcaatgacggtaaatggcccgcctggcattatgcccagtacatgaccttatgggactttcctacttggcagtacatctacgtattagtcatcgctattaccatggtcgaggtgagccccacgttctgcttcactctccccatctcccccccctccccacccccaattttgtatttatttattttttaattattttgtgcagcgatgggggcggggggggggggggggcgcgcgccaggcggggcggggcggggcgaggggcggggcggggcgaggcggagaggtgcggcggcagccaatcagagcggcgcgctccgaaagtttccttttatggcgaggcggcggcggcggcggccctataaaaagcgaagcgcgcggcgggcgggagtcgctgcgcgctgccttcgccccgtgccccgctccgccgccgcctcgcgccgcccgccccggctctgactgaccgcgttactcccacaggtgagcgggcgggacggcccttctcctccgggctgtaattagcgcttggtttaatgacggcttgtttcttttctgtggctgcgtgaaagccttgaggggctccgggagggccctttgtgcggggggagcggctcggggggtgcgtgcgtgtgtgtgtgcgtggggagcgccgcgtgcggctccgcgctgcccggcggctgtgagcgctgcgggcgcggcgcggggctttgtgcgctccgcagtgtgcgcgaggggagcgcggccgggggcggtgccccgcggtgcggggggggctgcgaggggaacaaaggctgcgtgcggggtgtgtgcgtgggggggtgagcagggggtgtgggcgcgtcggtcgggctgcaaccccccctgcacccccctccccgagttgctgagcacggcccggcttcgggtgcggggctccgtacggggcgtggcgcggggctcgccgtgccgggcggggggtggcggcaggtgggggtgccgggcggggcggggccgcctcgggccggggagggctcgggggaggggcgcggcggcccccggagcgccggcggctgtcgaggcgcggcgagccgcagccattgccttttatggtaatcgtgcgagagggcgcagggacttcctttgtcccaaatctgtgcggagccgaaatctgggaggcgccgccgcaccccctctagcgggcgcggggcgaagcggtgcggcgccggcaggaaggaaatgggcggggagggccttcgtgcgtcgccgcgccgccgtccccttctccctctccagcctcggggctgtccgcggggggacggctgccttcgggggggacggggcagggcggggttcggcttctggcgtgtgaccggcggctctagagcctctgctaaccatgttcatgccttcttctttttcctacagctcctgggcaacgtgctggttattgtgctgtctcatcattttggcaaagaattcgggattcgaaccggtgccgccaccatgaagttgcctgttaggctgttggtgctgatgttctggattcctgcttccagcagtgacgtgcagatgatccagagccccagcagcctgagcgcctcgctgggggacatcgtgaccatgacctgccaggcctcccagggcaccagcatcaacctcaactggttccagcagaagcccggcaaggcccccaagctcctcatctacggggccagcaacctggaggacggcgtgccctcccgcttcagcggctcccgctacggcacggacttcacgctgaccatctcctccctggaggacgaggacatggccacctacttctgcctgcagcacacctacctgcccttcaccttcggcagcgggaccaagctggagatcaagcgggctgatgctgcaccaactgtatccatcttcccaccatccagtgagcagttaacatctggaggtgcctcagtcgtgtgcttcttgaacaacttctaccccaaagacatcaatgtcaagtggaagattgatggcagtgaacgacaaaatggcgtcctgaacagttggactgatcaggacagcaaagacagcacctacagcatgagcagcaccctcacgttgaccaaggacgagtatgaacgacataacagctatacctgtgaggccactcacaagacatcaacttcacccattgtcaagagcttcaacaggaatgagtgtgagggcagaggaagtcttctaacatgcggtgacgtggaggagaatcccggccctatgaacttcgggctcagcttgattttccttgtccttgttttaaaaggtgtccagtgtcaggtgcagctgcagcagagcgacgccgagctggtgaaacctggggccagcgtcaagatcagctgcaaggcctccggctacaccttcaccgaccgcaccatccactgggtgaagcagcggcccgagcaggggctggagtggatcgggtacatctaccccggggacggctccaccaagtacaacgagaacttcaagggcaaagccaccctgacggccgacaagtccagcagcaccgcctacatgcagctgaacagcctgaccagcgaggacagcgccgtgtacttctgcgcccggcggggggctatggactactggggccagggcacctccgtgaccgtgtcctccgccaaaacgacacccccatctgtctatccactggcccctggatctgctgcccaaactaactccatggtgaccctgggatgcctggtcaagggctatttccctgagccagtgacagtgacctggaactctggatccctgtccagcggtgtgcacaccttcccagctgtcctgcagtctgacctctacactctgagcagctcagtgactgtcccctccagcacctggcccagcgagaccgtcacctgcaacgttgcccacccggccagcagcaccaaggtggacaagaaaattgtgcccagggattgtggttgtaagccttgcatatgtacagtcccagaagtatcatctgtcttcatcttccccccaaagcccaaggatgtgctcaccattactctgactcctaaggtcacgtgtgttgtggtagacatcagcaaggatgatcccgaggtccagttcagctggtttgtagatgatgtggaggtgcacacagctcagacgcaaccccgggaggagcagttcaacagcactttccgctcagtcagtgaacttcccatcatgcaccaggactggctcaatggcaaggagttcaaatgcagggtcaacagtgcagctttccctgcccccatcgagaaaaccatctccaaaaccaaaggcagaccgaaggctccacaggtgtacaccattccacctcccaaggagcagatggccaaggataaagtcagtctgacctgcatgataacagacttcttccctgaagacattactgtggagtggcagtggaatgggcagccagcggagaactacaagaacactcagcccatcatggacacagatggctcttacttcgtctacagcaagctcaatgtgcagaagagcaactgggaggcaggaaatactttcacctgctctgtgttacatgagggcctgcacaaccaccatactgagaagagcctctcccactctcctggtaagtagtaactcgaggacggggtgaactacgcctgaggatccgatctttttccctctgccaaaaattatggggacatcatgaagccccttgagcatctgacttctggctaataaaggaaatttattttcattgcaatagtgtgttggaattttttgtgtctctcactcggcctaggtagataagtagcatggcgggttaatcattaactacaaggaacccctagtgatggagttggccactccctctctgcgcgctcgctcgctcactgaggccgggcgaccaaaggtcgcccgacgcccgggctttgcccgggcggcctcagtgagcgagcgagcgcgcag

SEQ ID NO: 2151 - DNA, 3990 bp, Artificial Sequence
  source: /note="Description of Artificial Sequence: Synthetic polynucleotide"
ctgcgcgctcgctcgctcactgaggccgcccgggcaaagcccgggcgtcgggcgacctttggtcgcccggcctcagtgagcgagcgagcgcgcagagagggagtggccaactccatcactaggggttccttgtagttaatgattaacccgccatgctacttatctaccagggtaatggggatcctctagaactatagctagtcgacataacgcgtgatctaacatatcctggtgtggagtagcggacgctgctatgacagaggctcgggggcctgagctggctctgtgagctggggaggaggcagacagccaggccttgtctgcaagcagacctggcagcattgggctggccgccccccagggcctcctcttcatgcccagtgaatgactcaccttggcacagacacaatgttcggggtgggcacagtgcctgcttcccgccgcaccccagcccccctcaaatgccttccgagaagcccattgagcagggggcttgcattgcaccccagcctgacagcctggcatcttgggataaaagcagcacagccccctaggggctgcccttgctgtgtggcgccaccggcggtggagaacaaggctctattcagcctgtgcccaggaaaggggatcaggggatgcccaggcatggacagtgggtggcagggggggagaggagggctgtctgcttcccagaagtccaaggacacaaatgggtgaggggagagctctccccatagctgggctgcggcccaaccccaccccctcaggctatgccagggggtgttgccaggggcacccgggcatcgccagtctagcccactccttcataaagccctcgcatcccaggagcgagcagagccagagcaggttggagaggagacgcatcacctccgctgctcgcggggatcctctagaagcttcgtttagtgaaccgtcagatcgcctggagacgccatccacgctgttttgacctccatagaagacaccgggaccgatccagcctccgcggattcgaatcccggccgggaacggtgcattggaacgcggattccccgtgccaagagtgacgtaagtaccgcctatagagtctataggcccacaaaaaatgctttcttcttttaatatacttttttgtttatcttatttctaatactttccctaatctctttctttcagggcaataatgatacaatgtatcatgcctctttgcaccattctaaagaataacagtgataatttctgggttaaggcaatagcaatatttctgcatataaatatttctgcatataaattgtaactgatgtaagaggtttcatattgctaatagcagctacaatccagctaccattctgcttttattttatggttgggataaggctggattattctgagtccaagctaggcccttttgctaatcatgttcatacctcttatcttcctcccacagctcctgggcaacgtgctggtctgtgtgctggcccatcactttggcaaagaattgggattcgaaccggtgccgccaccatgaagttgcctgttaggctgttggtgctgatgttctggattcctgcttccagcagtgacgtgcagatgatccagagccccagcagcctgagcgcctcgctgggggacatcgtgaccatgacctgccaggcctcccagggcaccagcatcaacctcaactggttccagcagaagcccggcaaggcccccaagctcctcatctacggggccagcaacctggaggacggcgtgccctcccgcttcagcggctcccgctacggcacggacttcacgctgaccatctcctccctggaggacgaggacatggccacctacttctgcctgcagcacacctacctgcccttcaccttcggcagcgggaccaagctggagatcaagcgggctgatgctgcaccaactgtatccatcttcccaccatccagtgagcagttaacatctggaggtgcctcagtcgtgtgcttcttgaacaacttctaccccaaagacatcaatgtcaagtggaagattgatggcagtgaacgacaaaatggcgtcctgaacagttggactgatcaggacagcaaagacagcacctacagcatgagcagcaccctcacgttgaccaaggacgagtatgaacgacataacagctatacctgtgaggccactcacaagacatcaacttcacccattgtcaagagcttcaacaggaatgagtgtgagggcagaggaagtcttctaacatgcggtgacgtggaggagaatcccggccctatgaacttcgggctcagcttgattttccttgtccttgttttaaaaggtgtccagtgtcaggtgcagctgcagcagagcgacgccgagctggtgaaacctggggccagcgtcaagatcagctgcaaggcctccggctacaccttcaccgaccgcaccatccactgggtgaagcagcggcccgagcaggggctggagtggatcgggtacatctaccccggggacggctccaccaagtacaacgagaacttcaagggcaaagccaccctgacggccgacaagtccagcagcaccgcctacatgcagctgaacagcctgaccagcgaggacagcgccgtgtacttctgcgcccggcggggggctatggactactggggccagggcacctccgtgaccgtgtcctccgccaaaacgacacccccatctgtctatccactggcccctggatctgctgcccaaactaactccatggtgaccctgggatgcctggtcaagggctatttccctgagccagtgacagtgacctggaactctggatccctgtccagcggtgtgcacaccttcccagctgtcctgcagtctgacctctacactctgagcagctcagtgactgtcccctccagcacctggcccagcgagaccgtcacctgcaacgttgcccacccggccagcagcaccaaggtggacaagaaaattgtgcccagggattgtggttgtaagccttgcatatgtacagtcccagaagtatcatctgtcttcatcttccccccaaagcccaaggatgtgctcaccattactctgactcctaaggtcacgtgtgttgtggtagacatcagcaaggatgatcccgaggtccagttcagctggtttgtagatgatgtggaggtgcacacagctcagacgcaaccccgggaggagcagttcaacagcactttccgctcagtcagtgaacttcccatcatgcaccaggactggctcaatggcaaggagttcaaatgcagggtcaacagtgcagctttccctgcccccatcgagaaaaccatctccaaaaccaaaggcagaccgaaggctccacaggtgtacaccattccacctcccaaggagcagatggccaaggataaagtcagtctgacctgcatgataacagacttcttccctgaagacattactgtggagtggcagtggaatgggcagccagcggagaactacaagaacactcagcccatcatggacacagatggctcttacttcgtctacagcaagctcaatgtgcagaagagcaactgggaggcaggaaatactttcacctgctctgtgttacatgagggcctgcacaaccaccatactgagaagagcctctcccactctcctggtaagtagtaactcgaggacggggtgaactacgcctgaggatccgatctttttccctctgccaaaaattatggggacatcatgaagccccttgagcatctgacttctggctaataaaggaaatttattttcattgcaatagtgtgttggaattttttgtgtctctcactcggcctaggtagataagtagcatggcgggttaatcattaactacaaggaacccctagtgatggagttggccactccctctctgcgcgctcgctcgctcactgaggccgggcgaccaaaggtcgcccgacgcccgggctttgcccgggcggcctcagtgagcgagcgagcgcgcag

SEQ ID NO: 2152 - DNA, 3848 bp, Artificial Sequence
  source: /note="Description of Artificial Sequence: Synthetic polynucleotide"
ctgcgcgctcgctcgctcactgaggccgcccgggcaaagcccgggcgtcgggcgacctttggtcgcccggcctcagtgagcgagcgagcgcgcagagagggagtggccaactccatcactaggggttccttgtagttaatgattaacccgccatgctacttatctaccagggtaatggggatcctctagaactatagctagtcgacataacgcgttagtatctgcagagggccctgcgtatgagtgcaagtgggttttaggaccaggatgaggcggggtgggggtgcctacctgacgaccgaccccgacccactggacaagcacccaacccccattccccaaattgcgcatcccctatcagagagggggaggggaaacaggatgcggcgaggcgcgtgcgcactgccagcttcagcaccgcggacagtgccttcgcccccgcctggcggcgcgcgccaccgccgcctcagcactgaaggcgcgctgacgtcactcgccggtcccccgcaaactccccttcccggccaccttggtcgcgtccgcgccgccgccggcccagccggaccgcaccacgcgaggcgcgagataggggggcacgggcgcgaccatctgcgctgcggcgccggcgactcagcgctgcctcagtctgcggtgggcagcggaggagtcgtgtcgtgcctgagagcgcagctgtgctcctgggcaccgcgcagtccgcccccgcggctcctggccagaccacccctaggaccccctgccccaagtcgcagccaagcttcgtttagtgaaccgtcagatcgcctggagacgccatccacgctgttttgacctccatagaagacaccgggaccgatccagcctccgcggattcgaatcccggccgggaacggtgcattggaacgcggattccccgtgccaagagtgacgtaagtaccgcctatagagtctataggcccacaaaaaatgctttcttcttttaatatacttttttgtttatcttatttctaatactttccctaatctctttctttcagggcaataatgatacaatgtatcatgcctctttgcaccattctaaagaataacagtgataatttctgggttaaggcaatagcaatatttctgcatataaatatttctgcatataaattgtaactgatgtaagaggtttcatattgctaatagcagctacaatccagctaccattctgcttttattttatggttgggataaggctggattattctgagtccaagctaggcccttttgctaatcatgttcatacctcttatcttcctcccacagctcctgggcaacgtgctggtctgtgtgctggcccatcactttggcaaagaattgggattcgaaccggtgccgccaccatgaagttgcctgttaggctgttggtgctgatgttctggattcctgcttccagcagtgacgtgcagatgatccagagccccagcagcctgagcgcctcgctgggggacatcgtgaccatgacctgccaggcctcccagggcaccagcatcaacctcaactggttccagcagaagcccggcaaggcccccaagctcctcatctacggggccagcaacctggaggacggcgtgccctcccgcttcagcggctcccgctacggcacggacttcacgctgaccatctcctccctggaggacgaggacatggccacctacttctgcctgcagcacacctacctgcccttcaccttcggcagcgggaccaagctggagatcaagcgggctgatgctgcaccaactgtatccatcttcccaccatccagtgagcagttaacatctggaggtgcctcagtcgtgtgcttcttgaacaacttctaccccaaagacatcaatgtcaagtggaagattgatggcagtgaacgacaaaatggcgtcctgaacagttggactgatcaggacagcaaagacagcacctacagcatgagcagcaccctcacgttgaccaaggacgagtatgaacgacataacagctatacctgtgaggccactcacaagacatcaacttcacccattgtcaagagcttcaacaggaatgagtgtgagggcagaggaagtcttctaacatgcggtgacgtggaggagaatcccggccctatgaacttcgggctcagcttgattttccttgtccttgttttaaaaggtgtccagtgtcaggtgcagctgcagcagagcgacgccgagctggtgaaacctggggccagcgtcaagatcagctgcaaggcctccggctacaccttcaccgaccgcaccatccactgggtgaagcagcggcccgagcaggggctggagtggatcgggtacatctaccccggggacggctccaccaagtacaacgagaacttcaagggcaaagccaccctgacggccgacaagtccagcagcaccgcctacatgcagctgaacagcctgaccagcgaggacagcgccgtgtacttctgcgcccggcggggggctatggactactggggccagggcacctccgtgaccgtgtcctccgccaaaacgacacccccatctgtctatccactggcccctggatctgctgcccaaactaactccatggtgaccctgggatgcctggtcaagggctatttccctgagccagtgacagtgacctggaactctggatccctgtccagcggtgtgcacaccttcccagctgtcctgcagtctgacctctacactctgagcagctcagtgactgtcccctccagcacctggcccagcgagaccgtcacctgcaacgttgcccacccggccagcagcaccaaggtggacaagaaaattgtgcccagggattgtggttgtaagccttgcatatgtacagtcccagaagtatcatctgtcttcatcttccccccaaagcccaaggatgtgctcaccattactctgactcctaaggtcacgtgtgttgtggtagacatcagcaaggatgatcccgaggtccagttcagctggtttgtagatgatgtggaggtgcacacagctcagacgcaaccccgggaggagcagttcaacagcactttccgctcagtcagtgaacttcccatcatgcaccaggactggctcaatggcaaggagttcaaatgcagggtcaacagtgcagctttccctgcccccatcgagaaaaccatctccaaaaccaaaggcagaccgaaggctccacaggtgtacaccattccacctcccaaggagcagatggccaaggataaagtcagtctgacctgcatgataacagacttcttccctgaagacattactgtggagtggcagtggaatgggcagccagcggagaactacaagaacactcagcccatcatggacacagatggctcttacttcgtctacagcaagctcaatgtgcagaagagcaactgggaggcaggaaatactttcacctgctctgtgttacatgagggcctgcacaaccaccatactgagaagagcctctcccactctcctggtaagtagtaactcgaggacggggtgaactacgcctgaggatccgatctttttccctctgccaaaaattatggggacatcatgaagccccttgagcatctgacttctggctaataaaggaaatttattttcattgcaatagtgtgttggaattttttgtgtctctcactcggcctaggtagataagtagcatggcgggttaatcattaactacaaggaacccctagtgatggagttggccactccctctctgcgcgctcgctcgctcactgaggccgggcgaccaaaggtcgcccgacgcccgggctttgcccgggcggcctcagtgagcgagcgagcgcgcag

SEQ ID NO: 2153 - DNA, 3971 bp, Artificial Sequence
  source: /note="Description of Artificial Sequence: Synthetic polynucleotide"
ctgcgcgctcgctcgctcactgaggccgcccgggcaaagcccgggcgtcgggcgacctttggtcgcccggcctcagtgagcgagcgagcgcgcagagagggagtggccaactccatcactaggggttccttgtagttaatgattaacccgccatgctacttatctaccagggtaatggggatcctctagaactatagctagtcgacattgattattgactagttattaatagtaatcaattacggggtcattagttcatagcccatatatggagttccgcgttacataacttacggtaaatggcccgcctggctgaccgcccaacgacccccgcccattgacgtcaataatgacgtatgttcccatagtaacgccaatagggactttccattgacgtcaatgggtggagtatttacggtaaactgcccacttggcagtacatcaagtgtatcatatgccaagtacgccccctattgacgtcaatgacggtaaatggcccgcctggcattatgcccagtacatgaccttatgggactttcctacttggcagtacatctacgtattagtcatcgctattaccatgtcgaggccacgttctgcttcactctccccatctcccccccctccccacccccaattttgtatttatttattttttaattattttgtgcagcgatgggggcggggggggggggcgcgcgccaggcggggcggggcggggcgaggggcggggcggggcgaggcggagaggtgcggcggcagccaatcagagcggcgcgctccgaaagtttccttttatggcgaggcggcggcggcggcggccctataaaaagcgaagcgcgcggcgggcgggagcaagcttcgtttagtgaaccgtcagatcgcctggagacgccatccacgctgttttgacctccatagaagacaccgggaccgatccagcctccgcggattcgaatcccggccgggaacggtgcattggaacgcggattccccgtgccaagagtgacgtaagtaccgcctatagagtctataggcccacaaaaaatgctttcttcttttaatatacttttttgtttatcttatttctaatactttccctaatctctttctttcagggcaataatgatacaatgtatcatgcctctttgcaccattctaaagaataacagtgataatttctgggttaaggcaatagcaatatttctgcatataaatatttctgcatataaattgtaactgatgtaagaggtttcatattgctaatagcagctacaatccagctaccattctgcttttattttatggttgggataaggctggattattctgagtccaagctaggcccttttgctaatcatgttcatacctcttatcttcctcccacagctcctgggcaacgtgctggtctgtgtgctggcccatcactttggcaaagaattgggattcgaaccggtgccgccaccatgaacttcgggctcagcttgattttccttgtccttgttttaaaaggtgtccagtgtgaggtgaagctggtggagagcggcggcgacctggtgaagcctggcggcagcctgaagctgagctgcgccgccagcggcttcaccttcagcagctacgccatgagctgggtgagacagaaccctgagaagagactggagtgggtggccagcatcagcaagggcggcaacacctactaccctaacagcgtgaagggcagattcaccatcagcagagacaacgccagaaacatcctgtacctgcagatgagcagcctgagaagcgaggacaccgccctgtactactgcgccagaggctggggcgactacggctggttcgcctactggggccaggtgaccctggtgaccgtgagcgccgccaaaacgacacccccatctgtctatccactggcccctggatctgctgcccaaactaactccatggtgaccctgggatgcctggtcaagggctatttccctgagccagtgacagtgacctggaactctggatccctgtccagcggtgtgcacaccttcccagctgtcctgcagtctgacctctacactctgagcagctcagtgactgtcccctccagcacctggcccagcgagaccgtcacctgcaacgttgcccacccggccagcagcaccaaggtggacaagaaaattgtgcccagggattgtggttgtaagccttgcatatgtacagtcccagaagtatcatctgtcttcatcttccccccaaagcccaaggatgtgctcaccattactctgactcctaaggtcacgtgtgttgtggtagacatcagcaaggatgatcccgaggtccagttcagctggtttgtagatgatgtggaggtgcacacagctcagacgcaaccccgggaggagcagttcaacagcactttccgctcagtcagtgaacttcccatcatgcaccaggactggctcaatggcaaggagttcaaatgcagggtcaacagtgcagctttccctgcccccatcgagaaaaccatctccaaaaccaaaggcagaccgaaggctccacaggtgtacaccattccacctcccaaggagcagatggccaaggataaagtcagtctgacctgcatgataacagacttcttccctgaagacattactgtggagtggcagtggaatgggcagccagcggagaactacaagaacactcagcccatcatggacacagatggctcttacttcgtctacagcaagctcaatgtgcagaagagcaactgggaggcaggaaatactttcacctgctctgtgttacatgagggcctgcacaaccaccatactgagaagagcctctcccactctcctggtcgggccaagcggggaagcggagtgaaacagactttgaattttgaccttctcaagttggcgggagacgtggagtccaaccctggacctatgaagttgcctgttaggctgttggtgctgatgttctggattcctgcttccagcagtgacatcaagatgacccagagccctagcagcatgtacgccagcctgggcgagagagtgaccatcacctgcaaggccagccaggacatcaacagatacctgaactggttccagcagaagcctggcaagagccctaagaccctgatctacagagccaacagactgctggacggcgtgcctagcagattcagcggcagcggcagcggccaggactacagcctgaccatcagcagcctggactacgaggacatgggcatctactactgcctgcagtacgacgagttccctctgaccttcggcgacggcaccaagctggagctgaagcgggctgatgctgcaccaactgtatccatcttcccaccatccagtgagcagttaacatctggaggtgcctcagtcgtgtgcttcttgaacaacttctaccccaaagacatcaatgtcaagtggaagattgatggcagtgaacgacaaaatggcgtcctgaacagttggactgatcaggacagcaaagacagcacctacagcatgagcagcaccctcacgttgaccaaggacgagtatgaacgacataacagctatacctgtgaggccactcacaagacatcaacttcacccattgtcaagagcttcaacaggaatgagtgttagtaactcgaggacggggtgaactacgcctgaggatccgatctttttccctctgccaaaaattatggggacatcatgaagccccttgagcatctgacttctggctaataaaggaaatttattttcattgcaatagtgtgttggaattttttgtgtctctcactcggcctaggtagataagtagcatggcgggttaatcattaactacaaggaacccctagtgatggagttggccactccctctctgcgcgctcgctcgctcactgaggccgggcgaccaaaggtcgcccgacgcccgggctttgcccgggcggcctcagtgagcgagcgagcgcgcag

SEQ ID NO: 2154 - DNA, 4459 bp, Artificial Sequence
  source: /note="Description of Artificial Sequence: Synthetic polynucleotide"
ctgcgcgctcgctcgctcactgaggccgcccgggcaaagcccgggcgtcgggcgacctttggtcgcccggcctcagtgagcgagcgagcgcgcagagagggagtggccaactccatcactaggggttccttgtagttaatgattaacccgccatgctacttatctaccagggtaatggggatcctctagaactatagctagtcgacataacgcgtctagttattaatagtaatcaattacggggtcattagttcatagcccatatatggagttccgcgttacataacttacggtaaatggcccgcctggctgaccgcccaacgacccccgcccattgacgtcaataatgacgtatgttcccatagtaacgccaatagggactttccattgacgtcaatgggtggagtatttacggtaaactgcccacttggcagtacatcaagtgtatcatatgccaagtacgccccctattgacgtcaatgacggtaaatggcccgcctggcattatgcccagtacatgaccttatgggactttcctacttggcagtacatctacgtattagtcatcgctattaccatggtcgaggtgagccccacgttctgcttcactctccccatctcccccccctccccacccccaattttgtatttatttattttttaattattttgtgcagcgatgggggcggggggggggggggggcgcgcgccaggcggggcggggcggggcgaggggcggggcggggcgaggcggagaggtgcggcggcagccaatcagagcggcgcgctccgaaagtttccttttatggcgaggcggcggcggcggcggccctataaaaagcgaagcgcgcggcgggcgggagtcgctgcgcgctgccttcgccccgtgccccgctccgccgccgcctcgcgccgcccgccccggctctgactgaccgcgttactcccacaggtgagcgggcgggacggcccttctcctccgggctgtaattagcgcttggtttaatgacggcttgtttcttttctgtggctgcgtgaaagccttgaggggctccgggagggccctttgtgcggggggagcggctcggggggtgcgtgcgtgtgtgtgtgcgtggggagcgccgcgtgcggctccgcgctgcccggcggctgtgagcgctgcgggcgcggcgcggggctttgtgcgctccgcagtgtgcgcgaggggagcgcggccgggggcggtgccccgcggtgcggggggggctgcgaggggaacaaaggctgcgtgcggggtgtgtgcgtgggggggtgagcagggggtgtgggcgcgtcggtcgggctgcaaccccccctgcacccccctccccgagttgctgagcacggcccggcttcgggtgcggggctccgtacggggcgtggcgcggggctcgccgtgccgggcggggggtggcggcaggtgggggtgccgggcggggcggggccgcctcgggccggggagggctcgggggaggggcgcggcggcccccggagcgccggcggctgtcgaggcgcggcgagccgcagccattgccttttatggtaatcgtgcgagagggcgcagggacttcctttgtcccaaatctgtgcggagccgaaatctgggaggcgccgccgcaccccctctagcgggcgcggggcgaagcggtgcggcgccggcaggaaggaaatgggcggggagggccttcgtgcgtcgccgcgccgccgtccccttctccctctccagcctcggggctgtccgcggggggacggctgccttcgggggggacggggcagggcggggttcggcttctggcgtgtgaccggcggctctagagcctctgctaaccatgttcatgccttcttctttttcctacagctcctgggcaacgtgctggttattgtgctgtctcatcattttggcaaagaattcgggattcgaaccggtgccgccaccatgaacttcgggctcagcttgattttccttgtccttgttttaaaaggtgtccagtgtgaggtgaagctggtggagagcggcggcgacctggtgaagcctggcggcagcctgaagctgagctgcgccgccagcggcttcaccttcagcagctacgccatgagctgggtgagacagaaccctgagaagagactggagtgggtggccagcatcagcaagggcggcaacacctactaccctaacagcgtgaagggcagattcaccatcagcagagacaacgccagaaacatcctgtacctgcagatgagcagcctgagaagcgaggacaccgccctgtactactgcgccagaggctggggcgactacggctggttcgcctactggggccaggtgaccctggtgaccgtgagcgccgccaaaacgacacccccatctgtctatccactggcccctggatctgctgcccaaactaactccatggtgaccctgggatgcctggtcaagggctatttccctgagccagtgacagtgacctggaactctggatccctgtccagcggtgtgcacaccttcccagctgtcctgcagtctgacctctacactctgagcagctcagtgactgtcccctccagcacctggcccagcgagaccgtcacctgcaacgttgcccacccggccagcagcaccaaggtggacaagaaaattgtgcccagggattgtggttgtaagccttgcatatgtacagtcccagaagtatcatctgtcttcatcttccccccaaagcccaaggatgtgctcaccattactctgactcctaaggtcacgtgtgttgtggtagacatcagcaaggatgatcccgaggtccagttcagctggtttgtagatgatgtggaggtgcacacagctcagacgcaaccccgggaggagcagttcaacagcactttccgctcagtcagtgaacttcccatcatgcaccaggactggctcaatggcaaggagttcaaatgcagggtcaacagtgcagctttccctgcccccatcgagaaaaccatctccaaaaccaaaggcagaccgaaggctccacaggtgtacaccattccacctcccaaggagcagatggccaaggataaagtcagtctgacctgcatgataacagacttcttccctgaagacattactgtggagtggcagtggaatgggcagccagcggagaactacaagaacactcagcccatcatggacacagatggctcttacttcgtctacagcaagctcaatgtgcagaagagcaactgggaggcaggaaatactttcacctgctctgtgttacatgagggcctgcacaaccaccatactgagaagagcctctcccactctcctggtcgggccaagcggggaagcggagtgaaacagactttgaattttgaccttctcaagttggcgggagacgtggagtccaaccctggacctatgaagttgcctgttaggctgttggtgctgatgttctggattcctgcttccagcagtgacatcaagatgacccagagccctagcagcatgtacgccagcctgggcgagagagtgaccatcacctgcaaggccagccaggacatcaacagatacctgaactggttccagcagaagcctggcaagagccctaagaccctgatctacagagccaacagactgctggacggcgtgcctagcagattcagcggcagcggcagcggccaggactacagcctgaccatcagcagcctggactacgaggacatgggcatctactactgcctgcagtacgacgagttccctctgaccttcggcgacggcaccaagctggagctgaagcgggctgatgctgcaccaactgtatccatcttcccaccatccagtgagcagttaacatctggaggtgcctcagtcgtgtgcttcttgaacaacttctaccccaaagacatcaatgtcaagtggaagattgatggcagtgaacgacaaaatggcgtcctgaacagttggactgatcaggacagcaaagacagcacctacagcatgagcagcaccctcacgttgaccaaggacgagtatgaacgacataacagctatacctgtgaggccactcacaagacatcaacttcacccattgtcaagagcttcaacaggaatgagtgttagtaactcgaggacggggtgaactacgcctgaggatccgatctttttccctctgccaaaaattatggggacatcatgaagccccttgagcatctgacttctggctaataaaggaaatttattttcattgcaatagtgtgttggaattttttgtgtctctcactcggcctaggtagataagtagcatggcgggttaatcattaactacaaggaacccctagtgatggagttggccactccctctctgcgcgctcgctcgctcactgaggccgggcgaccaaaggtcgcccgacgcccgggctttgcccgggcggcctcagtgagcgagcgagcgcgcag

SEQ ID NO: 2155 - DNA, 4029 bp, Artificial Sequence
  source: /note="Description of Artificial Sequence: Synthetic polynucleotide"
ctgcgcgctcgctcgctcactgaggccgcccgggcaaagcccgggcgtcgggcgacctttggtcgcccggcctcagtgagcgagcgagcgcgcagagagggagtggccaactccatcactaggggttccttgtagttaatgattaacccgccatgctacttatctaccagggtaatggggatcctctagaactatagctagtcgacataacgcgtgatctaacatatcctggtgtggagtagcggacgctgctatgacagaggctcgggggcctgagctggctctgtgagctggggaggaggcagacagccaggccttgtctgcaagcagacctggcagcattgggctggccgccccccagggcctcctcttcatgcccagtgaatgactcaccttggcacagacacaatgttcggggtgggcacagtgcctgcttcccgccgcaccccagcccccctcaaatgccttccgagaagcccattgagcagggggcttgcattgcaccccagcctgacagcctggcatcttgggataaaagcagcacagccccctaggggctgcccttgctgtgtggcgccaccggcggtggagaacaaggctctattcagcctgtgcccaggaaaggggatcaggggatgcccaggcatggacagtgggtggcagggggggagaggagggctgtctgcttcccagaagtccaaggacacaaatgggtgaggggagagctctccccatagctgggctgcggcccaaccccaccccctcaggctatgccagggggtgttgccaggggcacccgggcatcgccagtctagcccactccttcataaagccctcgcatcccaggagcgagcagagccagagcaggttggagaggagacgcatcacctccgctgctcgcggggatcctctagaagcttcgtttagtgaaccgtcagatcgcctggagacgccatccacgctgttttgacctccatagaagacaccgggaccgatccagcctccgcggattcgaatcccggccgggaacggtgcattggaacgcggattccccgtgccaagagtgacgtaagtaccgcctatagagtctataggcccacaaaaaatgctttcttcttttaatatacttttttgtttatcttatttctaatactttccctaatctctttctttcagggcaataatgatacaatgtatcatgcctctttgcaccattctaaagaataacagtgataatttctgggttaaggcaatagcaatatttctgcatataaatatttctgcatataaattgtaactgatgtaagaggtttcatattgctaatagcagctacaatccagctaccattctgcttttattttatggttgggataaggctggattattctgagtccaagctaggcccttttgctaatcatgttcatacctcttatcttcctcccacagctcctgggcaacgtgctggtctgtgtgctggcccatcactttggcaaagaattgggattcgaaccggtgccgccaccatgaacttcgggctcagcttgattttccttgtccttgttttaaaaggtgtccagtgtgaggtgaagctggtggagagcggcggcgacctggtgaagcctggcggcagcctgaagctgagctgcgccgccagcggcttcaccttcagcagctacgccatgagctgggtgagacagaaccctgagaagagactggagtgggtggccagcatcagcaagggcggcaacacctactaccctaacagcgtgaagggcagattcaccatcagcagagacaacgccagaaacatcctgtacctgcagatgagcagcctgagaagcgaggacaccgccctgtactactgcgccagaggctggggcgactacggctggttcgcctactggggccaggtgaccctggtgaccgtgagcgccgccaaaacgacacccccatctgtctatccactggcccctggatctgctgcccaaactaactccatggtgaccctgggatgcctggtcaagggctatttccctgagccagtgacagtgacctggaactctggatccctgtccagcggtgtgcacaccttcccagctgtcctgcagtctgacctctacactctgagcagctcagtgactgtcccctccagcacctggcccagcgagaccgtcacctgcaacgttgcccacccggccagcagcaccaaggtggacaagaaaattgtgcccagggattgtggttgtaagccttgcatatgtacagtcccagaagtatcatctgtcttcatcttccccccaaagcccaaggatgtgctcaccattactctgactcctaaggtcacgtgtgttgtggtagacatcagcaaggatgatcccgaggtccagttcagctggtttgtagatgatgtggaggtgcacacagctcagacgcaaccccgggaggagcagttcaacagcactttccgctcagtcagtgaacttcccatcatgcaccaggactggctcaatggcaaggagttcaaatgcagggtcaacagtgcagctttccctgcccccatcgagaaaaccatctccaaaaccaaaggcagaccgaaggctccacaggtgtacaccattccacctcccaaggagcagatggccaaggataaagtcagtctgacctgcatgataacagacttcttccctgaagacattactgtggagtggcagtggaatgggcagccagcggagaactacaagaacactcagcccatcatggacacagatggctcttacttcgtctacagcaagctcaatgtgcagaagagcaactgggaggcaggaaatactttcacctgctctgtgttacatgagggcctgcacaaccaccatactgagaagagcctctcccactctcctggtcgggccaagcggggaagcggagtgaaacagactttgaattttgaccttctcaagttggcgggagacgtggagtccaaccctggacctatgaagttgcctgttaggctgttggtgctgatgttctggattcctgcttccagcagtgacatcaagatgacccagagccctagcagcatgtacgccagcctgggcgagagagtgaccatcacctgcaaggccagccaggacatcaacagatacctgaactggttccagcagaagcctggcaagagccctaagaccctgatctacagagccaacagactgctggacggcgtgcctagcagattcagcggcagcggcagcggccaggactacagcctgaccatcagcagcctggactacgaggacatgggcatctactactgcctgcagtacgacgagttccctctgaccttcggcgacggcaccaagctggagctgaagcgggctgatgctgcaccaactgtatccatcttcccaccatccagtgagcagttaacatctggaggtgcctcagtcgtgtgcttcttgaacaacttctaccccaaagacatcaatgtcaagtggaagattgatggcagtgaacgacaaaatggcgtcctgaacagttggactgatcaggacagcaaagacagcacctacagcatgagcagcaccctcacgttgaccaaggacgagtatgaacgacataacagctatacctgtgaggccactcacaagacatcaacttcacccattgtcaagagcttcaacaggaatgagtgttagtaactcgaggacggggtgaactacgcctgaggatccgatctttttccctctgccaaaaattatggggacatcatgaagccccttgagcatctgacttctggctaataaaggaaatttattttcattgcaatagtgtgttggaattttttgtgtctctcactcggcctaggtagataagtagcatggcgggttaatcattaactacaaggaacccctagtgatggagttggccactccctctctgcgcgctcgctcgctcactgaggccgggcgaccaaaggtcgcccgacgcccgggctttgcccgggcggcctcagtgagcgagcgagcgcgcag

SEQ ID NO: 2156 - DNA, 3887 bp, Artificial Sequence
  source: /note="Description of Artificial Sequence: Synthetic polynucleotide"
ctgcgcgctcgctcgctcactgaggccgcccgggcaaagcccgggcgtcgggcgacctttggtcgcccggcctcagtgagcgagcgagcgcgcagagagggagtggccaactccatcactaggggttccttgtagttaatgattaacccgccatgctacttatctaccagggtaatggggatcctctagaactatagctagtcgacataacgcgttagtatctgcagagggccctgcgtatgagtgcaagtgggttttaggaccaggatgaggcggggtgggggtgcctacctgacgaccgaccccgacccactggacaagcacccaacccccattccccaaattgcgcatcccctatcagagagggggaggggaaacaggatgcggcgaggcgcgtgcgcactgccagcttcagcaccgcggacagtgccttcgcccccgcctggcggcgcgcgccaccgccgcctcagcactgaaggcgcgctgacgtcactcgccggtcccccgcaaactccccttcccggccaccttggtcgcgtccgcgccgccgccggcccagccggaccgcaccacgcgaggcgcgagataggggggcacgggcgcgaccatctgcgctgcggcgccggcgactcagcgctgcctcagtctgcggtgggcagcggaggagtcgtgtcgtgcctgagagcgcagctgtgctcctgggcaccgcgcagtccgcccccgcggctcctggccagaccacccctaggaccccctgccccaagtcgcagccaagcttcgtttagtgaaccgtcagatcgcctggagacgccatccacgctgttttgacctccatagaagacaccgggaccgatccagcctccgcggattcgaatcccggccgggaacggtgcattggaacgcggattccccgtgccaagagtgacgtaagtaccgcctatagagtctataggcccacaaaaaatgctttcttcttttaatatacttttttgtttatcttatttctaatactttccctaatctctttctttcagggcaataatgatacaatgtatcatgcctctttgcaccattctaaagaataacagtgataatttctgggttaaggcaatagcaatatttctgcatataaatatttctgcatataaattgtaactgatgtaagaggtttcatattgctaatagcagctacaatccagctaccattctgcttttattttatggttgggataaggctggattattctgagtccaagctaggcccttttgctaatcatgttcatacctcttatcttcctcccacagctcctgggcaacgtgctggtctgtgtgctggcccatcactttggcaaagaattgggattcgaaccggtgccgccaccatgaacttcgggctcagcttgattttccttgtccttgttttaaaaggtgtccagtgtgaggtgaagctggtggagagcggcggcgacctggtgaagcctggcggcagcctgaagctgagctgcgccgccagcggcttcaccttcagcagctacgccatgagctgggtgagacagaaccctgagaagagactggagtgggtggccagcatcagcaagggcggcaacacctactaccctaacagcgtgaagggcagattcaccatcagcagagacaacgccagaaacatcctgtacctgcagatgagcagcctgagaagcgaggacaccgccctgtactactgcgccagaggctggggcgactacggctggttcgcctactggggccaggtgaccctggtgaccgtgagcgccgccaaaacgacacccccatctgtctatccactggcccctggatctgctgcccaaactaactccatggtgaccctgggatgcctggtcaagggctatttccctgagccagtgacagtgacctggaactctggatccctgtccagcggtgtgcacaccttcccagctgtcctgcagtctgacctctacactctgagcagctcagtgactgtcccctccagcacctggcccagcgagaccgtcacctgcaacgttgcccacccggccagcagcaccaaggtggacaagaaaattgtgcccagggattgtggttgtaagccttgcatatgtacagtcccagaagtatcatctgtcttcatcttccccccaaagcccaaggatgtgctcaccattactctgactcctaaggtcacgtgtgttgtggtagacatcagcaaggatgatcccgaggtccagttcagctggtttgtagatgatgtggaggtgcacacagctcagacgcaaccccgggaggagcagttcaacagcactttccgctcagtcagtgaacttcccatcatgcaccaggactggctcaatggcaaggagttcaaatgcagggtcaacagtgcagctttccctgcccccatcgagaaaaccatctccaaaaccaaaggcagaccgaaggctccacaggtgtacaccattccacctcccaaggagcagatggccaaggataaagtcagtctgacctgcatgataacagacttcttccctgaagacattactgtggagtggcagtggaatgggcagccagcggagaactacaagaacactcagcccatcatggacacagatggctcttacttcgtctacagcaagctcaatgtgcagaagagcaactgggaggcaggaaatactttcacctgctctgtgttacatgagggcctgcacaaccaccatactgagaagagcctctcccactctcctggtcgggccaagcggggaagcggagtgaaacagactttgaattttgaccttctcaagttggcgggagacgtggagtccaaccctggacctatgaagttgcctgttaggctgttggtgctgatgttctggattcctgcttccagcagtgacatcaagatgacccagagccctagcagcatgtacgccagcctgggcgagagagtgaccatcacctgcaaggccagccaggacatcaacagatacctgaactggttccagcagaagcctggcaagagccctaagaccctgatctacagagccaacagactgctggacggcgtgcctagcagattcagcggcagcggcagcggccaggactacagcctgaccatcagcagcctggactacgaggacatgggcatctactactgcctgcagtacgacgagttccctctgaccttcggcgacggcaccaagctggagctgaagcgggctgatgctgcaccaactgtatccatcttcccaccatccagtgagcagttaacatctggaggtgcctcagtcgtgtgcttcttgaacaacttctaccccaaagacatcaatgtcaagtggaagattgatggcagtgaacgacaaaatggcgtcctgaacagttggactgatcaggacagcaaagacagcacctacagcatgagcagcaccctcacgttgaccaaggacgagtatgaacgacataacagctatacctgtgaggccactcacaagacatcaacttcacccattgtcaagagcttcaacaggaatgagtgttagtaactcgaggacggggtgaactacgcctgaggatccgatctttttccctctgccaaaaattatggggacatcatgaagccccttgagcatctgacttctggctaataaaggaaatttattttcattgcaatagtgtgttggaattttttgtgtctctcactcggcctaggtagataagtagcatggcgggttaatcattaactacaaggaacccctagtgatggagttggccactccctctctgcgcgctcgctcgctcactgaggccgggcgaccaaaggtcgcccgacgcccgggctttgcccgggcggcctcagtgagcgagcgagcgcgcag

SEQ ID NO: 2157 - DNA, 3959 bp, Artificial Sequence
  source: /note="Description of Artificial Sequence: Synthetic polynucleotide"
ctgcgcgctcgctcgctcactgaggccgcccgggcaaagcccgggcgtcgggcgacctttggtcgcccggcctcagtgagcgagcgagcgcgcagagagggagtggccaactccatcactaggggttccttgtagttaatgattaacccgccatgctacttatctaccagggtaatggggatcctctagaactatagctagtcgacattgattattgactagttattaatagtaatcaattacggggtcattagttcatagcccatatatggagttccgcgttacataacttacggtaaatggcccgcctggctgaccgcccaacgacccccgcccattgacgtcaataatgacgtatgttcccatagtaacgccaatagggactttccattgacgtcaatgggtggagtatttacggtaaactgcccacttggcagtacatcaagtgtatcatatgccaagtacgccccctattgacgtcaatgacggtaaatggcccgcctggcattatgcccagtacatgaccttatgggactttcctacttggcagtacatctacgtattagtcatcgctattaccatgtcgaggccacgttctgcttcactctccccatctcccccccctccccacccccaattttgtatttatttattttttaattattttgtgcagcgatgggggcggggggggggggcgcgcgccaggcggggcggggcggggcgaggggcggggcggggcgaggcggagaggtgcggcggcagccaatcagagcggcgcgctccgaaagtttccttttatggcgaggcggcggcggcggcggccctataaaaagcgaagcgcgcggcgggcgggagcaagcttcgtttagtgaaccgtcagatcgcctggagacgccatccacgctgttttgacctccatagaagacaccgggaccgatccagcctccgcggattcgaatcccggccgggaacggtgcattggaacgcggattccccgtgccaagagtgacgtaagtaccgcctatagagtctataggcccacaaaaaatgctttcttcttttaatatacttttttgtttatcttatttctaatactttccctaatctctttctttcagggcaataatgatacaatgtatcatgcctctttgcaccattctaaagaataacagtgataatttctgggttaaggcaatagcaatatttctgcatataaatatttctgcatataaattgtaactgatgtaagaggtttcatattgctaatagcagctacaatccagctaccattctgcttttattttatggttgggataaggctggattattctgagtccaagctaggcccttttgctaatcatgttcatacctcttatcttcctcccacagctcctgggcaacgtgctggtctgtgtgctggcccatcactttggcaaagaattgggattcgaaccggtgccgccaccatgaagttgcctgttaggctgttggtgctgatgttctggattcctgcttccagcagtgacatcaagatgacccagagccctagcagcatgtacgccagcctgggcgagagagtgaccatcacctgcaaggccagccaggacatcaacagatacctgaactggttccagcagaagcctggcaagagccctaagaccctgatctacagagccaacagactgctggacggcgtgcctagcagattcagcggcagcggcagcggccaggactacagcctgaccatcagcagcctggactacgaggacatgggcatctactactgcctgcagtacgacgagttccctctgaccttcggcgacggcaccaagctggagctgaagcgggctgatgctgcaccaactgtatccatcttcccaccatccagtgagcagttaacatctggaggtgcctcagtcgtgtgcttcttgaacaacttctaccccaaagacatcaatgtcaagtggaagattgatggcagtgaacgacaaaatggcgtcctgaacagttggactgatcaggacagcaaagacagcacctacagcatgagcagcaccctcacgttgaccaaggacgagtatgaacgacataacagctatacctgtgaggccactcacaagacatcaacttcacccattgtcaagagcttcaacaggaatgagtgtggaagcggagtgaaacagactttgaattttgaccttctcaagttggcgggagacgtggagtccaaccctggacctatgaacttcgggctcagcttgattttccttgtccttgttttaaaaggtgtccagtgtgaggtgaagctggtggagagcggcggcgacctggtgaagcctggcggcagcctgaagctgagctgcgccgccagcggcttcaccttcagcagctacgccatgagctgggtgagacagaaccctgagaagagactggagtgggtggccagcatcagcaagggcggcaacacctactaccctaacagcgtgaagggcagattcaccatcagcagagacaacgccagaaacatcctgtacctgcagatgagcagcctgagaagcgaggacaccgccctgtactactgcgccagaggctggggcgactacggctggttcgcctactggggccaggtgaccctggtgaccgtgagcgccgccaaaacgacacccccatctgtctatccactggcccctggatctgctgcccaaactaactccatggtgaccctgggatgcctggtcaagggctatttccctgagccagtgacagtgacctggaactctggatccctgtccagcggtgtgcacaccttcccagctgtcctgcagtctgacctctacactctgagcagctcagtgactgtcccctccagcacctggcccagcgagaccgtcacctgcaacgttgcccacccggccagcagcaccaaggtggacaagaaaattgtgcccagggattgtggttgtaagccttgcatatgtacagtcccagaagtatcatctgtcttcatcttccccccaaagcccaaggatgtgctcaccattactctgactcctaaggtcacgtgtgttgtggtagacatcagcaaggatgatcccgaggtccagttcagctggtttgtagatgatgtggaggtgcacacagctcagacgcaaccccgggaggagcagttcaacagcactttccgctcagtcagtgaacttcccatcatgcaccaggactggctcaatggcaaggagttcaaatgcagggtcaacagtgcagctttccctgcccccatcgagaaaaccatctccaaaaccaaaggcagaccgaaggctccacaggtgtacaccattccacctcccaaggagcagatggccaaggataaagtcagtctgacctgcatgataacagacttcttccctgaagacattactgtggagtggcagtggaatgggcagccagcggagaactacaagaacactcagcccatcatggacacagatggctcttacttcgtctacagcaagctcaatgtgcagaagagcaactgggaggcaggaaatactttcacctgctctgtgttacatgagggcctgcacaaccaccatactgagaagagcctctcccactctcctggttagtaactcgaggacggggtgaactacgcctgaggatccgatctttttccctctgccaaaaattatggggacatcatgaagccccttgagcatctgacttctggctaataaaggaaatttattttcattgcaatagtgtgttggaattttttgtgtctctcactcggcctaggtagataagtagcatggcgggttaatcattaactacaaggaacccctagtgatggagttggccactccctctctgcgcgctcgctcgctcactgaggccgggcgaccaaaggtcgcccgacgcccgggctttgcccgggcggcctcagtgagcgagcgagcgcgcag

SEQ ID NO: 2158 - DNA, 4447 bp, Artificial Sequence
  source: /note="Description of Artificial Sequence: Synthetic polynucleotide"
ctgcgcgctcgctcgctcactgaggccgcccgggcaaagcccgggcgtcgggcgacctttggtcgcccggcctcagtgagcgagcgagcgcgcagagagggagtggccaactccatcactaggggttccttgtagttaatgattaacccgccatgctacttatctaccagggtaatggggatcctctagaactatagctagtcgacataacgcgtctagttattaatagtaatcaattacggggtcattagttcatagcccatatatggagttccgcgttacataacttacggtaaatggcccgcctggctgaccgcccaacgacccccgcccattgacgtcaataatgacgtatgttcccatagtaacgccaatagggactttccattgacgtcaatgggtggagtatttacggtaaactgcccacttggcagtacatcaagtgtatcatatgccaagtacgccccctattgacgtcaatgacggtaaatggcccgcctggcattatgcccagtacatgaccttatgggactttcctacttggcagtacatctacgtattagtcatcgctattaccatggtcgaggtgagccccacgttctgcttcactctccccatctcccccccctccccacccccaattttgtatttatttattttttaattattttgtgcagcgatgggggcggggggggggggggggcgcgcgccaggcggggcggggcggggcgaggggcggggcggggcgaggcggagaggtgcggcggcagccaatcagagcggcgcgctccgaaagtttccttttatggcgaggcggcggcggcggcggccctataaaaagcgaagcgcgcggcgggcgggagtcgctgcgcgctgccttcgccccgtgccccgctccgccgccgcctcgcgccgcccgccccggctctgactgaccgcgttactcccacaggtgagcgggcgggacggcccttctcctccgggctgtaattagcgcttggtttaatgacggcttgtttcttttctgtggctgcgtgaaagccttgaggggctccgggagggccctttgtgcggggggagcggctcggggggtgcgtgcgtgtgtgtgtgcgtggggagcgccgcgtgcggctccgcgctgcccggcggctgtgagcgctgcgggcgcggcgcggggctttgtgcgctccgcagtgtgcgcgaggggagcgcggccgggggcggtgccccgcggtgcggggggggctgcgaggggaacaaaggctgcgtgcggggtgtgtgcgtgggggggtgagcagggggtgtgggcgcgtcggtcgggctgcaaccccccctgcacccccctccccgagttgctgagcacggcccggcttcgggtgcggggctccgtacggggcgtggcgcggggctcgccgtgccgggcggggggtggcggcaggtgggggtgccgggcggggcggggccgcctcgggccggggagggctcgggggaggggcgcggcggcccccggagcgccggcggctgtcgaggcgcggcgagccgcagccattgccttttatggtaatcgtgcgagagggcgcagggacttcctttgtcccaaatctgtgcggagccgaaatctgggaggcgccgccgcaccccctctagcgggcgcggggcgaagcggtgcggcgccggcaggaaggaaatgggcggggagggccttcgtgcgtcgccgcgccgccgtccccttctccctctccagcctcggggctgtccgcggggggacggctgccttcgggggggacggggcagggcggggttcggcttctggcgtgtgaccggcggctctagagcctctgctaaccatgttcatgccttcttctttttcctacagctcctgggcaacgtgctggttattgtgctgtctcatcattttggcaaagaattcgggattcgaaccggtgccgccaccatgaagttgcctgttaggctgttggtgctgatgttctggattcctgcttccagcagtgacatcaagatgacccagagccctagcagcatgtacgccagcctgggcgagagagtgaccatcacctgcaaggccagccaggacatcaacagatacctgaactggttccagcagaagcctggcaagagccctaagaccctgatctacagagccaacagactgctggacggcgtgcctagcagattcagcggcagcggcagcggccaggactacagcctgaccatcagcagcctggactacgaggacatgggcatctactactgcctgcagtacgacgagttccctctgaccttcggcgacggcaccaagctggagctgaagcgggctgatgctgcaccaactgtatccatcttcccaccatccagtgagcagttaacatctggaggtgcctcagtcgtgtgcttcttgaacaacttctaccccaaagacatcaatgtcaagtggaagattgatggcagtgaacgacaaaatggcgtcctgaacagttggactgatcaggacagcaaagacagcacctacagcatgagcagcaccctcacgttgaccaaggacgagtatgaacgacataacagctatacctgtgaggccactcacaagacatcaacttcacccattgtcaagagcttcaacaggaatgagtgtggaagcggagtgaaacagactttgaattttgaccttctcaagttggcgggagacgtggagtccaaccctggacctatgaacttcgggctcagcttgattttccttgtccttgttttaaaaggtgtccagtgtgaggtgaagctggtggagagcggcggcgacctggtgaagcctggcggcagcctgaagctgagctgcgccgccagcggcttcaccttcagcagctacgccatgagctgggtgagacagaaccctgagaagagactggagtgggtggccagcatcagcaagggcggcaacacctactaccctaacagcgtgaagggcagattcaccatcagcagagacaacgccagaaacatcctgtacctgcagatgagcagcctgagaagcgaggacaccgccctgtactactgcgccagaggctggggcgactacggctggttcgcctactggggccaggtgaccctggtgaccgtgagcgccgccaaaacgacacccccatctgtctatccactggcccctggatctgctgcccaaactaactccatggtgaccctgggatgcctggtcaagggctatttccctgagccagtgacagtgacctggaactctggatccctgtccagcggtgtgcacaccttcccagctgtcctgcagtctgacctctacactctgagcagctcagtgactgtcccctccagcacctggcccagcgagaccgtcacctgcaacgttgcccacccggccagcagcaccaaggtggacaagaaaattgtgcccagggattgtggttgtaagccttgcatatgtacagtcccagaagtatcatctgtcttcatcttccccccaaagcccaaggatgtgctcaccattactctgactcctaaggtcacgtgtgttgtggtagacatcagcaaggatgatcccgaggtccagttcagctggtttgtagatgatgtggaggtgcacacagctcagacgcaaccccgggaggagcagttcaacagcactttccgctcagtcagtgaacttcccatcatgcaccaggactggctcaatggcaaggagttcaaatgcagggtcaacagtgcagctttccctgcccccatcgagaaaaccatctccaaaaccaaaggcagaccgaaggctccacaggtgtacaccattccacctcccaaggagcagatggccaaggataaagtcagtctgacctgcatgataacagacttcttccctgaagacattactgtggagtggcagtggaatgggcagccagcggagaactacaagaacactcagcccatcatggacacagatggctcttacttcgtctacagcaagctcaatgtgcagaagagcaactgggaggcaggaaatactttcacctgctctgtgttacatgagggcctgcacaaccaccatactgagaagagcctctcccactctcctggttagtaactcgaggacggggtgaactacgcctgaggatccgatctttttccctctgccaaaaattatggggacatcatgaagccccttgagcatctgacttctggctaataaaggaaatttattttcattgcaatagtgtgttggaattttttgtgtctctcactcggcctaggtagataagtagcatggcgggttaatcattaactacaaggaacccctagtgatggagttggccactccctctctgcgcgctcgctcgctcactgaggccgggcgaccaaaggtcgcccgacgcccgggctttgcccgggcggcctcagtgagcgagcgagcgcgcag

SEQ ID NO: 2159 - DNA, 4017 bp, Artificial Sequence
  source: /note="Description of Artificial Sequence: Synthetic polynucleotide"
ctgcgcgctcgctcgctcactgaggccgcccgggcaaagcccgggcgtcgggcgacctttggtcgcccggcctcagtgagcgagcgagcgcgcagagagggagtggccaactccatcactaggggttccttgtagttaatgattaacccgccatgctacttatctaccagggtaatggggatcctctagaactatagctagtcgacataacgcgtgatctaacatatcctggtgtggagtagcggacgctgctatgacagaggctcgggggcctgagctggctctgtgagctggggaggaggcagacagccaggccttgtctgcaagcagacctggcagcattgggctggccgccccccagggcctcctcttcatgcccagtgaatgactcaccttggcacagacacaatgttcggggtgggcacagtgcctgcttcccgccgcaccccagcccccctcaaatgccttccgagaagcccattgagcagggggcttgcattgcaccccagcctgacagcctggcatcttgggataaaagcagcacagccccctaggggctgcccttgctgtgtggcgccaccggcggtggagaacaaggctctattcagcctgtgcccaggaaaggggatcaggggatgcccaggcatggacagtgggtggcagggggggagaggagggctgtctgcttcccagaagtccaaggacacaaatgggtgaggggagagctctccccatagctgggctgcggcccaaccccaccccctcaggctatgccagggggtgttgccaggggcacccgggcatcgccagtctagcccactccttcataaagccctcgcatcccaggagcgagcagagccagagcaggttggagaggagacgcatcacctccgctgctcgcggggatcctctagaagcttcgtttagtgaaccgtcagatcgcctggagacgccatccacgctgttttgacctccatagaagacaccgggaccgatccagcctccgcggattcgaatcccggccgggaacggtgcattggaacgcggattccccgtgccaagagtgacgtaagtaccgcctatagagtctataggcccacaaaaaatgctttcttcttttaatatacttttttgtttatcttatttctaatactttccctaatctctttctttcagggcaataatgatacaatgtatcatgcctctttgcaccattctaaagaataacagtgataatttctgggttaaggcaatagcaatatttctgcatataaatatttctgcatataaattgtaactgatgtaagaggtttcatattgctaatagcagctacaatccagctaccattctgcttttattttatggttgggataaggctggattattctgagtccaagctaggcccttttgctaatcatgttcatacctcttatcttcctcccacagctcctgggcaacgtgctggtctgtgtgctggcccatcactttggcaaagaattgggattcgaaccggtgccgccaccatgaagttgcctgttaggctgttggtgctgatgttctggattcctgcttccagcagtgacatcaagatgacccagagccctagcagcatgtacgccagcctgggcgagagagtgaccatcacctgcaaggccagccaggacatcaacagatacctgaactggttccagcagaagcctggcaagagccctaagaccctgatctacagagccaacagactgctggacggcgtgcctagcagattcagcggcagcggcagcggccaggactacagcctgaccatcagcagcctggactacgaggacatgggcatctactactgcctgcagtacgacgagttccctctgaccttcggcgacggcaccaagctggagctgaagcgggctgatgctgcaccaactgtatccatcttcccaccatccagtgagcagttaacatctggaggtgcctcagtcgtgtgcttcttgaacaacttctaccccaaagacatcaatgtcaagtggaagattgatggcagtgaacgacaaaatggcgtcctgaacagttggactgatcaggacagcaaagacagcacctacagcatgagcagcaccctcacgttgaccaaggacgagtatgaacgacataacagctatacctgtgaggccactcacaagacatcaacttcacccattgtcaagagcttcaacaggaatgagtgtggaagcggagtgaaacagactttgaattttgaccttctcaagttggcgggagacgtggagtccaaccctggacctatgaacttcgggctcagcttgattttccttgtccttgttttaaaaggtgtccagtgtgaggtgaagctggtggagagcggcggcgacctggtgaagcctggcggcagcctgaagctgagctgcgccgccagcggcttcaccttcagcagctacgccatgagctgggtgagacagaaccctgagaagagactggagtgggtggccagcatcagcaagggcggcaacacctactaccctaacagcgtgaagggcagattcaccatcagcagagacaacgccagaaacatcctgtacctgcagatgagcagcctgagaagcgaggacaccgccctgtactactgcgccagaggctggggcgactacggctggttcgcctactggggccaggtgaccctggtgaccgtgagcgccgccaaaacgacacccccatctgtctatccactggcccctggatctgctgcccaaactaactccatggtgaccctgggatgcctggtcaagggctatttccctgagccagtgacagtgacctggaactctggatccctgtccagcggtgtgcacaccttcccagctgtcctgcagtctgacctctacactctgagcagctcagtgactgtcccctccagcacctggcccagcgagaccgtcacctgcaacgttgcccacccggccagcagcaccaaggtggacaagaaaattgtgcccagggattgtggttgtaagccttgcatatgtacagtcccagaagtatcatctgtcttcatcttccccccaaagcccaaggatgtgctcaccattactctgactcctaaggtcacgtgtgttgtggtagacatcagcaaggatgatcccgaggtccagttcagctggtttgtagatgatgtggaggtgcacacagctcagacgcaaccccgggaggagcagttcaacagcactttccgctcagtcagtgaacttcccatcatgcaccaggactggctcaatggcaaggagttcaaatgcagggtcaacagtgcagctttccctgcccccatcgagaaaaccatctccaaaaccaaaggcagaccgaaggctccacaggtgtacaccattccacctcccaaggagcagatggccaaggataaagtcagtctgacctgcatgataacagacttcttccctgaagacattactgtggagtggcagtggaatgggcagccagcggagaactacaagaacactcagcccatcatggacacagatggctcttacttcgtctacagcaagctcaatgtgcagaagagcaactgggaggcaggaaatactttcacctgctctgtgttacatgagggcctgcacaaccaccatactgagaagagcctctcccactctcctggttagtaactcgaggacggggtgaactacgcctgaggatccgatctttttccctctgccaaaaattatggggacatcatgaagccccttgagcatctgacttctggctaataaaggaaatttattttcattgcaatagtgtgttggaattttttgtgtctctcactcggcctaggtagataagtagcatggcgggttaatcattaactacaaggaacccctagtgatggagttggccactccctctctgcgcgctcgctcgctcactgaggccgggcgaccaaaggtcgcccgacgcccgggctttgcccgggcggcctcagtgagcgagcgagcgcgcag

SEQ ID NO: 2160 - DNA, 3875 bp, Artificial Sequence
  source: /note="Description of Artificial Sequence: Synthetic polynucleotide"
ctgcgcgctcgctcgctcactgaggccgcccgggcaaagcccgggcgtcgggcgacctttggtcgcccggcctcagtgagcgagcgagcgcgcagagagggagtggccaactccatcactaggggttccttgtagttaatgattaacccgccatgctacttatctaccagggtaatggggatcctctagaactatagctagtcgacataacgcgttagtatctgcagagggccctgcgtatgagtgcaagtgggttttaggaccaggatgaggcggggtgggggtgcctacctgacgaccgaccccgacccactggacaagcacccaacccccattccccaaattgcgcatcccctatcagagagggggaggggaaacaggatgcggcgaggcgcgtgcgcactgccagcttcagcaccgcggacagtgccttcgcccccgcctggcggcgcgcgccaccgccgcctcagcactgaaggcgcgctgacgtcactcgccggtcccccgcaaactccccttcccggccaccttggtcgcgtccgcgccgccgccggcccagccggaccgcaccacgcgaggcgcgagataggggggcacgggcgcgaccatctgcgctgcggcgccggcgactcagcgctgcctcagtctgcggtgggcagcggaggagtcgtgtcgtgcctgagagcgcagctgtgctcctgggcaccgcgcagtccgcccccgcggctcctggccagaccacccctaggaccccctgccccaagtcgcagccaagcttcgtttagtgaaccgtcagatcgcctggagacgccatccacgctgttttgacctccatagaagacaccgggaccgatccagcctccgcggattcgaatcccggccgggaacggtgcattggaacgcggattccccgtgccaagagtgacgtaagtaccgcctatagagtctataggcccacaaaaaatgctttcttcttttaatatacttttttgtttatcttatttctaatactttccctaatctctttctttcagggcaataatgatacaatgtatcatgcctctttgcaccattctaaagaataacagtgataatttctgggttaaggcaatagcaatatttctgcatataaatatttctgcatataaattgtaactgatgtaagaggtttcatattgctaatagcagctacaatccagctaccattctgcttttattttatggttgggataaggctggattattctgagtccaagctaggcccttttgctaatcatgttcatacctcttatcttcctcccacagctcctgggcaacgtgctggtctgtgtgctggcccatcactttggcaaagaattgggattcgaaccggtgccgccaccatgaagttgcctgttaggctgttggtgctgatgttctggattcctgcttccagcagtgacatcaagatgacccagagccctagcagcatgtacgccagcctgggcgagagagtgaccatcacctgcaaggccagccaggacatcaacagatacctgaactggttccagcagaagcctggcaagagccctaagaccctgatctacagagccaacagactgctggacggcgtgcctagcagattcagcggcagcggcagcggccaggactacagcctgaccatcagcagcctggactacgaggacatgggcatctactactgcctgcagtacgacgagttccctctgaccttcggcgacggcaccaagctggagctgaagcgggctgatgctgcaccaactgtatccatcttcccaccatccagtgagcagttaacatctggaggtgcctcagtcgtgtgcttcttgaacaacttctaccccaaagacatcaatgtcaagtggaagattgatggcagtgaacgacaaaatggcgtcctgaacagttggactgatcaggacagcaaagacagcacctacagcatgagcagcaccctcacgttgaccaaggacgagtatgaacgacataacagctatacctgtgaggccactcacaagacatcaacttcacccattgtcaagagcttcaacaggaatgagtgtggaagcggagtgaaacagactttgaattttgaccttctcaagttggcgggagacgtggagtccaaccctggacctatgaacttcgggctcagcttgattttccttgtccttgttttaaaaggtgtccagtgtgaggtgaagctggtggagagcggcggcgacctggtgaagcctggcggcagcctgaagctgagctgcgccgccagcggcttcaccttcagcagctacgccatgagctgggtgagacagaaccctgagaagagactggagtgggtggccagcatcagcaagggcggcaacacctactaccctaacagcgtgaagggcagattcaccatcagcagagacaacgccagaaacatcctgtacctgcagatgagcagcctgagaagcgaggacaccgccctgtactactgcgccagaggctggggcgactacggctggttcgcctactggggccaggtgaccctggtgaccgtgagcgccgccaaaacgacacccccatctgtctatccactggcccctggatctgctgcccaaactaactccatggtgaccctgggatgcctggtcaagggctatttccctgagccagtgacagtgacctggaactctggatccctgtccagcggtgtgcacaccttcccagctgtcctgcagtctgacctctacactctgagcagctcagtgactgtcccctccagcacctggcccagcgagaccgtcacctgcaacgttgcccacccggccagcagcaccaaggtggacaagaaaattgtgcccagggattgtggttgtaagccttgcatatgtacagtcccagaagtatcatctgtcttcatcttccccccaaagcccaaggatgtgctcaccattactctgactcctaaggtcacgtgtgttgtggtagacatcagcaaggatgatcccgaggtccagttcagctggtttgtagatgatgtggaggtgcacacagctcagacgcaaccccgggaggagcagttcaacagcactttccgctcagtcagtgaacttcccatcatgcaccaggactggctcaatggcaaggagttcaaatgcagggtcaacagtgcagctttccctgcccccatcgagaaaaccatctccaaaaccaaaggcagaccgaaggctccacaggtgtacaccattccacctcccaaggagcagatggccaaggataaagtcagtctgacctgcatgataacagacttcttccctgaagacattactgtggagtggcagtggaatgggcagccagcggagaactacaagaacactcagcccatcatggacacagatggctcttacttcgtctacagcaagctcaatgtgcagaagagcaactgggaggcaggaaatactttcacctgctctgtgttacatgagggcctgcacaaccaccatactgagaagagcctctcccactctcctggttagtaactcgaggacggggtgaactacgcctgaggatccgatctttttccctctgccaaaaattatggggacatcatgaagccccttgagcatctgacttctggctaataaaggaaatttattttcattgcaatagtgtgttggaattttttgtgtctctcactcggcctaggtagataagtagcatggcgggttaatcattaactacaaggaacccctagtgatggagttggccactccctctctgcgcgctcgctcgctcactgaggccgggcgaccaaaggtcgcccgacgcccgggctttgcccgggcggcctcagtgagcgagcgagcgcgcag

SEQ ID NO: 2161 - DNA, 3950 bp, Artificial Sequence
  source: /note="Description of Artificial Sequence: Synthetic polynucleotide"
ctgcgcgctcgctcgctcactgaggccgcccgggcaaagcccgggcgtcgggcgacctttggtcgcccggcctcagtgagcgagcgagcgcgcagagagggagtggccaactccatcactaggggttccttgtagttaatgattaacccgccatgctacttatctaccagggtaatggggatcctctagaactatagctagtcgacattgattattgactagttattaatagtaatcaattacggggtcattagttcatagcccatatatggagttccgcgttacataacttacggtaaatggcccgcctggctgaccgcccaacgacccccgcccattgacgtcaataatgacgtatgttcccatagtaacgccaatagggactttccattgacgtcaatgggtggagtatttacggtaaactgcccacttggcagtacatcaagtgtatcatatgccaagtacgccccctattgacgtcaatgacggtaaatggcccgcctggcattatgcccagtacatgaccttatgggactttcctacttggcagtacatctacgtattagtcatcgctattaccatgtcgaggccacgttctgcttcactctccccatctcccccccctccccacccccaattttgtatttatttattttttaattattttgtgcagcgatgggggcggggggggggggcgcgcgccaggcggggcggggcggggcgaggggcggggcggggcgaggcggagaggtgcggcggcagccaatcagagcggcgcgctccgaaagtttccttttatggcgaggcggcggcggcggcggccctataaaaagcgaagcgcgcggcgggcgggagcaagcttcgtttagtgaaccgtcagatcgcctggagacgccatccacgctgttttgacctccatagaagacaccgggaccgatccagcctccgcggattcgaatcccggccgggaacggtgcattggaacgcggattccccgtgccaagagtgacgtaagtaccgcctatagagtctataggcccacaaaaaatgctttcttcttttaatatacttttttgtttatcttatttctaatactttccctaatctctttctttcagggcaataatgatacaatgtatcatgcctctttgcaccattctaaagaataacagtgataatttctgggttaaggcaatagcaatatttctgcatataaatatttctgcatataaattgtaactgatgtaagaggtttcatattgctaatagcagctacaatccagctaccattctgcttttattttatggttgggataaggctggattattctgagtccaagctaggcccttttgctaatcatgttcatacctcttatcttcctcccacagctcctgggcaacgtgctggtctgtgtgctggcccatcactttggcaaagaattgggattcgaaccggtgccgccaccatgaacttcgggctcagcttgattttccttgtccttgttttaaaaggtgtccagtgtgaggtgaagctggtggagagcggcggcgacctggtgaagcctggcggcagcctgaagctgagctgcgccgccagcggcttcaccttcagcagctacgccatgagctgggtgagacagaaccctgagaagagactggagtgggtggccagcatcagcaagggcggcaacacctactaccctaacagcgtgaagggcagattcaccatcagcagagacaacgccagaaacatcctgtacctgcagatgagcagcctgagaagcgaggacaccgccctgtactactgcgccagaggctggggcgactacggctggttcgcctactggggccaggtgaccctggtgaccgtgagcgccgccaaaacgacacccccatctgtctatccactggcccctggatctgctgcccaaactaactccatggtgaccctgggatgcctggtcaagggctatttccctgagccagtgacagtgacctggaactctggatccctgtccagcggtgtgcacaccttcccagctgtcctgcagtctgacctctacactctgagcagctcagtgactgtcccctccagcacctggcccagcgagaccgtcacctgcaacgttgcccacccggccagcagcaccaaggtggacaagaaaattgtgcccagggattgtggttgtaagccttgcatatgtacagtcccagaagtatcatctgtcttcatcttccccccaaagcccaaggatgtgctcaccattactctgactcctaaggtcacgtgtgttgtggtagacatcagcaaggatgatcccgaggtccagttcagctggtttgtagatgatgtggaggtgcacacagctcagacgcaaccccgggaggagcagttcaacagcactttccgctcagtcagtgaacttcccatcatgcaccaggactggctcaatggcaaggagttcaaatgcagggtcaacagtgcagctttccctgcccccatcgagaaaaccatctccaaaaccaaaggcagaccgaaggctccacaggtgtacaccattccacctcccaaggagcagatggccaaggataaagtcagtctgacctgcatgataacagacttcttccctgaagacattactgtggagtggcagtggaatgggcagccagcggagaactacaagaacactcagcccatcatggacacagatggctcttacttcgtctacagcaagctcaatgtgcagaagagcaactgggaggcaggaaatactttcacctgctctgtgttacatgagggcctgcacaaccaccatactgagaagagcctctcccactctcctggtagaaagaggcgagagggcagaggaagtcttctaacatgcggtgacgtggaggagaatcccggccctatgaagttgcctgttaggctgttggtgctgatgttctggattcctgcttccagcagtgacatcaagatgacccagagccctagcagcatgtacgccagcctgggcgagagagtgaccatcacctgcaaggccagccaggacatcaacagatacctgaactggttccagcagaagcctggcaagagccctaagaccctgatctacagagccaacagactgctggacggcgtgcctagcagattcagcggcagcggcagcggccaggactacagcctgaccatcagcagcctggactacgaggacatgggcatctactactgcctgcagtacgacgagttccctctgaccttcggcgacggcaccaagctggagctgaagcgggctgatgctgcaccaactgtatccatcttcccaccatccagtgagcagttaacatctggaggtgcctcagtcgtgtgcttcttgaacaacttctaccccaaagacatcaatgtcaagtggaagattgatggcagtgaacgacaaaatggcgtcctgaacagttggactgatcaggacagcaaagacagcacctacagcatgagcagcaccctcacgttgaccaaggacgagtatgaacgacataacagctatacctgtgaggccactcacaagacatcaacttcacccattgtcaagagcttcaacaggaatgagtgttagtaactcgaggacggggtgaactacgcctgaggatccgatctttttccctctgccaaaaattatggggacatcatgaagccccttgagcatctgacttctggctaataaaggaaatttattttcattgcaatagtgtgttggaattttttgtgtctctcactcggcctaggtagataagtagcatggcgggttaatcattaactacaaggaacccctagtgatggagttggccactccctctctgcgcgctcgctcgctcactgaggccgggcgaccaaaggtcgcccgacgcccgggctttgcccgggcggcctcagtgagcgagcgagcgcgcag

SEQ ID NO: 2162 - DNA, 4438 bp, Artificial Sequence
  source: /note="Description of Artificial Sequence: Synthetic polynucleotide"
ctgcgcgctcgctcgctcactgaggccgcccgggcaaagcccgggcgtcgggcgacctttggtcgcccggcctcagtgagcgagcgagcgcgcagagagggagtggccaactccatcactaggggttccttgtagttaatgattaacccgccatgctacttatctaccagggtaatggggatcctctagaactatagctagtcgacataacgcgtctagttattaatagtaatcaattacggggtcattagttcatagcccatatatggagttccgcgttacataacttacggtaaatggcccgcctggctgaccgcccaacgacccccgcccattgacgtcaataatgacgtatgttcccatagtaacgccaatagggactttccattgacgtcaatgggtggagtatttacggtaaactgcccacttggcagtacatcaagtgtatcatatgccaagtacgccccctattgacgtcaatgacggtaaatggcccgcctggcattatgcccagtacatgaccttatgggactttcctacttggcagtacatctacgtattagtcatcgctattaccatggtcgaggtgagccccacgttctgcttcactctccccatctcccccccctccccacccccaattttgtatttatttattttttaattattttgtgcagcgatgggggcggggggggggggggggcgcgcgccaggcggggcggggcggggcgaggggcggggcggggcgaggcggagaggtgcggcggcagccaatcagagcggcgcgctccgaaagtttccttttatggcgaggcggcggcggcggcggccctataaaaagcgaagcgcgcggcgggcgggagtcgctgcgcgctgccttcgccccgtgccccgctccgccgccgcctcgcgccgcccgccccggctctgactgaccgcgttactcccacaggtgagcgggcgggacggcccttctcctccgggctgtaattagcgcttggtttaatgacggcttgtttcttttctgtggctgcgtgaaagccttgaggggctccgggagggccctttgtgcggggggagcggctcggggggtgcgtgcgtgtgtgtgtgcgtggggagcgccgcgtgcggctccgcgctgcccggcggctgtgagcgctgcgggcgcggcgcggggctttgtgcgctccgcagtgtgcgcgaggggagcgcggccgggggcggtgccccgcggtgcggggggggctgcgaggggaacaaaggctgcgtgcggggtgtgtgcgtgggggggtgagcagggggtgtgggcgcgtcggtcgggctgcaaccccccctgcacccccctccccgagttgctgagcacggcccggcttcgggtgcggggctccgtacggggcgtggcgcggggctcgccgtgccgggcggggggtggcggcaggtgggggtgccgggcggggcggggccgcctcgggccggggagggctcgggggaggggcgcggcggcccccggagcgccggcggctgtcgaggcgcggcgagccgcagccattgccttttatggtaatcgtgcgagagggcgcagggacttcctttgtcccaaatctgtgcggagccgaaatctgggaggcgccgccgcaccccctctagcgggcgcggggcgaagcggtgcggcgccggcaggaaggaaatgggcggggagggccttcgtgcgtcgccgcgccgccgtccccttctccctctccagcctcggggctgtccgcggggggacggctgccttcgggggggacggggcagggcggggttcggcttctggcgtgtgaccggcggctctagagcctctgctaaccatgttcatgccttcttctttttcctacagctcctgggcaacgtgctggttattgtgctgtctcatcattttggcaaagaattcgggattcgaaccggtgccgccaccatgaacttcgggctcagcttgattttccttgtccttgttttaaaaggtgtccagtgtgaggtgaagctggtggagagcggcggcgacctggtgaagcctggcggcagcctgaagctgagctgcgccgccagcggcttcaccttcagcagctacgccatgagctgggtgagacagaaccctgagaagagactggagtgggtggccagcatcagcaagggcggcaacacctactaccctaacagcgtgaagggcagattcaccatcagcagagacaacgccagaaacatcctgtacctgcagatgagcagcctgagaagcgaggacaccgccctgtactactgcgccagaggctggggcgactacggctggttcgcctactggggccaggtgaccctggtgaccgtgagcgccgccaaaacgacacccccatctgtctatccactggcccctggatctgctgcccaaactaactccatggtgaccctgggatgcctggtcaagggctatttccctgagccagtgacagtgacctggaactctggatccctgtccagcggtgtgcacaccttcccagctgtcctgcagtctgacctctacactctgagcagctcagtgactgtcccctccagcacctggcccagcgagaccgtcacctgcaacgttgcccacccggccagcagcaccaaggtggacaagaaaattgtgcccagggattgtggttgtaagccttgcatatgtacagtcccagaagtatcatctgtcttcatcttccccccaaagcccaaggatgtgctcaccattactctgactcctaaggtcacgtgtgttgtggtagacatcagcaaggatgatcccgaggtccagttcagctggtttgtagatgatgtggaggtgcacacagctcagacgcaaccccgggaggagcagttcaacagcactttccgctcagtcagtgaacttcccatcatgcaccaggactggctcaatggcaaggagttcaaatgcagggtcaacagtgcagctttccctgcccccatcgagaaaaccatctccaaaaccaaaggcagaccgaaggctccacaggtgtacaccattccacctcccaaggagcagatggccaaggataaagtcagtctgacctgcatgataacagacttcttccctgaagacattactgtggagtggcagtggaatgggcagccagcggagaactacaagaacactcagcccatcatggacacagatggctcttacttcgtctacagcaagctcaatgtgcagaagagcaactgggaggcaggaaatactttcacctgctctgtgttacatgagggcctgcacaaccaccatactgagaagagcctctcccactctcctggtagaaagaggcgagagggcagaggaagtcttctaacatgcggtgacgtggaggagaatcccggccctatgaagttgcctgttaggctgttggtgctgatgttctggattcctgcttccagcagtgacatcaagatgacccagagccctagcagcatgtacgccagcctgggcgagagagtgaccatcacctgcaaggccagccaggacatcaacagatacctgaactggttccagcagaagcctggcaagagccctaagaccctgatctacagagccaacagactgctggacggcgtgcctagcagattcagcggcagcggcagcggccaggactacagcctgaccatcagcagcctggactacgaggacatgggcatctactactgcctgcagtacgacgagttccctctgaccttcggcgacggcaccaagctggagctgaagcgggctgatgctgcaccaactgtatccatcttcccaccatccagtgagcagttaacatctggaggtgcctcagtcgtgtgcttcttgaacaacttctaccccaaagacatcaatgtcaagtggaagattgatggcagtgaacgacaaaatggcgtcctgaacagttggactgatcaggacagcaaagacagcacctacagcatgagcagcaccctcacgttgaccaaggacgagtatgaacgacataacagctatacctgtgaggccactcacaagacatcaacttcacccattgtcaagagcttcaacaggaatgagtgttagtaactcgaggacggggtgaactacgcctgaggatccgatctttttccctctgccaaaaattatggggacatcatgaagccccttgagcatctgacttctggctaataaaggaaatttattttcattgcaatagtgtgttggaattttttgtgtctctcactcggcctaggtagataagtagcatggcgggttaatcattaactacaaggaacccctagtgatggagttggccactccctctctgcgcgctcgctcgctcactgaggccgggcgaccaaaggtcgcccgacgcccgggctttgcccgggcggcctcagtgagcgagcgagcgcgcag

SEQ ID NO: 2163 - DNA, 4008 bp, Artificial Sequence
  source: /note="Description of Artificial Sequence: Synthetic polynucleotide"
ctgcgcgctcgctcgctcactgaggccgcccgggcaaagcccgggcgtcgggcgacctttggtcgcccggcctcagtgagcgagcgagcgcgcagagagggagtggccaactccatcactaggggttccttgtagttaatgattaacccgccatgctacttatctaccagggtaatggggatcctctagaactatagctagtcgacataacgcgtgatctaacatatcctggtgtggagtagcggacgctgctatgacagaggctcgggggcctgagctggctctgtgagctggggaggaggcagacagccaggccttgtctgcaagcagacctggcagcattgggctggccgccccccagggcctcctcttcatgcccagtgaatgactcaccttggcacagacacaatgttcggggtgggcacagtgcctgcttcccgccgcaccccagcccccctcaaatgccttccgagaagcccattgagcagggggcttgcattgcaccccagcctgacagcctggcatcttgggataaaagcagcacagccccctaggggctgcccttgctgtgtggcgccaccggcggtggagaacaaggctctattcagcctgtgcccaggaaaggggatcaggggatgcccaggcatggacagtgggtggcagggggggagaggagggctgtctgcttcccagaagtccaaggacacaaatgggtgaggggagagctctccccatagctgggctgcggcccaaccccaccccctcaggctatgccagggggtgttgccaggggcacccgggcatcgccagtctagcccactccttcataaagccctcgcatcccaggagcgagcagagccagagcaggttggagaggagacgcatcacctccgctgctcgcggggatcctctagaagcttcgtttagtgaaccgtcagatcgcctggagacgccatccacgctgttttgacctccatagaagacaccgggaccgatccagcctccgcggattcgaatcccggccgggaacggtgcattggaacgcggattccccgtgccaagagtgacgtaagtaccgcctatagagtctataggcccacaaaaaatgctttcttcttttaatatacttttttgtttatcttatttctaatactttccctaatctctttctttcagggcaataatgatacaatgtatcatgcctctttgcaccattctaaagaataacagtgataatttctgggttaaggcaatagcaatatttctgcatataaatatttctgcatataaattgtaactgatgtaagaggtttcatattgctaatagcagctacaatccagctaccattctgcttttattttatggttgggataaggctggattattctgagtccaagctaggcccttttgctaatcatgttcatacctcttatcttcctcccacagctcctgggcaacgtgctggtctgtgtgctggcccatcactttggcaaagaattgggattcgaaccggtgccgccaccatgaacttcgggctcagcttgattttccttgtccttgttttaaaaggtgtccagtgtgaggtgaagctggtggagagcggcggcgacctggtgaagcctggcggcagcctgaagctgagctgcgccgccagcggcttcaccttcagcagctacgccatgagctgggtgagacagaaccctgagaagagactggagtgggtggccagcatcagcaagggcggcaacacctactaccctaacagcgtgaagggcagattcaccatcagcagagacaacgccagaaacatcctgtacctgcagatgagcagcctgagaagcgaggacaccgccctgtactactgcgccagaggctggggcgactacggctggttcgcctactggggccaggtgaccctggtgaccgtgagcgccgccaaaacgacacccccatctgtctatccactggcccctggatctgctgcccaaactaactccatggtgaccctgggatgcctggtcaagggctatttccctgagccagtgacagtgacctggaactctggatccctgtccagcggtgtgcacaccttcccagctgtcctgcagtctgacctctacactctgagcagctcagtgactgtcccctccagcacctggcccagcgagaccgtcacctgcaacgttgcccacccggccagcagcaccaaggtggacaagaaaattgtgcccagggattgtggttgtaagccttgcatatgtacagtcccagaagtatcatctgtcttcatcttccccccaaagcccaaggatgtgctcaccattactctgactcctaaggtcacgtgtgttgtggtagacatcagcaaggatgatcccgaggtccagttcagctggtttgtagatgatgtggaggtgcacacagctcagacgcaaccccgggaggagcagttcaacagcactttccgctcagtcagtgaacttcccatcatgcaccaggactggctcaatggcaaggagttcaaatgcagggtcaacagtgcagctttccctgcccccatcgagaaaaccatctccaaaaccaaaggcagaccgaaggctccacaggtgtacaccattccacctcccaaggagcagatggccaaggataaagtcagtctgacctgcatgataacagacttcttccctgaagacattactgtggagtggcagtggaatgggcagccagcggagaactacaagaacactcagcccatcatggacacagatggctcttacttcgtctacagcaagctcaatgtgcagaagagcaactgggaggcaggaaatactttcacctgctctgtgttacatgagggcctgcacaaccaccatactgagaagagcctctcccactctcctggtagaaagaggcgagagggcagaggaagtcttctaacatgcggtgacgtggaggagaatcccggccctatgaagttgcctgttaggctgttggtgctgatgttctggattcctgcttccagcagtgacatcaagatgacccagagccctagcagcatgtacgccagcctgggcgagagagtgaccatcacctgcaaggccagccaggacatcaacagatacctgaactggttccagcagaagcctggcaagagccctaagaccctgatctacagagccaacagactgctggacggcgtgcctagcagattcagcggcagcggcagcggccaggactacagcctgaccatcagcagcctggactacgaggacatgggcatctactactgcctgcagtacgacgagttccctctgaccttcggcgacggcaccaagctggagctgaagcgggctgatgctgcaccaactgtatccatcttcccaccatccagtgagcagttaacatctggaggtgcctcagtcgtgtgcttcttgaacaacttctaccccaaagacatcaatgtcaagtggaagattgatggcagtgaacgacaaaatggcgtcctgaacagttggactgatcaggacagcaaagacagcacctacagcatgagcagcaccctcacgttgaccaaggacgagtatgaacgacataacagctatacctgtgaggccactcacaagacatcaacttcacccattgtcaagagcttcaacaggaatgagtgttagtaactcgaggacggggtgaactacgcctgaggatccgatctttttccctctgccaaaaattatggggacatcatgaagccccttgagcatctgacttctggctaataaaggaaatttattttcattgcaatagtgtgttggaattttttgtgtctctcactcggcctaggtagataagtagcatggcgggttaatcattaactacaaggaacccctagtgatggagttggccactccctctctgcgcgctcgctcgctcactgaggccgggcgaccaaaggtcgcccgacgcccgggctttgcccgggcggcctcagtgagcgagcgagcgcgcag

SEQ ID NO: 2164 - DNA, 3866 bp, Artificial Sequence
  source: /note="Description of Artificial Sequence: Synthetic polynucleotide"
ctgcgcgctcgctcgctcactgaggccgcccgggcaaagcccgggcgtcgggcgacctttggtcgcccggcctcagtgagcgagcgagcgcgcagagagggagtggccaactccatcactaggggttccttgtagttaatgattaacccgccatgctacttatctaccagggtaatggggatcctctagaactatagctagtcgacataacgcgttagtatctgcagagggccctgcgtatgagtgcaagtgggttttaggaccaggatgaggcggggtgggggtgcctacctgacgaccgaccccgacccactggacaagcacccaacccccattccccaaattgcgcatcccctatcagagagggggaggggaaacaggatgcggcgaggcgcgtgcgcactgccagcttcagcaccgcggacagtgccttcgcccccgcctggcggcgcgcgccaccgccgcctcagcactgaaggcgcgctgacgtcactcgccggtcccccgcaaactccccttcccggccaccttggtcgcgtccgcgccgccgccggcccagccggaccgcaccacgcgaggcgcgagataggggggcacgggcgcgaccatctgcgctgcggcgccggcgactcagcgctgcctcagtctgcggtgggcagcggaggagtcgtgtcgtgcctgagagcgcagctgtgctcctgggcaccgcgcagtccgcccccgcggctcctggccagaccacccctaggaccccctgccccaagtcgcagccaagcttcgtttagtgaaccgtcagatcgcctggagacgccatccacgctgttttgacctccatagaagacaccgggaccgatccagcctccgcggattcgaatcccggccgggaacggtgcattggaacgcggattccccgtgccaagagtgacgtaagtaccgcctatagagtctataggcccacaaaaaatgctttcttcttttaatatacttttttgtttatcttatttctaatactttccctaatctctttctttcagggcaataatgatacaatgtatcatgcctctttgcaccattctaaagaataacagtgataatttctgggttaaggcaatagcaatatttctgcatataaatatttctgcatataaattgtaactgatgtaagaggtttcatattgctaatagcagctacaatccagctaccattctgcttttattttatggttgggataaggctggattattctgagtccaagctaggcccttttgctaatcatgttcatacctcttatcttcctcccacagctcctgggcaacgtgctggtctgtgtgctggcccatcactttggcaaagaattgggattcgaaccggtgccgccaccatgaacttcgggctcagcttgattttccttgtccttgttttaaaaggtgtccagtgtgaggtgaagctggtggagagcggcggcgacctggtgaagcctggcggcagcctgaagctgagctgcgccgccagcggcttcaccttcagcagctacgccatgagctgggtgagacagaaccctgagaagagactggagtgggtggccagcatcagcaagggcggcaacacctactaccctaacagcgtgaagggcagattcaccatcagcagagacaacgccagaaacatcctgtacctgcagatgagcagcctgagaagcgaggacaccgccctgtactactgcgccagaggctggggcgactacggctggttcgcctactggggccaggtgaccctggtgaccgtgagcgccgccaaaacgacacccccatctgtctatccactggcccctggatctgctgcccaaactaactccatggtgaccctgggatgcctggtcaagggctatttccctgagccagtgacagtgacctggaactctggatccctgtccagcggtgtgcacaccttcccagctgtcctgcagtctgacctctacactctgagcagctcagtgactgtcccctccagcacctggcccagcgagaccgtcacctgcaacgttgcccacccggccagcagcaccaaggtggacaagaaaattgtgcccagggattgtggttgtaagccttgcatatgtacagtcccagaagtatcatctgtcttcatcttccccccaaagcccaaggatgtgctcaccattactctgactcctaaggtcacgtgtgttgtggtagacatcagcaaggatgatcccgaggtccagttcagctggtttgtagatgatgtggaggtgcacacagctcagacgcaaccccgggaggagcagttcaacagcactttccgctcagtcagtgaacttcccatcatgcaccaggactggctcaatggcaaggagttcaaatgcagggtcaacagtgcagctttccctgcccccatcgagaaaaccatctccaaaaccaaaggcagaccgaaggctccacaggtgtacaccattccacctcccaaggagcagatggccaaggataaagtcagtctgacctgcatgataacagacttcttccctgaagacattactgtggagtggcagtggaatgggcagccagcggagaactacaagaacactcagcccatcatggacacagatggctcttacttcgtctacagcaagctcaatgtgcagaagagcaactgggaggcaggaaatactttcacctgctctgtgttacatgagggcctgcacaaccaccatactgagaagagcctctcccactctcctggtagaaagaggcgagagggcagaggaagtcttctaacatgcggtgacgtggaggagaatcccggccctatgaagttgcctgttaggctgttggtgctgatgttctggattcctgcttccagcagtgacatcaagatgacccagagccctagcagcatgtacgccagcctgggcgagagagtgaccatcacctgcaaggccagccaggacatcaacagatacctgaactggttccagcagaagcctggcaagagccctaagaccctgatctacagagccaacagactgctggacggcgtgcctagcagattcagcggcagcggcagcggccaggactacagcctgaccatcagcagcctggactacgaggacatgggcatctactactgcctgcagtacgacgagttccctctgaccttcggcgacggcaccaagctggagctgaagcgggctgatgctgcaccaactgtatccatcttcccaccatccagtgagcagttaacatctggaggtgcctcagtcgtgtgcttcttgaacaacttctaccccaaagacatcaatgtcaagtggaagattgatggcagtgaacgacaaaatggcgtcctgaacagttggactgatcaggacagcaaagacagcacctacagcatgagcagcaccctcacgttgaccaaggacgagtatgaacgacataacagctatacctgtgaggccactcacaagacatcaacttcacccattgtcaagagcttcaacaggaatgagtgttagtaactcgaggacggggtgaactacgcctgaggatccgatctttttccctctgccaaaaattatggggacatcatgaagccccttgagcatctgacttctggctaataaaggaaatttattttcattgcaatagtgtgttggaattttttgtgtctctcactcggcctaggtagataagtagcatggcgggttaatcattaactacaaggaacccctagtgatggagttggccactccctctctgcgcgctcgctcgctcactgaggccgggcgaccaaaggtcgcccgacgcccgggctttgcccgggcggcctcagtgagcgagcgagcgcgcag

SEQ ID NO: 2165 - DNA, 3938 bp, Artificial Sequence
  source: /note="Description of Artificial Sequence: Synthetic polynucleotide"
ctgcgcgctcgctcgctcactgaggccgcccgggcaaagcccgggcgtcgggcgacctttggtcgcccggcctcagtgagcgagcgagcgcgcagagagggagtggccaactccatcactaggggttccttgtagttaatgattaacccgccatgctacttatctaccagggtaatggggatcctctagaactatagctagtcgacattgattattgactagttattaatagtaatcaattacggggtcattagttcatagcccatatatggagttccgcgttacataacttacggtaaatggcccgcctggctgaccgcccaacgacccccgcccattgacgtcaataatgacgtatgttcccatagtaacgccaatagggactttccattgacgtcaatgggtggagtatttacggtaaactgcccacttggcagtacatcaagtgtatcatatgccaagtacgccccctattgacgtcaatgacggtaaatggcccgcctggcattatgcccagtacatgaccttatgggactttcctacttggcagtacatctacgtattagtcatcgctattaccatgtcgaggccacgttctgcttcactctccccatctcccccccctccccacccccaattttgtatttatttattttttaattattttgtgcagcgatgggggcggggggggggggcgcgcgccaggcggggcggggcggggcgaggggcggggcggggcgaggcggagaggtgcggcggcagccaatcagagcggcgcgctccgaaagtttccttttatggcgaggcggcggcggcggcggccctataaaaagcgaagcgcgcggcgggcgggagcaagcttcgtttagtgaaccgtcagatcgcctggagacgccatccacgctgttttgacctccatagaagacaccgggaccgatccagcctccgcggattcgaatcccggccgggaacggtgcattggaacgcggattccccgtgccaagagtgacgtaagtaccgcctatagagtctataggcccacaaaaaatgctttcttcttttaatatacttttttgtttatcttatttctaatactttccctaatctctttctttcagggcaataatgatacaatgtatcatgcctctttgcaccattctaaagaataacagtgataatttctgggttaaggcaatagcaatatttctgcatataaatatttctgcatataaattgtaactgatgtaagaggtttcatattgctaatagcagctacaatccagctaccattctgcttttattttatggttgggataaggctggattattctgagtccaagctaggcccttttgctaatcatgttcatacctcttatcttcctcccacagctcctgggcaacgtgctggtctgtgtgctggcccatcactttggcaaagaattgggattcgaaccggtgccgccaccatgaagttgcctgttaggctgttggtgctgatgttctggattcctgcttccagcagtgacatcaagatgacccagagccctagcagcatgtacgccagcctgggcgagagagtgaccatcacctgcaaggccagccaggacatcaacagatacctgaactggttccagcagaagcctggcaagagccctaagaccctgatctacagagccaacagactgctggacggcgtgcctagcagattcagcggcagcggcagcggccaggactacagcctgaccatcagcagcctggactacgaggacatgggcatctactactgcctgcagtacgacgagttccctctgaccttcggcgacggcaccaagctggagctgaagcgggctgatgctgcaccaactgtatccatcttcccaccatccagtgagcagttaacatctggaggtgcctcagtcgtgtgcttcttgaacaacttctaccccaaagacatcaatgtcaagtggaagattgatggcagtgaacgacaaaatggcgtcctgaacagttggactgatcaggacagcaaagacagcacctacagcatgagcagcaccctcacgttgaccaaggacgagtatgaacgacataacagctatacctgtgaggccactcacaagacatcaacttcacccattgtcaagagcttcaacaggaatgagtgtgagggcagaggaagtcttctaacatgcggtgacgtggaggagaatcccggccctatgaacttcgggctcagcttgattttccttgtccttgttttaaaaggtgtccagtgtgaggtgaagctggtggagagcggcggcgacctggtgaagcctggcggcagcctgaagctgagctgcgccgccagcggcttcaccttcagcagctacgccatgagctgggtgagacagaaccctgagaagagactggagtgggtggccagcatcagcaagggcggcaacacctactaccctaacagcgtgaagggcagattcaccatcagcagagacaacgccagaaacatcctgtacctgcagatgagcagcctgagaagcgaggacaccgccctgtactactgcgccagaggctggggcgactacggctggttcgcctactggggccaggtgaccctggtgaccgtgagcgccgccaaaacgacacccccatctgtctatccactggcccctggatctgctgcccaaactaactccatggtgaccctgggatgcctggtcaagggctatttccctgagccagtgacagtgacctggaactctggatccctgtccagcggtgtgcacaccttcccagctgtcctgcagtctgacctctacactctgagcagctcagtgactgtcccctccagcacctggcccagcgagaccgtcacctgcaacgttgcccacccggccagcagcaccaaggtggacaagaaaattgtgcccagggattgtggttgtaagccttgcatatgtacagtcccagaagtatcatctgtcttcatcttccccccaaagcccaaggatgtgctcaccattactctgactcctaaggtcacgtgtgttgtggtagacatcagcaaggatgatcccgaggtccagttcagctggtttgtagatgatgtggaggtgcacacagctcagacgcaaccccgggaggagcagttcaacagcactttccgctcagtcagtgaacttcccatcatgcaccaggactggctcaatggcaaggagttcaaatgcagggtcaacagtgcagctttccctgcccccatcgagaaaaccatctccaaaaccaaaggcagaccgaaggctccacaggtgtacaccattccacctcccaaggagcagatggccaaggataaagtcagtctgacctgcatgataacagacttcttccctgaagacattactgtggagtggcagtggaatgggcagccagcggagaactacaagaacactcagcccatcatggacacagatggctcttacttcgtctacagcaagctcaatgtgcagaagagcaactgggaggcaggaaatactttcacctgctctgtgttacatgagggcctgcacaaccaccatactgagaagagcctctcccactctcctggttagtaactcgaggacggggtgaactacgcctgaggatccgatctttttccctctgccaaaaattatggggacatcatgaagccccttgagcatctgacttctggctaataaaggaaatttattttcattgcaatagtgtgttggaattttttgtgtctctcactcggcctaggtagataagtagcatggcgggttaatcattaactacaaggaacccctagtgatggagttggccactccctctctgcgcgctcgctcgctcactgaggccgggcgaccaaaggtcgcccgacgcccgggctttgcccgggcggcctcagtgagcgagcgagcgcgcag

SEQ ID NO: 2166 - DNA, 4426 bp, Artificial Sequence
  source: /note="Description of Artificial Sequence: Synthetic polynucleotide"
ctgcgcgctcgctcgctcactgaggccgcccgggcaaagcccgggcgtcgggcgacctttggtcgcccggcctcagtgagcgagcgagcgcgcagagagggagtggccaactccatcactaggggttccttgtagttaatgattaacccgccatgctacttatctaccagggtaatggggatcctctagaactatagctagtcgacataacgcgtctagttattaatagtaatcaattacggggtcattagttcatagcccatatatggagttccgcgttacataacttacggtaaatggcccgcctggctgaccgcccaacgacccccgcccattgacgtcaataatgacgtatgttcccatagtaacgccaatagggactttccattgacgtcaatgggtggagtatttacggtaaactgcccacttggcagtacatcaagtgtatcatatgccaagtacgccccctattgacgtcaatgacggtaaatggcccgcctggcattatgcccagtacatgaccttatgggactttcctacttggcagtacatctacgtattagtcatcgctattaccatggtcgaggtgagccccacgttctgcttcactctccccatctcccccccctccccacccccaattttgtatttatttattttttaattattttgtgcagcgatgggggcggggggggggggggggcgcgcgccaggcggggcggggcggggcgaggggcggggcggggcgaggcggagaggtgcggcggcagccaatcagagcggcgcgctccgaaagtttccttttatggcgaggcggcggcggcggcggccctataaaaagcgaagcgcgcggcgggcgggagtcgctgcgcgctgccttcgccccgtgccccgctccgccgccgcctcgcgccgcccgccccggctctgactgaccgcgttactcccacaggtgagcgggcgggacggcccttctcctccgggctgtaattagcgcttggtttaatgacggcttgtttcttttctgtggctgcgtgaaagccttgaggggctccgggagggccctttgtgcggggggagcggctcggggggtgcgtgcgtgtgtgtgtgcgtggggagcgccgcgtgcggctccgcgctgcccggcggctgtgagcgctgcgggcgcggcgcggggctttgtgcgctccgcagtgtgcgcgaggggagcgcggccgggggcggtgccccgcggtgcggggggggctgcgaggggaacaaaggctgcgtgcggggtgtgtgcgtgggggggtgagcagggggtgtgggcgcgtcggtcgggctgcaaccccccctgcacccccctccccgagttgctgagcacggcccggcttcgggtgcggggctccgtacggggcgtggcgcggggctcgccgtgccgggcggggggtggcggcaggtgggggtgccgggcggggcggggccgcctcgggccggggagggctcgggggaggggcgcggcggcccccggagcgccggcggctgtcgaggcgcggcgagccgcagccattgccttttatggtaatcgtgcgagagggcgcagggacttcctttgtcccaaatctgtgcggagccgaaatctgggaggcgccgccgcaccccctctagcgggcgcggggcgaagcggtgcggcgccggcaggaaggaaatgggcggggagggccttcgtgcgtcgccgcgccgccgtccccttctccctctccagcctcggggctgtccgcggggggacggctgccttcgggggggacggggcagggcggggttcggcttctggcgtgtgaccggcggctctagagcctctgctaaccatgttcatgccttcttctttttcctacagctcctgggcaacgtgctggttattgtgctgtctcatcattttggcaaagaattcgggattcgaaccggtgccgccaccatgaagttgcctgttaggctgttggtgctgatgttctggattcctgcttccagcagtgacatcaagatgacccagagccctagcagcatgtacgccagcctgggcgagagagtgaccatcacctgcaaggccagccaggacatcaacagatacctgaactggttccagcagaagcctggcaagagccctaagaccctgatctacagagccaacagactgctggacggcgtgcctagcagattcagcggcagcggcagcggccaggactacagcctgaccatcagcagcctggactacgaggacatgggcatctactactgcctgcagtacgacgagttccctctgaccttcggcgacggcaccaagctggagctgaagcgggctgatgctgcaccaactgtatccatcttcccaccatccagtgagcagttaacatctggaggtgcctcagtcgtgtgcttcttgaacaacttctaccccaaagacatcaatgtcaagtggaagattgatggcagtgaacgacaaaatggcgtcctgaacagttggactgatcaggacagcaaagacagcacctacagcatgagcagcaccctcacgttgaccaaggacgagtatgaacgacataacagctatacctgtgaggccactcacaagacatcaacttcacccattgtcaagagcttcaacaggaatgagtgtgagggcagaggaagtcttctaacatgcggtgacgtggaggagaatcccggccctatgaacttcgggctcagcttgattttccttgtccttgttttaaaaggtgtccagtgtgaggtgaagctggtggagagcggcggcgacctggtgaagcctggcggcagcctgaagctgagctgcgccgccagcggcttcaccttcagcagctacgccatgagctgggtgagacagaaccctgagaagagactggagtgggtggccagcatcagcaagggcggcaacacctactaccctaacagcgtgaagggcagattcaccatcagcagagacaacgccagaaacatcctgtacctgcagatgagcagcctgagaagcgaggacaccgccctgtactactgcgccagaggctggggcgactacggctggttcgcctactggggccaggtgaccctggtgaccgtgagcgccgccaaaacgacacccccatctgtctatccactggcccctggatctgctgcccaaactaactccatggtgaccctgggatgcctggtcaagggctatttccctgagccagtgacagtgacctggaactctggatccctgtccagcggtgtgcacaccttcccagctgtcctgcagtctgacctctacactctgagcagctcagtgactgtcccctccagcacctggcccagcgagaccgtcacctgcaacgttgcccacccggccagcagcaccaaggtggacaagaaaattgtgcccagggattgtggttgtaagccttgcatatgtacagtcccagaagtatcatctgtcttcatcttccccccaaagcccaaggatgtgctcaccattactctgactcctaaggtcacgtgtgttgtggtagacatcagcaaggatgatcccgaggtccagttcagctggtttgtagatgatgtggaggtgcacacagctcagacgcaaccccgggaggagcagttcaacagcactttccgctcagtcagtgaacttcccatcatgcaccaggactggctcaatggcaaggagttcaaatgcagggtcaacagtgcagctttccctgcccccatcgagaaaaccatctccaaaaccaaaggcagaccgaaggctccacaggtgtacaccattccacctcccaaggagcagatggccaaggataaagtcagtctgacctgcatgataacagacttcttccctgaagacattactgtggagtggcagtggaatgggcagccagcggagaactacaagaacactcagcccatcatggacacagatggctcttacttcgtctacagcaagctcaatgtgcagaagagcaactgggaggcaggaaatactttcacctgctctgtgttacatgagggcctgcacaaccaccatactgagaagagcctctcccactctcctggttagtaactcgaggacggggtgaactacgcctgaggatccgatctttttccctctgccaaaaattatggggacatcatgaagccccttgagcatctgacttctggctaataaaggaaatttattttcattgcaatagtgtgttggaattttttgtgtctctcactcggcctaggtagataagtagcatggcgggttaatcattaactacaaggaacccctagtgatggagttggccactccctctctgcgcgctcgctcgctcactgaggccgggcgaccaaaggtcgcccgacgcccgggctttgcccgggcggcctcagtgagcgagcgagcgcgcag

SEQ ID NO: 2167 - DNA, 3996 bp, Artificial Sequence
  source: /note="Description of Artificial Sequence: Synthetic polynucleotide"
ctgcgcgctcgctcgctcactgaggccgcccgggcaaagcccgggcgtcgggcgacctttggtcgcccggcctcagtgagcgagcgagcgcgcagagagggagtggccaactccatcactaggggttccttgtagttaatgattaacccgccatgctacttatctaccagggtaatggggatcctctagaactatagctagtcgacataacgcgtgatctaacatatcctggtgtggagtagcggacgctgctatgacagaggctcgggggcctgagctggctctgtgagctggggaggaggcagacagccaggccttgtctgcaagcagacctggcagcattgggctggccgccccccagggcctcctcttcatgcccagtgaatgactcaccttggcacagacacaatgttcggggtgggcacagtgcctgcttcccgccgcaccccagcccccctcaaatgccttccgagaagcccattgagcagggggcttgcattgcaccccagcctgacagcctggcatcttgggataaaagcagcacagccccctaggggctgcccttgctgtgtggcgccaccggcggtggagaacaaggctctattcagcctgtgcccaggaaaggggatcaggggatgcccaggcatggacagtgggtggcagggggggagaggagggctgtctgcttcccagaagtccaaggacacaaatgggtgaggggagagctctccccatagctgggctgcggcccaaccccaccccctcaggctatgccagggggtgttgccaggggcacccgggcatcgccagtctagcccactccttcataaagccctcgcatcccaggagcgagcagagccagagcaggttggagaggagacgcatcacctccgctgctcgcggggatcctctagaagcttcgtttagtgaaccgtcagatcgcctggagacgccatccacgctgttttgacctccatagaagacaccgggaccgatccagcctccgcggattcgaatcccggccgggaacggtgcattggaacgcggattccccgtgccaagagtgacgtaagtaccgcctatagagtctataggcccacaaaaaatgctttcttcttttaatatacttttttgtttatcttatttctaatactttccctaatctctttctttcagggcaataatgatacaatgtatcatgcctctttgcaccattctaaagaataacagtgataatttctgggttaaggcaatagcaatatttctgcatataaatatttctgcatataaattgtaactgatgtaagaggtttcatattgctaatagcagctacaatccagctaccattctgcttttattttatggttgggataaggctggattattctgagtccaagctaggcccttttgctaatcatgttcatacctcttatcttcctcccacagctcctgggcaacgtgctggtctgtgtgctggcccatcactttggcaaagaattgggattcgaaccggtgccgccaccatgaagttgcctgttaggctgttggtgctgatgttctggattcctgcttccagcagtgacatcaagatgacccagagccctagcagcatgtacgccagcctgggcgagagagtgaccatcacctgcaaggccagccaggacatcaacagatacctgaactggttccagcagaagcctggcaagagccctaagaccctgatctacagagccaacagactgctggacggcgtgcctagcagattcagcggcagcggcagcggccaggactacagcctgaccatcagcagcctggactacgaggacatgggcatctactactgcctgcagtacgacgagttccctctgaccttcggcgacggcaccaagctggagctgaagcgggctgatgctgcaccaactgtatccatcttcccaccatccagtgagcagttaacatctggaggtgcctcagtcgtgtgcttcttgaacaacttctaccccaaagacatcaatgtcaagtggaagattgatggcagtgaacgacaaaatggcgtcctgaacagttggactgatcaggacagcaaagacagcacctacagcatgagcagcaccctcacgttgaccaaggacgagtatgaacgacataacagctatacctgtgaggccactcacaagacatcaacttcacccattgtcaagagcttcaacaggaatgagtgtgagggcagaggaagtcttctaacatgcggtgacgtggaggagaatcccggccctatgaacttcgggctcagcttgattttccttgtccttgttttaaaaggtgtccagtgtgaggtgaagctggtggagagcggcggcgacctggtgaagcctggcggcagcctgaagctgagctgcgccgccagcggcttcaccttcagcagctacgccatgagctgggtgagacagaaccctgagaagagactggagtgggtggccagcatcagcaagggcggcaacacctactaccctaacagcgtgaagggcagattcaccatcagcagagacaacgccagaaacatcctgtacctgcagatgagcagcctgagaagcgaggacaccgccctgtactactgcgccagaggctggggcgactacggctggttcgcctactggggccaggtgaccctggtgaccgtgagcgccgccaaaacgacacccccatctgtctatccactggcccctggatctgctgcccaaactaactccatggtgaccctgggatgcctggtcaagggctatttccctgagccagtgacagtgacctggaactctggatccctgtccagcggtgtgcacaccttcccagctgtcctgcagtctgacctctacactctgagcagctcagtgactgtcccctccagcacctggcccagcgagaccgtcacctgcaacgttgcccacccggccagcagcaccaaggtggacaagaaaattgtgcccagggattgtggttgtaagccttgcatatgtacagtcccagaagtatcatctgtcttcatcttccccccaaagcccaaggatgtgctcaccattactctgactcctaaggtcacgtgtgttgtggtagacatcagcaaggatgatcccgaggtccagttcagctggtttgtagatgatgtggaggtgcacacagctcagacgcaaccccgggaggagcagttcaacagcactttccgctcagtcagtgaacttcccatcatgcaccaggactggctcaatggcaaggagttcaaatgcagggtcaacagtgcagctttccctgcccccatcgagaaaaccatctccaaaaccaaaggcagaccgaaggctccacaggtgtacaccattccacctcccaaggagcagatggccaaggataaagtcagtctgacctgcatgataacagacttcttccctgaagacattactgtggagtggcagtggaatgggcagccagcggagaactacaagaacactcagcccatcatggacacagatggctcttacttcgtctacagcaagctcaatgtgcagaagagcaactgggaggcaggaaatactttcacctgctctgtgttacatgagggcctgcacaaccaccatactgagaagagcctctcccactctcctggttagtaactcgaggacggggtgaactacgcctgaggatccgatctttttccctctgccaaaaattatggggacatcatgaagccccttgagcatctgacttctggctaataaaggaaatttattttcattgcaatagtgtgttggaattttttgtgtctctcactcggcctaggtagataagtagcatggcgggttaatcattaactacaaggaacccctagtgatggagttggccactccctctctgcgcgctcgctcgctcactgaggccgggcgaccaaaggtcgcccgacgcccgggctttgcccgggcggcctcagtgagcgagcgagcgcgcag

SEQ ID NO: 2168 - DNA, 3854 bp, Artificial Sequence
  source: /note="Description of Artificial Sequence: Synthetic polynucleotide"
ctgcgcgctcgctcgctcactgaggccgcccgggcaaagcccgggcgtcgggcgacctttggtcgcccggcctcagtgagcgagcgagcgcgcagagagggagtggccaactccatcactaggggttccttgtagttaatgattaacccgccatgctacttatctaccagggtaatggggatcctctagaactatagctagtcgacataacgcgttagtatctgcagagggccctgcgtatgagtgcaagtgggttttaggaccaggatgaggcggggtgggggtgcctacctgacgaccgaccccgacccactggacaagcacccaacccccattccccaaattgcgcatcccctatcagagagggggaggggaaacaggatgcggcgaggcgcgtgcgcactgccagcttcagcaccgcggacagtgccttcgcccccgcctggcggcgcgcgccaccgccgcctcagcactgaaggcgcgctgacgtcactcgccggtcccccgcaaactccccttcccggccaccttggtcgcgtccgcgccgccgccggcccagccggaccgcaccacgcgaggcgcgagataggggggcacgggcgcgaccatctgcgctgcggcgccggcgactcagcgctgcctcagtctgcggtgggcagcggaggagtcgtgtcgtgcctgagagcgcagctgtgctcctgggcaccgcgcagtccgcccccgcggctcctggccagaccacccctaggaccccctgccccaagtcgcagccaagcttcgtttagtgaaccgtcagatcgcctggagacgccatccacgctgttttgacctccatagaagacaccgggaccgatccagcctccgcggattcgaatcccggccgggaacggtgcattggaacgcggattccccgtgccaagagtgacgtaagtaccgcctatagagtctataggcccacaaaaaatgctttcttcttttaatatacttttttgtttatcttatttctaatactttccctaatctctttctttcagggcaataatgatacaatgtatcatgcctctttgcaccattctaaagaataacagtgataatttctgggttaaggcaatagcaatatttctgcatataaatatttctgcatataaattgtaactgatgtaagaggtttcatattgctaatagcagctacaatccagctaccattctgcttttattttatggttgggataaggctggattattctgagtccaagctaggcccttttgctaatcatgttcatacctcttatcttcctcccacagctcctgggcaacgtgctggtctgtgtgctggcccatcactttggcaaagaattgggattcgaaccggtgccgccaccatgaagttgcctgttaggctgttggtgctgatgttctggattcctgcttccagcagtgacatcaagatgacccagagccctagcagcatgtacgccagcctgggcgagagagtgaccatcacctgcaaggccagccaggacatcaacagatacctgaactggttccagcagaagcctggcaagagccctaagaccctgatctacagagccaacagactgctggacggcgtgcctagcagattcagcggcagcggcagcggccaggactacagcctgaccatcagcagcctggactacgaggacatgggcatctactactgcctgcagtacgacgagttccctctgaccttcggcgacggcaccaagctggagctgaagcgggctgatgctgcaccaactgtatccatcttcccaccatccagtgagcagttaacatctggaggtgcctcagtcgtgtgcttcttgaacaacttctaccccaaagacatcaatgtcaagtggaagattgatggcagtgaacgacaaaatggcgtcctgaacagttggactgatcaggacagcaaagacagcacctacagcatgagcagcaccctcacgttgaccaaggacgagtatgaacgacataacagctatacctgtgaggccactcacaagacatcaacttcacccattgtcaagagcttcaacaggaatgagtgtgagggcagaggaagtcttctaacatgcggtgacgtggaggagaatcccggccctatgaacttcgggctcagcttgattttccttgtccttgttttaaaaggtgtccagtgtgaggtgaagctggtggagagcggcggcgacctggtgaagcctggcggcagcctgaagctgagctgcgccgccagcggcttcaccttcagcagctacgccatgagctgggtgagacagaaccctgagaagagactggagtgggtggccagcatcagcaagggcggcaacacctactaccctaacagcgtgaagggcagattcaccatcagcagagacaacgccagaaacatcctgtacctgcagatgagcagcctgagaagcgaggacaccgccctgtactactgcgccagaggctggggcgactacggctggttcgcctactggggccaggtgaccctggtgaccgtgagcgccgccaaaacgacacccccatctgtctatccactggcccctggatctgctgcccaaactaactccatggtgaccctgggatgcctggtcaagggctatttccctgagccagtgacagtgacctggaactctggatccctgtccagcggtgtgcacaccttcccagctgtcctgcagtctgacctctacactctgagcagctcagtgactgtcccctccagcacctggcccagcgagaccgtcacctgcaacgttgcccacccggccagcagcaccaaggtggacaagaaaattgtgcccagggattgtggttgtaagccttgcatatgtacagtcccagaagtatcatctgtcttcatcttccccccaaagcccaaggatgtgctcaccattactctgactcctaaggtcacgtgtgttgtggtagacatcagcaaggatgatcccgaggtccagttcagctggtttgtagatgatgtggaggtgcacacagctcagacgcaaccccgggaggagcagttcaacagcactttccgctcagtcagtgaacttcccatcatgcaccaggactggctcaatggcaaggagttcaaatgcagggtcaacagtgcagctttccctgcccccatcgagaaaaccatctccaaaaccaaaggcagaccgaaggctccacaggtgtacaccattccacctcccaaggagcagatggccaaggataaagtcagtctgacctgcatgataacagacttcttccctgaagacattactgtggagtggcagtggaatgggcagccagcggagaactacaagaacactcagcccatcatggacacagatggctcttacttcgtctacagcaagctcaatgtgcagaagagcaactgggaggcaggaaatactttcacctgctctgtgttacatgagggcctgcacaaccaccatactgagaagagcctctcccactctcctggttagtaactcgaggacggggtgaactacgcctgaggatccgatctttttccctctgccaaaaattatggggacatcatgaagccccttgagcatctgacttctggctaataaaggaaatttattttcattgcaatagtgtgttggaattttttgtgtctctcactcggcctaggtagataagtagcatggcgggttaatcattaactacaaggaacccctagtgatggagttggccactccctctctgcgcgctcgctcgctcactgaggccgggcgaccaaaggtcgcccgacgcccgggctttgcccgggcggcctcagtgagcgagcgagcgcgcag

SEQ ID NO: 2169 - DNA, 435 bp, Artificial Sequence
  source: /note="Description of Artificial Sequence: Synthetic polynucleotide"
atggcgacgggttcaagaacttccctacttcttgcatttggcctgctttgtttgccgtggttacaggagggctcggcagctgccgaggtccagctgcaacagtctggacctgagctggtgaagcctggggcttcagtgaagatatcctgcaagacttctggatacacattcactgaatacaccatacactgggtgaagcagagccatggagagagccttgagtggattggaggtattaatccaaacgatggtggtactatttacaaccagaagttcaagggcaaggccacattgactgtagacaagtcctccaaaacagcctacatggagctccgcagcctgacatctgaggattctgcagtcttttactgtgcaagagggccctccgccaggtttccttactggggccaagggactctggtcactgtctctgca

SEQ ID NO: 2170 - DNA, 408 bp, Artificial Sequence
  source: /note="Description of Artificial Sequence: Synthetic polynucleotide"
atgggatggagctggatctttctctttctcctgtcaggaactacaggtgtcctctctgaggtccagctgcaacagtctggacctgagctggtgaagcctggggcttcagtgaagatatcctgcaagacttctggatacacattcactgaatacaccatacactgggtgaagcagagccatggagagagccttgagtggattggaggtattaatccaaacgatggtggtactatttacaaccagaagttcaagggcaaggccacattgactgtagacaagtcctccaaaacagcctacatggagctccgcagcctgacatctgaggattctgcagtcttttactgtgcaagagggccctccgccaggtttccttactggggccaagggactctggtcactgtctctgca

SEQ ID NO: 2171 - DNA, 3455 bp, Artificial Sequence
  source: /note="Description of Artificial Sequence: Synthetic polynucleotide"
ctgcgcgctcgctcgctcactgaggccgcccgggcaaagcccgggcgtcgggcgacctttggtcgcccggcctcagtgagcgagcgagcgcgcagagagggagtggccaactccatcactaggggttccttgtagttaatgattaacccgccatgctacttatctaccagggtaatggggatcctctagaactatagctagtcgacattgattattgactagttattaatagtaatcaattacggggtcattagttcatagcccatatatggagttccgcgttacataacttacggtaaatggcccgcctggctgaccgcccaacgacccccgcccattgacgtcaataatgacgtatgttcccatagtaacgccaatagggactttccattgacgtcaatgggtggagtatttacggtaaactgcccacttggcagtacatcaagtgtatcatatgccaagtacgccccctattgacgtcaatgacggtaaatggcccgcctggcattatgcccagtacatgaccttatgggactttcctacttggcagtacatctacgtattagtcatcgctattaccatgtcgaggccacgttctgcttcactctccccatctcccccccctccccacccccaattttgtatttatttattttttaattattttgtgcagcgatgggggcggggggggggggcgcgcgccaggcggggcggggcggggcgaggggcggggcggggcgaggcggagaggtgcggcggcagccaatcagagcggcgcgctccgaaagtttccttttatggcgaggcggcggcggcggcggccctataaaaagcgaagcgcgcggcgggcgggagcaagcttcgtttagtgaaccgtcagatcgcctggagacgccatccacgctgttttgacctccatagaagacaccgggaccgatccagcctccgcggattcgaatcccggccgggaacggtgcattggaacgcggattccccgtgccaagagtgacgtaagtaccgcctatagagtctataggcccacaaaaaatgctttcttcttttaatatacttttttgtttatcttatttctaatactttccctaatctctttctttcagggcaataatgatacaatgtatcatgcctctttgcaccattctaaagaataacagtgataatttctgggttaaggcaatagcaatatttctgcatataaatatttctgcatataaattgtaactgatgtaagaggtttcatattgctaatagcagctacaatccagctaccattctgcttttattttatggttgggataaggctggattattctgagtccaagctaggcccttttgctaatcatgttcatacctcttatcttcctcccacagctcctgggcaacgtgctggtctgtgtgctggcccatcactttggcaaagaattgggattcgaaccggtgccgccaccatgaacttcgggctcagcttgattttccttgtccttgttttaaaaggtgtccagtgtgaggttcatctggtggagtctgggggagccttagtgaagcctggagggtccctgaaactctcctgtgcagcctctggattcagtttcagtaaatatggcatgtcttgggttcgccagactccagacaagaggctggagtgggtcgcaaccattagtagtagtgggagtcgcacctactatccagacagtgtgaagggccaattcaccatctccagagacaatgccaagaacaccctgtacctgcaaatgagcagtctgaagtctgaggacacagccatgtattactgttcaattagctgggacggtgctatggactactggggtcaagggacctcagtcaccgtctcctcagccaaaacgacacccccatctgtctatccactggcccctggatctgctgcccaaactaactccatggtgaccctgggatgcctggtcaagggctatttccctgagccagtgacagtgacctggaactctggatccctgtccagcggtgtgcacaccttcccagctgtcctgcagtctgacctctacactctgagcagctcagtgactgtcccctccagcacctggcccagcgagaccgtcacctgcaacgttgcccacccggccagcagcaccaaggtggacaagaaaattgtgcccagggattgtggtgagctcaaaaccccacttggtgacacaactcacacatgcccacggtgcccagagcccaaatcttgtgacacacctcccccgtgcccacggtgcccagagcccaaatcttgtgacacacctcccccatgcccacggtgcccagcacctgaactcagaaagaggcgagagggcagaggaagtcttctaacatgcggtgacgtggaggagaatcccggccctatgaagttgcctgttaggctgttggtgctgatgttctggattcctgcttccagcagtgatgttttgatgacccaaactccactctccctgcctgtcagtcttggagatcaagcctccatctcttgcaaatctagtcagagcattgtacatagtaatggaaacacctatttagaatggtacctgcagaaaccaggccagtctccaaagctcctggtctacaaagtttccaatcgattttctggggtcccagacaggttcagtggcagtggatcagggacagatttcacactcaagatcagcagagtggaggctgaggatctgggaacttattactgctttcaaggttcacttgttccttgggcgttcggtggaggcaccaagctggaaatcaaacgggctgatgctgcaccaactgtatccatcttcccaccatccagtgagcagttaacatctggaggtgcctcagtcgtgtgcttcttgaacaacttctaccccaaagacatcaatgtcaagtggaagattgatggcagtgaacgacaaaatggcgtcctgaacagttggactgatcaggacagcaaagacagcacctacagcatgagcagcaccctcacgttgaccaaggacgagtatgaacgacataacagctatacctgtgaggccactcacaagacatcaacttcacccattgtcaagagcttcaacaggaatgagtgttagtaactcgaggacggggtgaactacgcctgaggatccgatctttttccctctgccaaaaattatggggacatcatgaagccccttgagcatctgacttctggctaataaaggaaatttattttcattgcaatagtgtgttggaattttttgtgtctctcactcggcctaggtagataagtagcatggcgggttaatcattaactacaaggaacccctagtgatggagttggccactccctctctgcgcgctcgctcgctcactgaggccgggcgaccaaaggtcgcccgacgcccgggctttgcccgggcggcctcagtgagcgagcgagcgcgcag

SEQ ID NO: 2172 - DNA, 3498 bp, Artificial Sequence
  source: /note="Description of Artificial Sequence: Synthetic polynucleotide"
ctgcgcgctcgctcgctcactgaggccgcccgggcaaagcccgggcgtcgggcgacctttggtcgcccggcctcagtgagcgagcgagcgcgcagagagggagtggccaactccatcactaggggttccttgtagttaatgattaacccgccatgctacttatctaccagggtaatggggatcctctagaactatagctagtcgacattgattattgactagttattaatagtaatcaattacggggtcattagttcatagcccatatatggagttccgcgttacataacttacggtaaatggcccgcctggctgaccgcccaacgacccccgcccattgacgtcaataatgacgtatgttcccatagtaacgccaatagggactttccattgacgtcaatgggtggagtatttacggtaaactgcccacttggcagtacatcaagtgtatcatatgccaagtacgccccctattgacgtcaatgacggtaaatggcccgcctggcattatgcccagtacatgaccttatgggactttcctacttggcagtacatctacgtattagtcatcgctattaccatgtcgaggccacgttctgcttcactctccccatctcccccccctccccacccccaattttgtatttatttattttttaattattttgtgcagcgatgggggcggggggggggggcgcgcgccaggcggggcggggcggggcgaggggcggggcggggcgaggcggagaggtgcggcggcagccaatcagagcggcgcgctccgaaagtttccttttatggcgaggcggcggcggcggcggccctataaaaagcgaagcgcgcggcgggcgggagcaagcttcgtttagtgaaccgtcagatcgcctggagacgccatccacgctgttttgacctccatagaagacaccgggaccgatccagcctccgcggattcgaatcccggccgggaacggtgcattggaacgcggattccccgtgccaagagtgacgtaagtaccgcctatagagtctataggcccacaaaaaatgctttcttcttttaatatacttttttgtttatcttatttctaatactttccctaatctctttctttcagggcaataatgatacaatgtatcatgcctctttgcaccattctaaagaataacagtgataatttctgggttaaggcaatagcaatatttctgcatataaatatttctgcatataaattgtaactgatgtaagaggtttcatattgctaatagcagctacaatccagctaccattctgcttttattttatggttgggataaggctggattattctgagtccaagctaggcccttttgctaatcatgttcatacctcttatcttcctcccacagctcctgggcaacgtgctggtctgtgtgctggcccatcactttggcaaagaattgggattcgaaccggtgccgccaccatgaacttcgggctcagcttgattttccttgtccttgttttaaaaggtgtccagtgtgaggttcatctggtggagtctgggggagccttagtgaagcctggagggtccctgaaactctcctgtgcagcctctggattcagtttcagtaaatatggcatgtcttgggttcgccagactccagacaagaggctggagtgggtcgcaaccattagtagtagtgggagtcgcacctactatccagacagtgtgaagggccaattcaccatctccagagacaatgccaagaacaccctgtacctgcaaatgagcagtctgaagtctgaggacacagccatgtattactgttcaattagctgggacggtgctatggactactggggtcaagggacctcagtcaccgtctcctcagccaaaacgacacccccatctgtctatccactggcccctggatctgctgcccaaactaactccatggtgaccctgggatgcctggtcaagggctatttccctgagccagtgacagtgacctggaactctggatccctgtccagcggtgtgcacaccttcccagctgtcctgcagtctgacctctacactctgagcagctcagtgactgtcccctccagcacctggcccagcgagaccgtcacctgcaacgttgcccacccggccagcagcaccaaggtggacaagaaaattgtgcccagggattgtggtgagctcaaaaccccacttggtgacacaactcacacatgcccacggtgcccagagcccaaatcttgtgacacacctcccccgtgcccacggtgcccagagcccaaatcttgtgacacaactcacacatgcccacggtgcccagagcccaaatcttgtgacacacctcccccgtgcccaaggtgcccagcacctgaactcagaaagaggcgagagggcagaggaagtcttctaacatgcggtgacgtggaggagaatcccggccctatgaagttgcctgttaggctgttggtgctgatgttctggattcctgcttccagcagtgatgttttgatgacccaaactccactctccctgcctgtcagtcttggagatcaagcctccatctcttgcaaatctagtcagagcattgtacatagtaatggaaacacctatttagaatggtacctgcagaaaccaggccagtctccaaagctcctggtctacaaagtttccaatcgattttctggggtcccagacaggttcagtggcagtggatcagggacagatttcacactcaagatcagcagagtggaggctgaggatctgggaacttattactgctttcaaggttcacttgttccttgggcgttcggtggaggcaccaagctggaaatcaaacgggctgatgctgcaccaactgtatccatcttcccaccatccagtgagcagttaacatctggaggtgcctcagtcgtgtgcttcttgaacaacttctaccccaaagacatcaatgtcaagtggaagattgatggcagtgaacgacaaaatggcgtcctgaacagttggactgatcaggacagcaaagacagcacctacagcatgagcagcaccctcacgttgaccaaggacgagtatgaacgacataacagctatacctgtgaggccactcacaagacatcaacttcacccattgtcaagagcttcaacaggaatgagtgttagtaactcgaggacggggtgaactacgcctgaggatgatctttttccctctgccaaaaattatggggacatcatgaagccccttgagcatctgacttctggctaataaaggaaatttattttcattgcaatagtgtgttggaattttttgtgtctctcactcggcctaggtagataagtagcatggcgggttaatcattaactacaaggaacccctagtgatggagttggccactccctctctgcgcgctcgctcgctcactgaggccgggcgaccaaaggtcgcccgacgcccgggctttgcccgggcggcctcagtgagcgagcgagcgcgcag

SEQ ID NO: 2173 - DNA, 3282 bp, Artificial Sequence
  source: /note="Description of Artificial Sequence: Synthetic polynucleotide"
ctgcgcgctcgctcgctcactgaggccgcccgggcaaagcccgggcgtcgggcgacctttggtcgcccggcctcagtgagcgagcgagcgcgcagagagggagtggccaactccatcactaggggttccttgtagttaatgattaacccgccatgctacttatctaccagggtaatggggatcctctagaactatagctagtcgacattgattattgactagttattaatagtaatcaattacggggtcattagttcatagcccatatatggagttccgcgttacataacttacggtaaatggcccgcctggctgaccgcccaacgacccccgcccattgacgtcaataatgacgtatgttcccatagtaacgccaatagggactttccattgacgtcaatgggtggagtatttacggtaaactgcccacttggcagtacatcaagtgtatcatatgccaagtacgccccctattgacgtcaatgacggtaaatggcccgcctggcattatgcccagtacatgaccttatgggactttcctacttggcagtacatctacgtattagtcatcgctattaccatgtcgaggccacgttctgcttcactctccccatctcccccccctccccacccccaattttgtatttatttattttttaattattttgtgcagcgatgggggcggggggggggggcgcgcgccaggcggggcggggcggggcgaggggcggggcggggcgaggcggagaggtgcggcggcagccaatcagagcggcgcgctccgaaagtttccttttatggcgaggcggcggcggcggcggccctataaaaagcgaagcgcgcggcgggcgggagcaagcttcgtttagtgaaccgtcagatcgcctggagacgccatccacgctgttttgacctccatagaagacaccgggaccgatccagcctccgcggattcgaatcccggccgggaacggtgcattggaacgcggattccccgtgccaagagtgacgtaagtaccgcctatagagtctataggcccacaaaaaatgctttcttcttttaatatacttttttgtttatcttatttctaatactttccctaatctctttctttcagggcaataatgatacaatgtatcatgcctctttgcaccattctaaagaataacagtgataatttctgggttaaggcaatagcaatatttctgcatataaatatttctgcatataaattgtaactgatgtaagaggtttcatattgctaatagcagctacaatccagctaccattctgcttttattttatggttgggataaggctggattattctgagtccaagctaggcccttttgctaatcatgttcatacctcttatcttcctcccacagctcctgggcaacgtgctggtctgtgtgctggcccatcactttggcaaagaattgggattcgaaccggtgccgccaccatgaacttcgggctcagcttgattttccttgtccttgttttaaaaggtgtccagtgtgaggttcatctggtggagtctgggggagccttagtgaagcctggagggtccctgaaactctcctgtgcagcctctggattcagtttcagtaaatatggcatgtcttgggttcgccagactccagacaagaggctggagtgggtcgcaaccattagtagtagtgggagtcgcacctactatccagacagtgtgaagggccaattcaccatctccagagacaatgccaagaacaccctgtacctgcaaatgagcagtctgaagtctgaggacacagccatgtattactgttcaattagctgggacggtgctatggactactggggtcaagggacctcagtcaccgtctcctcagccaaaacgacacccccatctgtctatccactggcccctggatctgctgcccaaactaactccatggtgaccctgggatgcctggtcaagggctatttccctgagccagtgacagtgacctggaactctggatccctgtccagcggtgtgcacaccttcccagctgtcctgcagtctgacctctacactctgagcagctcagtgactgtcccctccagcacctggcccagcgagaccgtcacctgcaacgttgcccacccggccagcagcaccaaggtggacaagaaaattagaaagaggcgagagggcagaggaagtcttctaacatgcggtgacgtggaggagaatcccggccctatgaagttgcctgttaggctgttggtgctgatgttctggattcctgcttccagcagtgatgttttgatgacccaaactccactctccctgcctgtcagtcttggagatcaagcctccatctcttgcaaatctagtcagagcattgtacatagtaatggaaacacctatttagaatggtacctgcagaaaccaggccagtctccaaagctcctggtctacaaagtttccaatcgattttctggggtcccagacaggttcagtggcagtggatcagggacagatttcacactcaagatcagcagagtggaggctgaggatctgggaacttattactgctttcaaggttcacttgttccttgggcgttcggtggaggcaccaagctggaaatcaaacgggctgatgctgcaccaactgtatccatcttcccaccatccagtgagcagttaacatctggaggtgcctcagtcgtgtgcttcttgaacaacttctaccccaaagacatcaatgtcaagtggaagattgatggcagtgaacgacaaaatggcgtcctgaacagttggactgatcaggacagcaaagacagcacctacagcatgagcagcaccctcacgttgaccaaggacgagtatgaacgacataacagctatacctgtgaggccactcacaagacatcaacttcacccattgtcaagagcttcaacaggaatgagtgttagtaactcgaggacggggtgaactacgcctgaggatgatctttttccctctgccaaaaattatggggacatcatgaagccccttgagcatctgacttctggctaataaaggaaatttattttcattgcaatagtgtgttggaattttttgtgtctctcactcggcctaggtagataagtagcatggcgggttaatcattaactacaaggaacccctagtgatggagttggccactccctctctgcgcgctcgctcgctcactgaggccgggcgaccaaaggtcgcccgacgcccgggctttgcccgggcggcctcagtgagcgagcgagcgcgcag

SEQ ID NO: 2174 - DNA, 3300 bp, Artificial Sequence
  source: /note="Description of Artificial Sequence: Synthetic polynucleotide"
ctgcgcgctcgctcgctcactgaggccgcccgggcaaagcccgggcgtcgggcgacctttggtcgcccggcctcagtgagcgagcgagcgcgcagagagggagtggccaactccatcactaggggttccttgtagttaatgattaacccgccatgctacttatctaccagggtaatggggatcctctagaactatagctagtcgacattgattattgactagttattaatagtaatcaattacggggtcattagttcatagcccatatatggagttccgcgttacataacttacggtaaatggcccgcctggctgaccgcccaacgacccccgcccattgacgtcaataatgacgtatgttcccatagtaacgccaatagggactttccattgacgtcaatgggtggagtatttacggtaaactgcccacttggcagtacatcaagtgtatcatatgccaagtacgccccctattgacgtcaatgacggtaaatggcccgcctggcattatgcccagtacatgaccttatgggactttcctacttggcagtacatctacgtattagtcatcgctattaccatgtcgaggccacgttctgcttcactctccccatctcccccccctccccacccccaattttgtatttatttattttttaattattttgtgcagcgatgggggcggggggggggggcgcgcgccaggcggggcggggcggggcgaggggcggggcggggcgaggcggagaggtgcggcggcagccaatcagagcggcgcgctccgaaagtttccttttatggcgaggcggcggcggcggcggccctataaaaagcgaagcgcgcggcgggcgggagcaagcttcgtttagtgaaccgtcagatcgcctggagacgccatccacgctgttttgacctccatagaagacaccgggaccgatccagcctccgcggattcgaatcccggccgggaacggtgcattggaacgcggattccccgtgccaagagtgacgtaagtaccgcctatagagtctataggcccacaaaaaatgctttcttcttttaatatacttttttgtttatcttatttctaatactttccctaatctctttctttcagggcaataatgatacaatgtatcatgcctctttgcaccattctaaagaataacagtgataatttctgggttaaggcaatagcaatatttctgcatataaatatttctgcatataaattgtaactgatgtaagaggtttcatattgctaatagcagctacaatccagctaccattctgcttttattttatggttgggataaggctggattattctgagtccaagctaggcccttttgctaatcatgttcatacctcttatcttcctcccacagctcctgggcaacgtgctggtctgtgtgctggcccatcactttggcaaagaattgggattcgaaccggtgccgccaccatgaacttcgggctcagcttgattttccttgtccttgttttaaaaggtgtccagtgtgaggttcatctggtggagtctgggggagccttagtgaagcctggagggtccctgaaactctcctgtgcagcctctggattcagtttcagtaaatatggcatgtcttgggttcgccagactccagacaagaggctggagtgggtcgcaaccattagtagtagtgggagtcgcacctactatccagacagtgtgaagggccaattcaccatctccagagacaatgccaagaacaccctgtacctgcaaatgagcagtctgaagtctgaggacacagccatgtattactgttcaattagctgggacggtgctatggactactggggtcaagggacctcagtcaccgtctcctcagccaaaacgacacccccatctgtctatccactggcccctggatctgctgcccaaactaactccatggtgaccctgggatgcctggtcaagggctatttccctgagccagtgacagtgacctggaactctggatccctgtccagcggtgtgcacaccttcccagctgtcctgcagtctgacctctacactctgagcagctcagtgactgtcccctccagcacctggcccagcgagaccgtcacctgcaacgttgcccacccggccagcagcaccaaggtggacaagaaaattgtgcccagggattgtggtagaaagaggcgagagggcagaggaagtcttctaacatgcggtgacgtggaggagaatcccggccctatgaagttgcctgttaggctgttggtgctgatgttctggattcctgcttccagcagtgatgttttgatgacccaaactccactctccctgcctgtcagtcttggagatcaagcctccatctcttgcaaatctagtcagagcattgtacatagtaatggaaacacctatttagaatggtacctgcagaaaccaggccagtctccaaagctcctggtctacaaagtttccaatcgattttctggggtcccagacaggttcagtggcagtggatcagggacagatttcacactcaagatcagcagagtggaggctgaggatctgggaacttattactgctttcaaggttcacttgttccttgggcgttcggtggaggcaccaagctggaaatcaaacgggctgatgctgcaccaactgtatccatcttcccaccatccagtgagcagttaacatctggaggtgcctcagtcgtgtgcttcttgaacaacttctaccccaaagacatcaatgtcaagtggaagattgatggcagtgaacgacaaaatggcgtcctgaacagttggactgatcaggacagcaaagacagcacctacagcatgagcagcaccctcacgttgaccaaggacgagtatgaacgacataacagctatacctgtgaggccactcacaagacatcaacttcacccattgtcaagagcttcaacaggaatgagtgttagtaactcgaggacggggtgaactacgcctgaggatgatctttttccctctgccaaaaattatggggacatcatgaagccccttgagcatctgacttctggctaataaaggaaatttattttcattgcaatagtgtgttggaattttttgtgtctctcactcggcctaggtagataagtagcatggcgggttaatcattaactacaaggaacccctagtgatggagttggccactccctctctgcgcgctcgctcgctcactgaggccgggcgaccaaaggtcgcccgacgcccgggctttgcccgggcggcctcagtgagcgagcgagcgcgcag

SEQ ID NO: 2175 - DNA, 3943 bp, Artificial Sequence
  source: /note="Description of Artificial Sequence: Synthetic polynucleotide"
ctgcgcgctcgctcgctcactgaggccgcccgggcaaagcccgggcgtcgggcgacctttggtcgcccggcctcagtgagcgagcgagcgcgcagagagggagtggccaactccatcactaggggttccttgtagttaatgattaacccgccatgctacttatctaccagggtaatggggatcctctagaactatagctagtcgacataacgcgtctagttattaatagtaatcaattacggggtcattagttcatagcccatatatggagttccgcgttacataacttacggtaaatggcccgcctggctgaccgcccaacgacccccgcccattgacgtcaataatgacgtatgttcccatagtaacgccaatagggactttccattgacgtcaatgggtggagtatttacggtaaactgcccacttggcagtacatcaagtgtatcatatgccaagtacgccccctattgacgtcaatgacggtaaatggcccgcctggcattatgcccagtacatgaccttatgggactttcctacttggcagtacatctacgtattagtcatcgctattaccatggtcgaggtgagccccacgttctgcttcactctccccatctcccccccctccccacccccaattttgtatttatttattttttaattattttgtgcagcgatgggggcggggggggggggggggcgcgcgccaggcggggcggggcggggcgaggggcggggcggggcgaggcggagaggtgcggcggcagccaatcagagcggcgcgctccgaaagtttccttttatggcgaggcggcggcggcggcggccctataaaaagcgaagcgcgcggcgggcgggagtcgctgcgcgctgccttcgccccgtgccccgctccgccgccgcctcgcgccgcccgccccggctctgactgaccgcgttactcccacaggtgagcgggcgggacggcccttctcctccgggctgtaattagcgcttggtttaatgacggcttgtttcttttctgtggctgcgtgaaagccttgaggggctccgggagggccctttgtgcggggggagcggctcggggggtgcgtgcgtgtgtgtgtgcgtggggagcgccgcgtgcggctccgcgctgcccggcggctgtgagcgctgcgggcgcggcgcggggctttgtgcgctccgcagtgtgcgcgaggggagcgcggccgggggcggtgccccgcggtgcggggggggctgcgaggggaacaaaggctgcgtgcggggtgtgtgcgtgggggggtgagcagggggtgtgggcgcgtcggtcgggctgcaaccccccctgcacccccctccccgagttgctgagcacggcccggcttcgggtgcggggctccgtacggggcgtggcgcggggctcgccgtgccgggcggggggtggcggcaggtgggggtgccgggcggggcggggccgcctcgggccggggagggctcgggggaggggcgcggcggcccccggagcgccggcggctgtcgaggcgcggcgagccgcagccattgccttttatggtaatcgtgcgagagggcgcagggacttcctttgtcccaaatctgtgcggagccgaaatctgggaggcgccgccgcaccccctctagcgggcgcggggcgaagcggtgcggcgccggcaggaaggaaatgggcggggagggccttcgtgcgtcgccgcgccgccgtccccttctccctctccagcctcggggctgtccgcggggggacggctgccttcgggggggacggggcagggcggggttcggcttctggcgtgtgaccggcggctctagagcctctgctaaccatgttcatgccttcttctttttcctacagctcctgggcaacgtgctggttattgtgctgtctcatcattttggcaaagaattcgggattcgaaccggtgccgccaccatgaacttcgggctcagcttgattttccttgtccttgttttaaaaggtgtccagtgtgaggttcatctggtggagtctgggggagccttagtgaagcctggagggtccctgaaactctcctgtgcagcctctggattcagtttcagtaaatatggcatgtcttgggttcgccagactccagacaagaggctggagtgggtcgcaaccattagtagtagtgggagtcgcacctactatccagacagtgtgaagggccaattcaccatctccagagacaatgccaagaacaccctgtacctgcaaatgagcagtctgaagtctgaggacacagccatgtattactgttcaattagctgggacggtgctatggactactggggtcaagggacctcagtcaccgtctcctcagccaaaacgacacccccatctgtctatccactggcccctggatctgctgcccaaactaactccatggtgaccctgggatgcctggtcaagggctatttccctgagccagtgacagtgacctggaactctggatccctgtccagcggtgtgcacaccttcccagctgtcctgcagtctgacctctacactctgagcagctcagtgactgtcccctccagcacctggcccagcgagaccgtcacctgcaacgttgcccacccggccagcagcaccaaggtggacaagaaaattgtgcccagggattgtggtgagctcaaaaccccacttggtgacacaactcacacatgcccacggtgcccagagcccaaatcttgtgacacacctcccccgtgcccacggtgcccagagcccaaatcttgtgacacacctcccccatgcccacggtgcccagcacctgaactcagaaagaggcgagagggcagaggaagtcttctaacatgcggtgacgtggaggagaatcccggccctatgaagttgcctgttaggctgttggtgctgatgttctggattcctgcttccagcagtgatgttttgatgacccaaactccactctccctgcctgtcagtcttggagatcaagcctccatctcttgcaaatctagtcagagcattgtacatagtaatggaaacacctatttagaatggtacctgcagaaaccaggccagtctccaaagctcctggtctacaaagtttccaatcgattttctggggtcccagacaggttcagtggcagtggatcagggacagatttcacactcaagatcagcagagtggaggctgaggatctgggaacttattactgctttcaaggttcacttgttccttgggcgttcggtggaggcaccaagctggaaatcaaacgggctgatgctgcaccaactgtatccatcttcccaccatccagtgagcagttaacatctggaggtgcctcagtcgtgtgcttcttgaacaacttctaccccaaagacatcaatgtcaagtggaagattgatggcagtgaacgacaaaatggcgtcctgaacagttggactgatcaggacagcaaagacagcacctacagcatgagcagcaccctcacgttgaccaaggacgagtatgaacgacataacagctatacctgtgaggccactcacaagacatcaacttcacccattgtcaagagcttcaacaggaatgagtgttagtaactcgaggacggggtgaactacgcctgaggatccgatctttttccctctgccaaaaattatggggacatcatgaagccccttgagcatctgacttctggctaataaaggaaatttattttcattgcaatagtgtgttggaattttttgtgtctctcactcggcctaggtagataagtagcatggcgggttaatcattaactacaaggaacccctagtgatggagttggccactccctctctgcgcgctcgctcgctcactgaggccgggcgaccaaaggtcgcccgacgcccgggctttgcccgggcggcctcagtgagcgagcgagcgcgcag

SEQ ID NO: 2176 - DNA, 3988 bp, Artificial Sequence
  source: /note="Description of Artificial Sequence: Synthetic polynucleotide"
ctgcgcgctcgctcgctcactgaggccgcccgggcaaagcccgggcgtcgggcgacctttggtcgcccggcctcagtgagcgagcgagcgcgcagagagggagtggccaactccatcactaggggttccttgtagttaatgattaacccgccatgctacttatctaccagggtaatggggatcctctagaactatagctagtcgacataacgcgtctagttattaatagtaatcaattacggggtcattagttcatagcccatatatggagttccgcgttacataacttacggtaaatggcccgcctggctgaccgcccaacgacccccgcccattgacgtcaataatgacgtatgttcccatagtaacgccaatagggactttccattgacgtcaatgggtggagtatttacggtaaactgcccacttggcagtacatcaagtgtatcatatgccaagtacgccccctattgacgtcaatgacggtaaatggcccgcctggcattatgcccagtacatgaccttatgggactttcctacttggcagtacatctacgtattagtcatcgctattaccatggtcgaggtgagccccacgttctgcttcactctccccatctcccccccctccccacccccaattttgtatttatttattttttaattattttgtgcagcgatgggggcggggggggggggggggcgcgcgccaggcggggcggggcggggcgaggggcggggcggggcgaggcggagaggtgcggcggcagccaatcagagcggcgcgctccgaaagtttccttttatggcgaggcggcggcggcggcggccctataaaaagcgaagcgcgcggcgggcgggagtcgctgcgcgctgccttcgccccgtgccccgctccgccgccgcctcgcgccgcccgccccggctctgactgaccgcgttactcccacaggtgagcgggcgggacggcccttctcctccgggctgtaattagcgcttggtttaatgacggcttgtttcttttctgtggctgcgtgaaagccttgaggggctccgggagggccctttgtgcggggggagcggctcggggggtgcgtgcgtgtgtgtgtgcgtggggagcgccgcgtgcggctccgcgctgcccggcggctgtgagcgctgcgggcgcggcgcggggctttgtgcgctccgcagtgtgcgcgaggggagcgcggccgggggcggtgccccgcggtgcggggggggctgcgaggggaacaaaggctgcgtgcggggtgtgtgcgtgggggggtgagcagggggtgtgggcgcgtcggtcgggctgcaaccccccctgcacccccctccccgagttgctgagcacggcccggcttcgggtgcggggctccgtacggggcgtggcgcggggctcgccgtgccgggcggggggtggcggcaggtgggggtgccgggcggggcggggccgcctcgggccggggagggctcgggggaggggcgcggcggcccccggagcgccggcggctgtcgaggcgcggcgagccgcagccattgccttttatggtaatcgtgcgagagggcgcagggacttcctttgtcccaaatctgtgcggagccgaaatctgggaggcgccgccgcaccccctctagcgggcgcggggcgaagcggtgcggcgccggcaggaaggaaatgggcggggagggccttcgtgcgtcgccgcgccgccgtccccttctccctctccagcctcggggctgtccgcggggggacggctgccttcgggggggacggggcagggcggggttcggcttctggcgtgtgaccggcggctctagagcctctgctaaccatgttcatgccttcttctttttcctacagctcctgggcaacgtgctggttattgtgctgtctcatcattttggcaaagaattcgggattcgaaccggtgccgccaccatgaacttcgggctcagcttgattttccttgtccttgttttaaaaggtgtccagtgtgaggttcatctggtggagtctgggggagccttagtgaagcctggagggtccctgaaactctcctgtgcagcctctggattcagtttcagtaaatatggcatgtcttgggttcgccagactccagacaagaggctggagtgggtcgcaaccattagtagtagtgggagtcgcacctactatccagacagtgtgaagggccaattcaccatctccagagacaatgccaagaacaccctgtacctgcaaatgagcagtctgaagtctgaggacacagccatgtattactgttcaattagctgggacggtgctatggactactggggtcaagggacctcagtcaccgtctcctcagccaaaacgacacccccatctgtctatccactggcccctggatctgctgcccaaactaactccatggtgaccctgggatgcctggtcaagggctatttccctgagccagtgacagtgacctggaactctggatccctgtccagcggtgtgcacaccttcccagctgtcctgcagtctgacctctacactctgagcagctcagtgactgtcccctccagcacctggcccagcgagaccgtcacctgcaacgttgcccacccggccagcagcaccaaggtggacaagaaaattgtgcccagggattgtggtgagctcaaaaccccacttggtgacacaactcacacatgcccacggtgcccagagcccaaatcttgtgacacacctcccccgtgcccacggtgcccagagcccaaatcttgtgacacaactcacacatgcccacggtgcccagagcccaaatcttgtgacacacctcccccgtgcccaaggtgcccagcacctgaactcagaaagaggcgagagggcagaggaagtcttctaacatgcggtgacgtggaggagaatcccggccctatgaagttgcctgttaggctgttggtgctgatgttctggattcctgcttccagcagtgatgttttgatgacccaaactccactctccctgcctgtcagtcttggagatcaagcctccatctcttgcaaatctagtcagagcattgtacatagtaatggaaacacctatttagaatggtacctgcagaaaccaggccagtctccaaagctcctggtctacaaagtttccaatcgattttctggggtcccagacaggttcagtggcagtggatcagggacagatttcacactcaagatcagcagagtggaggctgaggatctgggaacttattactgctttcaaggttcacttgttccttgggcgttcggtggaggcaccaagctggaaatcaaacgggctgatgctgcaccaactgtatccatcttcccaccatccagtgagcagttaacatctggaggtgcctcagtcgtgtgcttcttgaacaacttctaccccaaagacatcaatgtcaagtggaagattgatggcagtgaacgacaaaatggcgtcctgaacagttggactgatcaggacagcaaagacagcacctacagcatgagcagcaccctcacgttgaccaaggacgagtatgaacgacataacagctatacctgtgaggccactcacaagacatcaacttcacccattgtcaagagcttcaacaggaatgagtgttagtaactcgaggacggggtgaactacgcctgaggatccgatctttttccctctgccaaaaattatggggacatcatgaagccccttgagcatctgacttctggctaataaaggaaatttattttcattgcaatagtgtgttggaattttttgtgtctctcactcggcctaggtagataagtagcatggcgggttaatcattaactacaaggaacccctagtgatggagttggccactccctctctgcgcgctcgctcgctcactgaggccgggcgaccaaaggtcgcccgacgcccgggctttgcccgggcggcctcagtgagcgagcgagcgcgcag

SEQ ID NO: 2177 - DNA, 3772 bp, Artificial Sequence
  source: /note="Description of Artificial Sequence: Synthetic polynucleotide"
ctgcgcgctcgctcgctcactgaggccgcccgggcaaagcccgggcgtcgggcgacctttggtcgcccggcctcagtgagcgagcgagcgcgcagagagggagtggccaactccatcactaggggttccttgtagttaatgattaacccgccatgctacttatctaccagggtaatggggatcctctagaactatagctagtcgacataacgcgtctagttattaatagtaatcaattacggggtcattagttcatagcccatatatggagttccgcgttacataacttacggtaaatggcccgcctggctgaccgcccaacgacccccgcccattgacgtcaataatgacgtatgttcccatagtaacgccaatagggactttccattgacgtcaatgggtggagtatttacggtaaactgcccacttggcagtacatcaagtgtatcatatgccaagtacgccccctattgacgtcaatgacggtaaatggcccgcctggcattatgcccagtacatgaccttatgggactttcctacttggcagtacatctacgtattagtcatcgctattaccatggtcgaggtgagccccacgttctgcttcactctccccatctcccccccctccccacccccaattttgtatttatttattttttaattattttgtgcagcgatgggggcggggggggggggggggcgcgcgccaggcggggcggggcggggcgaggggcggggcggggcgaggcggagaggtgcggcggcagccaatcagagcggcgcgctccgaaagtttccttttatggcgaggcggcggcggcggcggccctataaaaagcgaagcgcgcggcgggcgggagtcgctgcgcgctgccttcgccccgtgccccgctccgccgccgcctcgcgccgcccgccccggctctgactgaccgcgttactcccacaggtgagcgggcgggacggcccttctcctccgggctgtaattagcgcttggtttaatgacggcttgtttcttttctgtggctgcgtgaaagccttgaggggctccgggagggccctttgtgcggggggagcggctcggggggtgcgtgcgtgtgtgtgtgcgtggggagcgccgcgtgcggctccgcgctgcccggcggctgtgagcgctgcgggcgcggcgcggggctttgtgcgctccgcagtgtgcgcgaggggagcgcggccgggggcggtgccccgcggtgcggggggggctgcgaggggaacaaaggctgcgtgcggggtgtgtgcgtgggggggtgagcagggggtgtgggcgcgtcggtcgggctgcaaccccccctgcacccccctccccgagttgctgagcacggcccggcttcgggtgcggggctccgtacggggcgtggcgcggggctcgccgtgccgggcggggggtggcggcaggtgggggtgccgggcggggcggggccgcctcgggccggggagggctcgggggaggggcgcggcggcccccggagcgccggcggctgtcgaggcgcggcgagccgcagccattgccttttatggtaatcgtgcgagagggcgcagggacttcctttgtcccaaatctgtgcggagccgaaatctgggaggcgccgccgcaccccctctagcgggcgcggggcgaagcggtgcggcgccggcaggaaggaaatgggcggggagggccttcgtgcgtcgccgcgccgccgtccccttctccctctccagcctcggggctgtccgcggggggacggctgccttcgggggggacggggcagggcggggttcggcttctggcgtgtgaccggcggctctagagcctctgctaaccatgttcatgccttcttctttttcctacagctcctgggcaacgtgctggttattgtgctgtctcatcattttggcaaagaattcgggattcgaaccggtgccgccaccatgaacttcgggctcagcttgattttccttgtccttgttttaaaaggtgtccagtgtgaggttcatctggtggagtctgggggagccttagtgaagcctggagggtccctgaaactctcctgtgcagcctctggattcagtttcagtaaatatggcatgtcttgggttcgccagactccagacaagaggctggagtgggtcgcaaccattagtagtagtgggagtcgcacctactatccagacagtgtgaagggccaattcaccatctccagagacaatgccaagaacaccctgtacctgcaaatgagcagtctgaagtctgaggacacagccatgtattactgttcaattagctgggacggtgctatggactactggggtcaagggacctcagtcaccgtctcctcagccaaaacgacacccccatctgtctatccactggcccctggatctgctgcccaaactaactccatggtgaccctgggatgcctggtcaagggctatttccctgagccagtgacagtgacctggaactctggatccctgtccagcggtgtgcacaccttcccagctgtcctgcagtctgacctctacactctgagcagctcagtgactgtcccctccagcacctggcccagcgagaccgtcacctgcaacgttgcccacccggccagcagcaccaaggtggacaagaaaattagaaagaggcgagagggcagaggaagtcttctaacatgcggtgacgtggaggagaatcccggccctatgaagttgcctgttaggctgttggtgctgatgttctggattcctgcttccagcagtgatgttttgatgacccaaactccactctccctgcctgtcagtcttggagatcaagcctccatctcttgcaaatctagtcagagcattgtacatagtaatggaaacacctatttagaatggtacctgcagaaaccaggccagtctccaaagctcctggtctacaaagtttccaatcgattttctggggtcccagacaggttcagtggcagtggatcagggacagatttcacactcaagatcagcagagtggaggctgaggatctgggaacttattactgctttcaaggttcacttgttccttgggcgttcggtggaggcaccaagctggaaatcaaacgggctgatgctgcaccaactgtatccatcttcccaccatccagtgagcagttaacatctggaggtgcctcagtcgtgtgcttcttgaacaacttctaccccaaagacatcaatgtcaagtggaagattgatggcagtgaacgacaaaatggcgtcctgaacagttggactgatcaggacagcaaagacagcacctacagcatgagcagcaccctcacgttgaccaaggacgagtatgaacgacataacagctatacctgtgaggccactcacaagacatcaacttcacccattgtcaagagcttcaacaggaatgagtgttagtaactcgaggacggggtgaactacgcctgaggatccgatctttttccctctgccaaaaattatggggacatcatgaagccccttgagcatctgacttctggctaataaaggaaatttattttcattgcaatagtgtgttggaattttttgtgtctctcactcggcctaggtagataagtagcatggcgggttaatcattaactacaaggaacccctagtgatggagttggccactccctctctgcgcgctcgctcgctcactgaggccgggcgaccaaaggtcgcccgacgcccgggctttgcccgggcggcctcagtgagcgagcgagcgcgcag

SEQ ID NO: 2178 - DNA, 3790 bp, Artificial Sequence
  source: /note="Description of Artificial Sequence: Synthetic polynucleotide"
ctgcgcgctcgctcgctcactgaggccgcccgggcaaagcccgggcgtcgggcgacctttggtcgcccggcctcagtgagcgagcgagcgcgcagagagggagtggccaactccatcactaggggttccttgtagttaatgattaacccgccatgctacttatctaccagggtaatggggatcctctagaactatagctagtcgacataacgcgtctagttattaatagtaatcaattacggggtcattagttcatagcccatatatggagttccgcgttacataacttacggtaaatggcccgcctggctgaccgcccaacgacccccgcccattgacgtcaataatgacgtatgttcccatagtaacgccaatagggactttccattgacgtcaatgggtggagtatttacggtaaactgcccacttggcagtacatcaagtgtatcatatgccaagtacgccccctattgacgtcaatgacggtaaatggcccgcctggcattatgcccagtacatgaccttatgggactttcctacttggcagtacatctacgtattagtcatcgctattaccatggtcgaggtgagccccacgttctgcttcactctccccatctcccccccctccccacccccaattttgtatttatttattttttaattattttgtgcagcgatgggggcggggggggggggggggcgcgcgccaggcggggcggggcggggcgaggggcggggcggggcgaggcggagaggtgcggcggcagccaatcagagcggcgcgctccgaaagtttccttttatggcgaggcggcggcggcggcggccctataaaaagcgaagcgcgcggcgggcgggagtcgctgcgcgctgccttcgccccgtgccccgctccgccgccgcctcgcgccgcccgccccggctctgactgaccgcgttactcccacaggtgagcgggcgggacggcccttctcctccgggctgtaattagcgcttggtttaatgacggcttgtttcttttctgtggctgcgtgaaagccttgaggggctccgggagggccctttgtgcggggggagcggctcggggggtgcgtgcgtgtgtgtgtgcgtggggagcgccgcgtgcggctccgcgctgcccggcggctgtgagcgctgcgggcgcggcgcggggctttgtgcgctccgcagtgtgcgcgaggggagcgcggccgggggcggtgccccgcggtgcggggggggctgcgaggggaacaaaggctgcgtgcggggtgtgtgcgtgggggggtgagcagggggtgtgggcgcgtcggtcgggctgcaaccccccctgcacccccctccccgagttgctgagcacggcccggcttcgggtgcggggctccgtacggggcgtggcgcggggctcgccgtgccgggcggggggtggcggcaggtgggggtgccgggcggggcggggccgcctcgggccggggagggctcgggggaggggcgcggcggcccccggagcgccggcggctgtcgaggcgcggcgagccgcagccattgccttttatggtaatcgtgcgagagggcgcagggacttcctttgtcccaaatctgtgcggagccgaaatctgggaggcgccgccgcaccccctctagcgggcgcggggcgaagcggtgcggcgccggcaggaaggaaatgggcggggagggccttcgtgcgtcgccgcgccgccgtccccttctccctctccagcctcggggctgtccgcggggggacggctgccttcgggggggacggggcagggcggggttcggcttctggcgtgtgaccggcggctctagagcctctgctaaccatgttcatgccttcttctttttcctacagctcctgggcaacgtgctggttattgtgctgtctcatcattttggcaaagaattcgggattcgaaccggtgccgccaccatgaacttcgggctcagcttgattttccttgtccttgttttaaaaggtgtccagtgtgaggttcatctggtggagtctgggggagccttagtgaagcctggagggtccctgaaactctcctgtgcagcctctggattcagtttcagtaaatatggcatgtcttgggttcgccagactccagacaagaggctggagtgggtcgcaaccattagtagtagtgggagtcgcacctactatccagacagtgtgaagggccaattcaccatctccagagacaatgccaagaacaccctgtacctgcaaatgagcagtctgaagtctgaggacacagccatgtattactgttcaattagctgggacggtgctatggactactggggtcaagggacctcagtcaccgtctcctcagccaaaacgacacccccatctgtctatccactggcccctggatctgctgcccaaactaactccatggtgaccctgggatgcctggtcaagggctatttccctgagccagtgacagtgacctggaactctggatccctgtccagcggtgtgcacaccttcccagctgtcctgcagtctgacctctacactctgagcagctcagtgactgtcccctccagcacctggcccagcgagaccgtcacctgcaacgttgcccacccggccagcagcaccaaggtggacaagaaaattgtgcccagggattgtggtagaaagaggcgagagggcagaggaagtcttctaacatgcggtgacgtggaggagaatcccggccctatgaagttgcctgttaggctgttggtgctgatgttctggattcctgcttccagcagtgatgttttgatgacccaaactccactctccctgcctgtcagtcttggagatcaagcctccatctcttgcaaatctagtcagagcattgtacatagtaatggaaacacctatttagaatggtacctgcagaaaccaggccagtctccaaagctcctggtctacaaagtttccaatcgattttctggggtcccagacaggttcagtggcagtggatcagggacagatttcacactcaagatcagcagagtggaggctgaggatctgggaacttattactgctttcaaggttcacttgttccttgggcgttcggtggaggcaccaagctggaaatcaaacgggctgatgctgcaccaactgtatccatcttcccaccatccagtgagcagttaacatctggaggtgcctcagtcgtgtgcttcttgaacaacttctaccccaaagacatcaatgtcaagtggaagattgatggcagtgaacgacaaaatggcgtcctgaacagttggactgatcaggacagcaaagacagcacctacagcatgagcagcaccctcacgttgaccaaggacgagtatgaacgacataacagctatacctgtgaggccactcacaagacatcaacttcacccattgtcaagagcttcaacaggaatgagtgttagtaactcgaggacggggtgaactacgcctgaggatccgatctttttccctctgccaaaaattatggggacatcatgaagccccttgagcatctgacttctggctaataaaggaaatttattttcattgcaatagtgtgttggaattttttgtgtctctcactcggcctaggtagataagtagcatggcgggttaatcattaactacaaggaacccctagtgatggagttggccactccctctctgcgcgctcgctcgctcactgaggccgggcgaccaaaggtcgcccgacgcccgggctttgcccgggcggcctcagtgagcgagcgagcgcgcag

SEQ ID NO: 2179 - DNA, 3324 bp, Artificial Sequence
  source: /note="Description of Artificial Sequence: Synthetic polynucleotide"
ctgcgcgctcgctcgctcactgaggccgcccgggcaaagcccgggcgtcgggcgacctttggtcgcccggcctcagtgagcgagcgagcgcgcagagagggagtggccaactccatcactaggggttccttgtagttaatgattaacccgccatgctacttatctaccagggtaatggggatcctctagaactatagctagtcgacattgattattgactagttattaatagtaatcaattacggggtcattagttcatagcccatatatggagttccgcgttacataacttacggtaaatggcccgcctggctgaccgcccaacgacccccgcccattgacgtcaataatgacgtatgttcccatagtaacgccaatagggactttccattgacgtcaatgggtggagtatttacggtaaactgcccacttggcagtacatcaagtgtatcatatgccaagtacgccccctattgacgtcaatgacggtaaatggcccgcctggcattatgcccagtacatgaccttatgggactttcctacttggcagtacatctacgtattagtcatcgctattaccatgtcgaggccacgttctgcttcactctccccatctcccccccctccccacccccaattttgtatttatttattttttaattattttgtgcagcgatgggggcggggggggggggcgcgcgccaggcggggcggggcggggcgaggggcggggcggggcgaggcggagaggtgcggcggcagccaatcagagcggcgcgctccgaaagtttccttttatggcgaggcggcggcggcggcggccctataaaaagcgaagcgcgcggcgggcgggagcaagcttcgtttagtgaaccgtcagatcgcctggagacgccatccacgctgttttgacctccatagaagacaccgggaccgatccagcctccgcggattcgaatcccggccgggaacggtgcattggaacgcggattccccgtgccaagagtgacgtaagtaccgcctatagagtctataggcccacaaaaaatgctttcttcttttaatatacttttttgtttatcttatttctaatactttccctaatctctttctttcagggcaataatgatacaatgtatcatgcctctttgcaccattctaaagaataacagtgataatttctgggttaaggcaatagcaatatttctgcatataaatatttctgcatataaattgtaactgatgtaagaggtttcatattgctaatagcagctacaatccagctaccattctgcttttattttatggttgggataaggctggattattctgagtccaagctaggcccttttgctaatcatgttcatacctcttatcttcctcccacagctcctgggcaacgtgctggtctgtgtgctggcccatcactttggcaaagaattgggattcgaaccggtgccgccaccatgaagttgcctgttaggctgttggtgctgatgttctggattcctgcttccagcagtgatgttttgatgacccaaactccactctccctgcctgtcagtcttggagatcaagcctccatctcttgcaaatctagtcagagcattgtacatagtaatggaaacacctatttagaatggtacctgcagaaaccaggccagtctccaaagctcctggtctacaaagtttccaatcgattttctggggtcccagacaggttcagtggcagtggatcagggacagatttcacactcaagatcagcagagtggaggctgaggatctgggaacttattactgctttcaaggttcacttgttccttgggcgttcggtggaggcaccaagctggaaatcaaacgggctgatgctgcaccaactgtatccatcttcccaccatccagtgagcagttaacatctggaggtgcctcagtcgtgtgcttcttgaacaacttctaccccaaagacatcaatgtcaagtggaagattgatggcagtgaacgacaaaatggcgtcctgaacagttggactgatcaggacagcaaagacagcacctacagcatgagcagcaccctcacgttgaccaaggacgagtatgaacgacataacagctatacctgtgaggccactcacaagacatcaacttcacccattgtcaagagcttcaacaggaatgagtgtgagggcagaggaagtcttctaacatgcggtgacgtggaggagaatcccggccctatgaacttcgggctcagcttgattttccttgtccttgttttaaaaggtgtccagtgtgaggttcatctggtggagtctgggggagccttagtgaagcctggagggtccctgaaactctcctgtgcagcctctggattcagtttcagtaaatatggcatgtcttgggttcgccagactccagacaagaggctggagtgggtcgcaaccattagtagtagtgggagtcgcacctactatccagacagtgtgaagggccaattcaccatctccagagacaatgccaagaacaccctgtacctgcaaatgagcagtctgaagtctgaggacacagccatgtattactgttcaattagctgggacggtgctatggactactggggtcaagggacctcagtcaccgtctcctcagccaaaacgacacccccatctgtctatccactggcccctggatctgctgcccaaactaactccatggtgaccctgggatgcctggtcaagggctatttccctgagccagtgacagtgacctggaactctggatccctgtccagcggtgtgcacaccttcccagctgtcctgcagtctgacctctacactctgagcagctcagtgactgtcccctccagcacctggcccagcgagaccgtcacctgcaacgttgcccacccggccagcagcaccaaggtggacaagaaaattgtgcccagggattgtggttaggcaattgaaggcgaattgttaattaagaattcactcctcatcgaggacggggtgaactacgcctgaggatgatctttttccctctgccaaaaattatggggacatcatgaagccccttgagcatctgacttctggctaataaaggaaatttattttcattgcaatagtgtgttggaattttttgtgtctctcactcggcctaggtagataagtagcatggcgggttaatcattaactacaaggaacccctagtgatggagttggccactccctctctgcgcgctcgctcgctcactgaggccgggcgaccaaaggtcgcccgacgcccgggctttgcccgggcggcctcagtgagcgagcgagcgcgcag

SEQ ID NO: 2180 - DNA, 3814 bp, Artificial Sequence
  source: /note="Description of Artificial Sequence: Synthetic polynucleotide"
ctgcgcgctcgctcgctcactgaggccgcccgggcaaagcccgggcgtcgggcgacctttggtcgcccggcctcagtgagcgagcgagcgcgcagagagggagtggccaactccatcactaggggttccttgtagttaatgattaacccgccatgctacttatctaccagggtaatggggatcctctagaactatagctagtcgacataacgcgtctagttattaatagtaatcaattacggggtcattagttcatagcccatatatggagttccgcgttacataacttacggtaaatggcccgcctggctgaccgcccaacgacccccgcccattgacgtcaataatgacgtatgttcccatagtaacgccaatagggactttccattgacgtcaatgggtggagtatttacggtaaactgcccacttggcagtacatcaagtgtatcatatgccaagtacgccccctattgacgtcaatgacggtaaatggcccgcctggcattatgcccagtacatgaccttatgggactttcctacttggcagtacatctacgtattagtcatcgctattaccatggtcgaggtgagccccacgttctgcttcactctccccatctcccccccctccccacccccaattttgtatttatttattttttaattattttgtgcagcgatgggggcggggggggggggggggcgcgcgccaggcggggcggggcggggcgaggggcggggcggggcgaggcggagaggtgcggcggcagccaatcagagcggcgcgctccgaaagtttccttttatggcgaggcggcggcggcggcggccctataaaaagcgaagcgcgcggcgggcgggagtcgctgcgcgctgccttcgccccgtgccccgctccgccgccgcctcgcgccgcccgccccggctctgactgaccgcgttactcccacaggtgagcgggcgggacggcccttctcctccgggctgtaattagcgcttggtttaatgacggcttgtttcttttctgtggctgcgtgaaagccttgaggggctccgggagggccctttgtgcggggggagcggctcggggggtgcgtgcgtgtgtgtgtgcgtggggagcgccgcgtgcggctccgcgctgcccggcggctgtgagcgctgcgggcgcggcgcggggctttgtgcgctccgcagtgtgcgcgaggggagcgcggccgggggcggtgccccgcggtgcggggggggctgcgaggggaacaaaggctgcgtgcggggtgtgtgcgtgggggggtgagcagggggtgtgggcgcgtcggtcgggctgcaaccccccctgcacccccctccccgagttgctgagcacggcccggcttcgggtgcggggctccgtacggggcgtggcgcggggctcgccgtgccgggcggggggtggcggcaggtgggggtgccgggcggggcggggccgcctcgggccggggagggctcgggggaggggcgcggcggcccccggagcgccggcggctgtcgaggcgcggcgagccgcagccattgccttttatggtaatcgtgcgagagggcgcagggacttcctttgtcccaaatctgtgcggagccgaaatctgggaggcgccgccgcaccccctctagcgggcgcggggcgaagcggtgcggcgccggcaggaaggaaatgggcggggagggccttcgtgcgtcgccgcgccgccgtccccttctccctctccagcctcggggctgtccgcggggggacggctgccttcgggggggacggggcagggcggggttcggcttctggcgtgtgaccggcggctctagagcctctgctaaccatgttcatgccttcttctttttcctacagctcctgggcaacgtgctggttattgtgctgtctcatcattttggcaaagaattcgggattcgaaccggtgccgccaccatgaagttgcctgttaggctgttggtgctgatgttctggattcctgcttccagcagtgatgttttgatgacccaaactccactctccctgcctgtcagtcttggagatcaagcctccatctcttgcaaatctagtcagagcattgtacatagtaatggaaacacctatttagaatggtacctgcagaaaccaggccagtctccaaagctcctggtctacaaagtttccaatcgattttctggggtcccagacaggttcagtggcagtggatcagggacagatttcacactcaagatcagcagagtggaggctgaggatctgggaacttattactgctttcaaggttcacttgttccttgggcgttcggtggaggcaccaagctggaaatcaaacgggctgatgctgcaccaactgtatccatcttcccaccatccagtgagcagttaacatctggaggtgcctcagtcgtgtgcttcttgaacaacttctaccccaaagacatcaatgtcaagtggaagattgatggcagtgaacgacaaaatggcgtcctgaacagttggactgatcaggacagcaaagacagcacctacagcatgagcagcaccctcacgttgaccaaggacgagtatgaacgacataacagctatacctgtgaggccactcacaagacatcaacttcacccattgtcaagagcttcaacaggaatgagtgtgagggcagaggaagtcttctaacatgcggtgacgtggaggagaatcccggccctatgaacttcgggctcagcttgattttccttgtccttgttttaaaaggtgtccagtgtgaggttcatctggtggagtctgggggagccttagtgaagcctggagggtccctgaaactctcctgtgcagcctctggattcagtttcagtaaatatggcatgtcttgggttcgccagactccagacaagaggctggagtgggtcgcaaccattagtagtagtgggagtcgcacctactatccagacagtgtgaagggccaattcaccatctccagagacaatgccaagaacaccctgtacctgcaaatgagcagtctgaagtctgaggacacagccatgtattactgttcaattagctgggacggtgctatggactactggggtcaagggacctcagtcaccgtctcctcagccaaaacgacacccccatctgtctatccactggcccctggatctgctgcccaaactaactccatggtgaccctgggatgcctggtcaagggctatttccctgagccagtgacagtgacctggaactctggatccctgtccagcggtgtgcacaccttcccagctgtcctgcagtctgacctctacactctgagcagctcagtgactgtcccctccagcacctggcccagcgagaccgtcacctgcaacgttgcccacccggccagcagcaccaaggtggacaagaaaattgtgcccagggattgtggttaggcaattgaaggcgaattgttaattaagaattcactcctcatcgaggacggggtgaactacgcctgaggatccgatctttttccctctgccaaaaattatggggacatcatgaagccccttgagcatctgacttctggctaataaaggaaatttattttcattgcaatagtgtgttggaattttttgtgtctctcactcggcctaggtagataagtagcatggcgggttaatcattaactacaaggaacccctagtgatggagttggccactccctctctgcgcgctcgctcgctcactgaggccgggcgaccaaaggtcgcccgacgcccgggctttgcccgggcggcctcagtgagcgagcgagcgcgcag

SEQ ID NO: 2181 - DNA, 2567 bp, Artificial Sequence
  source: /note="Description of Artificial Sequence: Synthetic polynucleotide"
ctgcgcgctcgctcgctcactgaggccgcccgggcaaagcccgggcgtcgggcgacctttggtcgcccggcctcagtgagcgagcgagcgcgcagagagggagtggccaactccatcactaggggttccttgtagttaatgattaacccgccatgctacttatctaccagggtaatggggatcctctagaactatagctagtcgacattgattattgactagttattaatagtaatcaattacggggtcattagttcatagcccatatatggagttccgcgttacataacttacggtaaatggcccgcctggctgaccgcccaacgacccccgcccattgacgtcaataatgacgtatgttcccatagtaacgccaatagggactttccattgacgtcaatgggtggagtatttacggtaaactgcccacttggcagtacatcaagtgtatcatatgccaagtacgccccctattgacgtcaatgacggtaaatggcccgcctggcattatgcccagtacatgaccttatgggactttcctacttggcagtacatctacgtattagtcatcgctattaccatgtcgaggccacgttctgcttcactctccccatctcccccccctccccacccccaattttgtatttatttattttttaattattttgtgcagcgatgggggcggggggggggggcgcgcgccaggcggggcggggcggggcgaggggcggggcggggcgaggcggagaggtgcggcggcagccaatcagagcggcgcgctccgaaagtttccttttatggcgaggcggcggcggcggcggccctataaaaagcgaagcgcgcggcgggcgggagcaagcttcgtttagtgaaccgtcagatcgcctggagacgccatccacgctgttttgacctccatagaagacaccgggaccgatccagcctccgcggattcgaatcccggccgggaacggtgcattggaacgcggattccccgtgccaagagtgacgtaagtaccgcctatagagtctataggcccacaaaaaatgctttcttcttttaatatacttttttgtttatcttatttctaatactttccctaatctctttctttcagggcaataatgatacaatgtatcatgcctctttgcaccattctaaagaataacagtgataatttctgggttaaggcaatagcaatatttctgcatataaatatttctgcatataaattgtaactgatgtaagaggtttcatattgctaatagcagctacaatccagctaccattctgcttttattttatggttgggataaggctggattattctgagtccaagctaggcccttttgctaatcatgttcatacctcttatcttcctcccacagctcctgggcaacgtgctggtctgtgtgctggcccatcactttggcaaagaattgggattcgaaccggtgccgccaccatgaacttcgggctcagcttgattttccttgtccttgttttaaaaggtgtccagtgtgaggttcatctggtggagtctgggggagccttagtgaagcctggagggtccctgaaactctcctgtgcagcctctggattcagtttcagtaaatatggcatgtcttgggttcgccagactccagacaagaggctggagtgggtcgcaaccattagtagtagtgggagtcgcacctactatccagacagtgtgaagggccaattcaccatctccagagacaatgccaagaacaccctgtacctgcaaatgagcagtctgaagtctgaggacacagccatgtattactgttcaattagctgggacggtgctatggactactggggtcaagggacctcagtcaccgtctcctcaggtggtggtggatccgatgttttgatgacccaaactccactctccctgcctgtcagtcttggagatcaagcctccatctcttgcaaatctagtcagagcattgtacatagtaatggaaacacctatttagaatggtacctgcagaaaccaggccagtctccaaagctcctggtctacaaagtttccaatcgattttctggggtcccagacaggttcagtggcagtggatcagggacagatttcacactcaagatcagcagagtggaggctgaggatctgggaacttattactgctttcaaggttcacttgttccttgggcgttcggtggaggcaccaagctggaaatcaaatacccatacgatgttccagattacgcttagtgacctgaggatgatctttttccctctgccaaaaattatggggacatcatgaagccccttgagcatctgacttctggctaataaaggaaatttattttcattgcaatagtgtgttggaattttttgtgtctctcactcggcctaggtagataagtagcatggcgggttaatcattaactacaaggaacccctagtgatggagttggccactccctctctgcgcgctcgctcgctcactgaggccgggcgaccaaaggtcgcccgacgcccgggctttgcccgggcggcctcagtgagcgagcgagcgcgcag

SEQ ID NO: 2182 - DNA, 2582 bp, Artificial Sequence
  source: /note="Description of Artificial Sequence: Synthetic polynucleotide"
ctgcgcgctcgctcgctcactgaggccgcccgggcaaagcccgggcgtcgggcgacctttggtcgcccggcctcagtgagcgagcgagcgcgcagagagggagtggccaactccatcactaggggttccttgtagttaatgattaacccgccatgctacttatctaccagggtaatggggatcctctagaactatagctagtcgacattgattattgactagttattaatagtaatcaattacggggtcattagttcatagcccatatatggagttccgcgttacataacttacggtaaatggcccgcctggctgaccgcccaacgacccccgcccattgacgtcaataatgacgtatgttcccatagtaacgccaatagggactttccattgacgtcaatgggtggagtatttacggtaaactgcccacttggcagtacatcaagtgtatcatatgccaagtacgccccctattgacgtcaatgacggtaaatggcccgcctggcattatgcccagtacatgaccttatgggactttcctacttggcagtacatctacgtattagtcatcgctattaccatgtcgaggccacgttctgcttcactctccccatctcccccccctccccacccccaattttgtatttatttattttttaattattttgtgcagcgatgggggcggggggggggggcgcgcgccaggcggggcggggcggggcgaggggcggggcggggcgaggcggagaggtgcggcggcagccaatcagagcggcgcgctccgaaagtttccttttatggcgaggcggcggcggcggcggccctataaaaagcgaagcgcgcggcgggcgggagcaagcttcgtttagtgaaccgtcagatcgcctggagacgccatccacgctgttttgacctccatagaagacaccgggaccgatccagcctccgcggattcgaatcccggccgggaacggtgcattggaacgcggattccccgtgccaagagtgacgtaagtaccgcctatagagtctataggcccacaaaaaatgctttcttcttttaatatacttttttgtttatcttatttctaatactttccctaatctctttctttcagggcaataatgatacaatgtatcatgcctctttgcaccattctaaagaataacagtgataatttctgggttaaggcaatagcaatatttctgcatataaatatttctgcatataaattgtaactgatgtaagaggtttcatattgctaatagcagctacaatccagctaccattctgcttttattttatggttgggataaggctggattattctgagtccaagctaggcccttttgctaatcatgttcatacctcttatcttcctcccacagctcctgggcaacgtgctggtctgtgtgctggcccatcactttggcaaagaattgggattcgaaccggtgccgccaccatgaacttcgggctcagcttgattttccttgtccttgttttaaaaggtgtccagtgtgaggttcatctggtggagtctgggggagccttagtgaagcctggagggtccctgaaactctcctgtgcagcctctggattcagtttcagtaaatatggcatgtcttgggttcgccagactccagacaagaggctggagtgggtcgcaaccattagtagtagtgggagtcgcacctactatccagacagtgtgaagggccaattcaccatctccagagacaatgccaagaacaccctgtacctgcaaatgagcagtctgaagtctgaggacacagccatgtattactgttcaattagctgggacggtgctatggactactggggtcaagggacctcagtcaccgtctcctcaggtggtggtggatccggtggtggtggatccgatgttttgatgacccaaactccactctccctgcctgtcagtcttggagatcaagcctccatctcttgcaaatctagtcagagcattgtacatagtaatggaaacacctatttagaatggtacctgcagaaaccaggccagtctccaaagctcctggtctacaaagtttccaatcgattttctggggtcccagacaggttcagtggcagtggatcagggacagatttcacactcaagatcagcagagtggaggctgaggatctgggaacttattactgctttcaaggttcacttgttccttgggcgttcggtggaggcaccaagctggaaatcaaatacccatacgatgttccagattacgcttagtgacctgaggatgatctttttccctctgccaaaaattatggggacatcatgaagccccttgagcatctgacttctggctaataaaggaaatttattttcattgcaatagtgtgttggaattttttgtgtctctcactcggcctaggtagataagtagcatggcgggttaatcattaactacaaggaacccctagtgatggagttggccactccctctctgcgcgctcgctcgctcactgaggccgggcgaccaaaggtcgcccgacgcccgggctttgcccgggcggcctcagtgagcgagcgagcgcgcag

SEQ ID NO: 2183 - DNA, 2597 bp, Artificial Sequence
  source: /note="Description of Artificial Sequence: Synthetic polynucleotide"
ctgcgcgctcgctcgctcactgaggccgcccgggcaaagcccgggcgtcgggcgacctttggtcgcccggcctcagtgagcgagcgagcgcgcagagagggagtggccaactccatcactaggggttccttgtagttaatgattaacccgccatgctacttatctaccagggtaatggggatcctctagaactatagctagtcgacattgattattgactagttattaatagtaatcaattacggggtcattagttcatagcccatatatggagttccgcgttacataacttacggtaaatggcccgcctggctgaccgcccaacgacccccgcccattgacgtcaataatgacgtatgttcccatagtaacgccaatagggactttccattgacgtcaatgggtggagtatttacggtaaactgcccacttggcagtacatcaagtgtatcatatgccaagtacgccccctattgacgtcaatgacggtaaatggcccgcctggcattatgcccagtacatgaccttatgggactttcctacttggcagtacatctacgtattagtcatcgctattaccatgtcgaggccacgttctgcttcactctccccatctcccccccctccccacccccaattttgtatttatttattttttaattattttgtgcagcgatgggggcggggggggggggcgcgcgccaggcggggcggggcggggcgaggggcggggcggggcgaggcggagaggtgcggcggcagccaatcagagcggcgcgctccgaaagtttccttttatggcgaggcggcggcggcggcggccctataaaaagcgaagcgcgcggcgggcgggagcaagcttcgtttagtgaaccgtcagatcgcctggagacgccatccacgctgttttgacctccatagaagacaccgggaccgatccagcctccgcggattcgaatcccggccgggaacggtgcattggaacgcggattccccgtgccaagagtgacgtaagtaccgcctatagagtctataggcccacaaaaaatgctttcttcttttaatatacttttttgtttatcttatttctaatactttccctaatctctttctttcagggcaataatgatacaatgtatcatgcctctttgcaccattctaaagaataacagtgataatttctgggttaaggcaatagcaatatttctgcatataaatatttctgcatataaattgtaactgatgtaagaggtttcatattgctaatagcagctacaatccagctaccattctgcttttattttatggttgggataaggctggattattctgagtccaagctaggcccttttgctaatcatgttcatacctcttatcttcctcccacagctcctgggcaacgtgctggtctgtgtgctggcccatcactttggcaaagaattgggattcgaaccggtgccgccaccatgaacttcgggctcagcttgattttccttgtccttgttttaaaaggtgtccagtgtgaggttcatctggtggagtctgggggagccttagtgaagcctggagggtccctgaaactctcctgtgcagcctctggattcagtttcagtaaatatggcatgtcttgggttcgccagactccagacaagaggctggagtgggtcgcaaccattagtagtagtgggagtcgcacctactatccagacagtgtgaagggccaattcaccatctccagagacaatgccaagaacaccctgtacctgcaaatgagcagtctgaagtctgaggacacagccatgtattactgttcaattagctgggacggtgctatggactactggggtcaagggacctcagtcaccgtctcctcaggtggtggtggtagcggcggcggcggctctggtggtggtggatccgatgttttgatgacccaaactccactctccctgcctgtcagtcttggagatcaagcctccatctcttgcaaatctagtcagagcattgtacatagtaatggaaacacctatttagaatggtacctgcagaaaccaggccagtctccaaagctcctggtctacaaagtttccaatcgattttctggggtcccagacaggttcagtggcagtggatcagggacagatttcacactcaagatcagcagagtggaggctgaggatctgggaacttattactgctttcaaggttcacttgttccttgggcgttcggtggaggcaccaagctggaaatcaaatacccatacgatgttccagattacgcttagtgacctgaggatgatctttttccctctgccaaaaattatggggacatcatgaagccccttgagcatctgacttctggctaataaaggaaatttattttcattgcaatagtgtgttggaattttttgtgtctctcactcggcctaggtagataagtagcatggcgggttaatcattaactacaaggaacccctagtgatggagttggccactccctctctgcgcgctcgctcgctcactgaggccgggcgaccaaaggtcgcccgacgcccgggctttgcccgggcggcctcagtgagcgagcgagcgcgcag

SEQ ID NO: 2184 - DNA, 2612 bp, Artificial Sequence
  source: /note="Description of Artificial Sequence: Synthetic polynucleotide"
ctgcgcgctcgctcgctcactgaggccgcccgggcaaagcccgggcgtcgggcgacctttggtcgcccggcctcagtgagcgagcgagcgcgcagagagggagtggccaactccatcactaggggttccttgtagttaatgattaacccgccatgctacttatctaccagggtaatggggatcctctagaactatagctagtcgacattgattattgactagttattaatagtaatcaattacggggtcattagttcatagcccatatatggagttccgcgttacataacttacggtaaatggcccgcctggctgaccgcccaacgacccccgcccattgacgtcaataatgacgtatgttcccatagtaacgccaatagggactttccattgacgtcaatgggtggagtatttacggtaaactgcccacttggcagtacatcaagtgtatcatatgccaagtacgccccctattgacgtcaatgacggtaaatggcccgcctggcattatgcccagtacatgaccttatgggactttcctacttggcagtacatctacgtattagtcatcgctattaccatgtcgaggccacgttctgcttcactctccccatctcccccccctccccacccccaattttgtatttatttattttttaattattttgtgcagcgatgggggcggggggggggggcgcgcgccaggcggggcggggcggggcgaggggcggggcggggcgaggcggagaggtgcggcggcagccaatcagagcggcgcgctccgaaagtttccttttatggcgaggcggcggcggcggcggccctataaaaagcgaagcgcgcggcgggcgggagcaagcttcgtttagtgaaccgtcagatcgcctggagacgccatccacgctgttttgacctccatagaagacaccgggaccgatccagcctccgcggattcgaatcccggccgggaacggtgcattggaacgcggattccccgtgccaagagtgacgtaagtaccgcctatagagtctataggcccacaaaaaatgctttcttcttttaatatacttttttgtttatcttatttctaatactttccctaatctctttctttcagggcaataatgatacaatgtatcatgcctctttgcaccattctaaagaataacagtgataatttctgggttaaggcaatagcaatatttctgcatataaatatttctgcatataaattgtaactgatgtaagaggtttcatattgctaatagcagctacaatccagctaccattctgcttttattttatggttgggataaggctggattattctgagtccaagctaggcccttttgctaatcatgttcatacctcttatcttcctcccacagctcctgggcaacgtgctggtctgtgtgctggcccatcactttggcaaagaattgggattcgaaccggtgccgccaccatgaacttcgggctcagcttgattttccttgtccttgttttaaaaggtgtccagtgtgaggttcatctggtggagtctgggggagccttagtgaagcctggagggtccctgaaactctcctgtgcagcctctggattcagtttcagtaaatatggcatgtcttgggttcgccagactccagacaagaggctggagtgggtcgcaaccattagtagtagtgggagtcgcacctactatccagacagtgtgaagggccaattcaccatctccagagacaatgccaagaacaccctgtacctgcaaatgagcagtctgaagtctgaggacacagccatgtattactgttcaattagctgggacggtgctatggactactggggtcaagggacctcagtcaccgtctcctcaggtggtggtggtagcggcggcggcggctctggtggtggtggatccggtggtggtggatccgatgttttgatgacccaaactccactctccctgcctgtcagtcttggagatcaagcctccatctcttgcaaatctagtcagagcattgtacatagtaatggaaacacctatttagaatggtacctgcagaaaccaggccagtctccaaagctcctggtctacaaagtttccaatcgattttctggggtcccagacaggttcagtggcagtggatcagggacagatttcacactcaagatcagcagagtggaggctgaggatctgggaacttattactgctttcaaggttcacttgttccttgggcgttcggtggaggcaccaagctggaaatcaaatacccatacgatgttccagattacgcttagtgacctgaggatgatctttttccctctgccaaaaattatggggacatcatgaagccccttgagcatctgacttctggctaataaaggaaatttattttcattgcaatagtgtgttggaattttttgtgtctctcactcggcctaggtagataagtagcatggcgggttaatcattaactacaaggaacccctagtgatggagttggccactccctctctgcgcgctcgctcgctcactgaggccgggcgaccaaaggtcgcccgacgcccgggctttgcccgggcggcctcagtgagcgagcgagcgcgcag

SEQ ID NO: 2185 - DNA, 2627 bp, Artificial Sequence
  source: /note="Description of Artificial Sequence: Synthetic polynucleotide"
ctgcgcgctcgctcgctcactgaggccgcccgggcaaagcccgggcgtcgggcgacctttggtcgcccggcctcagtgagcgagcgagcgcgcagagagggagtggccaactccatcactaggggttccttgtagttaatgattaacccgccatgctacttatctaccagggtaatggggatcctctagaactatagctagtcgacattgattattgactagttattaatagtaatcaattacggggtcattagttcatagcccatatatggagttccgcgttacataacttacggtaaatggcccgcctggctgaccgcccaacgacccccgcccattgacgtcaataatgacgtatgttcccatagtaacgccaatagggactttccattgacgtcaatgggtggagtatttacggtaaactgcccacttggcagtacatcaagtgtatcatatgccaagtacgccccctattgacgtcaatgacggtaaatggcccgcctggcattatgcccagtacatgaccttatgggactttcctacttggcagtacatctacgtattagtcatcgctattaccatgtcgaggccacgttctgcttcactctccccatctcccccccctccccacccccaattttgtatttatttattttttaattattttgtgcagcgatgggggcggggggggggggcgcgcgccaggcggggcggggcggggcgaggggcggggcggggcgaggcggagaggtgcggcggcagccaatcagagcggcgcgctccgaaagtttccttttatggcgaggcggcggcggcggcggccctataaaaagcgaagcgcgcggcgggcgggagcaagcttcgtttagtgaaccgtcagatcgcctggagacgccatccacgctgttttgacctccatagaagacaccgggaccgatccagcctccgcggattcgaatcccggccgggaacggtgcattggaacgcggattccccgtgccaagagtgacgtaagtaccgcctatagagtctataggcccacaaaaaatgctttcttcttttaatatacttttttgtttatcttatttctaatactttccctaatctctttctttcagggcaataatgatacaatgtatcatgcctctttgcaccattctaaagaataacagtgataatttctgggttaaggcaatagcaatatttctgcatataaatatttctgcatataaattgtaactgatgtaagaggtttcatattgctaatagcagctacaatccagctaccattctgcttttattttatggttgggataaggctggattattctgagtccaagctaggcccttttgctaatcatgttcatacctcttatcttcctcccacagctcctgggcaacgtgctggtctgtgtgctggcccatcactttggcaaagaattgggattcgaaccggtgccgccaccatgaacttcgggctcagcttgattttccttgtccttgttttaaaaggtgtccagtgtgaggttcatctggtggagtctgggggagccttagtgaagcctggagggtccctgaaactctcctgtgcagcctctggattcagtttcagtaaatatggcatgtcttgggttcgccagactccagacaagaggctggagtgggtcgcaaccattagtagtagtgggagtcgcacctactatccagacagtgtgaagggccaattcaccatctccagagacaatgccaagaacaccctgtacctgcaaatgagcagtctgaagtctgaggacacagccatgtattactgttcaattagctgggacggtgctatggactactggggtcaagggacctcagtcaccgtctcctcaggtggtggtggtagcggcggcggcggctctggtggtggtggatccggtggtggtggatccggtggtggtggatccgatgttttgatgacccaaactccactctccctgcctgtcagtcttggagatcaagcctccatctcttgcaaatctagtcagagcattgtacatagtaatggaaacacctatttagaatggtacctgcagaaaccaggccagtctccaaagctcctggtctacaaagtttccaatcgattttctggggtcccagacaggttcagtggcagtggatcagggacagatttcacactcaagatcagcagagtggaggctgaggatctgggaacttattactgctttcaaggttcacttgttccttgggcgttcggtggaggcaccaagctggaaatcaaatacccatacgatgttccagattacgcttagtgacctgaggatgatctttttccctctgccaaaaattatggggacatcatgaagccccttgagcatctgacttctggctaataaaggaaatttattttcattgcaatagtgtgttggaattttttgtgtctctcactcggcctaggtagataagtagcatggcgggttaatcattaactacaaggaacccctagtgatggagttggccactccctctctgcgcgctcgctcgctcactgaggccgggcgaccaaaggtcgcccgacgcccgggctttgcccgggcggcctcagtgagcgagcgagcgcgcag

SEQ ID NO: 2186 - DNA, 2642 bp, Artificial Sequence
  source: /note="Description of Artificial Sequence: Synthetic polynucleotide"
ctgcgcgctcgctcgctcactgaggccgcccgggcaaagcccgggcgtcgggcgacctttggtcgcccggcctcagtgagcgagcgagcgcgcagagagggagtggccaactccatcactaggggttccttgtagttaatgattaacccgccatgctacttatctaccagggtaatggggatcctctagaactatagctagtcgacattgattattgactagttattaatagtaatcaattacggggtcattagttcatagcccatatatggagttccgcgttacataacttacggtaaatggcccgcctggctgaccgcccaacgacccccgcccattgacgtcaataatgacgtatgttcccatagtaacgccaatagggactttccattgacgtcaatgggtggagtatttacggtaaactgcccacttggcagtacatcaagtgtatcatatgccaagtacgccccctattgacgtcaatgacggtaaatggcccgcctggcattatgcccagtacatgaccttatgggactttcctacttggcagtacatctacgtattagtcatcgctattaccatgtcgaggccacgttctgcttcactctccccatctcccccccctccccacccccaattttgtatttatttattttttaattattttgtgcagcgatgggggcggggggggggggcgcgcgccaggcggggcggggcggggcgaggggcggggcggggcgaggcggagaggtgcggcggcagccaatcagagcggcgcgctccgaaagtttccttttatggcgaggcggcggcggcggcggccctataaaaagcgaagcgcgcggcgggcgggagcaagcttcgtttagtgaaccgtcagatcgcctggagacgccatccacgctgttttgacctccatagaagacaccgggaccgatccagcctccgcggattcgaatcccggccgggaacggtgcattggaacgcggattccccgtgccaagagtgacgtaagtaccgcctatagagtctataggcccacaaaaaatgctttcttcttttaatatacttttttgtttatcttatttctaatactttccctaatctctttctttcagggcaataatgatacaatgtatcatgcctctttgcaccattctaaagaataacagtgataatttctgggttaaggcaatagcaatatttctgcatataaatatttctgcatataaattgtaactgatgtaagaggtttcatattgctaatagcagctacaatccagctaccattctgcttttattttatggttgggataaggctggattattctgagtccaagctaggcccttttgctaatcatgttcatacctcttatcttcctcccacagctcctgggcaacgtgctggtctgtgtgctggcccatcactttggcaaagaattgggattcgaaccggtgccgccaccatgaacttcgggctcagcttgattttccttgtccttgttttaaaaggtgtccagtgtgaggttcatctggtggagtctgggggagccttagtgaagcctggagggtccctgaaactctcctgtgcagcctctggattcagtttcagtaaatatggcatgtcttgggttcgccagactccagacaagaggctggagtgggtcgcaaccattagtagtagtgggagtcgcacctactatccagacagtgtgaagggccaattcaccatctccagagacaatgccaagaacaccctgtacctgcaaatgagcagtctgaagtctgaggacacagccatgtattactgttcaattagctgggacggtgctatggactactggggtcaagggacctcagtcaccgtctcctcaggtggtggtggtagcggcggcggcggctctggtggtggtggatccggtggtggtggatccggtggtggtggatccggtggtggtggatccgatgttttgatgacccaaactccactctccctgcctgtcagtcttggagatcaagcctccatctcttgcaaatctagtcagagcattgtacatagtaatggaaacacctatttagaatggtacctgcagaaaccaggccagtctccaaagctcctggtctacaaagtttccaatcgattttctggggtcccagacaggttcagtggcagtggatcagggacagatttcacactcaagatcagcagagtggaggctgaggatctgggaacttattactgctttcaaggttcacttgttccttgggcgttcggtggaggcaccaagctggaaatcaaatacccatacgatgttccagattacgcttagtgacctgaggatgatctttttccctctgccaaaaattatggggacatcatgaagccccttgagcatctgacttctggctaataaaggaaatttattttcattgcaatagtgtgttggaattttttgtgtctctcactcggcctaggtagataagtagcatggcgggttaatcattaactacaaggaacccctagtgatggagttggccactccctctctgcgcgctcgctcgctcactgaggccgggcgaccaaaggtcgcccgacgcccgggctttgcccgggcggcctcagtgagcgagcgagcgcgcag

SEQ ID NO: 2187 - DNA, 3055 bp, Artificial Sequence
  source: /note="Description of Artificial Sequence: Synthetic polynucleotide"
ctgcgcgctcgctcgctcactgaggccgcccgggcaaagcccgggcgtcgggcgacctttggtcgcccggcctcagtgagcgagcgagcgcgcagagagggagtggccaactccatcactaggggttccttgtagttaatgattaacccgccatgctacttatctaccagggtaatggggatcctctagaactatagctagtcgacataacgcgtctagttattaatagtaatcaattacggggtcattagttcatagcccatatatggagttccgcgttacataacttacggtaaatggcccgcctggctgaccgcccaacgacccccgcccattgacgtcaataatgacgtatgttcccatagtaacgccaatagggactttccattgacgtcaatgggtggagtatttacggtaaactgcccacttggcagtacatcaagtgtatcatatgccaagtacgccccctattgacgtcaatgacggtaaatggcccgcctggcattatgcccagtacatgaccttatgggactttcctacttggcagtacatctacgtattagtcatcgctattaccatggtcgaggtgagccccacgttctgcttcactctccccatctcccccccctccccacccccaattttgtatttatttattttttaattattttgtgcagcgatgggggcggggggggggggggggcgcgcgccaggcggggcggggcggggcgaggggcggggcggggcgaggcggagaggtgcggcggcagccaatcagagcggcgcgctccgaaagtttccttttatggcgaggcggcggcggcggcggccctataaaaagcgaagcgcgcggcgggcgggagtcgctgcgcgctgccttcgccccgtgccccgctccgccgccgcctcgcgccgcccgccccggctctgactgaccgcgttactcccacaggtgagcgggcgggacggcccttctcctccgggctgtaattagcgcttggtttaatgacggcttgtttcttttctgtggctgcgtgaaagccttgaggggctccgggagggccctttgtgcggggggagcggctcggggggtgcgtgcgtgtgtgtgtgcgtggggagcgccgcgtgcggctccgcgctgcccggcggctgtgagcgctgcgggcgcggcgcggggctttgtgcgctccgcagtgtgcgcgaggggagcgcggccgggggcggtgccccgcggtgcggggggggctgcgaggggaacaaaggctgcgtgcggggtgtgtgcgtgggggggtgagcagggggtgtgggcgcgtcggtcgggctgcaaccccccctgcacccccctccccgagttgctgagcacggcccggcttcgggtgcggggctccgtacggggcgtggcgcggggctcgccgtgccgggcggggggtggcggcaggtgggggtgccgggcggggcggggccgcctcgggccggggagggctcgggggaggggcgcggcggcccccggagcgccggcggctgtcgaggcgcggcgagccgcagccattgccttttatggtaatcgtgcgagagggcgcagggacttcctttgtcccaaatctgtgcggagccgaaatctgggaggcgccgccgcaccccctctagcgggcgcggggcgaagcggtgcggcgccggcaggaaggaaatgggcggggagggccttcgtgcgtcgccgcgccgccgtccccttctccctctccagcctcggggctgtccgcggggggacggctgccttcgggggggacggggcagggcggggttcggcttctggcgtgtgaccggcggctctagagcctctgctaaccatgttcatgccttcttctttttcctacagctcctgggcaacgtgctggttattgtgctgtctcatcattttggcaaagaattcgggattcgaaccggtgccgccaccatgaacttcgggctcagcttgattttccttgtccttgttttaaaaggtgtccagtgtgaggttcatctggtggagtctgggggagccttagtgaagcctggagggtccctgaaactctcctgtgcagcctctggattcagtttcagtaaatatggcatgtcttgggttcgccagactccagacaagaggctggagtgggtcgcaaccattagtagtagtgggagtcgcacctactatccagacagtgtgaagggccaattcaccatctccagagacaatgccaagaacaccctgtacctgcaaatgagcagtctgaagtctgaggacacagccatgtattactgttcaattagctgggacggtgctatggactactggggtcaagggacctcagtcaccgtctcctcaggtggtggtggatccgatgttttgatgacccaaactccactctccctgcctgtcagtcttggagatcaagcctccatctcttgcaaatctagtcagagcattgtacatagtaatggaaacacctatttagaatggtacctgcagaaaccaggccagtctccaaagctcctggtctacaaagtttccaatcgattttctggggtcccagacaggttcagtggcagtggatcagggacagatttcacactcaagatcagcagagtggaggctgaggatctgggaacttattactgctttcaaggttcacttgttccttgggcgttcggtggaggcaccaagctggaaatcaaatacccatacgatgttccagattacgcttagtgacctgaggatgatctttttccctctgccaaaaattatggggacatcatgaagccccttgagcatctgacttctggctaataaaggaaatttattttcattgcaatagtgtgttggaattttttgtgtctctcactcggcctaggtagataagtagcatggcgggttaatcattaactacaaggaacccctagtgatggagttggccactccctctctgcgcgctcgctcgctcactgaggccgggcgaccaaaggtcgcccgacgcccgggctttgcccgggcggcctcagtgagcgagcgagcgcgcag

SEQ ID NO: 2188 - DNA, 3070 bp, Artificial Sequence
  source: /note="Description of Artificial Sequence: Synthetic polynucleotide"
ctgcgcgctcgctcgctcactgaggccgcccgggcaaagcccgggcgtcgggcgacctttggtcgcccggcctcagtgagcgagcgagcgcgcagagagggagtggccaactccatcactaggggttccttgtagttaatgattaacccgccatgctacttatctaccagggtaatggggatcctctagaactatagctagtcgacataacgcgtctagttattaatagtaatcaattacggggtcattagttcatagcccatatatggagttccgcgttacataacttacggtaaatggcccgcctggctgaccgcccaacgacccccgcccattgacgtcaataatgacgtatgttcccatagtaacgccaatagggactttccattgacgtcaatgggtggagtatttacggtaaactgcccacttggcagtacatcaagtgtatcatatgccaagtacgccccctattgacgtcaatgacggtaaatggcccgcctggcattatgcccagtacatgaccttatgggactttcctacttggcagtacatctacgtattagtcatcgctattaccatggtcgaggtgagccccacgttctgcttcactctccccatctcccccccctccccacccccaattttgtatttatttattttttaattattttgtgcagcgatgggggcggggggggggggggggcgcgcgccaggcggggcggggcggggcgaggggcggggcggggcgaggcggagaggtgcggcggcagccaatcagagcggcgcgctccgaaagtttccttttatggcgaggcggcggcggcggcggccctataaaaagcgaagcgcgcggcgggcgggagtcgctgcgcgctgccttcgccccgtgccccgctccgccgccgcctcgcgccgcccgccccggctctgactgaccgcgttactcccacaggtgagcgggcgggacggcccttctcctccgggctgtaattagcgcttggtttaatgacggcttgtttcttttctgtggctgcgtgaaagccttgaggggctccgggagggccctttgtgcggggggagcggctcggggggtgcgtgcgtgtgtgtgtgcgtggggagcgccgcgtgcggctccgcgctgcccggcggctgtgagcgctgcgggcgcggcgcggggctttgtgcgctccgcagtgtgcgcgaggggagcgcggccgggggcggtgccccgcggtgcggggggggctgcgaggggaacaaaggctgcgtgcggggtgtgtgcgtgggggggtgagcagggggtgtgggcgcgtcggtcgggctgcaaccccccctgcacccccctccccgagttgctgagcacggcccggcttcgggtgcggggctccgtacggggcgtggcgcggggctcgccgtgccgggcggggggtggcggcaggtgggggtgccgggcggggcggggccgcctcgggccggggagggctcgggggaggggcgcggcggcccccggagcgccggcggctgtcgaggcgcggcgagccgcagccattgccttttatggtaatcgtgcgagagggcgcagggacttcctttgtcccaaatctgtgcggagccgaaatctgggaggcgccgccgcaccccctctagcgggcgcggggcgaagcggtgcggcgccggcaggaaggaaatgggcggggagggccttcgtgcgtcgccgcgccgccgtccccttctccctctccagcctcggggctgtccgcggggggacggctgccttcgggggggacggggcagggcggggttcggcttctggcgtgtgaccggcggctctagagcctctgctaaccatgttcatgccttcttctttttcctacagctcctgggcaacgtgctggttattgtgctgtctcatcattttggcaaagaattcgggattcgaaccggtgccgccaccatgaacttcgggctcagcttgattttccttgtccttgttttaaaaggtgtccagtgtgaggttcatctggtggagtctgggggagccttagtgaagcctggagggtccctgaaactctcctgtgcagcctctggattcagtttcagtaaatatggcatgtcttgggttcgccagactccagacaagaggctggagtgggtcgcaaccattagtagtagtgggagtcgcacctactatccagacagtgtgaagggccaattcaccatctccagagacaatgccaagaacaccctgtacctgcaaatgagcagtctgaagtctgaggacacagccatgtattactgttcaattagctgggacggtgctatggactactggggtcaagggacctcagtcaccgtctcctcaggtggtggtggtagcggcggcggcggctctgatgttttgatgacccaaactccactctccctgcctgtcagtcttggagatcaagcctccatctcttgcaaatctagtcagagcattgtacatagtaatggaaacacctatttagaatggtacctgcagaaaccaggccagtctccaaagctcctggtctacaaagtttccaatcgattttctggggtcccagacaggttcagtggcagtggatcagggacagatttcacactcaagatcagcagagtggaggctgaggatctgggaacttattactgctttcaaggttcacttgttccttgggcgttcggtggaggcaccaagctggaaatcaaatacccatacgatgttccagattacgcttagtgacctgaggatgatctttttccctctgccaaaaattatggggacatcatgaagccccttgagcatctgacttctggctaataaaggaaatttattttcattgcaatagtgtgttggaattttttgtgtctctcactcggcctaggtagataagtagcatggcgggttaatcattaactacaaggaacccctagtgatggagttggccactccctctctgcgcgctcgctcgctcactgaggccgggcgaccaaaggtcgcccgacgcccgggctttgcccgggcggcctcagtgagcgagcgagcgcgcag

SEQ ID NO: 2189 - DNA, 3085 bp, Artificial Sequence
  source: /note="Description of Artificial Sequence: Synthetic polynucleotide"
ctgcgcgctcgctcgctcactgaggccgcccgggcaaagcccgggcgtcgggcgacctttggtcgcccggcctcagtgagcgagcgagcgcgcagagagggagtggccaactccatcactaggggttccttgtagttaatgattaacccgccatgctacttatctaccagggtaatggggatcctctagaactatagctagtcgacataacgcgtctagttattaatagtaatcaattacggggtcattagttcatagcccatatatggagttccgcgttacataacttacggtaaatggcccgcctggctgaccgcccaacgacccccgcccattgacgtcaataatgacgtatgttcccatagtaacgccaatagggactttccattgacgtcaatgggtggagtatttacggtaaactgcccacttggcagtacatcaagtgtatcatatgccaagtacgccccctattgacgtcaatgacggtaaatggcccgcctggcattatgcccagtacatgaccttatgggactttcctacttggcagtacatctacgtattagtcatcgctattaccatggtcgaggtgagccccacgttctgcttcactctccccatctcccccccctccccacccccaattttgtatttatttattttttaattattttgtgcagcgatgggggcggggggggggggggggcgcgcgccaggcggggcggggcggggcgaggggcggggcggggcgaggcggagaggtgcggcggcagccaatcagagcggcgcgctccgaaagtttccttttatggcgaggcggcggcggcggcggccctataaaaagcgaagcgcgcggcgggcgggagtcgctgcgcgctgccttcgccccgtgccccgctccgccgccgcctcgcgccgcccgccccggctctgactgaccgcgttactcccacaggtgagcgggcgggacggcccttctcctccgggctgtaattagcgcttggtttaatgacggcttgtttcttttctgtggctgcgtgaaagccttgaggggctccgggagggccctttgtgcggggggagcggctcggggggtgcgtgcgtgtgtgtgtgcgtggggagcgccgcgtgcggctccgcgctgcccggcggctgtgagcgctgcgggcgcggcgcggggctttgtgcgctccgcagtgtgcgcgaggggagcgcggccgggggcggtgccccgcggtgcggggggggctgcgaggggaacaaaggctgcgtgcggggtgtgtgcgtgggggggtgagcagggggtgtgggcgcgtcggtcgggctgcaaccccccctgcacccccctccccgagttgctgagcacggcccggcttcgggtgcggggctccgtacggggcgtggcgcggggctcgccgtgccgggcggggggtggcggcaggtgggggtgccgggcggggcggggccgcctcgggccggggagggctcgggggaggggcgcggcggcccccggagcgccggcggctgtcgaggcgcggcgagccgcagccattgccttttatggtaatcgtgcgagagggcgcagggacttcctttgtcccaaatctgtgcggagccgaaatctgggaggcgccgccgcaccccctctagcgggcgcggggcgaagcggtgcggcgccggcaggaaggaaatgggcggggagggccttcgtgcgtcgccgcgccgccgtccccttctccctctccagcctcggggctgtccgcggggggacggctgccttcgggggggacggggcagggcggggttcggcttctggcgtgtgaccggcggctctagagcctctgctaaccatgttcatgccttcttctttttcctacagctcctgggcaacgtgctggttattgtgctgtctcatcattttggcaaagaattcgggattcgaaccggtgccgccaccatgaacttcgggctcagcttgattttccttgtccttgttttaaaaggtgtccagtgtgaggttcatctggtggagtctgggggagccttagtgaagcctggagggtccctgaaactctcctgtgcagcctctggattcagtttcagtaaatatggcatgtcttgggttcgccagactccagacaagaggctggagtgggtcgcaaccattagtagtagtgggagtcgcacctactatccagacagtgtgaagggccaattcaccatctccagagacaatgccaagaacaccctgtacctgcaaatgagcagtctgaagtctgaggacacagccatgtattactgttcaattagctgggacggtgctatggactactggggtcaagggacctcagtcaccgtctcctcaggtggtggtggtagcggcggcggcggctctggtggtggtggatccgatgttttgatgacccaaactccactctccctgcctgtcagtcttggagatcaagcctccatctcttgcaaatctagtcagagcattgtacatagtaatggaaacacctatttagaatggtacctgcagaaaccaggccagtctccaaagctcctggtctacaaagtttccaatcgattttctggggtcccagacaggttcagtggcagtggatcagggacagatttcacactcaagatcagcagagtggaggctgaggatctgggaacttattactgctttcaaggttcacttgttccttgggcgttcggtggaggcaccaagctggaaatcaaatacccatacgatgttccagattacgcttagtgacctgaggatgatctttttccctctgccaaaaattatggggacatcatgaagccccttgagcatctgacttctggctaataaaggaaatttattttcattgcaatagtgtgttggaattttttgtgtctctcactcggcctaggtagataagtagcatggcgggttaatcattaactacaaggaacccctagtgatggagttggccactccctctctgcgcgctcgctcgctcactgaggccgggcgaccaaaggtcgcccgacgcccgggctttgcccgggcggcctcagtgagcgagcgagcgcgcag

SEQ ID NO: 2190 - DNA, 3100 bp, Artificial Sequence
  source: /note="Description of Artificial Sequence: Synthetic polynucleotide"
ctgcgcgctcgctcgctcactgaggccgcccgggcaaagcccgggcgtcgggcgacctttggtcgcccggcctcagtgagcgagcgagcgcgcagagagggagtggccaactccatcactaggggttccttgtagttaatgattaacccgccatgctacttatctaccagggtaatggggatcctctagaactatagctagtcgacataacgcgtctagttattaatagtaatcaattacggggtcattagttcatagcccatatatggagttccgcgttacataacttacggtaaatggcccgcctggctgaccgcccaacgacccccgcccattgacgtcaataatgacgtatgttcccatagtaacgccaatagggactttccattgacgtcaatgggtggagtatttacggtaaactgcccacttggcagtacatcaagtgtatcatatgccaagtacgccccctattgacgtcaatgacggtaaatggcccgcctggcattatgcccagtacatgaccttatgggactttcctacttggcagtacatctacgtattagtcatcgctattaccatggtcgaggtgagccccacgttctgcttcactctccccatctcccccccctccccacccccaattttgtatttatttattttttaattattttgtgcagcgatgggggcggggggggggggggggcgcgcgccaggcggggcggggcggggcgaggggcggggcggggcgaggcggagaggtgcggcggcagccaatcagagcggcgcgctccgaaagtttccttttatggcgaggcggcggcggcggcggccctataaaaagcgaagcgcgcggcgggcgggagtcgctgcgcgctgccttcgccccgtgccccgctccgccgccgcctcgcgccgcccgccccggctctgactgaccgcgttactcccacaggtgagcgggcgggacggcccttctcctccgggctgtaattagcgcttggtttaatgacggcttgtttcttttctgtggctgcgtgaaagccttgaggggctccgggagggccctttgtgcggggggagcggctcggggggtgcgtgcgtgtgtgtgtgcgtggggagcgccgcgtgcggctccgcgctgcccggcggctgtgagcgctgcgggcgcggcgcggggctttgtgcgctccgcagtgtgcgcgaggggagcgcggccgggggcggtgccccgcggtgcggggggggctgcgaggggaacaaaggctgcgtgcggggtgtgtgcgtgggggggtgagcagggggtgtgggcgcgtcggtcgggctgcaaccccccctgcacccccctccccgagttgctgagcacggcccggcttcgggtgcggggctccgtacggggcgtggcgcggggctcgccgtgccgggcggggggtggcggcaggtgggggtgccgggcggggcggggccgcctcgggccggggagggctcgggggaggggcgcggcggcccccggagcgccggcggctgtcgaggcgcggcgagccgcagccattgccttttatggtaatcgtgcgagagggcgcagggacttcctttgtcccaaatctgtgcggagccgaaatctgggaggcgccgccgcaccccctctagcgggcgcggggcgaagcggtgcggcgccggcaggaaggaaatgggcggggagggccttcgtgcgtcgccgcgccgccgtccccttctccctctccagcctcggggctgtccgcggggggacggctgccttcgggggggacggggcagggcggggttcggcttctggcgtgtgaccggcggctctagagcctctgctaaccatgttcatgccttcttctttttcctacagctcctgggcaacgtgctggttattgtgctgtctcatcattttggcaaagaattcgggattcgaaccggtgccgccaccatgaacttcgggctcagcttgattttccttgtccttgttttaaaaggtgtccagtgtgaggttcatctggtggagtctgggggagccttagtgaagcctggagggtccctgaaactctcctgtgcagcctctggattcagtttcagtaaatatggcatgtcttgggttcgccagactccagacaagaggctggagtgggtcgcaaccattagtagtagtgggagtcgcacctactatccagacagtgtgaagggccaattcaccatctccagagacaatgccaagaacaccctgtacctgcaaatgagcagtctgaagtctgaggacacagccatgtattactgttcaattagctgggacggtgctatggactactggggtcaagggacctcagtcaccgtctcctcaggtggtggtggtagcggcggcggcggctctggtggtggtggatccggtggtggtggatccgatgttttgatgacccaaactccactctccctgcctgtcagtcttggagatcaagcctccatctcttgcaaatctagtcagagcattgtacatagtaatggaaacacctatttagaatggtacctgcagaaaccaggccagtctccaaagctcctggtctacaaagtttccaatcgattttctggggtcccagacaggttcagtggcagtggatcagggacagatttcacactcaagatcagcagagtggaggctgaggatctgggaacttattactgctttcaaggttcacttgttccttgggcgttcggtggaggcaccaagctggaaatcaaatacccatacgatgttccagattacgcttagtgacctgaggatgatctttttccctctgccaaaaattatggggacatcatgaagccccttgagcatctgacttctggctaataaaggaaatttattttcattgcaatagtgtgttggaattttttgtgtctctcactcggcctaggtagataagtagcatggcgggttaatcattaactacaaggaacccctagtgatggagttggccactccctctctgcgcgctcgctcgctcactgaggccgggcgaccaaaggtcgcccgacgcccgggctttgcccgggcggcctcagtgagcgagcgagcgcgcag

SEQ ID NO: 2191 - DNA, 3115 bp, Artificial Sequence
  source: /note="Description of Artificial Sequence: Synthetic polynucleotide"
ctgcgcgctcgctcgctcactgaggccgcccgggcaaagcccgggcgtcgggcgacctttggtcgcccggcctcagtgagcgagcgagcgcgcagagagggagtggccaactccatcactaggggttccttgtagttaatgattaacccgccatgctacttatctaccagggtaatggggatcctctagaactatagctagtcgacataacgcgtctagttattaatagtaatcaattacggggtcattagttcatagcccatatatggagttccgcgttacataacttacggtaaatggcccgcctggctgaccgcccaacgacccccgcccattgacgtcaataatgacgtatgttcccatagtaacgccaatagggactttccattgacgtcaatgggtggagtatttacggtaaactgcccacttggcagtacatcaagtgtatcatatgccaagtacgccccctattgacgtcaatgacggtaaatggcccgcctggcattatgcccagtacatgaccttatgggactttcctacttggcagtacatctacgtattagtcatcgctattaccatggtcgaggtgagccccacgttctgcttcactctccccatctcccccccctccccacccccaattttgtatttatttattttttaattattttgtgcagcgatgggggcggggggggggggggggcgcgcgccaggcggggcggggcggggcgaggggcggggcggggcgaggcggagaggtgcggcggcagccaatcagagcggcgcgctccgaaagtttccttttatggcgaggcggcggcggcggcggccctataaaaagcgaagcgcgcggcgggcgggagtcgctgcgcgctgccttcgccccgtgccccgctccgccgccgcctcgcgccgcccgccccggctctgactgaccgcgttactcccacaggtgagcgggcgggacggcccttctcctccgggctgtaattagcgcttggtttaatgacggcttgtttcttttctgtggctgcgtgaaagccttgaggggctccgggagggccctttgtgcggggggagcggctcggggggtgcgtgcgtgtgtgtgtgcgtggggagcgccgcgtgcggctccgcgctgcccggcggctgtgagcgctgcgggcgcggcgcggggctttgtgcgctccgcagtgtgcgcgaggggagcgcggccgggggcggtgccccgcggtgcggggggggctgcgaggggaacaaaggctgcgtgcggggtgtgtgcgtgggggggtgagcagggggtgtgggcgcgtcggtcgggctgcaaccccccctgcacccccctccccgagttgctgagcacggcccggcttcgggtgcggggctccgtacggggcgtggcgcggggctcgccgtgccgggcggggggtggcggcaggtgggggtgccgggcggggcggggccgcctcgggccggggagggctcgggggaggggcgcggcggcccccggagcgccggcggctgtcgaggcgcggcgagccgcagccattgccttttatggtaatcgtgcgagagggcgcagggacttcctttgtcccaaatctgtgcggagccgaaatctgggaggcgccgccgcaccccctctagcgggcgcggggcgaagcggtgcggcgccggcaggaaggaaatgggcggggagggccttcgtgcgtcgccgcgccgccgtccccttctccctctccagcctcggggctgtccgcggggggacggctgccttcgggggggacggggcagggcggggttcggcttctggcgtgtgaccggcggctctagagcctctgctaaccatgttcatgccttcttctttttcctacagctcctgggcaacgtgctggttattgtgctgtctcatcattttggcaaagaattcgggattcgaaccggtgccgccaccatgaacttcgggctcagcttgattttccttgtccttgttttaaaaggtgtccagtgtgaggttcatctggtggagtctgggggagccttagtgaagcctggagggtccctgaaactctcctgtgcagcctctggattcagtttcagtaaatatggcatgtcttgggttcgccagactccagacaagaggctggagtgggtcgcaaccattagtagtagtgggagtcgcacctactatccagacagtgtgaagggccaattcaccatctccagagacaatgccaagaacaccctgtacctgcaaatgagcagtctgaagtctgaggacacagccatgtattactgttcaattagctgggacggtgctatggactactggggtcaagggacctcagtcaccgtctcctcaggtggtggtggtagcggcggcggcggctctggtggtggtggatccggtggtggtggatccggtggtggtggatccgatgttttgatgacccaaactccactctccctgcctgtcagtcttggagatcaagcctccatctcttgcaaatctagtcagagcattgtacatagtaatggaaacacctatttagaatggtacctgcagaaaccaggccagtctccaaagctcctggtctacaaagtttccaatcgattttctggggtcccagacaggttcagtggcagtggatcagggacagatttcacactcaagatcagcagagtggaggctgaggatctgggaacttattactgctttcaaggttcacttgttccttgggcgttcggtggaggcaccaagctggaaatcaaatacccatacgatgttccagattacgcttagtgacctgaggatgatctttttccctctgccaaaaattatggggacatcatgaagccccttgagcatctgacttctggctaataaaggaaatttattttcattgcaatagtgtgttggaattttttgtgtctctcactcggcctaggtagataagtagcatggcgggttaatcattaactacaaggaacccctagtgatggagttggccactccctctctgcgcgctcgctcgctcactgaggccgggcgaccaaaggtcgcccgacgcccgggctttgcccgggcggcctcagtgagcgagcgagcgcgcag

SEQ ID NO: 2192 - DNA, 3130 bp, Artificial Sequence
  source: /note="Description of Artificial Sequence: Synthetic polynucleotide"
ctgcgcgctcgctcgctcactgaggccgcccgggcaaagcccgggcgtcgggcgacctttggtcgcccggcctcagtgagcgagcgagcgcgcagagagggagtggccaactccatcactaggggttccttgtagttaatgattaacccgccatgctacttatctaccagggtaatggggatcctctagaactatagctagtcgacataacgcgtctagttattaatagtaatcaattacggggtcattagttcatagcccatatatggagttccgcgttacataacttacggtaaatggcccgcctggctgaccgcccaacgacccccgcccattgacgtcaataatgacgtatgttcccatagtaacgccaatagggactttccattgacgtcaatgggtggagtatttacggtaaactgcccacttggcagtacatcaagtgtatcatatgccaagtacgccccctattgacgtcaatgacggtaaatggcccgcctggcattatgcccagtacatgaccttatgggactttcctacttggcagtacatctacgtattagtcatcgctattaccatggtcgaggtgagccccacgttctgcttcactctccccatctcccccccctccccacccccaattttgtatttatttattttttaattattttgtgcagcgatgggggcggggggggggggggggcgcgcgccaggcggggcggggcggggcgaggggcggggcggggcgaggcggagaggtgcggcggcagccaatcagagcggcgcgctccgaaagtttccttttatggcgaggcggcggcggcggcggccctataaaaagcgaagcgcgcggcgggcgggagtcgctgcgcgctgccttcgccccgtgccccgctccgccgccgcctcgcgccgcccgccccggctctgactgaccgcgttactcccacaggtgagcgggcgggacggcccttctcctccgggctgtaattagcgcttggtttaatgacggcttgtttcttttctgtggctgcgtgaaagccttgaggggctccgggagggccctttgtgcggggggagcggctcggggggtgcgtgcgtgtgtgtgtgcgtggggagcgccgcgtgcggctccgcgctgcccggcggctgtgagcgctgcgggcgcggcgcggggctttgtgcgctccgcagtgtgcgcgaggggagcgcggccgggggcggtgccccgcggtgcggggggggctgcgaggggaacaaaggctgcgtgcggggtgtgtgcgtgggggggtgagcagggggtgtgggcgcgtcggtcgggctgcaaccccccctgcacccccctccccgagttgctgagcacggcccggcttcgggtgcggggctccgtacggggcgtggcgcggggctcgccgtgccgggcggggggtggcggcaggtgggggtgccgggcggggcggggccgcctcgggccggggagggctcgggggaggggcgcggcggcccccggagcgccggcggctgtcgaggcgcggcgagccgcagccattgccttttatggtaatcgtgcgagagggcgcagggacttcctttgtcccaaatctgtgcggagccgaaatctgggaggcgccgccgcaccccctctagcgggcgcggggcgaagcggtgcggcgccggcaggaaggaaatgggcggggagggccttcgtgcgtcgccgcgccgccgtccccttctccctctccagcctcggggctgtccgcggggggacggctgccttcgggggggacggggcagggcggggttcggcttctggcgtgtgaccggcggctctagagcctctgctaaccatgttcatgccttcttctttttcctacagctcctgggcaacgtgctggttattgtgctgtctcatcattttggcaaagaattcgggattcgaaccggtgccgccaccatgaacttcgggctcagcttgattttccttgtccttgttttaaaaggtgtccagtgtgaggttcatctggtggagtctgggggagccttagtgaagcctggagggtccctgaaactctcctgtgcagcctctggattcagtttcagtaaatatggcatgtcttgggttcgccagactccagacaagaggctggagtgggtcgcaaccattagtagtagtgggagtcgcacctactatccagacagtgtgaagggccaattcaccatctccagagacaatgccaagaacaccctgtacctgcaaatgagcagtctgaagtctgaggacacagccatgtattactgttcaattagctgggacggtgctatggactactggggtcaagggacctcagtcaccgtctcctcaggtggtggtggtagcggcggcggcggctctggtggtggtggatccggtggtggtggatccggtggtggtggatccggtggtggtggatccgatgttttgatgacccaaactccactctccctgcctgtcagtcttggagatcaagcctccatctcttgcaaatctagtcagagcattgtacatagtaatggaaacacctatttagaatggtacctgcagaaaccaggccagtctccaaagctcctggtctacaaagtttccaatcgattttctggggtcccagacaggttcagtggcagtggatcagggacagatttcacactcaagatcagcagagtggaggctgaggatctgggaacttattactgctttcaaggttcacttgttccttgggcgttcggtggaggcaccaagctggaaatcaaatacccatacgatgttccagattacgcttagtgacctgaggatgatctttttccctctgccaaaaattatggggacatcatgaagccccttgagcatctgacttctggctaataaaggaaatttattttcattgcaatagtgtgttggaattttttgtgtctctcactcggcctaggtagataagtagcatggcgggttaatcattaactacaaggaacccctagtgatggagttggccactccctctctgcgcgctcgctcgctcactgaggccgggcgaccaaaggtcgcccgacgcccgggctttgcccgggcggcctcagtgagcgagcgagcgcgcag

SEQ ID NO: 2193 - DNA, 3160 bp, Artificial Sequence
  source: /note="Description of Artificial Sequence: Synthetic polynucleotide"
ctgcgcgctcgctcgctcactgaggccgcccgggcaaagcccgggcgtcgggcgacctttggtcgcccggcctcagtgagcgagcgagcgcgcagagagggagtggccaactccatcactaggggttccttgtagttaatgattaacccgccatgctacttatctaccagggtaatggggatcctctagaactatagctagtcgacataacgcgtctagttattaatagtaatcaattacggggtcattagttcatagcccatatatggagttccgcgttacataacttacggtaaatggcccgcctggctgaccgcccaacgacccccgcccattgacgtcaataatgacgtatgttcccatagtaacgccaatagggactttccattgacgtcaatgggtggagtatttacggtaaactgcccacttggcagtacatcaagtgtatcatatgccaagtacgccccctattgacgtcaatgacggtaaatggcccgcctggcattatgcccagtacatgaccttatgggactttcctacttggcagtacatctacgtattagtcatcgctattaccatggtcgaggtgagccccacgttctgcttcactctccccatctcccccccctccccacccccaattttgtatttatttattttttaattattttgtgcagcgatgggggcggggggggggggggggcgcgcgccaggcggggcggggcggggcgaggggcggggcggggcgaggcggagaggtgcggcggcagccaatcagagcggcgcgctccgaaagtttccttttatggcgaggcggcggcggcggcggccctataaaaagcgaagcgcgcggcgggcgggagtcgctgcgcgctgccttcgccccgtgccccgctccgccgccgcctcgcgccgcccgccccggctctgactgaccgcgttactcccacaggtgagcgggcgggacggcccttctcctccgggctgtaattagcgcttggtttaatgacggcttgtttcttttctgtggctgcgtgaaagccttgaggggctccgggagggccctttgtgcggggggagcggctcggggggtgcgtgcgtgtgtgtgtgcgtggggagcgccgcgtgcggctccgcgctgcccggcggctgtgagcgctgcgggcgcggcgcggggctttgtgcgctccgcagtgtgcgcgaggggagcgcggccgggggcggtgccccgcggtgcggggggggctgcgaggggaacaaaggctgcgtgcggggtgtgtgcgtgggggggtgagcagggggtgtgggcgcgtcggtcgggctgcaaccccccctgcacccccctccccgagttgctgagcacggcccggcttcgggtgcggggctccgtacggggcgtggcgcggggctcgccgtgccgggcggggggtggcggcaggtgggggtgccgggcggggcggggccgcctcgggccggggagggctcgggggaggggcgcggcggcccccggagcgccggcggctgtcgaggcgcggcgagccgcagccattgccttttatggtaatcgtgcgagagggcgcagggacttcctttgtcccaaatctgtgcggagccgaaatctgggaggcgccgccgcaccccctctagcgggcgcggggcgaagcggtgcggcgccggcaggaaggaaatgggcggggagggccttcgtgcgtcgccgcgccgccgtccccttctccctctccagcctcggggctgtccgcggggggacggctgccttcgggggggacggggcagggcggggttcggcttctggcgtgtgaccggcggctctagagcctctgctaaccatgttcatgccttcttctttttcctacagctcctgggcaacgtgctggttattgtgctgtctcatcattttggcaaagaattcgggattcgaaccggtgccgccaccatgaacttcgggctcagcttgattttccttgtccttgttttaaaaggtgtccagtgtgaggttcatctggtggagtctgggggagccttagtgaagcctggagggtccctgaaactctcctgtgcagcctctggattcagtttcagtaaatatggcatgtcttgggttcgccagactccagacaagaggctggagtgggtcgcaaccattagtagtagtgggagtcgcacctactatccagacagtgtgaagggccaattcaccatctccagagacaatgccaagaacaccctgtacctgcaaatgagcagtctgaagtctgaggacacagccatgtattactgttcaattagctgggacggtgctatggactactggggtcaagggacctcagtcaccgtctcctcaggtggtggtggtagcggcggcggcggctctggtggtggtggatccggtggtggtggatccggtggtggtggatccggtggtggtggatccggtggtggtggatccggtggtggtggatccgatgttttgatgacccaaactccactctccctgcctgtcagtcttggagatcaagcctccatctcttgcaaatctagtcagagcattgtacatagtaatggaaacacctatttagaatggtacctgcagaaaccaggccagtctccaaagctcctggtctacaaagtttccaatcgattttctggggtcccagacaggttcagtggcagtggatcagggacagatttcacactcaagatcagcagagtggaggctgaggatctgggaacttattactgctttcaaggttcacttgttccttgggcgttcggtggaggcaccaagctggaaatcaaatacccatacgatgttccagattacgcttagtgacctgaggatgatctttttccctctgccaaaaattatggggacatcatgaagccccttgagcatctgacttctggctaataaaggaaatttattttcattgcaatagtgtgttggaattttttgtgtctctcactcggcctaggtagataagtagcatggcgggttaatcattaactacaaggaacccctagtgatggagttggccactccctctctgcgcgctcgctcgctcactgaggccgggcgaccaaaggtcgcccgacgcccgggctttgcccgggcggcctcagtgagcgagcgagcgcgcag

SEQ ID NO: 2194 - DNA, 2569 bp, Artificial Sequence
  source: /note="Description of Artificial Sequence: Synthetic polynucleotide"
ctgcgcgctcgctcgctcactgaggccgcccgggcaaagcccgggcgtcgggcgacctttggtcgcccggcctcagtgagcgagcgagcgcgcagagagggagtggccaactccatcactaggggttccttgtagttaatgattaacccgccatgctacttatctaccagggtaatggggatcctctagaactatagctagtcgacattgattattgactagttattaatagtaatcaattacggggtcattagttcatagcccatatatggagttccgcgttacataacttacggtaaatggcccgcctggctgaccgcccaacgacccccgcccattgacgtcaataatgacgtatgttcccatagtaacgccaatagggactttccattgacgtcaatgggtggagtatttacggtaaactgcccacttggcagtacatcaagtgtatcatatgccaagtacgccccctattgacgtcaatgacggtaaatggcccgcctggcattatgcccagtacatgaccttatgggactttcctacttggcagtacatctacgtattagtcatcgctattaccatgtcgaggccacgttctgcttcactctccccatctcccccccctccccacccccaattttgtatttatttattttttaattattttgtgcagcgatgggggcggggggggggggcgcgcgccaggcggggcggggcggggcgaggggcggggcggggcgaggcggagaggtgcggcggcagccaatcagagcggcgcgctccgaaagtttccttttatggcgaggcggcggcggcggcggccctataaaaagcgaagcgcgcggcgggcgggagcaagcttcgtttagtgaaccgtcagatcgcctggagacgccatccacgctgttttgacctccatagaagacaccgggaccgatccagcctccgcggattcgaatcccggccgggaacggtgcattggaacgcggattccccgtgccaagagtgacgtaagtaccgcctatagagtctataggcccacaaaaaatgctttcttcttttaatatacttttttgtttatcttatttctaatactttccctaatctctttctttcagggcaataatgatacaatgtatcatgcctctttgcaccattctaaagaataacagtgataatttctgggttaaggcaatagcaatatttctgcatataaatatttctgcatataaattgtaactgatgtaagaggtttcatattgctaatagcagctacaatccagctaccattctgcttttattttatggttgggataaggctggattattctgagtccaagctaggcccttttgctaatcatgttcatacctcttatcttcctcccacagctcctgggcaacgtgctggtctgtgtgctggcccatcactttggcaaagaattgggattcgaaccggtgccgccaccatgaagttgcctgttaggctgttggtgctgatgttctggattcctgcttccagcagtgatgttttgatgacccaaactccactctccctgcctgtcagtcttggagatcaagcctccatctcttgcaaatctagtcagagcattgtacatagtaatggaaacacctatttagaatggtacctgcagaaaccaggccagtctccaaagctcctggtctacaaagtttccaatcgattttctggggtcccagacaggttcagtggcagtggatcagggacagatttcacactcaagatcagcagagtggaggctgaggatctgggaacttattactgctttcaaggttcacttgttccttgggcgttcggtggaggcaccaagctggaaatcaaaggtggtggtggatccgaggttcatctggtggagtctgggggagccttagtgaagcctggagggtccctgaaactctcctgtgcagcctctggattcagtttcagtaaatatggcatgtcttgggttcgccagactccagacaagaggctggagtgggtcgcaaccattagtagtagtgggagtcgcacctactatccagacagtgtgaagggccaattcaccatctccagagacaatgccaagaacaccctgtacctgcaaatgagcagtctgaagtctgaggacacagccatgtattactgttcaattagctgggacggtgctatggactactggggtcaagggacctcagtcaccgtctcctcatacccatacgatgttccagattacgcttagtgacctgaggatccgatctttttccctctgccaaaaattatggggacatcatgaagccccttgagcatctgacttctggctaataaaggaaatttattttcattgcaatagtgtgttggaattttttgtgtctctcactcggcctaggtagataagtagcatggcgggttaatcattaactacaaggaacccctagtgatggagttggccactccctctctgcgcgctcgctcgctcactgaggccgggcgaccaaaggtcgcccgacgcccgggctttgcccgggcggcctcagtgagcgagcgagcgcgcag

SEQ ID NO: 2195 - DNA, 2584 bp, Artificial Sequence
  source: /note="Description of Artificial Sequence: Synthetic polynucleotide"
ctgcgcgctcgctcgctcactgaggccgcccgggcaaagcccgggcgtcgggcgacctttggtcgcccggcctcagtgagcgagcgagcgcgcagagagggagtggccaactccatcactaggggttccttgtagttaatgattaacccgccatgctacttatctaccagggtaatggggatcctctagaactatagctagtcgacattgattattgactagttattaatagtaatcaattacggggtcattagttcatagcccatatatggagttccgcgttacataacttacggtaaatggcccgcctggctgaccgcccaacgacccccgcccattgacgtcaataatgacgtatgttcccatagtaacgccaatagggactttccattgacgtcaatgggtggagtatttacggtaaactgcccacttggcagtacatcaagtgtatcatatgccaagtacgccccctattgacgtcaatgacggtaaatggcccgcctggcattatgcccagtacatgaccttatgggactttcctacttggcagtacatctacgtattagtcatcgctattaccatgtcgaggccacgttctgcttcactctccccatctcccccccctccccacccccaattttgtatttatttattttttaattattttgtgcagcgatgggggcggggggggggggcgcgcgccaggcggggcggggcggggcgaggggcggggcggggcgaggcggagaggtgcggcggcagccaatcagagcggcgcgctccgaaagtttccttttatggcgaggcggcggcggcggcggccctataaaaagcgaagcgcgcggcgggcgggagcaagcttcgtttagtgaaccgtcagatcgcctggagacgccatccacgctgttttgacctccatagaagacaccgggaccgatccagcctccgcggattcgaatcccggccgggaacggtgcattggaacgcggattccccgtgccaagagtgacgtaagtaccgcctatagagtctataggcccacaaaaaatgctttcttcttttaatatacttttttgtttatcttatttctaatactttccctaatctctttctttcagggcaataatgatacaatgtatcatgcctctttgcaccattctaaagaataacagtgataatttctgggttaaggcaatagcaatatttctgcatataaatatttctgcatataaattgtaactgatgtaagaggtttcatattgctaatagcagctacaatccagctaccattctgcttttattttatggttgggataaggctggattattctgagtccaagctaggcccttttgctaatcatgttcatacctcttatcttcctcccacagctcctgggcaacgtgctggtctgtgtgctggcccatcactttggcaaagaattgggattcgaaccggtgccgccaccatgaagttgcctgttaggctgttggtgctgatgttctggattcctgcttccagcagtgatgttttgatgacccaaactccactctccctgcctgtcagtcttggagatcaagcctccatctcttgcaaatctagtcagagcattgtacatagtaatggaaacacctatttagaatggtacctgcagaaaccaggccagtctccaaagctcctggtctacaaagtttccaatcgattttctggggtcccagacaggttcagtggcagtggatcagggacagatttcacactcaagatcagcagagtggaggctgaggatctgggaacttattactgctttcaaggttcacttgttccttgggcgttcggtggaggcaccaagctggaaatcaaaggtggtggtggatccggtggtggtggatccgaggttcatctggtggagtctgggggagccttagtgaagcctggagggtccctgaaactctcctgtgcagcctctggattcagtttcagtaaatatggcatgtcttgggttcgccagactccagacaagaggctggagtgggtcgcaaccattagtagtagtgggagtcgcacctactatccagacagtgtgaagggccaattcaccatctccagagacaatgccaagaacaccctgtacctgcaaatgagcagtctgaagtctgaggacacagccatgtattactgttcaattagctgggacggtgctatggactactggggtcaagggacctcagtcaccgtctcctcatacccatacgatgttccagattacgcttagtgacctgaggatccgatctttttccctctgccaaaaattatggggacatcatgaagccccttgagcatctgacttctggctaataaaggaaatttattttcattgcaatagtgtgttggaattttttgtgtctctcactcggcctaggtagataagtagcatggcgggttaatcattaactacaaggaacccctagtgatggagttggccactccctctctgcgcgctcgctcgctcactgaggccgggcgaccaaaggtcgcccgacgcccgggctttgcccgggcggcctcagtgagcgagcgagcgcgcag

SEQ ID NO: 2196 - DNA, 2599 bp, Artificial Sequence
  source: /note="Description of Artificial Sequence: Synthetic polynucleotide"
ctgcgcgctcgctcgctcactgaggccgcccgggcaaagcccgggcgtcgggcgacctttggtcgcccggcctcagtgagcgagcgagcgcgcagagagggagtggccaactccatcactaggggttccttgtagttaatgattaacccgccatgctacttatctaccagggtaatggggatcctctagaactatagctagtcgacattgattattgactagttattaatagtaatcaattacggggtcattagttcatagcccatatatggagttccgcgttacataacttacggtaaatggcccgcctggctgaccgcccaacgacccccgcccattgacgtcaataatgacgtatgttcccatagtaacgccaatagggactttccattgacgtcaatgggtggagtatttacggtaaactgcccacttggcagtacatcaagtgtatcatatgccaagtacgccccctattgacgtcaatgacggtaaatggcccgcctggcattatgcccagtacatgaccttatgggactttcctacttggcagtacatctacgtattagtcatcgctattaccatgtcgaggccacgttctgcttcactctccccatctcccccccctccccacccccaattttgtatttatttattttttaattattttgtgcagcgatgggggcggggggggggggcgcgcgccaggcggggcggggcggggcgaggggcggggcggggcgaggcggagaggtgcggcggcagccaatcagagcggcgcgctccgaaagtttccttttatggcgaggcggcggcggcggcggccctataaaaagcgaagcgcgcggcgggcgggagcaagcttcgtttagtgaaccgtcagatcgcctggagacgccatccacgctgttttgacctccatagaagacaccgggaccgatccagcctccgcggattcgaatcccggccgggaacggtgcattggaacgcggattccccgtgccaagagtgacgtaagtaccgcctatagagtctataggcccacaaaaaatgctttcttcttttaatatacttttttgtttatcttatttctaatactttccctaatctctttctttcagggcaataatgatacaatgtatcatgcctctttgcaccattctaaagaataacagtgataatttctgggttaaggcaatagcaatatttctgcatataaatatttctgcatataaattgtaactgatgtaagaggtttcatattgctaatagcagctacaatccagctaccattctgcttttattttatggttgggataaggctggattattctgagtccaagctaggcccttttgctaatcatgttcatacctcttatcttcctcccacagctcctgggcaacgtgctggtctgtgtgctggcccatcactttggcaaagaattgggattcgaaccggtgccgccaccatgaagttgcctgttaggctgttggtgctgatgttctggattcctgcttccagcagtgatgttttgatgacccaaactccactctccctgcctgtcagtcttggagatcaagcctccatctcttgcaaatctagtcagagcattgtacatagtaatggaaacacctatttagaatggtacctgcagaaaccaggccagtctccaaagctcctggtctacaaagtttccaatcgattttctggggtcccagacaggttcagtggcagtggatcagggacagatttcacactcaagatcagcagagtggaggctgaggatctgggaacttattactgctttcaaggttcacttgttccttgggcgttcggtggaggcaccaagctggaaatcaaaggtggtggtggtagcggcggcggcggctctggtggtggtggatccgaggttcatctggtggagtctgggggagccttagtgaagcctggagggtccctgaaactctcctgtgcagcctctggattcagtttcagtaaatatggcatgtcttgggttcgccagactccagacaagaggctggagtgggtcgcaaccattagtagtagtgggagtcgcacctactatccagacagtgtgaagggccaattcaccatctccagagacaatgccaagaacaccctgtacctgcaaatgagcagtctgaagtctgaggacacagccatgtattactgttcaattagctgggacggtgctatggactactggggtcaagggacctcagtcaccgtctcctcatacccatacgatgttccagattacgcttagtgacctgaggatccgatctttttccctctgccaaaaattatggggacatcatgaagccccttgagcatctgacttctggctaataaaggaaatttattttcattgcaatagtgtgttggaattttttgtgtctctcactcggcctaggtagataagtagcatggcgggttaatcattaactacaaggaacccctagtgatggagttggccactccctctctgcgcgctcgctcgctcactgaggccgggcgaccaaaggtcgcccgacgcccgggctttgcccgggcggcctcagtgagcgagcgagcgcgcag

SEQ ID NO: 2197 - DNA, 2614 bp, Artificial Sequence
  source: /note="Description of Artificial Sequence: Synthetic polynucleotide"
ctgcgcgctcgctcgctcactgaggccgcccgggcaaagcccgggcgtcgggcgacctttggtcgcccggcctcagtgagcgagcgagcgcgcagagagggagtggccaactccatcactaggggttccttgtagttaatgattaacccgccatgctacttatctaccagggtaatggggatcctctagaactatagctagtcgacattgattattgactagttattaatagtaatcaattacggggtcattagttcatagcccatatatggagttccgcgttacataacttacggtaaatggcccgcctggctgaccgcccaacgacccccgcccattgacgtcaataatgacgtatgttcccatagtaacgccaatagggactttccattgacgtcaatgggtggagtatttacggtaaactgcccacttggcagtacatcaagtgtatcatatgccaagtacgccccctattgacgtcaatgacggtaaatggcccgcctggcattatgcccagtacatgaccttatgggactttcctacttggcagtacatctacgtattagtcatcgctattaccatgtcgaggccacgttctgcttcactctccccatctcccccccctccccacccccaattttgtatttatttattttttaattattttgtgcagcgatgggggcggggggggggggcgcgcgccaggcggggcggggcggggcgaggggcggggcggggcgaggcggagaggtgcggcggcagccaatcagagcggcgcgctccgaaagtttccttttatggcgaggcggcggcggcggcggccctataaaaagcgaagcgcgcggcgggcgggagcaagcttcgtttagtgaaccgtcagatcgcctggagacgccatccacgctgttttgacctccatagaagacaccgggaccgatccagcctccgcggattcgaatcccggccgggaacggtgcattggaacgcggattccccgtgccaagagtgacgtaagtaccgcctatagagtctataggcccacaaaaaatgctttcttcttttaatatacttttttgtttatcttatttctaatactttccctaatctctttctttcagggcaataatgatacaatgtatcatgcctctttgcaccattctaaagaataacagtgataatttctgggttaaggcaatagcaatatttctgcatataaatatttctgcatataaattgtaactgatgtaagaggtttcatattgctaatagcagctacaatccagctaccattctgcttttattttatggttgggataaggctggattattctgagtccaagctaggcccttttgctaatcatgttcatacctcttatcttcctcccacagctcctgggcaacgtgctggtctgtgtgctggcccatcactttggcaaagaattgggattcgaaccggtgccgccaccatgaagttgcctgttaggctgttggtgctgatgttctggattcctgcttccagcagtgatgttttgatgacccaaactccactctccctgcctgtcagtcttggagatcaagcctccatctcttgcaaatctagtcagagcattgtacatagtaatggaaacacctatttagaatggtacctgcagaaaccaggccagtctccaaagctcctggtctacaaagtttccaatcgattttctggggtcccagacaggttcagtggcagtggatcagggacagatttcacactcaagatcagcagagtggaggctgaggatctgggaacttattactgctttcaaggttcacttgttccttgggcgttcggtggaggcaccaagctggaaatcaaaggtggtggtggtagcggcggcggcggctctggtggtggtggatccggtggtggtggatccgaggttcatctggtggagtctgggggagccttagtgaagcctggagggtccctgaaactctcctgtgcagcctctggattcagtttcagtaaatatggcatgtcttgggttcgccagactccagacaagaggctggagtgggtcgcaaccattagtagtagtgggagtcgcacctactatccagacagtgtgaagggccaattcaccatctccagagacaatgccaagaacaccctgtacctgcaaatgagcagtctgaagtctgaggacacagccatgtattactgttcaattagctgggacggtgctatggactactggggtcaagggacctcagtcaccgtctcctcatacccatacgatgttccagattacgcttagtgacctgaggatccgatctttttccctctgccaaaaattatggggacatcatgaagccccttgagcatctgacttctggctaataaaggaaatttattttcattgcaatagtgtgttggaattttttgtgtctctcactcggcctaggtagataagtagcatggcgggttaatcattaactacaaggaacccctagtgatggagttggccactccctctctgcgcgctcgctcgctcactgaggccgggcgaccaaaggtcgcccgacgcccgggctttgcccgggcggcctcagtgagcgagcgagcgcgcag

SEQ ID NO: 2198 - DNA, 2627 bp, Artificial Sequence
  source: /note="Description of Artificial Sequence: Synthetic polynucleotide"
ctgcgcgctcgctcgctcactgaggccgcccgggcaaagcccgggcgtcgggcgacctttggtcgcccggcctcagtgagcgagcgagcgcgcagagagggagtggccaactccatcactaggggttccttgtagttaatgattaacccgccatgctacttatctaccagggtaatggggatcctctagaactatagctagtcgacattgattattgactagttattaatagtaatcaattacggggtcattagttcatagcccatatatggagttccgcgttacataacttacggtaaatggcccgcctggctgaccgcccaacgacccccgcccattgacgtcaataatgacgtatgttcccatagtaacgccaatagggactttccattgacgtcaatgggtggagtatttacggtaaactgcccacttggcagtacatcaagtgtatcatatgccaagtacgccccctattgacgtcaatgacggtaaatggcccgcctggcattatgcccagtacatgaccttatgggactttcctacttggcagtacatctacgtattagtcatcgctattaccatgtcgaggccacgttctgcttcactctccccatctcccccccctccccacccccaattttgtatttatttattttttaattattttgtgcagcgatgggggcggggggggggggcgcgcgccaggcggggcggggcggggcgaggggcggggcggggcgaggcggagaggtgcggcggcagccaatcagagcggcgcgctccgaaagtttccttttatggcgaggcggcggcggcggcggccctataaaaagcgaagcgcgcggcgggcgggagcaagcttcgtttagtgaaccgtcagatcgcctggagacgccatccacgctgttttgacctccatagaagacaccgggaccgatccagcctccgcggattcgaatcccggccgggaacggtgcattggaacgcggattccccgtgccaagagtgacgtaagtaccgcctatagagtctataggcccacaaaaaatgctttcttcttttaatatacttttttgtttatcttatttctaatactttccctaatctctttctttcagggcaataatgatacaatgtatcatgcctctttgcaccattctaaagaataacagtgataatttctgggttaaggcaatagcaatatttctgcatataaatatttctgcatataaattgtaactgatgtaagaggtttcatattgctaatagcagctacaatccagctaccattctgcttttattttatggttgggataaggctggattattctgagtccaagctaggcccttttgctaatcatgttcatacctcttatcttcctcccacagctcctgggcaacgtgctggtctgtgtgctggcccatcactttggcaaagaattgggattcgaaccggtgccgccaccatgaagttgcctgttaggctgttggtgctgatgttctggattcctgcttccagcagtgatgttttgatgacccaaactccactctccctgcctgtcagtcttggagatcaagcctccatctcttgcaaatctagtcagagcattgtacatagtaatggaaacacctatttagaatggtacctgcagaaaccaggccagtctccaaagctcctggtctacaaagtttccaatcgattttctggggtcccagacaggttcagtggcagtggatcagggacagatttcacactcaagatcagcagagtggaggctgaggatctgggaacttattactgctttcaaggttcacttgttccttgggcgttcggtggaggcaccaagctggaaatcaaaggtggtggtggtagcggcggcggcggctctggtggtggtggatccggtggtggtggatccggtggtggtggatccgaggttcatctggtggagtctgggggagccttagtgaagcctggagggtccctgaaactctcctgtgcagcctctggattcagtttcagtaaatatggcatgtcttgggttcgccagactccagacaagaggctggagtgggtcgcaaccattagtagtagtgggagtcgcacctactatccagacagtgtgaagggccaattcaccatctccagagacaatgccaagaacaccctgtacctgcaaatgagcagtctgaagtctgaggacacagccatgtattactgttcaattagctgggacggtgctatggactactggggtcaagggacctcagtcaccgtctcctcatacccatacgatgttccagattacgcttagtgacctgaggatgatctttttccctctgccaaaaattatggggacatcatgaagccccttgagcatctgacttctggctaataaaggaaatttattttcattgcaatagtgtgttggaattttttgtgtctctcactcggcctaggtagataagtagcatggcgggttaatcattaactacaaggaacccctagtgatggagttggccactccctctctgcgcgctcgctcgctcactgaggccgggcgaccaaaggtcgcccgacgcccgggctttgcccgggcggcctcagtgagcgagcgagcgcgcag

SEQ ID NO: 2199 - DNA, 2642 bp, Artificial Sequence
  source: /note="Description of Artificial Sequence: Synthetic polynucleotide"
ctgcgcgctcgctcgctcactgaggccgcccgggcaaagcccgggcgtcgggcgacctttggtcgcccggcctcagtgagcgagcgagcgcgcagagagggagtggccaactccatcactaggggttccttgtagttaatgattaacccgccatgctacttatctaccagggtaatggggatcctctagaactatagctagtcgacattgattattgactagttattaatagtaatcaattacggggtcattagttcatagcccatatatggagttccgcgttacataacttacggtaaatggcccgcctggctgaccgcccaacgacccccgcccattgacgtcaataatgacgtatgttcccatagtaacgccaatagggactttccattgacgtcaatgggtggagtatttacggtaaactgcccacttggcagtacatcaagtgtatcatatgccaagtacgccccctattgacgtcaatgacggtaaatggcccgcctggcattatgcccagtacatgaccttatgggactttcctacttggcagtacatctacgtattagtcatcgctattaccatgtcgaggccacgttctgcttcactctccccatctcccccccctccccacccccaattttgtatttatttattttttaattattttgtgcagcgatgggggcggggggggggggcgcgcgccaggcggggcggggcggggcgaggggcggggcggggcgaggcggagaggtgcggcggcagccaatcagagcggcgcgctccgaaagtttccttttatggcgaggcggcggcggcggcggccctataaaaagcgaagcgcgcggcgggcgggagcaagcttcgtttagtgaaccgtcagatcgcctggagacgccatccacgctgttttgacctccatagaagacaccgggaccgatccagcctccgcggattcgaatcccggccgggaacggtgcattggaacgcggattccccgtgccaagagtgacgtaagtaccgcctatagagtctataggcccacaaaaaatgctttcttcttttaatatacttttttgtttatcttatttctaatactttccctaatctctttctttcagggcaataatgatacaatgtatcatgcctctttgcaccattctaaagaataacagtgataatttctgggttaaggcaatagcaatatttctgcatataaatatttctgcatataaattgtaactgatgtaagaggtttcatattgctaatagcagctacaatccagctaccattctgcttttattttatggttgggataaggctggattattctgagtccaagctaggcccttttgctaatcatgttcatacctcttatcttcctcccacagctcctgggcaacgtgctggtctgtgtgctggcccatcactttggcaaagaattgggattcgaaccggtgccgccaccatgaagttgcctgttaggctgttggtgctgatgttctggattcctgcttccagcagtgatgttttgatgacccaaactccactctccctgcctgtcagtcttggagatcaagcctccatctcttgcaaatctagtcagagcattgtacatagtaatggaaacacctatttagaatggtacctgcagaaaccaggccagtctccaaagctcctggtctacaaagtttccaatcgattttctggggtcccagacaggttcagtggcagtggatcagggacagatttcacactcaagatcagcagagtggaggctgaggatctgggaacttattactgctttcaaggttcacttgttccttgggcgttcggtggaggcaccaagctggaaatcaaaggtggtggtggtagcggcggcggcggctctggtggtggtggatccggtggtggtggatccggtggtggtggatccggtggtggtggatccgaggttcatctggtggagtctgggggagccttagtgaagcctggagggtccctgaaactctcctgtgcagcctctggattcagtttcagtaaatatggcatgtcttgggttcgccagactccagacaagaggctggagtgggtcgcaaccattagtagtagtgggagtcgcacctactatccagacagtgtgaagggccaattcaccatctccagagacaatgccaagaacaccctgtacctgcaaatgagcagtctgaagtctgaggacacagccatgtattactgttcaattagctgggacggtgctatggactactggggtcaagggacctcagtcaccgtctcctcatacccatacgatgttccagattacgcttagtgacctgaggatgatctttttccctctgccaaaaattatggggacatcatgaagccccttgagcatctgacttctggctaataaaggaaatttattttcattgcaatagtgtgttggaattttttgtgtctctcactcggcctaggtagataagtagcatggcgggttaatcattaactacaaggaacccctagtgatggagttggccactccctctctgcgcgctcgctcgctcactgaggccgggcgaccaaaggtcgcccgacgcccgggctttgcccgggcggcctcagtgagcgagcgagcgcgcag

SEQ ID NO: 2200 - DNA, 3055 bp, Artificial Sequence
  source: /note="Description of Artificial Sequence: Synthetic polynucleotide"
ctgcgcgctcgctcgctcactgaggccgcccgggcaaagcccgggcgtcgggcgacctttggtcgcccggcctcagtgagcgagcgagcgcgcagagagggagtggccaactccatcactaggggttccttgtagttaatgattaacccgccatgctacttatctaccagggtaatggggatcctctagaactatagctagtcgacataacgcgtctagttattaatagtaatcaattacggggtcattagttcatagcccatatatggagttccgcgttacataacttacggtaaatggcccgcctggctgaccgcccaacgacccccgcccattgacgtcaataatgacgtatgttcccatagtaacgccaatagggactttccattgacgtcaatgggtggagtatttacggtaaactgcccacttggcagtacatcaagtgtatcatatgccaagtacgccccctattgacgtcaatgacggtaaatggcccgcctggcattatgcccagtacatgaccttatgggactttcctacttggcagtacatctacgtattagtcatcgctattaccatggtcgaggtgagccccacgttctgcttcactctccccatctcccccccctccccacccccaattttgtatttatttattttttaattattttgtgcagcgatgggggcggggggggggggggggcgcgcgccaggcggggcggggcggggcgaggggcggggcggggcgaggcggagaggtgcggcggcagccaatcagagcggcgcgctccgaaagtttccttttatggcgaggcggcggcggcggcggccctataaaaagcgaagcgcgcggcgggcgggagtcgctgcgcgctgccttcgccccgtgccccgctccgccgccgcctcgcgccgcccgccccggctctgactgaccgcgttactcccacaggtgagcgggcgggacggcccttctcctccgggctgtaattagcgcttggtttaatgacggcttgtttcttttctgtggctgcgtgaaagccttgaggggctccgggagggccctttgtgcggggggagcggctcggggggtgcgtgcgtgtgtgtgtgcgtggggagcgccgcgtgcggctccgcgctgcccggcggctgtgagcgctgcgggcgcggcgcggggctttgtgcgctccgcagtgtgcgcgaggggagcgcggccgggggcggtgccccgcggtgcggggggggctgcgaggggaacaaaggctgcgtgcggggtgtgtgcgtgggggggtgagcagggggtgtgggcgcgtcggtcgggctgcaaccccccctgcacccccctccccgagttgctgagcacggcccggcttcgggtgcggggctccgtacggggcgtggcgcggggctcgccgtgccgggcggggggtggcggcaggtgggggtgccgggcggggcggggccgcctcgggccggggagggctcgggggaggggcgcggcggcccccggagcgccggcggctgtcgaggcgcggcgagccgcagccattgccttttatggtaatcgtgcgagagggcgcagggacttcctttgtcccaaatctgtgcggagccgaaatctgggaggcgccgccgcaccccctctagcgggcgcggggcgaagcggtgcggcgccggcaggaaggaaatgggcggggagggccttcgtgcgtcgccgcgccgccgtccccttctccctctccagcctcggggctgtccgcggggggacggctgccttcgggggggacggggcagggcggggttcggcttctggcgtgtgaccggcggctctagagcctctgctaaccatgttcatgccttcttctttttcctacagctcctgggcaacgtgctggttattgtgctgtctcatcattttggcaaagaattcgggattcgaaccggtgccgccaccatgaagttgcctgttaggctgttggtgctgatgttctggattcctgcttccagcagtgatgttttgatgacccaaactccactctccctgcctgtcagtcttggagatcaagcctccatctcttgcaaatctagtcagagcattgtacatagtaatggaaacacctatttagaatggtacctgcagaaaccaggccagtctccaaagctcctggtctacaaagtttccaatcgattttctggggtcccagacaggttcagtggcagtggatcagggacagatttcacactcaagatcagcagagtggaggctgaggatctgggaacttattactgctttcaaggttcacttgttccttgggcgttcggtggaggcaccaagctggaaatcaaaggtggtggtggatccgaggttcatctggtggagtctgggggagccttagtgaagcctggagggtccctgaaactctcctgtgcagcctctggattcagtttcagtaaatatggcatgtcttgggttcgccagactccagacaagaggctggagtgggtcgcaaccattagtagtagtgggagtcgcacctactatccagacagtgtgaagggccaattcaccatctccagagacaatgccaagaacaccctgtacctgcaaatgagcagtctgaagtctgaggacacagccatgtattactgttcaattagctgggacggtgctatggactactggggtcaagggacctcagtcaccgtctcctcatacccatacgatgttccagattacgcttagtgacctgaggatgatctttttccctctgccaaaaattatggggacatcatgaagccccttgagcatctgacttctggctaataaaggaaatttattttcattgcaatagtgtgttggaattttttgtgtctctcactcggcctaggtagataagtagcatggcgggttaatcattaactacaaggaacccctagtgatggagttggccactccctctctgcgcgctcgctcgctcactgaggccgggcgaccaaaggtcgcccgacgcccgggctttgcccgggcggcctcagtgagcgagcgagcgcgcag

SEQ ID NO: 2201 - DNA, 3070 bp, Artificial Sequence
  source: /note="Description of Artificial Sequence: Synthetic polynucleotide"
ctgcgcgctcgctcgctcactgaggccgcccgggcaaagcccgggcgtcgggcgacctttggtcgcccggcctcagtgagcgagcgagcgcgcagagagggagtggccaactccatcactaggggttccttgtagttaatgattaacccgccatgctacttatctaccagggtaatggggatcctctagaactatagctagtcgacataacgcgtctagttattaatagtaatcaattacggggtcattagttcatagcccatatatggagttccgcgttacataacttacggtaaatggcccgcctggctgaccgcccaacgacccccgcccattgacgtcaataatgacgtatgttcccatagtaacgccaatagggactttccattgacgtcaatgggtggagtatttacggtaaactgcccacttggcagtacatcaagtgtatcatatgccaagtacgccccctattgacgtcaatgacggtaaatggcccgcctggcattatgcccagtacatgaccttatgggactttcctacttggcagtacatctacgtattagtcatcgctattaccatggtcgaggtgagccccacgttctgcttcactctccccatctcccccccctccccacccccaattttgtatttatttattttttaattattttgtgcagcgatgggggcggggggggggggggggcgcgcgccaggcggggcggggcggggcgaggggcggggcggggcgaggcggagaggtgcggcggcagccaatcagagcggcgcgctccgaaagtttccttttatggcgaggcggcggcggcggcggccctataaaaagcgaagcgcgcggcgggcgggagtcgctgcgcgctgccttcgccccgtgccccgctccgccgccgcctcgcgccgcccgccccggctctgactgaccgcgttactcccacaggtgagcgggcgggacggcccttctcctccgggctgtaattagcgcttggtttaatgacggcttgtttcttttctgtggctgcgtgaaagccttgaggggctccgggagggccctttgtgcggggggagcggctcggggggtgcgtgcgtgtgtgtgtgcgtggggagcgccgcgtgcggctccgcgctgcccggcggctgtgagcgctgcgggcgcggcgcggggctttgtgcgctccgcagtgtgcgcgaggggagcgcggccgggggcggtgccccgcggtgcggggggggctgcgaggggaacaaaggctgcgtgcggggtgtgtgcgtgggggggtgagcagggggtgtgggcgcgtcggtcgggctgcaaccccccctgcacccccctccccgagttgctgagcacggcccggcttcgggtgcggggctccgtacggggcgtggcgcggggctcgccgtgccgggcggggggtggcggcaggtgggggtgccgggcggggcggggccgcctcgggccggggagggctcgggggaggggcgcggcggcccccggagcgccggcggctgtcgaggcgcggcgagccgcagccattgccttttatggtaatcgtgcgagagggcgcagggacttcctttgtcccaaatctgtgcggagccgaaatctgggaggcgccgccgcaccccctctagcgggcgcggggcgaagcggtgcggcgccggcaggaaggaaatgggcggggagggccttcgtgcgtcgccgcgccgccgtccccttctccctctccagcctcggggctgtccgcggggggacggctgccttcgggggggacggggcagggcggggttcggcttctggcgtgtgaccggcggctctagagcctctgctaaccatgttcatgccttcttctttttcctacagctcctgggcaacgtgctggttattgtgctgtctcatcattttggcaaagaattcgggattcgaaccggtgccgccaccatgaagttgcctgttaggctgttggtgctgatgttctggattcctgcttccagcagtgatgttttgatgacccaaactccactctccctgcctgtcagtcttggagatcaagcctccatctcttgcaaatctagtcagagcattgtacatagtaatggaaacacctatttagaatggtacctgcagaaaccaggccagtctccaaagctcctggtctacaaagtttccaatcgattttctggggtcccagacaggttcagtggcagtggatcagggacagatttcacactcaagatcagcagagtggaggctgaggatctgggaacttattactgctttcaaggttcacttgttccttgggcgttcggtggaggcaccaagctggaaatcaaaggtggtggtggatccggtggtggtggatccgaggttcatctggtggagtctgggggagccttagtgaagcctggagggtccctgaaactctcctgtgcagcctctggattcagtttcagtaaatatggcatgtcttgggttcgccagactccagacaagaggctggagtgggtcgcaaccattagtagtagtgggagtcgcacctactatccagacagtgtgaagggccaattcaccatctccagagacaatgccaagaacaccctgtacctgcaaatgagcagtctgaagtctgaggacacagccatgtattactgttcaattagctgggacggtgctatggactactggggtcaagggacctcagtcaccgtctcctcatacccatacgatgttccagattacgcttagtgacctgaggatgatctttttccctctgccaaaaattatggggacatcatgaagccccttgagcatctgacttctggctaataaaggaaatttattttcattgcaatagtgtgttggaattttttgtgtctctcactcggcctaggtagataagtagcatggcgggttaatcattaactacaaggaacccctagtgatggagttggccactccctctctgcgcgctcgctcgctcactgaggccgggcgaccaaaggtcgcccgacgcccgggctttgcccgggcggcctcagtgagcgagcgagcgcgcag

SEQ ID NO: 2202 - DNA, 3084 bp, Artificial Sequence
  source: /note="Description of Artificial Sequence: Synthetic polynucleotide"
ctgcgcgctcgctcgctcactgaggccgcccgggcaaagcccgggcgtcgggcgacctttggtcgcccggcctcagtgagcgagcgagcgcgcagagagggagtggccaactccatcactaggggttccttgtagttaatgattaacccgccatgctacttatctaccagggtaatggggatcctctagaactatagctagtcgacataacgcgtctagttattaatagtaatcaattacggggtcattagttcatagcccatatatggagttccgcgttacataacttacggtaaatggcccgcctggctgaccgcccaacgacccccgcccattgacgtcaataatgacgtatgttcccatagtaacgccaatagggactttccattgacgtcaatgggtggagtatttacggtaaactgcccacttggcagtacatcaagtgtatcatatgccaagtacgccccctattgacgtcaatgacggtaaatggcccgcctggcattatgcccagtacatgaccttatgggactttcctacttggcagtacatctacgtattagtcatcgctattaccatggtcgaggtgagccccacgttctgcttcactctccccatctcccccccctccccacccccaattttgtatttatttattttttaattattttgtgcagcgatgggggcggggggggggggggggcgcgcgccaggcggggcggggcggggcgaggggcggggcggggcgaggcggagaggtgcggcggcagccaatcagagcggcgcgctccgaaagtttccttttatggcgaggcggcggcggcggcggccctataaaaagcgaagcgcgcggcgggcgggagtcgctgcgcgctgccttcgccccgtgccccgctccgccgccgcctcgcgccgcccgccccggctctgactgaccgcgttactcccacaggtgagcgggcgggacggcccttctcctccgggctgtaattagcgcttggtttaatgacggcttgtttcttttctgtggctgcgtgaaagccttgaggggctccgggagggccctttgtgcggggggagcggctcggggggtgcgtgcgtgtgtgtgtgcgtggggagcgccgcgtgcggctccgcgctgcccggcggctgtgagcgctgcgggcgcggcgcggggctttgtgcgctccgcagtgtgcgcgaggggagcgcggccgggggcggtgccccgcggtgcggggggggctgcgaggggaacaaaggctgcgtgcggggtgtgtgcgtgggggggtgagcagggggtgtgggcgcgtcggtcgggctgcaaccccccctgcacccccctccccgagttgctgagcacggcccggcttcgggtgcggggctccgtacggggcgtggcgcggggctcgccgtgccgggcggggggtggcggcaggtgggggtgccgggcggggcggggccgcctcgggccggggagggctcgggggaggggcgcggcggcccccggagcgccggcggctgtcgaggcgcggcgagccgcagccattgccttttatggtaatcgtgcgagagggcgcagggacttcctttgtcccaaatctgtgcggagccgaaatctgggaggcgccgccgcaccccctctagcgggcgcggggcgaagcggtgcggcgccggcaggaaggaaatgggcggggagggccttcgtgcgtcgccgcgccgccgtccccttctccctctccagcctcggggctgtccgcggggggacggctgccttcgggggggacggggcagggcggggttcggcttctggcgtgtgaccggcggctctagagcctctgctaaccatgttcatgccttcttctttttcctacagctcctgggcaacgtgctggttattgtgctgtctcatcattttggcaaagaattgggattcgaaccggtgccgccaccatgaagttgcctgttaggctgttggtgctgatgttctggattcctgcttccagcagtgatgttttgatgacccaaactccactctccctgcctgtcagtcttggagatcaagcctccatctcttgcaaatctagtcagagcattgtacatagtaatggaaacacctatttagaatggtacctgcagaaaccaggccagtctccaaagctcctggtctacaaagtttccaatcgattttctggggtcccagacaggttcagtggcagtggatcagggacagatttcacactcaagatcagcagagtggaggctgaggatctgggaacttattactgctttcaaggttcacttgttccttgggcgttcggtggaggcaccaagctggaaatcaaaggtggtggtggatccggtggtggtggatccggtggtggtggatccgaggttcatctggtggagtctgggggagccttagtgaagcctggagggtccctgaaactctcctgtgcagcctctggattcagtttcagtaaatatggcatgtcttgggttcgccagactccagacaagaggctggagtgggtcgcaaccattagtagtagtgggagtcgcacctactatccagacagtgtgaagggccaattcaccatctccagagacaatgccaagaacaccctgtacctgcaaatgagcagtctgaagtctgaggacacagccatgtattactgttcaattagctgggacggtgctatggactactggggtcaagggacctcagtcaccgtctcctcatacccatacgatgttccagattacgcttagtgacctgaggatgatctttttccctctgccaaaaattatggggacatcatgaagccccttgagcatctgacttctggctaataaaggaaatttattttcattgcaatagtgtgttggaattttttgtgtctctcactcggcctaggtagataagtagcatggcgggttaatcattaactacaaggaacccctagtgatggagttggccactccctctctgcgcgctcgctcgctcactgaggccgggcgaccaaaggtcgcccgacgcccgggctttgcccgggcggcctcagtgagcgagcgagcgcgcag

SEQ ID NO: 2203 - DNA, 3100 bp, Artificial Sequence
  source: /note="Description of Artificial Sequence: Synthetic polynucleotide"
ctgcgcgctcgctcgctcactgaggccgcccgggcaaagcccgggcgtcgggcgacctttggtcgcccggcctcagtgagcgagcgagcgcgcagagagggagtggccaactccatcactaggggttccttgtagttaatgattaacccgccatgctacttatctaccagggtaatggggatcctctagaactatagctagtcgacataacgcgtctagttattaatagtaatcaattacggggtcattagttcatagcccatatatggagttccgcgttacataacttacggtaaatggcccgcctggctgaccgcccaacgacccccgcccattgacgtcaataatgacgtatgttcccatagtaacgccaatagggactttccattgacgtcaatgggtggagtatttacggtaaactgcccacttggcagtacatcaagtgtatcatatgccaagtacgccccctattgacgtcaatgacggtaaatggcccgcctggcattatgcccagtacatgaccttatgggactttcctacttggcagtacatctacgtattagtcatcgctattaccatggtcgaggtgagccccacgttctgcttcactctccccatctcccccccctccccacccccaattttgtatttatttattttttaattattttgtgcagcgatgggggcggggggggggggggggcgcgcgccaggcggggcggggcggggcgaggggcggggcggggcgaggcggagaggtgcggcggcagccaatcagagcggcgcgctccgaaagtttccttttatggcgaggcggcggcggcggcggccctataaaaagcgaagcgcgcggcgggcgggagtcgctgcgcgctgccttcgccccgtgccccgctccgccgccgcctcgcgccgcccgccccggctctgactgaccgcgttactcccacaggtgagcgggcgggacggcccttctcctccgggctgtaattagcgcttggtttaatgacggcttgtttcttttctgtggctgcgtgaaagccttgaggggctccgggagggccctttgtgcggggggagcggctcggggggtgcgtgcgtgtgtgtgtgcgtggggagcgccgcgtgcggctccgcgctgcccggcggctgtgagcgctgcgggcgcggcgcggggctttgtgcgctccgcagtgtgcgcgaggggagcgcggccgggggcggtgccccgcggtgcggggggggctgcgaggggaacaaaggctgcgtgcggggtgtgtgcgtgggggggtgagcagggggtgtgggcgcgtcggtcgggctgcaaccccccctgcacccccctccccgagttgctgagcacggcccggcttcgggtgcggggctccgtacggggcgtggcgcggggctcgccgtgccgggcggggggtggcggcaggtgggggtgccgggcggggcggggccgcctcgggccggggagggctcgggggaggggcgcggcggcccccggagcgccggcggctgtcgaggcgcggcgagccgcagccattgccttttatggtaatcgtgcgagagggcgcagggacttcctttgtcccaaatctgtgcggagccgaaatctgggaggcgccgccgcaccccctctagcgggcgcggggcgaagcggtgcggcgccggcaggaaggaaatgggcggggagggccttcgtgcgtcgccgcgccgccgtccccttctccctctccagcctcggggctgtccgcggggggacggctgccttcgggggggacggggcagggcggggttcggcttctggcgtgtgaccggcggctctagagcctctgctaaccatgttcatgccttcttctttttcctacagctcctgggcaacgtgctggttattgtgctgtctcatcattttggcaaagaatttgggattcgaaccggtgccgccaccatgaagttgcctgttaggctgttggtgctgatgttctggattcctgcttccagcagtgatgttttgatgacccaaactccactctccctgcctgtcagtcttggagatcaagcctccatctcttgcaaatctagtcagagcattgtacatagtaatggaaacacctatttagaatggtacctgcagaaaccaggccagtctccaaagctcctggtctacaaagtttccaatcgattttctggggtcccagacaggttcagtggcagtggatcagggacagatttcacactcaagatcagcagagtggaggctgaggatctgggaacttattactgctttcaaggttcacttgttccttgggcgttcggtggaggcaccaagctggaaatcaaaggtggtggtggatccggtggtggtggatccggtggtggtggatccggtggtggtggatccgaggttcatctggtggagtctgggggagccttagtgaagcctggagggtccctgaaactctcctgtgcagcctctggattcagtttcagtaaatatggcatgtcttgggttcgccagactccagacaagaggctggagtgggtcgcaaccattagtagtagtgggagtcgcacctactatccagacagtgtgaagggccaattcaccatctccagagacaatgccaagaacaccctgtacctgcaaatgagcagtctgaagtctgaggacacagccatgtattactgttcaattagctgggacggtgctatggactactggggtcaagggacctcagtcaccgtctcctcatacccatacgatgttccagattacgcttagtgacctgaggatgatctttttccctctgccaaaaattatggggacatcatgaagccccttgagcatctgacttctggctaataaaggaaatttattttcattgcaatagtgtgttggaattttttgtgtctctcactcggcctaggtagataagtagcatggcgggttaatcattaactacaaggaacccctagtgatggagttggccactccctctctgcgcgctcgctcgctcactgaggccgggcgaccaaaggtcgcccgacgcccgggctttgcccgggcggcctcagtgagcgagcgagcgcgcag

SEQ ID NO: 2204 - DNA, 3115 bp, Artificial Sequence
  source: /note="Description of Artificial Sequence: Synthetic polynucleotide"
ctgcgcgctcgctcgctcactgaggccgcccgggcaaagcccgggcgtcgggcgacctttggtcgcccggcctcagtgagcgagcgagcgcgcagagagggagtggccaactccatcactaggggttccttgtagttaatgattaacccgccatgctacttatctaccagggtaatggggatcctctagaactatagctagtcgacataacgcgtctagttattaatagtaatcaattacggggtcattagttcatagcccatatatggagttccgcgttacataacttacggtaaatggcccgcctggctgaccgcccaacgacccccgcccattgacgtcaataatgacgtatgttcccatagtaacgccaatagggactttccattgacgtcaatgggtggagtatttacggtaaactgcccacttggcagtacatcaagtgtatcatatgccaagtacgccccctattgacgtcaatgacggtaaatggcccgcctggcattatgcccagtacatgaccttatgggactttcctacttggcagtacatctacgtattagtcatcgctattaccatggtcgaggtgagccccacgttctgcttcactctccccatctcccccccctccccacccccaattttgtatttatttattttttaattattttgtgcagcgatgggggcggggggggggggggggcgcgcgccaggcggggcggggcggggcgaggggcggggcggggcgaggcggagaggtgcggcggcagccaatcagagcggcgcgctccgaaagtttccttttatggcgaggcggcggcggcggcggccctataaaaagcgaagcgcgcggcgggcgggagtcgctgcgcgctgccttcgccccgtgccccgctccgccgccgcctcgcgccgcccgccccggctctgactgaccgcgttactcccacaggtgagcgggcgggacggcccttctcctccgggctgtaattagcgcttggtttaatgacggcttgtttcttttctgtggctgcgtgaaagccttgaggggctccgggagggccctttgtgcggggggagcggctcggggggtgcgtgcgtgtgtgtgtgcgtggggagcgccgcgtgcggctccgcgctgcccggcggctgtgagcgctgcgggcgcggcgcggggctttgtgcgctccgcagtgtgcgcgaggggagcgcggccgggggcggtgccccgcggtgcggggggggctgcgaggggaacaaaggctgcgtgcggggtgtgtgcgtgggggggtgagcagggggtgtgggcgcgtcggtcgggctgcaaccccccctgcacccccctccccgagttgctgagcacggcccggcttcgggtgcggggctccgtacggggcgtggcgcggggctcgccgtgccgggcggggggtggcggcaggtgggggtgccgggcggggcggggccgcctcgggccggggagggctcgggggaggggcgcggcggcccccggagcgccggcggctgtcgaggcgcggcgagccgcagccattgccttttatggtaatcgtgcgagagggcgcagggacttcctttgtcccaaatctgtgcggagccgaaatctgggaggcgccgccgcaccccctctagcgggcgcggggcgaagcggtgcggcgccggcaggaaggaaatgggcggggagggccttcgtgcgtcgccgcgccgccgtccccttctccctctccagcctcggggctgtccgcggggggacggctgccttcgggggggacggggcagggcggggttcggcttctggcgtgtgaccggcggctctagagcctctgctaaccatgttcatgccttcttctttttcctacagctcctgggcaacgtgctggttattgtgctgtctcatcattttggcaaagaatttgggattcgaaccggtgccgccaccatgaagttgcctgttaggctgttggtgctgatgttctggattcctgcttccagcagtgatgttttgatgacccaaactccactctccctgcctgtcagtcttggagatcaagcctccatctcttgcaaatctagtcagagcattgtacatagtaatggaaacacctatttagaatggtacctgcagaaaccaggccagtctccaaagctcctggtctacaaagtttccaatcgattttctggggtcccagacaggttcagtggcagtggatcagggacagatttcacactcaagatcagcagagtggaggctgaggatctgggaacttattactgctttcaaggttcacttgttccttgggcgttcggtggaggcaccaagctggaaatcaaaggtggtggtggatccggtggtggtggatccggtggtggtggatccggtggtggtggatccggtggtggtggatccgaggttcatctggtggagtctgggggagccttagtgaagcctggagggtccctgaaactctcctgtgcagcctctggattcagtttcagtaaatatggcatgtcttgggttcgccagactccagacaagaggctggagtgggtcgcaaccattagtagtagtgggagtcgcacctactatccagacagtgtgaagggccaattcaccatctccagagacaatgccaagaacaccctgtacctgcaaatgagcagtctgaagtctgaggacacagccatgtattactgttcaattagctgggacggtgctatggactactggggtcaagggacctcagtcaccgtctcctcatacccatacgatgttccagattacgcttagtgacctgaggatgatctttttccctctgccaaaaattatggggacatcatgaagccccttgagcatctgacttctggctaataaaggaaatttattttcattgcaatagtgtgttggaattttttgtgtctctcactcggcctaggtagataagtagcatggcgggttaatcattaactacaaggaacccctagtgatggagttggccactccctctctgcgcgctcgctcgctcactgaggccgggcgaccaaaggtcgcccgacgcccgggctttgcccgggcggcctcagtgagcgagcgagcgcgcag

SEQ ID NO: 2205 - DNA, 3130 bp, Artificial Sequence
  source: /note="Description of Artificial Sequence: Synthetic polynucleotide"
ctgcgcgctcgctcgctcactgaggccgcccgggcaaagcccgggcgtcgggcgacctttggtcgcccggcctcagtgagcgagcgagcgcgcagagagggagtggccaactccatcactaggggttccttgtagttaatgattaacccgccatgctacttatctaccagggtaatggggatcctctagaactatagctagtcgacataacgcgtctagttattaatagtaatcaattacggggtcattagttcatagcccatatatggagttccgcgttacataacttacggtaaatggcccgcctggctgaccgcccaacgacccccgcccattgacgtcaataatgacgtatgttcccatagtaacgccaatagggactttccattgacgtcaatgggtggagtatttacggtaaactgcccacttggcagtacatcaagtgtatcatatgccaagtacgccccctattgacgtcaatgacggtaaatggcccgcctggcattatgcccagtacatgaccttatgggactttcctacttggcagtacatctacgtattagtcatcgctattaccatggtcgaggtgagccccacgttctgcttcactctccccatctcccccccctccccacccccaattttgtatttatttattttttaattattttgtgcagcgatgggggcggggggggggggggggcgcgcgccaggcggggcggggcggggcgaggggcggggcggggcgaggcggagaggtgcggcggcagccaatcagagcggcgcgctccgaaagtttccttttatggcgaggcggcggcggcggcggccctataaaaagcgaagcgcgcggcgggcgggagtcgctgcgcgctgccttcgccccgtgccccgctccgccgccgcctcgcgccgcccgccccggctctgactgaccgcgttactcccacaggtgagcgggcgggacggcccttctcctccgggctgtaattagcgcttggtttaatgacggcttgtttcttttctgtggctgcgtgaaagccttgaggggctccgggagggccctttgtgcggggggagcggctcggggggtgcgtgcgtgtgtgtgtgcgtggggagcgccgcgtgcggctccgcgctgcccggcggctgtgagcgctgcgggcgcggcgcggggctttgtgcgctccgcagtgtgcgcgaggggagcgcggccgggggcggtgccccgcggtgcggggggggctgcgaggggaacaaaggctgcgtgcggggtgtgtgcgtgggggggtgagcagggggtgtgggcgcgtcggtcgggctgcaaccccccctgcacccccctccccgagttgctgagcacggcccggcttcgggtgcggggctccgtacggggcgtggcgcggggctcgccgtgccgggcggggggtggcggcaggtgggggtgccgggcggggcggggccgcctcgggccggggagggctcgggggaggggcgcggcggcccccggagcgccggcggctgtcgaggcgcggcgagccgcagccattgccttttatggtaatcgtgcgagagggcgcagggacttcctttgtcccaaatctgtgcggagccgaaatctgggaggcgccgccgcaccccctctagcgggcgcggggcgaagcggtgcggcgccggcaggaaggaaatgggcggggagggccttcgtgcgtcgccgcgccgccgtccccttctccctctccagcctcggggctgtccgcggggggacggctgccttcgggggggacggggcagggcggggttcggcttctggcgtgtgaccggcggctctagagcctctgctaaccatgttcatgccttcttctttttcctacagctcctgggcaacgtgctggttattgtgctgtctcatcattttggcaaagaatttgggattcgaaccggtgccgccaccatgaagttgcctgttaggctgttggtgctgatgttctggattcctgcttccagcagtgatgttttgatgacccaaactccactctccctgcctgtcagtcttggagatcaagcctccatctcttgcaaatctagtcagagcattgtacatagtaatggaaacacctatttagaatggtacctgcagaaaccaggccagtctccaaagctcctggtctacaaagtttccaatcgattttctggggtcccagacaggttcagtggcagtggatcagggacagatttcacactcaagatcagcagagtggaggctgaggatctgggaacttattactgctttcaaggttcacttgttccttgggcgttcggtggaggcaccaagctggaaatcaaaggtggtggtggatccggtggtggtggatccggtggtggtggatccggtggtggtggatccggtggtggtggatccggtggtggtggatccgaggttcatctggtggagtctgggggagccttagtgaagcctggagggtccctgaaactctcctgtgcagcctctggattcagtttcagtaaatatggcatgtcttgggttcgccagactccagacaagaggctggagtgggtcgcaaccattagtagtagtgggagtcgcacctactatccagacagtgtgaagggccaattcaccatctccagagacaatgccaagaacaccctgtacctgcaaatgagcagtctgaagtctgaggacacagccatgtattactgttcaattagctgggacggtgctatggactactggggtcaagggacctcagtcaccgtctcctcatacccatacgatgttccagattacgcttagtgacctgaggatgatctttttccctctgccaaaaattatggggacatcatgaagccccttgagcatctgacttctggctaataaaggaaatttattttcattgcaatagtgtgttggaattttttgtgtctctcactcggcctaggtagataagtagcatggcgggttaatcattaactacaaggaacccctagtgatggagttggccactccctctctgcgcgctcgctcgctcactgaggccgggcgaccaaaggtcgcccgacgcccgggctttgcccgggcggcctcagtgagcgagcgagcgcgcag

SEQ ID NO: 2206 - DNA, 3097 bp, Artificial Sequence
  source: /note="Description of Artificial Sequence: Synthetic polynucleotide"
ctgcgcgctcgctcgctcactgaggccgcccgggcaaagcccgggcgtcgggcgacctttggtcgcccggcctcagtgagcgagcgagcgcgcagagagggagtggccaactccatcactaggggttccttgtagttaatgattaacccgccatgctacttatctaccagggtaatggggatcctctagaactatagctagtcgacataacgcgtctagttattaatagtaatcaattacggggtcattagttcatagcccatatatggagttccgcgttacataacttacggtaaatggcccgcctggctgaccgcccaacgacccccgcccattgacgtcaataatgacgtatgttcccatagtaacgccaatagggactttccattgacgtcaatgggtggagtatttacggtaaactgcccacttggcagtacatcaagtgtatcatatgccaagtacgccccctattgacgtcaatgacggtaaatggcccgcctggcattatgcccagtacatgaccttatgggactttcctacttggcagtacatctacgtattagtcatcgctattaccatggtcgaggtgagccccacgttctgcttcactctccccatctcccccccctccccacccccaattttgtatttatttattttttaattattttgtgcagcgatgggggcggggggggggggggggcgcgcgccaggcggggcggggcggggcgaggggcggggcggggcgaggcggagaggtgcggcggcagccaatcagagcggcgcgctccgaaagtttccttttatggcgaggcggcggcggcggcggccctataaaaagcgaagcgcgcggcgggcgggagtcgctgcgcgctgccttcgccccgtgccccgctccgccgccgcctcgcgccgcccgccccggctctgactgaccgcgttactcccacaggtgagcgggcgggacggcccttctcctccgggctgtaattagcgcttggtttaatgacggcttgtttcttttctgtggctgcgtgaaagccttgaggggctccgggagggccctttgtgcggggggagcggctcggggggtgcgtgcgtgtgtgtgtgcgtggggagcgccgcgtgcggctccgcgctgcccggcggctgtgagcgctgcgggcgcggcgcggggctttgtgcgctccgcagtgtgcgcgaggggagcgcggccgggggcggtgccccgcggtgcggggggggctgcgaggggaacaaaggctgcgtgcggggtgtgtgcgtgggggggtgagcagggggtgtgggcgcgtcggtcgggctgcaaccccccctgcacccccctccccgagttgctgagcacggcccggcttcgggtgcggggctccgtacggggcgtggcgcggggctcgccgtgccgggcggggggtggcggcaggtgggggtgccgggcggggcggggccgcctcgggccggggagggctcgggggaggggcgcggcggcccccggagcgccggcggctgtcgaggcgcggcgagccgcagccattgccttttatggtaatcgtgcgagagggcgcagggacttcctttgtcccaaatctgtgcggagccgaaatctgggaggcgccgccgcaccccctctagcgggcgcggggcgaagcggtgcggcgccggcaggaaggaaatgggcggggagggccttcgtgcgtcgccgcgccgccgtccccttctccctctccagcctcggggctgtccgcggggggacggctgccttcgggggggacggggcagggcggggttcggcttctggcgtgtgaccggcggctctagagcctctgctaaccatgttcatgccttcttctttttcctacagctcctgggcaacgtgctggttattgtgctgtctcatcattttggcaaagaattcgggattcgaaccggtgccgccaccatgaagttgcctgttaggctgttggtgctgatgttctggattcctgcttccagcagtgaggtgaagctggtggagagcggcggcgacctggtgaagcctggcggcagcctgaagctgagctgcgccgccagcggcttcaccttcagcagctacgccatgagctgggtgagacagaaccctgagaagagactggagtgggtggccagcatcagcaagggcggcaacacctactaccctaacagcgtgaagggcagattcaccatcagcagagacaacgccagaaacatcctgtacctgcagatgagcagcctgagaagcgaggacaccgccctgtactactgcgccagaggctggggcgactacggctggttcgcctactggggccaggtgaccctggtgaccgtgagcgccggtggtggtggatccggtggtggtggatccggtggtggtggatccgacatcaagatgacccagagccctagcagcatgtacgccagcctgggcgagagagtgaccatcacctgcaaggccagccaggacatcaacagatacctgaactggttccagcagaagcctggcaagagccctaagaccctgatctacagagccaacagactgctggacggcgtgcctagcagattcagcggcagcggcagcggccaggactacagcctgaccatcagcagcctggactacgaggacatgggcatctactactgcctgcagtacgacgagttccctctgaccttcggcgacggcaccaagctggagctgaagtacccatacgatgttccagattacgcttagtaactcgaggacggggtgaactacgcctgaggatccgatctttttccctctgccaaaaattatggggacatcatgaagccccttgagcatctgacttctggctaataaaggaaatttattttcattgcaatagtgtgttggaattttttgtgtctctcactcggcctaggtagataagtagcatggcgggttaatcattaactacaaggaacccctagtgatggagttggccactccctctctgcgcgctcgctcgctcactgaggccgggcgaccaaaggtcgcccgacgcccgggctttgcccgggcggcctcagtgagcgagcgagcgcgcag

SEQ ID NO: 2207 - DNA, 3082 bp, Artificial Sequence
  source: /note="Description of Artificial Sequence: Synthetic polynucleotide"
ctgcgcgctcgctcgctcactgaggccgcccgggcaaagcccgggcgtcgggcgacctttggtcgcccggcctcagtgagcgagcgagcgcgcagagagggagtggccaactccatcactaggggttccttgtagttaatgattaacccgccatgctacttatctaccagggtaatggggatcctctagaactatagctagtcgacataacgcgtctagttattaatagtaatcaattacggggtcattagttcatagcccatatatggagttccgcgttacataacttacggtaaatggcccgcctggctgaccgcccaacgacccccgcccattgacgtcaataatgacgtatgttcccatagtaacgccaatagggactttccattgacgtcaatgggtggagtatttacggtaaactgcccacttggcagtacatcaagtgtatcatatgccaagtacgccccctattgacgtcaatgacggtaaatggcccgcctggcattatgcccagtacatgaccttatgggactttcctacttggcagtacatctacgtattagtcatcgctattaccatggtcgaggtgagccccacgttctgcttcactctccccatctcccccccctccccacccccaattttgtatttatttattttttaattattttgtgcagcgatgggggcggggggggggggggggcgcgcgccaggcggggcggggcggggcgaggggcggggcggggcgaggcggagaggtgcggcggcagccaatcagagcggcgcgctccgaaagtttccttttatggcgaggcggcggcggcggcggccctataaaaagcgaagcgcgcggcgggcgggagtcgctgcgcgctgccttcgccccgtgccccgctccgccgccgcctcgcgccgcccgccccggctctgactgaccgcgttactcccacaggtgagcgggcgggacggcccttctcctccgggctgtaattagcgcttggtttaatgacggcttgtttcttttctgtggctgcgtgaaagccttgaggggctccgggagggccctttgtgcggggggagcggctcggggggtgcgtgcgtgtgtgtgtgcgtggggagcgccgcgtgcggctccgcgctgcccggcggctgtgagcgctgcgggcgcggcgcggggctttgtgcgctccgcagtgtgcgcgaggggagcgcggccgggggcggtgccccgcggtgcggggggggctgcgaggggaacaaaggctgcgtgcggggtgtgtgcgtgggggggtgagcagggggtgtgggcgcgtcggtcgggctgcaaccccccctgcacccccctccccgagttgctgagcacggcccggcttcgggtgcggggctccgtacggggcgtggcgcggggctcgccgtgccgggcggggggtggcggcaggtgggggtgccgggcggggcggggccgcctcgggccggggagggctcgggggaggggcgcggcggcccccggagcgccggcggctgtcgaggcgcggcgagccgcagccattgccttttatggtaatcgtgcgagagggcgcagggacttcctttgtcccaaatctgtgcggagccgaaatctgggaggcgccgccgcaccccctctagcgggcgcggggcgaagcggtgcggcgccggcaggaaggaaatgggcggggagggccttcgtgcgtcgccgcgccgccgtccccttctccctctccagcctcggggctgtccgcggggggacggctgccttcgggggggacggggcagggcggggttcggcttctggcgtgtgaccggcggctctagagcctctgctaaccatgttcatgccttcttctttttcctacagctcctgggcaacgtgctggttattgtgctgtctcatcattttggcaaagaattcgggattcgaaccggtgccgccaccatgaacttcgggctcagcttgattttccttgtccttgttttaaaaggtgtccagtgtgaggtgaagctggtggagagcggcggcgacctggtgaagcctggcggcagcctgaagctgagctgcgccgccagcggcttcaccttcagcagctacgccatgagctgggtgagacagaaccctgagaagagactggagtgggtggccagcatcagcaagggcggcaacacctactaccctaacagcgtgaagggcagattcaccatcagcagagacaacgccagaaacatcctgtacctgcagatgagcagcctgagaagcgaggacaccgccctgtactactgcgccagaggctggggcgactacggctggttcgcctactggggccaggtgaccctggtgaccgtgagcgccggtggtggtggatccggtggtggtggatccgacatcaagatgacccagagccctagcagcatgtacgccagcctgggcgagagagtgaccatcacctgcaaggccagccaggacatcaacagatacctgaactggttccagcagaagcctggcaagagccctaagaccctgatctacagagccaacagactgctggacggcgtgcctagcagattcagcggcagcggcagcggccaggactacagcctgaccatcagcagcctggactacgaggacatgggcatctactactgcctgcagtacgacgagttccctctgaccttcggcgacggcaccaagctggagctgaagtacccatacgatgttccagattacgcttagtaactcgaggacggggtgaactacgcctgaggatccgatctttttccctctgccaaaaattatggggacatcatgaagccccttgagcatctgacttctggctaataaaggaaatttattttcattgcaatagtgtgttggaattttttgtgtctctcactcggcctaggtagataagtagcatggcgggttaatcattaactacaaggaacccctagtgatggagttggccactccctctctgcgcgctcgctcgctcactgaggccgggcgaccaaaggtcgcccgacgcccgggctttgcccgggcggcctcagtgagcgagcgagcgcgcag

SEQ ID NO: 2208 - DNA, 3097 bp, Artificial Sequence
  source: /note="Description of Artificial Sequence: Synthetic polynucleotide"
ctgcgcgctcgctcgctcactgaggccgcccgggcaaagcccgggcgtcgggcgacctttggtcgcccggcctcagtgagcgagcgagcgcgcagagagggagtggccaactccatcactaggggttccttgtagttaatgattaacccgccatgctacttatctaccagggtaatggggatcctctagaactatagctagtcgacataacgcgtctagttattaatagtaatcaattacggggtcattagttcatagcccatatatggagttccgcgttacataacttacggtaaatggcccgcctggctgaccgcccaacgacccccgcccattgacgtcaataatgacgtatgttcccatagtaacgccaatagggactttccattgacgtcaatgggtggagtatttacggtaaactgcccacttggcagtacatcaagtgtatcatatgccaagtacgccccctattgacgtcaatgacggtaaatggcccgcctggcattatgcccagtacatgaccttatgggactttcctacttggcagtacatctacgtattagtcatcgctattaccatggtcgaggtgagccccacgttctgcttcactctccccatctcccccccctccccacccccaattttgtatttatttattttttaattattttgtgcagcgatgggggcggggggggggggggggcgcgcgccaggcggggcggggcggggcgaggggcggggcggggcgaggcggagaggtgcggcggcagccaatcagagcggcgcgctccgaaagtttccttttatggcgaggcggcggcggcggcggccctataaaaagcgaagcgcgcggcgggcgggagtcgctgcgcgctgccttcgccccgtgccccgctccgccgccgcctcgcgccgcccgccccggctctgactgaccgcgttactcccacaggtgagcgggcgggacggcccttctcctccgggctgtaattagcgcttggtttaatgacggcttgtttcttttctgtggctgcgtgaaagccttgaggggctccgggagggccctttgtgcggggggagcggctcggggggtgcgtgcgtgtgtgtgtgcgtggggagcgccgcgtgcggctccgcgctgcccggcggctgtgagcgctgcgggcgcggcgcggggctttgtgcgctccgcagtgtgcgcgaggggagcgcggccgggggcggtgccccgcggtgcggggggggctgcgaggggaacaaaggctgcgtgcggggtgtgtgcgtgggggggtgagcagggggtgtgggcgcgtcggtcgggctgcaaccccccctgcacccccctccccgagttgctgagcacggcccggcttcgggtgcggggctccgtacggggcgtggcgcggggctcgccgtgccgggcggggggtggcggcaggtgggggtgccgggcggggcggggccgcctcgggccggggagggctcgggggaggggcgcggcggcccccggagcgccggcggctgtcgaggcgcggcgagccgcagccattgccttttatggtaatcgtgcgagagggcgcagggacttcctttgtcccaaatctgtgcggagccgaaatctgggaggcgccgccgcaccccctctagcgggcgcggggcgaagcggtgcggcgccggcaggaaggaaatgggcggggagggccttcgtgcgtcgccgcgccgccgtccccttctccctctccagcctcggggctgtccgcggggggacggctgccttcgggggggacggggcagggcggggttcggcttctggcgtgtgaccggcggctctagagcctctgctaaccatgttcatgccttcttctttttcctacagctcctgggcaacgtgctggttattgtgctgtctcatcattttggcaaagaattcgggattcgaaccggtgccgccaccatgaacttcgggctcagcttgattttccttgtccttgttttaaaaggtgtccagtgtgaggtgaagctggtggagagcggcggcgacctggtgaagcctggcggcagcctgaagctgagctgcgccgccagcggcttcaccttcagcagctacgccatgagctgggtgagacagaaccctgagaagagactggagtgggtggccagcatcagcaagggcggcaacacctactaccctaacagcgtgaagggcagattcaccatcagcagagacaacgccagaaacatcctgtacctgcagatgagcagcctgagaagcgaggacaccgccctgtactactgcgccagaggctggggcgactacggctggttcgcctactggggccaggtgaccctggtgaccgtgagcgccggtggtggtggatccggtggtggtggatccggtggtggtggatccgacatcaagatgacccagagccctagcagcatgtacgccagcctgggcgagagagtgaccatcacctgcaaggccagccaggacatcaacagatacctgaactggttccagcagaagcctggcaagagccctaagaccctgatctacagagccaacagactgctggacggcgtgcctagcagattcagcggcagcggcagcggccaggactacagcctgaccatcagcagcctggactacgaggacatgggcatctactactgcctgcagtacgacgagttccctctgaccttcggcgacggcaccaagctggagctgaagtacccatacgatgttccagattacgcttagtaactcgaggacggggtgaactacgcctgaggatccgatctttttccctctgccaaaaattatggggacatcatgaagccccttgagcatctgacttctggctaataaaggaaatttattttcattgcaatagtgtgttggaattttttgtgtctctcactcggcctaggtagataagtagcatggcgggttaatcattaactacaaggaacccctagtgatggagttggccactccctctctgcgcgctcgctcgctcactgaggccgggcgaccaaaggtcgcccgacgcccgggctttgcccgggcggcctcagtgagcgagcgagcgcgcag

SEQ ID NO: 2209 - DNA, 3112 bp, Artificial Sequence
  source: /note="Description of Artificial Sequence: Synthetic polynucleotide"
ctgcgcgctcgctcgctcactgaggccgcccgggcaaagcccgggcgtcgggcgacctttggtcgcccggcctcagtgagcgagcgagcgcgcagagagggagtggccaactccatcactaggggttccttgtagttaatgattaacccgccatgctacttatctaccagggtaatggggatcctctagaactatagctagtcgacataacgcgtctagttattaatagtaatcaattacggggtcattagttcatagcccatatatggagttccgcgttacataacttacggtaaatggcccgcctggctgaccgcccaacgacccccgcccattgacgtcaataatgacgtatgttcccatagtaacgccaatagggactttccattgacgtcaatgggtggagtatttacggtaaactgcccacttggcagtacatcaagtgtatcatatgccaagtacgccccctattgacgtcaatgacggtaaatggcccgcctggcattatgcccagtacatgaccttatgggactttcctacttggcagtacatctacgtattagtcatcgctattaccatggtcgaggtgagccccacgttctgcttcactctccccatctcccccccctccccacccccaattttgtatttatttattttttaattattttgtgcagcgatgggggcggggggggggggggggcgcgcgccaggcggggcggggcggggcgaggggcggggcggggcgaggcggagaggtgcggcggcagccaatcagagcggcgcgctccgaaagtttccttttatggcgaggcggcggcggcggcggccctataaaaagcgaagcgcgcggcgggcgggagtcgctgcgcgctgccttcgccccgtgccccgctccgccgccgcctcgcgccgcccgccccggctctgactgaccgcgttactcccacaggtgagcgggcgggacggcccttctcctccgggctgtaattagcgcttggtttaatgacggcttgtttcttttctgtggctgcgtgaaagccttgaggggctccgggagggccctttgtgcggggggagcggctcggggggtgcgtgcgtgtgtgtgtgcgtggggagcgccgcgtgcggctccgcgctgcccggcggctgtgagcgctgcgggcgcggcgcggggctttgtgcgctccgcagtgtgcgcgaggggagcgcggccgggggcggtgccccgcggtgcggggggggctgcgaggggaacaaaggctgcgtgcggggtgtgtgcgtgggggggtgagcagggggtgtgggcgcgtcggtcgggctgcaaccccccctgcacccccctccccgagttgctgagcacggcccggcttcgggtgcggggctccgtacggggcgtggcgcggggctcgccgtgccgggcggggggtggcggcaggtgggggtgccgggcggggcggggccgcctcgggccggggagggctcgggggaggggcgcggcggcccccggagcgccggcggctgtcgaggcgcggcgagccgcagccattgccttttatggtaatcgtgcgagagggcgcagggacttcctttgtcccaaatctgtgcggagccgaaatctgggaggcgccgccgcaccccctctagcgggcgcggggcgaagcggtgcggcgccggcaggaaggaaatgggcggggagggccttcgtgcgtcgccgcgccgccgtccccttctccctctccagcctcggggctgtccgcggggggacggctgccttcgggggggacggggcagggcggggttcggcttctggcgtgtgaccggcggctctagagcctctgctaaccatgttcatgccttcttctttttcctacagctcctgggcaacgtgctggttattgtgctgtctcatcattttggcaaagaattcgggattcgaaccggtgccgccaccatgaacttcgggctcagcttgattttccttgtccttgttttaaaaggtgtccagtgtgaggtgaagctggtggagagcggcggcgacctggtgaagcctggcggcagcctgaagctgagctgcgccgccagcggcttcaccttcagcagctacgccatgagctgggtgagacagaaccctgagaagagactggagtgggtggccagcatcagcaagggcggcaacacctactaccctaacagcgtgaagggcagattcaccatcagcagagacaacgccagaaacatcctgtacctgcagatgagcagcctgagaagcgaggacaccgccctgtactactgcgccagaggctggggcgactacggctggttcgcctactggggccaggtgaccctggtgaccgtgagcgccggtggtggtggatccggtggtggtggatccggtggtggtggatccggtggtggtggatccgacatcaagatgacccagagccctagcagcatgtacgccagcctgggcgagagagtgaccatcacctgcaaggccagccaggacatcaacagatacctgaactggttccagcagaagcctggcaagagccctaagaccctgatctacagagccaacagactgctggacggcgtgcctagcagattcagcggcagcggcagcggccaggactacagcctgaccatcagcagcctggactacgaggacatgggcatctactactgcctgcagtacgacgagttccctctgaccttcggcgacggcaccaagctggagctgaagtacccatacgatgttccagattacgcttagtaactcgaggacggggtgaactacgcctgaggatccgatctttttccctctgccaaaaattatggggacatcatgaagccccttgagcatctgacttctggctaataaaggaaatttattttcattgcaatagtgtgttggaattttttgtgtctctcactcggcctaggtagataagtagcatggcgggttaatcattaactacaaggaacccctagtgatggagttggccactccctctctgcgcgctcgctcgctcactgaggccgggcgaccaaaggtcgcccgacgcccgggctttgcccgggcggcctcagtgagcgagcgagcgcgcag

SEQ ID NO: 2210 - DNA, 3097 bp, Artificial Sequence
  source: /note="Description of Artificial Sequence: Synthetic polynucleotide"
ctgcgcgctcgctcgctcactgaggccgcccgggcaaagcccgggcgtcgggcgacctttggtcgcccggcctcagtgagcgagcgagcgcgcagagagggagtggccaactccatcactaggggttccttgtagttaatgattaacccgccatgctacttatctaccagggtaatggggatcctctagaactatagctagtcgacataacgcgtctagttattaatagtaatcaattacggggtcattagttcatagcccatatatggagttccgcgttacataacttacggtaaatggcccgcctggctgaccgcccaacgacccccgcccattgacgtcaataatgacgtatgttcccatagtaacgccaatagggactttccattgacgtcaatgggtggagtatttacggtaaactgcccacttggcagtacatcaagtgtatcatatgccaagtacgccccctattgacgtcaatgacggtaaatggcccgcctggcattatgcccagtacatgaccttatgggactttcctacttggcagtacatctacgtattagtcatcgctattaccatggtcgaggtgagccccacgttctgcttcactctccccatctcccccccctccccacccccaattttgtatttatttattttttaattattttgtgcagcgatgggggcggggggggggggggggcgcgcgccaggcggggcggggcggggcgaggggcggggcggggcgaggcggagaggtgcggcggcagccaatcagagcggcgcgctccgaaagtttccttttatggcgaggcggcggcggcggcggccctataaaaagcgaagcgcgcggcgggcgggagtcgctgcgcgctgccttcgccccgtgccccgctccgccgccgcctcgcgccgcccgccccggctctgactgaccgcgttactcccacaggtgagcgggcgggacggcccttctcctccgggctgtaattagcgcttggtttaatgacggcttgtttcttttctgtggctgcgtgaaagccttgaggggctccgggagggccctttgtgcggggggagcggctcggggggtgcgtgcgtgtgtgtgtgcgtggggagcgccgcgtgcggctccgcgctgcccggcggctgtgagcgctgcgggcgcggcgcggggctttgtgcgctccgcagtgtgcgcgaggggagcgcggccgggggcggtgccccgcggtgcggggggggctgcgaggggaacaaaggctgcgtgcggggtgtgtgcgtgggggggtgagcagggggtgtgggcgcgtcggtcgggctgcaaccccccctgcacccccctccccgagttgctgagcacggcccggcttcgggtgcggggctccgtacggggcgtggcgcggggctcgccgtgccgggcggggggtggcggcaggtgggggtgccgggcggggcggggccgcctcgggccggggagggctcgggggaggggcgcggcggcccccggagcgccggcggctgtcgaggcgcggcgagccgcagccattgccttttatggtaatcgtgcgagagggcgcagggacttcctttgtcccaaatctgtgcggagccgaaatctgggaggcgccgccgcaccccctctagcgggcgcggggcgaagcggtgcggcgccggcaggaaggaaatgggcggggagggccttcgtgcgtcgccgcgccgccgtccccttctccctctccagcctcggggctgtccgcggggggacggctgccttcgggggggacggggcagggcggggttcggcttctggcgtgtgaccggcggctctagagcctctgctaaccatgttcatgccttcttctttttcctacagctcctgggcaacgtgctggttattgtgctgtctcatcattttggcaaagaattcgggattcgaaccggtgccgccaccatgaacttcgggctcagcttgattttccttgtccttgttttaaaaggtgtccagtgtgacatcaagatgacccagagccctagcagcatgtacgccagcctgggcgagagagtgaccatcacctgcaaggccagccaggacatcaacagatacctgaactggttccagcagaagcctggcaagagccctaagaccctgatctacagagccaacagactgctggacggcgtgcctagcagattcagcggcagcggcagcggccaggactacagcctgaccatcagcagcctggactacgaggacatgggcatctactactgcctgcagtacgacgagttccctctgaccttcggcgacggcaccaagctggagctgaagggtggtggtggatccggtggtggtggatccggtggtggtggatccgaggtgaagctggtggagagcggcggcgacctggtgaagcctggcggcagcctgaagctgagctgcgccgccagcggcttcaccttcagcagctacgccatgagctgggtgagacagaaccctgagaagagactggagtgggtggccagcatcagcaagggcggcaacacctactaccctaacagcgtgaagggcagattcaccatcagcagagacaacgccagaaacatcctgtacctgcagatgagcagcctgagaagcgaggacaccgccctgtactactgcgccagaggctggggcgactacggctggttcgcctactggggccaggtgaccctggtgaccgtgagcgcctacccatacgatgttccagattacgcttagtaactcgaggacggggtgaactacgcctgaggatccgatctttttccctctgccaaaaattatggggacatcatgaagccccttgagcatctgacttctggctaataaaggaaatttattttcattgcaatagtgtgttggaattttttgtgtctctcactcggcctaggtagataagtagcatggcgggttaatcattaactacaaggaacccctagtgatggagttggccactccctctctgcgcgctcgctcgctcactgaggccgggcgaccaaaggtcgcccgacgcccgggctttgcccgggcggcctcagtgagcgagcgagcgcgcag

SEQ ID NO: 2211 - DNA, 3082 bp, Artificial Sequence
  source: /note="Description of Artificial Sequence: Synthetic polynucleotide"
ctgcgcgctcgctcgctcactgaggccgcccgggcaaagcccgggcgtcgggcgacctttggtcgcccggcctcagtgagcgagcgagcgcgcagagagggagtggccaactccatcactaggggttccttgtagttaatgattaacccgccatgctacttatctaccagggtaatggggatcctctagaactatagctagtcgacataacgcgtctagttattaatagtaatcaattacggggtcattagttcatagcccatatatggagttccgcgttacataacttacggtaaatggcccgcctggctgaccgcccaacgacccccgcccattgacgtcaataatgacgtatgttcccatagtaacgccaatagggactttccattgacgtcaatgggtggagtatttacggtaaactgcccacttggcagtacatcaagtgtatcatatgccaagtacgccccctattgacgtcaatgacggtaaatggcccgcctggcattatgcccagtacatgaccttatgggactttcctacttggcagtacatctacgtattagtcatcgctattaccatggtcgaggtgagccccacgttctgcttcactctccccatctcccccccctccccacccccaattttgtatttatttattttttaattattttgtgcagcgatgggggcggggggggggggggggcgcgcgccaggcggggcggggcggggcgaggggcggggcggggcgaggcggagaggtgcggcggcagccaatcagagcggcgcgctccgaaagtttccttttatggcgaggcggcggcggcggcggccctataaaaagcgaagcgcgcggcgggcgggagtcgctgcgcgctgccttcgccccgtgccccgctccgccgccgcctcgcgccgcccgccccggctctgactgaccgcgttactcccacaggtgagcgggcgggacggcccttctcctccgggctgtaattagcgcttggtttaatgacggcttgtttcttttctgtggctgcgtgaaagccttgaggggctccgggagggccctttgtgcggggggagcggctcggggggtgcgtgcgtgtgtgtgtgcgtggggagcgccgcgtgcggctccgcgctgcccggcggctgtgagcgctgcgggcgcggcgcggggctttgtgcgctccgcagtgtgcgcgaggggagcgcggccgggggcggtgccccgcggtgcggggggggctgcgaggggaacaaaggctgcgtgcggggtgtgtgcgtgggggggtgagcagggggtgtgggcgcgtcggtcgggctgcaaccccccctgcacccccctccccgagttgctgagcacggcccggcttcgggtgcggggctccgtacggggcgtggcgcggggctcgccgtgccgggcggggggtggcggcaggtgggggtgccgggcggggcggggccgcctcgggccggggagggctcgggggaggggcgcggcggcccccggagcgccggcggctgtcgaggcgcggcgagccgcagccattgccttttatggtaatcgtgcgagagggcgcagggacttcctttgtcccaaatctgtgcggagccgaaatctgggaggcgccgccgcaccccctctagcgggcgcggggcgaagcggtgcggcgccggcaggaaggaaatgggcggggagggccttcgtgcgtcgccgcgccgccgtccccttctccctctccagcctcggggctgtccgcggggggacggctgccttcgggggggacggggcagggcggggttcggcttctggcgtgtgaccggcggctctagagcctctgctaaccatgttcatgccttcttctttttcctacagctcctgggcaacgtgctggttattgtgctgtctcatcattttggcaaagaattcgggattcgaaccggtgccgccaccatgaagttgcctgttaggctgttggtgctgatgttctggattcctgcttccagcagtgacatcaagatgacccagagccctagcagcatgtacgccagcctgggcgagagagtgaccatcacctgcaaggccagccaggacatcaacagatacctgaactggttccagcagaagcctggcaagagccctaagaccctgatctacagagccaacagactgctggacggcgtgcctagcagattcagcggcagcggcagcggccaggactacagcctgaccatcagcagcctggactacgaggacatgggcatctactactgcctgcagtacgacgagttccctctgaccttcggcgacggcaccaagctggagctgaagggtggtggtggatccggtggtggtggatccgaggtgaagctggtggagagcggcggcgacctggtgaagcctggcggcagcctgaagctgagctgcgccgccagcggcttcaccttcagcagctacgccatgagctgggtgagacagaaccctgagaagagactggagtgggtggccagcatcagcaagggcggcaacacctactaccctaacagcgtgaagggcagattcaccatcagcagagacaacgccagaaacatcctgtacctgcagatgagcagcctgagaagcgaggacaccgccctgtactactgcgccagaggctggggcgactacggctggttcgcctactggggccaggtgaccctggtgaccgtgagcgcctacccatacgatgttccagattacgcttagtaactcgaggacggggtgaactacgcctgaggatccgatctttttccctctgccaaaaattatggggacatcatgaagccccttgagcatctgacttctggctaataaaggaaatttattttcattgcaatagtgtgttggaattttttgtgtctctcactcggcctaggtagataagtagcatggcgggttaatcattaactacaaggaacccctagtgatggagttggccactccctctctgcgcgctcgctcgctcactgaggccgggcgaccaaaggtcgcccgacgcccgggctttgcccgggcggcctcagtgagcgagcgagcgcgcag

SEQ ID NO: 2212 - DNA, 3097 bp, Artificial Sequence
  source: /note="Description of Artificial Sequence: Synthetic polynucleotide"
ctgcgcgctcgctcgctcactgaggccgcccgggcaaagcccgggcgtcgggcgacctttggtcgcccggcctcagtgagcgagcgagcgcgcagagagggagtggccaactccatcactaggggttccttgtagttaatgattaacccgccatgctacttatctaccagggtaatggggatcctctagaactatagctagtcgacataacgcgtctagttattaatagtaatcaattacggggtcattagttcatagcccatatatggagttccgcgttacataacttacggtaaatggcccgcctggctgaccgcccaacgacccccgcccattgacgtcaataatgacgtatgttcccatagtaacgccaatagggactttccattgacgtcaatgggtggagtatttacggtaaactgcccacttggcagtacatcaagtgtatcatatgccaagtacgccccctattgacgtcaatgacggtaaatggcccgcctggcattatgcccagtacatgaccttatgggactttcctacttggcagtacatctacgtattagtcatcgctattaccatggtcgaggtgagccccacgttctgcttcactctccccatctcccccccctccccacccccaattttgtatttatttattttttaattattttgtgcagcgatgggggcggggggggggggggggcgcgcgccaggcggggcggggcggggcgaggggcggggcggggcgaggcggagaggtgcggcggcagccaatcagagcggcgcgctccgaaagtttccttttatggcgaggcggcggcggcggcggccctataaaaagcgaagcgcgcggcgggcgggagtcgctgcgcgctgccttcgccccgtgccccgctccgccgccgcctcgcgccgcccgccccggctctgactgaccgcgttactcccacaggtgagcgggcgggacggcccttctcctccgggctgtaattagcgcttggtttaatgacggcttgtttcttttctgtggctgcgtgaaagccttgaggggctccgggagggccctttgtgcggggggagcggctcggggggtgcgtgcgtgtgtgtgtgcgtggggagcgccgcgtgcggctccgcgctgcccggcggctgtgagcgctgcgggcgcggcgcggggctttgtgcgctccgcagtgtgcgcgaggggagcgcggccgggggcggtgccccgcggtgcggggggggctgcgaggggaacaaaggctgcgtgcggggtgtgtgcgtgggggggtgagcagggggtgtgggcgcgtcggtcgggctgcaaccccccctgcacccccctccccgagttgctgagcacggcccggcttcgggtgcggggctccgtacggggcgtggcgcggggctcgccgtgccgggcggggggtggcggcaggtgggggtgccgggcggggcggggccgcctcgggccggggagggctcgggggaggggcgcggcggcccccggagcgccggcggctgtcgaggcgcggcgagccgcagccattgccttttatggtaatcgtgcgagagggcgcagggacttcctttgtcccaaatctgtgcggagccgaaatctgggaggcgccgccgcaccccctctagcgggcgcggggcgaagcggtgcggcgccggcaggaaggaaatgggcggggagggccttcgtgcgtcgccgcgccgccgtccccttctccctctccagcctcggggctgtccgcggggggacggctgccttcgggggggacggggcagggcggggttcggcttctggcgtgtgaccggcggctctagagcctctgctaaccatgttcatgccttcttctttttcctacagctcctgggcaacgtgctggttattgtgctgtctcatcattttggcaaagaattcgggattcgaaccggtgccgccaccatgaagttgcctgttaggctgttggtgctgatgttctggattcctgcttccagcagtgacatcaagatgacccagagccctagcagcatgtacgccagcctgggcgagagagtgaccatcacctgcaaggccagccaggacatcaacagatacctgaactggttccagcagaagcctggcaagagccctaagaccctgatctacagagccaacagactgctggacggcgtgcctagcagattcagcggcagcggcagcggccaggactacagcctgaccatcagcagcctggactacgaggacatgggcatctactactgcctgcagtacgacgagttccctctgaccttcggcgacggcaccaagctggagctgaagggtggtggtggatccggtggtggtggatccggtggtggtggatccgaggtgaagctggtggagagcggcggcgacctggtgaagcctggcggcagcctgaagctgagctgcgccgccagcggcttcaccttcagcagctacgccatgagctgggtgagacagaaccctgagaagagactggagtgggtggccagcatcagcaagggcggcaacacctactaccctaacagcgtgaagggcagattcaccatcagcagagacaacgccagaaacatcctgtacctgcagatgagcagcctgagaagcgaggacaccgccctgtactactgcgccagaggctggggcgactacggctggttcgcctactggggccaggtgaccctggtgaccgtgagcgcctacccatacgatgttccagattacgcttagtaactcgaggacggggtgaactacgcctgaggatccgatctttttccctctgccaaaaattatggggacatcatgaagccccttgagcatctgacttctggctaataaaggaaatttattttcattgcaatagtgtgttggaattttttgtgtctctcactcggcctaggtagataagtagcatggcgggttaatcattaactacaaggaacccctagtgatggagttggccactccctctctgcgcgctcgctcgctcactgaggccgggcgaccaaaggtcgcccgacgcccgggctttgcccgggcggcctcagtgagcgagcgagcgcgcag

SEQ ID NO: 2213 - DNA, 3112 bp, Artificial Sequence
  source: /note="Description of Artificial Sequence: Synthetic polynucleotide"
ctgcgcgctcgctcgctcactgaggccgcccgggcaaagcccgggcgtcgggcgacctttggtcgcccggcctcagtgagcgagcgagcgcgcagagagggagtggccaactccatcactaggggttccttgtagttaatgattaacccgccatgctacttatctaccagggtaatggggatcctctagaactatagctagtcgacataacgcgtctagttattaatagtaatcaattacggggtcattagttcatagcccatatatggagttccgcgttacataacttacggtaaatggcccgcctggctgaccgcccaacgacccccgcccattgacgtcaataatgacgtatgttcccatagtaacgccaatagggactttccattgacgtcaatgggtggagtatttacggtaaactgcccacttggcagtacatcaagtgtatcatatgccaagtacgccccctattgacgtcaatgacggtaaatggcccgcctggcattatgcccagtacatgaccttatgggactttcctacttggcagtacatctacgtattagtcatcgctattaccatggtcgaggtgagccccacgttctgcttcactctccccatctcccccccctccccacccccaattttgtatttatttattttttaattattttgtgcagcgatgggggcggggggggggggggggcgcgcgccaggcggggcggggcggggcgaggggcggggcggggcgaggcggagaggtgcggcggcagccaatcagagcggcgcgctccgaaagtttccttttatggcgaggcggcggcggcggcggccctataaaaagcgaagcgcgcggcgggcgggagtcgctgcgcgctgccttcgccccgtgccccgctccgccgccgcctcgcgccgcccgccccggctctgactgaccgcgttactcccacaggtgagcgggcgggacggcccttctcctccgggctgtaattagcgcttggtttaatgacggcttgtttcttttctgtggctgcgtgaaagccttgaggggctccgggagggccctttgtgcggggggagcggctcggggggtgcgtgcgtgtgtgtgtgcgtggggagcgccgcgtgcggctccgcgctgcccggcggctgtgagcgctgcgggcgcggcgcggggctttgtgcgctccgcagtgtgcgcgaggggagcgcggccgggggcggtgccccgcggtgcggggggggctgcgaggggaacaaaggctgcgtgcggggtgtgtgcgtgggggggtgagcagggggtgtgggcgcgtcggtcgggctgcaaccccccctgcacccccctccccgagttgctgagcacggcccggcttcgggtgcggggctccgtacggggcgtggcgcggggctcgccgtgccgggcggggggtggcggcaggtgggggtgccgggcggggcggggccgcctcgggccggggagggctcgggggaggggcgcggcggcccccggagcgccggcggctgtcgaggcgcggcgagccgcagccattgccttttatggtaatcgtgcgagagggcgcagggacttcctttgtcccaaatctgtgcggagccgaaatctgggaggcgccgccgcaccccctctagcgggcgcggggcgaagcggtgcggcgccggcaggaaggaaatgggcggggagggccttcgtgcgtcgccgcgccgccgtccccttctccctctccagcctcggggctgtccgcggggggacggctgccttcgggggggacggggcagggcggggttcggcttctggcgtgtgaccggcggctctagagcctctgctaaccatgttcatgccttcttctttttcctacagctcctgggcaacgtgctggttattgtgctgtctcatcattttggcaaagaattcgggattcgaaccggtgccgccaccatgaagttgcctgttaggctgttggtgctgatgttctggattcctgcttccagcagtgacatcaagatgacccagagccctagcagcatgtacgccagcctgggcgagagagtgaccatcacctgcaaggccagccaggacatcaacagatacctgaactggttccagcagaagcctggcaagagccctaagaccctgatctacagagccaacagactgctggacggcgtgcctagcagattcagcggcagcggcagcggccaggactacagcctgaccatcagcagcctggactacgaggacatgggcatctactactgcctgcagtacgacgagttccctctgaccttcggcgacggcaccaagctggagctgaagggtggtggtggatccggtggtggtggatccggtggtggtggatccggtggtggtggatccgaggtgaagctggtggagagcggcggcgacctggtgaagcctggcggcagcctgaagctgagctgcgccgccagcggcttcaccttcagcagctacgccatgagctgggtgagacagaaccctgagaagagactggagtgggtggccagcatcagcaagggcggcaacacctactaccctaacagcgtgaagggcagattcaccatcagcagagacaacgccagaaacatcctgtacctgcagatgagcagcctgagaagcgaggacaccgccctgtactactgcgccagaggctggggcgactacggctggttcgcctactggggccaggtgaccctggtgaccgtgagcgcctacccatacgatgttccagattacgcttagtaactcgaggacggggtgaactacgcctgaggatccgatctttttccctctgccaaaaattatggggacatcatgaagccccttgagcatctgacttctggctaataaaggaaatttattttcattgcaatagtgtgttggaattttttgtgtctctcactcggcctaggtagataagtagcatggcgggttaatcattaactacaaggaacccctagtgatggagttggccactccctctctgcgcgctcgctcgctcactgaggccgggcgaccaaaggtcgcccgacgcccgggctttgcccgggcggcctcagtgagcgagcgagcgcgcag

SEQ ID NO: 2214 - DNA, 2652 bp, Artificial Sequence
  source: /note="Description of Artificial Sequence: Synthetic polynucleotide"
ctgcgcgctcgctcgctcactgaggccgcccgggcaaagcccgggcgtcgggcgacctttggtcgcccggcctcagtgagcgagcgagcgcgcagagagggagtggccaactccatcactaggggttccttgtagttaatgattaacccgccatgctacttatctaccagggtaatggggatcctctagaactatagctagtcgacataacgcgtgatctaacatatcctggtgtggagtagcggacgctgctatgacagaggctcgggggcctgagctggctctgtgagctggggaggaggcagacagccaggccttgtctgcaagcagacctggcagcattgggctggccgccccccagggcctcctcttcatgcccagtgaatgactcaccttggcacagacacaatgttcggggtgggcacagtgcctgcttcccgccgcaccccagcccccctcaaatgccttccgagaagcccattgagcagggggcttgcattgcaccccagcctgacagcctggcatcttgggataaaagcagcacagccccctaggggctgcccttgctgtgtggcgccaccggcggtggagaacaaggctctattcagcctgtgcccaggaaaggggatcaggggatgcccaggcatggacagtgggtggcagggggggagaggagggctgtctgcttcccagaagtccaaggacacaaatgggtgaggggagagctctccccatagctgggctgcggcccaaccccaccccctcaggctatgccagggggtgttgccaggggcacccgggcatcgccagtctagcccactccttcataaagccctcgcatcccaggagcgagcagagccagagcaggttggagaggagacgcatcacctccgctgctcgcggggatcctctagaagcttcgtttagtgaaccgtcagatcgcctggagacgccatccacgctgttttgacctccatagaagacaccgggaccgatccagcctccgcggattcgaatcccggccgggaacggtgcattggaacgcggattccccgtgccaagagtgacgtaagtaccgcctatagagtctataggcccacaaaaaatgctttcttcttttaatatacttttttgtttatcttatttctaatactttccctaatctctttctttcagggcaataatgatacaatgtatcatgcctctttgcaccattctaaagaataacagtgataatttctgggttaaggcaatagcaatatttctgcatataaatatttctgcatataaattgtaactgatgtaagaggtttcatattgctaatagcagctacaatccagctaccattctgcttttattttatggttgggataaggctggattattctgagtccaagctaggcccttttgctaatcatgttcatacctcttatcttcctcccacagctcctgggcaacgtgctggtctgtgtgctggcccatcactttggcaaagaattgggattcgaaccggtgccgccaccatgaagttgcctgttaggctgttggtgctgatgttctggattcctgcttccagcagtgacatcaagatgacccagagccctagcagcatgtacgccagcctgggcgagagagtgaccatcacctgcaaggccagccaggacatcaacagatacctgaactggttccagcagaagcctggcaagagccctaagaccctgatctacagagccaacagactgctggacggcgtgcctagcagattcagcggcagcggcagcggccaggactacagcctgaccatcagcagcctggactacgaggacatgggcatctactactgcctgcagtacgacgagttccctctgaccttcggcgacggcaccaagctggagctgaagggtggtggtggatccggtggtggtggatccgaggtgaagctggtggagagcggcggcgacctggtgaagcctggcggcagcctgaagctgagctgcgccgccagcggcttcaccttcagcagctacgccatgagctgggtgagacagaaccctgagaagagactggagtgggtggccagcatcagcaagggcggcaacacctactaccctaacagcgtgaagggcagattcaccatcagcagagacaacgccagaaacatcctgtacctgcagatgagcagcctgagaagcgaggacaccgccctgtactactgcgccagaggctggggcgactacggctggttcgcctactggggccaggtgaccctggtgaccgtgagcgcctacccatacgatgttccagattacgcttagtaactcgaggacggggtgaactacgcctgaggatccgatctttttccctctgccaaaaattatggggacatcatgaagccccttgagcatctgacttctggctaataaaggaaatttattttcattgcaatagtgtgttggaattttttgtgtctctcactcggcctaggtagataagtagcatggcgggttaatcattaactacaaggaacccctagtgatggagttggccactccctctctgcgcgctcgctcgctcactgaggccgggcgaccaaaggtcgcccgacgcccgggctttgcccgggcggcctcagtgagcgagcgagcgcgcag

SEQ ID NO: 2215 - DNA, 2667 bp, Artificial Sequence
  source: /note="Description of Artificial Sequence: Synthetic polynucleotide"
ctgcgcgctcgctcgctcactgaggccgcccgggcaaagcccgggcgtcgggcgacctttggtcgcccggcctcagtgagcgagcgagcgcgcagagagggagtggccaactccatcactaggggttccttgtagttaatgattaacccgccatgctacttatctaccagggtaatggggatcctctagaactatagctagtcgacataacgcgtgatctaacatatcctggtgtggagtagcggacgctgctatgacagaggctcgggggcctgagctggctctgtgagctggggaggaggcagacagccaggccttgtctgcaagcagacctggcagcattgggctggccgccccccagggcctcctcttcatgcccagtgaatgactcaccttggcacagacacaatgttcggggtgggcacagtgcctgcttcccgccgcaccccagcccccctcaaatgccttccgagaagcccattgagcagggggcttgcattgcaccccagcctgacagcctggcatcttgggataaaagcagcacagccccctaggggctgcccttgctgtgtggcgccaccggcggtggagaacaaggctctattcagcctgtgcccaggaaaggggatcaggggatgcccaggcatggacagtgggtggcagggggggagaggagggctgtctgcttcccagaagtccaaggacacaaatgggtgaggggagagctctccccatagctgggctgcggcccaaccccaccccctcaggctatgccagggggtgttgccaggggcacccgggcatcgccagtctagcccactccttcataaagccctcgcatcccaggagcgagcagagccagagcaggttggagaggagacgcatcacctccgctgctcgcggggatcctctagaagcttcgtttagtgaaccgtcagatcgcctggagacgccatccacgctgttttgacctccatagaagacaccgggaccgatccagcctccgcggattcgaatcccggccgggaacggtgcattggaacgcggattccccgtgccaagagtgacgtaagtaccgcctatagagtctataggcccacaaaaaatgctttcttcttttaatatacttttttgtttatcttatttctaatactttccctaatctctttctttcagggcaataatgatacaatgtatcatgcctctttgcaccattctaaagaataacagtgataatttctgggttaaggcaatagcaatatttctgcatataaatatttctgcatataaattgtaactgatgtaagaggtttcatattgctaatagcagctacaatccagctaccattctgcttttattttatggttgggataaggctggattattctgagtccaagctaggcccttttgctaatcatgttcatacctcttatcttcctcccacagctcctgggcaacgtgctggtctgtgtgctggcccatcactttggcaaagaattgggattcgaaccggtgccgccaccatgaagttgcctgttaggctgttggtgctgatgttctggattcctgcttccagcagtgacatcaagatgacccagagccctagcagcatgtacgccagcctgggcgagagagtgaccatcacctgcaaggccagccaggacatcaacagatacctgaactggttccagcagaagcctggcaagagccctaagaccctgatctacagagccaacagactgctggacggcgtgcctagcagattcagcggcagcggcagcggccaggactacagcctgaccatcagcagcctggactacgaggacatgggcatctactactgcctgcagtacgacgagttccctctgaccttcggcgacggcaccaagctggagctgaagggtggtggtggatccggtggtggtggatccggtggtggtggatccgaggtgaagctggtggagagcggcggcgacctggtgaagcctggcggcagcctgaagctgagctgcgccgccagcggcttcaccttcagcagctacgccatgagctgggtgagacagaaccctgagaagagactggagtgggtggccagcatcagcaagggcggcaacacctactaccctaacagcgtgaagggcagattcaccatcagcagagacaacgccagaaacatcctgtacctgcagatgagcagcctgagaagcgaggacaccgccctgtactactgcgccagaggctggggcgactacggctggttcgcctactggggccaggtgaccctggtgaccgtgagcgcctacccatacgatgttccagattacgcttagtaactcgaggacggggtgaactacgcctgaggatccgatctttttccctctgccaaaaattatggggacatcatgaagccccttgagcatctgacttctggctaataaaggaaatttattttcattgcaatagtgtgttggaattttttgtgtctctcactcggcctaggtagataagtagcatggcgggttaatcattaactacaaggaacccctagtgatggagttggccactccctctctgcgcgctcgctcgctcactgaggccgggcgaccaaaggtcgcccgacgcccgggctttgcccgggcggcctcagtgagcgagcgagcgcgcag

SEQ ID NO: 2216 - DNA, 2682 bp, Artificial Sequence
  source: /note="Description of Artificial Sequence: Synthetic polynucleotide"
ctgcgcgctcgctcgctcactgaggccgcccgggcaaagcccgggcgtcgggcgacctttggtcgcccggcctcagtgagcgagcgagcgcgcagagagggagtggccaactccatcactaggggttccttgtagttaatgattaacccgccatgctacttatctaccagggtaatggggatcctctagaactatagctagtcgacataacgcgtgatctaacatatcctggtgtggagtagcggacgctgctatgacagaggctcgggggcctgagctggctctgtgagctggggaggaggcagacagccaggccttgtctgcaagcagacctggcagcattgggctggccgccccccagggcctcctcttcatgcccagtgaatgactcaccttggcacagacacaatgttcggggtgggcacagtgcctgcttcccgccgcaccccagcccccctcaaatgccttccgagaagcccattgagcagggggcttgcattgcaccccagcctgacagcctggcatcttgggataaaagcagcacagccccctaggggctgcccttgctgtgtggcgccaccggcggtggagaacaaggctctattcagcctgtgcccaggaaaggggatcaggggatgcccaggcatggacagtgggtggcagggggggagaggagggctgtctgcttcccagaagtccaaggacacaaatgggtgaggggagagctctccccatagctgggctgcggcccaaccccaccccctcaggctatgccagggggtgttgccaggggcacccgggcatcgccagtctagcccactccttcataaagccctcgcatcccaggagcgagcagagccagagcaggttggagaggagacgcatcacctccgctgctcgcggggatcctctagaagcttcgtttagtgaaccgtcagatcgcctggagacgccatccacgctgttttgacctccatagaagacaccgggaccgatccagcctccgcggattcgaatcccggccgggaacggtgcattggaacgcggattccccgtgccaagagtgacgtaagtaccgcctatagagtctataggcccacaaaaaatgctttcttcttttaatatacttttttgtttatcttatttctaatactttccctaatctctttctttcagggcaataatgatacaatgtatcatgcctctttgcaccattctaaagaataacagtgataatttctgggttaaggcaatagcaatatttctgcatataaatatttctgcatataaattgtaactgatgtaagaggtttcatattgctaatagcagctacaatccagctaccattctgcttttattttatggttgggataaggctggattattctgagtccaagctaggcccttttgctaatcatgttcatacctcttatcttcctcccacagctcctgggcaacgtgctggtctgtgtgctggcccatcactttggcaaagaattgggattcgaaccggtgccgccaccatgaagttgcctgttaggctgttggtgctgatgttctggattcctgcttccagcagtgacatcaagatgacccagagccctagcagcatgtacgccagcctgggcgagagagtgaccatcacctgcaaggccagccaggacatcaacagatacctgaactggttccagcagaagcctggcaagagccctaagaccctgatctacagagccaacagactgctggacggcgtgcctagcagattcagcggcagcggcagcggccaggactacagcctgaccatcagcagcctggactacgaggacatgggcatctactactgcctgcagtacgacgagttccctctgaccttcggcgacggcaccaagctggagctgaagggtggtggtggatccggtggtggtggatccggtggtggtggatccggtggtggtggatccgaggtgaagctggtggagagcggcggcgacctggtgaagcctggcggcagcctgaagctgagctgcgccgccagcggcttcaccttcagcagctacgccatgagctgggtgagacagaaccctgagaagagactggagtgggtggccagcatcagcaagggcggcaacacctactaccctaacagcgtgaagggcagattcaccatcagcagagacaacgccagaaacatcctgtacctgcagatgagcagcctgagaagcgaggacaccgccctgtactactgcgccagaggctggggcgactacggctggttcgcctactggggccaggtgaccctggtgaccgtgagcgcctacccatacgatgttccagattacgcttagtaactcgaggacggggtgaactacgcctgaggatccgatctttttccctctgccaaaaattatggggacatcatgaagccccttgagcatctgacttctggctaataaaggaaatttattttcattgcaatagtgtgttggaattttttgtgtctctcactcggcctaggtagataagtagcatggcgggttaatcattaactacaaggaacccctagtgatggagttggccactccctctctgcgcgctcgctcgctcactgaggccgggcgaccaaaggtcgcccgacgcccgggctttgcccgggcggcctcagtgagcgagcgagcgcgcag

SEQ ID NO: 2217 - DNA, 2510 bp, Artificial Sequence
  source: /note="Description of Artificial Sequence: Synthetic polynucleotide"
ctgcgcgctcgctcgctcactgaggccgcccgggcaaagcccgggcgtcgggcgacctttggtcgcccggcctcagtgagcgagcgagcgcgcagagagggagtggccaactccatcactaggggttccttgtagttaatgattaacccgccatgctacttatctaccagggtaatggggatcctctagaactatagctagtcgacataacgcgttagtatctgcagagggccctgcgtatgagtgcaagtgggttttaggaccaggatgaggcggggtgggggtgcctacctgacgaccgaccccgacccactggacaagcacccaacccccattccccaaattgcgcatcccctatcagagagggggaggggaaacaggatgcggcgaggcgcgtgcgcactgccagcttcagcaccgcggacagtgccttcgcccccgcctggcggcgcgcgccaccgccgcctcagcactgaaggcgcgctgacgtcactcgccggtcccccgcaaactccccttcccggccaccttggtcgcgtccgcgccgccgccggcccagccggaccgcaccacgcgaggcgcgagataggggggcacgggcgcgaccatctgcgctgcggcgccggcgactcagcgctgcctcagtctgcggtgggcagcggaggagtcgtgtcgtgcctgagagcgcagctgtgctcctgggcaccgcgcagtccgcccccgcggctcctggccagaccacccctaggaccccctgccccaagtcgcagccaagcttcgtttagtgaaccgtcagatcgcctggagacgccatccacgctgttttgacctccatagaagacaccgggaccgatccagcctccgcggattcgaatcccggccgggaacggtgcattggaacgcggattccccgtgccaagagtgacgtaagtaccgcctatagagtctataggcccacaaaaaatgctttcttcttttaatatacttttttgtttatcttatttctaatactttccctaatctctttctttcagggcaataatgatacaatgtatcatgcctctttgcaccattctaaagaataacagtgataatttctgggttaaggcaatagcaatatttctgcatataaatatttctgcatataaattgtaactgatgtaagaggtttcatattgctaatagcagctacaatccagctaccattctgcttttattttatggttgggataaggctggattattctgagtccaagctaggcccttttgctaatcatgttcatacctcttatcttcctcccacagctcctgggcaacgtgctggtctgtgtgctggcccatcactttggcaaagaattgggattcgaaccggtgccgccaccatgaagttgcctgttaggctgttggtgctgatgttctggattcctgcttccagcagtgacatcaagatgacccagagccctagcagcatgtacgccagcctgggcgagagagtgaccatcacctgcaaggccagccaggacatcaacagatacctgaactggttccagcagaagcctggcaagagccctaagaccctgatctacagagccaacagactgctggacggcgtgcctagcagattcagcggcagcggcagcggccaggactacagcctgaccatcagcagcctggactacgaggacatgggcatctactactgcctgcagtacgacgagttccctctgaccttcggcgacggcaccaagctggagctgaagggtggtggtggatccggtggtggtggatccgaggtgaagctggtggagagcggcggcgacctggtgaagcctggcggcagcctgaagctgagctgcgccgccagcggcttcaccttcagcagctacgccatgagctgggtgagacagaaccctgagaagagactggagtgggtggccagcatcagcaagggcggcaacacctactaccctaacagcgtgaagggcagattcaccatcagcagagacaacgccagaaacatcctgtacctgcagatgagcagcctgagaagcgaggacaccgccctgtactactgcgccagaggctggggcgactacggctggttcgcctactggggccaggtgaccctggtgaccgtgagcgcctacccatacgatgttccagattacgcttagtaactcgaggacggggtgaactacgcctgaggatccgatctttttccctctgccaaaaattatggggacatcatgaagccccttgagcatctgacttctggctaataaaggaaatttattttcattgcaatagtgtgttggaattttttgtgtctctcactcggcctaggtagataagtagcatggcgggttaatcattaactacaaggaacccctagtgatggagttggccactccctctctgcgcgctcgctcgctcactgaggccgggcgaccaaaggtcgcccgacgcccgggctttgcccgggcggcctcagtgagcgagcgagcgcgcag

SEQ ID NO: 2218 - DNA, 2525 bp, Artificial Sequence
  source: /note="Description of Artificial Sequence: Synthetic polynucleotide"
ctgcgcgctcgctcgctcactgaggccgcccgggcaaagcccgggcgtcgggcgacctttggtcgcccggcctcagtgagcgagcgagcgcgcagagagggagtggccaactccatcactaggggttccttgtagttaatgattaacccgccatgctacttatctaccagggtaatggggatcctctagaactatagctagtcgacataacgcgttagtatctgcagagggccctgcgtatgagtgcaagtgggttttaggaccaggatgaggcggggtgggggtgcctacctgacgaccgaccccgacccactggacaagcacccaacccccattccccaaattgcgcatcccctatcagagagggggaggggaaacaggatgcggcgaggcgcgtgcgcactgccagcttcagcaccgcggacagtgccttcgcccccgcctggcggcgcgcgccaccgccgcctcagcactgaaggcgcgctgacgtcactcgccggtcccccgcaaactccccttcccggccaccttggtcgcgtccgcgccgccgccggcccagccggaccgcaccacgcgaggcgcgagataggggggcacgggcgcgaccatctgcgctgcggcgccggcgactcagcgctgcctcagtctgcggtgggcagcggaggagtcgtgtcgtgcctgagagcgcagctgtgctcctgggcaccgcgcagtccgcccccgcggctcctggccagaccacccctaggaccccctgccccaagtcgcagccaagcttcgtttagtgaaccgtcagatcgcctggagacgccatccacgctgttttgacctccatagaagacaccgggaccgatccagcctccgcggattcgaatcccggccgggaacggtgcattggaacgcggattccccgtgccaagagtgacgtaagtaccgcctatagagtctataggcccacaaaaaatgctttcttcttttaatatacttttttgtttatcttatttctaatactttccctaatctctttctttcagggcaataatgatacaatgtatcatgcctctttgcaccattctaaagaataacagtgataatttctgggttaaggcaatagcaatatttctgcatataaatatttctgcatataaattgtaactgatgtaagaggtttcatattgctaatagcagctacaatccagctaccattctgcttttattttatggttgggataaggctggattattctgagtccaagctaggcccttttgctaatcatgttcatacctcttatcttcctcccacagctcctgggcaacgtgctggtctgtgtgctggcccatcactttggcaaagaattgggattcgaaccggtgccgccaccatgaagttgcctgttaggctgttggtgctgatgttctggattcctgcttccagcagtgacatcaagatgacccagagccctagcagcatgtacgccagcctgggcgagagagtgaccatcacctgcaaggccagccaggacatcaacagatacctgaactggttccagcagaagcctggcaagagccctaagaccctgatctacagagccaacagactgctggacggcgtgcctagcagattcagcggcagcggcagcggccaggactacagcctgaccatcagcagcctggactacgaggacatgggcatctactactgcctgcagtacgacgagttccctctgaccttcggcgacggcaccaagctggagctgaagggtggtggtggatccggtggtggtggatccggtggtggtggatccgaggtgaagctggtggagagcggcggcgacctggtgaagcctggcggcagcctgaagctgagctgcgccgccagcggcttcaccttcagcagctacgccatgagctgggtgagacagaaccctgagaagagactggagtgggtggccagcatcagcaagggcggcaacacctactaccctaacagcgtgaagggcagattcaccatcagcagagacaacgccagaaacatcctgtacctgcagatgagcagcctgagaagcgaggacaccgccctgtactactgcgccagaggctggggcgactacggctggttcgcctactggggccaggtgaccctggtgaccgtgagcgcctacccatacgatgttccagattacgcttagtaactcgaggacggggtgaactacgcctgaggatccgatctttttccctctgccaaaaattatggggacatcatgaagccccttgagcatctgacttctggctaataaaggaaatttattttcattgcaatagtgtgttggaattttttgtgtctctcactcggcctaggtagataagtagcatggcgggttaatcattaactacaaggaacccctagtgatggagttggccactccctctctgcgcgctcgctcgctcactgaggccgggcgaccaaaggtcgcccgacgcccgggctttgcccgggcggcctcagtgagcgagcgagcgcgcag

SEQ ID NO: 2219 - DNA, 2540 bp, Artificial Sequence
  source: /note="Description of Artificial Sequence: Synthetic polynucleotide"
ctgcgcgctcgctcgctcactgaggccgcccgggcaaagcccgggcgtcgggcgacctttggtcgcccggcctcagtgagcgagcgagcgcgcagagagggagtggccaactccatcactaggggttccttgtagttaatgattaacccgccatgctacttatctaccagggtaatggggatcctctagaactatagctagtcgacataacgcgttagtatctgcagagggccctgcgtatgagtgcaagtgggttttaggaccaggatgaggcggggtgggggtgcctacctgacgaccgaccccgacccactggacaagcacccaacccccattccccaaattgcgcatcccctatcagagagggggaggggaaacaggatgcggcgaggcgcgtgcgcactgccagcttcagcaccgcggacagtgccttcgcccccgcctggcggcgcgcgccaccgccgcctcagcactgaaggcgcgctgacgtcactcgccggtcccccgcaaactccccttcccggccaccttggtcgcgtccgcgccgccgccggcccagccggaccgcaccacgcgaggcgcgagataggggggcacgggcgcgaccatctgcgctgcggcgccggcgactcagcgctgcctcagtctgcggtgggcagcggaggagtcgtgtcgtgcctgagagcgcagctgtgctcctgggcaccgcgcagtccgcccccgcggctcctggccagaccacccctaggaccccctgccccaagtcgcagccaagcttcgtttagtgaaccgtcagatcgcctggagacgccatccacgctgttttgacctccatagaagacaccgggaccgatccagcctccgcggattcgaatcccggccgggaacggtgcattggaacgcggattccccgtgccaagagtgacgtaagtaccgcctatagagtctataggcccacaaaaaatgctttcttcttttaatatacttttttgtttatcttatttctaatactttccctaatctctttctttcagggcaataatgatacaatgtatcatgcctctttgcaccattctaaagaataacagtgataatttctgggttaaggcaatagcaatatttctgcatataaatatttctgcatataaattgtaactgatgtaagaggtttcatattgctaatagcagctacaatccagctaccattctgcttttattttatggttgggataaggctggattattctgagtccaagctaggcccttttgctaatcatgttcatacctcttatcttcctcccacagctcctgggcaacgtgctggtctgtgtgctggcccatcactttggcaaagaattgggattcgaaccggtgccgccaccatgaagttgcctgttaggctgttggtgctgatgttctggattcctgcttccagcagtgacatcaagatgacccagagccctagcagcatgtacgccagcctgggcgagagagtgaccatcacctgcaaggccagccaggacatcaacagatacctgaactggttccagcagaagcctggcaagagccctaagaccctgatctacagagccaacagactgctggacggcgtgcctagcagattcagcggcagcggcagcggccaggactacagcctgaccatcagcagcctggactacgaggacatgggcatctactactgcctgcagtacgacgagttccctctgaccttcggcgacggcaccaagctggagctgaagggtggtggtggatccggtggtggtggatccggtggtggtggatccggtggtggtggatccgaggtgaagctggtggagagcggcggcgacctggtgaagcctggcggcagcctgaagctgagctgcgccgccagcggcttcaccttcagcagctacgccatgagctgggtgagacagaaccctgagaagagactggagtgggtggccagcatcagcaagggcggcaacacctactaccctaacagcgtgaagggcagattcaccatcagcagagacaacgccagaaacatcctgtacctgcagatgagcagcctgagaagcgaggacaccgccctgtactactgcgccagaggctggggcgactacggctggttcgcctactggggccaggtgaccctggtgaccgtgagcgcctacccatacgatgttccagattacgcttagtaactcgaggacggggtgaactacgcctgaggatccgatctttttccctctgccaaaaattatggggacatcatgaagccccttgagcatctgacttctggctaataaaggaaatttattttcattgcaatagtgtgttggaattttttgtgtctctcactcggcctaggtagataagtagcatggcgggttaatcattaactacaaggaacccctagtgatggagttggccactccctctctgcgcgctcgctcgctcactgaggccgggcgaccaaaggtcgcccgacgcccgggctttgcccgggcggcctcagtgagcgagcgagcgcgcag

SEQ ID NO: 2220 - DNA, 3091 bp, Artificial Sequence
  source: /note="Description of Artificial Sequence: Synthetic polynucleotide"
ctgcgcgctcgctcgctcactgaggccgcccgggcaaagcccgggcgtcgggcgacctttggtcgcccggcctcagtgagcgagcgagcgcgcagagagggagtggccaactccatcactaggggttccttgtagttaatgattaacccgccatgctacttatctaccagggtaatggggatcctctagaactatagctagtcgacataacgcgtctagttattaatagtaatcaattacggggtcattagttcatagcccatatatggagttccgcgttacataacttacggtaaatggcccgcctggctgaccgcccaacgacccccgcccattgacgtcaataatgacgtatgttcccatagtaacgccaatagggactttccattgacgtcaatgggtggagtatttacggtaaactgcccacttggcagtacatcaagtgtatcatatgccaagtacgccccctattgacgtcaatgacggtaaatggcccgcctggcattatgcccagtacatgaccttatgggactttcctacttggcagtacatctacgtattagtcatcgctattaccatggtcgaggtgagccccacgttctgcttcactctccccatctcccccccctccccacccccaattttgtatttatttattttttaattattttgtgcagcgatgggggcggggggggggggggggcgcgcgccaggcggggcggggcggggcgaggggcggggcggggcgaggcggagaggtgcggcggcagccaatcagagcggcgcgctccgaaagtttccttttatggcgaggcggcggcggcggcggccctataaaaagcgaagcgcgcggcgggcgggagtcgctgcgcgctgccttcgccccgtgccccgctccgccgccgcctcgcgccgcccgccccggctctgactgaccgcgttactcccacaggtgagcgggcgggacggcccttctcctccgggctgtaattagcgcttggtttaatgacggcttgtttcttttctgtggctgcgtgaaagccttgaggggctccgggagggccctttgtgcggggggagcggctcggggggtgcgtgcgtgtgtgtgtgcgtggggagcgccgcgtgcggctccgcgctgcccggcggctgtgagcgctgcgggcgcggcgcggggctttgtgcgctccgcagtgtgcgcgaggggagcgcggccgggggcggtgccccgcggtgcggggggggctgcgaggggaacaaaggctgcgtgcggggtgtgtgcgtgggggggtgagcagggggtgtgggcgcgtcggtcgggctgcaaccccccctgcacccccctccccgagttgctgagcacggcccggcttcgggtgcggggctccgtacggggcgtggcgcggggctcgccgtgccgggcggggggtggcggcaggtgggggtgccgggcggggcggggccgcctcgggccggggagggctcgggggaggggcgcggcggcccccggagcgccggcggctgtcgaggcgcggcgagccgcagccattgccttttatggtaatcgtgcgagagggcgcagggacttcctttgtcccaaatctgtgcggagccgaaatctgggaggcgccgccgcaccccctctagcgggcgcggggcgaagcggtgcggcgccggcaggaaggaaatgggcggggagggccttcgtgcgtcgccgcgccgccgtccccttctccctctccagcctcggggctgtccgcggggggacggctgccttcgggggggacggggcagggcggggttcggcttctggcgtgtgaccggcggctctagagcctctgctaaccatgttcatgccttcttctttttcctacagctcctgggcaacgtgctggttattgtgctgtctcatcattttggcaaagaattcgggattcgaaccggtgccgccaccatgaacttcgggctcagcttgattttccttgtccttgttttaaaaggtgtccagtgtaagctggtggagagcggcggcgacctggtgaagcctggcggcagcctgaagctgagctgcgccgccagcggcttcaccttcagcagctacgccatgagctgggtgagacagaaccctgagaagagactggagtgggtggccagcatcagcaagggcggcaacacctactaccctaacagcgtgaagggcagattcaccatcagcagagacaacgccagaaacatcctgtacctgcagatgagcagcctgagaagcgaggacaccgccctgtactactgcgccagaggctggggcgactacggctggttcgcctactggggccaggtgaccctggtgaccgtgagcgccggtggtggtggatccggtggtggtggatccggtggtggtggatccgacatcaagatgacccagagccctagcagcatgtacgccagcctgggcgagagagtgaccatcacctgcaaggccagccaggacatcaacagatacctgaactggttccagcagaagcctggcaagagccctaagaccctgatctacagagccaacagactgctggacggcgtgcctagcagattcagcggcagcggcagcggccaggactacagcctgaccatcagcagcctggactacgaggacatgggcatctactactgcctgcagtacgacgagttccctctgaccttcggcgacggcaccaagctggagctgaagtacccatacgatgttccagattacgcttagtaactcgaggacggggtgaactacgcctgaggatccgatctttttccctctgccaaaaattatggggacatcatgaagccccttgagcatctgacttctggctaataaaggaaatttattttcattgcaatagtgtgttggaattttttgtgtctctcactcggcctaggtagataagtagcatggcgggttaatcattaactacaaggaacccctagtgatggagttggccactccctctctgcgcgctcgctcgctcactgaggccgggcgaccaaaggtcgcccgacgcccgggctttgcccgggcggcctcagtgagcgagcgagcgcgcag

SEQ ID NO: 2221 - DNA, 3082 bp, Artificial Sequence
  source: /note="Description of Artificial Sequence: Synthetic polynucleotide"
ctgcgcgctcgctcgctcactgaggccgcccgggcaaagcccgggcgtcgggcgacctttggtcgcccggcctcagtgagcgagcgagcgcgcagagagggagtggccaactccatcactaggggttccttgtagttaatgattaacccgccatgctacttatctaccagggtaatggggatcctctagaactatagctagtcgacataacgcgtctagttattaatagtaatcaattacggggtcattagttcatagcccatatatggagttccgcgttacataacttacggtaaatggcccgcctggctgaccgcccaacgacccccgcccattgacgtcaataatgacgtatgttcccatagtaacgccaatagggactttccattgacgtcaatgggtggagtatttacggtaaactgcccacttggcagtacatcaagtgtatcatatgccaagtacgccccctattgacgtcaatgacggtaaatggcccgcctggcattatgcccagtacatgaccttatgggactttcctacttggcagtacatctacgtattagtcatcgctattaccatggtcgaggtgagccccacgttctgcttcactctccccatctcccccccctccccacccccaattttgtatttatttattttttaattattttgtgcagcgatgggggcggggggggggggggggcgcgcgccaggcggggcggggcggggcgaggggcggggcggggcgaggcggagaggtgcggcggcagccaatcagagcggcgcgctccgaaagtttccttttatggcgaggcggcggcggcggcggccctataaaaagcgaagcgcgcggcgggcgggagtcgctgcgcgctgccttcgccccgtgccccgctccgccgccgcctcgcgccgcccgccccggctctgactgaccgcgttactcccacaggtgagcgggcgggacggcccttctcctccgggctgtaattagcgcttggtttaatgacggcttgtttcttttctgtggctgcgtgaaagccttgaggggctccgggagggccctttgtgcggggggagcggctcggggggtgcgtgcgtgtgtgtgtgcgtggggagcgccgcgtgcggctccgcgctgcccggcggctgtgagcgctgcgggcgcggcgcggggctttgtgcgctccgcagtgtgcgcgaggggagcgcggccgggggcggtgccccgcggtgcggggggggctgcgaggggaacaaaggctgcgtgcggggtgtgtgcgtgggggggtgagcagggggtgtgggcgcgtcggtcgggctgcaaccccccctgcacccccctccccgagttgctgagcacggcccggcttcgggtgcggggctccgtacggggcgtggcgcggggctcgccgtgccgggcggggggtggcggcaggtgggggtgccgggcggggcggggccgcctcgggccggggagggctcgggggaggggcgcggcggcccccggagcgccggcggctgtcgaggcgcggcgagccgcagccattgccttttatggtaatcgtgcgagagggcgcagggacttcctttgtcccaaatctgtgcggagccgaaatctgggaggcgccgccgcaccccctctagcgggcgcggggcgaagcggtgcggcgccggcaggaaggaaatgggcggggagggccttcgtgcgtcgccgcgccgccgtccccttctccctctccagcctcggggctgtccgcggggggacggctgccttcgggggggacggggcagggcggggttcggcttctggcgtgtgaccggcggctctagagcctctgctaaccatgttcatgccttcttctttttcctacagctcctgggcaacgtgctggttattgtgctgtctcatcattttggcaaagaattcgggattcgaaccggtgccgccaccatgaacttcgggctcagcttgattttccttgtccttgttttaaaaggtgtccagtgtgagagcggcggcgacctggtgaagcctggcggcagcctgaagctgagctgcgccgccagcggcttcaccttcagcagctacgccatgagctgggtgagacagaaccctgagaagagactggagtgggtggccagcatcagcaagggcggcaacacctactaccctaacagcgtgaagggcagattcaccatcagcagagacaacgccagaaacatcctgtacctgcagatgagcagcctgagaagcgaggacaccgccctgtactactgcgccagaggctggggcgactacggctggttcgcctactggggccaggtgaccctggtgaccgtgagcgccggtggtggtggatccggtggtggtggatccggtggtggtggatccgacatcaagatgacccagagccctagcagcatgtacgccagcctgggcgagagagtgaccatcacctgcaaggccagccaggacatcaacagatacctgaactggttccagcagaagcctggcaagagccctaagaccctgatctacagagccaacagactgctggacggcgtgcctagcagattcagcggcagcggcagcggccaggactacagcctgaccatcagcagcctggactacgaggacatgggcatctactactgcctgcagtacgacgagttccctctgaccttcggcgacggcaccaagctggagctgaagtacccatacgatgttccagattacgcttagtaactcgaggacggggtgaactacgcctgaggatccgatctttttccctctgccaaaaattatggggacatcatgaagccccttgagcatctgacttctggctaataaaggaaatttattttcattgcaatagtgtgttggaattttttgtgtctctcactcggcctaggtagataagtagcatggcgggttaatcattaactacaaggaacccctagtgatggagttggccactccctctctgcgcgctcgctcgctcactgaggccgggcgaccaaaggtcgcccgacgcccgggctttgcccgggcggcctcagtgagcgagcgagcgcgcag

SEQ ID NO: 2222 - DNA, 3103 bp, Artificial Sequence
  source: /note="Description of Artificial Sequence: Synthetic polynucleotide"
ctgcgcgctcgctcgctcactgaggccgcccgggcaaagcccgggcgtcgggcgacctttggtcgcccggcctcagtgagcgagcgagcgcgcagagagggagtggccaactccatcactaggggttccttgtagttaatgattaacccgccatgctacttatctaccagggtaatggggatcctctagaactatagctagtcgacataacgcgtctagttattaatagtaatcaattacggggtcattagttcatagcccatatatggagttccgcgttacataacttacggtaaatggcccgcctggctgaccgcccaacgacccccgcccattgacgtcaataatgacgtatgttcccatagtaacgccaatagggactttccattgacgtcaatgggtggagtatttacggtaaactgcccacttggcagtacatcaagtgtatcatatgccaagtacgccccctattgacgtcaatgacggtaaatggcccgcctggcattatgcccagtacatgaccttatgggactttcctacttggcagtacatctacgtattagtcatcgctattaccatggtcgaggtgagccccacgttctgcttcactctccccatctcccccccctccccacccccaattttgtatttatttattttttaattattttgtgcagcgatgggggcggggggggggggggggcgcgcgccaggcggggcggggcggggcgaggggcggggcggggcgaggcggagaggtgcggcggcagccaatcagagcggcgcgctccgaaagtttccttttatggcgaggcggcggcggcggcggccctataaaaagcgaagcgcgcggcgggcgggagtcgctgcgcgctgccttcgccccgtgccccgctccgccgccgcctcgcgccgcccgccccggctctgactgaccgcgttactcccacaggtgagcgggcgggacggcccttctcctccgggctgtaattagcgcttggtttaatgacggcttgtttcttttctgtggctgcgtgaaagccttgaggggctccgggagggccctttgtgcggggggagcggctcggggggtgcgtgcgtgtgtgtgtgcgtggggagcgccgcgtgcggctccgcgctgcccggcggctgtgagcgctgcgggcgcggcgcggggctttgtgcgctccgcagtgtgcgcgaggggagcgcggccgggggcggtgccccgcggtgcggggggggctgcgaggggaacaaaggctgcgtgcggggtgtgtgcgtgggggggtgagcagggggtgtgggcgcgtcggtcgggctgcaaccccccctgcacccccctccccgagttgctgagcacggcccggcttcgggtgcggggctccgtacggggcgtggcgcggggctcgccgtgccgggcggggggtggcggcaggtgggggtgccgggcggggcggggccgcctcgggccggggagggctcgggggaggggcgcggcggcccccggagcgccggcggctgtcgaggcgcggcgagccgcagccattgccttttatggtaatcgtgcgagagggcgcagggacttcctttgtcccaaatctgtgcggagccgaaatctgggaggcgccgccgcaccccctctagcgggcgcggggcgaagcggtgcggcgccggcaggaaggaaatgggcggggagggccttcgtgcgtcgccgcgccgccgtccccttctccctctccagcctcggggctgtccgcggggggacggctgccttcgggggggacggggcagggcggggttcggcttctggcgtgtgaccggcggctctagagcctctgctaaccatgttcatgccttcttctttttcctacagctcctgggcaacgtgctggttattgtgctgtctcatcattttggcaaagaattcgggattcgaaccggtgccgccaccatgaacttcgggctcagcttgattttccttgtccttgttttaaaaggtgtccagtgtgacatcgaggtgaagctggtggagagcggcggcgacctggtgaagcctggcggcagcctgaagctgagctgcgccgccagcggcttcaccttcagcagctacgccatgagctgggtgagacagaaccctgagaagagactggagtgggtggccagcatcagcaagggcggcaacacctactaccctaacagcgtgaagggcagattcaccatcagcagagacaacgccagaaacatcctgtacctgcagatgagcagcctgagaagcgaggacaccgccctgtactactgcgccagaggctggggcgactacggctggttcgcctactggggccaggtgaccctggtgaccgtgagcgccggtggtggtggatccggtggtggtggatccggtggtggtggatccgacatcaagatgacccagagccctagcagcatgtacgccagcctgggcgagagagtgaccatcacctgcaaggccagccaggacatcaacagatacctgaactggttccagcagaagcctggcaagagccctaagaccctgatctacagagccaacagactgctggacggcgtgcctagcagattcagcggcagcggcagcggccaggactacagcctgaccatcagcagcctggactacgaggacatgggcatctactactgcctgcagtacgacgagttccctctgaccttcggcgacggcaccaagctggagctgaagtacccatacgatgttccagattacgcttagtaactcgaggacggggtgaactacgcctgaggatccgatctttttccctctgccaaaaattatggggacatcatgaagccccttgagcatctgacttctggctaataaaggaaatttattttcattgcaatagtgtgttggaattttttgtgtctctcactcggcctaggtagataagtagcatggcgggttaatcattaactacaaggaacccctagtgatggagttggccactccctctctgcgcgctcgctcgctcactgaggccgggcgaccaaaggtcgcccgacgcccgggctttgcccgggcggcctcagtgagcgagcgagcgcgcag

SEQ ID NO: 2223 - DNA, 3109 bp, Artificial Sequence
  source: /note="Description of Artificial Sequence: Synthetic polynucleotide"
ctgcgcgctcgctcgctcactgaggccgcccgggcaaagcccgggcgtcgggcgacctttggtcgcccggcctcagtgagcgagcgagcgcgcagagagggagtggccaactccatcactaggggttccttgtagttaatgattaacccgccatgctacttatctaccagggtaatggggatcctctagaactatagctagtcgacataacgcgtctagttattaatagtaatcaattacggggtcattagttcatagcccatatatggagttccgcgttacataacttacggtaaatggcccgcctggctgaccgcccaacgacccccgcccattgacgtcaataatgacgtatgttcccatagtaacgccaatagggactttccattgacgtcaatgggtggagtatttacggtaaactgcccacttggcagtacatcaagtgtatcatatgccaagtacgccccctattgacgtcaatgacggtaaatggcccgcctggcattatgcccagtacatgaccttatgggactttcctacttggcagtacatctacgtattagtcatcgctattaccatggtcgaggtgagccccacgttctgcttcactctccccatctcccccccctccccacccccaattttgtatttatttattttttaattattttgtgcagcgatgggggcggggggggggggggggcgcgcgccaggcggggcggggcggggcgaggggcggggcggggcgaggcggagaggtgcggcggcagccaatcagagcggcgcgctccgaaagtttccttttatggcgaggcggcggcggcggcggccctataaaaagcgaagcgcgcggcgggcgggagtcgctgcgcgctgccttcgccccgtgccccgctccgccgccgcctcgcgccgcccgccccggctctgactgaccgcgttactcccacaggtgagcgggcgggacggcccttctcctccgggctgtaattagcgcttggtttaatgacggcttgtttcttttctgtggctgcgtgaaagccttgaggggctccgggagggccctttgtgcggggggagcggctcggggggtgcgtgcgtgtgtgtgtgcgtggggagcgccgcgtgcggctccgcgctgcccggcggctgtgagcgctgcgggcgcggcgcggggctttgtgcgctccgcagtgtgcgcgaggggagcgcggccgggggcggtgccccgcggtgcggggggggctgcgaggggaacaaaggctgcgtgcggggtgtgtgcgtgggggggtgagcagggggtgtgggcgcgtcggtcgggctgcaaccccccctgcacccccctccccgagttgctgagcacggcccggcttcgggtgcggggctccgtacggggcgtggcgcggggctcgccgtgccgggcggggggtggcggcaggtgggggtgccgggcggggcggggccgcctcgggccggggagggctcgggggaggggcgcggcggcccccggagcgccggcggctgtcgaggcgcggcgagccgcagccattgccttttatggtaatcgtgcgagagggcgcagggacttcctttgtcccaaatctgtgcggagccgaaatctgggaggcgccgccgcaccccctctagcgggcgcggggcgaagcggtgcggcgccggcaggaaggaaatgggcggggagggccttcgtgcgtcgccgcgccgccgtccccttctccctctccagcctcggggctgtccgcggggggacggctgccttcgggggggacggggcagggcggggttcggcttctggcgtgtgaccggcggctctagagcctctgctaaccatgttcatgccttcttctttttcctacagctcctgggcaacgtgctggttattgtgctgtctcatcattttggcaaagaattcgggattcgaaccggtgccgccaccatgaacttcgggctcagcttgattttccttgtccttgttttaaaaggtgtccagtgtgacatcaagatggaggtgaagctggtggagagcggcggcgacctggtgaagcctggcggcagcctgaagctgagctgcgccgccagcggcttcaccttcagcagctacgccatgagctgggtgagacagaaccctgagaagagactggagtgggtggccagcatcagcaagggcggcaacacctactaccctaacagcgtgaagggcagattcaccatcagcagagacaacgccagaaacatcctgtacctgcagatgagcagcctgagaagcgaggacaccgccctgtactactgcgccagaggctggggcgactacggctggttcgcctactggggccaggtgaccctggtgaccgtgagcgccggtggtggtggatccggtggtggtggatccggtggtggtggatccgacatcaagatgacccagagccctagcagcatgtacgccagcctgggcgagagagtgaccatcacctgcaaggccagccaggacatcaacagatacctgaactggttccagcagaagcctggcaagagccctaagaccctgatctacagagccaacagactgctggacggcgtgcctagcagattcagcggcagcggcagcggccaggactacagcctgaccatcagcagcctggactacgaggacatgggcatctactactgcctgcagtacgacgagttccctctgaccttcggcgacggcaccaagctggagctgaagtacccatacgatgttccagattacgcttagtaactcgaggacggggtgaactacgcctgaggatccgatctttttccctctgccaaaaattatggggacatcatgaagccccttgagcatctgacttctggctaataaaggaaatttattttcattgcaatagtgtgttggaattttttgtgtctctcactcggcctaggtagataagtagcatggcgggttaatcattaactacaaggaacccctagtgatggagttggccactccctctctgcgcgctcgctcgctcactgaggccgggcgaccaaaggtcgcccgacgcccgggctttgcccgggcggcctcagtgagcgagcgagcgcgcag

SEQ ID NO: 2224 - DNA, 3115 bp, Artificial Sequence
  source: /note="Description of Artificial Sequence: Synthetic polynucleotide"
ctgcgcgctcgctcgctcactgaggccgcccgggcaaagcccgggcgtcgggcgacctttggtcgcccggcctcagtgagcgagcgagcgcgcagagagggagtggccaactccatcactaggggttccttgtagttaatgattaacccgccatgctacttatctaccagggtaatggggatcctctagaactatagctagtcgacataacgcgtctagttattaatagtaatcaattacggggtcattagttcatagcccatatatggagttccgcgttacataacttacggtaaatggcccgcctggctgaccgcccaacgacccccgcccattgacgtcaataatgacgtatgttcccatagtaacgccaatagggactttccattgacgtcaatgggtggagtatttacggtaaactgcccacttggcagtacatcaagtgtatcatatgccaagtacgccccctattgacgtcaatgacggtaaatggcccgcctggcattatgcccagtacatgaccttatgggactttcctacttggcagtacatctacgtattagtcatcgctattaccatggtcgaggtgagccccacgttctgcttcactctccccatctcccccccctccccacccccaattttgtatttatttattttttaattattttgtgcagcgatgggggcggggggggggggggggcgcgcgccaggcggggcggggcggggcgaggggcggggcggggcgaggcggagaggtgcggcggcagccaatcagagcggcgcgctccgaaagtttccttttatggcgaggcggcggcggcggcggccctataaaaagcgaagcgcgcggcgggcgggagtcgctgcgcgctgccttcgccccgtgccccgctccgccgccgcctcgcgccgcccgccccggctctgactgaccgcgttactcccacaggtgagcgggcgggacggcccttctcctccgggctgtaattagcgcttggtttaatgacggcttgtttcttttctgtggctgcgtgaaagccttgaggggctccgggagggccctttgtgcggggggagcggctcggggggtgcgtgcgtgtgtgtgtgcgtggggagcgccgcgtgcggctccgcgctgcccggcggctgtgagcgctgcgggcgcggcgcggggctttgtgcgctccgcagtgtgcgcgaggggagcgcggccgggggcggtgccccgcggtgcggggggggctgcgaggggaacaaaggctgcgtgcggggtgtgtgcgtgggggggtgagcagggggtgtgggcgcgtcggtcgggctgcaaccccccctgcacccccctccccgagttgctgagcacggcccggcttcgggtgcggggctccgtacggggcgtggcgcggggctcgccgtgccgggcggggggtggcggcaggtgggggtgccgggcggggcggggccgcctcgggccggggagggctcgggggaggggcgcggcggcccccggagcgccggcggctgtcgaggcgcggcgagccgcagccattgccttttatggtaatcgtgcgagagggcgcagggacttcctttgtcccaaatctgtgcggagccgaaatctgggaggcgccgccgcaccccctctagcgggcgcggggcgaagcggtgcggcgccggcaggaaggaaatgggcggggagggccttcgtgcgtcgccgcgccgccgtccccttctccctctccagcctcggggctgtccgcggggggacggctgccttcgggggggacggggcagggcggggttcggcttctggcgtgtgaccggcggctctagagcctctgctaaccatgttcatgccttcttctttttcctacagctcctgggcaacgtgctggttattgtgctgtctcatcattttggcaaagaattcgggattcgaaccggtgccgccaccatgaacttcgggctcagcttgattttccttgtccttgttttaaaaggtgtccagtgtgacatcaagatgacccaggaggtgaagctggtggagagcggcggcgacctggtgaagcctggcggcagcctgaagctgagctgcgccgccagcggcttcaccttcagcagctacgccatgagctgggtgagacagaaccctgagaagagactggagtgggtggccagcatcagcaagggcggcaacacctactaccctaacagcgtgaagggcagattcaccatcagcagagacaacgccagaaacatcctgtacctgcagatgagcagcctgagaagcgaggacaccgccctgtactactgcgccagaggctggggcgactacggctggttcgcctactggggccaggtgaccctggtgaccgtgagcgccggtggtggtggatccggtggtggtggatccggtggtggtggatccgacatcaagatgacccagagccctagcagcatgtacgccagcctgggcgagagagtgaccatcacctgcaaggccagccaggacatcaacagatacctgaactggttccagcagaagcctggcaagagccctaagaccctgatctacagagccaacagactgctggacggcgtgcctagcagattcagcggcagcggcagcggccaggactacagcctgaccatcagcagcctggactacgaggacatgggcatctactactgcctgcagtacgacgagttccctctgaccttcggcgacggcaccaagctggagctgaagtacccatacgatgttccagattacgcttagtaactcgaggacggggtgaactacgcctgaggatccgatctttttccctctgccaaaaattatggggacatcatgaagccccttgagcatctgacttctggctaataaaggaaatttattttcattgcaatagtgtgttggaattttttgtgtctctcactcggcctaggtagataagtagcatggcgggttaatcattaactacaaggaacccctagtgatggagttggccactccctctctgcgcgctcgctcgctcactgaggccgggcgaccaaaggtcgcccgacgcccgggctttgcccgggcggcctcagtgagcgagcgagcgcgcag

SEQ ID NO: 2225 - DNA, 3121 bp, Artificial Sequence
  source: /note="Description of Artificial Sequence: Synthetic polynucleotide"
ctgcgcgctcgctcgctcactgaggccgcccgggcaaagcccgggcgtcgggcgacctttggtcgcccggcctcagtgagcgagcgagcgcgcagagagggagtggccaactccatcactaggggttccttgtagttaatgattaacccgccatgctacttatctaccagggtaatggggatcctctagaactatagctagtcgacataacgcgtctagttattaatagtaatcaattacggggtcattagttcatagcccatatatggagttccgcgttacataacttacggtaaatggcccgcctggctgaccgcccaacgacccccgcccattgacgtcaataatgacgtatgttcccatagtaacgccaatagggactttccattgacgtcaatgggtggagtatttacggtaaactgcccacttggcagtacatcaagtgtatcatatgccaagtacgccccctattgacgtcaatgacggtaaatggcccgcctggcattatgcccagtacatgaccttatgggactttcctacttggcagtacatctacgtattagtcatcgctattaccatggtcgaggtgagccccacgttctgcttcactctccccatctcccccccctccccacccccaattttgtatttatttattttttaattattttgtgcagcgatgggggcggggggggggggggggcgcgcgccaggcggggcggggcggggcgaggggcggggcggggcgaggcggagaggtgcggcggcagccaatcagagcggcgcgctccgaaagtttccttttatggcgaggcggcggcggcggcggccctataaaaagcgaagcgcgcggcgggcgggagtcgctgcgcgctgccttcgccccgtgccccgctccgccgccgcctcgcgccgcccgccccggctctgactgaccgcgttactcccacaggtgagcgggcgggacggcccttctcctccgggctgtaattagcgcttggtttaatgacggcttgtttcttttctgtggctgcgtgaaagccttgaggggctccgggagggccctttgtgcggggggagcggctcggggggtgcgtgcgtgtgtgtgtgcgtggggagcgccgcgtgcggctccgcgctgcccggcggctgtgagcgctgcgggcgcggcgcggggctttgtgcgctccgcagtgtgcgcgaggggagcgcggccgggggcggtgccccgcggtgcggggggggctgcgaggggaacaaaggctgcgtgcggggtgtgtgcgtgggggggtgagcagggggtgtgggcgcgtcggtcgggctgcaaccccccctgcacccccctccccgagttgctgagcacggcccggcttcgggtgcggggctccgtacggggcgtggcgcggggctcgccgtgccgggcggggggtggcggcaggtgggggtgccgggcggggcggggccgcctcgggccggggagggctcgggggaggggcgcggcggcccccggagcgccggcggctgtcgaggcgcggcgagccgcagccattgccttttatggtaatcgtgcgagagggcgcagggacttcctttgtcccaaatctgtgcggagccgaaatctgggaggcgccgccgcaccccctctagcgggcgcggggcgaagcggtgcggcgccggcaggaaggaaatgggcggggagggccttcgtgcgtcgccgcgccgccgtccccttctccctctccagcctcggggctgtccgcggggggacggctgccttcgggggggacggggcagggcggggttcggcttctggcgtgtgaccggcggctctagagcctctgctaaccatgttcatgccttcttctttttcctacagctcctgggcaacgtgctggttattgtgctgtctcatcattttggcaaagaattcgggattcgaaccggtgccgccaccatgaacttcgggctcagcttgattttccttgtccttgttttaaaaggtgtccagtgtgacatcaagatgacccagagccctgaggtgaagctggtggagagcggcggcgacctggtgaagcctggcggcagcctgaagctgagctgcgccgccagcggcttcaccttcagcagctacgccatgagctgggtgagacagaaccctgagaagagactggagtgggtggccagcatcagcaagggcggcaacacctactaccctaacagcgtgaagggcagattcaccatcagcagagacaacgccagaaacatcctgtacctgcagatgagcagcctgagaagcgaggacaccgccctgtactactgcgccagaggctggggcgactacggctggttcgcctactggggccaggtgaccctggtgaccgtgagcgccggtggtggtggatccggtggtggtggatccggtggtggtggatccgacatcaagatgacccagagccctagcagcatgtacgccagcctgggcgagagagtgaccatcacctgcaaggccagccaggacatcaacagatacctgaactggttccagcagaagcctggcaagagccctaagaccctgatctacagagccaacagactgctggacggcgtgcctagcagattcagcggcagcggcagcggccaggactacagcctgaccatcagcagcctggactacgaggacatgggcatctactactgcctgcagtacgacgagttccctctgaccttcggcgacggcaccaagctggagctgaagtacccatacgatgttccagattacgcttagtaactcgaggacggggtgaactacgcctgaggatccgatctttttccctctgccaaaaattatggggacatcatgaagccccttgagcatctgacttctggctaataaaggaaatttattttcattgcaatagtgtgttggaattttttgtgtctctcactcggcctaggtagataagtagcatggcgggttaatcattaactacaaggaacccctagtgatggagttggccactccctctctgcgcgctcgctcgctcactgaggccgggcgaccaaaggtcgcccgacgcccgggctttgcccgggcggcctcagtgagcgagcgagcgcgcag

SEQ ID NO: 2226 - DNA, 3097 bp, Artificial Sequence
  source: /note="Description of Artificial Sequence: Synthetic polynucleotide"
ctgcgcgctcgctcgctcactgaggccgcccgggcaaagcccgggcgtcgggcgacctttggtcgcccggcctcagtgagcgagcgagcgcgcagagagggagtggccaactccatcactaggggttccttgtagttaatgattaacccgccatgctacttatctaccagggtaatggggatcctctagaactatagctagtcgacataacgcgtctagttattaatagtaatcaattacggggtcattagttcatagcccatatatggagttccgcgttacataacttacggtaaatggcccgcctggctgaccgcccaacgacccccgcccattgacgtcaataatgacgtatgttcccatagtaacgccaatagggactttccattgacgtcaatgggtggagtatttacggtaaactgcccacttggcagtacatcaagtgtatcatatgccaagtacgccccctattgacgtcaatgacggtaaatggcccgcctggcattatgcccagtacatgaccttatgggactttcctacttggcagtacatctacgtattagtcatcgctattaccatggtcgaggtgagccccacgttctgcttcactctccccatctcccccccctccccacccccaattttgtatttatttattttttaattattttgtgcagcgatgggggcggggggggggggggggcgcgcgccaggcggggcggggcggggcgaggggcggggcggggcgaggcggagaggtgcggcggcagccaatcagagcggcgcgctccgaaagtttccttttatggcgaggcggcggcggcggcggccctataaaaagcgaagcgcgcggcgggcgggagtcgctgcgcgctgccttcgccccgtgccccgctccgccgccgcctcgcgccgcccgccccggctctgactgaccgcgttactcccacaggtgagcgggcgggacggcccttctcctccgggctgtaattagcgcttggtttaatgacggcttgtttcttttctgtggctgcgtgaaagccttgaggggctccgggagggccctttgtgcggggggagcggctcggggggtgcgtgcgtgtgtgtgtgcgtggggagcgccgcgtgcggctccgcgctgcccggcggctgtgagcgctgcgggcgcggcgcggggctttgtgcgctccgcagtgtgcgcgaggggagcgcggccgggggcggtgccccgcggtgcggggggggctgcgaggggaacaaaggctgcgtgcggggtgtgtgcgtgggggggtgagcagggggtgtgggcgcgtcggtcgggctgcaaccccccctgcacccccctccccgagttgctgagcacggcccggcttcgggtgcggggctccgtacggggcgtggcgcggggctcgccgtgccgggcggggggtggcggcaggtgggggtgccgggcggggcggggccgcctcgggccggggagggctcgggggaggggcgcggcggcccccggagcgccggcggctgtcgaggcgcggcgagccgcagccattgccttttatggtaatcgtgcgagagggcgcagggacttcctttgtcccaaatctgtgcggagccgaaatctgggaggcgccgccgcaccccctctagcgggcgcggggcgaagcggtgcggcgccggcaggaaggaaatgggcggggagggccttcgtgcgtcgccgcgccgccgtccccttctccctctccagcctcggggctgtccgcggggggacggctgccttcgggggggacggggcagggcggggttcggcttctggcgtgtgaccggcggctctagagcctctgctaaccatgttcatgccttcttctttttcctacagctcctgggcaacgtgctggttattgtgctgtctcatcattttggcaaagaattcgggattcgaaccggtgccgccaccatgggcgtgaaggtgctgttcgccctgatctgcatcgccgtggccgaggccgccgccgaggtgaagctggtggagagcggcggcgacctggtgaagcctggcggcagcctgaagctgagctgcgccgccagcggcttcaccttcagcagctacgccatgagctgggtgagacagaaccctgagaagagactggagtgggtggccagcatcagcaagggcggcaacacctactaccctaacagcgtgaagggcagattcaccatcagcagagacaacgccagaaacatcctgtacctgcagatgagcagcctgagaagcgaggacaccgccctgtactactgcgccagaggctggggcgactacggctggttcgcctactggggccaggtgaccctggtgaccgtgagcgccggtggtggtggatccggtggtggtggatccggtggtggtggatccgacatcaagatgacccagagccctagcagcatgtacgccagcctgggcgagagagtgaccatcacctgcaaggccagccaggacatcaacagatacctgaactggttccagcagaagcctggcaagagccctaagaccctgatctacagagccaacagactgctggacggcgtgcctagcagattcagcggcagcggcagcggccaggactacagcctgaccatcagcagcctggactacgaggacatgggcatctactactgcctgcagtacgacgagttccctctgaccttcggcgacggcaccaagctggagctgaagtacccatacgatgttccagattacgcttagtaactcgaggacggggtgaactacgcctgaggatccgatctttttccctctgccaaaaattatggggacatcatgaagccccttgagcatctgacttctggctaataaaggaaatttattttcattgcaatagtgtgttggaattttttgtgtctctcactcggcctaggtagataagtagcatggcgggttaatcattaactacaaggaacccctagtgatggagttggccactccctctctgcgcgctcgctcgctcactgaggccgggcgaccaaaggtcgcccgacgcccgggctttgcccgggcggcctcagtgagcgagcgagcgcgcag

SEQ ID NO: 2227 - DNA, 3124 bp, Artificial Sequence
  source: /note="Description of Artificial Sequence: Synthetic polynucleotide"
ctgcgcgctcgctcgctcactgaggccgcccgggcaaagcccgggcgtcgggcgacctttggtcgcccggcctcagtgagcgagcgagcgcgcagagagggagtggccaactccatcactaggggttccttgtagttaatgattaacccgccatgctacttatctaccagggtaatggggatcctctagaactatagctagtcgacataacgcgtctagttattaatagtaatcaattacggggtcattagttcatagcccatatatggagttccgcgttacataacttacggtaaatggcccgcctggctgaccgcccaacgacccccgcccattgacgtcaataatgacgtatgttcccatagtaacgccaatagggactttccattgacgtcaatgggtggagtatttacggtaaactgcccacttggcagtacatcaagtgtatcatatgccaagtacgccccctattgacgtcaatgacggtaaatggcccgcctggcattatgcccagtacatgaccttatgggactttcctacttggcagtacatctacgtattagtcatcgctattaccatggtcgaggtgagccccacgttctgcttcactctccccatctcccccccctccccacccccaattttgtatttatttattttttaattattttgtgcagcgatgggggcggggggggggggggggcgcgcgccaggcggggcggggcggggcgaggggcggggcggggcgaggcggagaggtgcggcggcagccaatcagagcggcgcgctccgaaagtttccttttatggcgaggcggcggcggcggcggccctataaaaagcgaagcgcgcggcgggcgggagtcgctgcgcgctgccttcgccccgtgccccgctccgccgccgcctcgcgccgcccgccccggctctgactgaccgcgttactcccacaggtgagcgggcgggacggcccttctcctccgggctgtaattagcgcttggtttaatgacggcttgtttcttttctgtggctgcgtgaaagccttgaggggctccgggagggccctttgtgcggggggagcggctcggggggtgcgtgcgtgtgtgtgtgcgtggggagcgccgcgtgcggctccgcgctgcccggcggctgtgagcgctgcgggcgcggcgcggggctttgtgcgctccgcagtgtgcgcgaggggagcgcggccgggggcggtgccccgcggtgcggggggggctgcgaggggaacaaaggctgcgtgcggggtgtgtgcgtgggggggtgagcagggggtgtgggcgcgtcggtcgggctgcaaccccccctgcacccccctccccgagttgctgagcacggcccggcttcgggtgcggggctccgtacggggcgtggcgcggggctcgccgtgccgggcggggggtggcggcaggtgggggtgccgggcggggcggggccgcctcgggccggggagggctcgggggaggggcgcggcggcccccggagcgccggcggctgtcgaggcgcggcgagccgcagccattgccttttatggtaatcgtgcgagagggcgcagggacttcctttgtcccaaatctgtgcggagccgaaatctgggaggcgccgccgcaccccctctagcgggcgcggggcgaagcggtgcggcgccggcaggaaggaaatgggcggggagggccttcgtgcgtcgccgcgccgccgtccccttctccctctccagcctcggggctgtccgcggggggacggctgccttcgggggggacggggcagggcggggttcggcttctggcgtgtgaccggcggctctagagcctctgctaaccatgttcatgccttcttctttttcctacagctcctgggcaacgtgctggttattgtgctgtctcatcattttggcaaagaattcgggattcgaaccggtgccgccaccatggccaccggcagcaggaccagcctgctgctggccttcggcctgctgtgcctgccctggctgcaggagggcagcgccgccgccgaggtgaagctggtggagagcggcggcgacctggtgaagcctggcggcagcctgaagctgagctgcgccgccagcggcttcaccttcagcagctacgccatgagctgggtgagacagaaccctgagaagagactggagtgggtggccagcatcagcaagggcggcaacacctactaccctaacagcgtgaagggcagattcaccatcagcagagacaacgccagaaacatcctgtacctgcagatgagcagcctgagaagcgaggacaccgccctgtactactgcgccagaggctggggcgactacggctggttcgcctactggggccaggtgaccctggtgaccgtgagcgccggtggtggtggatccggtggtggtggatccggtggtggtggatccgacatcaagatgacccagagccctagcagcatgtacgccagcctgggcgagagagtgaccatcacctgcaaggccagccaggacatcaacagatacctgaactggttccagcagaagcctggcaagagccctaagaccctgatctacagagccaacagactgctggacggcgtgcctagcagattcagcggcagcggcagcggccaggactacagcctgaccatcagcagcctggactacgaggacatgggcatctactactgcctgcagtacgacgagttccctctgaccttcggcgacggcaccaagctggagctgaagtacccatacgatgttccagattacgcttagtaactcgaggacggggtgaactacgcctgaggatccgatctttttccctctgccaaaaattatggggacatcatgaagccccttgagcatctgacttctggctaataaaggaaatttattttcattgcaatagtgtgttggaattttttgtgtctctcactcggcctaggtagataagtagcatggcgggttaatcattaactacaaggaacccctagtgatggagttggccactccctctctgcgcgctcgctcgctcactgaggccgggcgaccaaaggtcgcccgacgcccgggctttgcccgggcggcctcagtgagcgagcgagcgcgcag

SEQ ID NO: 2228 - DNA, 3109 bp, Artificial Sequence
  source: /note="Description of Artificial Sequence: Synthetic polynucleotide"
ctgcgcgctcgctcgctcactgaggccgcccgggcaaagcccgggcgtcgggcgacctttggtcgcccggcctcagtgagcgagcgagcgcgcagagagggagtggccaactccatcactaggggttccttgtagttaatgattaacccgccatgctacttatctaccagggtaatggggatcctctagaactatagctagtcgacataacgcgtctagttattaatagtaatcaattacggggtcattagttcatagcccatatatggagttccgcgttacataacttacggtaaatggcccgcctggctgaccgcccaacgacccccgcccattgacgtcaataatgacgtatgttcccatagtaacgccaatagggactttccattgacgtcaatgggtggagtatttacggtaaactgcccacttggcagtacatcaagtgtatcatatgccaagtacgccccctattgacgtcaatgacggtaaatggcccgcctggcattatgcccagtacatgaccttatgggactttcctacttggcagtacatctacgtattagtcatcgctattaccatggtcgaggtgagccccacgttctgcttcactctccccatctcccccccctccccacccccaattttgtatttatttattttttaattattttgtgcagcgatgggggcggggggggggggggggcgcgcgccaggcggggcggggcggggcgaggggcggggcggggcgaggcggagaggtgcggcggcagccaatcagagcggcgcgctccgaaagtttccttttatggcgaggcggcggcggcggcggccctataaaaagcgaagcgcgcggcgggcgggagtcgctgcgcgctgccttcgccccgtgccccgctccgccgccgcctcgcgccgcccgccccggctctgactgaccgcgttactcccacaggtgagcgggcgggacggcccttctcctccgggctgtaattagcgcttggtttaatgacggcttgtttcttttctgtggctgcgtgaaagccttgaggggctccgggagggccctttgtgcggggggagcggctcggggggtgcgtgcgtgtgtgtgtgcgtggggagcgccgcgtgcggctccgcgctgcccggcggctgtgagcgctgcgggcgcggcgcggggctttgtgcgctccgcagtgtgcgcgaggggagcgcggccgggggcggtgccccgcggtgcggggggggctgcgaggggaacaaaggctgcgtgcggggtgtgtgcgtgggggggtgagcagggggtgtgggcgcgtcggtcgggctgcaaccccccctgcacccccctccccgagttgctgagcacggcccggcttcgggtgcggggctccgtacggggcgtggcgcggggctcgccgtgccgggcggggggtggcggcaggtgggggtgccgggcggggcggggccgcctcgggccggggagggctcgggggaggggcgcggcggcccccggagcgccggcggctgtcgaggcgcggcgagccgcagccattgccttttatggtaatcgtgcgagagggcgcagggacttcctttgtcccaaatctgtgcggagccgaaatctgggaggcgccgccgcaccccctctagcgggcgcggggcgaagcggtgcggcgccggcaggaaggaaatgggcggggagggccttcgtgcgtcgccgcgccgccgtccccttctccctctccagcctcggggctgtccgcggggggacggctgccttcgggggggacggggcagggcggggttcggcttctggcgtgtgaccggcggctctagagcctctgctaaccatgttcatgccttcttctttttcctacagctcctgggcaacgtgctggttattgtgctgtctcatcattttggcaaagaattcgggattcgaaccggtgccgccaccatggagaccgacaccctgctgctgtgggtgctgctgctgtgggtgcccggcagcaccggcgacgccgccgaggtgaagctggtggagagcggcggcgacctggtgaagcctggcggcagcctgaagctgagctgcgccgccagcggcttcaccttcagcagctacgccatgagctgggtgagacagaaccctgagaagagactggagtgggtggccagcatcagcaagggcggcaacacctactaccctaacagcgtgaagggcagattcaccatcagcagagacaacgccagaaacatcctgtacctgcagatgagcagcctgagaagcgaggacaccgccctgtactactgcgccagaggctggggcgactacggctggttcgcctactggggccaggtgaccctggtgaccgtgagcgccggtggtggtggatccggtggtggtggatccggtggtggtggatccgacatcaagatgacccagagccctagcagcatgtacgccagcctgggcgagagagtgaccatcacctgcaaggccagccaggacatcaacagatacctgaactggttccagcagaagcctggcaagagccctaagaccctgatctacagagccaacagactgctggacggcgtgcctagcagattcagcggcagcggcagcggccaggactacagcctgaccatcagcagcctggactacgaggacatgggcatctactactgcctgcagtacgacgagttccctctgaccttcggcgacggcaccaagctggagctgaagtacccatacgatgttccagattacgcttagtaactcgaggacggggtgaactacgcctgaggatccgatctttttccctctgccaaaaattatggggacatcatgaagccccttgagcatctgacttctggctaataaaggaaatttattttcattgcaatagtgtgttggaattttttgtgtctctcactcggcctaggtagataagtagcatggcgggttaatcattaactacaaggaacccctagtgatggagttggccactccctctctgcgcgctcgctcgctcactgaggccgggcgaccaaaggtcgcccgacgcccgggctttgcccgggcggcctcagtgagcgagcgagcgcgcag

SEQ ID NO: 2229 - DNA, 3157 bp, Artificial Sequence
  source: /note="Description of Artificial Sequence: Synthetic polynucleotide"
ctgcgcgctcgctcgctcactgaggccgcccgggcaaagcccgggcgtcgggcgacctttggtcgcccggcctcagtgagcgagcgagcgcgcagagagggagtggccaactccatcactaggggttccttgtagttaatgattaacccgccatgctacttatctaccagggtaatggggatcctctagaactatagctagtcgacataacgcgtctagttattaatagtaatcaattacggggtcattagttcatagcccatatatggagttccgcgttacataacttacggtaaatggcccgcctggctgaccgcccaacgacccccgcccattgacgtcaataatgacgtatgttcccatagtaacgccaatagggactttccattgacgtcaatgggtggagtatttacggtaaactgcccacttggcagtacatcaagtgtatcatatgccaagtacgccccctattgacgtcaatgacggtaaatggcccgcctggcattatgcccagtacatgaccttatgggactttcctacttggcagtacatctacgtattagtcatcgctattaccatggtcgaggtgagccccacgttctgcttcactctccccatctcccccccctccccacccccaattttgtatttatttattttttaattattttgtgcagcgatgggggcggggggggggggggggcgcgcgccaggcggggcggggcggggcgaggggcggggcggggcgaggcggagaggtgcggcggcagccaatcagagcggcgcgctccgaaagtttccttttatggcgaggcggcggcggcggcggccctataaaaagcgaagcgcgcggcgggcgggagtcgctgcgcgctgccttcgccccgtgccccgctccgccgccgcctcgcgccgcccgccccggctctgactgaccgcgttactcccacaggtgagcgggcgggacggcccttctcctccgggctgtaattagcgcttggtttaatgacggcttgtttcttttctgtggctgcgtgaaagccttgaggggctccgggagggccctttgtgcggggggagcggctcggggggtgcgtgcgtgtgtgtgtgcgtggggagcgccgcgtgcggctccgcgctgcccggcggctgtgagcgctgcgggcgcggcgcggggctttgtgcgctccgcagtgtgcgcgaggggagcgcggccgggggcggtgccccgcggtgcggggggggctgcgaggggaacaaaggctgcgtgcggggtgtgtgcgtgggggggtgagcagggggtgtgggcgcgtcggtcgggctgcaaccccccctgcacccccctccccgagttgctgagcacggcccggcttcgggtgcggggctccgtacggggcgtggcgcggggctcgccgtgccgggcggggggtggcggcaggtgggggtgccgggcggggcggggccgcctcgggccggggagggctcgggggaggggcgcggcggcccccggagcgccggcggctgtcgaggcgcggcgagccgcagccattgccttttatggtaatcgtgcgagagggcgcagggacttcctttgtcccaaatctgtgcggagccgaaatctgggaggcgccgccgcaccccctctagcgggcgcggggcgaagcggtgcggcgccggcaggaaggaaatgggcggggagggccttcgtgcgtcgccgcgccgccgtccccttctccctctccagcctcggggctgtccgcggggggacggctgccttcgggggggacggggcagggcggggttcggcttctggcgtgtgaccggcggctctagagcctctgctaaccatgttcatgccttcttctttttcctacagctcctgggcaacgtgctggttattgtgctgtctcatcattttggcaaagaattcgggattcgaaccggtgccgccaccatgaacttcgggctcagcttgattttccttgtccttgttttaaaaggtgtccagtgtgacatcaagatgacccagagccctagcagcatgtacgccagcctgggcgagagagtgaccgaggtgaagctggtggagagcggcggcgacctggtgaagcctggcggcagcctgaagctgagctgcgccgccagcggcttcaccttcagcagctacgccatgagctgggtgagacagaaccctgagaagagactggagtgggtggccagcatcagcaagggcggcaacacctactaccctaacagcgtgaagggcagattcaccatcagcagagacaacgccagaaacatcctgtacctgcagatgagcagcctgagaagcgaggacaccgccctgtactactgcgccagaggctggggcgactacggctggttcgcctactggggccaggtgaccctggtgaccgtgagcgccggtggtggtggatccggtggtggtggatccggtggtggtggatccgacatcaagatgacccagagccctagcagcatgtacgccagcctgggcgagagagtgaccatcacctgcaaggccagccaggacatcaacagatacctgaactggttccagcagaagcctggcaagagccctaagaccctgatctacagagccaacagactgctggacggcgtgcctagcagattcagcggcagcggcagcggccaggactacagcctgaccatcagcagcctggactacgaggacatgggcatctactactgcctgcagtacgacgagttccctctgaccttcggcgacggcaccaagctggagctgaagtacccatacgatgttccagattacgcttagtaactcgaggacggggtgaactacgcctgaggatccgatctttttccctctgccaaaaattatggggacatcatgaagccccttgagcatctgacttctggctaataaaggaaatttattttcattgcaatagtgtgttggaattttttgtgtctctcactcggcctaggtagataagtagcatggcgggttaatcattaactacaaggaacccctagtgatggagttggccactccctctctgcgcgctcgctcgctcactgaggccgggcgaccaaaggtcgcccgacgcccgggctttgcccgggcggcctcagtgagcgagcgagcgcgcag

SEQ ID NO: 2230 - DNA, 3760 bp, Artificial Sequence
  source: /note="Description of Artificial Sequence: Synthetic polynucleotide"
ctgcgcgctcgctcgctcactgaggccgcccgggcaaagcccgggcgtcgggcgacctttggtcgcccggcctcagtgagcgagcgagcgcgcagagagggagtggccaactccatcactaggggttccttgtagttaatgattaacccgccatgctacttatctaccagggtaatggggatcctctagaactatagctagtcgacataacgcgtctagttattaatagtaatcaattacggggtcattagttcatagcccatatatggagttccgcgttacataacttacggtaaatggcccgcctggctgaccgcccaacgacccccgcccattgacgtcaataatgacgtatgttcccatagtaacgccaatagggactttccattgacgtcaatgggtggagtatttacggtaaactgcccacttggcagtacatcaagtgtatcatatgccaagtacgccccctattgacgtcaatgacggtaaatggcccgcctggcattatgcccagtacatgaccttatgggactttcctacttggcagtacatctacgtattagtcatcgctattaccatggtcgaggtgagccccacgttctgcttcactctccccatctcccccccctccccacccccaattttgtatttatttattttttaattattttgtgcagcgatgggggcggggggggggggggggcgcgcgccaggcggggcggggcggggcgaggggcggggcggggcgaggcggagaggtgcggcggcagccaatcagagcggcgcgctccgaaagtttccttttatggcgaggcggcggcggcggcggccctataaaaagcgaagcgcgcggcgggcgggagtcgctgcgcgctgccttcgccccgtgccccgctccgccgccgcctcgcgccgcccgccccggctctgactgaccgcgttactcccacaggtgagcgggcgggacggcccttctcctccgggctgtaattagcgcttggtttaatgacggcttgtttcttttctgtggctgcgtgaaagccttgaggggctccgggagggccctttgtgcggggggagcggctcggggggtgcgtgcgtgtgtgtgtgcgtggggagcgccgcgtgcggctccgcgctgcccggcggctgtgagcgctgcgggcgcggcgcggggctttgtgcgctccgcagtgtgcgcgaggggagcgcggccgggggcggtgccccgcggtgcggggggggctgcgaggggaacaaaggctgcgtgcggggtgtgtgcgtgggggggtgagcagggggtgtgggcgcgtcggtcgggctgcaaccccccctgcacccccctccccgagttgctgagcacggcccggcttcgggtgcggggctccgtacggggcgtggcgcggggctcgccgtgccgggcggggggtggcggcaggtgggggtgccgggcggggcggggccgcctcgggccggggagggctcgggggaggggcgcggcggcccccggagcgccggcggctgtcgaggcgcggcgagccgcagccattgccttttatggtaatcgtgcgagagggcgcagggacttcctttgtcccaaatctgtgcggagccgaaatctgggaggcgccgccgcaccccctctagcgggcgcggggcgaagcggtgcggcgccggcaggaaggaaatgggcggggagggccttcgtgcgtcgccgcgccgccgtccccttctccctctccagcctcggggctgtccgcggggggacggctgccttcgggggggacggggcagggcggggttcggcttctggcgtgtgaccggcggctctagagcctctgctaaccatgttcatgccttcttctttttcctacagctcctgggcaacgtgctggttattgtgctgtctcatcattttggcaaagaattcgggattcgaaccggtgccgccaccatgaacttcgggctcagcttgattttccttgtccttgttttaaaaggtgtccagtgtgaggtgaagctggtggagagcggcggcgacctggtgaagcctggcggcagcctgaagctgagctgcgccgccagcggcttcaccttcagcagctacgccatgagctgggtgagacagaaccctgagaagagactggagtgggtggccagcatcagcaagggcggcaacacctactaccctaacagcgtgaagggcagattcaccatcagcagagacaacgccagaaacatcctgtacctgcagatgagcagcctgagaagcgaggacaccgccctgtactactgcgccagaggctggggcgactacggctggttcgcctactggggccaggtgaccctggtgaccgtgagcgccgccaaaacgacacccccatctgtctatccactggcccctggatctgctgcccaaactaactccatggtgaccctgggatgcctggtcaagggctatttccctgagccagtgacagtgacctggaactctggatccctgtccagcggtgtgcacaccttcccagctgtcctgcagtctgacctctacactctgagcagctcagtgactgtcccctccagcacctggcccagcgagaccgtcacctgcaacgttgcccacccggccagcagcaccaaggtggacaagaaaattagaaagaggcgagagggcagaggaagtcttctaacatgcggtgacgtggaggagaatcccggccctatgaagttgcctgttaggctgttggtgctgatgttctggattcctgcttccagcagtgacatcaagatgacccagagccctagcagcatgtacgccagcctgggcgagagagtgaccatcacctgcaaggccagccaggacatcaacagatacctgaactggttccagcagaagcctggcaagagccctaagaccctgatctacagagccaacagactgctggacggcgtgcctagcagattcagcggcagcggcagcggccaggactacagcctgaccatcagcagcctggactacgaggacatgggcatctactactgcctgcagtacgacgagttccctctgaccttcggcgacggcaccaagctggagctgaagcgggctgatgctgcaccaactgtatccatcttcccaccatccagtgagcagttaacatctggaggtgcctcagtcgtgtgcttcttgaacaacttctaccccaaagacatcaatgtcaagtggaagattgatggcagtgaacgacaaaatggcgtcctgaacagttggactgatcaggacagcaaagacagcacctacagcatgagcagcaccctcacgttgaccaaggacgagtatgaacgacataacagctatacctgtgaggccactcacaagacatcaacttcacccattgtcaagagcttcaacaggaatgagtgttagtaactcgaggacggggtgaactacgcctgaggatccgatctttttccctctgccaaaaattatggggacatcatgaagccccttgagcatctgacttctggctaataaaggaaatttattttcattgcaatagtgtgttggaattttttgtgtctctcactcggcctaggtagataagtagcatggcgggttaatcattaactacaaggaacccctagtgatggagttggccactccctctctgcgcgctcgctcgctcactgaggccgggcgaccaaaggtcgcccgacgcccgggctttgcccgggcggcctcagtgagcgagcgagcgcgcag

SEQ ID NO: 2231 - DNA, 3781 bp, Artificial Sequence
  source: /note="Description of Artificial Sequence: Synthetic polynucleotide"
ctgcgcgctcgctcgctcactgaggccgcccgggcaaagcccgggcgtcgggcgacctttggtcgcccggcctcagtgagcgagcgagcgcgcagagagggagtggccaactccatcactaggggttccttgtagttaatgattaacccgccatgctacttatctaccagggtaatggggatcctctagaactatagctagtcgacataacgcgtctagttattaatagtaatcaattacggggtcattagttcatagcccatatatggagttccgcgttacataacttacggtaaatggcccgcctggctgaccgcccaacgacccccgcccattgacgtcaataatgacgtatgttcccatagtaacgccaatagggactttccattgacgtcaatgggtggagtatttacggtaaactgcccacttggcagtacatcaagtgtatcatatgccaagtacgccccctattgacgtcaatgacggtaaatggcccgcctggcattatgcccagtacatgaccttatgggactttcctacttggcagtacatctacgtattagtcatcgctattaccatggtcgaggtgagccccacgttctgcttcactctccccatctcccccccctccccacccccaattttgtatttatttattttttaattattttgtgcagcgatgggggcggggggggggggggggcgcgcgccaggcggggcggggcggggcgaggggcggggcggggcgaggcggagaggtgcggcggcagccaatcagagcggcgcgctccgaaagtttccttttatggcgaggcggcggcggcggcggccctataaaaagcgaagcgcgcggcgggcgggagtcgctgcgcgctgccttcgccccgtgccccgctccgccgccgcctcgcgccgcccgccccggctctgactgaccgcgttactcccacaggtgagcgggcgggacggcccttctcctccgggctgtaattagcgcttggtttaatgacggcttgtttcttttctgtggctgcgtgaaagccttgaggggctccgggagggccctttgtgcggggggagcggctcggggggtgcgtgcgtgtgtgtgtgcgtggggagcgccgcgtgcggctccgcgctgcccggcggctgtgagcgctgcgggcgcggcgcggggctttgtgcgctccgcagtgtgcgcgaggggagcgcggccgggggcggtgccccgcggtgcggggggggctgcgaggggaacaaaggctgcgtgcggggtgtgtgcgtgggggggtgagcagggggtgtgggcgcgtcggtcgggctgcaaccccccctgcacccccctccccgagttgctgagcacggcccggcttcgggtgcggggctccgtacggggcgtggcgcggggctcgccgtgccgggcggggggtggcggcaggtgggggtgccgggcggggcggggccgcctcgggccggggagggctcgggggaggggcgcggcggcccccggagcgccggcggctgtcgaggcgcggcgagccgcagccattgccttttatggtaatcgtgcgagagggcgcagggacttcctttgtcccaaatctgtgcggagccgaaatctgggaggcgccgccgcaccccctctagcgggcgcggggcgaagcggtgcggcgccggcaggaaggaaatgggcggggagggccttcgtgcgtcgccgcgccgccgtccccttctccctctccagcctcggggctgtccgcggggggacggctgccttcgggggggacggggcagggcggggttcggcttctggcgtgtgaccggcggctctagagcctctgctaaccatgttcatgccttcttctttttcctacagctcctgggcaacgtgctggttattgtgctgtctcatcattttggcaaagaattcgggattcgaaccggtgccgccaccatgaacttcgggctcagcttgattttccttgtccttgttttaaaaggtgtccagtgtgaggtgaagctggtggagagcggcggcgacctggtgaagcctggcggcagcctgaagctgagctgcgccgccagcggcttcaccttcagcagctacgccatgagctgggtgagacagaaccctgagaagagactggagtgggtggccagcatcagcaagggcggcaacacctactaccctaacagcgtgaagggcagattcaccatcagcagagacaacgccagaaacatcctgtacctgcagatgagcagcctgagaagcgaggacaccgccctgtactactgcgccagaggctggggcgactacggctggttcgcctactggggccaggtgaccctggtgaccgtgagcgccgccaaaacgacacccccatctgtctatccactggcccctggatctgctgcccaaactaactccatggtgaccctgggatgcctggtcaagggctatttccctgagccagtgacagtgacctggaactctggatccctgtccagcggtgtgcacaccttcccagctgtcctgcagtctgacctctacactctgagcagctcagtgactgtcccctccagcacctggcccagcgagaccgtcacctgcaacgttgcccacccggccagcagcaccaaggtggacaagaaaattcgggccaagcggggaagcggagtgaaacagactttgaattttgaccttctcaagttggcgggagacgtggagtccaaccctggacctatgaagttgcctgttaggctgttggtgctgatgttctggattcctgcttccagcagtgacatcaagatgacccagagccctagcagcatgtacgccagcctgggcgagagagtgaccatcacctgcaaggccagccaggacatcaacagatacctgaactggttccagcagaagcctggcaagagccctaagaccctgatctacagagccaacagactgctggacggcgtgcctagcagattcagcggcagcggcagcggccaggactacagcctgaccatcagcagcctggactacgaggacatgggcatctactactgcctgcagtacgacgagttccctctgaccttcggcgacggcaccaagctggagctgaagcgggctgatgctgcaccaactgtatccatcttcccaccatccagtgagcagttaacatctggaggtgcctcagtcgtgtgcttcttgaacaacttctaccccaaagacatcaatgtcaagtggaagattgatggcagtgaacgacaaaatggcgtcctgaacagttggactgatcaggacagcaaagacagcacctacagcatgagcagcaccctcacgttgaccaaggacgagtatgaacgacataacagctatacctgtgaggccactcacaagacatcaacttcacccattgtcaagagcttcaacaggaatgagtgttagtaactcgaggacggggtgaactacgcctgaggatccgatctttttccctctgccaaaaattatggggacatcatgaagccccttgagcatctgacttctggctaataaaggaaatttattttcattgcaatagtgtgttggaattttttgtgtctctcactcggcctaggtagataagtagcatggcgggttaatcattaactacaaggaacccctagtgatggagttggccactccctctctgcgcgctcgctcgctcactgaggccgggcgaccaaaggtcgcccgacgcccgggctttgcccgggcggcctcagtgagcgagcgagcgcgcag

SEQ ID NO: 2232 - DNA, 3778 bp, Artificial Sequence
  source: /note="Description of Artificial Sequence: Synthetic polynucleotide"
ctgcgcgctcgctcgctcactgaggccgcccgggcaaagcccgggcgtcgggcgacctttggtcgcccggcctcagtgagcgagcgagcgcgcagagagggagtggccaactccatcactaggggttccttgtagttaatgattaacccgccatgctacttatctaccagggtaatggggatcctctagaactatagctagtcgacataacgcgtctagttattaatagtaatcaattacggggtcattagttcatagcccatatatggagttccgcgttacataacttacggtaaatggcccgcctggctgaccgcccaacgacccccgcccattgacgtcaataatgacgtatgttcccatagtaacgccaatagggactttccattgacgtcaatgggtggagtatttacggtaaactgcccacttggcagtacatcaagtgtatcatatgccaagtacgccccctattgacgtcaatgacggtaaatggcccgcctggcattatgcccagtacatgaccttatgggactttcctacttggcagtacatctacgtattagtcatcgctattaccatggtcgaggtgagccccacgttctgcttcactctccccatctcccccccctccccacccccaattttgtatttatttattttttaattattttgtgcagcgatgggggcggggggggggggggggcgcgcgccaggcggggcggggcggggcgaggggcggggcggggcgaggcggagaggtgcggcggcagccaatcagagcggcgcgctccgaaagtttccttttatggcgaggcggcggcggcggcggccctataaaaagcgaagcgcgcggcgggcgggagtcgctgcgcgctgccttcgccccgtgccccgctccgccgccgcctcgcgccgcccgccccggctctgactgaccgcgttactcccacaggtgagcgggcgggacggcccttctcctccgggctgtaattagcgcttggtttaatgacggcttgtttcttttctgtggctgcgtgaaagccttgaggggctccgggagggccctttgtgcggggggagcggctcggggggtgcgtgcgtgtgtgtgtgcgtggggagcgccgcgtgcggctccgcgctgcccggcggctgtgagcgctgcgggcgcggcgcggggctttgtgcgctccgcagtgtgcgcgaggggagcgcggccgggggcggtgccccgcggtgcggggggggctgcgaggggaacaaaggctgcgtgcggggtgtgtgcgtgggggggtgagcagggggtgtgggcgcgtcggtcgggctgcaaccccccctgcacccccctccccgagttgctgagcacggcccggcttcgggtgcggggctccgtacggggcgtggcgcggggctcgccgtgccgggcggggggtggcggcaggtgggggtgccgggcggggcggggccgcctcgggccggggagggctcgggggaggggcgcggcggcccccggagcgccggcggctgtcgaggcgcggcgagccgcagccattgccttttatggtaatcgtgcgagagggcgcagggacttcctttgtcccaaatctgtgcggagccgaaatctgggaggcgccgccgcaccccctctagcgggcgcggggcgaagcggtgcggcgccggcaggaaggaaatgggcggggagggccttcgtgcgtcgccgcgccgccgtccccttctccctctccagcctcggggctgtccgcggggggacggctgccttcgggggggacggggcagggcggggttcggcttctggcgtgtgaccggcggctctagagcctctgctaaccatgttcatgccttcttctttttcctacagctcctgggcaacgtgctggttattgtgctgtctcatcattttggcaaagaattcgggattcgaaccggtgccgccaccatgaacttcgggctcagcttgattttccttgtccttgttttaaaaggtgtccagtgtgaggtgaagctggtggagagcggcggcgacctggtgaagcctggcggcagcctgaagctgagctgcgccgccagcggcttcaccttcagcagctacgccatgagctgggtgagacagaaccctgagaagagactggagtgggtggccagcatcagcaagggcggcaacacctactaccctaacagcgtgaagggcagattcaccatcagcagagacaacgccagaaacatcctgtacctgcagatgagcagcctgagaagcgaggacaccgccctgtactactgcgccagaggctggggcgactacggctggttcgcctactggggccaggtgaccctggtgaccgtgagcgccgccaaaacgacacccccatctgtctatccactggcccctggatctgctgcccaaactaactccatggtgaccctgggatgcctggtcaagggctatttccctgagccagtgacagtgacctggaactctggatccctgtccagcggtgtgcacaccttcccagctgtcctgcagtctgacctctacactctgagcagctcagtgactgtcccctccagcacctggcccagcgagaccgtcacctgcaacgttgcccacccggccagcagcaccaaggtggacaagaaaattgtgcccagggattgtggtagaaagaggcgagagggcagaggaagtcttctaacatgcggtgacgtggaggagaatcccggccctatgaagttgcctgttaggctgttggtgctgatgttctggattcctgcttccagcagtgacatcaagatgacccagagccctagcagcatgtacgccagcctgggcgagagagtgaccatcacctgcaaggccagccaggacatcaacagatacctgaactggttccagcagaagcctggcaagagccctaagaccctgatctacagagccaacagactgctggacggcgtgcctagcagattcagcggcagcggcagcggccaggactacagcctgaccatcagcagcctggactacgaggacatgggcatctactactgcctgcagtacgacgagttccctctgaccttcggcgacggcaccaagctggagctgaagcgggctgatgctgcaccaactgtatccatcttcccaccatccagtgagcagttaacatctggaggtgcctcagtcgtgtgcttcttgaacaacttctaccccaaagacatcaatgtcaagtggaagattgatggcagtgaacgacaaaatggcgtcctgaacagttggactgatcaggacagcaaagacagcacctacagcatgagcagcaccctcacgttgaccaaggacgagtatgaacgacataacagctatacctgtgaggccactcacaagacatcaacttcacccattgtcaagagcttcaacaggaatgagtgttagtaactcgaggacggggtgaactacgcctgaggatccgatctttttccctctgccaaaaattatggggacatcatgaagccccttgagcatctgacttctggctaataaaggaaatttattttcattgcaatagtgtgttggaattttttgtgtctctcactcggcctaggtagataagtagcatggcgggttaatcattaactacaaggaacccctagtgatggagttggccactccctctctgcgcgctcgctcgctcactgaggccgggcgaccaaaggtcgcccgacgcccgggctttgcccgggcggcctcagtgagcgagcgagcgcgcag

SEQ ID NO: 2233 - DNA, 3748 bp, Artificial Sequence
  source: /note="Description of Artificial Sequence: Synthetic polynucleotide"
ctgcgcgctcgctcgctcactgaggccgcccgggcaaagcccgggcgtcgggcgacctttggtcgcccggcctcagtgagcgagcgagcgcgcagagagggagtggccaactccatcactaggggttccttgtagttaatgattaacccgccatgctacttatctaccagggtaatggggatcctctagaactatagctagtcgacataacgcgtctagttattaatagtaatcaattacggggtcattagttcatagcccatatatggagttccgcgttacataacttacggtaaatggcccgcctggctgaccgcccaacgacccccgcccattgacgtcaataatgacgtatgttcccatagtaacgccaatagggactttccattgacgtcaatgggtggagtatttacggtaaactgcccacttggcagtacatcaagtgtatcatatgccaagtacgccccctattgacgtcaatgacggtaaatggcccgcctggcattatgcccagtacatgaccttatgggactttcctacttggcagtacatctacgtattagtcatcgctattaccatggtcgaggtgagccccacgttctgcttcactctccccatctcccccccctccccacccccaattttgtatttatttattttttaattattttgtgcagcgatgggggcggggggggggggggggcgcgcgccaggcggggcggggcggggcgaggggcggggcggggcgaggcggagaggtgcggcggcagccaatcagagcggcgcgctccgaaagtttccttttatggcgaggcggcggcggcggcggccctataaaaagcgaagcgcgcggcgggcgggagtcgctgcgcgctgccttcgccccgtgccccgctccgccgccgcctcgcgccgcccgccccggctctgactgaccgcgttactcccacaggtgagcgggcgggacggcccttctcctccgggctgtaattagcgcttggtttaatgacggcttgtttcttttctgtggctgcgtgaaagccttgaggggctccgggagggccctttgtgcggggggagcggctcggggggtgcgtgcgtgtgtgtgtgcgtggggagcgccgcgtgcggctccgcgctgcccggcggctgtgagcgctgcgggcgcggcgcggggctttgtgcgctccgcagtgtgcgcgaggggagcgcggccgggggcggtgccccgcggtgcggggggggctgcgaggggaacaaaggctgcgtgcggggtgtgtgcgtgggggggtgagcagggggtgtgggcgcgtcggtcgggctgcaaccccccctgcacccccctccccgagttgctgagcacggcccggcttcgggtgcggggctccgtacggggcgtggcgcggggctcgccgtgccgggcggggggtggcggcaggtgggggtgccgggcggggcggggccgcctcgggccggggagggctcgggggaggggcgcggcggcccccggagcgccggcggctgtcgaggcgcggcgagccgcagccattgccttttatggtaatcgtgcgagagggcgcagggacttcctttgtcccaaatctgtgcggagccgaaatctgggaggcgccgccgcaccccctctagcgggcgcggggcgaagcggtgcggcgccggcaggaaggaaatgggcggggagggccttcgtgcgtcgccgcgccgccgtccccttctccctctccagcctcggggctgtccgcggggggacggctgccttcgggggggacggggcagggcggggttcggcttctggcgtgtgaccggcggctctagagcctctgctaaccatgttcatgccttcttctttttcctacagctcctgggcaacgtgctggttattgtgctgtctcatcattttggcaaagaattcgggattcgaaccggtgccgccaccatgaagttgcctgttaggctgttggtgctgatgttctggattcctgcttccagcagtgacatcaagatgacccagagccctagcagcatgtacgccagcctgggcgagagagtgaccatcacctgcaaggccagccaggacatcaacagatacctgaactggttccagcagaagcctggcaagagccctaagaccctgatctacagagccaacagactgctggacggcgtgcctagcagattcagcggcagcggcagcggccaggactacagcctgaccatcagcagcctggactacgaggacatgggcatctactactgcctgcagtacgacgagttccctctgaccttcggcgacggcaccaagctggagctgaagcgggctgatgctgcaccaactgtatccatcttcccaccatccagtgagcagttaacatctggaggtgcctcagtcgtgtgcttcttgaacaacttctaccccaaagacatcaatgtcaagtggaagattgatggcagtgaacgacaaaatggcgtcctgaacagttggactgatcaggacagcaaagacagcacctacagcatgagcagcaccctcacgttgaccaaggacgagtatgaacgacataacagctatacctgtgaggccactcacaagacatcaacttcacccattgtcaagagcttcaacaggaatgagtgtgagggcagaggaagtcttctaacatgcggtgacgtggaggagaatcccggccctatgaacttcgggctcagcttgattttccttgtccttgttttaaaaggtgtccagtgtgaggtgaagctggtggagagcggcggcgacctggtgaagcctggcggcagcctgaagctgagctgcgccgccagcggcttcaccttcagcagctacgccatgagctgggtgagacagaaccctgagaagagactggagtgggtggccagcatcagcaagggcggcaacacctactaccctaacagcgtgaagggcagattcaccatcagcagagacaacgccagaaacatcctgtacctgcagatgagcagcctgagaagcgaggacaccgccctgtactactgcgccagaggctggggcgactacggctggttcgcctactggggccaggtgaccctggtgaccgtgagcgccgccaaaacgacacccccatctgtctatccactggcccctggatctgctgcccaaactaactccatggtgaccctgggatgcctggtcaagggctatttccctgagccagtgacagtgacctggaactctggatccctgtccagcggtgtgcacaccttcccagctgtcctgcagtctgacctctacactctgagcagctcagtgactgtcccctccagcacctggcccagcgagaccgtcacctgcaacgttgcccacccggccagcagcaccaaggtggacaagaaaatttagtaactcgaggacggggtgaactacgcctgaggatccgatctttttccctctgccaaaaattatggggacatcatgaagccccttgagcatctgacttctggctaataaaggaaatttattttcattgcaatagtgtgttggaattttttgtgtctctcactcggcctaggtagataagtagcatggcgggttaatcattaactacaaggaacccctagtgatggagttggccactccctctctgcgcgctcgctcgctcactgaggccgggcgaccaaaggtcgcccgacgcccgggctttgcccgggcggcctcagtgagcgagcgagcgcgcag

SEQ ID NO: 2234 - DNA, 3769 bp, Artificial Sequence
  source: /note="Description of Artificial Sequence: Synthetic polynucleotide"
ctgcgcgctcgctcgctcactgaggccgcccgggcaaagcccgggcgtcgggcgacctttggtcgcccggcctcagtgagcgagcgagcgcgcagagagggagtggccaactccatcactaggggttccttgtagttaatgattaacccgccatgctacttatctaccagggtaatggggatcctctagaactatagctagtcgacataacgcgtctagttattaatagtaatcaattacggggtcattagttcatagcccatatatggagttccgcgttacataacttacggtaaatggcccgcctggctgaccgcccaacgacccccgcccattgacgtcaataatgacgtatgttcccatagtaacgccaatagggactttccattgacgtcaatgggtggagtatttacggtaaactgcccacttggcagtacatcaagtgtatcatatgccaagtacgccccctattgacgtcaatgacggtaaatggcccgcctggcattatgcccagtacatgaccttatgggactttcctacttggcagtacatctacgtattagtcatcgctattaccatggtcgaggtgagccccacgttctgcttcactctccccatctcccccccctccccacccccaattttgtatttatttattttttaattattttgtgcagcgatgggggcggggggggggggggggcgcgcgccaggcggggcggggcggggcgaggggcggggcggggcgaggcggagaggtgcggcggcagccaatcagagcggcgcgctccgaaagtttccttttatggcgaggcggcggcggcggcggccctataaaaagcgaagcgcgcggcgggcgggagtcgctgcgcgctgccttcgccccgtgccccgctccgccgccgcctcgcgccgcccgccccggctctgactgaccgcgttactcccacaggtgagcgggcgggacggcccttctcctccgggctgtaattagcgcttggtttaatgacggcttgtttcttttctgtggctgcgtgaaagccttgaggggctccgggagggccctttgtgcggggggagcggctcggggggtgcgtgcgtgtgtgtgtgcgtggggagcgccgcgtgcggctccgcgctgcccggcggctgtgagcgctgcgggcgcggcgcggggctttgtgcgctccgcagtgtgcgcgaggggagcgcggccgggggcggtgccccgcggtgcggggggggctgcgaggggaacaaaggctgcgtgcggggtgtgtgcgtgggggggtgagcagggggtgtgggcgcgtcggtcgggctgcaaccccccctgcacccccctccccgagttgctgagcacggcccggcttcgggtgcggggctccgtacggggcgtggcgcggggctcgccgtgccgggcggggggtggcggcaggtgggggtgccgggcggggcggggccgcctcgggccggggagggctcgggggaggggcgcggcggcccccggagcgccggcggctgtcgaggcgcggcgagccgcagccattgccttttatggtaatcgtgcgagagggcgcagggacttcctttgtcccaaatctgtgcggagccgaaatctgggaggcgccgccgcaccccctctagcgggcgcggggcgaagcggtgcggcgccggcaggaaggaaatgggcggggagggccttcgtgcgtcgccgcgccgccgtccccttctccctctccagcctcggggctgtccgcggggggacggctgccttcgggggggacggggcagggcggggttcggcttctggcgtgtgaccggcggctctagagcctctgctaaccatgttcatgccttcttctttttcctacagctcctgggcaacgtgctggttattgtgctgtctcatcattttggcaaagaattcgggattcgaaccggtgccgccaccatgaagttgcctgttaggctgttggtgctgatgttctggattcctgcttccagcagtgacatcaagatgacccagagccctagcagcatgtacgccagcctgggcgagagagtgaccatcacctgcaaggccagccaggacatcaacagatacctgaactggttccagcagaagcctggcaagagccctaagaccctgatctacagagccaacagactgctggacggcgtgcctagcagattcagcggcagcggcagcggccaggactacagcctgaccatcagcagcctggactacgaggacatgggcatctactactgcctgcagtacgacgagttccctctgaccttcggcgacggcaccaagctggagctgaagcgggctgatgctgcaccaactgtatccatcttcccaccatccagtgagcagttaacatctggaggtgcctcagtcgtgtgcttcttgaacaacttctaccccaaagacatcaatgtcaagtggaagattgatggcagtgaacgacaaaatggcgtcctgaacagttggactgatcaggacagcaaagacagcacctacagcatgagcagcaccctcacgttgaccaaggacgagtatgaacgacataacagctatacctgtgaggccactcacaagacatcaacttcacccattgtcaagagcttcaacaggaatgagtgtggaagcggagtgaaacagactttgaattttgaccttctcaagttggcgggagacgtggagtccaaccctggacctatgaacttcgggctcagcttgattttccttgtccttgttttaaaaggtgtccagtgtgaggtgaagctggtggagagcggcggcgacctggtgaagcctggcggcagcctgaagctgagctgcgccgccagcggcttcaccttcagcagctacgccatgagctgggtgagacagaaccctgagaagagactggagtgggtggccagcatcagcaagggcggcaacacctactaccctaacagcgtgaagggcagattcaccatcagcagagacaacgccagaaacatcctgtacctgcagatgagcagcctgagaagcgaggacaccgccctgtactactgcgccagaggctggggcgactacggctggttcgcctactggggccaggtgaccctggtgaccgtgagcgccgccaaaacgacacccccatctgtctatccactggcccctggatctgctgcccaaactaactccatggtgaccctgggatgcctggtcaagggctatttccctgagccagtgacagtgacctggaactctggatccctgtccagcggtgtgcacaccttcccagctgtcctgcagtctgacctctacactctgagcagctcagtgactgtcccctccagcacctggcccagcgagaccgtcacctgcaacgttgcccacccggccagcagcaccaaggtggacaagaaaatttagtaactcgaggacggggtgaactacgcctgaggatccgatctttttccctctgccaaaaattatggggacatcatgaagccccttgagcatctgacttctggctaataaaggaaatttattttcattgcaatagtgtgttggaattttttgtgtctctcactcggcctaggtagataagtagcatggcgggttaatcattaactacaaggaacccctagtgatggagttggccactccctctctgcgcgctcgctcgctcactgaggccgggcgaccaaaggtcgcccgacgcccgggctttgcccgggcggcctcagtgagcgagcgagcgcgcag

SEQ ID NO: 2235 - DNA, 3766 bp, Artificial Sequence
  source: /note="Description of Artificial Sequence: Synthetic polynucleotide"
ctgcgcgctcgctcgctcactgaggccgcccgggcaaagcccgggcgtcgggcgacctttggtcgcccggcctcagtgagcgagcgagcgcgcagagagggagtggccaactccatcactaggggttccttgtagttaatgattaacccgccatgctacttatctaccagggtaatggggatcctctagaactatagctagtcgacataacgcgtctagttattaatagtaatcaattacggggtcattagttcatagcccatatatggagttccgcgttacataacttacggtaaatggcccgcctggctgaccgcccaacgacccccgcccattgacgtcaataatgacgtatgttcccatagtaacgccaatagggactttccattgacgtcaatgggtggagtatttacggtaaactgcccacttggcagtacatcaagtgtatcatatgccaagtacgccccctattgacgtcaatgacggtaaatggcccgcctggcattatgcccagtacatgaccttatgggactttcctacttggcagtacatctacgtattagtcatcgctattaccatggtcgaggtgagccccacgttctgcttcactctccccatctcccccccctccccacccccaattttgtatttatttattttttaattattttgtgcagcgatgggggcggggggggggggggggcgcgcgccaggcggggcggggcggggcgaggggcggggcggggcgaggcggagaggtgcggcggcagccaatcagagcggcgcgctccgaaagtttccttttatggcgaggcggcggcggcggcggccctataaaaagcgaagcgcgcggcgggcgggagtcgctgcgcgctgccttcgccccgtgccccgctccgccgccgcctcgcgccgcccgccccggctctgactgaccgcgttactcccacaggtgagcgggcgggacggcccttctcctccgggctgtaattagcgcttggtttaatgacggcttgtttcttttctgtggctgcgtgaaagccttgaggggctccgggagggccctttgtgcggggggagcggctcggggggtgcgtgcgtgtgtgtgtgcgtggggagcgccgcgtgcggctccgcgctgcccggcggctgtgagcgctgcgggcgcggcgcggggctttgtgcgctccgcagtgtgcgcgaggggagcgcggccgggggcggtgccccgcggtgcggggggggctgcgaggggaacaaaggctgcgtgcggggtgtgtgcgtgggggggtgagcagggggtgtgggcgcgtcggtcgggctgcaaccccccctgcacccccctccccgagttgctgagcacggcccggcttcgggtgcggggctccgtacggggcgtggcgcggggctcgccgtgccgggcggggggtggcggcaggtgggggtgccgggcggggcggggccgcctcgggccggggagggctcgggggaggggcgcggcggcccccggagcgccggcggctgtcgaggcgcggcgagccgcagccattgccttttatggtaatcgtgcgagagggcgcagggacttcctttgtcccaaatctgtgcggagccgaaatctgggaggcgccgccgcaccccctctagcgggcgcggggcgaagcggtgcggcgccggcaggaaggaaatgggcggggagggccttcgtgcgtcgccgcgccgccgtccccttctccctctccagcctcggggctgtccgcggggggacggctgccttcgggggggacggggcagggcggggttcggcttctggcgtgtgaccggcggctctagagcctctgctaaccatgttcatgccttcttctttttcctacagctcctgggcaacgtgctggttattgtgctgtctcatcattttggcaaagaattcgggattcgaaccggtgccgccaccatgaagttgcctgttaggctgttggtgctgatgttctggattcctgcttccagcagtgacatcaagatgacccagagccctagcagcatgtacgccagcctgggcgagagagtgaccatcacctgcaaggccagccaggacatcaacagatacctgaactggttccagcagaagcctggcaagagccctaagaccctgatctacagagccaacagactgctggacggcgtgcctagcagattcagcggcagcggcagcggccaggactacagcctgaccatcagcagcctggactacgaggacatgggcatctactactgcctgcagtacgacgagttccctctgaccttcggcgacggcaccaagctggagctgaagcgggctgatgctgcaccaactgtatccatcttcccaccatccagtgagcagttaacatctggaggtgcctcagtcgtgtgcttcttgaacaacttctaccccaaagacatcaatgtcaagtggaagattgatggcagtgaacgacaaaatggcgtcctgaacagttggactgatcaggacagcaaagacagcacctacagcatgagcagcaccctcacgttgaccaaggacgagtatgaacgacataacagctatacctgtgaggccactcacaagacatcaacttcacccattgtcaagagcttcaacaggaatgagtgtgagggcagaggaagtcttctaacatgcggtgacgtggaggagaatcccggccctatgaacttcgggctcagcttgattttccttgtccttgttttaaaaggtgtccagtgtgaggtgaagctggtggagagcggcggcgacctggtgaagcctggcggcagcctgaagctgagctgcgccgccagcggcttcaccttcagcagctacgccatgagctgggtgagacagaaccctgagaagagactggagtgggtggccagcatcagcaagggcggcaacacctactaccctaacagcgtgaagggcagattcaccatcagcagagacaacgccagaaacatcctgtacctgcagatgagcagcctgagaagcgaggacaccgccctgtactactgcgccagaggctggggcgactacggctggttcgcctactggggccaggtgaccctggtgaccgtgagcgccgccaaaacgacacccccatctgtctatccactggcccctggatctgctgcccaaactaactccatggtgaccctgggatgcctggtcaagggctatttccctgagccagtgacagtgacctggaactctggatccctgtccagcggtgtgcacaccttcccagctgtcctgcagtctgacctctacactctgagcagctcagtgactgtcccctccagcacctggcccagcgagaccgtcacctgcaacgttgcccacccggccagcagcaccaaggtggacaagaaaattgtgcccagggattgtggttagtaactcgaggacggggtgaactacgcctgaggatccgatctttttccctctgccaaaaattatggggacatcatgaagccccttgagcatctgacttctggctaataaaggaaatttattttcattgcaatagtgtgttggaattttttgtgtctctcactcggcctaggtagataagtagcatggcgggttaatcattaactacaaggaacccctagtgatggagttggccactccctctctgcgcgctcgctcgctcactgaggccgggcgaccaaaggtcgcccgacgcccgggctttgcccgggcggcctcagtgagcgagcgagcgcgcag

SEQ ID NO: 2236 - DNA, 3760 bp, Artificial Sequence
  source: /note="Description of Artificial Sequence: Synthetic polynucleotide"
ctgcgcgctcgctcgctcactgaggccgcccgggcaaagcccgggcgtcgggcgacctttggtcgcccggcctcagtgagcgagcgagcgcgcagagagggagtggccaactccatcactaggggttccttgtagttaatgattaacccgccatgctacttatctaccagggtaatggggatcctctagaactatagctagtcgacataacgcgtctagttattaatagtaatcaattacggggtcattagttcatagcccatatatggagttccgcgttacataacttacggtaaatggcccgcctggctgaccgcccaacgacccccgcccattgacgtcaataatgacgtatgttcccatagtaacgccaatagggactttccattgacgtcaatgggtggagtatttacggtaaactgcccacttggcagtacatcaagtgtatcatatgccaagtacgccccctattgacgtcaatgacggtaaatggcccgcctggcattatgcccagtacatgaccttatgggactttcctacttggcagtacatctacgtattagtcatcgctattaccatggtcgaggtgagccccacgttctgcttcactctccccatctcccccccctccccacccccaattttgtatttatttattttttaattattttgtgcagcgatgggggcggggggggggggggggcgcgcgccaggcggggcggggcggggcgaggggcggggcggggcgaggcggagaggtgcggcggcagccaatcagagcggcgcgctccgaaagtttccttttatggcgaggcggcggcggcggcggccctataaaaagcgaagcgcgcggcgggcgggagtcgctgcgcgctgccttcgccccgtgccccgctccgccgccgcctcgcgccgcccgccccggctctgactgaccgcgttactcccacaggtgagcgggcgggacggcccttctcctccgggctgtaattagcgcttggtttaatgacggcttgtttcttttctgtggctgcgtgaaagccttgaggggctccgggagggccctttgtgcggggggagcggctcggggggtgcgtgcgtgtgtgtgtgcgtggggagcgccgcgtgcggctccgcgctgcccggcggctgtgagcgctgcgggcgcggcgcggggctttgtgcgctccgcagtgtgcgcgaggggagcgcggccgggggcggtgccccgcggtgcggggggggctgcgaggggaacaaaggctgcgtgcggggtgtgtgcgtgggggggtgagcagggggtgtgggcgcgtcggtcgggctgcaaccccccctgcacccccctccccgagttgctgagcacggcccggcttcgggtgcggggctccgtacggggcgtggcgcggggctcgccgtgccgggcggggggtggcggcaggtgggggtgccgggcggggcggggccgcctcgggccggggagggctcgggggaggggcgcggcggcccccggagcgccggcggctgtcgaggcgcggcgagccgcagccattgccttttatggtaatcgtgcgagagggcgcagggacttcctttgtcccaaatctgtgcggagccgaaatctgggaggcgccgccgcaccccctctagcgggcgcggggcgaagcggtgcggcgccggcaggaaggaaatgggcggggagggccttcgtgcgtcgccgcgccgccgtccccttctccctctccagcctcggggctgtccgcggggggacggctgccttcgggggggacggggcagggcggggttcggcttctggcgtgtgaccggcggctctagagcctctgctaaccatgttcatgccttcttctttttcctacagctcctgggcaacgtgctggttattgtgctgtctcatcattttggcaaagaattcgggattcgaaccggtgccgccaccatgaagttgcctgttaggctgttggtgctgatgttctggattcctgcttccagcagtgacatcaagatgacccagagccctagcagcatgtacgccagcctgggcgagagagtgaccatcacctgcaaggccagccaggacatcaacagatacctgaactggttccagcagaagcctggcaagagccctaagaccctgatctacagagccaacagactgctggacggcgtgcctagcagattcagcggcagcggcagcggccaggactacagcctgaccatcagcagcctggactacgaggacatgggcatctactactgcctgcagtacgacgagttccctctgaccttcggcgacggcaccaagctggagctgaagcgggctgatgctgcaccaactgtatccatcttcccaccatccagtgagcagttaacatctggaggtgcctcagtcgtgtgcttcttgaacaacttctaccccaaagacatcaatgtcaagtggaagattgatggcagtgaacgacaaaatggcgtcctgaacagttggactgatcaggacagcaaagacagcacctacagcatgagcagcaccctcacgttgaccaaggacgagtatgaacgacataacagctatacctgtgaggccactcacaagacatcaacttcacccattgtcaagagcttcaacaggaatgagtgtagaaagaggcgagagggcagaggaagtcttctaacatgcggtgacgtggaggagaatcccggccctatgaacttcgggctcagcttgattttccttgtccttgttttaaaaggtgtccagtgtgaggtgaagctggtggagagcggcggcgacctggtgaagcctggcggcagcctgaagctgagctgcgccgccagcggcttcaccttcagcagctacgccatgagctgggtgagacagaaccctgagaagagactggagtgggtggccagcatcagcaagggcggcaacacctactaccctaacagcgtgaagggcagattcaccatcagcagagacaacgccagaaacatcctgtacctgcagatgagcagcctgagaagcgaggacaccgccctgtactactgcgccagaggctggggcgactacggctggttcgcctactggggccaggtgaccctggtgaccgtgagcgccgccaaaacgacacccccatctgtctatccactggcccctggatctgctgcccaaactaactccatggtgaccctgggatgcctggtcaagggctatttccctgagccagtgacagtgacctggaactctggatccctgtccagcggtgtgcacaccttcccagctgtcctgcagtctgacctctacactctgagcagctcagtgactgtcccctccagcacctggcccagcgagaccgtcacctgcaacgttgcccacccggccagcagcaccaaggtggacaagaaaatttagtaactcgaggacggggtgaactacgcctgaggatccgatctttttccctctgccaaaaattatggggacatcatgaagccccttgagcatctgacttctggctaataaaggaaatttattttcattgcaatagtgtgttggaattttttgtgtctctcactcggcctaggtagataagtagcatggcgggttaatcattaactacaaggaacccctagtgatggagttggccactccctctctgcgcgctcgctcgctcactgaggccgggcgaccaaaggtcgcccgacgcccgggctttgcccgggcggcctcagtgagcgagcgagcgcgcag

SEQ ID NO: 2237 - DNA, 3778 bp, Artificial Sequence
  source: /note="Description of Artificial Sequence: Synthetic polynucleotide"
ctgcgcgctcgctcgctcactgaggccgcccgggcaaagcccgggcgtcgggcgacctttggtcgcccggcctcagtgagcgagcgagcgcgcagagagggagtggccaactccatcactaggggttccttgtagttaatgattaacccgccatgctacttatctaccagggtaatggggatcctctagaactatagctagtcgacataacgcgtctagttattaatagtaatcaattacggggtcattagttcatagcccatatatggagttccgcgttacataacttacggtaaatggcccgcctggctgaccgcccaacgacccccgcccattgacgtcaataatgacgtatgttcccatagtaacgccaatagggactttccattgacgtcaatgggtggagtatttacggtaaactgcccacttggcagtacatcaagtgtatcatatgccaagtacgccccctattgacgtcaatgacggtaaatggcccgcctggcattatgcccagtacatgaccttatgggactttcctacttggcagtacatctacgtattagtcatcgctattaccatggtcgaggtgagccccacgttctgcttcactctccccatctcccccccctccccacccccaattttgtatttatttattttttaattattttgtgcagcgatgggggcggggggggggggggggcgcgcgccaggcggggcggggcggggcgaggggcggggcggggcgaggcggagaggtgcggcggcagccaatcagagcggcgcgctccgaaagtttccttttatggcgaggcggcggcggcggcggccctataaaaagcgaagcgcgcggcgggcgggagtcgctgcgcgctgccttcgccccgtgccccgctccgccgccgcctcgcgccgcccgccccggctctgactgaccgcgttactcccacaggtgagcgggcgggacggcccttctcctccgggctgtaattagcgcttggtttaatgacggcttgtttcttttctgtggctgcgtgaaagccttgaggggctccgggagggccctttgtgcggggggagcggctcggggggtgcgtgcgtgtgtgtgtgcgtggggagcgccgcgtgcggctccgcgctgcccggcggctgtgagcgctgcgggcgcggcgcggggctttgtgcgctccgcagtgtgcgcgaggggagcgcggccgggggcggtgccccgcggtgcggggggggctgcgaggggaacaaaggctgcgtgcggggtgtgtgcgtgggggggtgagcagggggtgtgggcgcgtcggtcgggctgcaaccccccctgcacccccctccccgagttgctgagcacggcccggcttcgggtgcggggctccgtacggggcgtggcgcggggctcgccgtgccgggcggggggtggcggcaggtgggggtgccgggcggggcggggccgcctcgggccggggagggctcgggggaggggcgcggcggcccccggagcgccggcggctgtcgaggcgcggcgagccgcagccattgccttttatggtaatcgtgcgagagggcgcagggacttcctttgtcccaaatctgtgcggagccgaaatctgggaggcgccgccgcaccccctctagcgggcgcggggcgaagcggtgcggcgccggcaggaaggaaatgggcggggagggccttcgtgcgtcgccgcgccgccgtccccttctccctctccagcctcggggctgtccgcggggggacggctgccttcgggggggacggggcagggcggggttcggcttctggcgtgtgaccggcggctctagagcctctgctaaccatgttcatgccttcttctttttcctacagctcctgggcaacgtgctggttattgtgctgtctcatcattttggcaaagaattcgggattcgaaccggtgccgccaccatgaagttgcctgttaggctgttggtgctgatgttctggattcctgcttccagcagtgacatcaagatgacccagagccctagcagcatgtacgccagcctgggcgagagagtgaccatcacctgcaaggccagccaggacatcaacagatacctgaactggttccagcagaagcctggcaagagccctaagaccctgatctacagagccaacagactgctggacggcgtgcctagcagattcagcggcagcggcagcggccaggactacagcctgaccatcagcagcctggactacgaggacatgggcatctactactgcctgcagtacgacgagttccctctgaccttcggcgacggcaccaagctggagctgaagcgggctgatgctgcaccaactgtatccatcttcccaccatccagtgagcagttaacatctggaggtgcctcagtcgtgtgcttcttgaacaacttctaccccaaagacatcaatgtcaagtggaagattgatggcagtgaacgacaaaatggcgtcctgaacagttggactgatcaggacagcaaagacagcacctacagcatgagcagcaccctcacgttgaccaaggacgagtatgaacgacataacagctatacctgtgaggccactcacaagacatcaacttcacccattgtcaagagcttcaacaggaatgagtgtagaaagaggcgagagggcagaggaagtcttctaacatgcggtgacgtggaggagaatcccggccctatgaacttcgggctcagcttgattttccttgtccttgttttaaaaggtgtccagtgtgaggtgaagctggtggagagcggcggcgacctggtgaagcctggcggcagcctgaagctgagctgcgccgccagcggcttcaccttcagcagctacgccatgagctgggtgagacagaaccctgagaagagactggagtgggtggccagcatcagcaagggcggcaacacctactaccctaacagcgtgaagggcagattcaccatcagcagagacaacgccagaaacatcctgtacctgcagatgagcagcctgagaagcgaggacaccgccctgtactactgcgccagaggctggggcgactacggctggttcgcctactggggccaggtgaccctggtgaccgtgagcgccgccaaaacgacacccccatctgtctatccactggcccctggatctgctgcccaaactaactccatggtgaccctgggatgcctggtcaagggctatttccctgagccagtgacagtgacctggaactctggatccctgtccagcggtgtgcacaccttcccagctgtcctgcagtctgacctctacactctgagcagctcagtgactgtcccctccagcacctggcccagcgagaccgtcacctgcaacgttgcccacccggccagcagcaccaaggtggacaagaaaattgtgcccagggattgtggttagtaactcgaggacggggtgaactacgcctgaggatccgatctttttccctctgccaaaaattatggggacatcatgaagccccttgagcatctgacttctggctaataaaggaaatttattttcattgcaatagtgtgttggaattttttgtgtctctcactcggcctaggtagataagtagcatggcgggttaatcattaactacaaggaacccctagtgatggagttggccactccctctctgcgcgctcgctcgctcactgaggccgggcgaccaaaggtcgcccgacgcccgggctttgcccgggcggcctcagtgagcgagcgagcgcgcag

SEQ ID NO: 2238 - DNA, 1714 bp, Artificial Sequence
  source: /note="Description of Artificial Sequence: Synthetic polynucleotide"
ctagttattaatagtaatcaattacggggtcattagttcatagcccatatatggagttccgcgttacataacttacggtaaatggcccgcctggctgaccgcccaacgacccccgcccattgacgtcaataatgacgtatgttcccatagtaacgccaatagggactttccattgacgtcaatgggtggagtatttacggtaaactgcccacttggcagtacatcaagtgtatcatatgccaagtacgccccctattgacgtcaatgacggtaaatggcccgcctggcattatgcccagtacatgaccttatgggactttcctacttggcagtacatctacgtattagtcatcgctattaccatggtcgaggtgagccccacgttctgcttcactctccccatctcccccccctccccacccccaattttgtatttatttattttttaattattttgtgcagcgatgggggcggggggggggggggggcgcgcgccaggcggggcggggcggggcgaggggcggggcggggcgaggcggagaggtgcggcggcagccaatcagagcggcgcgctccgaaagtttccttttatggcgaggcggcggcggcggcggccctataaaaagcgaagcgcgcggcgggcgggagtcgctgcgcgctgccttcgccccgtgccccgctccgccgccgcctcgcgccgcccgccccggctctgactgaccgcgttactcccacaggtgagcgggcgggacggcccttctcctccgggctgtaattagcgcttggtttaatgacggcttgtttcttttctgtggctgcgtgaaagccttgaggggctccgggagggccctttgtgcggggggagcggctcggggggtgcgtgcgtgtgtgtgtgcgtggggagcgccgcgtgcggctccgcgctgcccggcggctgtgagcgctgcgggcgcggcgcggggctttgtgcgctccgcagtgtgcgcgaggggagcgcggccgggggcggtgccccgcggtgcggggggggctgcgaggggaacaaaggctgcgtgcggggtgtgtgcgtgggggggtgagcagggggtgtgggcgcgtcggtcgggctgcaaccccccctgcacccccctccccgagttgctgagcacggcccggcttcgggtgcggggctccgtacggggcgtggcgcggggctcgccgtgccgggcggggggtggcggcaggtgggggtgccgggcggggcggggccgcctcgggccggggagggctcgggggaggggcgcggcggcccccggagcgccggcggctgtcgaggcgcggcgagccgcagccattgccttttatggtaatcgtgcgagagggcgcagggacttcctttgtcccaaatctgtgcggagccgaaatctgggaggcgccgccgcaccccctctagcgggcgcggggcgaagcggtgcggcgccggcaggaaggaaatgggcggggagggccttcgtgcgtcgccgcgccgccgtccccttctccctctccagcctcggggctgtccgcggggggacggctgccttcgggggggacggggcagggcggggttcggcttctggcgtgtgaccggcggctctagagcctctgctaaccatgttcatgccttcttctttttcctacagctcctgggcaacgtgctggttattgtgctgtctcatcattttggcaaagaatt

SEQ ID NO: 2239 - DNA, 380 bp, Artificial Sequence
  source: /note="Description of Artificial Sequence: Synthetic polynucleotide"
gacattgattattgactagttattaatagtaatcaattacggggtcattagttcatagcccatatatggagttccgcgttacataacttacggtaaatggcccgcctggctgaccgcccaacgacccccgcccattgacgtcaataatgacgtatgttcccatagtaacgccaatagggactttccattgacgtcaatgggtggagtatttacggtaaactgcccacttggcagtacatcaagtgtatcatatgccaagtacgccccctattgacgtcaatgacggtaaatggcccgcctggcattatgcccagtacatgaccttatgggactttcctacttggcagtacatctacgtattagtcatcgctattaccatg

SEQ ID NO: 2240 - DNA, 566 bp, Artificial Sequence
  source: /note="Description of Artificial Sequence: Synthetic polynucleotide"
tcagatcgcctggagacgccatccacgctgttttgacctccatagaagacaccgggaccgatccagcctccgcggattcgaatcccggccgggaacggtgcattggaacgcggattccccgtgccaagagtgacgtaagtaccgcctatagagtctataggcccacaaaaaatgctttcttcttttaatatacttttttgtttatcttatttctaatactttccctaatctctttctttcagggcaataatgatacaatgtatcatgcctctttgcaccattctaaagaataacagtgataatttctgggttaaggcaatagcaatatttctgcatataaatatttctgcatataaattgtaactgatgtaagaggtttcatattgctaatagcagctacaatccagctaccattctgcttttattttatggttgggataaggctggattattctgagtccaagctaggcccttttgctaatcatgttcatacctcttatcttcctcccacagctcctgggcaacgtgctggtctgtgtgctggcccatcactttggcaaagaatt

SEQ ID NO: 2241 - DNA, 348 bp, Artificial Sequence
  source: /note="Description of Artificial Sequence: Synthetic polynucleotide"
aagctggtggagagcggcggcgacctggtgaagcctggcggcagcctgaagctgagctgcgccgccagcggcttcaccttcagcagctacgccatgagctgggtgagacagaaccctgagaagagactggagtgggtggccagcatcagcaagggcggcaacacctactaccctaacagcgtgaagggcagattcaccatcagcagagacaacgccagaaacatcctgtacctgcagatgagcagcctgagaagcgaggacaccgccctgtactactgcgccagaggctggggcgactacggctggttcgcctactggggccaggtgaccctggtgaccgtgagcgcc

SEQ ID NO: 2242 - DNA, 309 bp, Artificial Sequence
  source: /note="Description of Artificial Sequence: Synthetic polynucleotide"
gccaaaacgacacccccatctgtctatccactggcccctggatctgctgcccaaactaactccatggtgaccctgggatgcctggtcaagggctatttccctgagccagtgacagtgacctggaactctggatccctgtccagcggtgtgcacaccttcccagctgtcctgcagtctgacctctacactctgagcagctcagtgactgtcccctccagcacctggcccagcgagaccgtcacctgcaacgttgcccacccggccagcagcaccaaggtggacaagaaaattgtgcccagggattgtggt

SEQ ID NO: 2243 - DNA, 291 bp, Artificial Sequence
  source: /note="Description of Artificial Sequence: Synthetic polynucleotide"
gccaaaacgacacccccatctgtctatccactggcccctggatctgctgcccaaactaactccatggtgaccctgggatgcctggtcaagggctatttccctgagccagtgacagtgacctggaactctggatccctgtccagcggtgtgcacaccttcccagctgtcctgcagtctgacctctacactctgagcagctcagtgactgtcccctccagcacctggcccagcgagaccgtcacctgcaacgttgcccacccggccagcagcaccaaggtggacaagaaaatt

SEQ ID NO: 2244 - DNA, 198 bp, Artificial Sequence
  source: /note="Description of Artificial Sequence: Synthetic polynucleotide"
gagctcaaaaccccacttggtgacacaactcacacatgcccacggtgcccagagcccaaatcttgtgacacacctcccccgtgcccacggtgcccagagcccaaatcttgtgacacaactcacacatgcccacggtgcccagagcccaaatcttgtgacacacctcccccgtgcccaaggtgcccagcacctgaactc

SEQ ID NO: 2245 - DNA, 15 bp, Artificial Sequence
  source: /note="Description of Artificial Sequence: Synthetic oligonucleotide"
ggtggtggtggatcc

SEQ ID NO: 2246 - DNA, 30 bp, Artificial Sequence
  source: /note="Description of Artificial Sequence: Synthetic oligonucleotide"
ggtggtggtggatccggtggtggtggatcc

SEQ ID NO: 2247 - DNA, 45 bp, Artificial Sequence
  source: /note="Description of Artificial Sequence: Synthetic oligonucleotide"
ggtggtggtggatccggtggtggtggatccggtggtggtggatcc

SEQ ID NO: 2248 - DNA, 60 bp, Artificial Sequence
  source: /note="Description of Artificial Sequence: Synthetic oligonucleotide"
ggtggtggtggatccggtggtggtggatccggtggtggtggatccggtggtggtggatcc

SEQ ID NO: 2249 - DNA, 75 bp, Artificial Sequence
  source: /note="Description of Artificial Sequence: Synthetic oligonucleotide"
ggtggtggtggtagcggcggcggcggctctggtggtggtggatccggtggtggtggatccggtggtggtggatcc

SEQ ID NO: 2250 - DNA, 75 bp, Artificial Sequence
  source: /note="Description of Artificial Sequence: Synthetic oligonucleotide"
ggtggtggtggatccggtggtggtggatccggtggtggtggatccggtggtggtggatccggtggtggtggatcc

SEQ ID NO: 2251 - DNA, 90 bp, Artificial Sequence
  source: /note="Description of Artificial Sequence: Synthetic oligonucleotide"
ggtggtggtggtagcggcggcggcggctctggtggtggtggatccggtggtggtggatccggtggtggtggatccggtggtggtggatcc

SEQ ID NO: 2252 - DNA, 120 bp, Artificial Sequence
  source: /note="Description of Artificial Sequence: Synthetic polynucleotide"
ggtggtggtggtagcggcggcggcggctctggtggtggtggatccggtggtggtggatccggtggtggtggatccggtggtggtggatccggtggtggtggatccggtggtggtggatcc

SEQ ID NO: 2253 - DNA, 120 bp, Artificial Sequence
  source: /note="Description of Artificial Sequence: Synthetic polynucleotide"
ggtggtggtggatccggtggtggtggatccggtggtggtggatccggtggtggtggatccggtggtggtggatccggtggtggtggatccggtggtggtggatccggtggtggtggatcc

SEQ ID NO: 2254 - DNA, 60 bp, Artificial Sequence
  source: /note="Description of Artificial Sequence: Synthetic oligonucleotide"
ggtggtggtggtagcggcggcggcggctctggtggtggtggatccggtggtggtggatcc

SEQ ID NO: 2255 - DNA, 18 bp, Artificial Sequence
  source: /note="Description of Artificial Sequence: Synthetic oligonucleotide"
catcatcaccatcaccat

SEQ ID NO: 2256 - DNA, 491 bp, Artificial Sequence
  source: /note="Description of Artificial Sequence: Synthetic polynucleotide"
attcgaatcccggccgggaacggtgcattggaacgcggattccccgtgccaagagtgacgtaagtaccgcctatagagtctataggcccacaaaaaatgctttcttcttttaatatacttttttgtttatcttatttctaatactttccctaatctctttctttcagggcaataatgatacaatgtatcatgcctctttgcaccattctaaagaataacagtgataatttctgggttaaggcaatagcaatatttctgcatataaatatttctgcatataaattgtaactgatgtaagaggtttcatattgctaatagcagctacaatccagctaccattctgcttttattttatggttgggataaggctggattattctgagtccaagctaggcccttttgctaatcatgttcatacctcttatcttcctcccacagctcctgggcaacgtgctggtctgtgtgctggcccatcactttggcaaagaatt

SEQ ID NO: 2257 - DNA, 387 bp, Artificial Sequence
  source: /note="Description of Artificial Sequence: Synthetic polynucleotide"
tcagatcgcctggagacgccatccacgctgttttgacctccatagaagacaccgggaccgatccagcctccgcggattcgaatcccggccgggaacggtgcattggaacgcggattccccgtgccaagagtgacgtaagtaccgcctatagagtctataggcccactctgcatataaattgtaactgatgtaagaggtttcatattgctaatagcagctacaatccagctaccattctgcttttattttatggttgggataaggctggattattctgagtccaagctaggcccttttgctaatcatgttcatacctcttatcttcctcccacagctcctgggcaacgtgctggtctgtgtgctggcccatcactttggcaaagaatt

SEQ ID NO: 2258 - DNA, 292 bp, Artificial Sequence
  source: /note="Description of Artificial Sequence: Synthetic polynucleotide"
tcagatcgcctggagacgccatccacgctgttttgacctccatagaagacaccgggaccgatccaggtaagtaccgcctatagagtctataggcccacaaaaaatgctttcttcttttaatatacttttttgtttatcttatttctaatactttccctaatctctttcgctggattattctgagtccaagctaggcccttttgctaatcatgttcatacctcttatcttcctcccacagctcctgggcaacgtgctggtctgtgtgctggcccatcactttggcaaagaatt

SEQ ID NO: 2259 - DNA, 90 bp, Artificial Sequence
  source: /note="Description of Artificial Sequence: Synthetic oligonucleotide"
ggtggtggtggatccggtggtggtggatccggtggtggtggatccggtggtggtggatccggtggtggtggatccggtggtggtggatcc

SEQ ID NO: 2260 - DNA, 3188 bp, Artificial Sequence
  source: /note="Description of Artificial Sequence: Synthetic polynucleotide"
ctgcgcgctcgctcgctcactgaggccgcccgggcaaagcccgggcgtcgggcgacctttggtcgcccggcctcagtgagcgagcgagcgcgcagagagggagtggccaactccatcactaggggttccttgtagttaatgattaacccgccatgctacttatctaccagggtaatggggatcctctagaactatagctagtcgacataacgcgttagtatctgcagagggccctgcgtatgagtgcaagtgggttttaggaccaggatgaggcggggtgggggtgcctacctgacgaccgaccccgacccactggacaagcacccaacccccattccccaaattgcgcatcccctatcagagagggggaggggaaacaggatgcggcgaggcgcgtgcgcactgccagcttcagcaccgcggacagtgccttcgcccccgcctggcggcgcgcgccaccgccgcctcagcactgaaggcgcgctgacgtcactcgccggtcccccgcaaactccccttcccggccaccttggtcgcgtccgcgccgccgccggcccagccggaccgcaccacgcgaggcgcgagataggggggcacgggcgcgaccatctgcgctgcggcgccggcgactcagcgctgcctcagtctgcggtgggcagcggaggagtcgtgtcgtgcctgagagcgcagctgtgctcctgggcaccgcgcagtccgcccccgcggctcctggccagaccacccctaggaccccctgccccaagtcgcagccaagcttcgtttagtgaaccgtcagatcgcctggagacgccatccacgctgttttgacctccatagaagacaccgggaccgatccagcctccgcggattcgaatcccggccgggaacggtgcattggaacgcggattccccgtgccaagagtgacgtaagtaccgcctatagagtctataggcccacaaaaaatgctttcttcttttaatatacttttttgtttatcttatttctaatactttccctaatctctttctttcagggcaataatgatacaatgtatcatgcctctttgcaccattctaaagaataacagtgataatttctgggttaaggcaatagcaatatttctgcatataaatatttctgcatataaattgtaactgatgtaagaggtttcatattgctaatagcagctacaatccagctaccattctgcttttattttatggttgggataaggctggattattctgagtccaagctaggcccttttgctaatcatgttcatacctcttatcttcctcccacagctcctgggcaacgtgctggtctgtgtgctggcccatcactttggcaaagaattgggattcgaaccggtgccgccaccatgaacttcgggctcagcttgattttccttgtccttgttttaaaaggtgtccagtgtgaggtgaagctggtggagagcggcggcgacctggtgaagcctggcggcagcctgaagctgagctgcgccgccagcggcttcaccttcagcagctacgccatgagctgggtgagacagaaccctgagaagagactggagtgggtggccagcatcagcaagggcggcaacacctactaccctaacagcgtgaagggcagattcaccatcagcagagacaacgccagaaacatcctgtacctgcagatgagcagcctgagaagcgaggacaccgccctgtactactgcgccagaggctggggcgactacggctggttcgcctactggggccaggtgaccctggtgaccgtgagcgccgccaaaacgacacccccatctgtctatccactggcccctggatctgctgcccaaactaactccatggtgaccctgggatgcctggtcaagggctatttccctgagccagtgacagtgacctggaactctggatccctgtccagcggtgtgcacaccttcccagctgtcctgcagtctgacctctacactctgagcagctcagtgactgtcccctccagcacctggcccagcgagaccgtcacctgcaacgttgcccacccggccagcagcaccaaggtggacaagaaaattagaaagaggcgagagggcagaggaagtcttctaacatgcggtgacgtggaggagaatcccggccctatgaagttgcctgttaggctgttggtgctgatgttctggattcctgcttccagcagtgacatcaagatgacccagagccctagcagcatgtacgccagcctgggcgagagagtgaccatcacctgcaaggccagccaggacatcaacagatacctgaactggttccagcagaagcctggcaagagccctaagaccctgatctacagagccaacagactgctggacggcgtgcctagcagattcagcggcagcggcagcggccaggactacagcctgaccatcagcagcctggactacgaggacatgggcatctactactgcctgcagtacgacgagttccctctgaccttcggcgacggcaccaagctggagctgaagcgggctgatgctgcaccaactgtatccatcttcccaccatccagtgagcagttaacatctggaggtgcctcagtcgtgtgcttcttgaacaacttctaccccaaagacatcaatgtcaagtggaagattgatggcagtgaacgacaaaatggcgtcctgaacagttggactgatcaggacagcaaagacagcacctacagcatgagcagcaccctcacgttgaccaaggacgagtatgaacgacataacagctatacctgtgaggccactcacaagacatcaacttcacccattgtcaagagcttcaacaggaatgagtgttagtaactcgaggacggggtgaactacgcctgaggatccgatctttttccctctgccaaaaattatggggacatcatgaagccccttgagcatctgacttctggctaataaaggaaatttattttcattgcaatagtgtgttggaattttttgtgtctctcactcggcctaggtagataagtagcatggcgggttaatcattaactacaaggaacccctagtgatggagttggccactccctctctgcgcgctcgctcgctcactgaggccgggcgaccaaaggtcgcccgacgcccgggctttgcccgggcggcctcagtgagcgagcgagcgcgcag

SEQ ID NO: 2261 - DNA, 3330 bp, Artificial Sequence
  source: /note="Description of Artificial Sequence: Synthetic polynucleotide"
ctgcgcgctcgctcgctcactgaggccgcccgggcaaagcccgggcgtcgggcgacctttggtcgcccggcctcagtgagcgagcgagcgcgcagagagggagtggccaactccatcactaggggttccttgtagttaatgattaacccgccatgctacttatctaccagggtaatggggatcctctagaactatagctagtcgacataacgcgtgatctaacatatcctggtgtggagtagcggacgctgctatgacagaggctcgggggcctgagctggctctgtgagctggggaggaggcagacagccaggccttgtctgcaagcagacctggcagcattgggctggccgccccccagggcctcctcttcatgcccagtgaatgactcaccttggcacagacacaatgttcggggtgggcacagtgcctgcttcccgccgcaccccagcccccctcaaatgccttccgagaagcccattgagcagggggcttgcattgcaccccagcctgacagcctggcatcttgggataaaagcagcacagccccctaggggctgcccttgctgtgtggcgccaccggcggtggagaacaaggctctattcagcctgtgcccaggaaaggggatcaggggatgcccaggcatggacagtgggtggcagggggggagaggagggctgtctgcttcccagaagtccaaggacacaaatgggtgaggggagagctctccccatagctgggctgcggcccaaccccaccccctcaggctatgccagggggtgttgccaggggcacccgggcatcgccagtctagcccactccttcataaagccctcgcatcccaggagcgagcagagccagagcaggttggagaggagacgcatcacctccgctgctcgcggggatcctctagaagcttcgtttagtgaaccgtcagatcgcctggagacgccatccacgctgttttgacctccatagaagacaccgggaccgatccagcctccgcggattcgaatcccggccgggaacggtgcattggaacgcggattccccgtgccaagagtgacgtaagtaccgcctatagagtctataggcccacaaaaaatgctttcttcttttaatatacttttttgtttatcttatttctaatactttccctaatctctttctttcagggcaataatgatacaatgtatcatgcctctttgcaccattctaaagaataacagtgataatttctgggttaaggcaatagcaatatttctgcatataaatatttctgcatataaattgtaactgatgtaagaggtttcatattgctaatagcagctacaatccagctaccattctgcttttattttatggttgggataaggctggattattctgagtccaagctaggcccttttgctaatcatgttcatacctcttatcttcctcccacagctcctgggcaacgtgctggtctgtgtgctggcccatcactttggcaaagaattgggattcgaaccggtgccgccaccatgaacttcgggctcagcttgattttccttgtccttgttttaaaaggtgtccagtgtgaggtgaagctggtggagagcggcggcgacctggtgaagcctggcggcagcctgaagctgagctgcgccgccagcggcttcaccttcagcagctacgccatgagctgggtgagacagaaccctgagaagagactggagtgggtggccagcatcagcaagggcggcaacacctactaccctaacagcgtgaagggcagattcaccatcagcagagacaacgccagaaacatcctgtacctgcagatgagcagcctgagaagcgaggacaccgccctgtactactgcgccagaggctggggcgactacggctggttcgcctactggggccaggtgaccctggtgaccgtgagcgccgccaaaacgacacccccatctgtctatccactggcccctggatctgctgcccaaactaactccatggtgaccctgggatgcctggtcaagggctatttccctgagccagtgacagtgacctggaactctggatccctgtccagcggtgtgcacaccttcccagctgtcctgcagtctgacctctacactctgagcagctcagtgactgtcccctccagcacctggcccagcgagaccgtcacctgcaacgttgcccacccggccagcagcaccaaggtggacaagaaaattagaaagaggcgagagggcagaggaagtcttctaacatgcggtgacgtggaggagaatcccggccctatgaagttgcctgttaggctgttggtgctgatgttctggattcctgcttccagcagtgacatcaagatgacccagagccctagcagcatgtacgccagcctgggcgagagagtgaccatcacctgcaaggccagccaggacatcaacagatacctgaactggttccagcagaagcctggcaagagccctaagaccctgatctacagagccaacagactgctggacggcgtgcctagcagattcagcggcagcggcagcggccaggactacagcctgaccatcagcagcctggactacgaggacatgggcatctactactgcctgcagtacgacgagttccctctgaccttcggcgacggcaccaagctggagctgaagcgggctgatgctgcaccaactgtatccatcttcccaccatccagtgagcagttaacatctggaggtgcctcagtcgtgtgcttcttgaacaacttctaccccaaagacatcaatgtcaagtggaagattgatggcagtgaacgacaaaatggcgtcctgaacagttggactgatcaggacagcaaagacagcacctacagcatgagcagcaccctcacgttgaccaaggacgagtatgaacgacataacagctatacctgtgaggccactcacaagacatcaacttcacccattgtcaagagcttcaacaggaatgagtgttagtaactcgaggacggggtgaactacgcctgaggatccgatctttttccctctgccaaaaattatggggacatcatgaagccccttgagcatctgacttctggctaataaaggaaatttattttcattgcaatagtgtgttggaattttttgtgtctctcactcggcctaggtagataagtagcatggcgggttaatcattaactacaaggaacccctagtgatggagttggccactccctctctgcgcgctcgctcgctcactgaggccgggcgaccaaaggtcgcccgacgcccgggctttgcccgggcggcctcagtgagcgagcgagcgcgcag

SEQ ID NO: 2262 - DNA, 3976 bp, Artificial Sequence
  source: /note="Description of Artificial Sequence: Synthetic polynucleotide"
ctgcgcgctcgctcgctcactgaggccgcccgggcaaagcccgggcgtcgggcgacctttggtcgcccggcctcagtgagcgagcgagcgcgcagagagggagtggccaactccatcactaggggttccttgtagttaatgattaacccgccatgctacttatctaccagggtaatggggatcctctagaactatagctagtcgacataacgcgtctagttattaatagtaatcaattacggggtcattagttcatagcccatatatggagttccgcgttacataacttacggtaaatggcccgcctggctgaccgcccaacgacccccgcccattgacgtcaataatgacgtatgttcccatagtaacgccaatagggactttccattgacgtcaatgggtggagtatttacggtaaactgcccacttggcagtacatcaagtgtatcatatgccaagtacgccccctattgacgtcaatgacggtaaatggcccgcctggcattatgcccagtacatgaccttatgggactttcctacttggcagtacatctacgtattagtcatcgctattaccatggtcgaggtgagccccacgttctgcttcactctccccatctcccccccctccccacccccaattttgtatttatttattttttaattattttgtgcagcgatgggggcggggggggggggggggcgcgcgccaggcggggcggggcggggcgaggggcggggcggggcgaggcggagaggtgcggcggcagccaatcagagcggcgcgctccgaaagtttccttttatggcgaggcggcggcggcggcggccctataaaaagcgaagcgcgcggcgggcgggagtcgctgcgcgctgccttcgccccgtgccccgctccgccgccgcctcgcgccgcccgccccggctctgactgaccgcgttactcccacaggtgagcgggcgggacggcccttctcctccgggctgtaattagcgcttggtttaatgacggcttgtttcttttctgtggctgcgtgaaagccttgaggggctccgggagggccctttgtgcggggggagcggctcggggggtgcgtgcgtgtgtgtgtgcgtggggagcgccgcgtgcggctccgcgctgcccggcggctgtgagcgctgcgggcgcggcgcggggctttgtgcgctccgcagtgtgcgcgaggggagcgcggccgggggcggtgccccgcggtgcggggggggctgcgaggggaacaaaggctgcgtgcggggtgtgtgcgtgggggggtgagcagggggtgtgggcgcgtcggtcgggctgcaaccccccctgcacccccctccccgagttgctgagcacggcccggcttcgggtgcggggctccgtacggggcgtggcgcggggctcgccgtgccgggcggggggtggcggcaggtgggggtgccgggcggggcggggccgcctcgggccggggagggctcgggggaggggcgcggcggcccccggagcgccggcggctgtcgaggcgcggcgagccgcagccattgccttttatggtaatcgtgcgagagggcgcagggacttcctttgtcccaaatctgtgcggagccgaaatctgggaggcgccgccgcaccccctctagcgggcgcggggcgaagcggtgcggcgccggcaggaaggaaatgggcggggagggccttcgtgcgtcgccgcgccgccgtccccttctccctctccagcctcggggctgtccgcggggggacggctgccttcgggggggacggggcagggcggggttcggcttctggcgtgtgaccggcggctctagagcctctgctaaccatgttcatgccttcttctttttcctacagctcctgggcaacgtgctggttattgtgctgtctcatcattttggcaaagaattcgggattcgaaccggtgccgccaccatgaacttcgggctcagcttgattttccttgtccttgttttaaaaggtgtccagtgtgaggtgaagctggtggagagcggcggcgacctggtgaagcctggcggcagcctgaagctgagctgcgccgccagcggcttcaccttcagcagctacgccatgagctgggtgagacagaaccctgagaagagactggagtgggtggccagcatcagcaagggcggcaacacctactaccctaacagcgtgaagggcagattcaccatcagcagagacaacgccagaaacatcctgtacctgcagatgagcagcctgagaagcgaggacaccgccctgtactactgcgccagaggctggggcgactacggctggttcgcctactggggccaggtgaccctggtgaccgtgagcgccgccaaaacgacacccccatctgtctatccactggcccctggatctgctgcccaaactaactccatggtgaccctgggatgcctggtcaagggctatttccctgagccagtgacagtgacctggaactctggatccctgtccagcggtgtgcacaccttcccagctgtcctgcagtctgacctctacactctgagcagctcagtgactgtcccctccagcacctggcccagcgagaccgtcacctgcaacgttgcccacccggccagcagcaccaaggtggacaagaaaattgtgcccagggattgtggtgagctcaaaaccccacttggtgacacaactcacacatgcccacggtgcccagagcccaaatcttgtgacacacctcccccgtgcccacggtgcccagagcccaaatcttgtgacacacctcccccatgcccacggtgcccagagcccaaatcttgtgacacacctcccccgtgcccaaggtgcccagcacctgaactcagaaagaggcgagagggcagaggaagtcttctaacatgcggtgacgtggaggagaatcccggccctatgaagttgcctgttaggctgttggtgctgatgttctggattcctgcttccagcagtgacatcaagatgacccagagccctagcagcatgtacgccagcctgggcgagagagtgaccatcacctgcaaggccagccaggacatcaacagatacctgaactggttccagcagaagcctggcaagagccctaagaccctgatctacagagccaacagactgctggacggcgtgcctagcagattcagcggcagcggcagcggccaggactacagcctgaccatcagcagcctggactacgaggacatgggcatctactactgcctgcagtacgacgagttccctctgaccttcggcgacggcaccaagctggagctgaagcgggctgatgctgcaccaactgtatccatcttcccaccatccagtgagcagttaacatctggaggtgcctcagtcgtgtgcttcttgaacaacttctaccccaaagacatcaatgtcaagtggaagattgatggcagtgaacgacaaaatggcgtcctgaacagttggactgatcaggacagcaaagacagcacctacagcatgagcagcaccctcacgttgaccaaggacgagtatgaacgacataacagctatacctgtgaggccactcacaagacatcaacttcacccattgtcaagagcttcaacaggaatgagtgttagtaactcgaggacggggtgaactacgcctgaggatccgatctttttccctctgccaaaaattatggggacatcatgaagccccttgagcatctgacttctggctaataaaggaaatttattttcattgcaatagtgtgttggaattttttgtgtctctcactcggcctaggtagataagtagcatggcgggttaatcattaactacaaggaacccctagtgatggagttggccactccctctctgcgcgctcgctcgctcactgaggccgggcgaccaaaggtcgcccgacgcccgggctttgcccgggcggcctcagtgagcgagcgagcgcgcag

SEQ ID NO: 2263 - DNA, 3404 bp, Artificial Sequence
  source: /note="Description of Artificial Sequence: Synthetic polynucleotide"
ctgcgcgctcgctcgctcactgaggccgcccgggcaaagcccgggcgtcgggcgacctttggtcgcccggcctcagtgagcgagcgagcgcgcagagagggagtggccaactccatcactaggggttccttgtagttaatgattaacccgccatgctacttatctaccagggtaatggggatcctctagaactatagctagtcgacataacgcgttagtatctgcagagggccctgcgtatgagtgcaagtgggttttaggaccaggatgaggcggggtgggggtgcctacctgacgaccgaccccgacccactggacaagcacccaacccccattccccaaattgcgcatcccctatcagagagggggaggggaaacaggatgcggcgaggcgcgtgcgcactgccagcttcagcaccgcggacagtgccttcgcccccgcctggcggcgcgcgccaccgccgcctcagcactgaaggcgcgctgacgtcactcgccggtcccccgcaaactccccttcccggccaccttggtcgcgtccgcgccgccgccggcccagccggaccgcaccacgcgaggcgcgagataggggggcacgggcgcgaccatctgcgctgcggcgccggcgactcagcgctgcctcagtctgcggtgggcagcggaggagtcgtgtcgtgcctgagagcgcagctgtgctcctgggcaccgcgcagtccgcccccgcggctcctggccagaccacccctaggaccccctgccccaagtcgcagccaagcttcgtttagtgaaccgtcagatcgcctggagacgccatccacgctgttttgacctccatagaagacaccgggaccgatccagcctccgcggattcgaatcccggccgggaacggtgcattggaacgcggattccccgtgccaagagtgacgtaagtaccgcctatagagtctataggcccacaaaaaatgctttcttcttttaatatacttttttgtttatcttatttctaatactttccctaatctctttctttcagggcaataatgatacaatgtatcatgcctctttgcaccattctaaagaataacagtgataatttctgggttaaggcaatagcaatatttctgcatataaatatttctgcatataaattgtaactgatgtaagaggtttcatattgctaatagcagctacaatccagctaccattctgcttttattttatggttgggataaggctggattattctgagtccaagctaggcccttttgctaatcatgttcatacctcttatcttcctcccacagctcctgggcaacgtgctggtctgtgtgctggcccatcactttggcaaagaattgggattcgaaccggtgccgccaccatgaacttcgggctcagcttgattttccttgtccttgttttaaaaggtgtccagtgtgaggtgaagctggtggagagcggcggcgacctggtgaagcctggcggcagcctgaagctgagctgcgccgccagcggcttcaccttcagcagctacgccatgagctgggtgagacagaaccctgagaagagactggagtgggtggccagcatcagcaagggcggcaacacctactaccctaacagcgtgaagggcagattcaccatcagcagagacaacgccagaaacatcctgtacctgcagatgagcagcctgagaagcgaggacaccgccctgtactactgcgccagaggctggggcgactacggctggttcgcctactggggccaggtgaccctggtgaccgtgagcgccgccaaaacgacacccccatctgtctatccactggcccctggatctgctgcccaaactaactccatggtgaccctgggatgcctggtcaagggctatttccctgagccagtgacagtgacctggaactctggatccctgtccagcggtgtgcacaccttcccagctgtcctgcagtctgacctctacactctgagcagctcagtgactgtcccctccagcacctggcccagcgagaccgtcacctgcaacgttgcccacccggccagcagcaccaaggtggacaagaaaattgtgcccagggattgtggtgagctcaaaaccccacttggtgacacaactcacacatgcccacggtgcccagagcccaaatcttgtgacacacctcccccgtgcccacggtgcccagagcccaaatcttgtgacacacctcccccatgcccacggtgcccagagcccaaatcttgtgacacacctcccccgtgcccaaggtgcccagcacctgaactcagaaagaggcgagagggcagaggaagtcttctaacatgcggtgacgtggaggagaatcccggccctatgaagttgcctgttaggctgttggtgctgatgttctggattcctgcttccagcagtgacatcaagatgacccagagccctagcagcatgtacgccagcctgggcgagagagtgaccatcacctgcaaggccagccaggacatcaacagatacctgaactggttccagcagaagcctggcaagagccctaagaccctgatctacagagccaacagactgctggacggcgtgcctagcagattcagcggcagcggcagcggccaggactacagcctgaccatcagcagcctggactacgaggacatgggcatctactactgcctgcagtacgacgagttccctctgaccttcggcgacggcaccaagctggagctgaagcgggctgatgctgcaccaactgtatccatcttcccaccatccagtgagcagttaacatctggaggtgcctcagtcgtgtgcttcttgaacaacttctaccccaaagacatcaatgtcaagtggaagattgatggcagtgaacgacaaaatggcgtcctgaacagttggactgatcaggacagcaaagacagcacctacagcatgagcagcaccctcacgttgaccaaggacgagtatgaacgacataacagctatacctgtgaggccactcacaagacatcaacttcacccattgtcaagagcttcaacaggaatgagtgttagtaactcgaggacggggtgaactacgcctgaggatccgatctttttccctctgccaaaaattatggggacatcatgaagccccttgagcatctgacttctggctaataaaggaaatttattttcattgcaatagtgtgttggaattttttgtgtctctcactcggcctaggtagataagtagcatggcgggttaatcattaactacaaggaacccctagtgatggagttggccactccctctctgcgcgctcgctcgctcactgaggccgggcgaccaaaggtcgcccgacgcccgggctttgcccgggcggcctcagtgagcgagcgagcgcgcag

SEQ ID NO: 2264 - DNA, 3546 bp, Artificial Sequence
  source: /note="Description of Artificial Sequence: Synthetic polynucleotide"
ctgcgcgctcgctcgctcactgaggccgcccgggcaaagcccgggcgtcgggcgacctttggtcgcccggcctcagtgagcgagcgagcgcgcagagagggagtggccaactccatcactaggggttccttgtagttaatgattaacccgccatgctacttatctaccagggtaatggggatcctctagaactatagctagtcgacataacgcgtgatctaacatatcctggtgtggagtagcggacgctgctatgacagaggctcgggggcctgagctggctctgtgagctggggaggaggcagacagccaggccttgtctgcaagcagacctggcagcattgggctggccgccccccagggcctcctcttcatgcccagtgaatgactcaccttggcacagacacaatgttcggggtgggcacagtgcctgcttcccgccgcaccccagcccccctcaaatgccttccgagaagcccattgagcagggggcttgcattgcaccccagcctgacagcctggcatcttgggataaaagcagcacagccccctaggggctgcccttgctgtgtggcgccaccggcggtggagaacaaggctctattcagcctgtgcccaggaaaggggatcaggggatgcccaggcatggacagtgggtggcagggggggagaggagggctgtctgcttcccagaagtccaaggacacaaatgggtgaggggagagctctccccatagctgggctgcggcccaaccccaccccctcaggctatgccagggggtgttgccaggggcacccgggcatcgccagtctagcccactccttcataaagccctcgcatcccaggagcgagcagagccagagcaggttggagaggagacgcatcacctccgctgctcgcggggatcctctagaagcttcgtttagtgaaccgtcagatcgcctggagacgccatccacgctgttttgacctccatagaagacaccgggaccgatccagcctccgcggattcgaatcccggccgggaacggtgcattggaacgcggattccccgtgccaagagtgacgtaagtaccgcctatagagtctataggcccacaaaaaatgctttcttcttttaatatacttttttgtttatcttatttctaatactttccctaatctctttctttcagggcaataatgatacaatgtatcatgcctctttgcaccattctaaagaataacagtgataatttctgggttaaggcaatagcaatatttctgcatataaatatttctgcatataaattgtaactgatgtaagaggtttcatattgctaatagcagctacaatccagctaccattctgcttttattttatggttgggataaggctggattattctgagtccaagctaggcccttttgctaatcatgttcatacctcttatcttcctcccacagctcctgggcaacgtgctggtctgtgtgctggcccatcactttggcaaagaattgggattcgaaccggtgccgccaccatgaacttcgggctcagcttgattttccttgtccttgttttaaaaggtgtccagtgtgaggtgaagctggtggagagcggcggcgacctggtgaagcctggcggcagcctgaagctgagctgcgccgccagcggcttcaccttcagcagctacgccatgagctgggtgagacagaaccctgagaagagactggagtgggtggccagcatcagcaagggcggcaacacctactaccctaacagcgtgaagggcagattcaccatcagcagagacaacgccagaaacatcctgtacctgcagatgagcagcctgagaagcgaggacaccgccctgtactactgcgccagaggctggggcgactacggctggttcgcctactggggccaggtgaccctggtgaccgtgagcgccgccaaaacgacacccccatctgtctatccactggcccctggatctgctgcccaaactaactccatggtgaccctgggatgcctggtcaagggctatttccctgagccagtgacagtgacctggaactctggatccctgtccagcggtgtgcacaccttcccagctgtcctgcagtctgacctctacactctgagcagctcagtgactgtcccctccagcacctggcccagcgagaccgtcacctgcaacgttgcccacccggccagcagcaccaaggtggacaagaaaattgtgcccagggattgtggtgagctcaaaaccccacttggtgacacaactcacacatgcccacggtgcccagagcccaaatcttgtgacacacctcccccgtgcccacggtgcccagagcccaaatcttgtgacacacctcccccatgcccacggtgcccagagcccaaatcttgtgacacacctcccccgtgcccaaggtgcccagcacctgaactcagaaagaggcgagagggcagaggaagtcttctaacatgcggtgacgtggaggagaatcccggccctatgaagttgcctgttaggctgttggtgctgatgttctggattcctgcttccagcagtgacatcaagatgacccagagccctagcagcatgtacgccagcctgggcgagagagtgaccatcacctgcaaggccagccaggacatcaacagatacctgaactggttccagcagaagcctggcaagagccctaagaccctgatctacagagccaacagactgctggacggcgtgcctagcagattcagcggcagcggcagcggccaggactacagcctgaccatcagcagcctggactacgaggacatgggcatctactactgcctgcagtacgacgagttccctctgaccttcggcgacggcaccaagctggagctgaagcgggctgatgctgcaccaactgtatccatcttcccaccatccagtgagcagttaacatctggaggtgcctcagtcgtgtgcttcttgaacaacttctaccccaaagacatcaatgtcaagtggaagattgatggcagtgaacgacaaaatggcgtcctgaacagttggactgatcaggacagcaaagacagcacctacagcatgagcagcaccctcacgttgaccaaggacgagtatgaacgacataacagctatacctgtgaggccactcacaagacatcaacttcacccattgtcaagagcttcaacaggaatgagtgttagtaactcgaggacggggtgaactacgcctgaggatccgatctttttccctctgccaaaaattatggggacatcatgaagccccttgagcatctgacttctggctaataaaggaaatttattttcattgcaatagtgtgttggaattttttgtgtctctcactcggcctaggtagataagtagcatggcgggttaatcattaactacaaggaacccctagtgatggagttggccactccctctctgcgcgctcgctcgctcactgaggccgggcgaccaaaggtcgcccgacgcccgggctttgcccgggcggcctcagtgagcgagcgagcgcgcag

SEQ ID NO: 2265 - DNA, 3997 bp, Artificial Sequence
  source: /note="Description of Artificial Sequence: Synthetic polynucleotide"
ctgcgcgctcgctcgctcactgaggccgcccgggcaaagcccgggcgtcgggcgacctttggtcgcccggcctcagtgagcgagcgagcgcgcagagagggagtggccaactccatcactaggggttccttgtagttaatgattaacccgccatgctacttatctaccagggtaatggggatcctctagaactatagctagtcgacataacgcgtctagttattaatagtaatcaattacggggtcattagttcatagcccatatatggagttccgcgttacataacttacggtaaatggcccgcctggctgaccgcccaacgacccccgcccattgacgtcaataatgacgtatgttcccatagtaacgccaatagggactttccattgacgtcaatgggtggagtatttacggtaaactgcccacttggcagtacatcaagtgtatcatatgccaagtacgccccctattgacgtcaatgacggtaaatggcccgcctggcattatgcccagtacatgaccttatgggactttcctacttggcagtacatctacgtattagtcatcgctattaccatggtcgaggtgagccccacgttctgcttcactctccccatctcccccccctccccacccccaattttgtatttatttattttttaattattttgtgcagcgatgggggcggggggggggggggggcgcgcgccaggcggggcggggcggggcgaggggcggggcggggcgaggcggagaggtgcggcggcagccaatcagagcggcgcgctccgaaagtttccttttatggcgaggcggcggcggcggcggccctataaaaagcgaagcgcgcggcgggcgggagtcgctgcgcgctgccttcgccccgtgccccgctccgccgccgcctcgcgccgcccgccccggctctgactgaccgcgttactcccacaggtgagcgggcgggacggcccttctcctccgggctgtaattagcgcttggtttaatgacggcttgtttcttttctgtggctgcgtgaaagccttgaggggctccgggagggccctttgtgcggggggagcggctcggggggtgcgtgcgtgtgtgtgtgcgtggggagcgccgcgtgcggctccgcgctgcccggcggctgtgagcgctgcgggcgcggcgcggggctttgtgcgctccgcagtgtgcgcgaggggagcgcggccgggggcggtgccccgcggtgcggggggggctgcgaggggaacaaaggctgcgtgcggggtgtgtgcgtgggggggtgagcagggggtgtgggcgcgtcggtcgggctgcaaccccccctgcacccccctccccgagttgctgagcacggcccggcttcgggtgcggggctccgtacggggcgtggcgcggggctcgccgtgccgggcggggggtggcggcaggtgggggtgccgggcggggcggggccgcctcgggccggggagggctcgggggaggggcgcggcggcccccggagcgccggcggctgtcgaggcgcggcgagccgcagccattgccttttatggtaatcgtgcgagagggcgcagggacttcctttgtcccaaatctgtgcggagccgaaatctgggaggcgccgccgcaccccctctagcgggcgcggggcgaagcggtgcggcgccggcaggaaggaaatgggcggggagggccttcgtgcgtcgccgcgccgccgtccccttctccctctccagcctcggggctgtccgcggggggacggctgccttcgggggggacggggcagggcggggttcggcttctggcgtgtgaccggcggctctagagcctctgctaaccatgttcatgccttcttctttttcctacagctcctgggcaacgtgctggttattgtgctgtctcatcattttggcaaagaattcgggattcgaaccggtgccgccaccatgaacttcgggctcagcttgattttccttgtccttgttttaaaaggtgtccagtgtgaggtgaagctggtggagagcggcggcgacctggtgaagcctggcggcagcctgaagctgagctgcgccgccagcggcttcaccttcagcagctacgccatgagctgggtgagacagaaccctgagaagagactggagtgggtggccagcatcagcaagggcggcaacacctactaccctaacagcgtgaagggcagattcaccatcagcagagacaacgccagaaacatcctgtacctgcagatgagcagcctgagaagcgaggacaccgccctgtactactgcgccagaggctggggcgactacggctggttcgcctactggggccaggtgaccctggtgaccgtgagcgccgccaaaacgacacccccatctgtctatccactggcccctggatctgctgcccaaactaactccatggtgaccctgggatgcctggtcaagggctatttccctgagccagtgacagtgacctggaactctggatccctgtccagcggtgtgcacaccttcccagctgtcctgcagtctgacctctacactctgagcagctcagtgactgtcccctccagcacctggcccagcgagaccgtcacctgcaacgttgcccacccggccagcagcaccaaggtggacaagaaaattgtgcccagggattgtggtgagctcaaaaccccacttggtgacacaactcacacatgcccacggtgcccagagcccaaatcttgtgacacacctcccccgtgcccacggtgcccagagcccaaatcttgtgacacacctcccccatgcccacggtgcccagagcccaaatcttgtgacacacctcccccgtgcccaaggtgcccagcacctgaactcagaaagaggcgaggaagcggagtgaaacagactttgaattttgaccttctcaagttggcgggagacgtggagtccaaccctggacctatgaagttgcctgttaggctgttggtgctgatgttctggattcctgcttccagcagtgacatcaagatgacccagagccctagcagcatgtacgccagcctgggcgagagagtgaccatcacctgcaaggccagccaggacatcaacagatacctgaactggttccagcagaagcctggcaagagccctaagaccctgatctacagagccaacagactgctggacggcgtgcctagcagattcagcggcagcggcagcggccaggactacagcctgaccatcagcagcctggactacgaggacatgggcatctactactgcctgcagtacgacgagttccctctgaccttcggcgacggcaccaagctggagctgaagcgggctgatgctgcaccaactgtatccatcttcccaccatccagtgagcagttaacatctggaggtgcctcagtcgtgtgcttcttgaacaacttctaccccaaagacatcaatgtcaagtggaagattgatggcagtgaacgacaaaatggcgtcctgaacagttggactgatcaggacagcaaagacagcacctacagcatgagcagcaccctcacgttgaccaaggacgagtatgaacgacataacagctatacctgtgaggccactcacaagacatcaacttcacccattgtcaagagcttcaacaggaatgagtgttagtaactcgaggacggggtgaactacgcctgaggatccgatctttttccctctgccaaaaattatggggacatcatgaagccccttgagcatctgacttctggctaataaaggaaatttattttcattgcaatagtgtgttggaattttttgtgtctctcactcggcctaggtagataagtagcatggcgggttaatcattaactacaaggaacccctagtgatggagttggccactccctctctgcgcgctcgctcgctcactgaggccgggcgaccaaaggtcgcccgacgcccgggctttgcccgggcggcctcagtgagcgagcgagcgcgcag

SEQ ID NO: 2266 - DNA, 3425 bp, Artificial Sequence
  source: /note="Description of Artificial Sequence: Synthetic polynucleotide"
ctgcgcgctcgctcgctcactgaggccgcccgggcaaagcccgggcgtcgggcgacctttggtcgcccggcctcagtgagcgagcgagcgcgcagagagggagtggccaactccatcactaggggttccttgtagttaatgattaacccgccatgctacttatctaccagggtaatggggatcctctagaactatagctagtcgacataacgcgttagtatctgcagagggccctgcgtatgagtgcaagtgggttttaggaccaggatgaggcggggtgggggtgcctacctgacgaccgaccccgacccactggacaagcacccaacccccattccccaaattgcgcatcccctatcagagagggggaggggaaacaggatgcggcgaggcgcgtgcgcactgccagcttcagcaccgcggacagtgccttcgcccccgcctggcggcgcgcgccaccgccgcctcagcactgaaggcgcgctgacgtcactcgccggtcccccgcaaactccccttcccggccaccttggtcgcgtccgcgccgccgccggcccagccggaccgcaccacgcgaggcgcgagataggggggcacgggcgcgaccatctgcgctgcggcgccggcgactcagcgctgcctcagtctgcggtgggcagcggaggagtcgtgtcgtgcctgagagcgcagctgtgctcctgggcaccgcgcagtccgcccccgcggctcctggccagaccacccctaggaccccctgccccaagtcgcagccaagcttcgtttagtgaaccgtcagatcgcctggagacgccatccacgctgttttgacctccatagaagacaccgggaccgatccagcctccgcggattcgaatcccggccgggaacggtgcattggaacgcggattccccgtgccaagagtgacgtaagtaccgcctatagagtctataggcccacaaaaaatgctttcttcttttaatatacttttttgtttatcttatttctaatactttccctaatctctttctttcagggcaataatgatacaatgtatcatgcctctttgcaccattctaaagaataacagtgataatttctgggttaaggcaatagcaatatttctgcatataaatatttctgcatataaattgtaactgatgtaagaggtttcatattgctaatagcagctacaatccagctaccattctgcttttattttatggttgggataaggctggattattctgagtccaagctaggcccttttgctaatcatgttcatacctcttatcttcctcccacagctcctgggcaacgtgctggtctgtgtgctggcccatcactttggcaaagaattgggattcgaaccggtgccgccaccatgaacttcgggctcagcttgattttccttgtccttgttttaaaaggtgtccagtgtgaggtgaagctggtggagagcggcggcgacctggtgaagcctggcggcagcctgaagctgagctgcgccgccagcggcttcaccttcagcagctacgccatgagctgggtgagacagaaccctgagaagagactggagtgggtggccagcatcagcaagggcggcaacacctactaccctaacagcgtgaagggcagattcaccatcagcagagacaacgccagaaacatcctgtacctgcagatgagcagcctgagaagcgaggacaccgccctgtactactgcgccagaggctggggcgactacggctggttcgcctactggggccaggtgaccctggtgaccgtgagcgccgccaaaacgacacccccatctgtctatccactggcccctggatctgctgcccaaactaactccatggtgaccctgggatgcctggtcaagggctatttccctgagccagtgacagtgacctggaactctggatccctgtccagcggtgtgcacaccttcccagctgtcctgcagtctgacctctacactctgagcagctcagtgactgtcccctccagcacctggcccagcgagaccgtcacctgcaacgttgcccacccggccagcagcaccaaggtggacaagaaaattgtgcccagggattgtggtgagctcaaaaccccacttggtgacacaactcacacatgcccacggtgcccagagcccaaatcttgtgacacacctcccccgtgcccacggtgcccagagcccaaatcttgtgacacacctcccccatgcccacggtgcccagagcccaaatcttgtgacacacctcccccgtgcccaaggtgcccagcacctgaactcagaaagaggcgaggaagcggagtgaaacagactttgaattttgaccttctcaagttggcgggagacgtggagtccaaccctggacctatgaagttgcctgttaggctgttggtgctgatgttctggattcctgcttccagcagtgacatcaagatgacccagagccctagcagcatgtacgccagcctgggcgagagagtgaccatcacctgcaaggccagccaggacatcaacagatacctgaactggttccagcagaagcctggcaagagccctaagaccctgatctacagagccaacagactgctggacggcgtgcctagcagattcagcggcagcggcagcggccaggactacagcctgaccatcagcagcctggactacgaggacatgggcatctactactgcctgcagtacgacgagttccctctgaccttcggcgacggcaccaagctggagctgaagcgggctgatgctgcaccaactgtatccatcttcccaccatccagtgagcagttaacatctggaggtgcctcagtcgtgtgcttcttgaacaacttctaccccaaagacatcaatgtcaagtggaagattgatggcagtgaacgacaaaatggcgtcctgaacagttggactgatcaggacagcaaagacagcacctacagcatgagcagcaccctcacgttgaccaaggacgagtatgaacgacataacagctatacctgtgaggccactcacaagacatcaacttcacccattgtcaagagcttcaacaggaatgagtgttagtaactcgaggacggggtgaactacgcctgaggatccgatctttttccctctgccaaaaattatggggacatcatgaagccccttgagcatctgacttctggctaataaaggaaatttattttcattgcaatagtgtgttggaattttttgtgtctctcactcggcctaggtagataagtagcatggcgggttaatcattaactacaaggaacccctagtgatggagttggccactccctctctgcgcgctcgctcgctcactgaggccgggcgaccaaaggtcgcccgacgcccgggctttgcccgggcggcctcagtgagcgagcgagcgcgcag

SEQ ID NO: 2267 - DNA, 3567 bp, Artificial Sequence
  source: /note="Description of Artificial Sequence: Synthetic polynucleotide"
ctgcgcgctcgctcgctcactgaggccgcccgggcaaagcccgggcgtcgggcgacctttggtcgcccggcctcagtgagcgagcgagcgcgcagagagggagtggccaactccatcactaggggttccttgtagttaatgattaacccgccatgctacttatctaccagggtaatggggatcctctagaactatagctagtcgacataacgcgtgatctaacatatcctggtgtggagtagcggacgctgctatgacagaggctcgggggcctgagctggctctgtgagctggggaggaggcagacagccaggccttgtctgcaagcagacctggcagcattgggctggccgccccccagggcctcctcttcatgcccagtgaatgactcaccttggcacagacacaatgttcggggtgggcacagtgcctgcttcccgccgcaccccagcccccctcaaatgccttccgagaagcccattgagcagggggcttgcattgcaccccagcctgacagcctggcatcttgggataaaagcagcacagccccctaggggctgcccttgctgtgtggcgccaccggcggtggagaacaaggctctattcagcctgtgcccaggaaaggggatcaggggatgcccaggcatggacagtgggtggcagggggggagaggagggctgtctgcttcccagaagtccaaggacacaaatgggtgaggggagagctctccccatagctgggctgcggcccaaccccaccccctcaggctatgccagggggtgttgccaggggcacccgggcatcgccagtctagcccactccttcataaagccctcgcatcccaggagcgagcagagccagagcaggttggagaggagacgcatcacctccgctgctcgcggggatcctctagaagcttcgtttagtgaaccgtcagatcgcctggagacgccatccacgctgttttgacctccatagaagacaccgggaccgatccagcctccgcggattcgaatcccggccgggaacggtgcattggaacgcggattccccgtgccaagagtgacgtaagtaccgcctatagagtctataggcccacaaaaaatgctttcttcttttaatatacttttttgtttatcttatttctaatactttccctaatctctttctttcagggcaataatgatacaatgtatcatgcctctttgcaccattctaaagaataacagtgataatttctgggttaaggcaatagcaatatttctgcatataaatatttctgcatataaattgtaactgatgtaagaggtttcatattgctaatagcagctacaatccagctaccattctgcttttattttatggttgggataaggctggattattctgagtccaagctaggcccttttgctaatcatgttcatacctcttatcttcctcccacagctcctgggcaacgtgctggtctgtgtgctggcccatcactttggcaaagaattgggattcgaaccggtgccgccaccatgaacttcgggctcagcttgattttccttgtccttgttttaaaaggtgtccagtgtgaggtgaagctggtggagagcggcggcgacctggtgaagcctggcggcagcctgaagctgagctgcgccgccagcggcttcaccttcagcagctacgccatgagctgggtgagacagaaccctgagaagagactggagtgggtggccagcatcagcaagggcggcaacacctactaccctaacagcgtgaagggcagattcaccatcagcagagacaacgccagaaacatcctgtacctgcagatgagcagcctgagaagcgaggacaccgccctgtactactgcgccagaggctggggcgactacggctggttcgcctactggggccaggtgaccctggtgaccgtgagcgccgccaaaacgacacccccatctgtctatccactggcccctggatctgctgcccaaactaactccatggtgaccctgggatgcctggtcaagggctatttccctgagccagtgacagtgacctggaactctggatccctgtccagcggtgtgcacaccttcccagctgtcctgcagtctgacctctacactctgagcagctcagtgactgtcccctccagcacctggcccagcgagaccgtcacctgcaacgttgcccacccggccagcagcaccaaggtggacaagaaaattgtgcccagggattgtggtgagctcaaaaccccacttggtgacacaactcacacatgcccacggtgcccagagcccaaatcttgtgacacacctcccccgtgcccacggtgcccagagcccaaatcttgtgacacacctcccccatgcccacggtgcccagagcccaaatcttgtgacacacctcccccgtgcccaaggtgcccagcacctgaactcagaaagaggcgaggaagcggagtgaaacagactttgaattttgaccttctcaagttggcgggagacgtggagtccaaccctggacctatgaagttgcctgttaggctgttggtgctgatgttctggattcctgcttccagcagtgacatcaagatgacccagagccctagcagcatgtacgccagcctgggcgagagagtgaccatcacctgcaaggccagccaggacatcaacagatacctgaactggttccagcagaagcctggcaagagccctaagaccctgatctacagagccaacagactgctggacggcgtgcctagcagattcagcggcagcggcagcggccaggactacagcctgaccatcagcagcctggactacgaggacatgggcatctactactgcctgcagtacgacgagttccctctgaccttcggcgacggcaccaagctggagctgaagcgggctgatgctgcaccaactgtatccatcttcccaccatccagtgagcagttaacatctggaggtgcctcagtcgtgtgcttcttgaacaacttctaccccaaagacatcaatgtcaagtggaagattgatggcagtgaacgacaaaatggcgtcctgaacagttggactgatcaggacagcaaagacagcacctacagcatgagcagcaccctcacgttgaccaaggacgagtatgaacgacataacagctatacctgtgaggccactcacaagacatcaacttcacccattgtcaagagcttcaacaggaatgagtgttagtaactcgaggacggggtgaactacgcctgaggatccgatctttttccctctgccaaaaattatggggacatcatgaagccccttgagcatctgacttctggctaataaaggaaatttattttcattgcaatagtgtgttggaattttttgtgtctctcactcggcctaggtagataagtagcatggcgggttaatcattaactacaaggaacccctagtgatggagttggccactccctctctgcgcgctcgctcgctcactgaggccgggcgaccaaaggtcgcccgacgcccgggctttgcccgggcggcctcagtgagcgagcgagcgcgcag

SEQ ID NO: 2268 - DNA, 3088 bp, Artificial Sequence
  source: /note="Description of Artificial Sequence: Synthetic polynucleotide"
ctgcgcgctcgctcgctcactgaggccgcccgggcaaagcccgggcgtcgggcgacctttggtcgcccggcctcagtgagcgagcgagcgcgcagagagggagtggccaactccatcactaggggttccttgtagttaatgattaacccgccatgctacttatctaccagggtaatggggatcctctagaactatagctagtcgacataacgcgtctagttattaatagtaatcaattacggggtcattagttcatagcccatatatggagttccgcgttacataacttacggtaaatggcccgcctggctgaccgcccaacgacccccgcccattgacgtcaataatgacgtatgttcccatagtaacgccaatagggactttccattgacgtcaatgggtggagtatttacggtaaactgcccacttggcagtacatcaagtgtatcatatgccaagtacgccccctattgacgtcaatgacggtaaatggcccgcctggcattatgcccagtacatgaccttatgggactttcctacttggcagtacatctacgtattagtcatcgctattaccatggtcgaggtgagccccacgttctgcttcactctccccatctcccccccctccccacccccaattttgtatttatttattttttaattattttgtgcagcgatgggggcggggggggggggggggcgcgcgccaggcggggcggggcggggcgaggggcggggcggggcgaggcggagaggtgcggcggcagccaatcagagcggcgcgctccgaaagtttccttttatggcgaggcggcggcggcggcggccctataaaaagcgaagcgcgcggcgggcgggagtcgctgcgcgctgccttcgccccgtgccccgctccgccgccgcctcgcgccgcccgccccggctctgactgaccgcgttactcccacaggtgagcgggcgggacggcccttctcctccgggctgtaattagcgcttggtttaatgacggcttgtttcttttctgtggctgcgtgaaagccttgaggggctccgggagggccctttgtgcggggggagcggctcggggggtgcgtgcgtgtgtgtgtgcgtggggagcgccgcgtgcggctccgcgctgcccggcggctgtgagcgctgcgggcgcggcgcggggctttgtgcgctccgcagtgtgcgcgaggggagcgcggccgggggcggtgccccgcggtgcggggggggctgcgaggggaacaaaggctgcgtgcggggtgtgtgcgtgggggggtgagcagggggtgtgggcgcgtcggtcgggctgcaaccccccctgcacccccctccccgagttgctgagcacggcccggcttcgggtgcggggctccgtacggggcgtggcgcggggctcgccgtgccgggcggggggtggcggcaggtgggggtgccgggcggggcggggccgcctcgggccggggagggctcgggggaggggcgcggcggcccccggagcgccggcggctgtcgaggcgcggcgagccgcagccattgccttttatggtaatcgtgcgagagggcgcagggacttcctttgtcccaaatctgtgcggagccgaaatctgggaggcgccgccgcaccccctctagcgggcgcggggcgaagcggtgcggcgccggcaggaaggaaatgggcggggagggccttcgtgcgtcgccgcgccgccgtccccttctccctctccagcctcggggctgtccgcggggggacggctgccttcgggggggacggggcagggcggggttcggcttctggcgtgtgaccggcggctctagagcctctgctaaccatgttcatgccttcttctttttcctacagctcctgggcaacgtgctggttattgtgctgtctcatcattttggcaaagaattcgggattcgaaccggtgccgccaccatgaagttgcctgttaggctgttggtgctgatgttctggattcctgcttccagcagtgacatcaagatgacccagagccctagcagcatgtacgccagcctgggcgagagagtgaccatcacctgcaaggccagccaggacatcaacagatacctgaactggttccagcagaagcctggcaagagccctaagaccctgatctacagagccaacagactgctggacggcgtgcctagcagattcagcggcagcggcagcggccaggactacagcctgaccatcagcagcctggactacgaggacatgggcatctactactgcctgcagtacgacgagttccctctgaccttcggcgacggcaccaagctggagctgaagggtggtggtggatccggtggtggtggatccggtggtggtggatccgaggtgaagctggtggagagcggcggcgacctggtgaagcctggcggcagcctgaagctgagctgcgccgccagcggcttcaccttcagcagctacgccatgagctgggtgagacagaaccctgagaagagactggagtgggtggccagcatcagcaagggcggcaacacctactaccctaacagcgtgaagggcagattcaccatcagcagagacaacgccagaaacatcctgtacctgcagatgagcagcctgagaagcgaggacaccgccctgtactactgcgccagaggctggggcgactacggctggttcgcctactggggccaggtgaccctggtgaccgtgagcgcccatcatcaccatcaccattagtaactcgaggacggggtgaactacgcctgaggatccgatctttttccctctgccaaaaattatggggacatcatgaagccccttgagcatctgacttctggctaataaaggaaatttattttcattgcaatagtgtgttggaattttttgtgtctctcactcggcctaggtagataagtagcatggcgggttaatcattaactacaaggaacccctagtgatggagttggccactccctctctgcgcgctcgctcgctcactgaggccgggcgaccaaaggtcgcccgacgcccgggctttgcccgggcggcctcagtgagcgagcgagcgcgcag

SEQ ID NO: 2269 - DNA, 3558 bp, Artificial Sequence
  source: /note="Description of Artificial Sequence: Synthetic polynucleotide"
ctgcgcgctcgctcgctcactgaggccgcccgggcaaagcccgggcgtcgggcgacctttggtcgcccggcctcagtgagcgagcgagcgcgcagagagggagtggccaactccatcactaggggttccttgtagttaatgattaacccgccatgctacttatctaccagggtaatggggatcctctagaactatagctagtcgacataacgcgtgatctaacatatcctggtgtggagtagcggacgctgctatgacagaggctcgggggcctgagctggctctgtgagctggggaggaggcagacagccaggccttgtctgcaagcagacctggcagcattgggctggccgccccccagggcctcctcttcatgcccagtgaatgactcaccttggcacagacacaatgttcggggtgggcacagtgcctgcttcccgccgcaccccagcccccctcaaatgccttccgagaagcccattgagcagggggcttgcattgcaccccagcctgacagcctggcatcttgggataaaagcagcacagccccctaggggctgcccttgctgtgtggcgccaccggcggtggagaacaaggctctattcagcctgtgcccaggaaaggggatcaggggatgcccaggcatggacagtgggtggcagggggggagaggagggctgtctgcttcccagaagtccaaggacacaaatgggtgaggggagagctctccccatagctgggctgcggcccaaccccaccccctcaggctatgccagggggtgttgccaggggcacccgggcatcgccagtctagcccactccttcataaagccctcgcatcccaggagcgagcagagccagagcaggttggagaggagacgcatcacctccgctgctcgcggggatcctctagaagcttcgtttagtgaaccgtcagatcgcctggagacgccatccacgctgttttgacctccatagaagacaccgggaccgatccagcctccgcggattcgaatcccggccgggaacggtgcattggaacgcggattccccgtgccaagagtgacgtaagtaccgcctatagagtctataggcccacaaaaaatgctttcttcttttaatatacttttttgtttatcttatttctaatactttccctaatctctttctttcagggcaataatgatacaatgtatcatgcctctttgcaccattctaaagaataacagtgataatttctgggttaaggcaatagcaatatttctgcatataaatatttctgcatataaattgtaactgatgtaagaggtttcatattgctaatagcagctacaatccagctaccattctgcttttattttatggttgggataaggctggattattctgagtccaagctaggcccttttgctaatcatgttcatacctcttatcttcctcccacagctcctgggcaacgtgctggtctgtgtgctggcccatcactttggcaaagaattgggattcgaaccggtgccgccaccatgaacttcgggctcagcttgattttccttgtccttgttttaaaaggtgtccagtgtgaggttcatctggtggagtctgggggagccttagtgaagcctggagggtccctgaaactctcctgtgcagcctctggattcagtttcagtaaatatggcatgtcttgggttcgccagactccagacaagaggctggagtgggtcgcaaccattagtagtagtgggagtcgcacctactatccagacagtgtgaagggccaattcaccatctccagagacaatgccaagaacaccctgtacctgcaaatgagcagtctgaagtctgaggacacagccatgtattactgttcaattagctgggacggtgctatggactactggggtcaagggacctcagtcaccgtctcctcagccaaaacgacacccccatctgtctatccactggcccctggatctgctgcccaaactaactccatggtgaccctgggatgcctggtcaagggctatttccctgagccagtgacagtgacctggaactctggatccctgtccagcggtgtgcacaccttcccagctgtcctgcagtctgacctctacactctgagcagctcagtgactgtcccctccagcacctggcccagcgagaccgtcacctgcaacgttgcccacccggccagcagcaccaaggtggacaagaaaattgtgcccagggattgtggtgagctcaaaaccccacttggtgacacaactcacacatgcccacggtgcccagagcccaaatcttgtgacacacctcccccgtgcccacggtgcccagagcccaaatcttgtgacacaactcacacatgcccacggtgcccagagcccaaatcttgtgacacacctcccccgtgcccaaggtgcccagcacctgaactcagaaagaggcgagagggcagaggaagtcttctaacatgcggtgacgtggaggagaatcccggccctatgaagttgcctgttaggctgttggtgctgatgttctggattcctgcttccagcagtgatgttttgatgacccaaactccactctccctgcctgtcagtcttggagatcaagcctccatctcttgcaaatctagtcagagcattgtacatagtaatggaaacacctatttagaatggtacctgcagaaaccaggccagtctccaaagctcctggtctacaaagtttccaatcgattttctggggtcccagacaggttcagtggcagtggatcagggacagatttcacactcaagatcagcagagtggaggctgaggatctgggaacttattactgctttcaaggttcacttgttccttgggcgttcggtggaggcaccaagctggaaatcaaacgggctgatgctgcaccaactgtatccatcttcccaccatccagtgagcagttaacatctggaggtgcctcagtcgtgtgcttcttgaacaacttctaccccaaagacatcaatgtcaagtggaagattgatggcagtgaacgacaaaatggcgtcctgaacagttggactgatcaggacagcaaagacagcacctacagcatgagcagcaccctcacgttgaccaaggacgagtatgaacgacataacagctatacctgtgaggccactcacaagacatcaacttcacccattgtcaagagcttcaacaggaatgagtgttagtaactcgaggacggggtgaactacgcctgaggatccgatctttttccctctgccaaaaattatggggacatcatgaagccccttgagcatctgacttctggctaataaaggaaatttattttcattgcaatagtgtgttggaattttttgtgtctctcactcggcctaggtagataagtagcatggcgggttaatcattaactacaaggaacccctagtgatggagttggccactccctctctgcgcgctcgctcgctcactgaggccgggcgaccaaaggtcgcccgacgcccgggctttgcccgggcggcctcagtgagcgagcgagcgcgcag

SEQ ID NO: 2270 - DNA, 3360 bp, Artificial Sequence
  source: /note="Description of Artificial Sequence: Synthetic polynucleotide"
ctgcgcgctcgctcgctcactgaggccgcccgggcaaagcccgggcgtcgggcgacctttggtcgcccggcctcagtgagcgagcgagcgcgcagagagggagtggccaactccatcactaggggttccttgtagttaatgattaacccgccatgctacttatctaccagggtaatggggatcctctagaactatagctagtcgacataacgcgtgatctaacatatcctggtgtggagtagcggacgctgctatgacagaggctcgggggcctgagctggctctgtgagctggggaggaggcagacagccaggccttgtctgcaagcagacctggcagcattgggctggccgccccccagggcctcctcttcatgcccagtgaatgactcaccttggcacagacacaatgttcggggtgggcacagtgcctgcttcccgccgcaccccagcccccctcaaatgccttccgagaagcccattgagcagggggcttgcattgcaccccagcctgacagcctggcatcttgggataaaagcagcacagccccctaggggctgcccttgctgtgtggcgccaccggcggtggagaacaaggctctattcagcctgtgcccaggaaaggggatcaggggatgcccaggcatggacagtgggtggcagggggggagaggagggctgtctgcttcccagaagtccaaggacacaaatgggtgaggggagagctctccccatagctgggctgcggcccaaccccaccccctcaggctatgccagggggtgttgccaggggcacccgggcatcgccagtctagcccactccttcataaagccctcgcatcccaggagcgagcagagccagagcaggttggagaggagacgcatcacctccgctgctcgcggggatcctctagaagcttcgtttagtgaaccgtcagatcgcctggagacgccatccacgctgttttgacctccatagaagacaccgggaccgatccagcctccgcggattcgaatcccggccgggaacggtgcattggaacgcggattccccgtgccaagagtgacgtaagtaccgcctatagagtctataggcccacaaaaaatgctttcttcttttaatatacttttttgtttatcttatttctaatactttccctaatctctttctttcagggcaataatgatacaatgtatcatgcctctttgcaccattctaaagaataacagtgataatttctgggttaaggcaatagcaatatttctgcatataaatatttctgcatataaattgtaactgatgtaagaggtttcatattgctaatagcagctacaatccagctaccattctgcttttattttatggttgggataaggctggattattctgagtccaagctaggcccttttgctaatcatgttcatacctcttatcttcctcccacagctcctgggcaacgtgctggtctgtgtgctggcccatcactttggcaaagaattgggattcgaaccggtgccgccaccatgaacttcgggctcagcttgattttccttgtccttgttttaaaaggtgtccagtgtgaggttcatctggtggagtctgggggagccttagtgaagcctggagggtccctgaaactctcctgtgcagcctctggattcagtttcagtaaatatggcatgtcttgggttcgccagactccagacaagaggctggagtgggtcgcaaccattagtagtagtgggagtcgcacctactatccagacagtgtgaagggccaattcaccatctccagagacaatgccaagaacaccctgtacctgcaaatgagcagtctgaagtctgaggacacagccatgtattactgttcaattagctgggacggtgctatggactactggggtcaagggacctcagtcaccgtctcctcagccaaaacgacacccccatctgtctatccactggcccctggatctgctgcccaaactaactccatggtgaccctgggatgcctggtcaagggctatttccctgagccagtgacagtgacctggaactctggatccctgtccagcggtgtgcacaccttcccagctgtcctgcagtctgacctctacactctgagcagctcagtgactgtcccctccagcacctggcccagcgagaccgtcacctgcaacgttgcccacccggccagcagcaccaaggtggacaagaaaattgtgcccagggattgtggtagaaagaggcgagagggcagaggaagtcttctaacatgcggtgacgtggaggagaatcccggccctatgaagttgcctgttaggctgttggtgctgatgttctggattcctgcttccagcagtgatgttttgatgacccaaactccactctccctgcctgtcagtcttggagatcaagcctccatctcttgcaaatctagtcagagcattgtacatagtaatggaaacacctatttagaatggtacctgcagaaaccaggccagtctccaaagctcctggtctacaaagtttccaatcgattttctggggtcccagacaggttcagtggcagtggatcagggacagatttcacactcaagatcagcagagtggaggctgaggatctgggaacttattactgctttcaaggttcacttgttccttgggcgttcggtggaggcaccaagctggaaatcaaacgggctgatgctgcaccaactgtatccatcttcccaccatccagtgagcagttaacatctggaggtgcctcagtcgtgtgcttcttgaacaacttctaccccaaagacatcaatgtcaagtggaagattgatggcagtgaacgacaaaatggcgtcctgaacagttggactgatcaggacagcaaagacagcacctacagcatgagcagcaccctcacgttgaccaaggacgagtatgaacgacataacagctatacctgtgaggccactcacaagacatcaacttcacccattgtcaagagcttcaacaggaatgagtgttagtaactcgaggacggggtgaactacgcctgaggatccgatctttttccctctgccaaaaattatggggacatcatgaagccccttgagcatctgacttctggctaataaaggaaatttattttcattgcaatagtgtgttggaattttttgtgtctctcactcggcctaggtagataagtagcatggcgggttaatcattaactacaaggaacccctagtgatggagttggccactccctctctgcgcgctcgctcgctcactgaggccgggcgaccaaaggtcgcccgacgcccgggctttgcccgggcggcctcagtgagcgagcgagcgcgcag

SEQ ID NO: 2271 - DNA, 3384 bp, Artificial Sequence
  source: /note="Description of Artificial Sequence: Synthetic polynucleotide"
ctgcgcgctcgctcgctcactgaggccgcccgggcaaagcccgggcgtcgggcgacctttggtcgcccggcctcagtgagcgagcgagcgcgcagagagggagtggccaactccatcactaggggttccttgtagttaatgattaacccgccatgctacttatctaccagggtaatggggatcctctagaactatagctagtcgacataacgcgtgatctaacatatcctggtgtggagtagcggacgctgctatgacagaggctcgggggcctgagctggctctgtgagctggggaggaggcagacagccaggccttgtctgcaagcagacctggcagcattgggctggccgccccccagggcctcctcttcatgcccagtgaatgactcaccttggcacagacacaatgttcggggtgggcacagtgcctgcttcccgccgcaccccagcccccctcaaatgccttccgagaagcccattgagcagggggcttgcattgcaccccagcctgacagcctggcatcttgggataaaagcagcacagccccctaggggctgcccttgctgtgtggcgccaccggcggtggagaacaaggctctattcagcctgtgcccaggaaaggggatcaggggatgcccaggcatggacagtgggtggcagggggggagaggagggctgtctgcttcccagaagtccaaggacacaaatgggtgaggggagagctctccccatagctgggctgcggcccaaccccaccccctcaggctatgccagggggtgttgccaggggcacccgggcatcgccagtctagcccactccttcataaagccctcgcatcccaggagcgagcagagccagagcaggttggagaggagacgcatcacctccgctgctcgcggggatcctctagaagcttcgtttagtgaaccgtcagatcgcctggagacgccatccacgctgttttgacctccatagaagacaccgggaccgatccagcctccgcggattcgaatcccggccgggaacggtgcattggaacgcggattccccgtgccaagagtgacgtaagtaccgcctatagagtctataggcccacaaaaaatgctttcttcttttaatatacttttttgtttatcttatttctaatactttccctaatctctttctttcagggcaataatgatacaatgtatcatgcctctttgcaccattctaaagaataacagtgataatttctgggttaaggcaatagcaatatttctgcatataaatatttctgcatataaattgtaactgatgtaagaggtttcatattgctaatagcagctacaatccagctaccattctgcttttattttatggttgggataaggctggattattctgagtccaagctaggcccttttgctaatcatgttcatacctcttatcttcctcccacagctcctgggcaacgtgctggtctgtgtgctggcccatcactttggcaaagaattgggattcgaaccggtgccgccaccatgaagttgcctgttaggctgttggtgctgatgttctggattcctgcttccagcagtgatgttttgatgacccaaactccactctccctgcctgtcagtcttggagatcaagcctccatctcttgcaaatctagtcagagcattgtacatagtaatggaaacacctatttagaatggtacctgcagaaaccaggccagtctccaaagctcctggtctacaaagtttccaatcgattttctggggtcccagacaggttcagtggcagtggatcagggacagatttcacactcaagatcagcagagtggaggctgaggatctgggaacttattactgctttcaaggttcacttgttccttgggcgttcggtggaggcaccaagctggaaatcaaacgggctgatgctgcaccaactgtatccatcttcccaccatccagtgagcagttaacatctggaggtgcctcagtcgtgtgcttcttgaacaacttctaccccaaagacatcaatgtcaagtggaagattgatggcagtgaacgacaaaatggcgtcctgaacagttggactgatcaggacagcaaagacagcacctacagcatgagcagcaccctcacgttgaccaaggacgagtatgaacgacataacagctatacctgtgaggccactcacaagacatcaacttcacccattgtcaagagcttcaacaggaatgagtgtgagggcagaggaagtcttctaacatgcggtgacgtggaggagaatcccggccctatgaacttcgggctcagcttgattttccttgtccttgttttaaaaggtgtccagtgtgaggttcatctggtggagtctgggggagccttagtgaagcctggagggtccctgaaactctcctgtgcagcctctggattcagtttcagtaaatatggcatgtcttgggttcgccagactccagacaagaggctggagtgggtcgcaaccattagtagtagtgggagtcgcacctactatccagacagtgtgaagggccaattcaccatctccagagacaatgccaagaacaccctgtacctgcaaatgagcagtctgaagtctgaggacacagccatgtattactgttcaattagctgggacggtgctatggactactggggtcaagggacctcagtcaccgtctcctcagccaaaacgacacccccatctgtctatccactggcccctggatctgctgcccaaactaactccatggtgaccctgggatgcctggtcaagggctatttccctgagccagtgacagtgacctggaactctggatccctgtccagcggtgtgcacaccttcccagctgtcctgcagtctgacctctacactctgagcagctcagtgactgtcccctccagcacctggcccagcgagaccgtcacctgcaacgttgcccacccggccagcagcaccaaggtggacaagaaaattgtgcccagggattgtggttaggcaattgaaggcgaattgttaattaagaattcactcctcatcgaggacggggtgaactacgcctgaggatccgatctttttccctctgccaaaaattatggggacatcatgaagccccttgagcatctgacttctggctaataaaggaaatttattttcattgcaatagtgtgttggaattttttgtgtctctcactcggcctaggtagataagtagcatggcgggttaatcattaactacaaggaacccctagtgatggagttggccactccctctctgcgcgctcgctcgctcactgaggccgggcgaccaaaggtcgcccgacgcccgggctttgcccgggcggcctcagtgagcgagcgagcgcgcag

SEQ ID NO: 2272 - DNA, 2625 bp, Artificial Sequence
  source: /note="Description of Artificial Sequence: Synthetic polynucleotide"
ctgcgcgctcgctcgctcactgaggccgcccgggcaaagcccgggcgtcgggcgacctttggtcgcccggcctcagtgagcgagcgagcgcgcagagagggagtggccaactccatcactaggggttccttgtagttaatgattaacccgccatgctacttatctaccagggtaatggggatcctctagaactatagctagtcgacataacgcgtgatctaacatatcctggtgtggagtagcggacgctgctatgacagaggctcgggggcctgagctggctctgtgagctggggaggaggcagacagccaggccttgtctgcaagcagacctggcagcattgggctggccgccccccagggcctcctcttcatgcccagtgaatgactcaccttggcacagacacaatgttcggggtgggcacagtgcctgcttcccgccgcaccccagcccccctcaaatgccttccgagaagcccattgagcagggggcttgcattgcaccccagcctgacagcctggcatcttgggataaaagcagcacagccccctaggggctgcccttgctgtgtggcgccaccggcggtggagaacaaggctctattcagcctgtgcccaggaaaggggatcaggggatgcccaggcatggacagtgggtggcagggggggagaggagggctgtctgcttcccagaagtccaaggacacaaatgggtgaggggagagctctccccatagctgggctgcggcccaaccccaccccctcaggctatgccagggggtgttgccaggggcacccgggcatcgccagtctagcccactccttcataaagccctcgcatcccaggagcgagcagagccagagcaggttggagaggagacgcatcacctccgctgctcgcggggatcctctagaagcttcgtttagtgaaccgtcagatcgcctggagacgccatccacgctgttttgacctccatagaagacaccgggaccgatccagcctccgcggattcgaatcccggccgggaacggtgcattggaacgcggattccccgtgccaagagtgacgtaagtaccgcctatagagtctataggcccacaaaaaatgctttcttcttttaatatacttttttgtttatcttatttctaatactttccctaatctctttctttcagggcaataatgatacaatgtatcatgcctctttgcaccattctaaagaataacagtgataatttctgggttaaggcaatagcaatatttctgcatataaatatttctgcatataaattgtaactgatgtaagaggtttcatattgctaatagcagctacaatccagctaccattctgcttttattttatggttgggataaggctggattattctgagtccaagctaggcccttttgctaatcatgttcatacctcttatcttcctcccacagctcctgggcaacgtgctggtctgtgtgctggcccatcactttggcaaagaattgggattcgaaccggtgccgccaccatgaacttcgggctcagcttgattttccttgtccttgttttaaaaggtgtccagtgtgaggttcatctggtggagtctgggggagccttagtgaagcctggagggtccctgaaactctcctgtgcagcctctggattcagtttcagtaaatatggcatgtcttgggttcgccagactccagacaagaggctggagtgggtcgcaaccattagtagtagtgggagtcgcacctactatccagacagtgtgaagggccaattcaccatctccagagacaatgccaagaacaccctgtacctgcaaatgagcagtctgaagtctgaggacacagccatgtattactgttcaattagctgggacggtgctatggactactggggtcaagggacctcagtcaccgtctcctcaggtggtggtggatccgatgttttgatgacccaaactccactctccctgcctgtcagtcttggagatcaagcctccatctcttgcaaatctagtcagagcattgtacatagtaatggaaacacctatttagaatggtacctgcagaaaccaggccagtctccaaagctcctggtctacaaagtttccaatcgattttctggggtcccagacaggttcagtggcagtggatcagggacagatttcacactcaagatcagcagagtggaggctgaggatctgggaacttattactgctttcaaggttcacttgttccttgggcgttcggtggaggcaccaagctggaaatcaaatacccatacgatgttccagattacgcttagtgacctgaggatgatctttttccctctgccaaaaattatggggacatcatgaagccccttgagcatctgacttctggctaataaaggaaatttattttcattgcaatagtgtgttggaattttttgtgtctctcactcggcctaggtagataagtagcatggcgggttaatcattaactacaaggaacccctagtgatggagttggccactccctctctgcgcgctcgctcgctcactgaggccgggcgaccaaaggtcgcccgacgcccgggctttgcccgggcggcctcagtgagcgagcgagcgcgcag

SEQ ID NO: 2273 - DNA, 2655 bp, Artificial Sequence
  source: /note="Description of Artificial Sequence: Synthetic polynucleotide"
ctgcgcgctcgctcgctcactgaggccgcccgggcaaagcccgggcgtcgggcgacctttggtcgcccggcctcagtgagcgagcgagcgcgcagagagggagtggccaactccatcactaggggttccttgtagttaatgattaacccgccatgctacttatctaccagggtaatggggatcctctagaactatagctagtcgacataacgcgtgatctaacatatcctggtgtggagtagcggacgctgctatgacagaggctcgggggcctgagctggctctgtgagctggggaggaggcagacagccaggccttgtctgcaagcagacctggcagcattgggctggccgccccccagggcctcctcttcatgcccagtgaatgactcaccttggcacagacacaatgttcggggtgggcacagtgcctgcttcccgccgcaccccagcccccctcaaatgccttccgagaagcccattgagcagggggcttgcattgcaccccagcctgacagcctggcatcttgggataaaagcagcacagccccctaggggctgcccttgctgtgtggcgccaccggcggtggagaacaaggctctattcagcctgtgcccaggaaaggggatcaggggatgcccaggcatggacagtgggtggcagggggggagaggagggctgtctgcttcccagaagtccaaggacacaaatgggtgaggggagagctctccccatagctgggctgcggcccaaccccaccccctcaggctatgccagggggtgttgccaggggcacccgggcatcgccagtctagcccactccttcataaagccctcgcatcccaggagcgagcagagccagagcaggttggagaggagacgcatcacctccgctgctcgcggggatcctctagaagcttcgtttagtgaaccgtcagatcgcctggagacgccatccacgctgttttgacctccatagaagacaccgggaccgatccagcctccgcggattcgaatcccggccgggaacggtgcattggaacgcggattccccgtgccaagagtgacgtaagtaccgcctatagagtctataggcccacaaaaaatgctttcttcttttaatatacttttttgtttatcttatttctaatactttccctaatctctttctttcagggcaataatgatacaatgtatcatgcctctttgcaccattctaaagaataacagtgataatttctgggttaaggcaatagcaatatttctgcatataaatatttctgcatataaattgtaactgatgtaagaggtttcatattgctaatagcagctacaatccagctaccattctgcttttattttatggttgggataaggctggattattctgagtccaagctaggcccttttgctaatcatgttcatacctcttatcttcctcccacagctcctgggcaacgtgctggtctgtgtgctggcccatcactttggcaaagaattgggattcgaaccggtgccgccaccatgaacttcgggctcagcttgattttccttgtccttgttttaaaaggtgtccagtgtgaggttcatctggtggagtctgggggagccttagtgaagcctggagggtccctgaaactctcctgtgcagcctctggattcagtttcagtaaatatggcatgtcttgggttcgccagactccagacaagaggctggagtgggtcgcaaccattagtagtagtgggagtcgcacctactatccagacagtgtgaagggccaattcaccatctccagagacaatgccaagaacaccctgtacctgcaaatgagcagtctgaagtctgaggacacagccatgtattactgttcaattagctgggacggtgctatggactactggggtcaagggacctcagtcaccgtctcctcaggtggtggtggtagcggcggcggcggctctggtggtggtggatccgatgttttgatgacccaaactccactctccctgcctgtcagtcttggagatcaagcctccatctcttgcaaatctagtcagagcattgtacatagtaatggaaacacctatttagaatggtacctgcagaaaccaggccagtctccaaagctcctggtctacaaagtttccaatcgattttctggggtcccagacaggttcagtggcagtggatcagggacagatttcacactcaagatcagcagagtggaggctgaggatctgggaacttattactgctttcaaggttcacttgttccttgggcgttcggtggaggcaccaagctggaaatcaaatacccatacgatgttccagattacgcttagtgacctgaggatgatctttttccctctgccaaaaattatggggacatcatgaagccccttgagcatctgacttctggctaataaaggaaatttattttcattgcaatagtgtgttggaattttttgtgtctctcactcggcctaggtagataagtagcatggcgggttaatcattaactacaaggaacccctagtgatggagttggccactccctctctgcgcgctcgctcgctcactgaggccgggcgaccaaaggtcgcccgacgcccgggctttgcccgggcggcctcagtgagcgagcgagcgcgcag

SEQ ID NO: 2274 - DNA, 2685 bp, Artificial Sequence
  source: /note="Description of Artificial Sequence: Synthetic polynucleotide"
ctgcgcgctcgctcgctcactgaggccgcccgggcaaagcccgggcgtcgggcgacctttggtcgcccggcctcagtgagcgagcgagcgcgcagagagggagtggccaactccatcactaggggttccttgtagttaatgattaacccgccatgctacttatctaccagggtaatggggatcctctagaactatagctagtcgacataacgcgtgatctaacatatcctggtgtggagtagcggacgctgctatgacagaggctcgggggcctgagctggctctgtgagctggggaggaggcagacagccaggccttgtctgcaagcagacctggcagcattgggctggccgccccccagggcctcctcttcatgcccagtgaatgactcaccttggcacagacacaatgttcggggtgggcacagtgcctgcttcccgccgcaccccagcccccctcaaatgccttccgagaagcccattgagcagggggcttgcattgcaccccagcctgacagcctggcatcttgggataaaagcagcacagccccctaggggctgcccttgctgtgtggcgccaccggcggtggagaacaaggctctattcagcctgtgcccaggaaaggggatcaggggatgcccaggcatggacagtgggtggcagggggggagaggagggctgtctgcttcccagaagtccaaggacacaaatgggtgaggggagagctctccccatagctgggctgcggcccaaccccaccccctcaggctatgccagggggtgttgccaggggcacccgggcatcgccagtctagcccactccttcataaagccctcgcatcccaggagcgagcagagccagagcaggttggagaggagacgcatcacctccgctgctcgcggggatcctctagaagcttcgtttagtgaaccgtcagatcgcctggagacgccatccacgctgttttgacctccatagaagacaccgggaccgatccagcctccgcggattcgaatcccggccgggaacggtgcattggaacgcggattccccgtgccaagagtgacgtaagtaccgcctatagagtctataggcccacaaaaaatgctttcttcttttaatatacttttttgtttatcttatttctaatactttccctaatctctttctttcagggcaataatgatacaatgtatcatgcctctttgcaccattctaaagaataacagtgataatttctgggttaaggcaatagcaatatttctgcatataaatatttctgcatataaattgtaactgatgtaagaggtttcatattgctaatagcagctacaatccagctaccattctgcttttattttatggttgggataaggctggattattctgagtccaagctaggcccttttgctaatcatgttcatacctcttatcttcctcccacagctcctgggcaacgtgctggtctgtgtgctggcccatcactttggcaaagaattgggattcgaaccggtgccgccaccatgaacttcgggctcagcttgattttccttgtccttgttttaaaaggtgtccagtgtgaggttcatctggtggagtctgggggagccttagtgaagcctggagggtccctgaaactctcctgtgcagcctctggattcagtttcagtaaatatggcatgtcttgggttcgccagactccagacaagaggctggagtgggtcgcaaccattagtagtagtgggagtcgcacctactatccagacagtgtgaagggccaattcaccatctccagagacaatgccaagaacaccctgtacctgcaaatgagcagtctgaagtctgaggacacagccatgtattactgttcaattagctgggacggtgctatggactactggggtcaagggacctcagtcaccgtctcctcaggtggtggtggtagcggcggcggcggctctggtggtggtggatccggtggtggtggatccggtggtggtggatccgatgttttgatgacccaaactccactctccctgcctgtcagtcttggagatcaagcctccatctcttgcaaatctagtcagagcattgtacatagtaatggaaacacctatttagaatggtacctgcagaaaccaggccagtctccaaagctcctggtctacaaagtttccaatcgattttctggggtcccagacaggttcagtggcagtggatcagggacagatttcacactcaagatcagcagagtggaggctgaggatctgggaacttattactgctttcaaggttcacttgttccttgggcgttcggtggaggcaccaagctggaaatcaaatacccatacgatgttccagattacgcttagtgacctgaggatgatctttttccctctgccaaaaattatggggacatcatgaagccccttgagcatctgacttctggctaataaaggaaatttattttcattgcaatagtgtgttggaattttttgtgtctctcactcggcctaggtagataagtagcatggcgggttaatcattaactacaaggaacccctagtgatggagttggccactccctctctgcgcgctcgctcgctcactgaggccgggcgaccaaaggtcgcccgacgcccgggctttgcccgggcggcctcagtgagcgagcgagcgcgcag

SEQ ID NO: 2275 - DNA, 2730 bp, Artificial Sequence
  source: /note="Description of Artificial Sequence: Synthetic polynucleotide"
ctgcgcgctcgctcgctcactgaggccgcccgggcaaagcccgggcgtcgggcgacctttggtcgcccggcctcagtgagcgagcgagcgcgcagagagggagtggccaactccatcactaggggttccttgtagttaatgattaacccgccatgctacttatctaccagggtaatggggatcctctagaactatagctagtcgacataacgcgtgatctaacatatcctggtgtggagtagcggacgctgctatgacagaggctcgggggcctgagctggctctgtgagctggggaggaggcagacagccaggccttgtctgcaagcagacctggcagcattgggctggccgccccccagggcctcctcttcatgcccagtgaatgactcaccttggcacagacacaatgttcggggtgggcacagtgcctgcttcccgccgcaccccagcccccctcaaatgccttccgagaagcccattgagcagggggcttgcattgcaccccagcctgacagcctggcatcttgggataaaagcagcacagccccctaggggctgcccttgctgtgtggcgccaccggcggtggagaacaaggctctattcagcctgtgcccaggaaaggggatcaggggatgcccaggcatggacagtgggtggcagggggggagaggagggctgtctgcttcccagaagtccaaggacacaaatgggtgaggggagagctctccccatagctgggctgcggcccaaccccaccccctcaggctatgccagggggtgttgccaggggcacccgggcatcgccagtctagcccactccttcataaagccctcgcatcccaggagcgagcagagccagagcaggttggagaggagacgcatcacctccgctgctcgcggggatcctctagaagcttcgtttagtgaaccgtcagatcgcctggagacgccatccacgctgttttgacctccatagaagacaccgggaccgatccagcctccgcggattcgaatcccggccgggaacggtgcattggaacgcggattccccgtgccaagagtgacgtaagtaccgcctatagagtctataggcccacaaaaaatgctttcttcttttaatatacttttttgtttatcttatttctaatactttccctaatctctttctttcagggcaataatgatacaatgtatcatgcctctttgcaccattctaaagaataacagtgataatttctgggttaaggcaatagcaatatttctgcatataaatatttctgcatataaattgtaactgatgtaagaggtttcatattgctaatagcagctacaatccagctaccattctgcttttattttatggttgggataaggctggattattctgagtccaagctaggcccttttgctaatcatgttcatacctcttatcttcctcccacagctcctgggcaacgtgctggtctgtgtgctggcccatcactttggcaaagaattgggattcgaaccggtgccgccaccatgaacttcgggctcagcttgattttccttgtccttgttttaaaaggtgtccagtgtgaggttcatctggtggagtctgggggagccttagtgaagcctggagggtccctgaaactctcctgtgcagcctctggattcagtttcagtaaatatggcatgtcttgggttcgccagactccagacaagaggctggagtgggtcgcaaccattagtagtagtgggagtcgcacctactatccagacagtgtgaagggccaattcaccatctccagagacaatgccaagaacaccctgtacctgcaaatgagcagtctgaagtctgaggacacagccatgtattactgttcaattagctgggacggtgctatggactactggggtcaagggacctcagtcaccgtctcctcaggtggtggtggtagcggcggcggcggctctggtggtggtggatccggtggtggtggatccggtggtggtggatccggtggtggtggatccggtggtggtggatccggtggtggtggatccgatgttttgatgacccaaactccactctccctgcctgtcagtcttggagatcaagcctccatctcttgcaaatctagtcagagcattgtacatagtaatggaaacacctatttagaatggtacctgcagaaaccaggccagtctccaaagctcctggtctacaaagtttccaatcgattttctggggtcccagacaggttcagtggcagtggatcagggacagatttcacactcaagatcagcagagtggaggctgaggatctgggaacttattactgctttcaaggttcacttgttccttgggcgttcggtggaggcaccaagctggaaatcaaatacccatacgatgttccagattacgcttagtgacctgaggatgatctttttccctctgccaaaaattatggggacatcatgaagccccttgagcatctgacttctggctaataaaggaaatttattttcattgcaatagtgtgttggaattttttgtgtctctcactcggcctaggtagataagtagcatggcgggttaatcattaactacaaggaacccctagtgatggagttggccactccctctctgcgcgctcgctcgctcactgaggccgggcgaccaaaggtcgcccgacgcccgggctttgcccgggcggcctcagtgagcgagcgagcgcgcag

SEQ ID NO: 2276 - DNA, 2625 bp, Artificial Sequence
  source: /note="Description of Artificial Sequence: Synthetic polynucleotide"
ctgcgcgctcgctcgctcactgaggccgcccgggcaaagcccgggcgtcgggcgacctttggtcgcccggcctcagtgagcgagcgagcgcgcagagagggagtggccaactccatcactaggggttccttgtagttaatgattaacccgccatgctacttatctaccagggtaatggggatcctctagaactatagctagtcgacataacgcgtgatctaacatatcctggtgtggagtagcggacgctgctatgacagaggctcgggggcctgagctggctctgtgagctggggaggaggcagacagccaggccttgtctgcaagcagacctggcagcattgggctggccgccccccagggcctcctcttcatgcccagtgaatgactcaccttggcacagacacaatgttcggggtgggcacagtgcctgcttcccgccgcaccccagcccccctcaaatgccttccgagaagcccattgagcagggggcttgcattgcaccccagcctgacagcctggcatcttgggataaaagcagcacagccccctaggggctgcccttgctgtgtggcgccaccggcggtggagaacaaggctctattcagcctgtgcccaggaaaggggatcaggggatgcccaggcatggacagtgggtggcagggggggagaggagggctgtctgcttcccagaagtccaaggacacaaatgggtgaggggagagctctccccatagctgggctgcggcccaaccccaccccctcaggctatgccagggggtgttgccaggggcacccgggcatcgccagtctagcccactccttcataaagccctcgcatcccaggagcgagcagagccagagcaggttggagaggagacgcatcacctccgctgctcgcggggatcctctagaagcttcgtttagtgaaccgtcagatcgcctggagacgccatccacgctgttttgacctccatagaagacaccgggaccgatccagcctccgcggattcgaatcccggccgggaacggtgcattggaacgcggattccccgtgccaagagtgacgtaagtaccgcctatagagtctataggcccacaaaaaatgctttcttcttttaatatacttttttgtttatcttatttctaatactttccctaatctctttctttcagggcaataatgatacaatgtatcatgcctctttgcaccattctaaagaataacagtgataatttctgggttaaggcaatagcaatatttctgcatataaatatttctgcatataaattgtaactgatgtaagaggtttcatattgctaatagcagctacaatccagctaccattctgcttttattttatggttgggataaggctggattattctgagtccaagctaggcccttttgctaatcatgttcatacctcttatcttcctcccacagctcctgggcaacgtgctggtctgtgtgctggcccatcactttggcaaagaattgggattcgaaccggtgccgccaccatgaagttgcctgttaggctgttggtgctgatgttctggattcctgcttccagcagtgatgttttgatgacccaaactccactctccctgcctgtcagtcttggagatcaagcctccatctcttgcaaatctagtcagagcattgtacatagtaatggaaacacctatttagaatggtacctgcagaaaccaggccagtctccaaagctcctggtctacaaagtttccaatcgattttctggggtcccagacaggttcagtggcagtggatcagggacagatttcacactcaagatcagcagagtggaggctgaggatctgggaacttattactgctttcaaggttcacttgttccttgggcgttcggtggaggcaccaagctggaaatcaaaggtggtggtggatccgaggttcatctggtggagtctgggggagccttagtgaagcctggagggtccctgaaactctcctgtgcagcctctggattcagtttcagtaaatatggcatgtcttgggttcgccagactccagacaagaggctggagtgggtcgcaaccattagtagtagtgggagtcgcacctactatccagacagtgtgaagggccaattcaccatctccagagacaatgccaagaacaccctgtacctgcaaatgagcagtctgaagtctgaggacacagccatgtattactgttcaattagctgggacggtgctatggactactggggtcaagggacctcagtcaccgtctcctcatacccatacgatgttccagattacgcttagtgacctgaggatgatctttttccctctgccaaaaattatggggacatcatgaagccccttgagcatctgacttctggctaataaaggaaatttattttcattgcaatagtgtgttggaattttttgtgtctctcactcggcctaggtagataagtagcatggcgggttaatcattaactacaaggaacccctagtgatggagttggccactccctctctgcgcgctcgctcgctcactgaggccgggcgaccaaaggtcgcccgacgcccgggctttgcccgggcggcctcagtgagcgagcgagcgcgcag

SEQ ID NO: 2277 - DNA, 2655 bp, Artificial Sequence
  source: /note="Description of Artificial Sequence: Synthetic polynucleotide"
ctgcgcgctcgctcgctcactgaggccgcccgggcaaagcccgggcgtcgggcgacctttggtcgcccggcctcagtgagcgagcgagcgcgcagagagggagtggccaactccatcactaggggttccttgtagttaatgattaacccgccatgctacttatctaccagggtaatggggatcctctagaactatagctagtcgacataacgcgtgatctaacatatcctggtgtggagtagcggacgctgctatgacagaggctcgggggcctgagctggctctgtgagctggggaggaggcagacagccaggccttgtctgcaagcagacctggcagcattgggctggccgccccccagggcctcctcttcatgcccagtgaatgactcaccttggcacagacacaatgttcggggtgggcacagtgcctgcttcccgccgcaccccagcccccctcaaatgccttccgagaagcccattgagcagggggcttgcattgcaccccagcctgacagcctggcatcttgggataaaagcagcacagccccctaggggctgcccttgctgtgtggcgccaccggcggtggagaacaaggctctattcagcctgtgcccaggaaaggggatcaggggatgcccaggcatggacagtgggtggcagggggggagaggagggctgtctgcttcccagaagtccaaggacacaaatgggtgaggggagagctctccccatagctgggctgcggcccaaccccaccccctcaggctatgccagggggtgttgccaggggcacccgggcatcgccagtctagcccactccttcataaagccctcgcatcccaggagcgagcagagccagagcaggttggagaggagacgcatcacctccgctgctcgcggggatcctctagaagcttcgtttagtgaaccgtcagatcgcctggagacgccatccacgctgttttgacctccatagaagacaccgggaccgatccagcctccgcggattcgaatcccggccgggaacggtgcattggaacgcggattccccgtgccaagagtgacgtaagtaccgcctatagagtctataggcccacaaaaaatgctttcttcttttaatatacttttttgtttatcttatttctaatactttccctaatctctttctttcagggcaataatgatacaatgtatcatgcctctttgcaccattctaaagaataacagtgataatttctgggttaaggcaatagcaatatttctgcatataaatatttctgcatataaattgtaactgatgtaagaggtttcatattgctaatagcagctacaatccagctaccattctgcttttattttatggttgggataaggctggattattctgagtccaagctaggcccttttgctaatcatgttcatacctcttatcttcctcccacagctcctgggcaacgtgctggtctgtgtgctggcccatcactttggcaaagaattgggattcgaaccggtgccgccaccatgaagttgcctgttaggctgttggtgctgatgttctggattcctgcttccagcagtgatgttttgatgacccaaactccactctccctgcctgtcagtcttggagatcaagcctccatctcttgcaaatctagtcagagcattgtacatagtaatggaaacacctatttagaatggtacctgcagaaaccaggccagtctccaaagctcctggtctacaaagtttccaatcgattttctggggtcccagacaggttcagtggcagtggatcagggacagatttcacactcaagatcagcagagtggaggctgaggatctgggaacttattactgctttcaaggttcacttgttccttgggcgttcggtggaggcaccaagctggaaatcaaaggtggtggtggatccggtggtggtggatccggtggtggtggatccgaggttcatctggtggagtctgggggagccttagtgaagcctggagggtccctgaaactctcctgtgcagcctctggattcagtttcagtaaatatggcatgtcttgggttcgccagactccagacaagaggctggagtgggtcgcaaccattagtagtagtgggagtcgcacctactatccagacagtgtgaagggccaattcaccatctccagagacaatgccaagaacaccctgtacctgcaaatgagcagtctgaagtctgaggacacagccatgtattactgttcaattagctgggacggtgctatggactactggggtcaagggacctcagtcaccgtctcctcatacccatacgatgttccagattacgcttagtgacctgaggatgatctttttccctctgccaaaaattatggggacatcatgaagccccttgagcatctgacttctggctaataaaggaaatttattttcattgcaatagtgtgttggaattttttgtgtctctcactcggcctaggtagataagtagcatggcgggttaatcattaactacaaggaacccctagtgatggagttggccactccctctctgcgcgctcgctcgctcactgaggccgggcgaccaaaggtcgcccgacgcccgggctttgcccgggcggcctcagtgagcgagcgagcgcgcag

SEQ ID NO: 2278 - DNA, 2685 bp, Artificial Sequence
  source: /note="Description of Artificial Sequence: Synthetic polynucleotide"
ctgcgcgctcgctcgctcactgaggccgcccgggcaaagcccgggcgtcgggcgacctttggtcgcccggcctcagtgagcgagcgagcgcgcagagagggagtggccaactccatcactaggggttccttgtagttaatgattaacccgccatgctacttatctaccagggtaatggggatcctctagaactatagctagtcgacataacgcgtgatctaacatatcctggtgtggagtagcggacgctgctatgacagaggctcgggggcctgagctggctctgtgagctggggaggaggcagacagccaggccttgtctgcaagcagacctggcagcattgggctggccgccccccagggcctcctcttcatgcccagtgaatgactcaccttggcacagacacaatgttcggggtgggcacagtgcctgcttcccgccgcaccccagcccccctcaaatgccttccgagaagcccattgagcagggggcttgcattgcaccccagcctgacagcctggcatcttgggataaaagcagcacagccccctaggggctgcccttgctgtgtggcgccaccggcggtggagaacaaggctctattcagcctgtgcccaggaaaggggatcaggggatgcccaggcatggacagtgggtggcagggggggagaggagggctgtctgcttcccagaagtccaaggacacaaatgggtgaggggagagctctccccatagctgggctgcggcccaaccccaccccctcaggctatgccagggggtgttgccaggggcacccgggcatcgccagtctagcccactccttcataaagccctcgcatcccaggagcgagcagagccagagcaggttggagaggagacgcatcacctccgctgctcgcggggatcctctagaagcttcgtttagtgaaccgtcagatcgcctggagacgccatccacgctgttttgacctccatagaagacaccgggaccgatccagcctccgcggattcgaatcccggccgggaacggtgcattggaacgcggattccccgtgccaagagtgacgtaagtaccgcctatagagtctataggcccacaaaaaatgctttcttcttttaatatacttttttgtttatcttatttctaatactttccctaatctctttctttcagggcaataatgatacaatgtatcatgcctctttgcaccattctaaagaataacagtgataatttctgggttaaggcaatagcaatatttctgcatataaatatttctgcatataaattgtaactgatgtaagaggtttcatattgctaatagcagctacaatccagctaccattctgcttttattttatggttgggataaggctggattattctgagtccaagctaggcccttttgctaatcatgttcatacctcttatcttcctcccacagctcctgggcaacgtgctggtctgtgtgctggcccatcactttggcaaagaattgggattcgaaccggtgccgccaccatgaagttgcctgttaggctgttggtgctgatgttctggattcctgcttccagcagtgatgttttgatgacccaaactccactctccctgcctgtcagtcttggagatcaagcctccatctcttgcaaatctagtcagagcattgtacatagtaatggaaacacctatttagaatggtacctgcagaaaccaggccagtctccaaagctcctggtctacaaagtttccaatcgattttctggggtcccagacaggttcagtggcagtggatcagggacagatttcacactcaagatcagcagagtggaggctgaggatctgggaacttattactgctttcaaggttcacttgttccttgggcgttcggtggaggcaccaagctggaaatcaaaggtggtggtggatccggtggtggtggatccggtggtggtggatccggtggtggtggatccggtggtggtggatccgaggttcatctggtggagtctgggggagccttagtgaagcctggagggtccctgaaactctcctgtgcagcctctggattcagtttcagtaaatatggcatgtcttgggttcgccagactccagacaagaggctggagtgggtcgcaaccattagtagtagtgggagtcgcacctactatccagacagtgtgaagggccaattcaccatctccagagacaatgccaagaacaccctgtacctgcaaatgagcagtctgaagtctgaggacacagccatgtattactgttcaattagctgggacggtgctatggactactggggtcaagggacctcagtcaccgtctcctcatacccatacgatgttccagattacgcttagtgacctgaggatgatctttttccctctgccaaaaattatggggacatcatgaagccccttgagcatctgacttctggctaataaaggaaatttattttcattgcaatagtgtgttggaattttttgtgtctctcactcggcctaggtagataagtagcatggcgggttaatcattaactacaaggaacccctagtgatggagttggccactccctctctgcgcgctcgctcgctcactgaggccgggcgaccaaaggtcgcccgacgcccgggctttgcccgggcggcctcagtgagcgagcgagcgcgcag

SEQ ID NO: 2279 - DNA, 3416 bp, Artificial Sequence
  source: /note="Description of Artificial Sequence: Synthetic polynucleotide"
ctgcgcgctcgctcgctcactgaggccgcccgggcaaagcccgggcgtcgggcgacctttggtcgcccggcctcagtgagcgagcgagcgcgcagagagggagtggccaactccatcactaggggttccttgtagttaatgattaacccgccatgctacttatctaccagggtaatggggatcctctagaactatagctagtcgacataacgcgttagtatctgcagagggccctgcgtatgagtgcaagtgggttttaggaccaggatgaggcggggtgggggtgcctacctgacgaccgaccccgacccactggacaagcacccaacccccattccccaaattgcgcatcccctatcagagagggggaggggaaacaggatgcggcgaggcgcgtgcgcactgccagcttcagcaccgcggacagtgccttcgcccccgcctggcggcgcgcgccaccgccgcctcagcactgaaggcgcgctgacgtcactcgccggtcccccgcaaactccccttcccggccaccttggtcgcgtccgcgccgccgccggcccagccggaccgcaccacgcgaggcgcgagataggggggcacgggcgcgaccatctgcgctgcggcgccggcgactcagcgctgcctcagtctgcggtgggcagcggaggagtcgtgtcgtgcctgagagcgcagctgtgctcctgggcaccgcgcagtccgcccccgcggctcctggccagaccacccctaggaccccctgccccaagtcgcagccaagcttcgtttagtgaaccgtcagatcgcctggagacgccatccacgctgttttgacctccatagaagacaccgggaccgatccagcctccgcggattcgaatcccggccgggaacggtgcattggaacgcggattccccgtgccaagagtgacgtaagtaccgcctatagagtctataggcccacaaaaaatgctttcttcttttaatatacttttttgtttatcttatttctaatactttccctaatctctttctttcagggcaataatgatacaatgtatcatgcctctttgcaccattctaaagaataacagtgataatttctgggttaaggcaatagcaatatttctgcatataaatatttctgcatataaattgtaactgatgtaagaggtttcatattgctaatagcagctacaatccagctaccattctgcttttattttatggttgggataaggctggattattctgagtccaagctaggcccttttgctaatcatgttcatacctcttatcttcctcccacagctcctgggcaacgtgctggtctgtgtgctggcccatcactttggcaaagaattgggattcgaaccggtgccgccaccatgaacttcgggctcagcttgattttccttgtccttgttttaaaaggtgtccagtgtgaggttcatctggtggagtctgggggagccttagtgaagcctggagggtccctgaaactctcctgtgcagcctctggattcagtttcagtaaatatggcatgtcttgggttcgccagactccagacaagaggctggagtgggtcgcaaccattagtagtagtgggagtcgcacctactatccagacagtgtgaagggccaattcaccatctccagagacaatgccaagaacaccctgtacctgcaaatgagcagtctgaagtctgaggacacagccatgtattactgttcaattagctgggacggtgctatggactactggggtcaagggacctcagtcaccgtctcctcagccaaaacgacacccccatctgtctatccactggcccctggatctgctgcccaaactaactccatggtgaccctgggatgcctggtcaagggctatttccctgagccagtgacagtgacctggaactctggatccctgtccagcggtgtgcacaccttcccagctgtcctgcagtctgacctctacactctgagcagctcagtgactgtcccctccagcacctggcccagcgagaccgtcacctgcaacgttgcccacccggccagcagcaccaaggtggacaagaaaattgtgcccagggattgtggtgagctcaaaaccccacttggtgacacaactcacacatgcccacggtgcccagagcccaaatcttgtgacacacctcccccgtgcccacggtgcccagagcccaaatcttgtgacacaactcacacatgcccacggtgcccagagcccaaatcttgtgacacacctcccccgtgcccaaggtgcccagcacctgaactcagaaagaggcgagagggcagaggaagtcttctaacatgcggtgacgtggaggagaatcccggccctatgaagttgcctgttaggctgttggtgctgatgttctggattcctgcttccagcagtgatgttttgatgacccaaactccactctccctgcctgtcagtcttggagatcaagcctccatctcttgcaaatctagtcagagcattgtacatagtaatggaaacacctatttagaatggtacctgcagaaaccaggccagtctccaaagctcctggtctacaaagtttccaatcgattttctggggtcccagacaggttcagtggcagtggatcagggacagatttcacactcaagatcagcagagtggaggctgaggatctgggaacttattactgctttcaaggttcacttgttccttgggcgttcggtggaggcaccaagctggaaatcaaacgggctgatgctgcaccaactgtatccatcttcccaccatccagtgagcagttaacatctggaggtgcctcagtcgtgtgcttcttgaacaacttctaccccaaagacatcaatgtcaagtggaagattgatggcagtgaacgacaaaatggcgtcctgaacagttggactgatcaggacagcaaagacagcacctacagcatgagcagcaccctcacgttgaccaaggacgagtatgaacgacataacagctatacctgtgaggccactcacaagacatcaacttcacccattgtcaagagcttcaacaggaatgagtgttagtaactcgaggacggggtgaactacgcctgaggatccgatctttttccctctgccaaaaattatggggacatcatgaagccccttgagcatctgacttctggctaataaaggaaatttattttcattgcaatagtgtgttggaattttttgtgtctctcactcggcctaggtagataagtagcatggcgggttaatcattaactacaaggaacccctagtgatggagttggccactccctctctgcgcgctcgctcgctcactgaggccgggcgaccaaaggtcgcccgacgcccgggctttgcccgggcggcctcagtgagcgagcgagcgcgcag

SEQ ID NO: 2280 - DNA, 3218 bp, Artificial Sequence
  source: /note="Description of Artificial Sequence: Synthetic polynucleotide"
ctgcgcgctcgctcgctcactgaggccgcccgggcaaagcccgggcgtcgggcgacctttggtcgcccggcctcagtgagcgagcgagcgcgcagagagggagtggccaactccatcactaggggttccttgtagttaatgattaacccgccatgctacttatctaccagggtaatggggatcctctagaactatagctagtcgacataacgcgttagtatctgcagagggccctgcgtatgagtgcaagtgggttttaggaccaggatgaggcggggtgggggtgcctacctgacgaccgaccccgacccactggacaagcacccaacccccattccccaaattgcgcatcccctatcagagagggggaggggaaacaggatgcggcgaggcgcgtgcgcactgccagcttcagcaccgcggacagtgccttcgcccccgcctggcggcgcgcgccaccgccgcctcagcactgaaggcgcgctgacgtcactcgccggtcccccgcaaactccccttcccggccaccttggtcgcgtccgcgccgccgccggcccagccggaccgcaccacgcgaggcgcgagataggggggcacgggcgcgaccatctgcgctgcggcgccggcgactcagcgctgcctcagtctgcggtgggcagcggaggagtcgtgtcgtgcctgagagcgcagctgtgctcctgggcaccgcgcagtccgcccccgcggctcctggccagaccacccctaggaccccctgccccaagtcgcagccaagcttcgtttagtgaaccgtcagatcgcctggagacgccatccacgctgttttgacctccatagaagacaccgggaccgatccagcctccgcggattcgaatcccggccgggaacggtgcattggaacgcggattccccgtgccaagagtgacgtaagtaccgcctatagagtctataggcccacaaaaaatgctttcttcttttaatatacttttttgtttatcttatttctaatactttccctaatctctttctttcagggcaataatgatacaatgtatcatgcctctttgcaccattctaaagaataacagtgataatttctgggttaaggcaatagcaatatttctgcatataaatatttctgcatataaattgtaactgatgtaagaggtttcatattgctaatagcagctacaatccagctaccattctgcttttattttatggttgggataaggctggattattctgagtccaagctaggcccttttgctaatcatgttcatacctcttatcttcctcccacagctcctgggcaacgtgctggtctgtgtgctggcccatcactttggcaaagaattgggattcgaaccggtgccgccaccatgaacttcgggctcagcttgattttccttgtccttgttttaaaaggtgtccagtgtgaggttcatctggtggagtctgggggagccttagtgaagcctggagggtccctgaaactctcctgtgcagcctctggattcagtttcagtaaatatggcatgtcttgggttcgccagactccagacaagaggctggagtgggtcgcaaccattagtagtagtgggagtcgcacctactatccagacagtgtgaagggccaattcaccatctccagagacaatgccaagaacaccctgtacctgcaaatgagcagtctgaagtctgaggacacagccatgtattactgttcaattagctgggacggtgctatggactactggggtcaagggacctcagtcaccgtctcctcagccaaaacgacacccccatctgtctatccactggcccctggatctgctgcccaaactaactccatggtgaccctgggatgcctggtcaagggctatttccctgagccagtgacagtgacctggaactctggatccctgtccagcggtgtgcacaccttcccagctgtcctgcagtctgacctctacactctgagcagctcagtgactgtcccctccagcacctggcccagcgagaccgtcacctgcaacgttgcccacccggccagcagcaccaaggtggacaagaaaattgtgcccagggattgtggtagaaagaggcgagagggcagaggaagtcttctaacatgcggtgacgtggaggagaatcccggccctatgaagttgcctgttaggctgttggtgctgatgttctggattcctgcttccagcagtgatgttttgatgacccaaactccactctccctgcctgtcagtcttggagatcaagcctccatctcttgcaaatctagtcagagcattgtacatagtaatggaaacacctatttagaatggtacctgcagaaaccaggccagtctccaaagctcctggtctacaaagtttccaatcgattttctggggtcccagacaggttcagtggcagtggatcagggacagatttcacactcaagatcagcagagtggaggctgaggatctgggaacttattactgctttcaaggttcacttgttccttgggcgttcggtggaggcaccaagctggaaatcaaacgggctgatgctgcaccaactgtatccatcttcccaccatccagtgagcagttaacatctggaggtgcctcagtcgtgtgcttcttgaacaacttctaccccaaagacatcaatgtcaagtggaagattgatggcagtgaacgacaaaatggcgtcctgaacagttggactgatcaggacagcaaagacagcacctacagcatgagcagcaccctcacgttgaccaaggacgagtatgaacgacataacagctatacctgtgaggccactcacaagacatcaacttcacccattgtcaagagcttcaacaggaatgagtgttagtaactcgaggacggggtgaactacgcctgaggatccgatctttttccctctgccaaaaattatggggacatcatgaagccccttgagcatctgacttctggctaataaaggaaatttattttcattgcaatagtgtgttggaattttttgtgtctctcactcggcctaggtagataagtagcatggcgggttaatcattaactacaaggaacccctagtgatggagttggccactccctctctgcgcgctcgctcgctcactgaggccgggcgaccaaaggtcgcccgacgcccgggctttgcccgggcggcctcagtgagcgagcgagcgcgcag

SEQ ID NO: 2281 - DNA, 3242 bp, Artificial Sequence
  source: /note="Description of Artificial Sequence: Synthetic polynucleotide"
ctgcgcgctcgctcgctcactgaggccgcccgggcaaagcccgggcgtcgggcgacctttggtcgcccggcctcagtgagcgagcgagcgcgcagagagggagtggccaactccatcactaggggttccttgtagttaatgattaacccgccatgctacttatctaccagggtaatggggatcctctagaactatagctagtcgacataacgcgttagtatctgcagagggccctgcgtatgagtgcaagtgggttttaggaccaggatgaggcggggtgggggtgcctacctgacgaccgaccccgacccactggacaagcacccaacccccattccccaaattgcgcatcccctatcagagagggggaggggaaacaggatgcggcgaggcgcgtgcgcactgccagcttcagcaccgcggacagtgccttcgcccccgcctggcggcgcgcgccaccgccgcctcagcactgaaggcgcgctgacgtcactcgccggtcccccgcaaactccccttcccggccaccttggtcgcgtccgcgccgccgccggcccagccggaccgcaccacgcgaggcgcgagataggggggcacgggcgcgaccatctgcgctgcggcgccggcgactcagcgctgcctcagtctgcggtgggcagcggaggagtcgtgtcgtgcctgagagcgcagctgtgctcctgggcaccgcgcagtccgcccccgcggctcctggccagaccacccctaggaccccctgccccaagtcgcagccaagcttcgtttagtgaaccgtcagatcgcctggagacgccatccacgctgttttgacctccatagaagacaccgggaccgatccagcctccgcggattcgaatcccggccgggaacggtgcattggaacgcggattccccgtgccaagagtgacgtaagtaccgcctatagagtctataggcccacaaaaaatgctttcttcttttaatatacttttttgtttatcttatttctaatactttccctaatctctttctttcagggcaataatgatacaatgtatcatgcctctttgcaccattctaaagaataacagtgataatttctgggttaaggcaatagcaatatttctgcatataaatatttctgcatataaattgtaactgatgtaagaggtttcatattgctaatagcagctacaatccagctaccattctgcttttattttatggttgggataaggctggattattctgagtccaagctaggcccttttgctaatcatgttcatacctcttatcttcctcccacagctcctgggcaacgtgctggtctgtgtgctggcccatcactttggcaaagaattgggattcgaaccggtgccgccaccatgaagttgcctgttaggctgttggtgctgatgttctggattcctgcttccagcagtgatgttttgatgacccaaactccactctccctgcctgtcagtcttggagatcaagcctccatctcttgcaaatctagtcagagcattgtacatagtaatggaaacacctatttagaatggtacctgcagaaaccaggccagtctccaaagctcctggtctacaaagtttccaatcgattttctggggtcccagacaggttcagtggcagtggatcagggacagatttcacactcaagatcagcagagtggaggctgaggatctgggaacttattactgctttcaaggttcacttgttccttgggcgttcggtggaggcaccaagctggaaatcaaacgggctgatgctgcaccaactgtatccatcttcccaccatccagtgagcagttaacatctggaggtgcctcagtcgtgtgcttcttgaacaacttctaccccaaagacatcaatgtcaagtggaagattgatggcagtgaacgacaaaatggcgtcctgaacagttggactgatcaggacagcaaagacagcacctacagcatgagcagcaccctcacgttgaccaaggacgagtatgaacgacataacagctatacctgtgaggccactcacaagacatcaacttcacccattgtcaagagcttcaacaggaatgagtgtgagggcagaggaagtcttctaacatgcggtgacgtggaggagaatcccggccctatgaacttcgggctcagcttgattttccttgtccttgttttaaaaggtgtccagtgtgaggttcatctggtggagtctgggggagccttagtgaagcctggagggtccctgaaactctcctgtgcagcctctggattcagtttcagtaaatatggcatgtcttgggttcgccagactccagacaagaggctggagtgggtcgcaaccattagtagtagtgggagtcgcacctactatccagacagtgtgaagggccaattcaccatctccagagacaatgccaagaacaccctgtacctgcaaatgagcagtctgaagtctgaggacacagccatgtattactgttcaattagctgggacggtgctatggactactggggtcaagggacctcagtcaccgtctcctcagccaaaacgacacccccatctgtctatccactggcccctggatctgctgcccaaactaactccatggtgaccctgggatgcctggtcaagggctatttccctgagccagtgacagtgacctggaactctggatccctgtccagcggtgtgcacaccttcccagctgtcctgcagtctgacctctacactctgagcagctcagtgactgtcccctccagcacctggcccagcgagaccgtcacctgcaacgttgcccacccggccagcagcaccaaggtggacaagaaaattgtgcccagggattgtggttaggcaattgaaggcgaattgttaattaagaattcactcctcatcgaggacggggtgaactacgcctgaggatccgatctttttccctctgccaaaaattatggggacatcatgaagccccttgagcatctgacttctggctaataaaggaaatttattttcattgcaatagtgtgttggaattttttgtgtctctcactcggcctaggtagataagtagcatggcgggttaatcattaactacaaggaacccctagtgatggagttggccactccctctctgcgcgctcgctcgctcactgaggccgggcgaccaaaggtcgcccgacgcccgggctttgcccgggcggcctcagtgagcgagcgagcgcgcag

SEQ ID NO: 2282 - DNA, 2483 bp, Artificial Sequence
  source: /note="Description of Artificial Sequence: Synthetic polynucleotide"
ctgcgcgctcgctcgctcactgaggccgcccgggcaaagcccgggcgtcgggcgacctttggtcgcccggcctcagtgagcgagcgagcgcgcagagagggagtggccaactccatcactaggggttccttgtagttaatgattaacccgccatgctacttatctaccagggtaatggggatcctctagaactatagctagtcgacataacgcgttagtatctgcagagggccctgcgtatgagtgcaagtgggttttaggaccaggatgaggcggggtgggggtgcctacctgacgaccgaccccgacccactggacaagcacccaacccccattccccaaattgcgcatcccctatcagagagggggaggggaaacaggatgcggcgaggcgcgtgcgcactgccagcttcagcaccgcggacagtgccttcgcccccgcctggcggcgcgcgccaccgccgcctcagcactgaaggcgcgctgacgtcactcgccggtcccccgcaaactccccttcccggccaccttggtcgcgtccgcgccgccgccggcccagccggaccgcaccacgcgaggcgcgagataggggggcacgggcgcgaccatctgcgctgcggcgccggcgactcagcgctgcctcagtctgcggtgggcagcggaggagtcgtgtcgtgcctgagagcgcagctgtgctcctgggcaccgcgcagtccgcccccgcggctcctggccagaccacccctaggaccccctgccccaagtcgcagccaagcttcgtttagtgaaccgtcagatcgcctggagacgccatccacgctgttttgacctccatagaagacaccgggaccgatccagcctccgcggattcgaatcccggccgggaacggtgcattggaacgcggattccccgtgccaagagtgacgtaagtaccgcctatagagtctataggcccacaaaaaatgctttcttcttttaatatacttttttgtttatcttatttctaatactttccctaatctctttctttcagggcaataatgatacaatgtatcatgcctctttgcaccattctaaagaataacagtgataatttctgggttaaggcaatagcaatatttctgcatataaatatttctgcatataaattgtaactgatgtaagaggtttcatattgctaatagcagctacaatccagctaccattctgcttttattttatggttgggataaggctggattattctgagtccaagctaggcccttttgctaatcatgttcatacctcttatcttcctcccacagctcctgggcaacgtgctggtctgtgtgctggcccatcactttggcaaagaattgggattcgaaccggtgccgccaccatgaacttcgggctcagcttgattttccttgtccttgttttaaaaggtgtccagtgtgaggttcatctggtggagtctgggggagccttagtgaagcctggagggtccctgaaactctcctgtgcagcctctggattcagtttcagtaaatatggcatgtcttgggttcgccagactccagacaagaggctggagtgggtcgcaaccattagtagtagtgggagtcgcacctactatccagacagtgtgaagggccaattcaccatctccagagacaatgccaagaacaccctgtacctgcaaatgagcagtctgaagtctgaggacacagccatgtattactgttcaattagctgggacggtgctatggactactggggtcaagggacctcagtcaccgtctcctcaggtggtggtggatccgatgttttgatgacccaaactccactctccctgcctgtcagtcttggagatcaagcctccatctcttgcaaatctagtcagagcattgtacatagtaatggaaacacctatttagaatggtacctgcagaaaccaggccagtctccaaagctcctggtctacaaagtttccaatcgattttctggggtcccagacaggttcagtggcagtggatcagggacagatttcacactcaagatcagcagagtggaggctgaggatctgggaacttattactgctttcaaggttcacttgttccttgggcgttcggtggaggcaccaagctggaaatcaaatacccatacgatgttccagattacgcttagtgacctgaggatgatctttttccctctgccaaaaattatggggacatcatgaagccccttgagcatctgacttctggctaataaaggaaatttattttcattgcaatagtgtgttggaattttttgtgtctctcactcggcctaggtagataagtagcatggcgggttaatcattaactacaaggaacccctagtgatggagttggccactccctctctgcgcgctcgctcgctcactgaggccgggcgaccaaaggtcgcccgacgcccgggctttgcccgggcggcctcagtgagcgagcgagcgcgcag

SEQ ID NO: 2283 - DNA, 2513 bp, Artificial Sequence
  source: /note="Description of Artificial Sequence: Synthetic polynucleotide"
ctgcgcgctcgctcgctcactgaggccgcccgggcaaagcccgggcgtcgggcgacctttggtcgcccggcctcagtgagcgagcgagcgcgcagagagggagtggccaactccatcactaggggttccttgtagttaatgattaacccgccatgctacttatctaccagggtaatggggatcctctagaactatagctagtcgacataacgcgttagtatctgcagagggccctgcgtatgagtgcaagtgggttttaggaccaggatgaggcggggtgggggtgcctacctgacgaccgaccccgacccactggacaagcacccaacccccattccccaaattgcgcatcccctatcagagagggggaggggaaacaggatgcggcgaggcgcgtgcgcactgccagcttcagcaccgcggacagtgccttcgcccccgcctggcggcgcgcgccaccgccgcctcagcactgaaggcgcgctgacgtcactcgccggtcccccgcaaactccccttcccggccaccttggtcgcgtccgcgccgccgccggcccagccggaccgcaccacgcgaggcgcgagataggggggcacgggcgcgaccatctgcgctgcggcgccggcgactcagcgctgcctcagtctgcggtgggcagcggaggagtcgtgtcgtgcctgagagcgcagctgtgctcctgggcaccgcgcagtccgcccccgcggctcctggccagaccacccctaggaccccctgccccaagtcgcagccaagcttcgtttagtgaaccgtcagatcgcctggagacgccatccacgctgttttgacctccatagaagacaccgggaccgatccagcctccgcggattcgaatcccggccgggaacggtgcattggaacgcggattccccgtgccaagagtgacgtaagtaccgcctatagagtctataggcccacaaaaaatgctttcttcttttaatatacttttttgtttatcttatttctaatactttccctaatctctttctttcagggcaataatgatacaatgtatcatgcctctttgcaccattctaaagaataacagtgataatttctgggttaaggcaatagcaatatttctgcatataaatatttctgcatataaattgtaactgatgtaagaggtttcatattgctaatagcagctacaatccagctaccattctgcttttattttatggttgggataaggctggattattctgagtccaagctaggcccttttgctaatcatgttcatacctcttatcttcctcccacagctcctgggcaacgtgctggtctgtgtgctggcccatcactttggcaaagaattgggattcgaaccggtgccgccaccatgaacttcgggctcagcttgattttccttgtccttgttttaaaaggtgtccagtgtgaggttcatctggtggagtctgggggagccttagtgaagcctggagggtccctgaaactctcctgtgcagcctctggattcagtttcagtaaatatggcatgtcttgggttcgccagactccagacaagaggctggagtgggtcgcaaccattagtagtagtgggagtcgcacctactatccagacagtgtgaagggccaattcaccatctccagagacaatgccaagaacaccctgtacctgcaaatgagcagtctgaagtctgaggacacagccatgtattactgttcaattagctgggacggtgctatggactactggggtcaagggacctcagtcaccgtctcctcaggtggtggtggtagcggcggcggcggctctggtggtggtggatccgatgttttgatgacccaaactccactctccctgcctgtcagtcttggagatcaagcctccatctcttgcaaatctagtcagagcattgtacatagtaatggaaacacctatttagaatggtacctgcagaaaccaggccagtctccaaagctcctggtctacaaagtttccaatcgattttctggggtcccagacaggttcagtggcagtggatcagggacagatttcacactcaagatcagcagagtggaggctgaggatctgggaacttattactgctttcaaggttcacttgttccttgggcgttcggtggaggcaccaagctggaaatcaaatacccatacgatgttccagattacgcttagtgacctgaggatgatctttttccctctgccaaaaattatggggacatcatgaagccccttgagcatctgacttctggctaataaaggaaatttattttcattgcaatagtgtgttggaattttttgtgtctctcactcggcctaggtagataagtagcatggcgggttaatcattaactacaaggaacccctagtgatggagttggccactccctctctgcgcgctcgctcgctcactgaggccgggcgaccaaaggtcgcccgacgcccgggctttgcccgggcggcctcagtgagcgagcgagcgcgcag

SEQ ID NO: 2284 - DNA, 2543 bp, Artificial Sequence
  source: /note="Description of Artificial Sequence: Synthetic polynucleotide"
ctgcgcgctcgctcgctcactgaggccgcccgggcaaagcccgggcgtcgggcgacctttggtcgcccggcctcagtgagcgagcgagcgcgcagagagggagtggccaactccatcactaggggttccttgtagttaatgattaacccgccatgctacttatctaccagggtaatggggatcctctagaactatagctagtcgacataacgcgttagtatctgcagagggccctgcgtatgagtgcaagtgggttttaggaccaggatgaggcggggtgggggtgcctacctgacgaccgaccccgacccactggacaagcacccaacccccattccccaaattgcgcatcccctatcagagagggggaggggaaacaggatgcggcgaggcgcgtgcgcactgccagcttcagcaccgcggacagtgccttcgcccccgcctggcggcgcgcgccaccgccgcctcagcactgaaggcgcgctgacgtcactcgccggtcccccgcaaactccccttcccggccaccttggtcgcgtccgcgccgccgccggcccagccggaccgcaccacgcgaggcgcgagataggggggcacgggcgcgaccatctgcgctgcggcgccggcgactcagcgctgcctcagtctgcggtgggcagcggaggagtcgtgtcgtgcctgagagcgcagctgtgctcctgggcaccgcgcagtccgcccccgcggctcctggccagaccacccctaggaccccctgccccaagtcgcagccaagcttcgtttagtgaaccgtcagatcgcctggagacgccatccacgctgttttgacctccatagaagacaccgggaccgatccagcctccgcggattcgaatcccggccgggaacggtgcattggaacgcggattccccgtgccaagagtgacgtaagtaccgcctatagagtctataggcccacaaaaaatgctttcttcttttaatatacttttttgtttatcttatttctaatactttccctaatctctttctttcagggcaataatgatacaatgtatcatgcctctttgcaccattctaaagaataacagtgataatttctgggttaaggcaatagcaatatttctgcatataaatatttctgcatataaattgtaactgatgtaagaggtttcatattgctaatagcagctacaatccagctaccattctgcttttattttatggttgggataaggctggattattctgagtccaagctaggcccttttgctaatcatgttcatacctcttatcttcctcccacagctcctgggcaacgtgctggtctgtgtgctggcccatcactttggcaaagaattgggattcgaaccggtgccgccaccatgaacttcgggctcagcttgattttccttgtccttgttttaaaaggtgtccagtgtgaggttcatctggtggagtctgggggagccttagtgaagcctggagggtccctgaaactctcctgtgcagcctctggattcagtttcagtaaatatggcatgtcttgggttcgccagactccagacaagaggctggagtgggtcgcaaccattagtagtagtgggagtcgcacctactatccagacagtgtgaagggccaattcaccatctccagagacaatgccaagaacaccctgtacctgcaaatgagcagtctgaagtctgaggacacagccatgtattactgttcaattagctgggacggtgctatggactactggggtcaagggacctcagtcaccgtctcctcaggtggtggtggtagcggcggcggcggctctggtggtggtggatccggtggtggtggatccggtggtggtggatccgatgttttgatgacccaaactccactctccctgcctgtcagtcttggagatcaagcctccatctcttgcaaatctagtcagagcattgtacatagtaatggaaacacctatttagaatggtacctgcagaaaccaggccagtctccaaagctcctggtctacaaagtttccaatcgattttctggggtcccagacaggttcagtggcagtggatcagggacagatttcacactcaagatcagcagagtggaggctgaggatctgggaacttattactgctttcaaggttcacttgttccttgggcgttcggtggaggcaccaagctggaaatcaaatacccatacgatgttccagattacgcttagtgacctgaggatgatctttttccctctgccaaaaattatggggacatcatgaagccccttgagcatctgacttctggctaataaaggaaatttattttcattgcaatagtgtgttggaattttttgtgtctctcactcggcctaggtagataagtagcatggcgggttaatcattaactacaaggaacccctagtgatggagttggccactccctctctgcgcgctcgctcgctcactgaggccgggcgaccaaaggtcgcccgacgcccgggctttgcccgggcggcctcagtgagcgagcgagcgcgcag

SEQ ID NO: 2285 - DNA, 2588 bp, Artificial Sequence
  source: /note="Description of Artificial Sequence: Synthetic polynucleotide"
ctgcgcgctcgctcgctcactgaggccgcccgggcaaagcccgggcgtcgggcgacctttggtcgcccggcctcagtgagcgagcgagcgcgcagagagggagtggccaactccatcactaggggttccttgtagttaatgattaacccgccatgctacttatctaccagggtaatggggatcctctagaactatagctagtcgacataacgcgttagtatctgcagagggccctgcgtatgagtgcaagtgggttttaggaccaggatgaggcggggtgggggtgcctacctgacgaccgaccccgacccactggacaagcacccaacccccattccccaaattgcgcatcccctatcagagagggggaggggaaacaggatgcggcgaggcgcgtgcgcactgccagcttcagcaccgcggacagtgccttcgcccccgcctggcggcgcgcgccaccgccgcctcagcactgaaggcgcgctgacgtcactcgccggtcccccgcaaactccccttcccggccaccttggtcgcgtccgcgccgccgccggcccagccggaccgcaccacgcgaggcgcgagataggggggcacgggcgcgaccatctgcgctgcggcgccggcgactcagcgctgcctcagtctgcggtgggcagcggaggagtcgtgtcgtgcctgagagcgcagctgtgctcctgggcaccgcgcagtccgcccccgcggctcctggccagaccacccctaggaccccctgccccaagtcgcagccaagcttcgtttagtgaaccgtcagatcgcctggagacgccatccacgctgttttgacctccatagaagacaccgggaccgatccagcctccgcggattcgaatcccggccgggaacggtgcattggaacgcggattccccgtgccaagagtgacgtaagtaccgcctatagagtctataggcccacaaaaaatgctttcttcttttaatatacttttttgtttatcttatttctaatactttccctaatctctttctttcagggcaataatgatacaatgtatcatgcctctttgcaccattctaaagaataacagtgataatttctgggttaaggcaatagcaatatttctgcatataaatatttctgcatataaattgtaactgatgtaagaggtttcatattgctaatagcagctacaatccagctaccattctgcttttattttatggttgggataaggctggattattctgagtccaagctaggcccttttgctaatcatgttcatacctcttatcttcctcccacagctcctgggcaacgtgctggtctgtgtgctggcccatcactttggcaaagaattgggattcgaaccggtgccgccaccatgaacttcgggctcagcttgattttccttgtccttgttttaaaaggtgtccagtgtgaggttcatctggtggagtctgggggagccttagtgaagcctggagggtccctgaaactctcctgtgcagcctctggattcagtttcagtaaatatggcatgtcttgggttcgccagactccagacaagaggctggagtgggtcgcaaccattagtagtagtgggagtcgcacctactatccagacagtgtgaagggccaattcaccatctccagagacaatgccaagaacaccctgtacctgcaaatgagcagtctgaagtctgaggacacagccatgtattactgttcaattagctgggacggtgctatggactactggggtcaagggacctcagtcaccgtctcctcaggtggtggtggtagcggcggcggcggctctggtggtggtggatccggtggtggtggatccggtggtggtggatccggtggtggtggatccggtggtggtggatccggtggtggtggatccgatgttttgatgacccaaactccactctccctgcctgtcagtcttggagatcaagcctccatctcttgcaaatctagtcagagcattgtacatagtaatggaaacacctatttagaatggtacctgcagaaaccaggccagtctccaaagctcctggtctacaaagtttccaatcgattttctggggtcccagacaggttcagtggcagtggatcagggacagatttcacactcaagatcagcagagtggaggctgaggatctgggaacttattactgctttcaaggttcacttgttccttgggcgttcggtggaggcaccaagctggaaatcaaatacccatacgatgttccagattacgcttagtgacctgaggatgatctttttccctctgccaaaaattatggggacatcatgaagccccttgagcatctgacttctggctaataaaggaaatttattttcattgcaatagtgtgttggaattttttgtgtctctcactcggcctaggtagataagtagcatggcgggttaatcattaactacaaggaacccctagtgatggagttggccactccctctctgcgcgctcgctcgctcactgaggccgggcgaccaaaggtcgcccgacgcccgggctttgcccgggcggcctcagtgagcgagcgagcgcgcag

SEQ ID NO: 2286 - DNA, 2483 bp, Artificial Sequence
  source: /note="Description of Artificial Sequence: Synthetic polynucleotide"
ctgcgcgctcgctcgctcactgaggccgcccgggcaaagcccgggcgtcgggcgacctttggtcgcccggcctcagtgagcgagcgagcgcgcagagagggagtggccaactccatcactaggggttccttgtagttaatgattaacccgccatgctacttatctaccagggtaatggggatcctctagaactatagctagtcgacataacgcgttagtatctgcagagggccctgcgtatgagtgcaagtgggttttaggaccaggatgaggcggggtgggggtgcctacctgacgaccgaccccgacccactggacaagcacccaacccccattccccaaattgcgcatcccctatcagagagggggaggggaaacaggatgcggcgaggcgcgtgcgcactgccagcttcagcaccgcggacagtgccttcgcccccgcctggcggcgcgcgccaccgccgcctcagcactgaaggcgcgctgacgtcactcgccggtcccccgcaaactccccttcccggccaccttggtcgcgtccgcgccgccgccggcccagccggaccgcaccacgcgaggcgcgagataggggggcacgggcgcgaccatctgcgctgcggcgccggcgactcagcgctgcctcagtctgcggtgggcagcggaggagtcgtgtcgtgcctgagagcgcagctgtgctcctgggcaccgcgcagtccgcccccgcggctcctggccagaccacccctaggaccccctgccccaagtcgcagccaagcttcgtttagtgaaccgtcagatcgcctggagacgccatccacgctgttttgacctccatagaagacaccgggaccgatccagcctccgcggattcgaatcccggccgggaacggtgcattggaacgcggattccccgtgccaagagtgacgtaagtaccgcctatagagtctataggcccacaaaaaatgctttcttcttttaatatacttttttgtttatcttatttctaatactttccctaatctctttctttcagggcaataatgatacaatgtatcatgcctctttgcaccattctaaagaataacagtgataatttctgggttaaggcaatagcaatatttctgcatataaatatttctgcatataaattgtaactgatgtaagaggtttcatattgctaatagcagctacaatccagctaccattctgcttttattttatggttgggataaggctggattattctgagtccaagctaggcccttttgctaatcatgttcatacctcttatcttcctcccacagctcctgggcaacgtgctggtctgtgtgctggcccatcactttggcaaagaattgggattcgaaccggtgccgccaccatgaagttgcctgttaggctgttggtgctgatgttctggattcctgcttccagcagtgatgttttgatgacccaaactccactctccctgcctgtcagtcttggagatcaagcctccatctcttgcaaatctagtcagagcattgtacatagtaatggaaacacctatttagaatggtacctgcagaaaccaggccagtctccaaagctcctggtctacaaagtttccaatcgattttctggggtcccagacaggttcagtggcagtggatcagggacagatttcacactcaagatcagcagagtggaggctgaggatctgggaacttattactgctttcaaggttcacttgttccttgggcgttcggtggaggcaccaagctggaaatcaaaggtggtggtggatccgaggttcatctggtggagtctgggggagccttagtgaagcctggagggtccctgaaactctcctgtgcagcctctggattcagtttcagtaaatatggcatgtcttgggttcgccagactccagacaagaggctggagtgggtcgcaaccattagtagtagtgggagtcgcacctactatccagacagtgtgaagggccaattcaccatctccagagacaatgccaagaacaccctgtacctgcaaatgagcagtctgaagtctgaggacacagccatgtattactgttcaattagctgggacggtgctatggactactggggtcaagggacctcagtcaccgtctcctcatacccatacgatgttccagattacgcttagtgacctgaggatgatctttttccctctgccaaaaattatggggacatcatgaagccccttgagcatctgacttctggctaataaaggaaatttattttcattgcaatagtgtgttggaattttttgtgtctctcactcggcctaggtagataagtagcatggcgggttaatcattaactacaaggaacccctagtgatggagttggccactccctctctgcgcgctcgctcgctcactgaggccgggcgaccaaaggtcgcccgacgcccgggctttgcccgggcggcctcagtgagcgagcgagcgcgcag

SEQ ID NO: 2287 - DNA, 2513 bp, Artificial Sequence
  source: /note="Description of Artificial Sequence: Synthetic polynucleotide"
ctgcgcgctcgctcgctcactgaggccgcccgggcaaagcccgggcgtcgggcgacctttggtcgcccggcctcagtgagcgagcgagcgcgcagagagggagtggccaactccatcactaggggttccttgtagttaatgattaacccgccatgctacttatctaccagggtaatggggatcctctagaactatagctagtcgacataacgcgttagtatctgcagagggccctgcgtatgagtgcaagtgggttttaggaccaggatgaggcggggtgggggtgcctacctgacgaccgaccccgacccactggacaagcacccaacccccattccccaaattgcgcatcccctatcagagagggggaggggaaacaggatgcggcgaggcgcgtgcgcactgccagcttcagcaccgcggacagtgccttcgcccccgcctggcggcgcgcgccaccgccgcctcagcactgaaggcgcgctgacgtcactcgccggtcccccgcaaactccccttcccggccaccttggtcgcgtccgcgccgccgccggcccagccggaccgcaccacgcgaggcgcgagataggggggcacgggcgcgaccatctgcgctgcggcgccggcgactcagcgctgcctcagtctgcggtgggcagcggaggagtcgtgtcgtgcctgagagcgcagctgtgctcctgggcaccgcgcagtccgcccccgcggctcctggccagaccacccctaggaccccctgccccaagtcgcagccaagcttcgtttagtgaaccgtcagatcgcctggagacgccatccacgctgttttgacctccatagaagacaccgggaccgatccagcctccgcggattcgaatcccggccgggaacggtgcattggaacgcggattccccgtgccaagagtgacgtaagtaccgcctatagagtctataggcccacaaaaaatgctttcttcttttaatatacttttttgtttatcttatttctaatactttccctaatctctttctttcagggcaataatgatacaatgtatcatgcctctttgcaccattctaaagaataacagtgataatttctgggttaaggcaatagcaatatttctgcatataaatatttctgcatataaattgtaactgatgtaagaggtttcatattgctaatagcagctacaatccagctaccattctgcttttattttatggttgggataaggctggattattctgagtccaagctaggcccttttgctaatcatgttcatacctcttatcttcctcccacagctcctgggcaacgtgctggtctgtgtgctggcccatcactttggcaaagaattgggattcgaaccggtgccgccaccatgaagttgcctgttaggctgttggtgctgatgttctggattcctgcttccagcagtgatgttttgatgacccaaactccactctccctgcctgtcagtcttggagatcaagcctccatctcttgcaaatctagtcagagcattgtacatagtaatggaaacacctatttagaatggtacctgcagaaaccaggccagtctccaaagctcctggtctacaaagtttccaatcgattttctggggtcccagacaggttcagtggcagtggatcagggacagatttcacactcaagatcagcagagtggaggctgaggatctgggaacttattactgctttcaaggttcacttgttccttgggcgttcggtggaggcaccaagctggaaatcaaaggtggtggtggatccggtggtggtggatccggtggtggtggatccgaggttcatctggtggagtctgggggagccttagtgaagcctggagggtccctgaaactctcctgtgcagcctctggattcagtttcagtaaatatggcatgtcttgggttcgccagactccagacaagaggctggagtgggtcgcaaccattagtagtagtgggagtcgcacctactatccagacagtgtgaagggccaattcaccatctccagagacaatgccaagaacaccctgtacctgcaaatgagcagtctgaagtctgaggacacagccatgtattactgttcaattagctgggacggtgctatggactactggggtcaagggacctcagtcaccgtctcctcatacccatacgatgttccagattacgcttagtgacctgaggatgatctttttccctctgccaaaaattatggggacatcatgaagccccttgagcatctgacttctggctaataaaggaaatttattttcattgcaatagtgtgttggaattttttgtgtctctcactcggcctaggtagataagtagcatggcgggttaatcattaactacaaggaacccctagtgatggagttggccactccctctctgcgcgctcgctcgctcactgaggccgggcgaccaaaggtcgcccgacgcccgggctttgcccgggcggcctcagtgagcgagcgagcgcgcag

SEQ ID NO: 2288 - DNA, 2543 bp, Artificial Sequence
  source: /note="Description of Artificial Sequence: Synthetic polynucleotide"
ctgcgcgctcgctcgctcactgaggccgcccgggcaaagcccgggcgtcgggcgacctttggtcgcccggcctcagtgagcgagcgagcgcgcagagagggagtggccaactccatcactaggggttccttgtagttaatgattaacccgccatgctacttatctaccagggtaatggggatcctctagaactatagctagtcgacataacgcgttagtatctgcagagggccctgcgtatgagtgcaagtgggttttaggaccaggatgaggcggggtgggggtgcctacctgacgaccgaccccgacccactggacaagcacccaacccccattccccaaattgcgcatcccctatcagagagggggaggggaaacaggatgcggcgaggcgcgtgcgcactgccagcttcagcaccgcggacagtgccttcgcccccgcctggcggcgcgcgccaccgccgcctcagcactgaaggcgcgctgacgtcactcgccggtcccccgcaaactccccttcccggccaccttggtcgcgtccgcgccgccgccggcccagccggaccgcaccacgcgaggcgcgagataggggggcacgggcgcgaccatctgcgctgcggcgccggcgactcagcgctgcctcagtctgcggtgggcagcggaggagtcgtgtcgtgcctgagagcgcagctgtgctcctgggcaccgcgcagtccgcccccgcggctcctggccagaccacccctaggaccccctgccccaagtcgcagccaagcttcgtttagtgaaccgtcagatcgcctggagacgccatccacgctgttttgacctccatagaagacaccgggaccgatccagcctccgcggattcgaatcccggccgggaacggtgcattggaacgcggattccccgtgccaagagtgacgtaagtaccgcctatagagtctataggcccacaaaaaatgctttcttcttttaatatacttttttgtttatcttatttctaatactttccctaatctctttctttcagggcaataatgatacaatgtatcatgcctctttgcaccattctaaagaataacagtgataatttctgggttaaggcaatagcaatatttctgcatataaatatttctgcatataaattgtaactgatgtaagaggtttcatattgctaatagcagctacaatccagctaccattctgcttttattttatggttgggataaggctggattattctgagtccaagctaggcccttttgctaatcatgttcatacctcttatcttcctcccacagctcctgggcaacgtgctggtctgtgtgctggcccatcactttggcaaagaattgggattcgaaccggtgccgccaccatgaagttgcctgttaggctgttggtgctgatgttctggattcctgcttccagcagtgatgttttgatgacccaaactccactctccctgcctgtcagtcttggagatcaagcctccatctcttgcaaatctagtcagagcattgtacatagtaatggaaacacctatttagaatggtacctgcagaaaccaggccagtctccaaagctcctggtctacaaagtttccaatcgattttctggggtcccagacaggttcagtggcagtggatcagggacagatttcacactcaagatcagcagagtggaggctgaggatctgggaacttattactgctttcaaggttcacttgttccttgggcgttcggtggaggcaccaagctggaaatcaaaggtggtggtggatccggtggtggtggatccggtggtggtggatccggtggtggtggatccggtggtggtggatccgaggttcatctggtggagtctgggggagccttagtgaagcctggagggtccctgaaactctcctgtgcagcctctggattcagtttcagtaaatatggcatgtcttgggttcgccagactccagacaagaggctggagtgggtcgcaaccattagtagtagtgggagtcgcacctactatccagacagtgtgaagggccaattcaccatctccagagacaatgccaagaacaccctgtacctgcaaatgagcagtctgaagtctgaggacacagccatgtattactgttcaattagctgggacggtgctatggactactggggtcaagggacctcagtcaccgtctcctcatacccatacgatgttccagattacgcttagtgacctgaggatgatctttttccctctgccaaaaattatggggacatcatgaagccccttgagcatctgacttctggctaataaaggaaatttattttcattgcaatagtgtgttggaattttttgtgtctctcactcggcctaggtagataagtagcatggcgggttaatcattaactacaaggaacccctagtgatggagttggccactccctctctgcgcgctcgctcgctcactgaggccgggcgaccaaaggtcgcccgacgcccgggctttgcccgggcggcctcagtgagcgagcgagcgcgcag

SEQ ID NO: 2289 - DNA, 3967 bp, Artificial Sequence
  source: /note="Description of Artificial Sequence: Synthetic polynucleotide"
ctgcgcgctcgctcgctcactgaggccgcccgggcaaagcccgggcgtcgggcgacctttggtcgcccggcctcagtgagcgagcgagcgcgcagagagggagtggccaactccatcactaggggttccttgtagttaatgattaacccgccatgctacttatctaccagggtaatggggatcctctagaactatagctagtcgacataacgcgtctagttattaatagtaatcaattacggggtcattagttcatagcccatatatggagttccgcgttacataacttacggtaaatggcccgcctggctgaccgcccaacgacccccgcccattgacgtcaataatgacgtatgttcccatagtaacgccaatagggactttccattgacgtcaatgggtggagtatttacggtaaactgcccacttggcagtacatcaagtgtatcatatgccaagtacgccccctattgacgtcaatgacggtaaatggcccgcctggcattatgcccagtacatgaccttatgggactttcctacttggcagtacatctacgtattagtcatcgctattaccatggtcgaggtgagccccacgttctgcttcactctccccatctcccccccctccccacccccaattttgtatttatttattttttaattattttgtgcagcgatgggggcggggggggggggggggcgcgcgccaggcggggcggggcggggcgaggggcggggcggggcgaggcggagaggtgcggcggcagccaatcagagcggcgcgctccgaaagtttccttttatggcgaggcggcggcggcggcggccctataaaaagcgaagcgcgcggcgggcgggagtcgctgcgcgctgccttcgccccgtgccccgctccgccgccgcctcgcgccgcccgccccggctctgactgaccgcgttactcccacaggtgagcgggcgggacggcccttctcctccgggctgtaattagcgcttggtttaatgacggcttgtttcttttctgtggctgcgtgaaagccttgaggggctccgggagggccctttgtgcggggggagcggctcggggggtgcgtgcgtgtgtgtgtgcgtggggagcgccgcgtgcggctccgcgctgcccggcggctgtgagcgctgcgggcgcggcgcggggctttgtgcgctccgcagtgtgcgcgaggggagcgcggccgggggcggtgccccgcggtgcggggggggctgcgaggggaacaaaggctgcgtgcggggtgtgtgcgtgggggggtgagcagggggtgtgggcgcgtcggtcgggctgcaaccccccctgcacccccctccccgagttgctgagcacggcccggcttcgggtgcggggctccgtacggggcgtggcgcggggctcgccgtgccgggcggggggtggcggcaggtgggggtgccgggcggggcggggccgcctcgggccggggagggctcgggggaggggcgcggcggcccccggagcgccggcggctgtcgaggcgcggcgagccgcagccattgccttttatggtaatcgtgcgagagggcgcagggacttcctttgtcccaaatctgtgcggagccgaaatctgggaggcgccgccgcaccccctctagcgggcgcggggcgaagcggtgcggcgccggcaggaaggaaatgggcggggagggccttcgtgcgtcgccgcgccgccgtccccttctccctctccagcctcggggctgtccgcggggggacggctgccttcgggggggacggggcagggcggggttcggcttctggcgtgtgaccggcggctctagagcctctgctaaccatgttcatgccttcttctttttcctacagctcctgggcaacgtgctggttattgtgctgtctcatcattttggcaaagaattcgggattcgaaccggtgccgccaccatgaacttcgggctcagcttgattttccttgtccttgttttaaaaggtgtccagtgtcaggtgcagctgcagcagagcgacgccgagctggtgaaacctggggccagcgtcaagatcagctgcaaggcctccggctacaccttcaccgaccgcaccatccactgggtgaagcagcggcccgagcaggggctggagtggatcgggtacatctaccccggggacggctccaccaagtacaacgagaacttcaagggcaaagccaccctgacggccgacaagtccagcagcaccgcctacatgcagctgaacagcctgaccagcgaggacagcgccgtgtacttctgcgcccggcggggggctatggactactggggccagggcacctccgtgaccgtgtcctccgccaaaacgacacccccatctgtctatccactggcccctggatctgctgcccaaactaactccatggtgaccctgggatgcctggtcaagggctatttccctgagccagtgacagtgacctggaactctggatccctgtccagcggtgtgcacaccttcccagctgtcctgcagtctgacctctacactctgagcagctcagtgactgtcccctccagcacctggcccagcgagaccgtcacctgcaacgttgcccacccggccagcagcaccaaggtggacaagaaaattgtgcccagggattgtggtgagctcaaaaccccacttggtgacacaactcacacatgcccacggtgcccagagcccaaatcttgtgacacacctcccccgtgcccacggtgcccagagcccaaatcttgtgacacaactcacacatgcccacggtgcccagagcccaaatcttgtgacacacctcccccgtgcccaaggtgcccagcacctgaactcagaaagaggcgagagggcagaggaagtcttctaacatgcggtgacgtggaggagaatcccggccctatgaagttgcctgttaggctgttggtgctgatgttctggattcctgcttccagcagtgacgtgcagatgatccagagccccagcagcctgagcgcctcgctgggggacatcgtgaccatgacctgccaggcctcccagggcaccagcatcaacctcaactggttccagcagaagcccggcaaggcccccaagctcctcatctacggggccagcaacctggaggacggcgtgccctcccgcttcagcggctcccgctacggcacggacttcacgctgaccatctcctccctggaggacgaggacatggccacctacttctgcctgcagcacacctacctgcccttcaccttcggcagcgggaccaagctggagatcaagcgggctgatgctgcaccaactgtatccatcttcccaccatccagtgagcagttaacatctggaggtgcctcagtcgtgtgcttcttgaacaacttctaccccaaagacatcaatgtcaagtggaagattgatggcagtgaacgacaaaatggcgtcctgaacagttggactgatcaggacagcaaagacagcacctacagcatgagcagcaccctcacgttgaccaaggacgagtatgaacgacataacagctatacctgtgaggccactcacaagacatcaacttcacccattgtcaagagcttcaacaggaatgagtgttagtaactcgaggacggggtgaactacgcctgaggatccgatctttttccctctgccaaaaattatggggacatcatgaagccccttgagcatctgacttctggctaataaaggaaatttattttcattgcaatagtgtgttggaattttttgtgtctctcactcggcctaggtagataagtagcatggcgggttaatcattaactacaaggaacccctagtgatggagttggccactccctctctgcgcgctcgctcgctcactgaggccgggcgaccaaaggtcgcccgacgcccgggctttgcccgggcggcctcagtgagcgagcgagcgcgcag

SEQ ID NO: 2290 - DNA, 3769 bp, Artificial Sequence
  source: /note="Description of Artificial Sequence: Synthetic polynucleotide"
ctgcgcgctcgctcgctcactgaggccgcccgggcaaagcccgggcgtcgggcgacctttggtcgcccggcctcagtgagcgagcgagcgcgcagagagggagtggccaactccatcactaggggttccttgtagttaatgattaacccgccatgctacttatctaccagggtaatggggatcctctagaactatagctagtcgacataacgcgtctagttattaatagtaatcaattacggggtcattagttcatagcccatatatggagttccgcgttacataacttacggtaaatggcccgcctggctgaccgcccaacgacccccgcccattgacgtcaataatgacgtatgttcccatagtaacgccaatagggactttccattgacgtcaatgggtggagtatttacggtaaactgcccacttggcagtacatcaagtgtatcatatgccaagtacgccccctattgacgtcaatgacggtaaatggcccgcctggcattatgcccagtacatgaccttatgggactttcctacttggcagtacatctacgtattagtcatcgctattaccatggtcgaggtgagccccacgttctgcttcactctccccatctcccccccctccccacccccaattttgtatttatttattttttaattattttgtgcagcgatgggggcggggggggggggggggcgcgcgccaggcggggcggggcggggcgaggggcggggcggggcgaggcggagaggtgcggcggcagccaatcagagcggcgcgctccgaaagtttccttttatggcgaggcggcggcggcggcggccctataaaaagcgaagcgcgcggcgggcgggagtcgctgcgcgctgccttcgccccgtgccccgctccgccgccgcctcgcgccgcccgccccggctctgactgaccgcgttactcccacaggtgagcgggcgggacggcccttctcctccgggctgtaattagcgcttggtttaatgacggcttgtttcttttctgtggctgcgtgaaagccttgaggggctccgggagggccctttgtgcggggggagcggctcggggggtgcgtgcgtgtgtgtgtgcgtggggagcgccgcgtgcggctccgcgctgcccggcggctgtgagcgctgcgggcgcggcgcggggctttgtgcgctccgcagtgtgcgcgaggggagcgcggccgggggcggtgccccgcggtgcggggggggctgcgaggggaacaaaggctgcgtgcggggtgtgtgcgtgggggggtgagcagggggtgtgggcgcgtcggtcgggctgcaaccccccctgcacccccctccccgagttgctgagcacggcccggcttcgggtgcggggctccgtacggggcgtggcgcggggctcgccgtgccgggcggggggtggcggcaggtgggggtgccgggcggggcggggccgcctcgggccggggagggctcgggggaggggcgcggcggcccccggagcgccggcggctgtcgaggcgcggcgagccgcagccattgccttttatggtaatcgtgcgagagggcgcagggacttcctttgtcccaaatctgtgcggagccgaaatctgggaggcgccgccgcaccccctctagcgggcgcggggcgaagcggtgcggcgccggcaggaaggaaatgggcggggagggccttcgtgcgtcgccgcgccgccgtccccttctccctctccagcctcggggctgtccgcggggggacggctgccttcgggggggacggggcagggcggggttcggcttctggcgtgtgaccggcggctctagagcctctgctaaccatgttcatgccttcttctttttcctacagctcctgggcaacgtgctggttattgtgctgtctcatcattttggcaaagaattcgggattcgaaccggtgccgccaccatgaacttcgggctcagcttgattttccttgtccttgttttaaaaggtgtccagtgtcaggtgcagctgcagcagagcgacgccgagctggtgaaacctggggccagcgtcaagatcagctgcaaggcctccggctacaccttcaccgaccgcaccatccactgggtgaagcagcggcccgagcaggggctggagtggatcgggtacatctaccccggggacggctccaccaagtacaacgagaacttcaagggcaaagccaccctgacggccgacaagtccagcagcaccgcctacatgcagctgaacagcctgaccagcgaggacagcgccgtgtacttctgcgcccggcggggggctatggactactggggccagggcacctccgtgaccgtgtcctccgccaaaacgacacccccatctgtctatccactggcccctggatctgctgcccaaactaactccatggtgaccctgggatgcctggtcaagggctatttccctgagccagtgacagtgacctggaactctggatccctgtccagcggtgtgcacaccttcccagctgtcctgcagtctgacctctacactctgagcagctcagtgactgtcccctccagcacctggcccagcgagaccgtcacctgcaacgttgcccacccggccagcagcaccaaggtggacaagaaaattgtgcccagggattgtggtagaaagaggcgagagggcagaggaagtcttctaacatgcggtgacgtggaggagaatcccggccctatgaagttgcctgttaggctgttggtgctgatgttctggattcctgcttccagcagtgacgtgcagatgatccagagccccagcagcctgagcgcctcgctgggggacatcgtgaccatgacctgccaggcctcccagggcaccagcatcaacctcaactggttccagcagaagcccggcaaggcccccaagctcctcatctacggggccagcaacctggaggacggcgtgccctcccgcttcagcggctcccgctacggcacggacttcacgctgaccatctcctccctggaggacgaggacatggccacctacttctgcctgcagcacacctacctgcccttcaccttcggcagcgggaccaagctggagatcaagcgggctgatgctgcaccaactgtatccatcttcccaccatccagtgagcagttaacatctggaggtgcctcagtcgtgtgcttcttgaacaacttctaccccaaagacatcaatgtcaagtggaagattgatggcagtgaacgacaaaatggcgtcctgaacagttggactgatcaggacagcaaagacagcacctacagcatgagcagcaccctcacgttgaccaaggacgagtatgaacgacataacagctatacctgtgaggccactcacaagacatcaacttcacccattgtcaagagcttcaacaggaatgagtgttagtaactcgaggacggggtgaactacgcctgaggatccgatctttttccctctgccaaaaattatggggacatcatgaagccccttgagcatctgacttctggctaataaaggaaatttattttcattgcaatagtgtgttggaattttttgtgtctctcactcggcctaggtagataagtagcatggcgggttaatcattaactacaaggaacccctagtgatggagttggccactccctctctgcgcgctcgctcgctcactgaggccgggcgaccaaaggtcgcccgacgcccgggctttgcccgggcggcctcagtgagcgagcgagcgcgcag

SEQ ID NO: 2291 - DNA, 3792 bp, Artificial Sequence
  source: /note="Description of Artificial Sequence: Synthetic polynucleotide"
ctgcgcgctcgctcgctcactgaggccgcccgggcaaagcccgggcgtcgggcgacctttggtcgcccggcctcagtgagcgagcgagcgcgcagagagggagtggccaactccatcactaggggttccttgtagttaatgattaacccgccatgctacttatctaccagggtaatggggatcctctagaactatagctagtcgacataacgcgtctagttattaatagtaatcaattacggggtcattagttcatagcccatatatggagttccgcgttacataacttacggtaaatggcccgcctggctgaccgcccaacgacccccgcccattgacgtcaataatgacgtatgttcccatagtaacgccaatagggactttccattgacgtcaatgggtggagtatttacggtaaactgcccacttggcagtacatcaagtgtatcatatgccaagtacgccccctattgacgtcaatgacggtaaatggcccgcctggcattatgcccagtacatgaccttatgggactttcctacttggcagtacatctacgtattagtcatcgctattaccatggtcgaggtgagccccacgttctgcttcactctccccatctcccccccctccccacccccaattttgtatttatttattttttaattattttgtgcagcgatgggggcggggggggggggggggcgcgcgccaggcggggcggggcggggcgaggggcggggcggggcgaggcggagaggtgcggcggcagccaatcagagcggcgcgctccgaaagtttccttttatggcgaggcggcggcggcggcggccctataaaaagcgaagcgcgcggcgggcgggagtcgctgcgcgctgccttcgccccgtgccccgctccgccgccgcctcgcgccgcccgccccggctctgactgaccgcgttactcccacaggtgagcgggcgggacggcccttctcctccgggctgtaattagcgcttggtttaatgacggcttgtttcttttctgtggctgcgtgaaagccttgaggggctccgggagggccctttgtgcggggggagcggctcggggggtgcgtgcgtgtgtgtgtgcgtggggagcgccgcgtgcggctccgcgctgcccggcggctgtgagcgctgcgggcgcggcgcggggctttgtgcgctccgcagtgtgcgcgaggggagcgcggccgggggcggtgccccgcggtgcggggggggctgcgaggggaacaaaggctgcgtgcggggtgtgtgcgtgggggggtgagcagggggtgtgggcgcgtcggtcgggctgcaaccccccctgcacccccctccccgagttgctgagcacggcccggcttcgggtgcggggctccgtacggggcgtggcgcggggctcgccgtgccgggcggggggtggcggcaggtgggggtgccgggcggggcggggccgcctcgggccggggagggctcgggggaggggcgcggcggcccccggagcgccggcggctgtcgaggcgcggcgagccgcagccattgccttttatggtaatcgtgcgagagggcgcagggacttcctttgtcccaaatctgtgcggagccgaaatctgggaggcgccgccgcaccccctctagcgggcgcggggcgaagcggtgcggcgccggcaggaaggaaatgggcggggagggccttcgtgcgtcgccgcgccgccgtccccttctccctctccagcctcggggctgtccgcggggggacggctgccttcgggggggacggggcagggcggggttcggcttctggcgtgtgaccggcggctctagagcctctgctaaccatgttcatgccttcttctttttcctacagctcctgggcaacgtgctggttattgtgctgtctcatcattttggcaaagaattcgggattcgaaccggtgccgccaccatgaagttgcctgttaggctgttggtgctgatgttctggattcctgcttccagcagtgacgtgcagatgatccagagccccagcagcctgagcgcctcgctgggggacatcgtgaccatgacctgccaggcctcccagggcaccagcatcaacctcaactggttccagcagaagcccggcaaggcccccaagctcctcatctacggggccagcaacctggaggacggcgtgccctcccgcttcagcggctcccgctacggcacggacttcacgctgaccatctcctccctggaggacgaggacatggccacctacttctgcctgcagcacacctacctgcccttcaccttcggcagcgggaccaagctggagatcaagcgggctgatgctgcaccaactgtatccatcttcccaccatccagtgagcagttaacatctggaggtgcctcagtcgtgtgcttcttgaacaacttctaccccaaagacatcaatgtcaagtggaagattgatggcagtgaacgacaaaatggcgtcctgaacagttggactgatcaggacagcaaagacagcacctacagcatgagcagcaccctcacgttgaccaaggacgagtatgaacgacataacagctatacctgtgaggccactcacaagacatcaacttcacccattgtcaagagcttcaacaggaatgagtgtgagggcagaggaagtcttctaacatgcggtgacgtggaggagaatcccggccctatgaacttcgggctcagcttgattttccttgtccttgttttaaaaggtgtccagtgtcaggtgcagctgcagcagagcgacgccgagctggtgaaacctggggccagcgtcaagatcagctgcaaggcctccggctacaccttcaccgaccgcaccatccactgggtgaagcagcggcccgagcaggggctggagtggatcgggtacatctaccccggggacggctccaccaagtacaacgagaacttcaagggcaaagccaccctgacggccgacaagtccagcagcaccgcctacatgcagctgaacagcctgaccagcgaggacagcgccgtgtacttctgcgcccggcggggggctatggactactggggccagggcacctccgtgaccgtgtcctccgccaaaacgacacccccatctgtctatccactggcccctggatctgctgcccaaactaactccatggtgaccctgggatgcctggtcaagggctatttccctgagccagtgacagtgacctggaactctggatccctgtccagcggtgtgcacaccttcccagctgtcctgcagtctgacctctacactctgagcagctcagtgactgtcccctccagcacctggcccagcgagaccgtcacctgcaacgttgcccacccggccagcagcaccaaggtggacaagaaaattgtgcccagggattgtggttaggcaattgaaggcgaattgttaattaagaattcactcctctcgaggacggggtgaactacgcctgaggatccgatctttttccctctgccaaaaattatggggacatcatgaagccccttgagcatctgacttctggctaataaaggaaatttattttcattgcaatagtgtgttggaattttttgtgtctctcactcggcctaggtagataagtagcatggcgggttaatcattaactacaaggaacccctagtgatggagttggccactccctctctgcgcgctcgctcgctcactgaggccgggcgaccaaaggtcgcccgacgcccgggctttgcccgggcggcctcagtgagcgagcgagcgcgcag

SEQ ID NO: 2292 - DNA, 3751 bp, Artificial Sequence
  source: /note="Description of Artificial Sequence: Synthetic polynucleotide"
ctgcgcgctcgctcgctcactgaggccgcccgggcaaagcccgggcgtcgggcgacctttggtcgcccggcctcagtgagcgagcgagcgcgcagagagggagtggccaactccatcactaggggttccttgtagttaatgattaacccgccatgctacttatctaccagggtaatggggatcctctagaactatagctagtcgacataacgcgtctagttattaatagtaatcaattacggggtcattagttcatagcccatatatggagttccgcgttacataacttacggtaaatggcccgcctggctgaccgcccaacgacccccgcccattgacgtcaataatgacgtatgttcccatagtaacgccaatagggactttccattgacgtcaatgggtggagtatttacggtaaactgcccacttggcagtacatcaagtgtatcatatgccaagtacgccccctattgacgtcaatgacggtaaatggcccgcctggcattatgcccagtacatgaccttatgggactttcctacttggcagtacatctacgtattagtcatcgctattaccatggtcgaggtgagccccacgttctgcttcactctccccatctcccccccctccccacccccaattttgtatttatttattttttaattattttgtgcagcgatgggggcggggggggggggggggcgcgcgccaggcggggcggggcggggcgaggggcggggcggggcgaggcggagaggtgcggcggcagccaatcagagcggcgcgctccgaaagtttccttttatggcgaggcggcggcggcggcggccctataaaaagcgaagcgcgcggcgggcgggagtcgctgcgcgctgccttcgccccgtgccccgctccgccgccgcctcgcgccgcccgccccggctctgactgaccgcgttactcccacaggtgagcgggcgggacggcccttctcctccgggctgtaattagcgcttggtttaatgacggcttgtttcttttctgtggctgcgtgaaagccttgaggggctccgggagggccctttgtgcggggggagcggctcggggggtgcgtgcgtgtgtgtgtgcgtggggagcgccgcgtgcggctccgcgctgcccggcggctgtgagcgctgcgggcgcggcgcggggctttgtgcgctccgcagtgtgcgcgaggggagcgcggccgggggcggtgccccgcggtgcggggggggctgcgaggggaacaaaggctgcgtgcggggtgtgtgcgtgggggggtgagcagggggtgtgggcgcgtcggtcgggctgcaaccccccctgcacccccctccccgagttgctgagcacggcccggcttcgggtgcggggctccgtacggggcgtggcgcggggctcgccgtgccgggcggggggtggcggcaggtgggggtgccgggcggggcggggccgcctcgggccggggagggctcgggggaggggcgcggcggcccccggagcgccggcggctgtcgaggcgcggcgagccgcagccattgccttttatggtaatcgtgcgagagggcgcagggacttcctttgtcccaaatctgtgcggagccgaaatctgggaggcgccgccgcaccccctctagcgggcgcggggcgaagcggtgcggcgccggcaggaaggaaatgggcggggagggccttcgtgcgtcgccgcgccgccgtccccttctccctctccagcctcggggctgtccgcggggggacggctgccttcgggggggacggggcagggcggggttcggcttctggcgtgtgaccggcggctctagagcctctgctaaccatgttcatgccttcttctttttcctacagctcctgggcaacgtgctggttattgtgctgtctcatcattttggcaaagaattcgggattcgaaccggtgccgccaccatgaacttcgggctcagcttgattttccttgtccttgttttaaaaggtgtccagtgtcaggtgcagctgcagcagagcgacgccgagctggtgaaacctggggccagcgtcaagatcagctgcaaggcctccggctacaccttcaccgaccgcaccatccactgggtgaagcagcggcccgagcaggggctggagtggatcgggtacatctaccccggggacggctccaccaagtacaacgagaacttcaagggcaaagccaccctgacggccgacaagtccagcagcaccgcctacatgcagctgaacagcctgaccagcgaggacagcgccgtgtacttctgcgcccggcggggggctatggactactggggccagggcacctccgtgaccgtgtcctccgccaaaacgacacccccatctgtctatccactggcccctggatctgctgcccaaactaactccatggtgaccctgggatgcctggtcaagggctatttccctgagccagtgacagtgacctggaactctggatccctgtccagcggtgtgcacaccttcccagctgtcctgcagtctgacctctacactctgagcagctcagtgactgtcccctccagcacctggcccagcgagaccgtcacctgcaacgttgcccacccggccagcagcaccaaggtggacaagaaaattagaaagaggcgagagggcagaggaagtcttctaacatgcggtgacgtggaggagaatcccggccctatgaagttgcctgttaggctgttggtgctgatgttctggattcctgcttccagcagtgacgtgcagatgatccagagccccagcagcctgagcgcctcgctgggggacatcgtgaccatgacctgccaggcctcccagggcaccagcatcaacctcaactggttccagcagaagcccggcaaggcccccaagctcctcatctacggggccagcaacctggaggacggcgtgccctcccgcttcagcggctcccgctacggcacggacttcacgctgaccatctcctccctggaggacgaggacatggccacctacttctgcctgcagcacacctacctgcccttcaccttcggcagcgggaccaagctggagatcaagcgggctgatgctgcaccaactgtatccatcttcccaccatccagtgagcagttaacatctggaggtgcctcagtcgtgtgcttcttgaacaacttctaccccaaagacatcaatgtcaagtggaagattgatggcagtgaacgacaaaatggcgtcctgaacagttggactgatcaggacagcaaagacagcacctacagcatgagcagcaccctcacgttgaccaaggacgagtatgaacgacataacagctatacctgtgaggccactcacaagacatcaacttcacccattgtcaagagcttcaacaggaatgagtgttagtaactcgaggacggggtgaactacgcctgaggatccgatctttttccctctgccaaaaattatggggacatcatgaagccccttgagcatctgacttctggctaataaaggaaatttattttcattgcaatagtgtgttggaattttttgtgtctctcactcggcctaggtagataagtagcatggcgggttaatcattaactacaaggaacccctagtgatggagttggccactccctctctgcgcgctcgctcgctcactgaggccgggcgaccaaaggtcgcccgacgcccgggctttgcccgggcggcctcagtgagcgagcgagcgcgcag

SEQ ID NO: 2293 - DNA, 3058 bp, Artificial Sequence
  source: /note="Description of Artificial Sequence: Synthetic polynucleotide"
ctgcgcgctcgctcgctcactgaggccgcccgggcaaagcccgggcgtcgggcgacctttggtcgcccggcctcagtgagcgagcgagcgcgcagagagggagtggccaactccatcactaggggttccttgtagttaatgattaacccgccatgctacttatctaccagggtaatggggatcctctagaactatagctagtcgacataacgcgtctagttattaatagtaatcaattacggggtcattagttcatagcccatatatggagttccgcgttacataacttacggtaaatggcccgcctggctgaccgcccaacgacccccgcccattgacgtcaataatgacgtatgttcccatagtaacgccaatagggactttccattgacgtcaatgggtggagtatttacggtaaactgcccacttggcagtacatcaagtgtatcatatgccaagtacgccccctattgacgtcaatgacggtaaatggcccgcctggcattatgcccagtacatgaccttatgggactttcctacttggcagtacatctacgtattagtcatcgctattaccatggtcgaggtgagccccacgttctgcttcactctccccatctcccccccctccccacccccaattttgtatttatttattttttaattattttgtgcagcgatgggggcggggggggggggggggcgcgcgccaggcggggcggggcggggcgaggggcggggcggggcgaggcggagaggtgcggcggcagccaatcagagcggcgcgctccgaaagtttccttttatggcgaggcggcggcggcggcggccctataaaaagcgaagcgcgcggcgggcgggagtcgctgcgcgctgccttcgccccgtgccccgctccgccgccgcctcgcgccgcccgccccggctctgactgaccgcgttactcccacaggtgagcgggcgggacggcccttctcctccgggctgtaattagcgcttggtttaatgacggcttgtttcttttctgtggctgcgtgaaagccttgaggggctccgggagggccctttgtgcggggggagcggctcggggggtgcgtgcgtgtgtgtgtgcgtggggagcgccgcgtgcggctccgcgctgcccggcggctgtgagcgctgcgggcgcggcgcggggctttgtgcgctccgcagtgtgcgcgaggggagcgcggccgggggcggtgccccgcggtgcggggggggctgcgaggggaacaaaggctgcgtgcggggtgtgtgcgtgggggggtgagcagggggtgtgggcgcgtcggtcgggctgcaaccccccctgcacccccctccccgagttgctgagcacggcccggcttcgggtgcggggctccgtacggggcgtggcgcggggctcgccgtgccgggcggggggtggcggcaggtgggggtgccgggcggggcggggccgcctcgggccggggagggctcgggggaggggcgcggcggcccccggagcgccggcggctgtcgaggcgcggcgagccgcagccattgccttttatggtaatcgtgcgagagggcgcagggacttcctttgtcccaaatctgtgcggagccgaaatctgggaggcgccgccgcaccccctctagcgggcgcggggcgaagcggtgcggcgccggcaggaaggaaatgggcggggagggccttcgtgcgtcgccgcgccgccgtccccttctccctctccagcctcggggctgtccgcggggggacggctgccttcgggggggacggggcagggcggggttcggcttctggcgtgtgaccggcggctctagagcctctgctaaccatgttcatgccttcttctttttcctacagctcctgggcaacgtgctggttattgtgctgtctcatcattttggcaaagaattcgggattcgaaccggtgccgccaccatgaagttgcctgttaggctgttggtgctgatgttctggattcctgcttccagcagtgacgtgcagatgatccagagccccagcagcctgagcgcctcgctgggggacatcgtgaccatgacctgccaggcctcccagggcaccagcatcaacctcaactggttccagcagaagcccggcaaggcccccaagctcctcatctacggggccagcaacctggaggacggcgtgccctcccgcttcagcggctcccgctacggcacggacttcacgctgaccatctcctccctggaggacgaggacatggccacctacttctgcctgcagcacacctacctgcccttcaccttcggcagcgggaccaagctggagatcaagggtggtggtggatcccaggtgcagctgcagcagagcgacgccgagctggtgaaacctggggccagcgtcaagatcagctgcaaggcctccggctacaccttcaccgaccgcaccatccactgggtgaagcagcggcccgagcaggggctggagtggatcgggtacatctaccccggggacggctccaccaagtacaacgagaacttcaagggcaaagccaccctgacggccgacaagtccagcagcaccgcctacatgcagctgaacagcctgaccagcgaggacagcgccgtgtacttctgcgcccggcggggggctatggactactggggccagggcacctccgtgaccgtgtcctcctacccatacgatgttccagattacgcttagtaactcgaggacggggtgaactacgcctgaggatccgatctttttccctctgccaaaaattatggggacatcatgaagccccttgagcatctgacttctggctaataaaggaaatttattttcattgcaatagtgtgttggaattttttgtgtctctcactcggcctaggtagataagtagcatggcgggttaatcattaactacaaggaacccctagtgatggagttggccactccctctctgcgcgctcgctcgctcactgaggccgggcgaccaaaggtcgcccgacgcccgggctttgcccgggcggcctcagtgagcgagcgagcgcgcag

SEQ ID NO: 2294 - DNA, 3088 bp, Artificial Sequence
  source: /note="Description of Artificial Sequence: Synthetic polynucleotide"
ctgcgcgctcgctcgctcactgaggccgcccgggcaaagcccgggcgtcgggcgacctttggtcgcccggcctcagtgagcgagcgagcgcgcagagagggagtggccaactccatcactaggggttccttgtagttaatgattaacccgccatgctacttatctaccagggtaatggggatcctctagaactatagctagtcgacataacgcgtctagttattaatagtaatcaattacggggtcattagttcatagcccatatatggagttccgcgttacataacttacggtaaatggcccgcctggctgaccgcccaacgacccccgcccattgacgtcaataatgacgtatgttcccatagtaacgccaatagggactttccattgacgtcaatgggtggagtatttacggtaaactgcccacttggcagtacatcaagtgtatcatatgccaagtacgccccctattgacgtcaatgacggtaaatggcccgcctggcattatgcccagtacatgaccttatgggactttcctacttggcagtacatctacgtattagtcatcgctattaccatggtcgaggtgagccccacgttctgcttcactctccccatctcccccccctccccacccccaattttgtatttatttattttttaattattttgtgcagcgatgggggcggggggggggggggggcgcgcgccaggcggggcggggcggggcgaggggcggggcggggcgaggcggagaggtgcggcggcagccaatcagagcggcgcgctccgaaagtttccttttatggcgaggcggcggcggcggcggccctataaaaagcgaagcgcgcggcgggcgggagtcgctgcgcgctgccttcgccccgtgccccgctccgccgccgcctcgcgccgcccgccccggctctgactgaccgcgttactcccacaggtgagcgggcgggacggcccttctcctccgggctgtaattagcgcttggtttaatgacggcttgtttcttttctgtggctgcgtgaaagccttgaggggctccgggagggccctttgtgcggggggagcggctcggggggtgcgtgcgtgtgtgtgtgcgtggggagcgccgcgtgcggctccgcgctgcccggcggctgtgagcgctgcgggcgcggcgcggggctttgtgcgctccgcagtgtgcgcgaggggagcgcggccgggggcggtgccccgcggtgcggggggggctgcgaggggaacaaaggctgcgtgcggggtgtgtgcgtgggggggtgagcagggggtgtgggcgcgtcggtcgggctgcaaccccccctgcacccccctccccgagttgctgagcacggcccggcttcgggtgcggggctccgtacggggcgtggcgcggggctcgccgtgccgggcggggggtggcggcaggtgggggtgccgggcggggcggggccgcctcgggccggggagggctcgggggaggggcgcggcggcccccggagcgccggcggctgtcgaggcgcggcgagccgcagccattgccttttatggtaatcgtgcgagagggcgcagggacttcctttgtcccaaatctgtgcggagccgaaatctgggaggcgccgccgcaccccctctagcgggcgcggggcgaagcggtgcggcgccggcaggaaggaaatgggcggggagggccttcgtgcgtcgccgcgccgccgtccccttctccctctccagcctcggggctgtccgcggggggacggctgccttcgggggggacggggcagggcggggttcggcttctggcgtgtgaccggcggctctagagcctctgctaaccatgttcatgccttcttctttttcctacagctcctgggcaacgtgctggttattgtgctgtctcatcattttggcaaagaattcgggattcgaaccggtgccgccaccatgaagttgcctgttaggctgttggtgctgatgttctggattcctgcttccagcagtgacgtgcagatgatccagagccccagcagcctgagcgcctcgctgggggacatcgtgaccatgacctgccaggcctcccagggcaccagcatcaacctcaactggttccagcagaagcccggcaaggcccccaagctcctcatctacggggccagcaacctggaggacggcgtgccctcccgcttcagcggctcccgctacggcacggacttcacgctgaccatctcctccctggaggacgaggacatggccacctacttctgcctgcagcacacctacctgcccttcaccttcggcagcgggaccaagctggagatcaagggtggtggtggatccggtggtggtggatccggtggtggtggatcccaggtgcagctgcagcagagcgacgccgagctggtgaaacctggggccagcgtcaagatcagctgcaaggcctccggctacaccttcaccgaccgcaccatccactgggtgaagcagcggcccgagcaggggctggagtggatcgggtacatctaccccggggacggctccaccaagtacaacgagaacttcaagggcaaagccaccctgacggccgacaagtccagcagcaccgcctacatgcagctgaacagcctgaccagcgaggacagcgccgtgtacttctgcgcccggcggggggctatggactactggggccagggcacctccgtgaccgtgtcctcctacccatacgatgttccagattacgcttagtaactcgaggacggggtgaactacgcctgaggatccgatctttttccctctgccaaaaattatggggacatcatgaagccccttgagcatctgacttctggctaataaaggaaatttattttcattgcaatagtgtgttggaattttttgtgtctctcactcggcctaggtagataagtagcatggcgggttaatcattaactacaaggaacccctagtgatggagttggccactccctctctgcgcgctcgctcgctcactgaggccgggcgaccaaaggtcgcccgacgcccgggctttgcccgggcggcctcagtgagcgagcgagcgcgcag

SEQ ID NO: 2295 - DNA, 3118 bp, Artificial Sequence
  source: /note="Description of Artificial Sequence: Synthetic polynucleotide"
ctgcgcgctcgctcgctcactgaggccgcccgggcaaagcccgggcgtcgggcgacctttggtcgcccggcctcagtgagcgagcgagcgcgcagagagggagtggccaactccatcactaggggttccttgtagttaatgattaacccgccatgctacttatctaccagggtaatggggatcctctagaactatagctagtcgacataacgcgtctagttattaatagtaatcaattacggggtcattagttcatagcccatatatggagttccgcgttacataacttacggtaaatggcccgcctggctgaccgcccaacgacccccgcccattgacgtcaataatgacgtatgttcccatagtaacgccaatagggactttccattgacgtcaatgggtggagtatttacggtaaactgcccacttggcagtacatcaagtgtatcatatgccaagtacgccccctattgacgtcaatgacggtaaatggcccgcctggcattatgcccagtacatgaccttatgggactttcctacttggcagtacatctacgtattagtcatcgctattaccatggtcgaggtgagccccacgttctgcttcactctccccatctcccccccctccccacccccaattttgtatttatttattttttaattattttgtgcagcgatgggggcggggggggggggggggcgcgcgccaggcggggcggggcggggcgaggggcggggcggggcgaggcggagaggtgcggcggcagccaatcagagcggcgcgctccgaaagtttccttttatggcgaggcggcggcggcggcggccctataaaaagcgaagcgcgcggcgggcgggagtcgctgcgcgctgccttcgccccgtgccccgctccgccgccgcctcgcgccgcccgccccggctctgactgaccgcgttactcccacaggtgagcgggcgggacggcccttctcctccgggctgtaattagcgcttggtttaatgacggcttgtttcttttctgtggctgcgtgaaagccttgaggggctccgggagggccctttgtgcggggggagcggctcggggggtgcgtgcgtgtgtgtgtgcgtggggagcgccgcgtgcggctccgcgctgcccggcggctgtgagcgctgcgggcgcggcgcggggctttgtgcgctccgcagtgtgcgcgaggggagcgcggccgggggcggtgccccgcggtgcggggggggctgcgaggggaacaaaggctgcgtgcggggtgtgtgcgtgggggggtgagcagggggtgtgggcgcgtcggtcgggctgcaaccccccctgcacccccctccccgagttgctgagcacggcccggcttcgggtgcggggctccgtacggggcgtggcgcggggctcgccgtgccgggcggggggtggcggcaggtgggggtgccgggcggggcggggccgcctcgggccggggagggctcgggggaggggcgcggcggcccccggagcgccggcggctgtcgaggcgcggcgagccgcagccattgccttttatggtaatcgtgcgagagggcgcagggacttcctttgtcccaaatctgtgcggagccgaaatctgggaggcgccgccgcaccccctctagcgggcgcggggcgaagcggtgcggcgccggcaggaaggaaatgggcggggagggccttcgtgcgtcgccgcgccgccgtccccttctccctctccagcctcggggctgtccgcggggggacggctgccttcgggggggacggggcagggcggggttcggcttctggcgtgtgaccggcggctctagagcctctgctaaccatgttcatgccttcttctttttcctacagctcctgggcaacgtgctggttattgtgctgtctcatcattttggcaaagaattcgggattcgaaccggtgccgccaccatgaagttgcctgttaggctgttggtgctgatgttctggattcctgcttccagcagtgacgtgcagatgatccagagccccagcagcctgagcgcctcgctgggggacatcgtgaccatgacctgccaggcctcccagggcaccagcatcaacctcaactggttccagcagaagcccggcaaggcccccaagctcctcatctacggggccagcaacctggaggacggcgtgccctcccgcttcagcggctcccgctacggcacggacttcacgctgaccatctcctccctggaggacgaggacatggccacctacttctgcctgcagcacacctacctgcccttcaccttcggcagcgggaccaagctggagatcaagggtggtggtggatccggtggtggtggatccggtggtggtggatccggtggtggtggatccggtggtggtggatcccaggtgcagctgcagcagagcgacgccgagctggtgaaacctggggccagcgtcaagatcagctgcaaggcctccggctacaccttcaccgaccgcaccatccactgggtgaagcagcggcccgagcaggggctggagtggatcgggtacatctaccccggggacggctccaccaagtacaacgagaacttcaagggcaaagccaccctgacggccgacaagtccagcagcaccgcctacatgcagctgaacagcctgaccagcgaggacagcgccgtgtacttctgcgcccggcggggggctatggactactggggccagggcacctccgtgaccgtgtcctcctacccatacgatgttccagattacgcttagtaactcgaggacggggtgaactacgcctgaggatccgatctttttccctctgccaaaaattatggggacatcatgaagccccttgagcatctgacttctggctaataaaggaaatttattttcattgcaatagtgtgttggaattttttgtgtctctcactcggcctaggtagataagtagcatggcgggttaatcattaactacaaggaacccctagtgatggagttggccactccctctctgcgcgctcgctcgctcactgaggccgggcgaccaaaggtcgcccgacgcccgggctttgcccgggcggcctcagtgagcgagcgagcgcgcag

SEQ ID NO: 2296 - DNA, 3163 bp, Artificial Sequence
  source: /note="Description of Artificial Sequence: Synthetic polynucleotide"
ctgcgcgctcgctcgctcactgaggccgcccgggcaaagcccgggcgtcgggcgacctttggtcgcccggcctcagtgagcgagcgagcgcgcagagagggagtggccaactccatcactaggggttccttgtagttaatgattaacccgccatgctacttatctaccagggtaatggggatcctctagaactatagctagtcgacataacgcgtctagttattaatagtaatcaattacggggtcattagttcatagcccatatatggagttccgcgttacataacttacggtaaatggcccgcctggctgaccgcccaacgacccccgcccattgacgtcaataatgacgtatgttcccatagtaacgccaatagggactttccattgacgtcaatgggtggagtatttacggtaaactgcccacttggcagtacatcaagtgtatcatatgccaagtacgccccctattgacgtcaatgacggtaaatggcccgcctggcattatgcccagtacatgaccttatgggactttcctacttggcagtacatctacgtattagtcatcgctattaccatggtcgaggtgagccccacgttctgcttcactctccccatctcccccccctccccacccccaattttgtatttatttattttttaattattttgtgcagcgatgggggcggggggggggggggggcgcgcgccaggcggggcggggcggggcgaggggcggggcggggcgaggcggagaggtgcggcggcagccaatcagagcggcgcgctccgaaagtttccttttatggcgaggcggcggcggcggcggccctataaaaagcgaagcgcgcggcgggcgggagtcgctgcgcgctgccttcgccccgtgccccgctccgccgccgcctcgcgccgcccgccccggctctgactgaccgcgttactcccacaggtgagcgggcgggacggcccttctcctccgggctgtaattagcgcttggtttaatgacggcttgtttcttttctgtggctgcgtgaaagccttgaggggctccgggagggccctttgtgcggggggagcggctcggggggtgcgtgcgtgtgtgtgtgcgtggggagcgccgcgtgcggctccgcgctgcccggcggctgtgagcgctgcgggcgcggcgcggggctttgtgcgctccgcagtgtgcgcgaggggagcgcggccgggggcggtgccccgcggtgcggggggggctgcgaggggaacaaaggctgcgtgcggggtgtgtgcgtgggggggtgagcagggggtgtgggcgcgtcggtcgggctgcaaccccccctgcacccccctccccgagttgctgagcacggcccggcttcgggtgcggggctccgtacggggcgtggcgcggggctcgccgtgccgggcggggggtggcggcaggtgggggtgccgggcggggcggggccgcctcgggccggggagggctcgggggaggggcgcggcggcccccggagcgccggcggctgtcgaggcgcggcgagccgcagccattgccttttatggtaatcgtgcgagagggcgcagggacttcctttgtcccaaatctgtgcggagccgaaatctgggaggcgccgccgcaccccctctagcgggcgcggggcgaagcggtgcggcgccggcaggaaggaaatgggcggggagggccttcgtgcgtcgccgcgccgccgtccccttctccctctccagcctcggggctgtccgcggggggacggctgccttcgggggggacggggcagggcggggttcggcttctggcgtgtgaccggcggctctagagcctctgctaaccatgttcatgccttcttctttttcctacagctcctgggcaacgtgctggttattgtgctgtctcatcattttggcaaagaattcgggattcgaaccggtgccgccaccatgaagttgcctgttaggctgttggtgctgatgttctggattcctgcttccagcagtgacgtgcagatgatccagagccccagcagcctgagcgcctcgctgggggacatcgtgaccatgacctgccaggcctcccagggcaccagcatcaacctcaactggttccagcagaagcccggcaaggcccccaagctcctcatctacggggccagcaacctggaggacggcgtgccctcccgcttcagcggctcccgctacggcacggacttcacgctgaccatctcctccctggaggacgaggacatggccacctacttctgcctgcagcacacctacctgcccttcaccttcggcagcgggaccaagctggagatcaagggtggtggtggatccggtggtggtggatccggtggtggtggatccggtggtggtggatccggtggtggtggatccggtggtggtggatccggtggtggtggatccggtggtggtggatcccaggtgcagctgcagcagagcgacgccgagctggtgaaacctggggccagcgtcaagatcagctgcaaggcctccggctacaccttcaccgaccgcaccatccactgggtgaagcagcggcccgagcaggggctggagtggatcgggtacatctaccccggggacggctccaccaagtacaacgagaacttcaagggcaaagccaccctgacggccgacaagtccagcagcaccgcctacatgcagctgaacagcctgaccagcgaggacagcgccgtgtacttctgcgcccggcggggggctatggactactggggccagggcacctccgtgaccgtgtcctcctacccatacgatgttccagattacgcttagtaactcgaggacggggtgaactacgcctgaggatccgatctttttccctctgccaaaaattatggggacatcatgaagccccttgagcatctgacttctggctaataaaggaaatttattttcattgcaatagtgtgttggaattttttgtgtctctcactcggcctaggtagataagtagcatggcgggttaatcattaactacaaggaacccctagtgatggagttggccactccctctctgcgcgctcgctcgctcactgaggccgggcgaccaaaggtcgcccgacgcccgggctttgcccgggcggcctcagtgagcgagcgagcgcgcag

SEQ ID NO: 2297 - DNA, 3537 bp, Artificial Sequence
  source: /note="Description of Artificial Sequence: Synthetic polynucleotide"
ctgcgcgctcgctcgctcactgaggccgcccgggcaaagcccgggcgtcgggcgacctttggtcgcccggcctcagtgagcgagcgagcgcgcagagagggagtggccaactccatcactaggggttccttgtagttaatgattaacccgccatgctacttatctaccagggtaatggggatcctctagaactatagctagtcgacataacgcgtgatctaacatatcctggtgtggagtagcggacgctgctatgacagaggctcgggggcctgagctggctctgtgagctggggaggaggcagacagccaggccttgtctgcaagcagacctggcagcattgggctggccgccccccagggcctcctcttcatgcccagtgaatgactcaccttggcacagacacaatgttcggggtgggcacagtgcctgcttcccgccgcaccccagcccccctcaaatgccttccgagaagcccattgagcagggggcttgcattgcaccccagcctgacagcctggcatcttgggataaaagcagcacagccccctaggggctgcccttgctgtgtggcgccaccggcggtggagaacaaggctctattcagcctgtgcccaggaaaggggatcaggggatgcccaggcatggacagtgggtggcagggggggagaggagggctgtctgcttcccagaagtccaaggacacaaatgggtgaggggagagctctccccatagctgggctgcggcccaaccccaccccctcaggctatgccagggggtgttgccaggggcacccgggcatcgccagtctagcccactccttcataaagccctcgcatcccaggagcgagcagagccagagcaggttggagaggagacgcatcacctccgctgctcgcggggatcctctagaagcttcgtttagtgaaccgtcagatcgcctggagacgccatccacgctgttttgacctccatagaagacaccgggaccgatccagcctccgcggattcgaatcccggccgggaacggtgcattggaacgcggattccccgtgccaagagtgacgtaagtaccgcctatagagtctataggcccacaaaaaatgctttcttcttttaatatacttttttgtttatcttatttctaatactttccctaatctctttctttcagggcaataatgatacaatgtatcatgcctctttgcaccattctaaagaataacagtgataatttctgggttaaggcaatagcaatatttctgcatataaatatttctgcatataaattgtaactgatgtaagaggtttcatattgctaatagcagctacaatccagctaccattctgcttttattttatggttgggataaggctggattattctgagtccaagctaggcccttttgctaatcatgttcatacctcttatcttcctcccacagctcctgggcaacgtgctggtctgtgtgctggcccatcactttggcaaagaattgggattcgaaccggtgccgccaccatgaacttcgggctcagcttgattttccttgtccttgttttaaaaggtgtccagtgtcaggtgcagctgcagcagagcgacgccgagctggtgaaacctggggccagcgtcaagatcagctgcaaggcctccggctacaccttcaccgaccgcaccatccactgggtgaagcagcggcccgagcaggggctggagtggatcgggtacatctaccccggggacggctccaccaagtacaacgagaacttcaagggcaaagccaccctgacggccgacaagtccagcagcaccgcctacatgcagctgaacagcctgaccagcgaggacagcgccgtgtacttctgcgcccggcggggggctatggactactggggccagggcacctccgtgaccgtgtcctccgccaaaacgacacccccatctgtctatccactggcccctggatctgctgcccaaactaactccatggtgaccctgggatgcctggtcaagggctatttccctgagccagtgacagtgacctggaactctggatccctgtccagcggtgtgcacaccttcccagctgtcctgcagtctgacctctacactctgagcagctcagtgactgtcccctccagcacctggcccagcgagaccgtcacctgcaacgttgcccacccggccagcagcaccaaggtggacaagaaaattgtgcccagggattgtggtgagctcaaaaccccacttggtgacacaactcacacatgcccacggtgcccagagcccaaatcttgtgacacacctcccccgtgcccacggtgcccagagcccaaatcttgtgacacaactcacacatgcccacggtgcccagagcccaaatcttgtgacacacctcccccgtgcccaaggtgcccagcacctgaactcagaaagaggcgagagggcagaggaagtcttctaacatgcggtgacgtggaggagaatcccggccctatgaagttgcctgttaggctgttggtgctgatgttctggattcctgcttccagcagtgacgtgcagatgatccagagccccagcagcctgagcgcctcgctgggggacatcgtgaccatgacctgccaggcctcccagggcaccagcatcaacctcaactggttccagcagaagcccggcaaggcccccaagctcctcatctacggggccagcaacctggaggacggcgtgccctcccgcttcagcggctcccgctacggcacggacttcacgctgaccatctcctccctggaggacgaggacatggccacctacttctgcctgcagcacacctacctgcccttcaccttcggcagcgggaccaagctggagatcaagcgggctgatgctgcaccaactgtatccatcttcccaccatccagtgagcagttaacatctggaggtgcctcagtcgtgtgcttcttgaacaacttctaccccaaagacatcaatgtcaagtggaagattgatggcagtgaacgacaaaatggcgtcctgaacagttggactgatcaggacagcaaagacagcacctacagcatgagcagcaccctcacgttgaccaaggacgagtatgaacgacataacagctatacctgtgaggccactcacaagacatcaacttcacccattgtcaagagcttcaacaggaatgagtgttagtaactcgaggacggggtgaactacgcctgaggatccgatctttttccctctgccaaaaattatggggacatcatgaagccccttgagcatctgacttctggctaataaaggaaatttattttcattgcaatagtgtgttggaattttttgtgtctctcactcggcctaggtagataagtagcatggcgggttaatcattaactacaaggaacccctagtgatggagttggccactccctctctgcgcgctcgctcgctcactgaggccgggcgaccaaaggtcgcccgacgcccgggctttgcccgggcggcctcagtgagcgagcgagcgcgcag

SEQ ID NO: 2298 - DNA, 3339 bp, Artificial Sequence
  source: /note="Description of Artificial Sequence: Synthetic polynucleotide"
ctgcgcgctcgctcgctcactgaggccgcccgggcaaagcccgggcgtcgggcgacctttggtcgcccggcctcagtgagcgagcgagcgcgcagagagggagtggccaactccatcactaggggttccttgtagttaatgattaacccgccatgctacttatctaccagggtaatggggatcctctagaactatagctagtcgacataacgcgtgatctaacatatcctggtgtggagtagcggacgctgctatgacagaggctcgggggcctgagctggctctgtgagctggggaggaggcagacagccaggccttgtctgcaagcagacctggcagcattgggctggccgccccccagggcctcctcttcatgcccagtgaatgactcaccttggcacagacacaatgttcggggtgggcacagtgcctgcttcccgccgcaccccagcccccctcaaatgccttccgagaagcccattgagcagggggcttgcattgcaccccagcctgacagcctggcatcttgggataaaagcagcacagccccctaggggctgcccttgctgtgtggcgccaccggcggtggagaacaaggctctattcagcctgtgcccaggaaaggggatcaggggatgcccaggcatggacagtgggtggcagggggggagaggagggctgtctgcttcccagaagtccaaggacacaaatgggtgaggggagagctctccccatagctgggctgcggcccaaccccaccccctcaggctatgccagggggtgttgccaggggcacccgggcatcgccagtctagcccactccttcataaagccctcgcatcccaggagcgagcagagccagagcaggttggagaggagacgcatcacctccgctgctcgcggggatcctctagaagcttcgtttagtgaaccgtcagatcgcctggagacgccatccacgctgttttgacctccatagaagacaccgggaccgatccagcctccgcggattcgaatcccggccgggaacggtgcattggaacgcggattccccgtgccaagagtgacgtaagtaccgcctatagagtctataggcccacaaaaaatgctttcttcttttaatatacttttttgtttatcttatttctaatactttccctaatctctttctttcagggcaataatgatacaatgtatcatgcctctttgcaccattctaaagaataacagtgataatttctgggttaaggcaatagcaatatttctgcatataaatatttctgcatataaattgtaactgatgtaagaggtttcatattgctaatagcagctacaatccagctaccattctgcttttattttatggttgggataaggctggattattctgagtccaagctaggcccttttgctaatcatgttcatacctcttatcttcctcccacagctcctgggcaacgtgctggtctgtgtgctggcccatcactttggcaaagaattgggattcgaaccggtgccgccaccatgaacttcgggctcagcttgattttccttgtccttgttttaaaaggtgtccagtgtcaggtgcagctgcagcagagcgacgccgagctggtgaaacctggggccagcgtcaagatcagctgcaaggcctccggctacaccttcaccgaccgcaccatccactgggtgaagcagcggcccgagcaggggctggagtggatcgggtacatctaccccggggacggctccaccaagtacaacgagaacttcaagggcaaagccaccctgacggccgacaagtccagcagcaccgcctacatgcagctgaacagcctgaccagcgaggacagcgccgtgtacttctgcgcccggcggggggctatggactactggggccagggcacctccgtgaccgtgtcctccgccaaaacgacacccccatctgtctatccactggcccctggatctgctgcccaaactaactccatggtgaccctgggatgcctggtcaagggctatttccctgagccagtgacagtgacctggaactctggatccctgtccagcggtgtgcacaccttcccagctgtcctgcagtctgacctctacactctgagcagctcagtgactgtcccctccagcacctggcccagcgagaccgtcacctgcaacgttgcccacccggccagcagcaccaaggtggacaagaaaattgtgcccagggattgtggtagaaagaggcgagagggcagaggaagtcttctaacatgcggtgacgtggaggagaatcccggccctatgaagttgcctgttaggctgttggtgctgatgttctggattcctgcttccagcagtgacgtgcagatgatccagagccccagcagcctgagcgcctcgctgggggacatcgtgaccatgacctgccaggcctcccagggcaccagcatcaacctcaactggttccagcagaagcccggcaaggcccccaagctcctcatctacggggccagcaacctggaggacggcgtgccctcccgcttcagcggctcccgctacggcacggacttcacgctgaccatctcctccctggaggacgaggacatggccacctacttctgcctgcagcacacctacctgcccttcaccttcggcagcgggaccaagctggagatcaagcgggctgatgctgcaccaactgtatccatcttcccaccatccagtgagcagttaacatctggaggtgcctcagtcgtgtgcttcttgaacaacttctaccccaaagacatcaatgtcaagtggaagattgatggcagtgaacgacaaaatggcgtcctgaacagttggactgatcaggacagcaaagacagcacctacagcatgagcagcaccctcacgttgaccaaggacgagtatgaacgacataacagctatacctgtgaggccactcacaagacatcaacttcacccattgtcaagagcttcaacaggaatgagtgttagtaactcgaggacggggtgaactacgcctgaggatccgatctttttccctctgccaaaaattatggggacatcatgaagccccttgagcatctgacttctggctaataaaggaaatttattttcattgcaatagtgtgttggaattttttgtgtctctcactcggcctaggtagataagtagcatggcgggttaatcattaactacaaggaacccctagtgatggagttggccactccctctctgcgcgctcgctcgctcactgaggccgggcgaccaaaggtcgcccgacgcccgggctttgcccgggcggcctcagtgagcgagcgagcgcgcag

SEQ ID NO: 2299 - DNA, 3362 bp, Artificial Sequence
  source: /note="Description of Artificial Sequence: Synthetic polynucleotide"
ctgcgcgctcgctcgctcactgaggccgcccgggcaaagcccgggcgtcgggcgacctttggtcgcccggcctcagtgagcgagcgagcgcgcagagagggagtggccaactccatcactaggggttccttgtagttaatgattaacccgccatgctacttatctaccagggtaatggggatcctctagaactatagctagtcgacataacgcgtgatctaacatatcctggtgtggagtagcggacgctgctatgacagaggctcgggggcctgagctggctctgtgagctggggaggaggcagacagccaggccttgtctgcaagcagacctggcagcattgggctggccgccccccagggcctcctcttcatgcccagtgaatgactcaccttggcacagacacaatgttcggggtgggcacagtgcctgcttcccgccgcaccccagcccccctcaaatgccttccgagaagcccattgagcagggggcttgcattgcaccccagcctgacagcctggcatcttgggataaaagcagcacagccccctaggggctgcccttgctgtgtggcgccaccggcggtggagaacaaggctctattcagcctgtgcccaggaaaggggatcaggggatgcccaggcatggacagtgggtggcagggggggagaggagggctgtctgcttcccagaagtccaaggacacaaatgggtgaggggagagctctccccatagctgggctgcggcccaaccccaccccctcaggctatgccagggggtgttgccaggggcacccgggcatcgccagtctagcccactccttcataaagccctcgcatcccaggagcgagcagagccagagcaggttggagaggagacgcatcacctccgctgctcgcggggatcctctagaagcttcgtttagtgaaccgtcagatcgcctggagacgccatccacgctgttttgacctccatagaagacaccgggaccgatccagcctccgcggattcgaatcccggccgggaacggtgcattggaacgcggattccccgtgccaagagtgacgtaagtaccgcctatagagtctataggcccacaaaaaatgctttcttcttttaatatacttttttgtttatcttatttctaatactttccctaatctctttctttcagggcaataatgatacaatgtatcatgcctctttgcaccattctaaagaataacagtgataatttctgggttaaggcaatagcaatatttctgcatataaatatttctgcatataaattgtaactgatgtaagaggtttcatattgctaatagcagctacaatccagctaccattctgcttttattttatggttgggataaggctggattattctgagtccaagctaggcccttttgctaatcatgttcatacctcttatcttcctcccacagctcctgggcaacgtgctggtctgtgtgctggcccatcactttggcaaagaattgggattcgaaccggtgccgccaccatgaagttgcctgttaggctgttggtgctgatgttctggattcctgcttccagcagtgacgtgcagatgatccagagccccagcagcctgagcgcctcgctgggggacatcgtgaccatgacctgccaggcctcccagggcaccagcatcaacctcaactggttccagcagaagcccggcaaggcccccaagctcctcatctacggggccagcaacctggaggacggcgtgccctcccgcttcagcggctcccgctacggcacggacttcacgctgaccatctcctccctggaggacgaggacatggccacctacttctgcctgcagcacacctacctgcccttcaccttcggcagcgggaccaagctggagatcaagcgggctgatgctgcaccaactgtatccatcttcccaccatccagtgagcagttaacatctggaggtgcctcagtcgtgtgcttcttgaacaacttctaccccaaagacatcaatgtcaagtggaagattgatggcagtgaacgacaaaatggcgtcctgaacagttggactgatcaggacagcaaagacagcacctacagcatgagcagcaccctcacgttgaccaaggacgagtatgaacgacataacagctatacctgtgaggccactcacaagacatcaacttcacccattgtcaagagcttcaacaggaatgagtgtgagggcagaggaagtcttctaacatgcggtgacgtggaggagaatcccggccctatgaacttcgggctcagcttgattttccttgtccttgttttaaaaggtgtccagtgtcaggtgcagctgcagcagagcgacgccgagctggtgaaacctggggccagcgtcaagatcagctgcaaggcctccggctacaccttcaccgaccgcaccatccactgggtgaagcagcggcccgagcaggggctggagtggatcgggtacatctaccccggggacggctccaccaagtacaacgagaacttcaagggcaaagccaccctgacggccgacaagtccagcagcaccgcctacatgcagctgaacagcctgaccagcgaggacagcgccgtgtacttctgcgcccggcggggggctatggactactggggccagggcacctccgtgaccgtgtcctccgccaaaacgacacccccatctgtctatccactggcccctggatctgctgcccaaactaactccatggtgaccctgggatgcctggtcaagggctatttccctgagccagtgacagtgacctggaactctggatccctgtccagcggtgtgcacaccttcccagctgtcctgcagtctgacctctacactctgagcagctcagtgactgtcccctccagcacctggcccagcgagaccgtcacctgcaacgttgcccacccggccagcagcaccaaggtggacaagaaaattgtgcccagggattgtggttaggcaattgaaggcgaattgttaattaagaattcactcctcacgaggacggggtgaactacgcctgaggatccgatctttttccctctgccaaaaattatggggacatcatgaagccccttgagcatctgacttctggctaataaaggaaatttattttcattgcaatagtgtgttggaattttttgtgtctctcactcggcctaggtagataagtagcatggcgggttaatcattaactacaaggaacccctagtgatggagttggccactccctctctgcgcgctcgctcgctcactgaggccgggcgaccaaaggtcgcccgacgcccgggctttgcccgggcggcctcagtgagcgagcgagcgcgcag

SEQ ID NO: 2300 - DNA, 3321 bp, Artificial Sequence
  source: /note="Description of Artificial Sequence: Synthetic polynucleotide"
ctgcgcgctcgctcgctcactgaggccgcccgggcaaagcccgggcgtcgggcgacctttggtcgcccggcctcagtgagcgagcgagcgcgcagagagggagtggccaactccatcactaggggttccttgtagttaatgattaacccgccatgctacttatctaccagggtaatggggatcctctagaactatagctagtcgacataacgcgtgatctaacatatcctggtgtggagtagcggacgctgctatgacagaggctcgggggcctgagctggctctgtgagctggggaggaggcagacagccaggccttgtctgcaagcagacctggcagcattgggctggccgccccccagggcctcctcttcatgcccagtgaatgactcaccttggcacagacacaatgttcggggtgggcacagtgcctgcttcccgccgcaccccagcccccctcaaatgccttccgagaagcccattgagcagggggcttgcattgcaccccagcctgacagcctggcatcttgggataaaagcagcacagccccctaggggctgcccttgctgtgtggcgccaccggcggtggagaacaaggctctattcagcctgtgcccaggaaaggggatcaggggatgcccaggcatggacagtgggtggcagggggggagaggagggctgtctgcttcccagaagtccaaggacacaaatgggtgaggggagagctctccccatagctgggctgcggcccaaccccaccccctcaggctatgccagggggtgttgccaggggcacccgggcatcgccagtctagcccactccttcataaagccctcgcatcccaggagcgagcagagccagagcaggttggagaggagacgcatcacctccgctgctcgcggggatcctctagaagcttcgtttagtgaaccgtcagatcgcctggagacgccatccacgctgttttgacctccatagaagacaccgggaccgatccagcctccgcggattcgaatcccggccgggaacggtgcattggaacgcggattccccgtgccaagagtgacgtaagtaccgcctatagagtctataggcccacaaaaaatgctttcttcttttaatatacttttttgtttatcttatttctaatactttccctaatctctttctttcagggcaataatgatacaatgtatcatgcctctttgcaccattctaaagaataacagtgataatttctgggttaaggcaatagcaatatttctgcatataaatatttctgcatataaattgtaactgatgtaagaggtttcatattgctaatagcagctacaatccagctaccattctgcttttattttatggttgggataaggctggattattctgagtccaagctaggcccttttgctaatcatgttcatacctcttatcttcctcccacagctcctgggcaacgtgctggtctgtgtgctggcccatcactttggcaaagaattgggattcgaaccggtgccgccaccatgaacttcgggctcagcttgattttccttgtccttgttttaaaaggtgtccagtgtcaggtgcagctgcagcagagcgacgccgagctggtgaaacctggggccagcgtcaagatcagctgcaaggcctccggctacaccttcaccgaccgcaccatccactgggtgaagcagcggcccgagcaggggctggagtggatcgggtacatctaccccggggacggctccaccaagtacaacgagaacttcaagggcaaagccaccctgacggccgacaagtccagcagcaccgcctacatgcagctgaacagcctgaccagcgaggacagcgccgtgtacttctgcgcccggcggggggctatggactactggggccagggcacctccgtgaccgtgtcctccgccaaaacgacacccccatctgtctatccactggcccctggatctgctgcccaaactaactccatggtgaccctgggatgcctggtcaagggctatttccctgagccagtgacagtgacctggaactctggatccctgtccagcggtgtgcacaccttcccagctgtcctgcagtctgacctctacactctgagcagctcagtgactgtcccctccagcacctggcccagcgagaccgtcacctgcaacgttgcccacccggccagcagcaccaaggtggacaagaaaattagaaagaggcgagagggcagaggaagtcttctaacatgcggtgacgtggaggagaatcccggccctatgaagttgcctgttaggctgttggtgctgatgttctggattcctgcttccagcagtgacgtgcagatgatccagagccccagcagcctgagcgcctcgctgggggacatcgtgaccatgacctgccaggcctcccagggcaccagcatcaacctcaactggttccagcagaagcccggcaaggcccccaagctcctcatctacggggccagcaacctggaggacggcgtgccctcccgcttcagcggctcccgctacggcacggacttcacgctgaccatctcctccctggaggacgaggacatggccacctacttctgcctgcagcacacctacctgcccttcaccttcggcagcgggaccaagctggagatcaagcgggctgatgctgcaccaactgtatccatcttcccaccatccagtgagcagttaacatctggaggtgcctcagtcgtgtgcttcttgaacaacttctaccccaaagacatcaatgtcaagtggaagattgatggcagtgaacgacaaaatggcgtcctgaacagttggactgatcaggacagcaaagacagcacctacagcatgagcagcaccctcacgttgaccaaggacgagtatgaacgacataacagctatacctgtgaggccactcacaagacatcaacttcacccattgtcaagagcttcaacaggaatgagtgttagtaactcgaggacggggtgaactacgcctgaggatccgatctttttccctctgccaaaaattatggggacatcatgaagccccttgagcatctgacttctggctaataaaggaaatttattttcattgcaatagtgtgttggaattttttgtgtctctcactcggcctaggtagataagtagcatggcgggttaatcattaactacaaggaacccctagtgatggagttggccactccctctctgcgcgctcgctcgctcactgaggccgggcgaccaaaggtcgcccgacgcccgggctttgcccgggcggcctcagtgagcgagcgagcgcgcag

SEQ ID NO: 2301 - DNA, 2628 bp, Artificial Sequence
  source: /note="Description of Artificial Sequence: Synthetic polynucleotide"
ctgcgcgctcgctcgctcactgaggccgcccgggcaaagcccgggcgtcgggcgacctttggtcgcccggcctcagtgagcgagcgagcgcgcagagagggagtggccaactccatcactaggggttccttgtagttaatgattaacccgccatgctacttatctaccagggtaatggggatcctctagaactatagctagtcgacataacgcgtgatctaacatatcctggtgtggagtagcggacgctgctatgacagaggctcgggggcctgagctggctctgtgagctggggaggaggcagacagccaggccttgtctgcaagcagacctggcagcattgggctggccgccccccagggcctcctcttcatgcccagtgaatgactcaccttggcacagacacaatgttcggggtgggcacagtgcctgcttcccgccgcaccccagcccccctcaaatgccttccgagaagcccattgagcagggggcttgcattgcaccccagcctgacagcctggcatcttgggataaaagcagcacagccccctaggggctgcccttgctgtgtggcgccaccggcggtggagaacaaggctctattcagcctgtgcccaggaaaggggatcaggggatgcccaggcatggacagtgggtggcagggggggagaggagggctgtctgcttcccagaagtccaaggacacaaatgggtgaggggagagctctccccatagctgggctgcggcccaaccccaccccctcaggctatgccagggggtgttgccaggggcacccgggcatcgccagtctagcccactccttcataaagccctcgcatcccaggagcgagcagagccagagcaggttggagaggagacgcatcacctccgctgctcgcggggatcctctagaagcttcgtttagtgaaccgtcagatcgcctggagacgccatccacgctgttttgacctccatagaagacaccgggaccgatccagcctccgcggattcgaatcccggccgggaacggtgcattggaacgcggattccccgtgccaagagtgacgtaagtaccgcctatagagtctataggcccacaaaaaatgctttcttcttttaatatacttttttgtttatcttatttctaatactttccctaatctctttctttcagggcaataatgatacaatgtatcatgcctctttgcaccattctaaagaataacagtgataatttctgggttaaggcaatagcaatatttctgcatataaatatttctgcatataaattgtaactgatgtaagaggtttcatattgctaatagcagctacaatccagctaccattctgcttttattttatggttgggataaggctggattattctgagtccaagctaggcccttttgctaatcatgttcatacctcttatcttcctcccacagctcctgggcaacgtgctggtctgtgtgctggcccatcactttggcaaagaattgggattcgaaccggtgccgccaccatgaagttgcctgttaggctgttggtgctgatgttctggattcctgcttccagcagtgacgtgcagatgatccagagccccagcagcctgagcgcctcgctgggggacatcgtgaccatgacctgccaggcctcccagggcaccagcatcaacctcaactggttccagcagaagcccggcaaggcccccaagctcctcatctacggggccagcaacctggaggacggcgtgccctcccgcttcagcggctcccgctacggcacggacttcacgctgaccatctcctccctggaggacgaggacatggccacctacttctgcctgcagcacacctacctgcccttcaccttcggcagcgggaccaagctggagatcaagggtggtggtggatcccaggtgcagctgcagcagagcgacgccgagctggtgaaacctggggccagcgtcaagatcagctgcaaggcctccggctacaccttcaccgaccgcaccatccactgggtgaagcagcggcccgagcaggggctggagtggatcgggtacatctaccccggggacggctccaccaagtacaacgagaacttcaagggcaaagccaccctgacggccgacaagtccagcagcaccgcctacatgcagctgaacagcctgaccagcgaggacagcgccgtgtacttctgcgcccggcggggggctatggactactggggccagggcacctccgtgaccgtgtcctcctacccatacgatgttccagattacgcttagtaactcgaggacggggtgaactacgcctgaggatccgatctttttccctctgccaaaaattatggggacatcatgaagccccttgagcatctgacttctggctaataaaggaaatttattttcattgcaatagtgtgttggaattttttgtgtctctcactcggcctaggtagataagtagcatggcgggttaatcattaactacaaggaacccctagtgatggagttggccactccctctctgcgcgctcgctcgctcactgaggccgggcgaccaaaggtcgcccgacgcccgggctttgcccgggcggcctcagtgagcgagcgagcgcgcag

SEQ ID NO: 2302 - DNA, 2658 bp, Artificial Sequence
  source: /note="Description of Artificial Sequence: Synthetic polynucleotide"
ctgcgcgctcgctcgctcactgaggccgcccgggcaaagcccgggcgtcgggcgacctttggtcgcccggcctcagtgagcgagcgagcgcgcagagagggagtggccaactccatcactaggggttccttgtagttaatgattaacccgccatgctacttatctaccagggtaatggggatcctctagaactatagctagtcgacataacgcgtgatctaacatatcctggtgtggagtagcggacgctgctatgacagaggctcgggggcctgagctggctctgtgagctggggaggaggcagacagccaggccttgtctgcaagcagacctggcagcattgggctggccgccccccagggcctcctcttcatgcccagtgaatgactcaccttggcacagacacaatgttcggggtgggcacagtgcctgcttcccgccgcaccccagcccccctcaaatgccttccgagaagcccattgagcagggggcttgcattgcaccccagcctgacagcctggcatcttgggataaaagcagcacagccccctaggggctgcccttgctgtgtggcgccaccggcggtggagaacaaggctctattcagcctgtgcccaggaaaggggatcaggggatgcccaggcatggacagtgggtggcagggggggagaggagggctgtctgcttcccagaagtccaaggacacaaatgggtgaggggagagctctccccatagctgggctgcggcccaaccccaccccctcaggctatgccagggggtgttgccaggggcacccgggcatcgccagtctagcccactccttcataaagccctcgcatcccaggagcgagcagagccagagcaggttggagaggagacgcatcacctccgctgctcgcggggatcctctagaagcttcgtttagtgaaccgtcagatcgcctggagacgccatccacgctgttttgacctccatagaagacaccgggaccgatccagcctccgcggattcgaatcccggccgggaacggtgcattggaacgcggattccccgtgccaagagtgacgtaagtaccgcctatagagtctataggcccacaaaaaatgctttcttcttttaatatacttttttgtttatcttatttctaatactttccctaatctctttctttcagggcaataatgatacaatgtatcatgcctctttgcaccattctaaagaataacagtgataatttctgggttaaggcaatagcaatatttctgcatataaatatttctgcatataaattgtaactgatgtaagaggtttcatattgctaatagcagctacaatccagctaccattctgcttttattttatggttgggataaggctggattattctgagtccaagctaggcccttttgctaatcatgttcatacctcttatcttcctcccacagctcctgggcaacgtgctggtctgtgtgctggcccatcactttggcaaagaattgggattcgaaccggtgccgccaccatgaagttgcctgttaggctgttggtgctgatgttctggattcctgcttccagcagtgacgtgcagatgatccagagccccagcagcctgagcgcctcgctgggggacatcgtgaccatgacctgccaggcctcccagggcaccagcatcaacctcaactggttccagcagaagcccggcaaggcccccaagctcctcatctacggggccagcaacctggaggacggcgtgccctcccgcttcagcggctcccgctacggcacggacttcacgctgaccatctcctccctggaggacgaggacatggccacctacttctgcctgcagcacacctacctgcccttcaccttcggcagcgggaccaagctggagatcaagggtggtggtggatccggtggtggtggatccggtggtggtggatcccaggtgcagctgcagcagagcgacgccgagctggtgaaacctggggccagcgtcaagatcagctgcaaggcctccggctacaccttcaccgaccgcaccatccactgggtgaagcagcggcccgagcaggggctggagtggatcgggtacatctaccccggggacggctccaccaagtacaacgagaacttcaagggcaaagccaccctgacggccgacaagtccagcagcaccgcctacatgcagctgaacagcctgaccagcgaggacagcgccgtgtacttctgcgcccggcggggggctatggactactggggccagggcacctccgtgaccgtgtcctcctacccatacgatgttccagattacgcttagtaactcgaggacggggtgaactacgcctgaggatccgatctttttccctctgccaaaaattatggggacatcatgaagccccttgagcatctgacttctggctaataaaggaaatttattttcattgcaatagtgtgttggaattttttgtgtctctcactcggcctaggtagataagtagcatggcgggttaatcattaactacaaggaacccctagtgatggagttggccactccctctctgcgcgctcgctcgctcactgaggccgggcgaccaaaggtcgcccgacgcccgggctttgcccgggcggcctcagtgagcgagcgagcgcgcag

SEQ ID NO: 2303 - DNA, 2688 bp, Artificial Sequence
  source: /note="Description of Artificial Sequence: Synthetic polynucleotide"
ctgcgcgctcgctcgctcactgaggccgcccgggcaaagcccgggcgtcgggcgacctttggtcgcccggcctcagtgagcgagcgagcgcgcagagagggagtggccaactccatcactaggggttccttgtagttaatgattaacccgccatgctacttatctaccagggtaatggggatcctctagaactatagctagtcgacataacgcgtgatctaacatatcctggtgtggagtagcggacgctgctatgacagaggctcgggggcctgagctggctctgtgagctggggaggaggcagacagccaggccttgtctgcaagcagacctggcagcattgggctggccgccccccagggcctcctcttcatgcccagtgaatgactcaccttggcacagacacaatgttcggggtgggcacagtgcctgcttcccgccgcaccccagcccccctcaaatgccttccgagaagcccattgagcagggggcttgcattgcaccccagcctgacagcctggcatcttgggataaaagcagcacagccccctaggggctgcccttgctgtgtggcgccaccggcggtggagaacaaggctctattcagcctgtgcccaggaaaggggatcaggggatgcccaggcatggacagtgggtggcagggggggagaggagggctgtctgcttcccagaagtccaaggacacaaatgggtgaggggagagctctccccatagctgggctgcggcccaaccccaccccctcaggctatgccagggggtgttgccaggggcacccgggcatcgccagtctagcccactccttcataaagccctcgcatcccaggagcgagcagagccagagcaggttggagaggagacgcatcacctccgctgctcgcggggatcctctagaagcttcgtttagtgaaccgtcagatcgcctggagacgccatccacgctgttttgacctccatagaagacaccgggaccgatccagcctccgcggattcgaatcccggccgggaacggtgcattggaacgcggattccccgtgccaagagtgacgtaagtaccgcctatagagtctataggcccacaaaaaatgctttcttcttttaatatacttttttgtttatcttatttctaatactttccctaatctctttctttcagggcaataatgatacaatgtatcatgcctctttgcaccattctaaagaataacagtgataatttctgggttaaggcaatagcaatatttctgcatataaatatttctgcatataaattgtaactgatgtaagaggtttcatattgctaatagcagctacaatccagctaccattctgcttttattttatggttgggataaggctggattattctgagtccaagctaggcccttttgctaatcatgttcatacctcttatcttcctcccacagctcctgggcaacgtgctggtctgtgtgctggcccatcactttggcaaagaattgggattcgaaccggtgccgccaccatgaagttgcctgttaggctgttggtgctgatgttctggattcctgcttccagcagtgacgtgcagatgatccagagccccagcagcctgagcgcctcgctgggggacatcgtgaccatgacctgccaggcctcccagggcaccagcatcaacctcaactggttccagcagaagcccggcaaggcccccaagctcctcatctacggggccagcaacctggaggacggcgtgccctcccgcttcagcggctcccgctacggcacggacttcacgctgaccatctcctccctggaggacgaggacatggccacctacttctgcctgcagcacacctacctgcccttcaccttcggcagcgggaccaagctggagatcaagggtggtggtggatccggtggtggtggatccggtggtggtggatccggtggtggtggatccggtggtggtggatcccaggtgcagctgcagcagagcgacgccgagctggtgaaacctggggccagcgtcaagatcagctgcaaggcctccggctacaccttcaccgaccgcaccatccactgggtgaagcagcggcccgagcaggggctggagtggatcgggtacatctaccccggggacggctccaccaagtacaacgagaacttcaagggcaaagccaccctgacggccgacaagtccagcagcaccgcctacatgcagctgaacagcctgaccagcgaggacagcgccgtgtacttctgcgcccggcggggggctatggactactggggccagggcacctccgtgaccgtgtcctcctacccatacgatgttccagattacgcttagtaactcgaggacggggtgaactacgcctgaggatccgatctttttccctctgccaaaaattatggggacatcatgaagccccttgagcatctgacttctggctaataaaggaaatttattttcattgcaatagtgtgttggaattttttgtgtctctcactcggcctaggtagataagtagcatggcgggttaatcattaactacaaggaacccctagtgatggagttggccactccctctctgcgcgctcgctcgctcactgaggccgggcgaccaaaggtcgcccgacgcccgggctttgcccgggcggcctcagtgagcgagcgagcgcgcag

SEQ ID NO: 2304 - DNA, 2733 bp, Artificial Sequence
  source: /note="Description of Artificial Sequence: Synthetic polynucleotide"
ctgcgcgctcgctcgctcactgaggccgcccgggcaaagcccgggcgtcgggcgacctttggtcgcccggcctcagtgagcgagcgagcgcgcagagagggagtggccaactccatcactaggggttccttgtagttaatgattaacccgccatgctacttatctaccagggtaatggggatcctctagaactatagctagtcgacataacgcgtgatctaacatatcctggtgtggagtagcggacgctgctatgacagaggctcgggggcctgagctggctctgtgagctggggaggaggcagacagccaggccttgtctgcaagcagacctggcagcattgggctggccgccccccagggcctcctcttcatgcccagtgaatgactcaccttggcacagacacaatgttcggggtgggcacagtgcctgcttcccgccgcaccccagcccccctcaaatgccttccgagaagcccattgagcagggggcttgcattgcaccccagcctgacagcctggcatcttgggataaaagcagcacagccccctaggggctgcccttgctgtgtggcgccaccggcggtggagaacaaggctctattcagcctgtgcccaggaaaggggatcaggggatgcccaggcatggacagtgggtggcagggggggagaggagggctgtctgcttcccagaagtccaaggacacaaatgggtgaggggagagctctccccatagctgggctgcggcccaaccccaccccctcaggctatgccagggggtgttgccaggggcacccgggcatcgccagtctagcccactccttcataaagccctcgcatcccaggagcgagcagagccagagcaggttggagaggagacgcatcacctccgctgctcgcggggatcctctagaagcttcgtttagtgaaccgtcagatcgcctggagacgccatccacgctgttttgacctccatagaagacaccgggaccgatccagcctccgcggattcgaatcccggccgggaacggtgcattggaacgcggattccccgtgccaagagtgacgtaagtaccgcctatagagtctataggcccacaaaaaatgctttcttcttttaatatacttttttgtttatcttatttctaatactttccctaatctctttctttcagggcaataatgatacaatgtatcatgcctctttgcaccattctaaagaataacagtgataatttctgggttaaggcaatagcaatatttctgcatataaatatttctgcatataaattgtaactgatgtaagaggtttcatattgctaatagcagctacaatccagctaccattctgcttttattttatggttgggataaggctggattattctgagtccaagctaggcccttttgctaatcatgttcatacctcttatcttcctcccacagctcctgggcaacgtgctggtctgtgtgctggcccatcactttggcaaagaattgggattcgaaccggtgccgccaccatgaagttgcctgttaggctgttggtgctgatgttctggattcctgcttccagcagtgacgtgcagatgatccagagccccagcagcctgagcgcctcgctgggggacatcgtgaccatgacctgccaggcctcccagggcaccagcatcaacctcaactggttccagcagaagcccggcaaggcccccaagctcctcatctacggggccagcaacctggaggacggcgtgccctcccgcttcagcggctcccgctacggcacggacttcacgctgaccatctcctccctggaggacgaggacatggccacctacttctgcctgcagcacacctacctgcccttcaccttcggcagcgggaccaagctggagatcaagggtggtggtggatccggtggtggtggatccggtggtggtggatccggtggtggtggatccggtggtggtggatccggtggtggtggatccggtggtggtggatccggtggtggtggatcccaggtgcagctgcagcagagcgacgccgagctggtgaaacctggggccagcgtcaagatcagctgcaaggcctccggctacaccttcaccgaccgcaccatccactgggtgaagcagcggcccgagcaggggctggagtggatcgggtacatctaccccggggacggctccaccaagtacaacgagaacttcaagggcaaagccaccctgacggccgacaagtccagcagcaccgcctacatgcagctgaacagcctgaccagcgaggacagcgccgtgtacttctgcgcccggcggggggctatggactactggggccagggcacctccgtgaccgtgtcctcctacccatacgatgttccagattacgcttagtaactcgaggacggggtgaactacgcctgaggatccgatctttttccctctgccaaaaattatggggacatcatgaagccccttgagcatctgacttctggctaataaaggaaatttattttcattgcaatagtgtgttggaattttttgtgtctctcactcggcctaggtagataagtagcatggcgggttaatcattaactacaaggaacccctagtgatggagttggccactccctctctgcgcgctcgctcgctcactgaggccgggcgaccaaaggtcgcccgacgcccgggctttgcccgggcggcctcagtgagcgagcgagcgcgcag

SEQ ID NO: 2305 - DNA, 3395 bp, Artificial Sequence
  source: /note="Description of Artificial Sequence: Synthetic polynucleotide"
ctgcgcgctcgctcgctcactgaggccgcccgggcaaagcccgggcgtcgggcgacctttggtcgcccggcctcagtgagcgagcgagcgcgcagagagggagtggccaactccatcactaggggttccttgtagttaatgattaacccgccatgctacttatctaccagggtaatggggatcctctagaactatagctagtcgacataacgcgttagtatctgcagagggccctgcgtatgagtgcaagtgggttttaggaccaggatgaggcggggtgggggtgcctacctgacgaccgaccccgacccactggacaagcacccaacccccattccccaaattgcgcatcccctatcagagagggggaggggaaacaggatgcggcgaggcgcgtgcgcactgccagcttcagcaccgcggacagtgccttcgcccccgcctggcggcgcgcgccaccgccgcctcagcactgaaggcgcgctgacgtcactcgccggtcccccgcaaactccccttcccggccaccttggtcgcgtccgcgccgccgccggcccagccggaccgcaccacgcgaggcgcgagataggggggcacgggcgcgaccatctgcgctgcggcgccggcgactcagcgctgcctcagtctgcggtgggcagcggaggagtcgtgtcgtgcctgagagcgcagctgtgctcctgggcaccgcgcagtccgcccccgcggctcctggccagaccacccctaggaccccctgccccaagtcgcagccaagcttcgtttagtgaaccgtcagatcgcctggagacgccatccacgctgttttgacctccatagaagacaccgggaccgatccagcctccgcggattcgaatcccggccgggaacggtgcattggaacgcggattccccgtgccaagagtgacgtaagtaccgcctatagagtctataggcccacaaaaaatgctttcttcttttaatatacttttttgtttatcttatttctaatactttccctaatctctttctttcagggcaataatgatacaatgtatcatgcctctttgcaccattctaaagaataacagtgataatttctgggttaaggcaatagcaatatttctgcatataaatatttctgcatataaattgtaactgatgtaagaggtttcatattgctaatagcagctacaatccagctaccattctgcttttattttatggttgggataaggctggattattctgagtccaagctaggcccttttgctaatcatgttcatacctcttatcttcctcccacagctcctgggcaacgtgctggtctgtgtgctggcccatcactttggcaaagaattgggattcgaaccggtgccgccaccatgaacttcgggctcagcttgattttccttgtccttgttttaaaaggtgtccagtgtcaggtgcagctgcagcagagcgacgccgagctggtgaaacctggggccagcgtcaagatcagctgcaaggcctccggctacaccttcaccgaccgcaccatccactgggtgaagcagcggcccgagcaggggctggagtggatcgggtacatctaccccggggacggctccaccaagtacaacgagaacttcaagggcaaagccaccctgacggccgacaagtccagcagcaccgcctacatgcagctgaacagcctgaccagcgaggacagcgccgtgtacttctgcgcccggcggggggctatggactactggggccagggcacctccgtgaccgtgtcctccgccaaaacgacacccccatctgtctatccactggcccctggatctgctgcccaaactaactccatggtgaccctgggatgcctggtcaagggctatttccctgagccagtgacagtgacctggaactctggatccctgtccagcggtgtgcacaccttcccagctgtcctgcagtctgacctctacactctgagcagctcagtgactgtcccctccagcacctggcccagcgagaccgtcacctgcaacgttgcccacccggccagcagcaccaaggtggacaagaaaattgtgcccagggattgtggtgagctcaaaaccccacttggtgacacaactcacacatgcccacggtgcccagagcccaaatcttgtgacacacctcccccgtgcccacggtgcccagagcccaaatcttgtgacacaactcacacatgcccacggtgcccagagcccaaatcttgtgacacacctcccccgtgcccaaggtgcccagcacctgaactcagaaagaggcgagagggcagaggaagtcttctaacatgcggtgacgtggaggagaatcccggccctatgaagttgcctgttaggctgttggtgctgatgttctggattcctgcttccagcagtgacgtgcagatgatccagagccccagcagcctgagcgcctcgctgggggacatcgtgaccatgacctgccaggcctcccagggcaccagcatcaacctcaactggttccagcagaagcccggcaaggcccccaagctcctcatctacggggccagcaacctggaggacggcgtgccctcccgcttcagcggctcccgctacggcacggacttcacgctgaccatctcctccctggaggacgaggacatggccacctacttctgcctgcagcacacctacctgcccttcaccttcggcagcgggaccaagctggagatcaagcgggctgatgctgcaccaactgtatccatcttcccaccatccagtgagcagttaacatctggaggtgcctcagtcgtgtgcttcttgaacaacttctaccccaaagacatcaatgtcaagtggaagattgatggcagtgaacgacaaaatggcgtcctgaacagttggactgatcaggacagcaaagacagcacctacagcatgagcagcaccctcacgttgaccaaggacgagtatgaacgacataacagctatacctgtgaggccactcacaagacatcaacttcacccattgtcaagagcttcaacaggaatgagtgttagtaactcgaggacggggtgaactacgcctgaggatccgatctttttccctctgccaaaaattatggggacatcatgaagccccttgagcatctgacttctggctaataaaggaaatttattttcattgcaatagtgtgttggaattttttgtgtctctcactcggcctaggtagataagtagcatggcgggttaatcattaactacaaggaacccctagtgatggagttggccactccctctctgcgcgctcgctcgctcactgaggccgggcgaccaaaggtcgcccgacgcccgggctttgcccgggcggcctcagtgagcgagcgagcgcgcag

SEQ ID NO: 2306 - DNA, 3197 bp, Artificial Sequence
  source: /note="Description of Artificial Sequence: Synthetic polynucleotide"
ctgcgcgctcgctcgctcactgaggccgcccgggcaaagcccgggcgtcgggcgacctttggtcgcccggcctcagtgagcgagcgagcgcgcagagagggagtggccaactccatcactaggggttccttgtagttaatgattaacccgccatgctacttatctaccagggtaatggggatcctctagaactatagctagtcgacataacgcgttagtatctgcagagggccctgcgtatgagtgcaagtgggttttaggaccaggatgaggcggggtgggggtgcctacctgacgaccgaccccgacccactggacaagcacccaacccccattccccaaattgcgcatcccctatcagagagggggaggggaaacaggatgcggcgaggcgcgtgcgcactgccagcttcagcaccgcggacagtgccttcgcccccgcctggcggcgcgcgccaccgccgcctcagcactgaaggcgcgctgacgtcactcgccggtcccccgcaaactccccttcccggccaccttggtcgcgtccgcgccgccgccggcccagccggaccgcaccacgcgaggcgcgagataggggggcacgggcgcgaccatctgcgctgcggcgccggcgactcagcgctgcctcagtctgcggtgggcagcggaggagtcgtgtcgtgcctgagagcgcagctgtgctcctgggcaccgcgcagtccgcccccgcggctcctggccagaccacccctaggaccccctgccccaagtcgcagccaagcttcgtttagtgaaccgtcagatcgcctggagacgccatccacgctgttttgacctccatagaagacaccgggaccgatccagcctccgcggattcgaatcccggccgggaacggtgcattggaacgcggattccccgtgccaagagtgacgtaagtaccgcctatagagtctataggcccacaaaaaatgctttcttcttttaatatacttttttgtttatcttatttctaatactttccctaatctctttctttcagggcaataatgatacaatgtatcatgcctctttgcaccattctaaagaataacagtgataatttctgggttaaggcaatagcaatatttctgcatataaatatttctgcatataaattgtaactgatgtaagaggtttcatattgctaatagcagctacaatccagctaccattctgcttttattttatggttgggataaggctggattattctgagtccaagctaggcccttttgctaatcatgttcatacctcttatcttcctcccacagctcctgggcaacgtgctggtctgtgtgctggcccatcactttggcaaagaattgggattcgaaccggtgccgccaccatgaacttcgggctcagcttgattttccttgtccttgttttaaaaggtgtccagtgtcaggtgcagctgcagcagagcgacgccgagctggtgaaacctggggccagcgtcaagatcagctgcaaggcctccggctacaccttcaccgaccgcaccatccactgggtgaagcagcggcccgagcaggggctggagtggatcgggtacatctaccccggggacggctccaccaagtacaacgagaacttcaagggcaaagccaccctgacggccgacaagtccagcagcaccgcctacatgcagctgaacagcctgaccagcgaggacagcgccgtgtacttctgcgcccggcggggggctatggactactggggccagggcacctccgtgaccgtgtcctccgccaaaacgacacccccatctgtctatccactggcccctggatctgctgcccaaactaactccatggtgaccctgggatgcctggtcaagggctatttccctgagccagtgacagtgacctggaactctggatccctgtccagcggtgtgcacaccttcccagctgtcctgcagtctgacctctacactctgagcagctcagtgactgtcccctccagcacctggcccagcgagaccgtcacctgcaacgttgcccacccggccagcagcaccaaggtggacaagaaaattgtgcccagggattgtggtagaaagaggcgagagggcagaggaagtcttctaacatgcggtgacgtggaggagaatcccggccctatgaagttgcctgttaggctgttggtgctgatgttctggattcctgcttccagcagtgacgtgcagatgatccagagccccagcagcctgagcgcctcgctgggggacatcgtgaccatgacctgccaggcctcccagggcaccagcatcaacctcaactggttccagcagaagcccggcaaggcccccaagctcctcatctacggggccagcaacctggaggacggcgtgccctcccgcttcagcggctcccgctacggcacggacttcacgctgaccatctcctccctggaggacgaggacatggccacctacttctgcctgcagcacacctacctgcccttcaccttcggcagcgggaccaagctggagatcaagcgggctgatgctgcaccaactgtatccatcttcccaccatccagtgagcagttaacatctggaggtgcctcagtcgtgtgcttcttgaacaacttctaccccaaagacatcaatgtcaagtggaagattgatggcagtgaacgacaaaatggcgtcctgaacagttggactgatcaggacagcaaagacagcacctacagcatgagcagcaccctcacgttgaccaaggacgagtatgaacgacataacagctatacctgtgaggccactcacaagacatcaacttcacccattgtcaagagcttcaacaggaatgagtgttagtaactcgaggacggggtgaactacgcctgaggatccgatctttttccctctgccaaaaattatggggacatcatgaagccccttgagcatctgacttctggctaataaaggaaatttattttcattgcaatagtgtgttggaattttttgtgtctctcactcggcctaggtagataagtagcatggcgggttaatcattaactacaaggaacccctagtgatggagttggccactccctctctgcgcgctcgctcgctcactgaggccgggcgaccaaaggtcgcccgacgcccgggctttgcccgggcggcctcagtgagcgagcgagcgcgcag

SEQ ID NO: 2307 - DNA, 3220 bp, Artificial Sequence
  source: /note="Description of Artificial Sequence: Synthetic polynucleotide"
ctgcgcgctcgctcgctcactgaggccgcccgggcaaagcccgggcgtcgggcgacctttggtcgcccggcctcagtgagcgagcgagcgcgcagagagggagtggccaactccatcactaggggttccttgtagttaatgattaacccgccatgctacttatctaccagggtaatggggatcctctagaactatagctagtcgacataacgcgttagtatctgcagagggccctgcgtatgagtgcaagtgggttttaggaccaggatgaggcggggtgggggtgcctacctgacgaccgaccccgacccactggacaagcacccaacccccattccccaaattgcgcatcccctatcagagagggggaggggaaacaggatgcggcgaggcgcgtgcgcactgccagcttcagcaccgcggacagtgccttcgcccccgcctggcggcgcgcgccaccgccgcctcagcactgaaggcgcgctgacgtcactcgccggtcccccgcaaactccccttcccggccaccttggtcgcgtccgcgccgccgccggcccagccggaccgcaccacgcgaggcgcgagataggggggcacgggcgcgaccatctgcgctgcggcgccggcgactcagcgctgcctcagtctgcggtgggcagcggaggagtcgtgtcgtgcctgagagcgcagctgtgctcctgggcaccgcgcagtccgcccccgcggctcctggccagaccacccctaggaccccctgccccaagtcgcagccaagcttcgtttagtgaaccgtcagatcgcctggagacgccatccacgctgttttgacctccatagaagacaccgggaccgatccagcctccgcggattcgaatcccggccgggaacggtgcattggaacgcggattccccgtgccaagagtgacgtaagtaccgcctatagagtctataggcccacaaaaaatgctttcttcttttaatatacttttttgtttatcttatttctaatactttccctaatctctttctttcagggcaataatgatacaatgtatcatgcctctttgcaccattctaaagaataacagtgataatttctgggttaaggcaatagcaatatttctgcatataaatatttctgcatataaattgtaactgatgtaagaggtttcatattgctaatagcagctacaatccagctaccattctgcttttattttatggttgggataaggctggattattctgagtccaagctaggcccttttgctaatcatgttcatacctcttatcttcctcccacagctcctgggcaacgtgctggtctgtgtgctggcccatcactttggcaaagaattgggattcgaaccggtgccgccaccatgaagttgcctgttaggctgttggtgctgatgttctggattcctgcttccagcagtgacgtgcagatgatccagagccccagcagcctgagcgcctcgctgggggacatcgtgaccatgacctgccaggcctcccagggcaccagcatcaacctcaactggttccagcagaagcccggcaaggcccccaagctcctcatctacggggccagcaacctggaggacggcgtgccctcccgcttcagcggctcccgctacggcacggacttcacgctgaccatctcctccctggaggacgaggacatggccacctacttctgcctgcagcacacctacctgcccttcaccttcggcagcgggaccaagctggagatcaagcgggctgatgctgcaccaactgtatccatcttcccaccatccagtgagcagttaacatctggaggtgcctcagtcgtgtgcttcttgaacaacttctaccccaaagacatcaatgtcaagtggaagattgatggcagtgaacgacaaaatggcgtcctgaacagttggactgatcaggacagcaaagacagcacctacagcatgagcagcaccctcacgttgaccaaggacgagtatgaacgacataacagctatacctgtgaggccactcacaagacatcaacttcacccattgtcaagagcttcaacaggaatgagtgtgagggcagaggaagtcttctaacatgcggtgacgtggaggagaatcccggccctatgaacttcgggctcagcttgattttccttgtccttgttttaaaaggtgtccagtgtcaggtgcagctgcagcagagcgacgccgagctggtgaaacctggggccagcgtcaagatcagctgcaaggcctccggctacaccttcaccgaccgcaccatccactgggtgaagcagcggcccgagcaggggctggagtggatcgggtacatctaccccggggacggctccaccaagtacaacgagaacttcaagggcaaagccaccctgacggccgacaagtccagcagcaccgcctacatgcagctgaacagcctgaccagcgaggacagcgccgtgtacttctgcgcccggcggggggctatggactactggggccagggcacctccgtgaccgtgtcctccgccaaaacgacacccccatctgtctatccactggcccctggatctgctgcccaaactaactccatggtgaccctgggatgcctggtcaagggctatttccctgagccagtgacagtgacctggaactctggatccctgtccagcggtgtgcacaccttcccagctgtcctgcagtctgacctctacactctgagcagctcagtgactgtcccctccagcacctggcccagcgagaccgtcacctgcaacgttgcccacccggccagcagcaccaaggtggacaagaaaattgtgcccagggattgtggttaggcaattgaaggcgaattgttaattaagaattcactcctctcgaggacggggtgaactacgcctgaggatccgatctttttccctctgccaaaaattatggggacatcatgaagccccttgagcatctgacttctggctaataaaggaaatttattttcattgcaatagtgtgttggaattttttgtgtctctcactcggcctaggtagataagtagcatggcgggttaatcattaactacaaggaacccctagtgatggagttggccactccctctctgcgcgctcgctcgctcactgaggccgggcgaccaaaggtcgcccgacgcccgggctttgcccgggcggcctcagtgagcgagcgagcgcgcag

SEQ ID NO: 2308 - DNA, 3179 bp, Artificial Sequence
  source: /note="Description of Artificial Sequence: Synthetic polynucleotide"
ctgcgcgctcgctcgctcactgaggccgcccgggcaaagcccgggcgtcgggcgacctttggtcgcccggcctcagtgagcgagcgagcgcgcagagagggagtggccaactccatcactaggggttccttgtagttaatgattaacccgccatgctacttatctaccagggtaatggggatcctctagaactatagctagtcgacataacgcgttagtatctgcagagggccctgcgtatgagtgcaagtgggttttaggaccaggatgaggcggggtgggggtgcctacctgacgaccgaccccgacccactggacaagcacccaacccccattccccaaattgcgcatcccctatcagagagggggaggggaaacaggatgcggcgaggcgcgtgcgcactgccagcttcagcaccgcggacagtgccttcgcccccgcctggcggcgcgcgccaccgccgcctcagcactgaaggcgcgctgacgtcactcgccggtcccccgcaaactccccttcccggccaccttggtcgcgtccgcgccgccgccggcccagccggaccgcaccacgcgaggcgcgagataggggggcacgggcgcgaccatctgcgctgcggcgccggcgactcagcgctgcctcagtctgcggtgggcagcggaggagtcgtgtcgtgcctgagagcgcagctgtgctcctgggcaccgcgcagtccgcccccgcggctcctggccagaccacccctaggaccccctgccccaagtcgcagccaagcttcgtttagtgaaccgtcagatcgcctggagacgccatccacgctgttttgacctccatagaagacaccgggaccgatccagcctccgcggattcgaatcccggccgggaacggtgcattggaacgcggattccccgtgccaagagtgacgtaagtaccgcctatagagtctataggcccacaaaaaatgctttcttcttttaatatacttttttgtttatcttatttctaatactttccctaatctctttctttcagggcaataatgatacaatgtatcatgcctctttgcaccattctaaagaataacagtgataatttctgggttaaggcaatagcaatatttctgcatataaatatttctgcatataaattgtaactgatgtaagaggtttcatattgctaatagcagctacaatccagctaccattctgcttttattttatggttgggataaggctggattattctgagtccaagctaggcccttttgctaatcatgttcatacctcttatcttcctcccacagctcctgggcaacgtgctggtctgtgtgctggcccatcactttggcaaagaattgggattcgaaccggtgccgccaccatgaacttcgggctcagcttgattttccttgtccttgttttaaaaggtgtccagtgtcaggtgcagctgcagcagagcgacgccgagctggtgaaacctggggccagcgtcaagatcagctgcaaggcctccggctacaccttcaccgaccgcaccatccactgggtgaagcagcggcccgagcaggggctggagtggatcgggtacatctaccccggggacggctccaccaagtacaacgagaacttcaagggcaaagccaccctgacggccgacaagtccagcagcaccgcctacatgcagctgaacagcctgaccagcgaggacagcgccgtgtacttctgcgcccggcggggggctatggactactggggccagggcacctccgtgaccgtgtcctccgccaaaacgacacccccatctgtctatccactggcccctggatctgctgcccaaactaactccatggtgaccctgggatgcctggtcaagggctatttccctgagccagtgacagtgacctggaactctggatccctgtccagcggtgtgcacaccttcccagctgtcctgcagtctgacctctacactctgagcagctcagtgactgtcccctccagcacctggcccagcgagaccgtcacctgcaacgttgcccacccggccagcagcaccaaggtggacaagaaaattagaaagaggcgagagggcagaggaagtcttctaacatgcggtgacgtggaggagaatcccggccctatgaagttgcctgttaggctgttggtgctgatgttctggattcctgcttccagcagtgacgtgcagatgatccagagccccagcagcctgagcgcctcgctgggggacatcgtgaccatgacctgccaggcctcccagggcaccagcatcaacctcaactggttccagcagaagcccggcaaggcccccaagctcctcatctacggggccagcaacctggaggacggcgtgccctcccgcttcagcggctcccgctacggcacggacttcacgctgaccatctcctccctggaggacgaggacatggccacctacttctgcctgcagcacacctacctgcccttcaccttcggcagcgggaccaagctggagatcaagcgggctgatgctgcaccaactgtatccatcttcccaccatccagtgagcagttaacatctggaggtgcctcagtcgtgtgcttcttgaacaacttctaccccaaagacatcaatgtcaagtggaagattgatggcagtgaacgacaaaatggcgtcctgaacagttggactgatcaggacagcaaagacagcacctacagcatgagcagcaccctcacgttgaccaaggacgagtatgaacgacataacagctatacctgtgaggccactcacaagacatcaacttcacccattgtcaagagcttcaacaggaatgagtgttagtaactcgaggacggggtgaactacgcctgaggatccgatctttttccctctgccaaaaattatggggacatcatgaagccccttgagcatctgacttctggctaataaaggaaatttattttcattgcaatagtgtgttggaattttttgtgtctctcactcggcctaggtagataagtagcatggcgggttaatcattaactacaaggaacccctagtgatggagttggccactccctctctgcgcgctcgctcgctcactgaggccgggcgaccaaaggtcgcccgacgcccgggctttgcccgggcggcctcagtgagcgagcgagcgcgcag

SEQ ID NO: 2309 - DNA, 2486 bp, Artificial Sequence
  source: /note="Description of Artificial Sequence: Synthetic polynucleotide"
ctgcgcgctcgctcgctcactgaggccgcccgggcaaagcccgggcgtcgggcgacctttggtcgcccggcctcagtgagcgagcgagcgcgcagagagggagtggccaactccatcactaggggttccttgtagttaatgattaacccgccatgctacttatctaccagggtaatggggatcctctagaactatagctagtcgacataacgcgttagtatctgcagagggccctgcgtatgagtgcaagtgggttttaggaccaggatgaggcggggtgggggtgcctacctgacgaccgaccccgacccactggacaagcacccaacccccattccccaaattgcgcatcccctatcagagagggggaggggaaacaggatgcggcgaggcgcgtgcgcactgccagcttcagcaccgcggacagtgccttcgcccccgcctggcggcgcgcgccaccgccgcctcagcactgaaggcgcgctgacgtcactcgccggtcccccgcaaactccccttcccggccaccttggtcgcgtccgcgccgccgccggcccagccggaccgcaccacgcgaggcgcgagataggggggcacgggcgcgaccatctgcgctgcggcgccggcgactcagcgctgcctcagtctgcggtgggcagcggaggagtcgtgtcgtgcctgagagcgcagctgtgctcctgggcaccgcgcagtccgcccccgcggctcctggccagaccacccctaggaccccctgccccaagtcgcagccaagcttcgtttagtgaaccgtcagatcgcctggagacgccatccacgctgttttgacctccatagaagacaccgggaccgatccagcctccgcggattcgaatcccggccgggaacggtgcattggaacgcggattccccgtgccaagagtgacgtaagtaccgcctatagagtctataggcccacaaaaaatgctttcttcttttaatatacttttttgtttatcttatttctaatactttccctaatctctttctttcagggcaataatgatacaatgtatcatgcctctttgcaccattctaaagaataacagtgataatttctgggttaaggcaatagcaatatttctgcatataaatatttctgcatataaattgtaactgatgtaagaggtttcatattgctaatagcagctacaatccagctaccattctgcttttattttatggttgggataaggctggattattctgagtccaagctaggcccttttgctaatcatgttcatacctcttatcttcctcccacagctcctgggcaacgtgctggtctgtgtgctggcccatcactttggcaaagaattgggattcgaaccggtgccgccaccatgaagttgcctgttaggctgttggtgctgatgttctggattcctgcttccagcagtgacgtgcagatgatccagagccccagcagcctgagcgcctcgctgggggacatcgtgaccatgacctgccaggcctcccagggcaccagcatcaacctcaactggttccagcagaagcccggcaaggcccccaagctcctcatctacggggccagcaacctggaggacggcgtgccctcccgcttcagcggctcccgctacggcacggacttcacgctgaccatctcctccctggaggacgaggacatggccacctacttctgcctgcagcacacctacctgcccttcaccttcggcagcgggaccaagctggagatcaagggtggtggtggatcccaggtgcagctgcagcagagcgacgccgagctggtgaaacctggggccagcgtcaagatcagctgcaaggcctccggctacaccttcaccgaccgcaccatccactgggtgaagcagcggcccgagcaggggctggagtggatcgggtacatctaccccggggacggctccaccaagtacaacgagaacttcaagggcaaagccaccctgacggccgacaagtccagcagcaccgcctacatgcagctgaacagcctgaccagcgaggacagcgccgtgtacttctgcgcccggcggggggctatggactactggggccagggcacctccgtgaccgtgtcctcctacccatacgatgttccagattacgcttagtaactcgaggacggggtgaactacgcctgaggatccgatctttttccctctgccaaaaattatggggacatcatgaagccccttgagcatctgacttctggctaataaaggaaatttattttcattgcaatagtgtgttggaattttttgtgtctctcactcggcctaggtagataagtagcatggcgggttaatcattaactacaaggaacccctagtgatggagttggccactccctctctgcgcgctcgctcgctcactgaggccgggcgaccaaaggtcgcccgacgcccgggctttgcccgggcggcctcagtgagcgagcgagcgcgcag

SEQ ID NO: 2310 - DNA, 2516 bp, Artificial Sequence
  source: /note="Description of Artificial Sequence: Synthetic polynucleotide"
ctgcgcgctcgctcgctcactgaggccgcccgggcaaagcccgggcgtcgggcgacctttggtcgcccggcctcagtgagcgagcgagcgcgcagagagggagtggccaactccatcactaggggttccttgtagttaatgattaacccgccatgctacttatctaccagggtaatggggatcctctagaactatagctagtcgacataacgcgttagtatctgcagagggccctgcgtatgagtgcaagtgggttttaggaccaggatgaggcggggtgggggtgcctacctgacgaccgaccccgacccactggacaagcacccaacccccattccccaaattgcgcatcccctatcagagagggggaggggaaacaggatgcggcgaggcgcgtgcgcactgccagcttcagcaccgcggacagtgccttcgcccccgcctggcggcgcgcgccaccgccgcctcagcactgaaggcgcgctgacgtcactcgccggtcccccgcaaactccccttcccggccaccttggtcgcgtccgcgccgccgccggcccagccggaccgcaccacgcgaggcgcgagataggggggcacgggcgcgaccatctgcgctgcggcgccggcgactcagcgctgcctcagtctgcggtgggcagcggaggagtcgtgtcgtgcctgagagcgcagctgtgctcctgggcaccgcgcagtccgcccccgcggctcctggccagaccacccctaggaccccctgccccaagtcgcagccaagcttcgtttagtgaaccgtcagatcgcctggagacgccatccacgctgttttgacctccatagaagacaccgggaccgatccagcctccgcggattcgaatcccggccgggaacggtgcattggaacgcggattccccgtgccaagagtgacgtaagtaccgcctatagagtctataggcccacaaaaaatgctttcttcttttaatatacttttttgtttatcttatttctaatactttccctaatctctttctttcagggcaataatgatacaatgtatcatgcctctttgcaccattctaaagaataacagtgataatttctgggttaaggcaatagcaatatttctgcatataaatatttctgcatataaattgtaactgatgtaagaggtttcatattgctaatagcagctacaatccagctaccattctgcttttattttatggttgggataaggctggattattctgagtccaagctaggcccttttgctaatcatgttcatacctcttatcttcctcccacagctcctgggcaacgtgctggtctgtgtgctggcccatcactttggcaaagaattgggattcgaaccggtgccgccaccatgaagttgcctgttaggctgttggtgctgatgttctggattcctgcttccagcagtgacgtgcagatgatccagagccccagcagcctgagcgcctcgctgggggacatcgtgaccatgacctgccaggcctcccagggcaccagcatcaacctcaactggttccagcagaagcccggcaaggcccccaagctcctcatctacggggccagcaacctggaggacggcgtgccctcccgcttcagcggctcccgctacggcacggacttcacgctgaccatctcctccctggaggacgaggacatggccacctacttctgcctgcagcacacctacctgcccttcaccttcggcagcgggaccaagctggagatcaagggtggtggtggatccggtggtggtggatccggtggtggtggatcccaggtgcagctgcagcagagcgacgccgagctggtgaaacctggggccagcgtcaagatcagctgcaaggcctccggctacaccttcaccgaccgcaccatccactgggtgaagcagcggcccgagcaggggctggagtggatcgggtacatctaccccggggacggctccaccaagtacaacgagaacttcaagggcaaagccaccctgacggccgacaagtccagcagcaccgcctacatgcagctgaacagcctgaccagcgaggacagcgccgtgtacttctgcgcccggcggggggctatggactactggggccagggcacctccgtgaccgtgtcctcctacccatacgatgttccagattacgcttagtaactcgaggacggggtgaactacgcctgaggatccgatctttttccctctgccaaaaattatggggacatcatgaagccccttgagcatctgacttctggctaataaaggaaatttattttcattgcaatagtgtgttggaattttttgtgtctctcactcggcctaggtagataagtagcatggcgggttaatcattaactacaaggaacccctagtgatggagttggccactccctctctgcgcgctcgctcgctcactgaggccgggcgaccaaaggtcgcccgacgcccgggctttgcccgggcggcctcagtgagcgagcgagcgcgcag

SEQ ID NO: 2311 - DNA, 2546 bp, Artificial Sequence
  source: /note="Description of Artificial Sequence: Synthetic polynucleotide"
ctgcgcgctcgctcgctcactgaggccgcccgggcaaagcccgggcgtcgggcgacctttggtcgcccggcctcagtgagcgagcgagcgcgcagagagggagtggccaactccatcactaggggttccttgtagttaatgattaacccgccatgctacttatctaccagggtaatggggatcctctagaactatagctagtcgacataacgcgttagtatctgcagagggccctgcgtatgagtgcaagtgggttttaggaccaggatgaggcggggtgggggtgcctacctgacgaccgaccccgacccactggacaagcacccaacccccattccccaaattgcgcatcccctatcagagagggggaggggaaacaggatgcggcgaggcgcgtgcgcactgccagcttcagcaccgcggacagtgccttcgcccccgcctggcggcgcgcgccaccgccgcctcagcactgaaggcgcgctgacgtcactcgccggtcccccgcaaactccccttcccggccaccttggtcgcgtccgcgccgccgccggcccagccggaccgcaccacgcgaggcgcgagataggggggcacgggcgcgaccatctgcgctgcggcgccggcgactcagcgctgcctcagtctgcggtgggcagcggaggagtcgtgtcgtgcctgagagcgcagctgtgctcctgggcaccgcgcagtccgcccccgcggctcctggccagaccacccctaggaccccctgccccaagtcgcagccaagcttcgtttagtgaaccgtcagatcgcctggagacgccatccacgctgttttgacctccatagaagacaccgggaccgatccagcctccgcggattcgaatcccggccgggaacggtgcattggaacgcggattccccgtgccaagagtgacgtaagtaccgcctatagagtctataggcccacaaaaaatgctttcttcttttaatatacttttttgtttatcttatttctaatactttccctaatctctttctttcagggcaataatgatacaatgtatcatgcctctttgcaccattctaaagaataacagtgataatttctgggttaaggcaatagcaatatttctgcatataaatatttctgcatataaattgtaactgatgtaagaggtttcatattgctaatagcagctacaatccagctaccattctgcttttattttatggttgggataaggctggattattctgagtccaagctaggcccttttgctaatcatgttcatacctcttatcttcctcccacagctcctgggcaacgtgctggtctgtgtgctggcccatcactttggcaaagaattgggattcgaaccggtgccgccaccatgaagttgcctgttaggctgttggtgctgatgttctggattcctgcttccagcagtgacgtgcagatgatccagagccccagcagcctgagcgcctcgctgggggacatcgtgaccatgacctgccaggcctcccagggcaccagcatcaacctcaactggttccagcagaagcccggcaaggcccccaagctcctcatctacggggccagcaacctggaggacggcgtgccctcccgcttcagcggctcccgctacggcacggacttcacgctgaccatctcctccctggaggacgaggacatggccacctacttctgcctgcagcacacctacctgcccttcaccttcggcagcgggaccaagctggagatcaagggtggtggtggatccggtggtggtggatccggtggtggtggatccggtggtggtggatccggtggtggtggatcccaggtgcagctgcagcagagcgacgccgagctggtgaaacctggggccagcgtcaagatcagctgcaaggcctccggctacaccttcaccgaccgcaccatccactgggtgaagcagcggcccgagcaggggctggagtggatcgggtacatctaccccggggacggctccaccaagtacaacgagaacttcaagggcaaagccaccctgacggccgacaagtccagcagcaccgcctacatgcagctgaacagcctgaccagcgaggacagcgccgtgtacttctgcgcccggcggggggctatggactactggggccagggcacctccgtgaccgtgtcctcctacccatacgatgttccagattacgcttagtaactcgaggacggggtgaactacgcctgaggatccgatctttttccctctgccaaaaattatggggacatcatgaagccccttgagcatctgacttctggctaataaaggaaatttattttcattgcaatagtgtgttggaattttttgtgtctctcactcggcctaggtagataagtagcatggcgggttaatcattaactacaaggaacccctagtgatggagttggccactccctctctgcgcgctcgctcgctcactgaggccgggcgaccaaaggtcgcccgacgcccgggctttgcccgggcggcctcagtgagcgagcgagcgcgcag

SEQ ID NO: 2312 - DNA, 2591 bp, Artificial Sequence
  source: /note="Description of Artificial Sequence: Synthetic polynucleotide"
ctgcgcgctcgctcgctcactgaggccgcccgggcaaagcccgggcgtcgggcgacctttggtcgcccggcctcagtgagcgagcgagcgcgcagagagggagtggccaactccatcactaggggttccttgtagttaatgattaacccgccatgctacttatctaccagggtaatggggatcctctagaactatagctagtcgacataacgcgttagtatctgcagagggccctgcgtatgagtgcaagtgggttttaggaccaggatgaggcggggtgggggtgcctacctgacgaccgaccccgacccactggacaagcacccaacccccattccccaaattgcgcatcccctatcagagagggggaggggaaacaggatgcggcgaggcgcgtgcgcactgccagcttcagcaccgcggacagtgccttcgcccccgcctggcggcgcgcgccaccgccgcctcagcactgaaggcgcgctgacgtcactcgccggtcccccgcaaactccccttcccggccaccttggtcgcgtccgcgccgccgccggcccagccggaccgcaccacgcgaggcgcgagataggggggcacgggcgcgaccatctgcgctgcggcgccggcgactcagcgctgcctcagtctgcggtgggcagcggaggagtcgtgtcgtgcctgagagcgcagctgtgctcctgggcaccgcgcagtccgcccccgcggctcctggccagaccacccctaggaccccctgccccaagtcgcagccaagcttcgtttagtgaaccgtcagatcgcctggagacgccatccacgctgttttgacctccatagaagacaccgggaccgatccagcctccgcggattcgaatcccggccgggaacggtgcattggaacgcggattccccgtgccaagagtgacgtaagtaccgcctatagagtctataggcccacaaaaaatgctttcttcttttaatatacttttttgtttatcttatttctaatactttccctaatctctttctttcagggcaataatgatacaatgtatcatgcctctttgcaccattctaaagaataacagtgataatttctgggttaaggcaatagcaatatttctgcatataaatatttctgcatataaattgtaactgatgtaagaggtttcatattgctaatagcagctacaatccagctaccattctgcttttattttatggttgggataaggctggattattctgagtccaagctaggcccttttgctaatcatgttcatacctcttatcttcctcccacagctcctgggcaacgtgctggtctgtgtgctggcccatcactttggcaaagaattgggattcgaaccggtgccgccaccatgaagttgcctgttaggctgttggtgctgatgttctggattcctgcttccagcagtgacgtgcagatgatccagagccccagcagcctgagcgcctcgctgggggacatcgtgaccatgacctgccaggcctcccagggcaccagcatcaacctcaactggttccagcagaagcccggcaaggcccccaagctcctcatctacggggccagcaacctggaggacggcgtgccctcccgcttcagcggctcccgctacggcacggacttcacgctgaccatctcctccctggaggacgaggacatggccacctacttctgcctgcagcacacctacctgcccttcaccttcggcagcgggaccaagctggagatcaagggtggtggtggatccggtggtggtggatccggtggtggtggatccggtggtggtggatccggtggtggtggatccggtggtggtggatccggtggtggtggatccggtggtggtggatcccaggtgcagctgcagcagagcgacgccgagctggtgaaacctggggccagcgtcaagatcagctgcaaggcctccggctacaccttcaccgaccgcaccatccactgggtgaagcagcggcccgagcaggggctggagtggatcgggtacatctaccccggggacggctccaccaagtacaacgagaacttcaagggcaaagccaccctgacggccgacaagtccagcagcaccgcctacatgcagctgaacagcctgaccagcgaggacagcgccgtgtacttctgcgcccggcggggggctatggactactggggccagggcacctccgtgaccgtgtcctcctacccatacgatgttccagattacgcttagtaactcgaggacggggtgaactacgcctgaggatccgatctttttccctctgccaaaaattatggggacatcatgaagccccttgagcatctgacttctggctaataaaggaaatttattttcattgcaatagtgtgttggaattttttgtgtctctcactcggcctaggtagataagtagcatggcgggttaatcattaactacaaggaacccctagtgatggagttggccactccctctctgcgcgctcgctcgctcactgaggccgggcgaccaaaggtcgcccgacgcccgggctttgcccgggcggcctcagtgagcgagcgagcgcgcag

SEQ ID NO: 2313 - DNA, 3900 bp, Artificial Sequence
  source: /note="Description of Artificial Sequence: Synthetic polynucleotide"
ctgcgcgctcgctcgctcactgaggccgcccgggcaaagcccgggcgtcgggcgacctttggtcgcccggcctcagtgagcgagcgagcgcgcagagagggagtggccaactccatcactaggggttccttgtagttaatgattaacccgccatgctacttatctaccagggtaatggggatcctctagaactatagctagtcgacataacgcgttagtatctgcagagggccctgcgtatgagtgcaagtgggttttaggaccaggatgaggcggggtgggggtgcctacctgacgaccgaccccgacccactggacaagcacccaacccccattccccaaattgcgcatcccctatcagagagggggaggggaaacaggatgcggcgaggcgcgtgcgcactgccagcttcagcaccgcggacagtgccttcgcccccgcctggcggcgcgcgccaccgccgcctcagcactgaaggcgcgctgacgtcactcgccggtcccccgcaaactccccttcccggccaccttggtcgcgtccgcgccgccgccggcccagccggaccgcaccacgcgaggcgcgagataggggggcacgggcgcgaccatctgcgctgcggcgccggcgactcagcgctgcctcagtctgcggtgggcagcggaggagtcgtgtcgtgcctgagagcgcagctgtgctcctgggcaccgcgcagtccgcccccgcggctcctggccagaccacccctaggaccccctgccccaagtcgcagccaagcttcgtttagtgaaccgtcagatcgcctggagacgccatccacgctgttttgacctccatagaagacaccgggaccgatccagcctccgcggattcgaatcccggccgggaacggtgcattggaacgcggattccccgtgccaagagtgacgtaagtaccgcctatagagtctataggcccacaaaaaatgctttcttcttttaatatacttttttgtttatcttatttctaatactttccctaatctctttctttcagggcaataatgatacaatgtatcatgcctctttgcaccattctaaagaataacagtgataatttctgggttaaggcaatagcaatatttctgcatataaatatttctgcatataaattgtaactgatgtaagaggtttcatattgctaatagcagctacaatccagctaccattctgcttttattttatggttgggataaggctggattattctgagtccaagctaggcccttttgctaatcatgttcatacctcttatcttcctcccacagctcctgggcaacgtgctggtctgtgtgctggcccatcactttggcaaagaattgagctccttcctactcaaagccacatgaataggaggagccaccatgggatggagctggatctttctctttctcctgtcaggaactacaggtgtcctctctgaggtccagctgcaacagtctggacctgagctggtgaagcctggggcttcagtgaagatatcctgcaagacttctggatacacattcactgaatacaccatacactgggtgaagcagagccatggagagagccttgagtggattggaggtattaatccaaacgatggtggtactatttacaaccagaagttcaagggcaaggccacattgactgtagacaagtcctccaaaacagcctacatggagctccgcagcctgacatctgaggattctgcagtcttttactgtgcaagagggccctccgccaggtttccttactggggccaagggactctggtcactgtctctgcagccaaaacgacacccccatctgtctatccactggcccctggatctgctgcccaaactaactccatggtgaccctgggatgcctggtcaagggctatttccctgagccagtgacagtgacctggaactctggatccctgtccagcggtgtgcacaccttcccagctgtcctgcagtctgacctctacactctgagcagctcagtgactgtcccctccagcacctggcccagcgagaccgtcacctgcaacgttgcccacccggccagcagcaccaaggtggacaagaaaattgtgcccagggattgtggttgtaagccttgcatatgtacagtcccagaagtatcatctgtcttcatcttccccccaaagcccaaggatgtgctcaccattactctgactcctaaggtcacgtgtgttgtggtagacatcagcaaggatgatcccgaggtccagttcagctggtttgtagatgatgtggaggtgcacacagctcagacgcaaccccgggaggagcagttcaacagcactttccgctcagtcagtgaacttcccatcatgcaccaggactggctcaatggcaaggagttcaaatgcagggtcaacagtgcagctttccctgcccccatcgagaaaaccatctccaaaaccaaaggcagaccgaaggctccacaggtgtacaccattccacctcccaaggagcagatggccaaggataaagtcagtctgacctgcatgataacagacttcttccctgaagacattactgtggagtggcagtggaatgggcagccagcggagaactacaagaacactcagcccatcatggacacagatggctcttacttcgtctacagcaagctcaatgtgcagaagagcaactgggaggcaggaaatactttcacctgctctgtgttacatgagggcctgcacaaccaccatactgagaagagcctctcccactctcctggtagaaagaggcgagagggcagaggaagtcttctaacatgcggtgacgtggaggagaatcccggccctatgatgagtcctgcccagttcctgtttctgttagtgctctggattcgggaaaccaacggtgatgttgtgatgacccagactccactcactttgtcggttaccattggacaaccagcctccatctcttgcaagtcaagtcagagcctcttagatagtgatggaaagacatatttgaattggttgttacagaggccaggccagtctccaaagcgcctaatctatctggtgtctaaactggactctggagtccctgacagattcactggcagtggatcagggacagatttcacactgaaaattagcagagtggaggctgaggatttgggagtttattattgctggcaaggtacacattttcctcggacgttcggtggaggcaccaagctggaaatcaaacgggctgatgctgcaccaactgtatccatcttcccaccatccagtgagcagttaacatctggaggtgcctcagtcgtgtgcttcttgaacaacttctaccccaaagacatcaatgtcaagtggaagattgatggcagtgaacgacaaaatggcgtcctgaacagttggactgatcaggacagcaaagacagcacctacagcatgagcagcaccctcacgttgaccaaggacgagtatgaacgacataacagctatacctgtgaggccactcacaagacatcaacttcacccattgtcaagagcttcaacaggaatgagtgttagtaactcgaggacggggtgaactacgcctgaggatccgatctttttccctctgccaaaaattatggggacatcatgaagccccttgagcatctgacttctggctaataaaggaaatttattttcattgcaatagtgtgttggaattttttgtgtctctcactcggcctaggtagataagtagcatggcgggttaatcattaactacaaggaacccctagtgatggagttggccactccctctctgcgcgctcgctcgctcactgaggccgggcgaccaaaggtcgcccgacgcccgggctttgcccgggcggcctcagtgagcgagcgagcgcgcag

SEQ ID NO: 2314 - DNA, 4042 bp, Artificial Sequence
  source: /note="Description of Artificial Sequence: Synthetic polynucleotide"
ctgcgcgctcgctcgctcactgaggccgcccgggcaaagcccgggcgtcgggcgacctttggtcgcccggcctcagtgagcgagcgagcgcgcagagagggagtggccaactccatcactaggggttccttgtagttaatgattaacccgccatgctacttatctaccagggtaatggggatcctctagaactatagctagtcgacataacgcgtgatctaacatatcctggtgtggagtagcggacgctgctatgacagaggctcgggggcctgagctggctctgtgagctggggaggaggcagacagccaggccttgtctgcaagcagacctggcagcattgggctggccgccccccagggcctcctcttcatgcccagtgaatgactcaccttggcacagacacaatgttcggggtgggcacagtgcctgcttcccgccgcaccccagcccccctcaaatgccttccgagaagcccattgagcagggggcttgcattgcaccccagcctgacagcctggcatcttgggataaaagcagcacagccccctaggggctgcccttgctgtgtggcgccaccggcggtggagaacaaggctctattcagcctgtgcccaggaaaggggatcaggggatgcccaggcatggacagtgggtggcagggggggagaggagggctgtctgcttcccagaagtccaaggacacaaatgggtgaggggagagctctccccatagctgggctgcggcccaaccccaccccctcaggctatgccagggggtgttgccaggggcacccgggcatcgccagtctagcccactccttcataaagccctcgcatcccaggagcgagcagagccagagcaggttggagaggagacgcatcacctccgctgctcgcggggatcctctagaagcttcgtttagtgaaccgtcagatcgcctggagacgccatccacgctgttttgacctccatagaagacaccgggaccgatccagcctccgcggattcgaatcccggccgggaacggtgcattggaacgcggattccccgtgccaagagtgacgtaagtaccgcctatagagtctataggcccacaaaaaatgctttcttcttttaatatacttttttgtttatcttatttctaatactttccctaatctctttctttcagggcaataatgatacaatgtatcatgcctctttgcaccattctaaagaataacagtgataatttctgggttaaggcaatagcaatatttctgcatataaatatttctgcatataaattgtaactgatgtaagaggtttcatattgctaatagcagctacaatccagctaccattctgcttttattttatggttgggataaggctggattattctgagtccaagctaggcccttttgctaatcatgttcatacctcttatcttcctcccacagctcctgggcaacgtgctggtctgtgtgctggcccatcactttggcaaagaattgagctccttcctactcaaagccacatgaataggaggagccaccatgggatggagctggatctttctctttctcctgtcaggaactacaggtgtcctctctgaggtccagctgcaacagtctggacctgagctggtgaagcctggggcttcagtgaagatatcctgcaagacttctggatacacattcactgaatacaccatacactgggtgaagcagagccatggagagagccttgagtggattggaggtattaatccaaacgatggtggtactatttacaaccagaagttcaagggcaaggccacattgactgtagacaagtcctccaaaacagcctacatggagctccgcagcctgacatctgaggattctgcagtcttttactgtgcaagagggccctccgccaggtttccttactggggccaagggactctggtcactgtctctgcagccaaaacgacacccccatctgtctatccactggcccctggatctgctgcccaaactaactccatggtgaccctgggatgcctggtcaagggctatttccctgagccagtgacagtgacctggaactctggatccctgtccagcggtgtgcacaccttcccagctgtcctgcagtctgacctctacactctgagcagctcagtgactgtcccctccagcacctggcccagcgagaccgtcacctgcaacgttgcccacccggccagcagcaccaaggtggacaagaaaattgtgcccagggattgtggttgtaagccttgcatatgtacagtcccagaagtatcatctgtcttcatcttccccccaaagcccaaggatgtgctcaccattactctgactcctaaggtcacgtgtgttgtggtagacatcagcaaggatgatcccgaggtccagttcagctggtttgtagatgatgtggaggtgcacacagctcagacgcaaccccgggaggagcagttcaacagcactttccgctcagtcagtgaacttcccatcatgcaccaggactggctcaatggcaaggagttcaaatgcagggtcaacagtgcagctttccctgcccccatcgagaaaaccatctccaaaaccaaaggcagaccgaaggctccacaggtgtacaccattccacctcccaaggagcagatggccaaggataaagtcagtctgacctgcatgataacagacttcttccctgaagacattactgtggagtggcagtggaatgggcagccagcggagaactacaagaacactcagcccatcatggacacagatggctcttacttcgtctacagcaagctcaatgtgcagaagagcaactgggaggcaggaaatactttcacctgctctgtgttacatgagggcctgcacaaccaccatactgagaagagcctctcccactctcctggtagaaagaggcgagagggcagaggaagtcttctaacatgcggtgacgtggaggagaatcccggccctatgatgagtcctgcccagttcctgtttctgttagtgctctggattcgggaaaccaacggtgatgttgtgatgacccagactccactcactttgtcggttaccattggacaaccagcctccatctcttgcaagtcaagtcagagcctcttagatagtgatggaaagacatatttgaattggttgttacagaggccaggccagtctccaaagcgcctaatctatctggtgtctaaactggactctggagtccctgacagattcactggcagtggatcagggacagatttcacactgaaaattagcagagtggaggctgaggatttgggagtttattattgctggcaaggtacacattttcctcggacgttcggtggaggcaccaagctggaaatcaaacgggctgatgctgcaccaactgtatccatcttcccaccatccagtgagcagttaacatctggaggtgcctcagtcgtgtgcttcttgaacaacttctaccccaaagacatcaatgtcaagtggaagattgatggcagtgaacgacaaaatggcgtcctgaacagttggactgatcaggacagcaaagacagcacctacagcatgagcagcaccctcacgttgaccaaggacgagtatgaacgacataacagctatacctgtgaggccactcacaagacatcaacttcacccattgtcaagagcttcaacaggaatgagtgttagtaactcgaggacggggtgaactacgcctgaggatccgatctttttccctctgccaaaaattatggggacatcatgaagccccttgagcatctgacttctggctaataaaggaaatttattttcattgcaatagtgtgttggaattttttgtgtctctcactcggcctaggtagataagtagcatggcgggttaatcattaactacaaggaacccctagtgatggagttggccactccctctctgcgcgctcgctcgctcactgaggccgggcgaccaaaggtcgcccgacgcccgggctttgcccgggcggcctcagtgagcgagcgagcgcgcag

SEQ ID NO: 2315 - DNA, 3984 bp, Artificial Sequence
  source: /note="Description of Artificial Sequence: Synthetic polynucleotide"
ctgcgcgctcgctcgctcactgaggccgcccgggcaaagcccgggcgtcgggcgacctttggtcgcccggcctcagtgagcgagcgagcgcgcagagagggagtggccaactccatcactaggggttccttgtagttaatgattaacccgccatgctacttatctaccagggtaatggggatcctctagaactatagctagtcgacattgattattgactagttattaatagtaatcaattacggggtcattagttcatagcccatatatggagttccgcgttacataacttacggtaaatggcccgcctggctgaccgcccaacgacccccgcccattgacgtcaataatgacgtatgttcccatagtaacgccaatagggactttccattgacgtcaatgggtggagtatttacggtaaactgcccacttggcagtacatcaagtgtatcatatgccaagtacgccccctattgacgtcaatgacggtaaatggcccgcctggcattatgcccagtacatgaccttatgggactttcctacttggcagtacatctacgtattagtcatcgctattaccatgtcgaggccacgttctgcttcactctccccatctcccccccctccccacccccaattttgtatttatttattttttaattattttgtgcagcgatgggggcggggggggggggcgcgcgccaggcggggcggggcggggcgaggggcggggcggggcgaggcggagaggtgcggcggcagccaatcagagcggcgcgctccgaaagtttccttttatggcgaggcggcggcggcggcggccctataaaaagcgaagcgcgcggcgggcgggagcaagcttcgtttagtgaaccgtcagatcgcctggagacgccatccacgctgttttgacctccatagaagacaccgggaccgatccagcctccgcggattcgaatcccggccgggaacggtgcattggaacgcggattccccgtgccaagagtgacgtaagtaccgcctatagagtctataggcccacaaaaaatgctttcttcttttaatatacttttttgtttatcttatttctaatactttccctaatctctttctttcagggcaataatgatacaatgtatcatgcctctttgcaccattctaaagaataacagtgataatttctgggttaaggcaatagcaatatttctgcatataaatatttctgcatataaattgtaactgatgtaagaggtttcatattgctaatagcagctacaatccagctaccattctgcttttattttatggttgggataaggctggattattctgagtccaagctaggcccttttgctaatcatgttcatacctcttatcttcctcccacagctcctgggcaacgtgctggtctgtgtgctggcccatcactttggcaaagaattgagctccttcctactcaaagccacatgaataggaggagccaccatgggatggagctggatctttctctttctcctgtcaggaactacaggtgtcctctctgaggtccagctgcaacagtctggacctgagctggtgaagcctggggcttcagtgaagatatcctgcaagacttctggatacacattcactgaatacaccatacactgggtgaagcagagccatggagagagccttgagtggattggaggtattaatccaaacgatggtggtactatttacaaccagaagttcaagggcaaggccacattgactgtagacaagtcctccaaaacagcctacatggagctccgcagcctgacatctgaggattctgcagtcttttactgtgcaagagggccctccgccaggtttccttactggggccaagggactctggtcactgtctctgcagccaaaacgacacccccatctgtctatccactggcccctggatctgctgcccaaactaactccatggtgaccctgggatgcctggtcaagggctatttccctgagccagtgacagtgacctggaactctggatccctgtccagcggtgtgcacaccttcccagctgtcctgcagtctgacctctacactctgagcagctcagtgactgtcccctccagcacctggcccagcgagaccgtcacctgcaacgttgcccacccggccagcagcaccaaggtggacaagaaaattgtgcccagggattgtggttgtaagccttgcatatgtacagtcccagaagtatcatctgtcttcatcttccccccaaagcccaaggatgtgctcaccattactctgactcctaaggtcacgtgtgttgtggtagacatcagcaaggatgatcccgaggtccagttcagctggtttgtagatgatgtggaggtgcacacagctcagacgcaaccccgggaggagcagttcaacagcactttccgctcagtcagtgaacttcccatcatgcaccaggactggctcaatggcaaggagttcaaatgcagggtcaacagtgcagctttccctgcccccatcgagaaaaccatctccaaaaccaaaggcagaccgaaggctccacaggtgtacaccattccacctcccaaggagcagatggccaaggataaagtcagtctgacctgcatgataacagacttcttccctgaagacattactgtggagtggcagtggaatgggcagccagcggagaactacaagaacactcagcccatcatggacacagatggctcttacttcgtctacagcaagctcaatgtgcagaagagcaactgggaggcaggaaatactttcacctgctctgtgttacatgagggcctgcacaaccaccatactgagaagagcctctcccactctcctggtagaaagaggcgagagggcagaggaagtcttctaacatgcggtgacgtggaggagaatcccggccctatgatgagtcctgcccagttcctgtttctgttagtgctctggattcgggaaaccaacggtgatgttgtgatgacccagactccactcactttgtcggttaccattggacaaccagcctccatctcttgcaagtcaagtcagagcctcttagatagtgatggaaagacatatttgaattggttgttacagaggccaggccagtctccaaagcgcctaatctatctggtgtctaaactggactctggagtccctgacagattcactggcagtggatcagggacagatttcacactgaaaattagcagagtggaggctgaggatttgggagtttattattgctggcaaggtacacattttcctcggacgttcggtggaggcaccaagctggaaatcaaacgggctgatgctgcaccaactgtatccatcttcccaccatccagtgagcagttaacatctggaggtgcctcagtcgtgtgcttcttgaacaacttctaccccaaagacatcaatgtcaagtggaagattgatggcagtgaacgacaaaatggcgtcctgaacagttggactgatcaggacagcaaagacagcacctacagcatgagcagcaccctcacgttgaccaaggacgagtatgaacgacataacagctatacctgtgaggccactcacaagacatcaacttcacccattgtcaagagcttcaacaggaatgagtgttagtaactcgaggacggggtgaactacgcctgaggatccgatctttttccctctgccaaaaattatggggacatcatgaagccccttgagcatctgacttctggctaataaaggaaatttattttcattgcaatagtgtgttggaattttttgtgtctctcactcggcctaggtagataagtagcatggcgggttaatcattaactacaaggaacccctagtgatggagttggccactccctctctgcgcgctcgctcgctcactgaggccgggcgaccaaaggtcgcccgacgcccgggctttgcccgggcggcctcagtgagcgagcgagcgcgcag

SEQ ID NO: 2316 - DNA, 4472 bp, Artificial Sequence
  source: /note="Description of Artificial Sequence: Synthetic polynucleotide"
ctgcgcgctcgctcgctcactgaggccgcccgggcaaagcccgggcgtcgggcgacctttggtcgcccggcctcagtgagcgagcgagcgcgcagagagggagtggccaactccatcactaggggttccttgtagttaatgattaacccgccatgctacttatctaccagggtaatggggatcctctagaactatagctagtcgacataacgcgtctagttattaatagtaatcaattacggggtcattagttcatagcccatatatggagttccgcgttacataacttacggtaaatggcccgcctggctgaccgcccaacgacccccgcccattgacgtcaataatgacgtatgttcccatagtaacgccaatagggactttccattgacgtcaatgggtggagtatttacggtaaactgcccacttggcagtacatcaagtgtatcatatgccaagtacgccccctattgacgtcaatgacggtaaatggcccgcctggcattatgcccagtacatgaccttatgggactttcctacttggcagtacatctacgtattagtcatcgctattaccatggtcgaggtgagccccacgttctgcttcactctccccatctcccccccctccccacccccaattttgtatttatttattttttaattattttgtgcagcgatgggggcggggggggggggggggcgcgcgccaggcggggcggggcggggcgaggggcggggcggggcgaggcggagaggtgcggcggcagccaatcagagcggcgcgctccgaaagtttccttttatggcgaggcggcggcggcggcggccctataaaaagcgaagcgcgcggcgggcgggagtcgctgcgcgctgccttcgccccgtgccccgctccgccgccgcctcgcgccgcccgccccggctctgactgaccgcgttactcccacaggtgagcgggcgggacggcccttctcctccgggctgtaattagcgcttggtttaatgacggcttgtttcttttctgtggctgcgtgaaagccttgaggggctccgggagggccctttgtgcggggggagcggctcggggggtgcgtgcgtgtgtgtgtgcgtggggagcgccgcgtgcggctccgcgctgcccggcggctgtgagcgctgcgggcgcggcgcggggctttgtgcgctccgcagtgtgcgcgaggggagcgcggccgggggcggtgccccgcggtgcggggggggctgcgaggggaacaaaggctgcgtgcggggtgtgtgcgtgggggggtgagcagggggtgtgggcgcgtcggtcgggctgcaaccccccctgcacccccctccccgagttgctgagcacggcccggcttcgggtgcggggctccgtacggggcgtggcgcggggctcgccgtgccgggcggggggtggcggcaggtgggggtgccgggcggggcggggccgcctcgggccggggagggctcgggggaggggcgcggcggcccccggagcgccggcggctgtcgaggcgcggcgagccgcagccattgccttttatggtaatcgtgcgagagggcgcagggacttcctttgtcccaaatctgtgcggagccgaaatctgggaggcgccgccgcaccccctctagcgggcgcggggcgaagcggtgcggcgccggcaggaaggaaatgggcggggagggccttcgtgcgtcgccgcgccgccgtccccttctccctctccagcctcggggctgtccgcggggggacggctgccttcgggggggacggggcagggcggggttcggcttctggcgtgtgaccggcggctctagagcctctgctaaccatgttcatgccttcttctttttcctacagctcctgggcaacgtgctggttattgtgctgtctcatcattttggcaaagaattcgagctccttcctactcaaagccacatgaataggaggagccaccatgggatggagctggatctttctctttctcctgtcaggaactacaggtgtcctctctgaggtccagctgcaacagtctggacctgagctggtgaagcctggggcttcagtgaagatatcctgcaagacttctggatacacattcactgaatacaccatacactgggtgaagcagagccatggagagagccttgagtggattggaggtattaatccaaacgatggtggtactatttacaaccagaagttcaagggcaaggccacattgactgtagacaagtcctccaaaacagcctacatggagctccgcagcctgacatctgaggattctgcagtcttttactgtgcaagagggccctccgccaggtttccttactggggccaagggactctggtcactgtctctgcagccaaaacgacacccccatctgtctatccactggcccctggatctgctgcccaaactaactccatggtgaccctgggatgcctggtcaagggctatttccctgagccagtgacagtgacctggaactctggatccctgtccagcggtgtgcacaccttcccagctgtcctgcagtctgacctctacactctgagcagctcagtgactgtcccctccagcacctggcccagcgagaccgtcacctgcaacgttgcccacccggccagcagcaccaaggtggacaagaaaattgtgcccagggattgtggttgtaagccttgcatatgtacagtcccagaagtatcatctgtcttcatcttccccccaaagcccaaggatgtgctcaccattactctgactcctaaggtcacgtgtgttgtggtagacatcagcaaggatgatcccgaggtccagttcagctggtttgtagatgatgtggaggtgcacacagctcagacgcaaccccgggaggagcagttcaacagcactttccgctcagtcagtgaacttcccatcatgcaccaggactggctcaatggcaaggagttcaaatgcagggtcaacagtgcagctttccctgcccccatcgagaaaaccatctccaaaaccaaaggcagaccgaaggctccacaggtgtacaccattccacctcccaaggagcagatggccaaggataaagtcagtctgacctgcatgataacagacttcttccctgaagacattactgtggagtggcagtggaatgggcagccagcggagaactacaagaacactcagcccatcatggacacagatggctcttacttcgtctacagcaagctcaatgtgcagaagagcaactgggaggcaggaaatactttcacctgctctgtgttacatgagggcctgcacaaccaccatactgagaagagcctctcccactctcctggtagaaagaggcgagagggcagaggaagtcttctaacatgcggtgacgtggaggagaatcccggccctatgatgagtcctgcccagttcctgtttctgttagtgctctggattcgggaaaccaacggtgatgttgtgatgacccagactccactcactttgtcggttaccattggacaaccagcctccatctcttgcaagtcaagtcagagcctcttagatagtgatggaaagacatatttgaattggttgttacagaggccaggccagtctccaaagcgcctaatctatctggtgtctaaactggactctggagtccctgacagattcactggcagtggatcagggacagatttcacactgaaaattagcagagtggaggctgaggatttgggagtttattattgctggcaaggtacacattttcctcggacgttcggtggaggcaccaagctggaaatcaaacgggctgatgctgcaccaactgtatccatcttcccaccatccagtgagcagttaacatctggaggtgcctcagtcgtgtgcttcttgaacaacttctaccccaaagacatcaatgtcaagtggaagattgatggcagtgaacgacaaaatggcgtcctgaacagttggactgatcaggacagcaaagacagcacctacagcatgagcagcaccctcacgttgaccaaggacgagtatgaacgacataacagctatacctgtgaggccactcacaagacatcaacttcacccattgtcaagagcttcaacaggaatgagtgttagtaactcgaggacggggtgaactacgcctgaggatccgatctttttccctctgccaaaaattatggggacatcatgaagccccttgagcatctgacttctggctaataaaggaaatttattttcattgcaatagtgtgttggaattttttgtgtctctcactcggcctaggtagataagtagcatggcgggttaatcattaactacaaggaacccctagtgatggagttggccactccctctctgcgcgctcgctcgctcactgaggccgggcgaccaaaggtcgcccgacgcccgggctttgcccgggcggcctcagtgagcgagcgagcgcgcag

SEQ ID NO: 2317 - DNA, 2549 bp, Artificial Sequence
  source: /note="Description of Artificial Sequence: Synthetic polynucleotide"
cctgcaggcagctgcgcgctcgctcgctcactgaggccgcccgggcaaagcccgggcgtcgggcgacctttggtcgcccggcctcagtgagcgagcgagcgcgcagagagggagtggccaactccatcactaggggttccttgtagttaatgattaacccgccatgctacttatctacgtagccatgcgtcgacataacgcgtcgacattgattattgactagttattaatagtaatcaattacggggtcattagttcatagcccatatatggagttccgcgttacataacttacggtaaatggcccgcctggctgaccgcccaacgacccccgcccattgacgtcaataatgacgtatgttcccatagtaacgccaatagggactttccattgacgtcaatgggtggagtatttacggtaaactgcccacttggcagtacatcaagtgtatcatatgccaagtacgccccctattgacgtcaatgacggtaaatggcccgcctggcattatgcccagtacatgaccttatgggactttcctacttggcagtacatctacgtattagtcatcgctattaccatgtcgaggccacgttctgcttcactctccccatctcccccccctccccacccccaattttgtatttatttattttttaattattttgtgcagcgatgggggcggggggggggggcgcgcgccaggcggggcggggcggggcgaggggcggggcggggcgaggcggagaggtgcggcggcagccaatcagagcggcgcgctccgaaagtttccttttatggcgaggcggcggcggcggcggccctataaaaagcgaagcgcgcggcgggcgggagcaagcttcgtttagtgaaccgattcgaatcccggccgggaacggtgcattggaacgcggattccccgtgccaagagtgacgtaagtaccgcctatagagtctataggcccacaaaaaatgctttcttcttttaatatacttttttgtttatcttatttctaatactttccctaatctctttctttcagggcaataatgatacaatgtatcatgcctctttgcaccattctaaagaataacagtgataatttctgggttaaggcaatagcaatatttctgcatataaatatttctgcatataaattgtaactgatgtaagaggtttcatattgctaatagcagctacaatccagctaccattctgcttttattttatggttgggataaggctggattattctgagtccaagctaggcccttttgctaatcatgttcatacctcttatcttcctcccacagctcctgggcaacgtgctggtctgtgtgctggcccatcactttggcaaagaattgggattcgaaccggtgccgccaccatgggatggagctggatctttctctttctcctgtcaggaactacaggtgtcctctctgaggtccagctgcaacagtctggacctgagctggtgaagcctggggcttcagtgaagatatcctgcaagacttctggatacacattcactgaatacaccatacactgggtgaagcagagccatggagagagccttgagtggattggaggtattaatccaaacgatggtggtactatttacaaccagaagttcaagggcaaggccacattgactgtagacaagtcctccaaaacagcctacatggagctccgcagcctgacatctgaggattctgcagtcttttactgtgcaagagggccctccgccaggtttccttactggggccaagggactctggtcactgtctctgcaggtggtggtggtagcggcggcggcggctctggtggtggtggatccgatgttgtgatgacccagactccactcactttgtcggttaccattggacaaccagcctccatctcttgcaagtcaagtcagagcctcttagatagtgatggaaagacatatttgaattggttgttacagaggccaggccagtctccaaagcgcctaatctatctggtgtctaaactggactctggagtccctgacagattcactggcagtggatcagggacagatttcacactgaaaattagcagagtggaggctgaggatttgggagtttattattgctggcaaggtacacattttcctcggacgttcggtggaggcaccaagctggaaatcaaacggtacccatacgatgttccagattacgcttagtgacctgaggatgatctttttccctctgccaaaaattatggggacatcatgaagccccttgagcatctgacttctggctaataaaggaaatttattttcattgcaatagtgtgttggaattttttgtgtctctcactcgcctaggatcgatgctacgtagataagtagcatggcgggttaatcattaactacagaggaacccctagtgatggagttggccactccctctctgcgcgctcgctcgctcactgaggccgggcgaccaaaggtcgcccgacgcccgggctttgcccgggcggcctcagtgagcgagcgagcgcgcagctgcctgcagg

SEQ ID NO: 2318 - DNA, 2445 bp, Artificial Sequence
  source: /note="Description of Artificial Sequence: Synthetic polynucleotide"
cctgcaggcagctgcgcgctcgctcgctcactgaggccgcccgggcaaagcccgggcgtcgggcgacctttggtcgcccggcctcagtgagcgagcgagcgcgcagagagggagtggccaactccatcactaggggttccttgtagttaatgattaacccgccatgctacttatctacgtagccatgcgtcgacataacgcgtcgacattgattattgactagttattaatagtaatcaattacggggtcattagttcatagcccatatatggagttccgcgttacataacttacggtaaatggcccgcctggctgaccgcccaacgacccccgcccattgacgtcaataatgacgtatgttcccatagtaacgccaatagggactttccattgacgtcaatgggtggagtatttacggtaaactgcccacttggcagtacatcaagtgtatcatatgccaagtacgccccctattgacgtcaatgacggtaaatggcccgcctggcattatgcccagtacatgaccttatgggactttcctacttggcagtacatctacgtattagtcatcgctattaccatgtcgaggccacgttctgcttcactctccccatctcccccccctccccacccccaattttgtatttatttattttttaattattttgtgcagcgatgggggcggggggggggggcgcgcgccaggcggggcggggcggggcgaggggcggggcggggcgaggcggagaggtgcggcggcagccaatcagagcggcgcgctccgaaagtttccttttatggcgaggcggcggcggcggcggccctataaaaagcgaagcgcgcggcgggcgggagcaagcttcgtttagtgaaccgtcagatcgcctggagacgccatccacgctgttttgacctccatagaagacaccgggaccgatccagcctccgcggattcgaatcccggccgggaacggtgcattggaacgcggattccccgtgccaagagtgacgtaagtaccgcctatagagtctataggcccactctgcatataaattgtaactgatgtaagaggtttcatattgctaatagcagctacaatccagctaccattctgcttttattttatggttgggataaggctggattattctgagtccaagctaggcccttttgctaatcatgttcatacctcttatcttcctcccacagctcctgggcaacgtgctggtctgtgtgctggcccatcactttggcaaagaattgggattcgaaccggtgccgccaccatgggatggagctggatctttctctttctcctgtcaggaactacaggtgtcctctctgaggtccagctgcaacagtctggacctgagctggtgaagcctggggcttcagtgaagatatcctgcaagacttctggatacacattcactgaatacaccatacactgggtgaagcagagccatggagagagccttgagtggattggaggtattaatccaaacgatggtggtactatttacaaccagaagttcaagggcaaggccacattgactgtagacaagtcctccaaaacagcctacatggagctccgcagcctgacatctgaggattctgcagtcttttactgtgcaagagggccctccgccaggtttccttactggggccaagggactctggtcactgtctctgcaggtggtggtggtagcggcggcggcggctctggtggtggtggatccgatgttgtgatgacccagactccactcactttgtcggttaccattggacaaccagcctccatctcttgcaagtcaagtcagagcctcttagatagtgatggaaagacatatttgaattggttgttacagaggccaggccagtctccaaagcgcctaatctatctggtgtctaaactggactctggagtccctgacagattcactggcagtggatcagggacagatttcacactgaaaattagcagagtggaggctgaggatttgggagtttattattgctggcaaggtacacattttcctcggacgttcggtggaggcaccaagctggaaatcaaacggtacccatacgatgttccagattacgcttagtgacctgaggatgatctttttccctctgccaaaaattatggggacatcatgaagccccttgagcatctgacttctggctaataaaggaaatttattttcattgcaatagtgtgttggaattttttgtgtctctcactcgcctaggatcgatgctacgtagataagtagcatggcgggttaatcattaactacagaggaacccctagtgatggagttggccactccctctctgcgcgctcgctcgctcactgaggccgggcgaccaaaggtcgcccgacgcccgggctttgcccgggcggcctcagtgagcgagcgagcgcgcagctgcctgcagg

SEQ ID NO: 2319 - DNA, 2350 bp, Artificial Sequence
  source: /note="Description of Artificial Sequence: Synthetic polynucleotide"
cctgcaggcagctgcgcgctcgctcgctcactgaggccgcccgggcaaagcccgggcgtcgggcgacctttggtcgcccggcctcagtgagcgagcgagcgcgcagagagggagtggccaactccatcactaggggttccttgtagttaatgattaacccgccatgctacttatctacgtagccatgcgtcgacataacgcgtcgacattgattattgactagttattaatagtaatcaattacggggtcattagttcatagcccatatatggagttccgcgttacataacttacggtaaatggcccgcctggctgaccgcccaacgacccccgcccattgacgtcaataatgacgtatgttcccatagtaacgccaatagggactttccattgacgtcaatgggtggagtatttacggtaaactgcccacttggcagtacatcaagtgtatcatatgccaagtacgccccctattgacgtcaatgacggtaaatggcccgcctggcattatgcccagtacatgaccttatgggactttcctacttggcagtacatctacgtattagtcatcgctattaccatgtcgaggccacgttctgcttcactctccccatctcccccccctccccacccccaattttgtatttatttattttttaattattttgtgcagcgatgggggcggggggggggggcgcgcgccaggcggggcggggcggggcgaggggcggggcggggcgaggcggagaggtgcggcggcagccaatcagagcggcgcgctccgaaagtttccttttatggcgaggcggcggcggcggcggccctataaaaagcgaagcgcgcggcgggcgggagcaagcttcgtttagtgaaccgtcagatcgcctggagacgccatccacgctgttttgacctccatagaagacaccgggaccgatccaggtaagtaccgcctatagagtctataggcccacaaaaaatgctttcttcttttaatatacttttttgtttatcttatttctaatactttccctaatctctttcgctggattattctgagtccaagctaggcccttttgctaatcatgttcatacctcttatcttcctcccacagctcctgggcaacgtgctggtctgtgtgctggcccatcactttggcaaagaattgggattcgaaccggtgccgccaccatgggatggagctggatctttctctttctcctgtcaggaactacaggtgtcctctctgaggtccagctgcaacagtctggacctgagctggtgaagcctggggcttcagtgaagatatcctgcaagacttctggatacacattcactgaatacaccatacactgggtgaagcagagccatggagagagccttgagtggattggaggtattaatccaaacgatggtggtactatttacaaccagaagttcaagggcaaggccacattgactgtagacaagtcctccaaaacagcctacatggagctccgcagcctgacatctgaggattctgcagtcttttactgtgcaagagggccctccgccaggtttccttactggggccaagggactctggtcactgtctctgcaggtggtggtggtagcggcggcggcggctctggtggtggtggatccgatgttgtgatgacccagactccactcactttgtcggttaccattggacaaccagcctccatctcttgcaagtcaagtcagagcctcttagatagtgatggaaagacatatttgaattggttgttacagaggccaggccagtctccaaagcgcctaatctatctggtgtctaaactggactctggagtccctgacagattcactggcagtggatcagggacagatttcacactgaaaattagcagagtggaggctgaggatttgggagtttattattgctggcaaggtacacattttcctcggacgttcggtggaggcaccaagctggaaatcaaacggtacccatacgatgttccagattacgcttagtgacctgaggatgatctttttccctctgccaaaaattatggggacatcatgaagccccttgagcatctgacttctggctaataaaggaaatttattttcattgcaatagtgtgttggaattttttgtgtctctcactcgcctaggatcgatgctacgtagataagtagcatggcgggttaatcattaactacagaggaacccctagtgatggagttggccactccctctctgcgcgctcgctcgctcactgaggccgggcgaccaaaggtcgcccgacgcccgggctttgcccgggcggcctcagtgagcgagcgagcgcgcagctgcctgcagg

SEQ ID NO: 2320 - DNA, 4698 bp, Artificial Sequence
  source: /note="Description of Artificial Sequence: Synthetic polynucleotide"
cctgcaggcagctgcgcgctcgctcgctcactgaggccgcccgggcaaagcccgggcgtcgggcgacctttggtcgcccggcctcagtgagcgagcgagcgcgcagagagggagtggccaactccatcactaggggttccttgtagttaatgattaacccgccatgctacttatctacgtagccatgcgtcgacataacgcgtctagttattaatagtaatcaattacggggtcattagttcatagcccatatatggagttccgcgttacataacttacggtaaatggcccgcctggctgaccgcccaacgacccccgcccattgacgtcaataatgacgtatgttcccatagtaacgccaatagggactttccattgacgtcaatgggtggagtatttacggtaaactgcccacttggcagtacatcaagtgtatcatatgccaagtacgccccctattgacgtcaatgacggtaaatggcccgcctggcattatgcccagtacatgaccttatgggactttcctacttggcagtacatctacgtattagtcatcgctattaccatggtcgaggtgagccccacgttctgcttcactctccccatctcccccccctccccacccccaattttgtatttatttattttttaattattttgtgcagcgatgggggcggggggggggggggggcgcgcgccaggcggggcggggcggggcgaggggcggggcggggcgaggcggagaggtgcggcggcagccaatcagagcggcgcgctccgaaagtttccttttatggcgaggcggcggcggcggcggccctataaaaagcgaagcgcgcggcgggcgggagtcgctgcgcgctgccttcgccccgtgccccgctccgccgccgcctcgcgccgcccgccccggctctgactgaccgcgttactcccacaggtgagcgggcgggacggcccttctcctccgggctgtaattagcgcttggtttaatgacggcttgtttcttttctgtggctgcgtgaaagccttgaggggctccgggagggccctttgtgcggggggagcggctcggggggtgcgtgcgtgtgtgtgtgcgtggggagcgccgcgtgcggctccgcgctgcccggcggctgtgagcgctgcgggcgcggcgcggggctttgtgcgctccgcagtgtgcgcgaggggagcgcggccgggggcggtgccccgcggtgcggggggggctgcgaggggaacaaaggctgcgtgcggggtgtgtgcgtgggggggtgagcagggggtgtgggcgcgtcggtcgggctgcaaccccccctgcacccccctccccgagttgctgagcacggcccggcttcgggtgcggggctccgtacggggcgtggcgcggggctcgccgtgccgggcggggggtggcggcaggtgggggtgccgggcggggcggggccgcctcgggccggggagggctcgggggaggggcgcggcggcccccggagcgccggcggctgtcgaggcgcggcgagccgcagccattgccttttatggtaatcgtgcgagagggcgcagggacttcctttgtcccaaatctgtgcggagccgaaatctgggaggcgccgccgcaccccctctagcgggcgcggggcgaagcggtgcggcgccggcaggaaggaaatgggcggggagggccttcgtgcgtcgccgcgccgccgtccccttctccctctccagcctcggggctgtccgcggggggacggctgccttcgggggggacggggcagggcggggttcggcttctggcgtgtgaccggcggctctagagcctctgctaaccatgttcatgccttcttctttttcctacagctcctgggcaacgtgctggttattgtgctgtctcatcattttggcaaagaattcgggattcgaaccggtgccgccaccatggcgacgggttcaagaacttccctacttcttgcatttggcctgctttgtttgccgtggttacaggagggctcggcagctgccgaggtccagctgcaacagtctggacctgagctggtgaagcctggggcttcagtgaagatatcctgcaagacttctggatacacattcactgaatacaccatacactgggtgaagcagagccatggagagagccttgagtggattggaggtattaatccaaacgatggtggtactatttacaaccagaagttcaagggcaaggccacattgactgtagacaagtcctccaaaacagcctacatggagctccgcagcctgacatctgaggattctgcagtcttttactgtgcaagagggccctccgccaggtttccttactggggccaagggactctggtcactgtctctgcaggtggtggtggtagcggcggcggcggctctggtggtggtggatccgatgttgtgatgacccagactccactcactttgtcggttaccattggacaaccagcctccatctcttgcaagtcaagtcagagcctcttagatagtgatggaaagacatatttgaattggttgttacagaggccaggccagtctccaaagcgcctaatctatctggtgtctaaactggactctggagtccctgacagattcactggcagtggatcagggacagatttcacactgaaaattagcagagtggaggctgaggatttgggagtttattattgctggcaaggtacacattttcctcggacgttcggtggaggcaccaagctggaaatcaaacggtagtgacctgaggatgggtggcatccctgtgacccctccccagtgcctctcctggccctggaagttgccactccagtgcccaccagccttgtcctaataaaattaagttgcatcattttgtctgactaggtgtccttctataatattatggggtggaggggggtggtatggagcaaggggcaagttgggaagacaacctgtagggcctgcggggtctattgggaaccaagctggagtgcagtggcacaatcttggctcactgcaatctccgcctcctgggttcaagcgattctcctgcctcagcctcccgagttgttgggattccaggcatgcatgaccaggctcagctaatttttgtttttttggtagagacggggtttcaccatattggccaggctggtctccaactcctaatctcaggtgatctacccaccttggcctcccaaattgctgggattacaggcgtgaaccactgctcccttccctgtccttggcctagaattatatttttttaaagactcacatagtcttctgcacagggcattctttttgcttcaggatgtttacaacatttgctgcccacttttcctaggtttcttgagacctctacaagagttggagttgacacttggggtactttcttggtgtaacgaactaatagcctgaaaaaaagaagtcatgtgttttcagcaaggcaagaaactgtctaacatagtagataaaacagagaacacttggccggaatcaactaagatgttgctatgttccattcatcatattatctccatctgcagagtagtgggttagtggagggtagaaaacattctcctgaacaactagttaaacttggctttgagttccacctgtaccacttgcataatcttgggaaagtgagttgcctaattcagtgacattaataaatttattaatttcttctttcaataaaacctggagagagcttcatatgtatcagcatatgctaaacttgaaagatacaagtagaaaatggaaggaaatatatctgactcaatagggatagttcaagggttaaattaaaagtagtaaagtattataattaatctgacatggtacctaatatataataatcatgtattaagaatgccagtcaccattaaaagtcaatgtatgactttaatctactcgaggaaagaaactatgtcttgttcactgttattatctctaaaatccataatcagaagagcaccatgtgtatgagccacacaataaatatctactgtataatatgtctcttcttgtttttaaccttcatagataagactctattgaattgggacattagtccagcaagccattctgtctctgtctcttctatggagggaaaggtttaaccatcaaagactaggtgcatctcccaaacaacctgaatttaatattcaaatatgtatctaaattcatttgttacatttttgtgttcagcttacatattactttttgagcgacatctattcaaggcctactacttgctgctctacaaaatattgccatgctctatttgcccattaactatttcttaaccttcaagggacatgctcagttctgatataccaagatttggtatttaccctcccagcctacatacttccaatcttaagagaacaatttttagactacattcaaatatagacctctccaccccatcaactattttatctctcctctcctatctttcttgacaaagagtgattagaaatatgcaattctaggtatcgatgctacgtagataagtagcatggcgggttaatcattaactacagaggaacccctagtgatggagttggccactccctctctgcgcgctcgctcgctcactgaggccgggcgaccaaaggtcgcccgacgcccgggctttgcccgggcggcctcagtgagcgagcgagcgcgcagctgcctgcagg

SEQ ID NO: 2321 - DNA, 4223 bp, Artificial Sequence
  source: /note="Description of Artificial Sequence: Synthetic polynucleotide"
cctgcaggcagctgcgcgctcgctcgctcactgaggccgcccgggcaaagcccgggcgtcgggcgacctttggtcgcccggcctcagtgagcgagcgagcgcgcagagagggagtggccaactccatcactaggggttccttgtagttaatgattaacccgccatgctacttatctacgtagccatgcgtcgacataacgcgtcgacattgattattgactagttattaatagtaatcaattacggggtcattagttcatagcccatatatggagttccgcgttacataacttacggtaaatggcccgcctggctgaccgcccaacgacccccgcccattgacgtcaataatgacgtatgttcccatagtaacgccaatagggactttccattgacgtcaatgggtggagtatttacggtaaactgcccacttggcagtacatcaagtgtatcatatgccaagtacgccccctattgacgtcaatgacggtaaatggcccgcctggcattatgcccagtacatgaccttatgggactttcctacttggcagtacatctacgtattagtcatcgctattaccatgtcgaggccacgttctgcttcactctccccatctcccccccctccccacccccaattttgtatttatttattttttaattattttgtgcagcgatgggggcggggggggggggcgcgcgccaggcggggcggggcggggcgaggggcggggcggggcgaggcggagaggtgcggcggcagccaatcagagcggcgcgctccgaaagtttccttttatggcgaggcggcggcggcggcggccctataaaaagcgaagcgcgcggcgggcgggagcaagcttcgtttagtgaaccgtcagatcgcctggagacgccatccacgctgttttgacctccatagaagacaccgggaccgatccagcctccgcggattcgaatcccggccgggaacggtgcattggaacgcggattccccgtgccaagagtgacgtaagtaccgcctatagagtctataggcccacaaaaaatgctttcttcttttaatatacttttttgtttatcttatttctaatactttccctaatctctttctttcagggcaataatgatacaatgtatcatgcctctttgcaccattctaaagaataacagtgataatttctgggttaaggcaatagcaatatttctgcatataaatatttctgcatataaattgtaactgatgtaagaggtttcatattgctaatagcagctacaatccagctaccattctgcttttattttatggttgggataaggctggattattctgagtccaagctaggcccttttgctaatcatgttcatacctcttatcttcctcccacagctcctgggcaacgtgctggtctgtgtgctggcccatcactttggcaaagaattgggattcgaaccggtgccgccaccatggcgacgggttcaagaacttccctacttcttgcatttggcctgctttgtttgccgtggttacaggagggctcggcagctgccgaggtccagctgcaacagtctggacctgagctggtgaagcctggggcttcagtgaagatatcctgcaagacttctggatacacattcactgaatacaccatacactgggtgaagcagagccatggagagagccttgagtggattggaggtattaatccaaacgatggtggtactatttacaaccagaagttcaagggcaaggccacattgactgtagacaagtcctccaaaacagcctacatggagctccgcagcctgacatctgaggattctgcagtcttttactgtgcaagagggccctccgccaggtttccttactggggccaagggactctggtcactgtctctgcaggtggtggtggtagcggcggcggcggctctggtggtggtggatccgatgttgtgatgacccagactccactcactttgtcggttaccattggacaaccagcctccatctcttgcaagtcaagtcagagcctcttagatagtgatggaaagacatatttgaattggttgttacagaggccaggccagtctccaaagcgcctaatctatctggtgtctaaactggactctggagtccctgacagattcactggcagtggatcagggacagatttcacactgaaaattagcagagtggaggctgaggatttgggagtttattattgctggcaaggtacacattttcctcggacgttcggtggaggcaccaagctggaaatcaaacggtagtgacctgaggatgggtggcatccctgtgacccctccccagtgcctctcctggccctggaagttgccactccagtgcccaccagccttgtcctaataaaattaagttgcatcattttgtctgactaggtgtccttctataatattatggggtggaggggggtggtatggagcaaggggcaagttgggaagacaacctgtagggcctgcggggtctattgggaaccaagctggagtgcagtggcacaatcttggctcactgcaatctccgcctcctgggttcaagcgattctcctgcctcagcctcccgagttgttgggattccaggcatgcatgaccaggctcagctaatttttgtttttttggtagagacggggtttcaccatattggccaggctggtctccaactcctaatctcaggtgatctacccaccttggcctcccaaattgctgggattacaggcgtgaaccactgctcccttccctgtccttggcctagaattatatttttttaaagactcacatagtcttctgcacagggcattctttttgcttcaggatgtttacaacatttgctgcccacttttcctaggtttcttgagacctctacaagagttggagttgacacttggggtactttcttggtgtaacgaactaatagcctgaaaaaaagaagtcatgtgttttcagcaaggcaagaaactgtctaacatagtagataaaacagagaacacttggccggaatcaactaagatgttgctatgttccattcatcatattatctccatctgcagagtagtgggttagtggagggtagaaaacattctcctgaacaactagttaaacttggctttgagttccacctgtaccacttgcataatcttgggaaagtgagttgcctaattcagtgacattaataaatttattaatttcttctttcaataaaacctggagagagcttcatatgtatcagcatatgctaaacttgaaagatacaagtagaaaatggaaggaaatatatctgactcaatagggatagttcaagggttaaattaaaagtagtaaagtattataattaatctgacatggtacctaatatataataatcatgtattaagaatgccagtcaccattaaaagtcaatgtatgactttaatctactcgaggaaagaaactatgtcttgttcactgttattatctctaaaatccataatcagaagagcaccatgtgtatgagccacacaataaatatctactgtataatatgtctcttcttgtttttaaccttcatagataagactctattgaattgggacattagtccagcaagccattctgtctctgtctcttctatggagggaaaggtttaaccatcaaagactaggtgcatctcccaaacaacctgaatttaatattcaaatatgtatctaaattcatttgttacatttttgtgttcagcttacatattactttttgagcgacatctattcaaggcctactacttgctgctctacaaaatattgccatgctctatttgcccattaactatttcttaaccttcaagggacatgctcagttctgatataccaagatttggtatttaccctcccagcctacatacttccaatcttaagagaacaatttttagactacattcaaatatagacctctccaccccatcaactattttatctctcctctcctatctttcttgacaaagagtgattagaaatatgcaattctaggtatcgatgctacgtagataagtagcatggcgggttaatcattaactacagaggaacccctagtgatggagttggccactccctctctgcgcgctcgctcgctcactgaggccgggcgaccaaaggtcgcccgacgcccgggctttgcccgggcggcctcagtgagcgagcgagcgcgcagctgcctgcagg

SEQ ID NO: 2322 - protein, 735 aa, Artificial Sequence
  source: /note="Description of Artificial Sequence: Synthetic polypeptide"
MAADGYLPDWLEDTLSEGIRQWWKLKPGPPPPKPAERHKDDSRGLVLPGYKYLGPFNGLDKGEPVNEADAAALEHDKAYDRQLDSGDNPYLKYNHADAEFQERLKEDTSFGGNLARAVFQAKKRVLEPLGLVEEPVKTAPGKKRPVEHSPAEPDSSSGTGKSGQQPARKRLNFGQTGDADSVPDPQPLGQPPAAPSGLGTNTMASGSGAPMADNNEGADGVGNSSGNWHCDSTWMGDRVITTSTRTWALPTYNNHLYKQISSQSGASNDNHYFGYSTPWGYFDFNRFHCHFSPRDWQRLINNNWGFRPKRLNFKLFNIQVKEVTQNDGTTTIANNLTSTVQVFTDSEYQLPYVLGSAHQGCLPPFPADVFMVPQYGYLTLNNGSQAVGRSSFYCLEYFPSQMLRTGNNFTFSYTFEDVPFHSSYAHSQSLDRLMNPLIDQYLYYLSRTNTPSGTTTQSRLQFSQAGASDIRDQSRNWLPRPCYRQQRVSKTAADNNNSDYSWTGATKYHLNGRDSLVNPGTAMASHKDDEEKYFPQSGVLIFGKQDSGKTNVDIEKVMITDEEEIRTTNPVATEQYGSVSTNLQSGNTQAATSDVNTQGVLPGMVRQDRDVYLQGPIWAKIPHTDGHFHPSPLMGGFGLKHPPPQILIKNTPVPANPSTTFSAAKFASFITQYSTGQVSVEIEWEPQKENSKRWNPEIQYTSNYNKSVNVDFTVDTNGVYSEPRPIGTRYLTRNL

SEQ ID NO: 2323 - protein, 735 aa, Artificial Sequence
  source: /note="Description of Artificial Sequence: Synthetic polypeptide"
MAADGYLPDWLEDTLSEGIRQWWKLKPGPPPPKPAERHKDDSRGLVLPGYKYLGPFNGLDKGEPVNEADAAALEHDKAYDRQLDSGDNPYLKYNHADAEFQERLKEDTSFGGNLARAVFQAKKRVLEPLGLVEEPVKTAPGKKRPVEHSPAEPDSSSGTGKSGQQPARKRLNFGQTGDADSVPDPQPLGQPPAAPSGLGTNTMASGSGAPMADNNEGADGVGNSSGNWHCDSTWMGDRVITTSTRTWALPTYNNHLYKQISSQSGASNDNHYFGYSTPWGYFDFNGFHCHFSPRDWQRLINNNWGFRPKRLNFKLFNIQVKEVTQNDGTTTIANNLTSTVQVFTDSEYQLPYVLGSAHQGCLPPFPADVFMVPQYGYLTLNNGSQAVGRSSFYCLEYFPSQMLRTGNNFTFSYTFEDVPFHSSYAHSQSLDRLMNPLIDQYLYYLSRTNTPSGTTTQSRLQFSQAGASDIRDQSRNWLPGPCYRQQRVSKTAADNNNSDYSWTGATKYHLNGRDSLVNPGTAMASHKDDEEKYFPQSGVLIFGKQDSGKTNVDIEKVMITDEEEIRTTNPVATEQYGSVSTNLQSGDTQAATSDVNTQGVLPGMARQDRDVYLQGPIWAKIPHTDGHFHPSPLMGGFGLKHPPPQILIKNTPVPANPSTTFSAAKFASFITQYSTGQVSVEIEWEPQKENSKRWNPEIQYTSNYNKSVNVDFTVDTNGVYSEPRPIGTRYLTRNL

SEQ ID NO: 2324 - protein, 735 aa, Artificial Sequence
  source: /note="Description of Artificial Sequence: Synthetic polypeptide"
MAADGYLPDWLEDTLSEGIRQWWKLKPGPPPPKPAERHKDDSRGLVLPGYKYLGPFNGLDKGEPVNEADAAALEHDKAYDRQLDSGDNPYLKYNRADAEFQERLKEDTSFGGNLARAVFQAKKRVLEPLGLVEEPVKTAPGKKRPVEHSPAEPDSSSGTGKSGQQPARKRLNFGQTGDADSVPDPQPLGQPPAAPSGLGTNTMASGSGAPMADNNEGADGVGNSSGNWHCDSTWMGDRVITTSTRTWALPTYNNHLYKQISSQSGASNDNHYFGYSTPWGYFDFNRFHCHFSPRDWQRLINNNWGFRPKRLNFKLFNIQVKEVTQNDGTTTIANNLTSTVQVFTDSEYQLPYVLGSAHQGCLPPFPADVFMVPQYGYLTLNNGSQAVGRSSFYCLEYFPSQMLRTGNNFTFSYTFEDVPFHSSYAHSQSLDRLMNPLIDQYLYYLSRTNTPSGTTTQSRLQFSQAGASDIRDQSRNWLPGPCYRQQRVSKTAADNNNSDYSWTGATKYHLNGRDSLVNPGTAMASHKDDEEKYFPQSGVLIFGKQDSGKTNVDIEKVMITDEEEIRTTNPVATEQYGSVSTNLQSGNTQAATSDVNTQGVLPGMVRQDRDVYLQGPIWAKIPHTDGHFHPSPLMGGFGLKHPPPQILIKNTPVPANPSTTFSAAKFASFITQYSTGQVSVEIEWEPQKENSKRWNPEIQYTSNYNKSVNVDFTVDTNGVYSEPRPIGTRYLTRNL

SEQ ID NO: 2325 - protein, 735 aa, Artificial Sequence
  source: /note="Description of Artificial Sequence: Synthetic polypeptide"
MAADGYLPDWLEDTLSEGIRQWWKLKPGPPPPKPAERHKDDSRGLVLPGYKYLGPFNGLDKGEPVNEADAAALEHDKAYDRQLDSGDNPYLKYNHADAEFQERLKEDTSFGGNLARAVFQAKKRVLEPLGLVEEPVKTAPGKKRPVEHSPAEPDSSSGTGKSGQQPARKRLNFGQTGDADSVPDPQPLGQPPAAPSGLGTNTMASGSGAPMADNNEGADGVGNSSGNWHCDSTWMGDRVITTSTRTWALPTYNNHLYKQISSQSGASNDNHYFGYSTPWGYFDFNRFHCHFSPRDWQRLINNNWGFRPKRLNFKLFNIQVKEVTQNDGTTTIANNLTSTVQVFTDSEYQLPYVLGSAHQGCLPPFPADVFMVPQYGYLTLNNGSQAVGRSSFYCLEYFPSQMLRTGNNFTFSYTFEDVPFHSSYAHSQSLDRLMNPLIDQYLYYLSRTNTPSGTTTQSRLQFSQAGASDIRDQSRNWLPGPCYRQQRVSKTAADNNNSDYSWTGATKYHLNGRDSLVNPGTAMASHKDDEEKYFPQSGVLIFGKQDSGKTNVDIEKVMITDEEEVRTTNPVATEQYGSVSTNLQSGNTQAATSDVNTQGVLPGMVRQDRDVYLQGPIWAKIPHTDGHFHPSPLMGGFGLKHPPPQILIKNTPVPANPSTTFSAAKFASFITQYSTGQVSVEIEWEPQKENSKRWNPEIQYTSNYNKSVNVDFTVDTNGVYSEPRPIGTRYLTRNL

SEQ ID NO: 2326 - protein, 735 aa, Artificial Sequence
  source: /note="Description of Artificial Sequence: Synthetic polypeptide"
MAADGYLPDWLEDTLSEGIRQWWKLKPGPPPPKPAERHKDDSRGLVLPGYKYLGPFNGLDKGEPVNEADAAALEHDKAYDRQLDSGDNPYLKYNHADAEFQERLKEDTSFGGNLARAVFQAKKRVLEPLGLVEEPVKTAPGKKRPVEHSPAGPDSSSGTGKSGQQPARKRLNFGQTGDADSVPDPQPLGQPPAAPSGLGTNTMASGSGAPMADNNEGADGVGNSSGNWHCDSTWMGDRVITTSTRTWALPTYNNHLYKQISSQSGASNDNHYFGYSTPWGYFDFNRFHCHFSPRDWQRLINNNWGFRPKRLNFELFNIQVKEVTQNDGTTTIANNLTSTVQVFTDSEYQLPYVLGSAHQGCLPPFPADVFMVPQYGYLTLNNGSQAVGRSSFYCLEYFPSQMLRTGNNFTFSYTFEDVPFHSSYAHSQSLDRLMNPLIDQYLYYLSRTNTPSGTTTQSRLQFSQAGASDIRDQSRNWLPGPCYRQQRVSKTAADNNNSDYSWTGATKYHLNGRDSLVNPGTAMASHKDDEEKYFPQSGVLIFGKQDSGKTNVDIEKVMITDEEEIRTTNPVATEQYGSVSTNLQSGNTQAATSDVNTQGVLPGMVWQDRDVYLQGPIWAKIPHTDGHFHPSPLMGGFGLKHPPPQILIKSTPVPANPSTTFSAAKFASFITQYSTGQVSVEIEWELQKENSKRWNPEIQYTSNYNKSVNVDFTVDTNGVYSEPRPIGTRYLTRNL

SEQ ID NO: 2327 - protein, 735 aa, Artificial Sequence
  source: /note="Description of Artificial Sequence: Synthetic polypeptide"
MAADGYLPDWLEDTLSEGIRQWWKLKPGPPPPKPAERHKDDSRGLVLPGYKYLGPFNGLDKGEPVNEADAAALEHDKAYDRQLDSGDNPYLKYNHADAEFQERLKEDTSFGGNLARAVFQAKKRVLEPLGLVEEPVKTAPGKKRPVEHSPAGPDSSSGTGKSGQQPARKRLNFGQTGDADSVPDPQPLGQPPAAPSGLGTNTMASGSGAPMADNNEGADGVGNSSGNWHCDSTWMGDRVITTSTRTWALPTYNNHLYKQISSQSGASNDNHYFGYSTPWGYFDFNRFHCYFSPRDWQRLINNNWGFRPKRLNFELFNIQVKEVTQNDGTTTIANNLTSTVQVFTDSEYQLPYVLGSAHQGCLPPFPADVFMVPQYGYLTLNNGSQAVGRSSFYCLEYFPSQMLRTGNNFTFSYTFEDVPFHSSYAHSQSLDRLMNPLIDQYLYYLSRTNTPSGTTTQSRLQFSQAGASDIRDQSRNWLPGPCYRQQRVSKTAADNNNSDYSWTGATKYHLNGRDSLVNPGTAMASHKDDEEKYFPQSGVLIFGKQDSGKTNVDIEKVMITDEEEIRTTNPVATEQYGSVSTNLQSGNTQAATSDVNTQGVLPGMVWQDRDVYLQGPIWAKIPHTDGHFHPSPLMGGFGLKHPPPQILIKSTPVPANPSTTFSAAKFASFITQYSTGQVSVEIEWELQKENSKRWNPEIQYTSNYNKSVNVDFTVDTNGVYSEPRPIGTRYLTRNL

SEQ ID NO: 2328 - protein, 734 aa, Artificial Sequence
  source: /note="Description of Artificial Sequence: Synthetic polypeptide"
MAADGYLPDWLEDTLSEGIRQWWKLKPGPPPPKPAERHKDDSRGLVLPGYKYLGPFNGLDKGEPVNEADAAALEHDKAYDRQLDSGDNPYLKYNHADAEFQERLKEDTSFGGNLARAVFQAKKRVLEPLGLVEEPVKTAPGKKRPVEHSPAEPDSSSGTGKSGQQPARKRLNFGQTGDADSVPDPQPLGQPPAAPSGLGTNTMASGSGAPMADNNEGADGVGNSSGNWHCDSTWMGDRVITTSTRTWALPTYNNHLYKQISSQSGASNDNHYFGYSTPWGYFDFNRFHCHFSPRDWQRLINNNWGFRPKRLNFKLFNIQVKEVTQNDGTTTIANNLTSTVQVFTDSEYQLPYVLGSAHQGCLPPFPADVFMVPQYGYLTLNNGSQAVGRSSFYCLEYFPSQMLRTGNNFTFSYTFEDVPFHSSYAHSQSLDRLMNPLIDQYLYYLSRTNTPSGTTTQSRLQFSQAGASDIRDQSRNWLPGPCYRQQRVSKTAADNNSDYSWTGATKYHLNGRDSLVNPGTAMASHKDDEEKYFPQSGVLIFGKQDSGKTNVDIEKVMITDEEEIRTTNPVATEQYGSVSTNLQSGNTQAATSDVNTQGVLPGMVRQDRDVYLQGPIWAKIPHTDGHFHPSPLMGGFGLKHPPPQILIKNTPVPANPSTTFSAAKFASFITQYSTGQVSVEIEWEPQKENSKRWNPEIQYTSNYNKSVNVDFTVDTNGVYSEPRPIGTRYLTRNL

SEQ ID NO: 2329 - protein, 735 aa, Artificial Sequence
  source: /note="Description of Artificial Sequence: Synthetic polypeptide"
MAADGYLPDWLEDTLSEGIRQWWKLKPGPPPPKPAERHKDDSRGLVLPGYKCLGPFNGLDKGEPVNEADAAALEHDKAYDRQLDSGDNPYLKYNHADAEFQERLKEDTSFGGNLARAVFQAKKRVLEPLGLVEEPVKTAPGKKRPVEHSPAESDSSSGTGKSGQQPARKRLNFGQTGDADSVPDPQPLGQPPAAPSGLGTNTMASGSGAPMADNNEGADGVGNSSGNWHCDSTWMGDRVITTSTRTWALPTYNNHLYKQISSQSGASNDNHYFGYSTPWGYFDFNRFHCHFSPRDWQRLINNNWGFRPKRLNFKLFNIQVKEVTQNDGTTTIANNLTSTVQVFTDSEYQLPYVLGSAHQGCLPPFPADVFMVPQYGYLTLNNGSQAVGRSSFYCLEYFPSQMLRTGNNFTFSYTFEDVPFHSSYAHSQSLDRLMNPLIDQYLYYLSRTNTPSGTTTQSRLQFSQAGASDIRDQSRNWLPGPCYRQQRVSKTAADNNNSDYSWTGATKYHLNGRDSLVNPGTAMASHKDDEEKYFPQSGVLIFGKQDSGKTNVDIEKVMITDEEEIRTTNPVATEQYGSVSTNLQSGNTQAATSDVNTQGVLPGMVWQDRDVYLQGPIWAKIPHTDGHFHPSPLMGGFGLKHPPPQILIKNTPVPANPSTTFSAAKFASFITQYSTGQVSVEIEWELQKENSKRWNPEIQYTSNYNKSVNVDFTVDTNGVYSEPRPIGTRYLTRNL

SEQ ID NO: 2330 - protein, 735 aa, Artificial Sequence
  source: /note="Description of Artificial Sequence: Synthetic polypeptide"
MAADGYLPDWLEDILSEGIRQWWKLKPGPPPPKPAERHKDDSRGLVLPGYKYLGPFNGLDKGEPVNEADAAALEHDKAYDRQLDSGDNPYLKYNHADAEFQERLKEDTSFGGNLGRAVFQAKKRVLEPLGLVEEPVKTAPGKKRPVEQSPAEPDSSSGTGKAGNQPARKRLNFGQTGDADSVPDPQPLGQPPAAPSGLGTNTMASGSGAPMADNNEGADGVGNSSGNWHCDSTWMGDRVITTSTRTWALPTYNNHLYKQISSQSGASNDNHYFGYSTPWGYFDFNRFHCHFSPRDWQRLINNNWGFRPKRLNFKLFNIQVKEVTQNDGTTTIANNLTSTVQVFTDSEYQLPYVLGSAHQGCLPPFPADVFMVPQYGYLTLNNGSQAVGRSSFYCLEYFPSQMLRTGNNFTFSYTFEDVPFHSSYAHSQSLDRLMNPLIDQYLYYLSRTNTPSGTTTQSRLQFSQAGASDIRDQSRNWLPGPCYRQQRVSKTAADNNNSDYSWTGATKYHLNGRDSLVNPGTAMASHKDDEEKYFPQSGVLIFGKQDSGKTNVDIEKVMITDEEEIRTTNPVATEQYGSVSTNLQSGNTQAATSDVNTQGVLPGMVRQDRDVYLQGPIWAKIPHTDGHFHPSPLMGGFGLKHPPPQILIKNTPVPANPSTTFSAAKFASFITQYSTGQVSVEIEWEPQKENSKRWNPEIQYTSNYNKSVNVDFTVDTNGVYSEPRPIGTRYLTRNL

SEQ ID NO: 2331 - protein, 735 aa, Artificial Sequence
  source: /note="Description of Artificial Sequence: Synthetic polypeptide"
MAADGYLPDWLEDTLSEGIRQWWKLKPGPPPPKPAERHKDDSRGLVLPGYKYLGPFNGLDKGEPVNEADAAALEHDKAYDRQLDSGDNPYLKYNHADAEFQERLKEDTSFGGNLARAVFQAKKRVLEPLGLVEEPVKTAPGKKRPVEHSPAEPDSSSGTGKSGQQPARKRLNFGQTGDADSVPDPQPLGQPPAAPSGLGTNTMASGSGAPMADNNEGADGVGNSSGNWHCDSTWMGDRVITTSTRTWALPTYNNHLYKQISSQSGASNDNHYFGYSTPWGYFDFNRFHCHFSPRDWQRLINNNWGFRPKRLNFKLFNIQVKEVTQNDGTTTIANNLTSTVQVFTDSEYQLPYVLGSAHQGCLPPFPADVFMVPQYGYLTLNNGSQAVGRSSFYCLEYFPSQMLRTGNNFTFSYTFEDVPFHSSYAHSQSLDRLMNPLIDQYLYYLSRTNTPSGTTTQSRLQFSQAGASDIRDQSRNWLPGPCYRQQRVSKTAADNNNSDYSWTGATKYHLNGRDSLVNPGTAMASHKDDEEKYFPQSGVLIFGKQDSGKTNVDIEKVMITDEEEIRTTNPVATEQYGSVSTNLQSGNTQAATSDVNTQGVLPGMVRQDRDVYLQGPIWAKIPHTDGHFHPSPLMGGFGLKHPPPQILIKNTPVPANPSTTFSAAKFASFITQYSTGQVSVEIEWEPQKENSKRWNPEIQYTSNYNKSVNVDFTVDTNGVYSEPRPIGTRCLTRNL

SEQ ID NO: 2332 - protein, 735 aa, Artificial Sequence
  source: /note="Description of Artificial Sequence: Synthetic polypeptide"
MAADGYLPDWLEDTLSEGIRQWWKLKPGPPPPKPAERHKDDSRGLVLPGYKYLGPFNGLDKGEPVNEADAAALEHDKAYDRQLDSGDNPYLKYNHADAEFQERLKEDTSFGGNLARAVFQAKKRVLEPLGLVEEPVKTAPGKKRPVEHSPAEPDSSSGTGKSGQQPARKRLNFGQTGDADSVPDPQPLGQPPAAPSGLGTNTMASGSGAPMADNNEGADGVGNSSGNWHCDSTWMGDRVITTSTRTWALPTYNNHLYKQISSQSGASNDNHYFGYSTPWGYFDFNRFHCHFSPRDWQRLINNNWGFRPKRLNFKLFNIQVKEVTQNDGTTTIANNLTSTVQVFTDSEYQLPYVLGSAHQGCLPPFPADVFMVPQYGYLTLNNGSQAVGRSSFYCLEYFPSQMLRTGNNFTFSYTFEDVPFHSSYAHSQSLDRLMNPLIDQYLYYLSRTNTPSGTTTQSRLQFSQAGASDIRDQSRNWLPGPCYRQQRVSKTAADNNNSDYSWTGATKYHLNGRDSLVNPGTAMASHKDDEEKYFPQSGVLIFGKQDSGKTNVDIEKVMITDEEEIRTTNPVATEQYGSVSTNLQSGNTQAATSDVNTQGVLPGMVRQGRDVYLQGPIWAKIPHTDGHFHPSPLMGGFGLKHPPPQILIKNTPVPANPSTTFSAAKFASFITQYSTGQVSVEIEWEPQKENSKRWNPEIQYTSNYNKSVNVDFTVDTNGVYSEPRPIGTRYLTRNL

SEQ ID NO: 2333 - protein, 735 aa, Artificial Sequence
  source: /note="Description of Artificial Sequence: Synthetic polypeptide"
MAADGYLPDWLEDTLSEGIRQWWKLKPGPPPPKPAERHKDDSRGLVLPGYKYLGPFNGLDKGEPVNEADAAALEHDKAYDRQLDSGDNPYLKYNHADAEFQERLKEDTSFGGNLARAVFQAKKRVLEPLGLVEEPVKTAPGKKRPVEHSPAEPDSSSGTGKSGQQPARKRLNFGQTGDADSVPDPQPLGQPPAAPSGLGTNTMASGSGAPMADNNEGADGVGNSSGNWHCDSTWMGDRVITTSTRTWALPTYNNHLYKQISSQSGASNDNHYFGYSTPWGYFDFNRFHCHFSPRDWQRLINNNWGFRPKRLNFKLFNIQVKEVTQNDGTTTIANNLTSTVQVFTDSEYQLPYVLGSAHQGCLPPFPADVFMVPQYGYLTLNNGSQAVGRSSFYCLEYFPSQMLRTGNNFTFSYTFEDVPFHSSYAHSQSLDRLMNPLIDQYLYYLSRTNTPSGTTTQSRLQFSQAGASDIRDQSRNWLPGPCYRQQRVSKTAADNNNSDYSWTGATKYHLNGRDSLVNPGTAMASHKDDEEKYFPQSGVLIFGKQDSGKTNVDIEKVMITDEGEIRTTNPVATEQYGSVSTNLQSGNTQAATSDVNTQGVLPGMVRQDRDVYLQGPIWAKIPHTDGHFHPSPLMGGFGLKHPPPQILIKNTPVPANPSTTFSAAKFASFITQYSTGQVSVEIEWEPQKENSKRWNPEIQYTSNYNKSVNVDFTVDTNGVYSEPRPIGTRYLTRNL

SEQ ID NO: 2334 - protein, 735 aa, Artificial Sequence
  source: /note="Description of Artificial Sequence: Synthetic polypeptide"
MAADGYLPDWLEDTLSEGIRQWWKLKPGPPPPKPAERHKDDSRGLVLPGYKYLGPFNGLDKGEPVNEADAAALEHDKAYDRQLDSGDNPYLKYNHADAEFQERLKEDTSFGGNLARAVFQAKKRVLEPLGLVEEPVKTAPGKKRPVEHSPAEPDSSSGTGKSGQQPARKRLNFGQTGDADSVPDPQPLGQPPAAPSGLGTNTMASGSGAPMADNNEGADGVGNSSGNWHCDSTWMGDRVITTSTRTWALPTYNNHLYKQISSQSGASNDNHYFGYSTPWGYFDFNRFHCHFSPRDWQRLINNNWGFRPKRLNFELFNIQVKEVTQNDGTTTIANNLTSTVQVFTDSEYQLPYVLGSAHQGCLPPFPADVFMVPQYGYLTLNNGSQAVGRSSFYCLEYFPSQMLRTGNNFTFSYTFEDVPFHSSYAHSQSLDRLMNPLIDQYLYYLSRTNTPSGTTTQSRLQFSQAGASDIRDQSRNWLPGPCYRQQRVSKTAADNNNSDYSWTGATKYHLNGRDSLVNPGTAMASHKDDEEKYFPQSGVLIFGKQDSGKTNVDIEKVMITDEEEIRTTNPVATEQYGSVSTNLQSGNTQAATSDVNTQGVLPGMVWQDRDVYLQGPIWAKIPHTDGHFHPSPLMGGFGLKHPPPQILIKSTPVPANPSTTFSAAKFASFITQYSTGQVSVEIEWELQKENSKRWNPEIQYTSNYNKSVNVDFTVDTNGVYSEPRPIGTRYLTRNL

SEQ ID NO: 2335 - protein, 735 aa, Artificial Sequence
  source: /note="Description of Artificial Sequence: Synthetic polypeptide"
MAADGYLPDWLEDILSEGIRQWWKLKPGPPPPKPAERHKDDSRGLVLPGYKYLGPFNGLDKGEPVNEADAAALEHDKAYDRQLDSGDNPYLKYNHADAEFQERLKEDTSFGGNLGRAVFQAKKRVLEPLGLVEEPVKTAPGKKRPVEQSPAEPDSSSGTGKAGNQPARKRLNFGQTGDADSVPDPQPLGQPPAAPSGLGSTTMATGSGAPMADNNEGADGVGNSSGNWHCDSTWMGDRVITTSTRTWALPTYNNHLYKQISSQSGASNDNHYFGYSTPWGYFDFNRFHCHFSPRDWQRLINNNWGFRPKRLNFKLFNIQVKEVTQNDGTTTIANNLTSTVQVFTDSEYQLPYVLGSAHQGCLPPFPADVFMVPQYGYLTLNNGSQAVGRSSFYCLEYFPSQMLRTGNNFTFSYTFEDVPFHSSYAHSQSLDRLMNPLIDQYLYYLSRTNTPSGTTTQSRLQFSQAGASDIRDQSRNWLPGPCYRQQRVSKTAADNNNSDYSWTGATKYHLNGRDSLVNPGTAMASHKDDEEKYFPQSGVLIFGKQDSGKTNVDIEKVMITDEEEIRTTNPVATEQYGSVSTNLQSGNTQAATSDVNTQGVLPGMVRQDRDVYLQGPIWAKIPHTDGHFHPSPLMGGFGLKHPPPQILIKNTPVPANPSTTFSAAKFASFITQYSTGQVSVEIEWEPQKENSKRWNPEIQYTSNYNKSVNVDFTVDTNGVYSEPRPIGTRYLTRNL

SEQ ID NO: 2336 - protein, 735 aa, Artificial Sequence
  source: /note="Description of Artificial Sequence: Synthetic polypeptide"
MAADGYLPDWLEDTLSEGIRQWWKLKPGPPPPKPAERHKDDSRGLVLPGYKYLGPFNGLDKGEPVNEADAAALEHDKAYDRQLDSGDNPYLKYNHADAEFQERLKEDTSFGGNLARAVFQAKKRVLEPLGLVEEPVKTAPGKKRPVEHSPAEPDSSSGTGKSGQQPARKRLNFGQTGDADSVPDPQPLGQPPAAPSGLGTNTMASGSGAPMADNNEGADGVGNSSGNWHCDSTWMGDRVITTSTRTWALPTYNNHLYKQISSQSGASNDNHYFGYSTPWGYFDFNRFHCHFSPRDWQRLINNNWGFRPKRLNFKLFNIQVKEVTQNDGTTTIANNLTSTVQVFTDSEYQLPYVLGSAHQGCLPPFPADVFMVPQYGYLTLNNGSQAVGRSSFYCLEYFPSQMLRTGNNFTFSYTFEDVPFHSSYAHSQSLDRLMNPLIDQYLYYLSRTNTPSGTTTQSRLQFSQAGASDIRDQSRNWLPGPCYRQQRVSKTAADNNNSDYSWTGATKYHLNGRDSLVNPGTAMASHKDDEEKYFPQSGVLIFGKQDSGKTNVDIEKVMITDEEEIRTTNPVATEQYGSVSTNLQSGNTQAATSDVNTQGVLPGMVRQDRDVYLQGPIWAKIPHTDGHFHPSPLMGGFGLKHPPPQILIKNTPVPANPSTTFSAAKFASFITQYSTGQVSVEIEWEPQKENSKRWNPEIQYTSNYNKSVNVDFTVDTNGVYSEPRPIGTRYLTRNL

SEQ ID NO: 2337 - protein, 735 aa, Artificial Sequence
  source: /note="Description of Artificial Sequence: Synthetic polypeptide"
MAADGYLPDWLEDTLSEGIRQWWKLKPGPPPPKPAERHKDDSRGLVLPGYKYLGPFNGLDKGEPVNEADAAALEHDKAYDRQLDSGDNPYLKYNHADAEFQERLKEDTSFGGNLARAVFQAKKRVLEPLGLVEEPVKTAPGKKRPVEHSPAEPDSSSGTGKSGQQPARKRLNFGQTGDADSVPDPQPLGQPPAAPSGLGTNTMASGSGAPMADNNEGADGVGNSSGNWHCDSTWMGDRVITTSTRTWALPTYNNHLYKQISSQSGASNDNHYFGYSTPWGYFDFNRFHCHFSPRDWQRLINNNWGFRPKRLNFKLFNIQVKEVTQNDGTTTIANNLTSTVQVFTDSEYQLPYVLGSAHQGCLPPFPADVFMVPQYGYLTQNNGSQAVGRSSFYCLEYFPSQMLRTGNNFTFSYTFEDVPFHSSYAHSQSLDRLMNPLIDQYLYYLSRTNTPSGTTTQSRLQFSQAGASDIRDQSRNWLPGPCYRQQRVSKTAADNNNSDYSWTGATKYHLNGRDSLVNPGTAMASHKDDEEKYFPQSGVLIFGKQDSGKTNVDIEKVMITDEEEIRTTNPVATEQYGSVSTNLQSGNTQAATSDVNTQGVLPGMVRQDRDVYLQGPIWAKIPHTDGHFHPSPLMGGFGLKHPPPQILIKNTPVPANPSTTFSAAKFASFITQYSTGQVSVEIEWEPQKENSKRWNPEIQYTSNYNKSVNVDFTVDTNGVYSEPRPIGTRYLTRNL

SEQ ID NO: 2338 - protein, 735 aa, Artificial Sequence
  source: /note="Description of Artificial Sequence: Synthetic polypeptide"
MAADGYLPDWLEDTLSEGIRQWWKLKPGPPPPKPAERHKDDSRGLVLPGYKYLGPFNGLDKGEPVNEADAAALEHDKAYDRQLDSGDNPYLKYNRADAEFQERLKEDTSFGGNLARAVFQAKKRVLEPLGLVEEPVKTAPGKKRPVEHSPAGPDSSSGTGKSGQQPARKRLNFGQTGDADSVPDPQPLGQPPAAPSGLGTNTMASGSGAPMADNNEGADGVGNSSGNWHCDSTWMGDRVITTSTRTWALPTYNNHLYKQISSQSGASNDNHYFGYSTPWGYFDFNRFHCHFSPRDWQRLINNNWGFRPKRLNFELFNIQVKEVTQNDGTTTIANNLTSTVQVFTDSEYQLPYVLGSAHQGCLPPFPADVFMVPQYGYPTLNNGSQAVGRSSFYCLEYFPSQMLRTGNNFTFSYTFEDVPFHSSYAHSQSLDRLMNPLIDQYLYYLSRTNTPSGTTTQSRLQFSQAGASDIRDQSRNWLPGPCYRQQRVSKTAADNNNSDYSWTGATKYHLNGRDSLVNPGTAMASHKDDEEKYFPQSGVLIFGKQDSGKTNVDIEKVMITDEEEIRTTNPVATEQYGSVSTNLQSGNTQAATSDVNTQGVLPGMVWQDRDVYLQGPIWAKIPHTDGHFHPSPLMGGFGLKHPPPQILIKSTPVPANPSTTFSAAKFASFITQYSTGQVSVEIEWELQKENSKRWNPEIQYTSNYNKSVNVDFTVDTNGVYSEPRPIGTRYLTRNL

SEQ ID NO: 2339 - protein, 735 aa, Artificial Sequence
  source: /note="Description of Artificial Sequence: Synthetic polypeptide"
MAADGYLPDWLEDTLSEGIRQWWKLKPGPPPPKPAERHKDDSRGLVLPGYKYLGPFNGLDKGEPVNEADAAALEHDKAYDRQLDSGDNPYLKYNHADAEFQERLKEDTSFGGNLARAVFQAKKRVLEPLGLVEEPVKTAPGKKRPVEHSPAEPDSSSGTGKSGQQPARKRLNFGQTGDADSVPDPQPLGQPPAAPSGLGTNTMASGSGAPMADNNEGADGVGNSSGNWHCDSTWMGDRVITTSTRTWALPTYNNHLYKQISSQSGASNDNHYFGYSTPWGYFDFNGFHCHFSPRDWQRLINNNWGFRPKRLNFKLFNIQVKEVTQNDGTTTIANNLTSTVQVFTDSEYQLPYVLGSAHQGCLPPFPADVFMVPQYGYLTLNNGSQAVGRSSFYCLEYFPSQMLRTGNNFTFSYTFEDVPFHSSYAHSQSLDRLMNPLIDQYLYYLSRTNTPSGTTTQSRLQFSQAGASDIRDQSRNWLPGPCYRQQRVSKTAADNNNSDYSWTGATKYHLNGRDSLVNPGTAMASHKDDEEKYFPQSGVLIFGKQDSGKTNVDIEKVMITDEEEIRTTNPVATEQYGSVSTNLQSGNTQAATSDVNTQGVLPGMVRQDRDVYLQGPIWAKIPHTDGHFHPSPLMGGFGLKHPPPQILIKNTPVPANPSTTFSAAKFASFITQYSTGQVSVEIEWEPQKENSKRWNPEIQYTSNYNKSVNVDFTVDTNGVYSEPRPIGTRYLTRNL

SEQ ID NO: 2340 - protein, 735 aa, Artificial Sequence
  source: /note="Description of Artificial Sequence: Synthetic polypeptide"
MAADGYLPDWLEDTLSEGIRQWWKLKPGPPPPKPAERHKDDSRGLVLPGYKYLGPFNGLDKGEPVNEADAAALEHDKAYDRQLDSGDNPYLKYNHADAEFQERLKEDTSFGGNLARAVFQAKKRVLEPPGLVEEPVKTAPGKKRPVEHSPAEPDSSSGTGKSGQQPARKRLNFGQTGDADSVPDPQPLGQPPAAPSGLGTNTMASGSGAPMADNNEGADGVGNSSGNWHCDSTWMGDRVITTSTRTWALPTYNNHLYKQISSQSGASNDNHYFGYSTPWGYFDFNRFHCHFSPRDWQRLINNNWGFRPKRLNFKLFNIQVKEVTQNDGTTTIANNLTSTVQVFTDSEYQLPYVLGSAHQGCLPPFPADVFMVPQYGYLTLNNGSQAVGRSSFYCLEYFPSQMLRTGNNFTFSYTFEDVPFHSSYAHSQSLDRLMNPLIDQYLYYLSRTNTPSGTTTQSRLQFSQAGASDIRDQSRNWLPGPCYRQQRVSKTAADNNNSDYSWTGATKYHLNGRDSLVNPGTAMASHKDDEEKYFPQSGVLIFGKQDSGKTNVDIEKVMITDEGEIRTTNPVATEQYGSVSTNLQSGNTQAATSDVNTQGVLPGMVRQDRDVYLQGPIWAKIPHTDGHFHPSPLMGGFGLKHPPPQILIKNTPVPANPSTTFSAAKFASFITQYSTGQVSVEIEWEPQKENSKRWNPEIQYTSNYSKSVNVDFTVDTNGVYSEPRPIGTRYLTRNL

SEQ ID NO: 2341 - protein, 735 aa, Artificial Sequence
  source: /note="Description of Artificial Sequence: Synthetic polypeptide"
MAADGYLPDWLEDILSEGIRQWWKLKPGPPPPKPAERHKDDSRGLVLPGYKYLGPFNGLDKGEPVNEADAAALEHDKAYDRQLDSGDNPYLKYNHADAEFQERLKEDTSFGGNLGRAVFQAKKRVLEPLGLVEEPVKTAPGKKRPVEQSPAEPDSSSGTGKAGNQPARKRLNFGQTGDADSVPDPQPLGQPPAAPSGLGSTTMATGSGAPMADNNEGADGVGNSSGNWHCDSQWLGDRVITTSTRTWALPTYNNHLYKQISSQSGASNDNHYFGYSTPWGYFDFNRFHCHFSPRDWQRLINNNWGFRPKRLNFKLFNIQVKEVTQNDGTTTIANNLTSTVQVFTDSEYQLPYVLGSAHQGCLPPFPADVFMVPQYGYLTLNNGSQAVGRSSFYCLEYFPSQMLRTGNNFTFSYTFEDVPFHSSYAHSQSLDRLMNPLIDQYLYYLSRTNTPSGTTTQSRLQFSQAGASDIRDQSRNWLPGPCYRQQRVSKTAADNNNSDYSWTGATKYHLNGRDSLVNPGTAMASHKDDEEKYFPQSGVLIFGKQDSGKTNVDIEKVMITDEEEIRTTNPVATEQYGSVSTNLQSGNTQAATSDVNTQGVLPGMVRQDRDVYLQGPIWAKIPHTDGHFHPSPLMGGFGLKHPPPQILIKNTPVPANPSTTFSAAKFASFITQYSTGQVSVEIEWEPQKENSKRWNPEIQYTSNYNKSVNVDFTVDTNGVYSEPRPIGTRYLTRNL

SEQ ID NO: 2342 - protein, 735 aa, Artificial Sequence
  source: /note="Description of Artificial Sequence: Synthetic polypeptide"
MAADGYLPDWLEDTLSEGIRQWWKLKPGPPPPKPAERHKDDSRGLVLPGYKYLGPFNGLDKGEPVNEADAAALEHDKAYDRQLDSGDNPYLKYNHADAEFQERLKEDTSFGGNLARAVFQAKKRVLEPLGLVEEPVKTAPGKKRPVEHSPAEPDSSSGTGKSGQQPARKRLNFGQTGDADSVPDPQPLGQPPAAPSGLGTNTMASGSGAPMADNNEGADGVGNSSGNWHCDSTWMGDRVITTSTRTWALPTYNNHLYKQISSQSGASNDNHYFGYSTPWGYFDFNRFHCHFSPRDWQRLINNNWGFRPKRLNFKLFNIQVKEVTQNDGTTTIANNLTSTVQVFTDSEYQLPYVLGSAHQGCLPPFPADVFMVPQYGYLTLNNGSQAVGRSSFYCLEYFPSQMLRTGNNFTFSYTFEDVPFHSSYAHSQSLDRLMNPLIDQYLYYLSRTNTPSGTTTQSRLQFSQAGASDIRDQSRNWLPGPCYRQQRVSKTAADNNNSDYSWTGATKYHLNGRDSLVNPGTAMASHKDDEEKYFPQSGVLIFGKQDSGKTNVDIEKVMITDEEEIRTTNPVATEQYGSVSTNLQSGNTQAATSDVNTQGVLPGTVRQDRDVYLQGPIWAKIPHTDGHFHPSPLMGGFGLKHPPPQILIKNTPVPANPSTTFSAAKFASFITQYSTGQVSVEIEWEPQKENSKRWNPEIQYTSNYNKSVNVDFTVDTNGVYSEPRPIGTRYLTRNL

SEQ ID NO: 2343 - protein, 735 aa, Artificial Sequence
  source: /note="Description of Artificial Sequence: Synthetic polypeptide"
MAADGYLPDWLEDILSEGIRQWWKLKPGPPPPKPAERHKDDSRGLVLPGYKYLGPFNGLDKGEPVNEADAAALEHDKAYDRQLDSGDNPYLKYNHADAEFQERLKEDTSFGGNLGRAVFQAKKRVLEPLGLVEEPVKTAPGKKRPVEHSPAEPDSSSGTGKSGQQPARKRLNFGQTGDADSVPDPQPLGQPPAAPSGLGTNTMASGSGAPMADNNEGADGVGNSSGNWHCDSTWMGDRVITTSTRTWALPTYNNHLYKQISSQSGASNDNHYFGYSTPWGYFDFNRFHCHFSPRDWQRLINNNWGFRPKRLNFKLFNIQVKEVTQNDGTTTIANNLTSTVQVFTDSEYQLPYVLGSAHQGCLPPFPADVFMVPQYGYLTLNNGSQAVGRSSFYCLEYFPSQMLRTGNNFTFSYTFEDVPFHSSYAHSQSLDRLMNPLIDQYLYYLSRTNTPSGTTTQSRLQFSQAGASDIRDQSRNWLPGPCYRQQRVSKTAADNNNSDYSWTGATKYHLNGRDSLVNPGTAMASHKDDEEKYFPQSGVLIFGKQDSGKTNVDIEKVMITDEEEIRTTNPVATEQYGSVSTNLQSGNTQAATSDVNTQGVLPGMVRQDRDVYLQGPIWAKIPHTDGHFHPSPLMGGFGLKHPPPQILIKNTPVPANPSTTFSAAKFASFITQYSTGQVSVEIEWEPQKENSKRWNPEIQYTSNYNKSVNVDFTVDTNGVYSEPRPIGTRYLTRNL

SEQ ID NO: 2344 - protein, 735 aa, Artificial Sequence
  source: /note="Description of Artificial Sequence: Synthetic polypeptide"
MAADGYLPDWLEDTLSEGIRQWWKLKPGPPPPKPAERHKDDSRGLVLPGYKYLGPFNGLDKGEPVNEADAAALEHDKAYDRQLDSGDNPYLKYNHADAEFQERLKEDTSFGGNLARAVFQAKKRVLEPLGLVEEPVKTAPGKKRPVEHSPAESDSSSGTGKSGQQPARKRLNFGQTGDADSVPDPQPLGQPPAAPSGLGTNTMASGSGAPMADNNEGADGVGNSSGNWHCDSTWMGDRVITTSTRTWALPTYNNHLYKQISSQSGASNDNHYFGYSTPWGYFDFNRFHCHFSPRDWQRLINNNWGFRPKRLNFKLFNIQVKEVTQNDGTTTIANNLTSTVQVFTDSEYQLPYVLGSAHQGCLPPFPADVFMVPQYGYLTLNNGSQAVGRSSFYCLEYFPSQMLRTGNNFTFSYTFEDVPFHSSYAHSQSLDRLMNPLIDQYLYYLSRTNTPSGTTTQSRLQFSQAGASDIRDQSRNWLPGPCYRQQRVSKTAADNNNSDYSWTGATKYHLNGRDSLVNPGTAMASHKDDEEKYFPQSGVLIFGKQDSGKTNVDIEKVMITDEEEIRTTNPVATEQYGSVSTNLQSGNTQAATSDVNTQGVLPGMVWQDRDVYLQGPIWAKIPHTDGHFHPSPLMGGFGLKHPPPQILIKNTPVPANPSTTFSAAKFASFITQYSTGQVSVEIEWELQKENSKRWNPEIQYTSNYNKSVNVDFTVDTNGVYSEPRPIGTRYLTRNL

SEQ ID NO: 2345 - protein, 735 aa, Artificial Sequence
  source: /note="Description of Artificial Sequence: Synthetic polypeptide"
MAADGYLPDWLEDTLSEGIRQWWKLKPGPPPPKPAERHKDDSRGLVLPGYKYLGPFNGLDKGEPVNEADAAALEHDKAYDRQLDSGDNPYLKYNHADAEFQERLKEDTSFGGNLARAVFQAKKRVLEPLGLVEEPVKTAPGKKRPVEHSPAEPDSSSGTGKSGQQPARKRLNFGQTGDADSVPDPQPLGQPPAAPSGLGTNTMASGSGAPMADNNEGADGVGNSSGNWHCDSTWMGDRVITTSTRTWALPTYNNHLYKQISSQSGASNDNHYFGYSTPWGYFDFNRFHCHFSPRDWQRLINNNWGFRPKRLNFKLFNIQVKEVTQNDGTTTIANNLTSTVQVFTDSEYQLPYVLGSAHQGCLPPFPADVFMVPQYGYLTLNNGSQAVGRSSFYCLEYFPSQMLRTGNNFTFSYTFEDVPFHSSYAHSQSLDRLMNPLIDQYLYYLSRTNTPSGTTTQSRLQFSQAGASDIRDQSRNWLPGPCYRQQRVSKTAADNNNSDYSWTGATKYHLNGRDSLVNPGTAMASHKDDEEKYFPQSGVLIFRKQDSGKTNVDIEKVMITDEEEIRTTNPVATEQYGSVSTNLQSGNTQAATSDVNTQGVLPGMVRQDRDVYLQGPIWAKIPHTDGHFHPSPLMGGFGLKHPPPQILIKNTPVPANPSTTFSAAKFASFITQYSTGQVSVEIEWEPQKENSKRWNPEIQYTSNYNKSVNVDFTVDTNGVYSEPRPIGTRYLTRNL

SEQ ID NO: 2346 - protein, 735 aa, Artificial Sequence
  source: /note="Description of Artificial Sequence: Synthetic polypeptide"
MAADGYLPDWLEDTLSEGIRQWWKLKPGPPPPKPAERHQDDSRGLVLPGYKYLGPFNGLDKGEPVNEADAAALEHDKAYDRQLDSGDNPYLKYNHADAEFQERLKEDTSFGGNLGRAVFQAKKRVLEPLGLVEEPVKTAPGKKRPVEHSPAEPDSSSGTGKAGQQPARKRLNFGQTGDADSVPDPQPLGQPPAAPSGLGTNTTATGSGAPMADNNEGADGVGNSSGNWHCDSTWMGDRVITTSTRTWALPTYNNHLYKQISSQSGASNDNHYFGYSTPWGYFDFNRFHCHFSPRDWQRLINNNWGFRPKRLNFKLFNIQVKEVTQNDGTTTIANNLTSTVQVFADSEYQLPYVLGSAHQGCLPPFPADVFMVPQYGYLTLNNGSQAVGRSSFYCLEYFPSQMLRTGNNFTFSYTFEDVPFHSSYAHSQSLDRLMNPLIDQYLYYLSKTNAPSGTTTMSRLQFSQAGASDIRDQSRNWLPGPCYRQQRVSKTAADNNNSDYSWTGATKYHLNGRDSLVNPGPAMASHKDDEEKYFPQSGVLIFGKQDSGKTNVDIEKVMITDEEEIRTTNPVATEQYGSVSTNLQSGNTQAATTDVNTQGVLPGMVWQDRDVYLQGPIWAKIPHTDGHFHPSPLMGGFGLKHPPPQILIKNTPVPANPSTTFSAAKFASFITQYSTGQVSVEIEWELQKENSKRWNPEIQYTSNYNKSVNVDFTVDTNGVYSEPRPIGTRYLTRNL

SEQ ID NO: 2347 - protein, 735 aa, Artificial Sequence
  source: /note="Description of Artificial Sequence: Synthetic polypeptide"
MAADGYLPDWLEDTLSEGIRQWWKLKPGPPPPKPAERHQDDSRGLVLPGYKYLGPFNGLDKGEPVNEADAAALEHDKAYDRQLDSGDNPYLKYNHADAEFQERLKEDTSFGGNLGRAVFQAKKRVLEPLGLVEEPVKTAPGKKRPVEHSPAEPDSSSGTGKAGQQPARKRLNFGQTGDADSVPDPQPLGQPPAAPSGLGTNTMATGSGAPMADNNEGADGVGNSSGNWHCDSTWMGDRVITTSTRTWALPTYNNHLYKQISSQSGASNDNHYFGYSTPWGYFDFNRFHCHFSPRDWQRLINNNWGFRPKRLNFKLFNIQVKEVTQNDGTTTIANNLTSTVQVFTDSEYQLPYVLGSAHQGCLPPFPADVFMVPQYGYLTLNNGSQAVGRSSFYCLEYFPSQMLRTGNNFTFSYTFEDVPFHSSYAHSQSLDRLMNPLIDQYLYYLSKTNAPSGTTTMSRLQFSQAGASDIRDQSRNWLPGPCYRQQRVSKTAADNNNSDYSWTGATKYHPNGRDSLVNPGPAMASHKDDEEKYFPQSGVLIFGKQDSGKTNVDIEKVMITDEEEIRTTNPVATEQYGSVSTNLQSGNTQAATTDVNTQGVLPGMVWQDRDVYLHGPIWAKIPHTDGHFHPSPLMGGFGLKHPPPQILIKNTPVPANPSTTFSAAKFASFITQYSTGQVSVEIEWELQKENSKRWNPEIQYTSNYNKSVNVDFTVDTNGVYSEPRPIGTRYLTRNL

SEQ ID NO: 2348 - protein, 735 aa, Artificial Sequence
  source: /note="Description of Artificial Sequence: Synthetic polypeptide"
MAADGYLPDWLEDTLSEGIRQWWKLKPGPPPPKPAERHQDDSRGLVLPGYKYLGPFNGLDKGEPVNEADAAALEHDKAYDRQLDSGDNPYLKYNHADAEFQERLKEDTSFGGNLGRAVFQAKKRVLEPLGLVEEPVKTAPGKKRPVEHSPAEPDSSSGTGKAGQQPARKRLNFGQTGDADSVPDPQPLGQPPAAPSGLGTNTMATGSGAPMADNNEGADGVGNSSGNWHCDSTWMGDRAITTSTRTWALPTYNNHLYKQISSQSGASNDNHYFGYSTPWGYFDFNRFHCHFSPRDWQRLINNNWGFRPKRLNFKLFNIQVKEVTQNDGTTTIANNLTSTVQVFTDSEYQLPYVLGSAHQGCLPPFPADVFMVPQYGYLTLNNGSQAVGRSSFYCLEYFPSQMLRTGNNFTFSYTFEDVPFHSSYAHSQSLDRLMNPLIDQYLYYLSKTNAPSGTTTMSRLQFSQAGASDIRDQSRNWLPGPCYRQQRVSKTAADNNNSDYSWTGATKYHLNGRDSLVNPGPAMASHKDDEEKYFPQSGVLIFGKQDSGKTNVDIEKVMITDEEEIRTTNPVATEQYGSVSTNLQSGNTQAATTDVNTQGVLPGMVWQDRDVYLQGPIWAKIPHTDGHFHPSPLMGGFGLKHPPPQILIKNTPVPANPSTTFSAAKLASFITQYSTGQVSVEIEWELQKENSKRWNPEIQYTSNYNKSVNVDFTVDTNGVYSEPRPIGTRYLTRNL

SEQ ID NO: 2349 - protein, 735 aa, Artificial Sequence
  source: /note="Description of Artificial Sequence: Synthetic polypeptide"
MAADGYLPDWLEDTLSEGIRQWWKLKPGPPPPKPAERHQDDSRGLVLPGYKYLGPFNGLDKGEPVNEADAAALEHDKAYDRQLDSGDNPYLKYNHADAEFQERLKEDTSFGGNLGRAVFQAKKRVLEPLGLVEEPVKTAPGKKRPVEHSPAEPDSSSGTGKAGQQPARKRLNFGQTGDADSVPDPQPPGQPPAAPSGLGTNTMATGSGAPMADNNEGADGVGNSSGNWHCDSTWMGDRVITTSTRTWALPTYNNHLYKQISSQSGASNDNHYFGYSTPWGYFDFNRFHCHFSPRDWQRLINNNWGFRPKRLNFKLFNIQVKEVTQNDGTTTIANNLTSTVQVFTDSEYQLPYVLGSAHQGCLPPFPADVFMVPQYGYLTLNNGSQAVGRSSFYCLEYFPSQMLRTGNNFTFSYTFEDVPFHSSYAHSQSLDRLMNPLIDQYLYYLSKTNAPSGTTTMSRLQFSQAGASDIRDQSRNWLPGPCYRQQRVSKTAADNNNSDYSWTGATKYHLNGRDSLVNPGPAMASHKDDEEKYFPQSGVLIFGKQDSGKTNVDIEKVMITDEEEVRTTNPVATEQYGSVSTNLQSGNTQAATTDVNTQGVLPGMVWQDRDVYLQGPIWAKIPHTDGHFHPSPLMGGFGLKHPPPQILIKNTPVPANPSTTFSAAKFASFITQYSTGQVSVEIEWELQKENSKRWNPEIQYTSNYNKSVNVDFTVDTNGVYSEPRPIGTGYLTRNL

SEQ ID NO: 2350 - protein, 735 aa, Artificial Sequence
  source: /note="Description of Artificial Sequence: Synthetic polypeptide"
MAADGYLPDWLEDTLSEGIRQWWKLKPGPPPPKPAERHQDDSRGLVLPGYKYLGPFNGLDKGEPVNEADAAALEHDKAYDRQLDSGDNPYLKYNHADAEFQERLKEDTSFGGNLGRAVFQAKKRVLEPLGLVEEPVKTAPGKKRPVEHSPAEPDSSSGTGKAGQQPARKRLNFGQTGDADSVPDPQPLGQPPAAPSGLGTNTVATGSGAPMADNNEGADGVGNSSGNWHCDSTWMGDRVITTSTRTWALPTYNNHLYKQISSQSGASNDNHYFGYSTPWGYFDFNRFHCHFSPRDWQRLINNNWRFRPKRLNFKLFNIQVKEVTQNDGTTTIADNLTSTVQVFTDSEYQLPYVLGSAHQGCLPPFPADVFMVPQYGYLTLNNGSQAVGRSSFYCLEYFPSQMLRTGNNFTFSYTFEDVPLHSSYAHSQSLDRLMNPLIDQYLYYLSKTNAPSGTTTMSRLQFSQAGASDIRDQSRNWLPGPCYRQQRVSKTAADNNNSDYSWTGATKYHLNGRDSLVNPGPAMASHKDDEEKYFPQSGVLIFGKQDSGKTNVDIEKVMITDEEEIRTTNPVATEQYGSVSTNLQSGNTQAATTDVNTQGVLPGMVWQDRDVYLQGPIWAKIPHTDGHFHPSPLMGGFGLKHPPPQILIKNTPVPANPSTTFSAAKLASFITQYSTGQVSVEIEWELQKENSKRWNPEIQYTSNYNKSVNVDFTADTNGVYSEPRPIGTRYLTRNL

SEQ ID NO: 2351 - protein, 735 aa, Artificial Sequence
  source: /note="Description of Artificial Sequence: Synthetic polypeptide"
MAADGYLPDWLEDTLSEGIRQWWKLKPGPPPPKPAERHQDDSRGLVLPGYKYLGPFNGLDKGEPVNEADAAALEHDKAYDRQLDSGDNPYLKYNHADAEFQERLKEDTSFGGNLGRAVFQAKKRVLEPLGLVEEPVKTAPGKKRPVEHSPAEPDSSSGTGKAGQQPARKRSNFGQTGDADSVPDPQPLGQPPAAPSGLGTNTMATGSGAPMADNNEGADGVGNSSGNWHCDSTWMGDRVITTSTRTWALPTYNNHLYKQISSQSGASNDNHYFGYSTPWGYFDFNRFHCHFSPRDWQRLINNNWGFRPKRLNFKLFNIQVKEVAQNDGTTTIANNLTSTVQVFTDSEYQLPYVLGSAHQGCLPPFPADVFMVPQYGYLTLNNGSQAVGRSSFYCLEYFPSQMLRTGNNFTFSYTFEDVPFHSSYAHSQSLDRLMNPLIDQYLYYLSKTNAPSGTTTMSRLQFSQAGASDIRDQSRNWLPGPCYRQQRVSKTAADNNNSDYSWTGATKYHLNGRDSLVNPGPAMASHKDDEEKYFPQSGVLIFGKQDSGKTNVDIKKVMITDEEEIRTTNPVATEQYGSVSTNLQSGNTQAATTDVNTQGVLPGMVWQDRDVYLQGPIWAKIPHTDGHFHPSPLMGGFGLKHPPPQILIKNTPVPANPSTTFSAAKFASFITQYSTGQVSVEIEWELQKENSKRWNPEIQYTSNYNKSVNVDFTVDTNGVYSEPRPIGTRYLTRNL

SEQ ID NO: 2352 - protein, 734 aa, Artificial Sequence
  source: /note="Description of Artificial Sequence: Synthetic polypeptide"
MAADGYLPDWLEDTLSEGIRQWWKLKPGPPPPKPAERHQDDSRGLVLPGYKYLGPFNGLDKGEPVNEADAAALEHDKAYDRQLDSGDNPYLKYNHADAEFQERLKEDTSFGGNLGRAVFQAKKRVLEPLGLVEEPVKTAPGKKRPVEHSPAEPDSSSGTGKAGQQPARKRLNFGQTGDADSVPDPQPLGQPPAAPSGLGTNTMATGSGAPMADNNEGADGVGNSSGNWHCDSTWMGDRVITTSTRTWALPTYNNHLYKQISSQSGASNDNHYFGYSTPWGYFDFNRFHCHFSPRDWQRLINNWGFRPKRLNFKLFNIQVKEVTQNDGTTTIANNLTSTVQVFTDSEYQLPYVLGSAHQGCLPPFPADVFMVPQYGYLTLNNGSQAVGRSSFYCLEYFPSQMLRTGNNFTFSYTFEDVPFHSSYAHSQSLDRLMNPLIDQYLYYLSKTNAPSGTTTMSRLQFSQAGASDIRDQSRNWLPGPCYRQQRVSKTAADNNNSDYSWTGATKYHLNGRDSLVNPGPAMASHKDDEEKYFPQSGVLIFGKQDSGKTNVDIEKVMITDEEEIRTTNPVATEQYGSVSTNLQSGNTQAATTDVNTQGVLPGMVWQDRDVYLQGPIWAKIPHTDGHFHPSPLMGGFGLKHPPPQILIKNTPVPANPSTTFSAAKFASFITQYSTGQVSVEIEWELQKENSKRWNPEIQYTSNYNKSVNVDFTVDTNGVYSEPRPIGTRYLTRNL

SEQ ID NO: 2353 - protein, 735 aa, Artificial Sequence
  source: /note="Description of Artificial Sequence: Synthetic polypeptide"
MAADGYLPDWLEDTLSEGIRQWWKLKPGPPPPKPAERHQDDSRGLVLPGYKYLGPFNGLDKGEPVNEADAAALEHDKAYDRQLDSGDNPYLKYNHADAEFQERLKEDTSFGGNLGRAVFQAKKRVLEPLGLVEEPVKTAPGKKRPVEHSPAEPDSSSGTGKAGQQPARKRLNFGQTGDADSVPDPQPLGQPPAAPSGLGTNTMATGSGAPMADNNEGADGVGNSSGNWHCDSTWMGDRVITTSTRTWALPTYNNHLYKQISSQSGASNDNHYFGYSTPWGYFDFNRFHCHFSPRDWQRLINNNWGFRPKRLNFKLFNIQVKEVTQNDGTTTIANNLTSTVQVFTDSEYQLPYVLGSAHQGCLPPFPADVFMVPQYGYLTLNNGSQAVGRSSFYCLEYFPSQMLRTGNNFTFSYTFEDVPFHSSYAHSQSLDRLMNPLIDQYLYYLSKTNAPSGTTTMSRLQFSQAGASDIRDQSRNWLPGPCYRQQRVSKTAADNNNSDYSWTGATKYHLNGRDSLVNPGPAMASHKDDEEKYFPQSGVLIFGKQDSGKTNVDIEKVMITDEEEIRTTNPVATEQYGSVSTNLQSGNTQAATTDVNTQGVLPGMVWQDRDVYLQGPIWAKIPHTDGHFHPSPLMGGFGLKHPPPQILIKNTPVPANPSTTFSAAKFASFITQYSTGQVSVEIEWELQKENSKRWNPEIQYTSNYNKSVNVDFTVDTNGVYSEPRPIDTRYLTRNL

SEQ ID NO: 2354 - protein, 735 aa, Artificial Sequence
  source: /note="Description of Artificial Sequence: Synthetic polypeptide"
MAADGYLPDWLEDTLSEGIRQWWKLKPGPPPPKPAERHQDDSRGLVLPGYKYLGPFNGLDKGEPVNEADAAALEHDKAYDRQLDSGDNPYLKYNHADAEFQERLKEDTSFGGNLGRAVFQAKKRVLEPLGLVEEPVKTAPGKKRPVEHSPAEPDSSSGTGKAGQQPARKRLNFGQTGDADSVPDPQPLGQPPAAPSGLGTNTMATGSGAPMADNNEGADGVGNSSGNWHCDSTWMGDRVITTSTRTWALPTYNNHLYKQISSQSGASNDNHYFGYSTPWGYFDFNRFHCHFSPRDWQRLINNNWGFRPKRLNFKLFNIQVKEVTQNDGTTTIANNLTSTVQVFTDSEYQLPYVLGSAHQGCLPPFPADVFMVPQYGYLTLNNGSQAVGRSSFYCLEYFPSQMLRTGNNFTFSYTFEDVPFHSSYAHSQSLDRLMNPLINQYLYYLSKTNAPSGTTTMSRLQFSQAGASDIRDQSRNWLPGPCYRQQRVSKTAADNNNSDYSWTGATKYHLNGRDSLVNPGPAMASHKDDEEKYFPQSGVLIFGKQDSGKTNVDIEKVMITDEEEIRTTNPVATEQYGSVSTNLQSGNTQAATTDVNTQGVLPGMVWQDRDVYLQGPIWAKIPHTDGHFHPSPLMGGFGLKHPPPQILIKNTPVPANPSTTFSAAKFASFITQYSTGQVSVEIEWELQKENSKRWNPEIQYTSNYNKSVNVDFTVDTNGVYSEPRPIGTRYLTRNL

SEQ ID NO: 2355 - protein, 735 aa, Artificial Sequence
  source: /note="Description of Artificial Sequence: Synthetic polypeptide"
MAADGYLPDWLEDTLSEGIRQWWKLKPGPPPPKPAERHQDDSRGLVLPGYKYLGPFNGLDKGEPVNEADAAALEHDKAYDRQLDSGDNPYLKYNHADAEFQERLKEDTSFGGNLGRAVFQAKKRVLEPLGLVEEPVKMAPGKKRPVEHSPAEPDSSSGTGKAGQQPARKRLNFGQTGDADSVPDPQPLGQPPAAPSGLGTNTTATGSGAPMADNNEGADGVGNSSGNWHCDSTWMGDRVITTSTRTWALPTYNNHLYKQISSQSGASNDNHYFGYSTPWGYFDFNRFHCHFSPRDWQRLINNNWGFRPKRLNFKLFNIQVKEVTQNDGTTTIANNLTSTVQVFTDSEYQLPYVLGSAHQGCLPPFPADVFMVPQYGYLTLNNGSQAVGRSSFYCLEYFPSQMLRTGNNFTFSYTFEDVPFHSSYAHSQSLDRLMNPLIDQYLYYLSKTNAPSGTTTMSRLQFSQAGASDIRDQSRNWLPGPCYRQQRVSKTAADNNNSDYSWTGATKYHLNGRDSLVNPGPAMASHKDDEEKYFPQSGVLIFGKQDSGKTNVDIEKVMITDEEEIRTTNPVATEQYGSVSTNLQSGNTQAATTDVNTQGVLPGMVWQDRDVYLQGPIWAKIPHTDGHFHPSPLMGGFGLKHPPPQILIKNTPVPANPSTTFSAAKFASFITQYSTGQVSVEIEWELQKENSKRWNPEIQYTSNYNKSVNVDFTVDTNGVYSEPRPIGTRYLTRNL

SEQ ID NO: 2356 - protein, 735 aa, Artificial Sequence
  source: /note="Description of Artificial Sequence: Synthetic polypeptide"
MAADGYLPDWLEDTLSEGIRQWWKLKPGPPPPKPAERHQDDSRGLVLPGYKYLGPFNGLDKGEPVNEADAAALEHDKAYDRQLDSGDNPYLKYNHADAEFQERLKEDTSFGGNLGRAVFQAKKRVLEPLGLVEEPVKTAPGKKRPVEHSPAEPDSSSGTGKAGQQPARKRLNFGQTGDADSVPDPQPLGQPPAAPSGLGTNTMATGSGAPMADNNEGADGVGNSSGNWHCDSTWMGDRVITTSTRTWALPTYNNHLYKQISSQSGASNDNHYFGYSTPWGYFDFNRFHCHFSPRDWQRLINNNWGFRPKRLNFKLFNIQVKEVTQNDGTTTIANNLTSTVQVFTDSEYQLPYVLGSAHQGCLPPFPADVFMVPQYGYLTLNNGSQAVGRSSFYCLEYFPSQMLRTGNNFTFSYTFEDVPFHSSYAHSQSLDRLMNPLIDQYLYYLSKTNAPSGTTTMSRLQFSQAGASDIRDQSRNWLPGPCYRQQRVSKTAADNNNSDYSWTGATKYHLNGRDSLVNPGPAMASHKDDEEKYFPQSGVLIFGKQDSGKTNVDIEKVMITDEEEIRTTNPMATEQYGSVSTNLQSGNTQAATTDVNTQGVLPGMVWQDRDVYLQGPIWAKIPHTDGHFHPSPLMGGFGLKHPPPQILIKNTPVPANPSTTFSAAKFASFITQYSTGQVSVEIEWELQKENSKRWNPEIQYTSNYNKSVNVDFTVDTNGVYSEPRPIGTRYLTRNL

SEQ ID NO: 2357 - protein, 735 aa, Artificial Sequence
  source: /note="Description of Artificial Sequence: Synthetic polypeptide"
MAADGYLPDWLEDTLSEGIRQWWKLKPGPPPPKPAERHQDDSRGLVLPGYKYLGPFNGLDKGEPVNEADAAALEHDKAYDRQLDSGDNPYLKYNHADAEFQERLKEDTSFGGNLGRAVFQAKKRVLEPLGLVEEPVKTAPGKKRPVEHSPAEPDSSSGTGKAGQQPARKRLNFGQTGDADSVPDPQPLGQPPAAPSGLGTNTMATGSGAPMADNNEGADGVGNSSGNWHCDSTWMGDRVITTSTRTWALPTYNNHLYKQISSQSGASNDNHYFGYSTPWGYFDFNRFHCHFSPRDWQRLINNNWGFRPKRLNFKLFNIQVKEVTQNDGTTTIANNLTSTVQVFTDSEYQLPYVLGSAHQGCLPPFPADVSMVPQYGYLTLNNGSQAVGRSSFYCLEYFPSQMLRTGNNFTFSYTFEDVPFHSSYAHSQSLDRLMNPLIDQYLYYLSKTNAPSGTTTMSRLQFSQAGASDIRDQSRNWLPGPCYRQQRVSKTAADNNNSDYSWTGATKYHLNGRDSLVNPGPAMASHKDDEEKYFPQSGVLIFGKQDSGKTNVDIEKVMITDEEEIRTTNPVATEQYGSVSTNLQSGNTQAATTDVNTQGVLPGMVWQDRDVYLQGPIWAKIPHTDGHFHPSPLMGGFGLKHPPPQILIKNTPVPANPSTTFSAAKLASFITQYSTGQVSVEIEWELQKENSKRWNPEIQYTSNYNKSVNVDFTVDTNGVYSEPRPIGTRYLTRNL

SEQ ID NO: 2358 - protein, 735 aa, Artificial Sequence
  source: /note="Description of Artificial Sequence: Synthetic polypeptide"
MAADGYLPDWPEDTLSEGIRQWWKLKPGPPPPKPAERHQDDSRGLVLPGYKYLGPFNGLDKGEPVNEADAAALEHDKAYDRQLDSGDNPYLKYNHADAEFQERLKEDTSFGGNLGRAVFQAKKRVLEPLGLVEEPVKTAPGKKRPVEHSPAEPDSSSGTGKAGQQPARKRLNFGQTGDADSVPDPQPLGQPPAAPSGLGTNTMATGSGAPMADNNEGADGVGNSSGNWHCDSTWMGDRVITTSTRTWALPTYNNHLYKQISSQSGASNDNHYFGYSTPWGYFDFNRFHCHFSPRDWQRLINNNWGFRPKRLNFKLFNIQVKEVTQNDGTTTIANNLTSTVQVFTDSEYQLPYVLGSAHQGCLPPFPADVFMVPQYGYLTLNNGSQAVGRSSFYCLEYFPSQMLRTGNNFTFSYTFEDVPFHSSYAHSQSLDRLMNPLIDQYLYYLSKTNAPSGTTTMSRLQFSQAGASDIRDQSRNWLPGPCYRQQRVSKTAADNNNSDYSWTGATKYHLNGRDSLVNPGPAMASHKDDEEKYFPQSGVLIFGKQDSGKTNVDIEKVMITDEEEIRTTNPVATEQYGSVSTNLQSGNTQAATTDVNTQGVLPGMVWQDRDVYLQGPIWAKIPHTDGHFHPSPLMGGFGLKHPPPQILIKNTPVPANPSTTFSAAKFASFITQYSTGQVSVEIEWELQKENSKRWNPEIQYTSNYNKSVNVDFTVDTNGVYSEPRPIGTRYLTRNL

SEQ ID NO: 2359 - protein, 735 aa, Artificial Sequence
  source: /note="Description of Artificial Sequence: Synthetic polypeptide"
MAADGYLPDWLEDTLSEGIRQWWKLKPGPPPPKPAERHQDDSRGLVLPGYKYLGPFNGLDKGEPVNEADAAALEHDKAYDRQLDSGDNPYLKYNHADAEFQERLKEDTSFGGNLGRAVFQAKKRVLEPLGLVEEPVKTAPGKKRPVEHSPAEPDSSSGTGKAGQQPARKRLNFGQTGDADSVPDPQPLGQPPAAPSGLGTNTMATGSGAPMADNNEGADGVGNSSGNWHCDSTWMGDRVITTSTRTWALPTYNNHLYKQISSQSGASNDNHYFGYSTPWGYFDFNRFHCHFSPRDWQRLINNNWGFRPKRLNFKLFNIQVKEVTQNDGTTTIANNLTSTVQVFTDSEYQLPYVLGSAHQGCLPPFPADVFMVPQYGYLTLNNGSQAVGRSSFYCLEYFPSQMLRTGNNFTFSYTFEDVPFHSSYAHSQSLDRLMNPLIDQYLYYLSKTNAPSGTTTMSRLQFSQAGASDIRDQSRNWLPGPCYRQQRVSKTAADNNNSDYSWTGATKYHLNGRDSLVNPGPAMASHKDDEEKFFPQSGVLIFGKQDSGKTNVDIEKVMITDEEEIRTTNPVATEQYGSVSTNLQSGNTQAATTDVNTQGVLPGMVWQDRDVYLQGPIWAKIPHTDGHFHPSPLMGGFGLKHPPPQILIKNTPVPANPSTTFSAAKFASFITQYSTGQVSVEIEWELQKENSKRWNPEIQYTSNYNKSVNVDFTVDTNGVYSEPRPIGTRYLTRNL

SEQ ID NO: 2360 - protein, 735 aa, Artificial Sequence
  source: /note="Description of Artificial Sequence: Synthetic polypeptide"
MAADGYLPDWLEDTLSEGIRQWWKLKPGPPPPKPAERHQDDSRGLVLPGYKYLGPFNGLDKGEPVNEADAAALEHDKAYDRQLDSGDNPYLKYNHADAEFQERLKEDTSFGGNLGRAVFQAKKRVLEPLGLVEEPVKTAPGKKRPVEHSPAEPDSSSGIGKAGQQPARKRLNFGQTGDADSVPDPQPLGQPPAAPSGLGTNTMATGSGAPMADNNEGADGVGNSSGNWHCDSTWMGDRVITTSTRTWALPTYNNHLYKQISSQSGASNDNHYFGYSTPWGYFDFNRFHCHFSPRDWQRLINNNWGFRPKRLNFKLFNIQVKEVTQNDGTTTIANNLTSTVQVFTDSEYQLPYVLGSAHQGCLPPFPADVFMVPQYGYLTLNNGSQAVGRSSFYCLEYFPSQMLRTGNNFTFSYTFEDVPFHSSYAHSQSLDRLMNPLIDQYLYYLSKTNAPSGTTTMSRLQFSQAGASDIRDQSRNWLPGPCYRQQRVSKTAADNNNSDYSWTGATKYHLNGRDSLVNPGPAMASHKDDEEKYFPQSGVLIFGKQDSGKTNVDIEKVMITDEEEIRTTNPVATEQYGSVSTNLQSGNTQAATTDVNTQGVLPGMVWQDRDVYLQGPIWAKIPHTDGHFHPSPLMGGFGLKHPPPQILIKNTPVPANPSTTFSAAKFASFITQYSTGQVSVEIEWELQKENSKRWNPEIQYTSNYNKSVNVDFTVDTNGVYSEPRPIGTRYLTRNL

SEQ ID NO: 2361 - protein, 735 aa, Artificial Sequence
  source: /note="Description of Artificial Sequence: Synthetic polypeptide"
MAADGYLPDWLEDTLSEGIRQWWKLKPGPPPPKPAERHQDDSRGLVLPGYKYLGPFNGLDKGEPVNEADAAALEHDKAYDRQLDSGDNPYLKYNHADAEFQERLKEDTSFGGNLGRAVFQAKKRVLEPLGLVEEPVKTAPGKKRPVEHSPAEPDSSSGTGKAGQQPARKRLNFGQTGDADSVPDPQPLGQPPAAPSGLGTNTMATGSGAPMADNNEGADGVGNSSGNWHCDSTWMGDRVITTSTRTWALPTYNNHLYKQISSQSGASNDNHYFGYSTPWGYFDFNRFHCHFSPRDWQRLINNNWRFRPKRLNFKLFNIQVKEVTQNDGTTTIANNLTSTVQVFTDSEYQLPYVLGSAHQGCLPPFPADVFMVPQYGYLTLNNGSQAVGRSSFYCLEYFPSQMLRTGNNFTFSYTFEDVPFHSSYAHSQSLDRLMNPLIDQYLYYLSKTNAPSGTTTMSRLQFSQAGASDIRDQSRNWLPGPCYRQQRVSKTAADNNNSDYSWTGATKYHLNGRDSLVNPGPAMASHKDDEEKYFPQSGVLIFGKQDSGKTNVDIEKVMITDEEEIRTTNPVATEQYGSVSTNLQSGNTQAATTDVNTQGVLPGMVWQDRDVYLQGPIWAKIPHTDGHFHPSPLMGGFGLKHPPPQILIKNTPVPANPSTTFSAAKLASFITQYSTGQVSVEIEWELQKENSKRWNPEIQYTSNYNKSVNVDFTVDTNGVYSEPRPIGTRYLTRNL

SEQ ID NO: 2362 - protein, 735 aa, Artificial Sequence
  source: /note="Description of Artificial Sequence: Synthetic polypeptide"
MAADGYLPDWLEDTLSEGIRQWWKLKPGPPPPKPAERHQDDSRGLVLPGYKYLGPFNGLDKGEPVNEADAAALEHDKAYDRQLDSGDNPYLKYNHADAEFQERLKEDTSFGGNLGRAVFQAKKRVLEPLGLVEEPVKTAPGKKRPVEHSPAEPDSSSGTGKAGQQPARKRLNFGQTGDADSVPDPQPLGQPPAAPSGLGTNTMATGSGAPMADNNEGADGVGNSSGNWHCDSTWMGDRVITTSTRTWALPTYNNHLYKQISSQSGASNDNHYFGYSTPWGYFDFNRFHCHFSPRDWQRLINNNWGFRPKRLNFKLFNIQVKEVTQNDGTTTIANNLTSTVQVFTDSEYQLPYVLGSAHQGCLPPFPADVFMVPQYGYLTLNNGSQAVGRSSFYCLEYFPSQMLRTGNNFTFSYTFEDVPFHSSYAHSQSLDRLMNPLIDQYLYYLSKTNAPSGTTTMSRLQFSQAGASDIRDQSRNWLPGPCYRQQRVSKTAADNNNSDYSWTGATKYHLNGRDSLVNPGPAMASHKDDEEKYFPQSGVLIFGKQDSGKTNVDIEKVMITDEEEIRTTNPVATEQYGSVSTNLQSGNTQAATTDVNTQGVLPGMVWQDRDVYLQGPIWAKIPHTDGHFHPSPLMGGFGLKHPPPQILIKNTPVPANPSTTFSAAKFASFITQYSTGQVSVEIEWELQKENSKRWNPEIQYTSNYNKSVNVDFTVDTNGVYSEPRPIGTRYLARNL

SEQ ID NO: 2363 - protein, 735 aa, Artificial Sequence
  source: /note="Description of Artificial Sequence: Synthetic polypeptide"
MAADGYLPDWLEDTLSEGIRQWWKLKPGPPPPKPAERHQDDSRGLVLPGYKYLGPFNGLDKGEPVNEADAAALEHDKAYDRQLDSGDNPYLKYNHADAEFQERLKEDTSFGGNLGRAVFQAKKRVLEPLGLVEEPVKTAPGKKRPVEHSPAEPDSSSGTGKAGQQPARKRLNFGQTGDADSVPDPQPLGQPPAAPSGLGTNTMATGSGAPMADNNEGADGVGNSSGNWHCDSTWMGDRVITTSTRTWALPTYNNHLYKQISSQSGASNDDHYFGYSTPWGYFDFNRFHCHFSPRDWQRLINNNWGFRPKRLNFKLFNIQVKEVTQNDGTTTIANNLTSTVQVFTDSEYQLPYVLGSAHQGCLPPFPADVFMVPQYGYLTLNNGSQAVGRSSFYCLEYFPSQMLRTGNNFTFSYTFEDVPFHSSYAHSQSLDRLMNPLIDQYLYYLSKTNAPSGTTTMSRLQFSQAGASDIRDQSRNWLPGPCYRQQRVSKTAADNNNSDYSWTGATKYHLNGRDSLVNPGPAMASHKDDEEKYFPQSGVLIFGKQDSGKTNVDIEKVMITDEEEIRTTNPVATEQYGSVSTNLQSGNTQAATTDVNTQGVLPGMVWQDRDVYLQGPIWAKIPHTDGHFHPSPLMGGFGLKHPPPQILIKNTPVPANPSTTFSAAKFASFITQYSTGQVSVEIEWELQKENSKRWNPEIQYTSNYNKSVNVDFTVDTNGVYSEPRPIGTRYLTRNL

SEQ ID NO: 2364 - protein, 735 aa, Artificial Sequence
  source: /note="Description of Artificial Sequence: Synthetic polypeptide"
MAADGYLPDWLEDTLSEGIRQWWKLKPGPPPPKPAERHQDDSRGLVLPGYKYLGPFNGLDKGEPVNEADAAALEHDKAYDRQLDSGDNPYLKYNHADAEFQERLKEDTSFGGNLGRAVFQAKKGVLEPLGLVEEPVKTAPGKKRPVEHSPAEPDSSSGTGKAGQQPARKRLNFGQTGDADSVPDPQPLGQPPAAPSGLGTNTMATGSGAPMADNNEGADGVGNSSGNWHCDSTWMGDRVITTSTRTWALPTYNNHLYKQISSQSGASNDNHYFGYSTPWGYFDFNRFHCHFSPRDWQRLINNNWGFRPKRLNFKLFNIQVKEVTQNDGTTTIANNLTSTVQVFTDSEYQLPYVLGSAHQGCLPPFPADVFMVPQYGYLTLNNGSQAVGRSSFYCLEYFPSQMLRTGNNFTFSYTFEDVPFHSSYAHSQSLDRLMNPLIDQYLYYLSKTNAPSGTTTMSRLQFSQAGASDIRDQSRNWLPGPCYRQQRVSKTAADNNNSDYSWTGATKYHLNGRDSLVNPGPAMASHKDDEEKYFPQSGVLIFGKQDSGKTNVDIEKVMITDEEEIRTTNPVATEQYGSVSTNLQSGNTQAATTDVNTQGVLPGMVWQDRDVYLQGPIWAKIPHTDGHFHPSPLMGGFGLKHPPPQILIKNTPVPANPSTTFSAAKLASFITQYSTGQVSVEIEWELQKENSKRWNPEIQYTSNYNKSVNVDFTVDTNGVYSEPRPIGTRYLTRNL

SEQ ID NO: 2365 - protein, 735 aa, Artificial Sequence
  source: /note="Description of Artificial Sequence: Synthetic polypeptide"
MAADGYLPDWLEDTLSEGIRQWWKLKPGPPPPKPAERHQDDSRGLVLPGYKYLGPFNGLDKGEPVNEADAAALEHDKAYDRQLDSGDNPYLKYNHADAEFQERLKEDTSFGGNLGRAVFQAKKRVLEPLGLVEEPVKTAPGKKRPVEHSPAEPDSPSGTGKAGQQPARKRLNFGQTGDADSVPDPQPLGQPPAAPSGLGTNTMATGSGAPMADNNEGADGVGNSSGNWHCDSTWMGDRVITTSTRTWALPTYNNHLYKQISSQSGASNDNHYFGYSTPWGYFDFNRFHCHFSPRDWQRLINNNWGFRPKRLNFKLFNIQVKEVTQNDGTTTIANNLTSTVQVFTDSEYQLPYVLGSAHQGCLPPFPADVFMVPQYGYLTLNNGSQAVGRSSFYCLEYFPSQMLRTGNNFTFSYTFEDVPFHSSYAHSQSLDRLMNPLIDQYLYYLSKTNAPSGTTTMSRLQFSQAGASDIRDQSRNWLPGPCYRQQRVSKTAADNNNSDYSWTGATKYHLNGRDSLVNPGPAMASHKDDEEKYFPQSGVLIFGKQDSGKTNVDIEKVMITDEEEIRTTNPVATEQYGSVSTNLQSGNTQAATTDVNTQGVLPGMVWQDRDVYLQGPIWAKIPHTDGHFHPSPLMGGFGLKHPPPQILIKNTPVPANPSTTFSAAKFASFITQYSTGQVSVEIEWELQKENSKRWNPEIQYTSNYNKSVNVDFTVDTNGVYSEPRPIGTRYLTRNL

SEQ ID NO: 2366 - protein, 735 aa, Artificial Sequence
  source: /note="Description of Artificial Sequence: Synthetic polypeptide"
MAADGYLPDWLEDTLSEGIRQWWKLKPGPPPPKPAERHQDDSRGLVLPGYKYLGPFNGLDKGEPVNEADAAALEHDKAYDRQLDSGDNPYLKYNHADAEFQERLKEDTSFGGNLGRAVFQAKKRVLEPLGLVEEPVKTAPGKKRPVEHSPAEPDSSSGTGKAGQQPARKRLNFGQTGDADSVPDPQPLGQPPAAPSGLGTNTMATGSGAPMADNNEGADGVGNSSGNWHCDSTWMGDRVITTSTRTWALPTYNNHPYKQISSQSGASNDNHYFGYSTPWGYFDFNRFHCHFSPRDWQRLINNNWGFRPKRLNFKLFNIQVKEVTQNDGTTTIANNLTSTVQVFTDSEYQLPYVLGSAHQGCLPPFPADVFMVPQYGYLTLNNGSQAVGRSSFYCLEYFPSQMLRTGNNFTFSYTFEDVPFHSSYAHSQSLDRLMNPLIDQYLYYLSKTNAPSGTTTMSRLQFSQAGASDIRDQSRNWLPGPCYRQQRVSKTAADNNNSDYSWTGATKYHLNGRDSLVNPGPAMASHKDDEEKYFPQSGVLIFGKQDSGKTNVDIEKVMITDEEEIRTTNPVATEQYGSVSTNLQSGNTQAATTDVNTQGVLPGMVWQDRDVYLQGPIWAKIPHTDGHFHPSPLMGGFGLKHPPPQILIKNTPVPANPSTTFSAAKFASFITQYSTGQVSVEIEWELQKENSKRWNPEIQYTSNYNKSVNVDFTVDTNGVYSEPRPIGTRYLTRNL

SEQ ID NO: 2367 - protein, 735 aa, Artificial Sequence
  source: /note="Description of Artificial Sequence: Synthetic polypeptide"
MAADGYLPDWLEDTLSEGIRQWWKLKPGPPPPKPAERHQDDSRGLVLPGYKYLGPFNGLDKGEPVSEADVAALEHDKAYDRQLDSGDNPYLKYNHADAEFQERLKEDTSFGGNLGRAVFQAKKRVLEPLGLVEEPVKTAPGKKRPVEHSPAEPDSSSGTGKAGQQPARKRLNFGQTGDADSVPDPQPLGQPPAAPSGLGTNTMATGSGAPMADNNEGADGVGNSSGNWHCDSTWMGDRVITTSTRTWALPTYNNHLYKQISSQSGASNDNHYFGYSTPWGYFDFNRFHCHFSPRDWQRLINNNWGFRPKRLNFKLFNIQVKEVTQNDGTTTIANNLTSTVQVFTDSEYQLPYVLGSAHQGCLPPFPADVFMVPQYGYLTLNNGSQAVGRSSFYCLEYFPSQMLRTGNNFTFSYTFEDVPFHSSYAHSQSLDRLMNPLIDQYLYYLSKTNAPSGTTTMSRLQFSQAGASDIRDQSRNWLPGPCYRQQRVSKTAADNNNSDYSWTGATKYHLNGRDSLVNPGPAMASHKDDEEKYFPQSGVLIFGKQDSGKTNVDIEKVMITDEEEIRTTNPVATEQYGSVSTNLQSGNTQAATTDVNTQGVLPGMVWQDRDVYLQGPIWAKIPHTDGHFHPSPLMGGFGLKHPPPQILIKNTPVPANPSTTFSAAKFASFITQYSTGQVSVEIEWELQKENSKRWNPEIQYTSNYNKSVNVDFTVDTNGVYSEPRPIGTRYLTRNL

SEQ ID NO: 2368 - protein, 735 aa, Artificial Sequence
  source: /note="Description of Artificial Sequence: Synthetic polypeptide"
MAADGYLPDWLEDTLSEGIRQWWKLKPGPPPPKPAERHQDDSRGLVLPGYKYLGPFNGLDKGEPVNEADAAALEHDKAYDRQLDSGDNPYLKYNHADAEFQERLKEDTSFGGNLGRAVFQAKKRVLEPLGLVEEPVKTAPGKKRPVEHSPAEPDSSSGTGKAGQQPARKRLNFGQTGDADSVPDPQPLGQPPAAPSGLGTNTMATGSGAPMADNNEGADGVGNSSGNWHCDSTWMGDRVITTSTRTWALPTYNNHLYKQISSQSGASNDNHYFGYSTPWGYFDFNRFHCHFSPRDWQRLINNNWGFRPKRLNFKLFNIQVKEVTQNDGTTTIANNLTSTVQVFTDSEYQLPYVLGSAHQGCLPPFPADVFMVPQYGYLTLNNGSQAVGRSSFYCLEYFPSQMLRTGNNFTFSYTFEDVPFHSSYAHSQSLDRLMNPLIDQYLYYLSKTNAPSGTTTMSRLQFSQAGASDIRDQSRNWLPGPCYRQQRVSKTAADNNNSDYSWTGATKYHLNGRDSLVNPGPAMASHKDDEEKYFPQSGVLIFGKQDSGKINVDIEKVMITDEEEIRTTNPVATEQYGSVSTNLQSGNTQAATTDVNTQGVLPGMVWQDRDVYLQGPIWAKIPHTDGHFHPSPLMGGFGLKHPPPQILIKNTPVPANPSTTFSAAKFASFITQYSTGQVSVEIEWELQKENSKRWNPEIQYTSNYNKSVNVDFTVDTNGVYSEPRPIGTRYLTRNL

SEQ ID NO: 2369 - protein, 735 aa, Artificial Sequence
  source: /note="Description of Artificial Sequence: Synthetic polypeptide"
MAADGYLPDWLEDTLSEGIRQWWKLKPGPPPLKPAERHQDDSRGLVLPGYKYLGPFNGLDKGEPVNEADAAALEHDKAYDRQLDSGDNPYLKYNHADAEFQERLKEDTSFGGNLGRAVFQAKKRVLEPLGLVEEPVKTAPGKKRPVEHSPAEPDSSSGTGKAGQQPARKRLNFGQTGDADSVPDPQPLGQPPAAPSGLGTNTMATGSGAPMADNNEGADGVGNSSGNWHCDSTWMGDRVITTSTRTWALPTYNNHLYKQISSQSGASNDNHYFGYSTPWGYFDFNRFHCHFSPRDWQRLINNNWGFRPKRLNFKLFNIQVKEVTQNDGTTTIANNLTSTVQVFTDSEYQLPYVLGSAHQGCLPPFPADVFMVPQYGYLTLNNGSQAVGRSSFYCLEYFPSQMLRTGNNFTFSYTFEDVPFHSSYAHSQSLDRLMNPLIDQYLYYLSKTNAPSGTTTMSRLQFSQAGASDIRDQSRSWLPGPCYRQQRVSKTAADNNNSDYSWTGATKYHLNGRDSLVNPGPAMASHKDDEEKYFPQSGVLIFGKQDSGKTNVDIEKVMITDEEEIRTTNPVATEQYGSVSTNLQSGNTQAATTDVNTQGVLPGMVWQDRDVYLQGPIWAKIPHTDGHFHPSPLMGGFGLKHPPPQILIKNTPVPANPSTTFSAAKFASFITQYSTGQVSVEIEWELQKENSKRWNPEIQYTSNYNKSVNVDFTVDTNGVYSEPRPIGTRYLTRNL

SEQ ID NO: 2370 - protein, 735 aa, Artificial Sequence
  source: /note="Description of Artificial Sequence: Synthetic polypeptide"
MAADGYLPDWLEDTLSEGIRQWWKLKPGPPPPKPAERHQDDSRGLVLPGYKYLGPFNGLDKGEPVNEADAAALEHDKAYDRQLDSGDNPYLKYNHADAEFQERLKEDTSFGGNLGRAVFQAKKRVLEPLGLVEEPVKTAPGKKRPVEHSPAEPDSSSGTGKAGQQPARKRLNFGQTGDADSVPDPQPLGQPPAAPSGLGTNTMATGSGAPMADNNEGADGVGNSSGNWHCDSTWMGDRVITTSTRTWALPTYNNHLYKQISSQSGASNDNHYFGYSTPWGYFDFNRFHCHFSPRDWQRLINNNWGFRPKRLNFKLFNIQVKEVTQNDGTTTIANNLTSTVQVFTDSEYQLPYVLGSAHQGCLPPFPADVFMVPQYGYLTLNNGSQAVGRSSFYCLEYFPSQMLRTGNNFTFSYTFEDVPFHSSYAHSQSLDRLMNPLIDQYLYYLSKTNAPSGTTTMSRLQFSQAGASDIRDQSRNWLPGPCYRQQRVSKTAADNNNSDYSWTGATKYHLNGRDSLVNPGPAMASHKDDEEKYFPQSGVLIFGKQDSGKTNVDIEKVMITDEEEIGTTNPVATEQYGSVSTNLQSGNTQAATTDVNTQGVLPGMVWQDRDVYLQGPIWAKIPHTDGHFHPSPLMGGFGLKHPPPQILIKNTPVPANPSTTFSAAKFASFITQYSTGQVSVEIEWELQKENSKRWNPEIQYTSNYNKSVNVDFTVDTNGVYSEPRPIGTRYLTRNL

SEQ ID NO: 2371 - protein, 735 aa, Artificial Sequence
  source: /note="Description of Artificial Sequence: Synthetic polypeptide"
MAADGYLPDWLEDTLSEGIRQWWKLKPGPPPPKPAERHQDDSRGLVLPGYKYLGPFNGLDKGEPVNEADAAALEHDKAYDRQLDSGDNPYLKYNHADAEFQERLKEDTSFGGNLGRAVFQAKKRVLEPLGLVEEPVKTAPGKKRPVEHSPAEPDSSSGTGKAGQQPARKRLNFGQTGDADSVPDPQPLGQPPAAPSGLGTNTMATGSGAPMADNNEGADGVGNSSGNWHCDSTWMGDRVITTSTRTWALPTYNNHLYKQISSQSGASNDNHYFGYSTPWGYFDFNRFHCHFSPRDWQRLINNNWGFRPKRLNFKLFNIQVKEVTQNDGTTTIANNLTSTVQVFTDSEYRLPYVLGSAHQGCLPPFPADVFMVPQYGYLTLNNGSQAVGRSSFYCLEYFPSQMLRTGNNFTFSYTFEDVPFHSSYAHSQSLDRLMNPLIDQYLYYLSKTNAPSGTTTMSRLQFSQAGASDIRDQSRNWLPGPCYRQQRVSKTAADNNNSDYSWTGATKYHLNGRDSLVNPGPAMASHKDDEEKYFPQSGVLIFGKQDSGKTNVDIEKVMITDEEEIRTTNPVATEQYGSVSTNLQSGNTQAATTDVNTQGVLPGMVWQDRDVYLQGPIWAKIPHTDGHFHPSPLMGGFGLKHPPPQILIKNTPVPANPSTTFSAAKFASFITQYSTGQVSVEIEWELQKENSKRWNPEIQYTSNYNKSVNVDFTVDTNGVYSEPRPIGTRYLTRNL

SEQ ID NO: 2372 - protein, 735 aa, Artificial Sequence
  source: /note="Description of Artificial Sequence: Synthetic polypeptide"
MAADGYLPDWLEDTLSEGIRQWWKLKPGPPPPKPAERHQDDSRGLVLPGYKYLGPFNGLDKGEPVNEADAAALEHDKAYDRQLDSGDNPYLKYNHADAEFQERLKEDTSFGGNLGRAVFQAKKRVLEPLGLVEEPVKTAPGKKRPVEHSPAEPDSSSGTGKAGQQPARKRLNFGQTGDADSVPDPQPLGQPPAAPSGLGTNTMATGSGAPMADNNEGADGVGNSSGNWHCDSTWMGDRVITTSTRTWALPTYNNHLYKQISSQSGASNDNHYFGYSTPWGYFDFNRFHCHFSPRDWQRLINNNWGFRPKRLNFKLFNIQVKEVTQNDGTTTIANNLTSTVQVFTDSEYQLPYVLGSAHQGCLPPFPADVFMVPQYGYLTLNNGSQAVGRSSFYCLEYFPSQMLRTGNNFTFSYTFEDVPFHSSYAHSQSLDRLMNPLIDQYLYYLSKTNAPSGTTTMSRLQFSQAGASDIRDQSRNWLPGPCYRQQRVSKTAADNNNSDYSWTGATKYHLNGRDSLVNPGPAMASHKDDEEKYFPQSGVLIFGKQDSGKTNVDIEKVMITDEEEIRTTNPVATEQYGSVSTNLQSGNTQAATTDVNTQGVLPGMVWQDRDVYLQGPIWAKIPHTDGHFHPSPLMGGFGLKHPPPQILIKNTPVPANPSTTFSAAKFASFITQYSTGQVSVEIEWELQKENSKRWNPKIQYTSNYNKSVNVDFTVDTNGVYSEPRPIGTRYLTRNL

SEQ ID NO: 2373 - protein, 735 aa, Artificial Sequence
  source: /note="Description of Artificial Sequence: Synthetic polypeptide"
MAADGYLPDWLEDTLSEGIRQWWKLKPGPPPPKPAERHQDDSRGLVLPGYKYLGPFNGLDKGEPVNEADAAALEHDKAYDRQLDSGDNPYLKYNHADAESQERLKEDTSFGGNLGRAVFQAKKRVLEPLGLVEEPVKTAPGKKRPVEHSPAEPDSSSGTGKAGQQPARKRLNFGQTGDADSVPDPQPLGQPPAAPSGLGTNTMATGSGAPMADNNEGADGVGNSSGNWHCDSTWMGDRVITTSTRTWALPTYNNHLYKQISSQSGASNDNHYFGYSTPWGYFDFNRFHCHFSPRDWQRLINNNWGFRPKRLNFKLFNIQVKEVTQNDGTTTIANNLTSTVQVFTDSEYQLPYVLGSAHQGCLPPFPADVFMVPQYGYLTLNNGSQAVGRSSFYCLEYFPSQMLRTGNNFTFSYTFEDVPFHSSYAHSQSLDRLMNPLIDQYLYYLSKTNAPSGTTTMSRLQFSQAGASDIRDQSRNWLPGPCYRQQRVSKTAADNNNSDYSWTGATKYHLNGRDSLVNPGPAMASHKDDEEKYFPQSGVLIFGKQDSGKTNVDIEKVMITDEEEIRTTNPVATEQYGSVSTNLQSGNTQAATTDVNTQGVLPGMVWQDRDVYLQGPIWAKIPHTDGHFHPSPLMGGFGLKHPPPQILIKNTPVPANPSTTFSAAKFASFITQYSTGQVSVEIEWELQKENSKRWNPEIQYTSNYNKSVNVDFTVDTNGVYSEPRPIGTRYLTRNL

SEQ ID NO: 2374 - protein, 735 aa, Artificial Sequence
  source: /note="Description of Artificial Sequence: Synthetic polypeptide"
MAADGYLPDWLEDTLSEGIRQWWKLKPGPPPPKPAERHQDDSRGLVLPGYKYLGPFNGLDKGEPVNEADAAALEHDKAYDRQLDSGDNPYLKYNHADAEFQERLKEDTSFGGNLGRAVFQAKKRVLEPLGLVEEPVKTAPGKKRPVEHSPAEPDSSSGTGKAGQQPARKRLNFGQTGDADSVPDPQPLGQPPAAPSGLGTNTMATGSGAPTADNNEGADGVGNSSGNWHCDSTWMGDRVITTSTRTWALPTYNNHLYKQISSQSGASNDNHYFGYSTPWGYFDFNRFHCHFSPRDWQRLINNNWGFRPKRLNFKLFNIQVKEVTQNDGTTTIANNLTSTVQVFTDSEYQLPYVLGSAHQGCLPPFPADVFMVPQYGYLTLNNGSQAVGRSSFYCLEYFPSQMLRTGNNFTFSYTFEDVPFHSSYAHSQSLDRLMNPLIDQYLYYLSKTNAPSGTTTMSRLQFSQAGASDIRDQSRNWLPGPCYRQQRVSKTAADNNNSDYSWTGATKYHLNGRDSLVNPGPAMASHKDDEEKYFPQSGVLIFGKQDSGKTNVDIEKVMITDEEEIRTTNPVATEQYGSVSTNLQSGNTQAATTDVNTQGVLPGMVWQDRDVYLQGPIWAKIPHTDGHFHPSPLMGGFGLKHPPPQILIKNTPVPANPSTTFSAAKFASFITQYSTGQVSVEIEWELQKENSKRWNPEIQYTSNYNKSVNVDFTVDTNGVYSEPRPIGTRYLTRNL

SEQ ID NO: 2375 - protein, 735 aa, Artificial Sequence
  source: /note="Description of Artificial Sequence: Synthetic polypeptide"
MAADGYLPDWLEDTLSEGIRQWWKLKPGPPPPKPAERHQDDSRGLVLPGYKYLGPFNGLDKGEPVNEADAAALEHDKAYDRQLDSGDNPYLKYNHADAEFQERLKEDTSFGGNLGRAVFQAKKRVLEPLGLVEEPVKTAPGKKRPVEHSPAEPDASSGTGKAGQQPARKRLNFGQTGDADSVPDPQPLGQPPAAPSGLGTNTMATGSGAPMADNNEGADGVGNSSGNWHCDSTWMGDRVITTSTRTWALPTYNNHLYKQISSQSGASNDNHYFGYSTPWGYFDFNRFHCHFSPRDWQRLINNNWGFRPKRLNFKLFNIQVKEVTQNDGTTTIANNLTSTVQVFTDSEYQLPYVLGSAHQGCLPPFPADVFMVPQYGYLTLNNGSQAVGRSSFYCPEYFPSQMLRTGNNFTFSYTFEDVPFHSSYAHSQSLDRLMNPLIDQYLYYLSKTNAPSGTTTMSRLQFSQAGASDIRDQSRNWLPGPCYRQQRVSKTAADNNNSDYSWTGATKYHLNGRDSLVNPGPAMASHKDDEEKYFPQSGVLIFGKQDSGKTNVDIEKVMITDEEEIRTTNPVATEQYGSVSTNLQSGNTQAATTDVNTQGVLPGMVWQDRDVYLQGPIWAKIPHTDGHFHPSPLMGGFGLKHPPPQILIKNTPVPANPSTTFSAAKFASFITQYSTGQVSVEIEWELQKENSKRWNPEIQYTSNYNKSVNVDFTVDTNGVYSEPRPIGTRYLTRNL

SEQ ID NO: 2376 - protein, 735 aa, Artificial Sequence
  source: /note="Description of Artificial Sequence: Synthetic polypeptide"
MAADGYLPDWLEDTLSEGIRQWWKLKPGPPPPKPAERHQDDSRGLVLPGYKYLGPFNGLDKGEPVNEADAAALEHDKAYDRQLDSGDNPYLKYNHADAEFQERLKEDTSFGGNLGRAVFQAKKRVLEPLGLVEEPVKTAPGKKRPVEHSPAEPDSSSGTGKAGQQPARKRLNFGQTGDADSVPDPQPLGQPPAAPSGLGTNTMATGSGAPMADNNEGADGVGNSSGNWHCDSTWMGDRVITTSTRTWALPTYNNHLYKQISSQSGASNDNHYFGYSTPWGYFDFNRFHCHFSPRDWQRLINNNWGLRPKRLNFKLFNIQVKEVTQNDGTTTIANNLTSTVQVFTDSEYQLPYVLGSAHQGCLPPFPADVFMVPQYGYLTLNNGSQAVGRSSFYCLEYFPSQMLRTGNNFTFSYTFEDVPFHSSYAHSQSLDRLMNPLIDQYLYYLSKTNAPSGTTTMSRLQFSQAGASDIRDQSRNWLPGPCYRQQRVSKTAADNNNSDYSWTGATKYHLNGRDSLVNPGPAMASHKDDEEKYFPQSGVLIFGKQDSGKTNVDIEKVMITDEEEIRTTNPVATEQYGSVSTNLQSGNTQAATTDVNTQGVLPGMVWQDRDVYLQGPIWAKIPHTDGHFHPSPLMGGFGLKHPPPQILIKNTPVPANPSTTFSAAKFASFITQYSTGQVSVEIEWELQKENSKRWNPEIQYTSNYNKSVNVDFTVDTNGVYSEPRPIGTRYLTRNL

SEQ ID NO: 2377 - protein, 735 aa, Artificial Sequence
  source: /note="Description of Artificial Sequence: Synthetic polypeptide"
MAADGYLPDWLEDTLSEGIRQWWKLKPGPPPPKPAERHQDDSRGLVLPGYKYLGPFNGLDKGEPVNEADAAALEHDKAYDRQLDSGDNPYLKYNHADAEFQERLKEDTSFGGNLGRAVFQAKKRVLEPLGLVEEPVKTAPGKKRPVEHFPAEPDSSSGTGKAGQQPARKRLNFGQTGDADSVPDPQPLGQPPAAPSGLGTNTMATGSGAPMADNNEGADGVGNSSGNWHCDSTWMGDRVITTSTRTWALPTYNNHLYKQISSQSGASNDNHYFGYSTPWGYFDFNRFHCHFSPRDWQRLINNNWGFRPKRLNFKLFNIQVKEVTQNDGTTTIANNLTSTVQVFTDSEYQLPYVLGSAHQGCLPPFPADVFMVPQYGYLTLNNGSQAVGRSSFYCLEYFPSQMLRTGNNFTFSYTFEDVPFHSSYAHSQSLDRLMNPLIDQYLYYLSKTNAPSGTTTMSRLQFSQAGASDIRDQSRNWLPGPCYRQQRVSKTAADNNNSDYSWTGATKYHLNGRDSLVNPGPAMASHKDDEEKYFPQSGVLIFGKQDSGKTNVDIEKVMITDEEEIRTTNPVATEQYGSVSTNLQSGNTQAATTDVNTQGVLPGMVWQDRDVYLQGPIWAKIPHTDGHFHPSPLMGGFGLKHPPPQILIKNTPVPANPSTTFSAAKFASFITQYSTGQVSVEIEWELQKENSKRWNPEIQYTSNYNKSVNVDFTVDTNGVYSEPRPIGTRYLTRNL

SEQ ID NO: 2378 - protein, 735 aa, Artificial Sequence
  source: /note="Description of Artificial Sequence: Synthetic polypeptide"
MAADGYLPDWLKDTLSEGIRQWWKLKPGPPPPKPAERHQDDSRGLVLPGYKYLGPFNGLDKGEPVNEADAAALEHDKAYDRQLDSGDNPYLKYNHADAEFQERLKEDTSFGGNLGRAVFQAKKRVLEPLGLVEEPVKTAPGKKRPVEHSPAEPDSSSGTGKAGQQPARKRLNFGQTGDADSVPDPQPLGQPPAAPSGLGTNTMATGSGAPMADNNEGADGVGNSSGNWHCDSTWMGDRVITTSTRTWALPTYNNHLYKQISSQSGASNDNHYFGYSTPWGYFDFNRFHCHFSPRDWQRLINNNWGFRPKRLNFKLFNIQVKEVTQNDGTTTIANNLTSTVQVFTDSEYQLPYVLGSAHQGCLPPFPADVFMVPQYGYLTLNNGSQAVGRSSFYCLEYFPSQMLRTGNNFTFSYTFEDVPFHSSYAHSQSLDRLMNPLIDQYLYYLSKTNAPSGTTTMSRLQFSQAGASDIRDQSRNWLPGPCYRQQRVSKTAADNNNSDYSWTGATKYHLNGRDSLVNPGPAMASHKDDEEKYFPQSGVLIFGKQDSGKTNVDIEKVMITDEEEIRTTNPVATEQYGSVSTNLQSGNTQAATTDVNTQGVLPGMVWQDRDVYLQGPIWAKIPHTDGHFHPSPLMGGFGLKHPPPQILIKNTPVPANPSTTFSAAKFASFITQYSTGQVSVEIEWELQKENSKRWNPEIQYTSNYNKSVNVDFTVDTNGVYSEPRPIGTRYLTRNL

SEQ ID NO: 2379 - protein, 735 aa, Artificial Sequence
  source: /note="Description of Artificial Sequence: Synthetic polypeptide"
MAADGYLPDWLEDTLSEGIRQWWKLKPGPPPPKPAERHQDDSRGLVLPGYKYLGPFNGLDKGEPVNEADVAALEHDKAYDRQLDSGDNPYLKYNHADAEFQERLKEDTSFGGNLGRAVFQAKRRVLEPLGLVEEPVKTAPGKKRPVEHSPAEPDSSSGTGKAGQQPARKRLNFGQTGDADSVPDPQPLGQPPAAPSGLGTNTMATGSGAPMADNNEGADGVGNSSGNWHCDSTWMGDRVITTSTRTWALPTYNNHLYKQISSQSGASNDNHYFGYSTPWGYFDFNRFHCHFSPRDWQRLINNNWGFRPKRLNFKLFNIQVKEVTQNDGTTTIANNLTSTVQVFTDSEYQLPYVLGSAHQGCLPPFPADVFMVPQYGYLTLNNGSQAVGRSSFYCLEYFPSQMLRTGNNFTFSYTFEDVPFHSSYAHSQSLDRLMNPLIDQYLYYLSKTNAPSGTTTMSRLQFSQAGASDIRDQSRNWLPGPCYRQQRVSKTAADNNNSDYSWTGATKYHLNGRDSLVNPGPAMASHKDDEEKYFPQSGVLIFGKQDSGKTNVDIEKVMITDEEEIRTTNPVATEQYGSVSTNLQSGNTQAATTDVNTQGVLPGMVWQDRDVYLQGPIWAKIPHTDGHFHPSPLMGGFGLKHPPPQILIKNTPVPANPSTTFSAAKFASFITQYSTGQVSVEIEWELQKENSKRWNPEIQYTSNYNKSVNVDFTVDTNGVYSEPRPIGTRYLTRNL

SEQ ID NO: 2380 - protein, 735 aa, Artificial Sequence
  source: /note="Description of Artificial Sequence: Synthetic polypeptide"
MAADGYLPDWLEDTLSEGIRQWWKLKPGPPPPKPAERHQDDSRGLVLPGYKYLGPFNGLDKGEPVNEADAAALEHDKAYDRQLDSGDNPYLKYNHADAEFQERLKEDTSFGGNLGRAVFQAKKRVLEPLGLVEEPVKTAPGKKRPVEHSPAEPDSSSGTGKAGQQPARKRLNFGQTGDADSVPDPQPLGQPPAAPSGLGTNTMATGSGAPMADNNEGADGVGNSSGNWHCDSTWMGDRVITTSTRTWALPTYNNHLYKQISSQSGASNDNHYFGYSTPWGYFDFNRFHCHFSPRDWQRLINNNWGFRPKRLNFKLFNIQVKEVTQNDGTTTIANNLTSTVQVFTDSEYQLPYVLGSAHQGCLPPFPADVFMVPQYGYLTLNNGSQAVGRSSFYCLEYFPSQMLRTGNNFTFSYTFEDVPFHSSYAHSQSLDRLMNPLIDQYLYYLSKTNALSGTTTMSRLQFSQAGASDIRDQSRNWLPGPCYRQQRVSKTAADNNNSDYSWTGATKYHLNGRDSLVNPGPAMASHKDDEEKYFPQSEVLIFGKQDSGKTNVDIEKVMITDEEEIRTTNPVATEQYGSVSTNLQSGNTQAATTDVNTQGVLPGMVWQDRDVYLQGPIWAKIPHTDGHFHPSPLMGGFGLKHPPPQILIKNTPVPANPSTTFSAAKLASFITQYSTGQVSVEIEWELQKENSKRWNPEIQYTSNYNKSVNVDFTVDTNGVYSEPRPIGTRYLTRNL

SEQ ID NO: 2381 - protein, 735 aa, Artificial Sequence
  source: /note="Description of Artificial Sequence: Synthetic polypeptide"
MAADGYLPDWLEDTLSEGIRQWWKLKPGPPPPKPAERHQDDSRGLVLPGYKYLGPFNGLDKGEPVNEADAAALEHDKAYDRQLDSGDNPYLKYNHADAEFQERLKEDTSFGGNLGRAVFQAKKRVLEPLGLVEEPVKTAPGKKRPVEHSPAEPDSSSGTGKAGQQPARKRLNFGQTGDADSVPDPQPLGQPPAAPSGLGTNTMATGSGAPMADNNEGADGVGNSSGNWHCDSTWMGDRVITTSTRTWALPTYNNHLYKQISSQSGASNDNHYFGYSTPWGYFDFNRFHCHFSPRDWQRLINNNWGFRPKRLNFKLFNIQVKEVTQNDGTTTIANNLTSTVQVFTDSEYQLPYALGSAHQGCLPPFPADVFMVPQYGYLTLNNGSQAVGRSSFYCLEYFPSQMLRTGNNFTFSYTFEDVPFHSSYAHSQSLDRLMNPLIDQYLYYLSKTNAPSGTTTMSRLQFSQAGASDIRDQSRNWLPGPCYRQQRVSKTAADNNNSDYSWTGATKYHLNGRDSLVNPGPAMASHKDDEEKYFPQSGVLIFGKQDSGKTNVDIEKVMITDEEEIRTTNPVATEQYGSVSTNLQSGNTQAATTDVNTQGVLPGMVWQDRDVYLQGPIWAKIPHTDGHFHPSPLMGGFGLKHPPPQILIKNTPVPANPSTTFSAAKFASFITQYSTGQVSVEIEWELQKENSKRWNPEIQYTSNYNKSVNVDFTVDTNGVYSEPRPIGTRYLTRNL

SEQ ID NO: 2382 - protein, 735 aa, Artificial Sequence
  source: /note="Description of Artificial Sequence: Synthetic polypeptide"
MAADGYLPDWLEDTLSEGIRQWWKLKPGPPPPKPAERHQDDSRGLVLPGYKYLGPFNGLDKGEPVNEADAAALEHDKAYDRQLDSGDNPYLKYNHADAEFQERLKEDTSFGGNLGRAVFQAKKRVLEPLGLVEEPVKTAPGKKRPVEHSPAEPDSSSGTGKAGQQPARKRLNFGQTGDADSVPDPQPLGQPPAAPSGLGTNTMATGSGAPMADNNEGADGVGNSSGNWHCDSTWMGDRVITTSTRTWALPTYNNHLYKQISSQSGASNDNHYFGYSTPWGYFDFSRFHCHFSPRDWQRLINNNWGFRPKRLNFKLFNIQVKEVTQNDGTTTIANNLTSTVQVFTDSEYQLPYVLGSAHQGCLPPFPADVFMVPQYGYLTLNNGSQAVGRSSFYCLEYFPSQMLRTGNNFTFSYTFEDVPFHSSYAHSQSLDRLMNPLIDQYLYYLSKTNAPSGTTTMSRLQFSQAGASDIRDQSRNWLPGPCYRQQRVSKTAADNNNSDYSWTGATKYHLNGRDSLVNPGPAMASHKDDEEKYFPQSGVLIFGKQDSGKTNVDIEKVMITDEEEIRTTNPVATEQYGSVSTNLQSGNTQAATTDVNTQGVLPGMVWQDRDVYLQGPIWAKIPHTDGHFHPSPLMGGFGLKHPPPQILIKNTPVPANPSTTFSAAKFASFITQYSTGQVSVEIEWELQKENSKRWNPEIQYTSNYNKSVNVDFTVDTNGVYSEPRPIGTRYLTRNL

SEQ ID NO: 2383 - protein, 735 aa, Artificial Sequence
  source: /note="Description of Artificial Sequence: Synthetic polypeptide"
MAADGYLPDWLEDTLSEGIRQWWKLKPGPPPPKPAERHQDDSRGLVLPGYKYLGPFNGLDKGEPVNEADAAALEHDKAYDRQLDSGDNPYLKYNHADAEFQERLKEDTSFGGNLGRAVFQAKKRVLEPLGLVEEPVKTAPGKKRPVEHSPAEPDSSSGTGKAGQQPARKRLNFGQTGDADSVPDPQPLGQPPAAPSGLGTNTMATGSGAPMADNNEGADGVGNSSGNWHCDSTWMGDRVITTSTRTWALPTYNNHLYKQISSQSGASNDNHYVGYSTPWGYFDFNRFHCHFSPRDWQRLINNNWGFRPKRLNFKLFNIQVKEVTQNDGTTTIANNLTSTVQVFTDSEYQLPYVLGSAHQGCLPPFPADVFMVPQYGYLTLNNGSQAVGRSSFYCLEYFPSQMLRTGNNFTFSYTFEDVPFHSSYAHSQSLDRLMNPLIDQYLYYLSKTNAPSGTTTMSRLQFSQAGASDIRDQSRNWLPGPCYRQQRVSKTAADNNNSDYSWTGATKYHLNGRDSLVNPGPAMASHKDDEEKYFPQSGVLIFGKQDSGKTNVDIEKVMITDEEEIRTTNPVATEQYGSVSTNLQSGNTQAATTDVNTQGVLPGMVWQDRDVYLQGPIWAKIPHTDGHFHPSPLMGGFGLKHPPPQILIKNTPVPANPSTTFSAAKFASFITQYSTGQVSVEIEWELQKENSKRWNPEIQYTSNYNKSVNVDFTVDTNGVYSEPRPIGTRYLTRNL

SEQ ID NO: 2384 - protein, 735 aa, Artificial Sequence
  source: /note="Description of Artificial Sequence: Synthetic polypeptide"
MAADGYLPDWLEDTLSEGIRQWWKLKPGPPPPKPAERHQDDSRGLVLPGYKYLGPFNGLDKGEPVNEADAAALEHDKAYDRQLDSGDNPYLKYNHADAEFQERLKEDTSFGGNLGRAVFQAKKRVLEPLGLVEEPVKTAPGKKRPVEHSPAEPDSSSGTGKAGQQPARKRLNFGQTGDADSVPDPQPLGQPPAAPSGLGTNTMATGSGAPMADNNEGADGVGNSSGNWHCDSTWMGDRVITTSTRTWALPTYNNHLYKQISSQSGASNDNHYFGYSTPWGHFDFNRFHCHFSPRDWQRLINNNWGFRPKRLNFKLFNIQVKEVTQNDGTTTIANNLTSTVQVFTDSEYQLPYVLGSAHQGCLPPFPADVFMVPQYGYLTLNNGSQAVGRSSFYCLEYFPSQMLRTGNNFTFSYTFEDVPFHSSYAHSQSLDRLMNPLIDQYLYYLSKTNAPSGTTTMSRLQFSQAGASDIRDQSRNWLPGPCYRQQRVSKTAADNNNSDYSWTGATKYHLNGRDSLVNPGPAMASHKDDEEKYFPQSGVLIFGKQDSGKTNVDIEKVMITDEEEIRTTNPVATEQYGSVSTNLQSGNTQAATTDVNTQGVLPGMVWQDRDVYLQGPIWAKIPHTDGHFHPSPLMGGFGLKHPPPQILIKNTPVPANPSTTFSAAKFASFITQYSTGQVSVEIEWELQKENSKRWNPEIQYTSNYNKSVNVDFTVDTNGVYSEPRPIGTRYLTRNL

SEQ ID NO: 2385 - protein, 735 aa, Artificial Sequence
  source: /note="Description of Artificial Sequence: Synthetic polypeptide"
MAADGYLPDWLEDTLSEGIRQWWKLKPGPPPPKPAERHQDDSRGLVLPGYKYLGPFNGLDKGEPVNEADVAALEHDKAYDRQLDSGDNPYLKYNHADAEFQERLKEDTSFGGNLGRAVFQAKKRVLEPLGLVEEPVKTAPGKKRPVEHSPAEPDSSSGTGKAGQQPARKRLNFGQTGDADSVPDPQPLGQPPAAPSGLGTNTMATGSGAPMADNNEGADGVGNSSGNWHCDSTWMGDRVITTSTRTWALPTYNNHLYKQISSQSGASNDNHYFGYSTPWGYFDFNRFHCHFSPRDWQRLINNDWGFRPKRLNFKLFNIQVKEVTQNDGTTTIANNLTSTVQVFTDSEYQLPYVLGSAHQGCLPPFPADVFMVPQYGYLTLNNGSQAVGRSSFYCLEYFPSQMLRTGNNFTFSYTFEDVPFHSSYAHSQSLDRLMNPLIDQYLYYLSKTNAPSGTTTMSRLQFSQAGASDIRDQSRNWLPGPCYRQQRVSKTAADNNNSDYSWTGATKYHLNGRDSLVNPGPAMASHKDDEEKYFPQSGVLIFGKQDSGKTNVDIEKVMITDEEEIRTTNPVATEQYGSVSTNLQSGNTQAATTDVNTQGVLPGMVWQDRDVYLQGPIWAKIPHTDGHFHPSPLMGGFGLKHPPPQILIKNTPVPANPSTTFSAAKFASFITQYSTGQVSVEIEWELQKENSKRWNPEIQYTSNYNKSVNVDFTVDTNGVYSEPRPIGTRYLTRNL

SEQ ID NO: 2386 - protein, 735 aa, Artificial Sequence
  source: /note="Description of Artificial Sequence: Synthetic polypeptide"
MAADGYLPDWLEDTLSEGIRQWWKLKPGPPPPKPAERHQDDSRGLVLPGYKYLGPFNGLDKGEPVNEADAAALEHDKAYDRQLDSGDNPYLKYNHADAEFQERLKEDTSFGGNLGRAVFQAKKRVLEPLGLVEEPVKTAPGKKRPVEHSPAEPDSSSGTGKAGQQPARKRLNFGQTGDADSVPDPQPLGQPPAAPSGLGTNTMATGSGAPMADNNEGADGVGNSSGNWHCDSTWMGDRVITTSTRTWALPTYNNHLYKQISSQSGASNDNHYFGYSTPWGYFDFNRFHCHFSPRDWQRLINNNWGFRPKRLNFKLFNIQVKEVTQNDGTTTIANNLTSTVQVFTDSEYQLPYVLGSAHQGCLPPFPADVFMVPQYGYLTLNNGSQAVGRSSFYCLEYFPSQMLRTGNNFTFSYTFEDVPFHSSYAHSQSLDRLMNPLIDQYLYYLSKTNAPSGTTTMSRLQFSQAGASDIRDQSRNWLPGPCYRQQRVSKTAADNNNSDYSWTGATKYHLNGRDSLVNPGPAMASHKDDEEKYFPQSGVLIFGKQDSEKTNVDIEKVMITDEEEIRTTNPVATEQYGSVSTNLQSGNTQAATTDVNTQGVLPGMVWQDRDVYLQGPIWAKIPHTDGHFHPSPLMGGFGLKHPPPQILIKNTPVPANPSTTFSAAKFASFITQYSTGQVSVEIEWELQKENSKRWNPEIQYTSNYNKSVNVDFTVDTNGVYSEPRPIGTRYLTRNL

SEQ ID NO: 2387 - protein, 735 aa, Artificial Sequence
  source: /note="Description of Artificial Sequence: Synthetic polypeptide"
MAADGYLPDWLEDTLSEGIRQWWKLKPGPPPPKPAERHQDDSRGLVLPGYKYLGPFNGLDKGEPVNEADAAALEHDKAYDRQLDSGDNPYLKYNHADAEFQERLKEDTSFGGNLGRAVFQAKKRVLEPLGLVEEPVKTAPGKKRPVEHSPAEPDSSSGTGKAGQQPARKRLNFGQTGDADSVPDPQPLGQPPAAPSGLGTNTMATGSGAPMADNNEGADGVGNSSGNWHCDSTWMGDRVITTSTRTWALPTYNNHLYKQISSQSGASNDNHYFGYSTPWGYFDFNRFHCHFSPRDWQRLINNNWGFRPKRLNFKLFNIQVKEVTQNDGTTTIANNLTSTVQVFTDSEYQLPYVLGSAHQGCLPPFPADVFMVPQYGYLTLNNGSQAVGRSSFYCLEYFPSQMLRTGNNFTFSYTFEDVPFHSSYAHSQSLDRLMNPLIDQYLYYLSKTNAPSGTTTMSRLQFSQAGASDIRDQSRNWLPGPCYRQQRVSKTAADNNNSDYSWTGATKYHLNGRDSLVNPGPAMASHKDDEEKYFPQSGVLIFGKQDSGKTNVDIEKVMITDEEEIRTTNPVATEQYGSVSTNLQSGNTQAATTDVNTQGVLPGMVWQDRDVYLQGPIWAKIPHTDGHFHPSPLMGGFGLKHPPPQILIKNTPVPANPSTTFSAAKFASFITQYSTGQVSVEIEWELQKENSKRWNPEIQYTSNYNKSVNVDFTVDTNGVYSEPRPIGTRYLTRNL

SEQ ID NO: 2388 - protein, 735 aa, Artificial Sequence
  source: /note="Description of Artificial Sequence: Synthetic polypeptide"
MAADGYLPDWLEDTLSEGIRQWWKLKPGPPPPKPAERHQDDSRGLVLPGYKYLGPFNGLDKGEPVNEADVAALEHDKAYDRQLDSGDNPYLKYNHADAEFQERLKEDTSFGGNLGRAVFQAKKRVLEPLGLVEEPVKTAPGKKRPVEHSPAEPDSSSGTGKAGQQPARKRLNFGQTGDADSVPDPQPLGQPPAAPSGLGTNTMATGSGAPMADNNEGADGVGNSSGNWHCDSTWMGDRVITTSTRTWALPTYNNHLYKQISSQSGASNDNHYFGYSTPWGYFDFNRFHCHFSPRDWQRLINNNWGFRPKRLNFKLFNIQVKEVTQNDGTTTIANNLTSTVQVFTDSEYQLPYVLGSAHQGCLPPFPADVFMVPQYGYLTLNNGSQAVGRSSFYCLEYFPSQMLRTGNNFTFSYTFEDVPFHSSYAHSQSLDRLMNPLIDQYLYYLSKTNAPSGTTTMSRLQFSQAGASDIRDQSRNWLPGPCYRQQRVSKTAADNNNSDYSWTGATKYHLNGRDSLVNPGPAMASHKDDEEKYFPQSGVLIFGKQDSGKTNVDIEKVMITDEEEIRTTNPVATEQYGSVSTNLQSGNTQAATTDVNTQGVLPGMVWQDRDVYLQGPIWAKIPHTDGHFHPSPLMGGFGLKHPPPQILIKNTPVPANPSTTFSAAKFASFITQYSTGQVSVEIEWELQKENSKRWNPEIQYTSNYNKSVNVDFTVDTNGVYSEPRPIGTRYLTRNL

SEQ ID NO: 2389 - protein, 735 aa, Artificial Sequence
  source: /note="Description of Artificial Sequence: Synthetic polypeptide"
MAADGYLPDWLEDTLSEGIRQWWKLKPGPPPPKPAERHQDDSRGLVLPGYKYLGPFNGLDKGEPVNEADAAALEHDKAYDRQLDSGDNPYLKYNHADAEFQERLKEDTSFGGNLGRAVFQAKKRVLEPLGLVEEPVKTAPGKKRPVEHSPAEPDSSSGTGKAGQQPARKRLNFGQTGDADSVPDPQPLGQPPAAPSGLGTNTMATGSGAPMADNNEGADGVGNSSGNWHCDSTWMGDRVITTSTRTWALPTYNNHLYKQISSQSGASNDNHYFGYSTPWGYFDFNRFHCHFSPRDWQRLINNNWGFRPKRLNFKLFNIQVKEVTQNDGTTTIANNLTSTVQVFTDSEYQLPYVLGSAHQGCLPPFPADVFMVPQYGYLTLNNGSQAVGRSSFYCLEYFPSQMLRTGNNFTFSYTFEDVPFHSSYAHSQSLDRLMNPLIDQYLYYLSKTNAPSGTTTMSRLQFSQAGASDIRDQSRNWLPGPCYRQQRVSKTAADNNNSDYPWTGATKYHLNGRDSLVNPGPAMASHKDDEEKYFPQSGVLIFGKQDSGKTNVDIEKVMITDEEEIRTTNPVATEQYGSVSTNLQSGNTQAATTDVNTQGVLPGMVWQDRDVYLQGPIWAKIPHTDGHFHPSPLMGGFGLKHPPPQILIKNTPVPANPSTTFSAAKFASFITQYSTGQVSVEIEWELQKENSKRWNPEIQYTSNYNKSVNVDFTVDTNGVYSEPRPIGTRYLTRNL

SEQ ID NO: 2390 - protein, 735 aa, Artificial Sequence
  source: /note="Description of Artificial Sequence: Synthetic polypeptide"
MAADGYLPDWLEDTLSEGIRQWWKLKPGPPPPKPAERHQDDSRGLVLPGYKYLGPFNGLDKGEPVNEADAAALEHDKAYDRQLDSGDNPYLKYNHADAEFQERLKEDTSFGGNLGRAVFQAKKRVLEPLGLVEEPVKTAPGKKRPVEHSPAEPDSSSGTGKAGQQPARKRLNFGQTGDADSVPDPQPLGQPPAAPSGLGTNTMATGSGAPMADNNEGADGVGNSSGNWHCDSTWMGDRVITTSTRTWALPTYNNHLYKQISSQSGASNDNHYFGYSTPWGYFDFNRFHCHFSPRDWQRLINNNWGFRPKRLNFKLFNIQVKEVTQNDGTTTIANNLTSTVQVFTDSEYQLPYVLGSAHQGCLPPFPADVFMVPQYGYLTLNNGSQAVGRSSFYCLEYFPSQMLRTGNNFTFSYTFEDVPFHSSYAHSQSLDRLMNPLIDQYLYYLSKTNAPSGTTTMSRLQFSQAGASDIRDQSRNWLPGPCYRQQRVSKTAADNNNSDYSWTGATKYHLNGRDSLVNPGPAMASHKDDEEKYFPQSGVLIFGKQDSGKTNVDIEKVMITDEEEIRTTNPVATEQYGSVSTNLQSGNTQAATTDVNTQGALPGMVWQDRDVYLQGPIWAKIPHTDGHFHPSPLMGGFGLKHPPPQILIKNTPVPANPSTTFSAAKFASFITQYSTGQVSVEIEWELQKENSKRWNPEIQYTSNYNKSVNVDFTVDTNGVYSEPRPIGTRYLTRNL

SEQ ID NO: 2391 - protein, 735 aa, Artificial Sequence
  source: /note="Description of Artificial Sequence: Synthetic polypeptide"
MAADGYLPDWLEDTLSEGIRQWWKLKPGPPPPKPAERHQDDSRGLVLPGYKYLGPFNGLDKGEPVNEADAAALEHDKAYDRQLDSGDNPYLKYNHADAEFQERLKEDTSFGGNLGRAVFQAKKRVLEPLGLVEEPVKTAPGKKRPVEHSPAEPDSSSGTGKAGQQPARKRLNFGQTGDADSVPDPQPLGQPPAAPSGLGTNTMATGSGAPMADNNEGADGVGNSSGNWHCDSTWMGDRVITTSTRTWALPTYNNHLYKQISSQSGASNDNHYFGYSTPWGYFDFNRFHCHFSPRDWQRLINNNWGFRPKRLNFKLFNIQVKEVTQNDGTTTIANNLTSTVQVFTDSEYQLPYVLGSAHQGCLPPFPADVFMVPQYGYLTLNNGSQAVGRSSFYCLEYFPSQMLRTGNNFTFSYTFEDVPFHSSYAHSQSLDRLMNPLIDQYLYYLSKTNAPSGTTTMSRLQFSQAGASDIRDQSRNWLPGPCYRQQRVSKTAADNNNSDYSWTGATKYHLNGRDSLVNPGPAMASHKDDEEKYFPQSGVLIFGKQDSGKTNVDIEKVMITDEEEIRTTNPVATEQYGSVSTNLQSGNTQAATTDVNTQGVLPGMVWQDRDVYLQGPIWAKIPHTDGHFHPSPLMGGFGLKHPPPQILIKNTPVPANPSTTFSAAKLASFITQYSTGQVSVEVEWELQKENSKRWNPEIQYTSNYNKSVNVDFTVDTNGVYSEPRPIGTRYLTRNL

SEQ ID NO: 2392 - protein, 735 aa, Artificial Sequence
  source: /note="Description of Artificial Sequence: Synthetic polypeptide"
MAADGYLPDWLEDTLSEGIRQWWKLKPGPPPPKPAERHQDDSRGLVLPGYKYLGPFNGLDKGEPVNEADVAALEHDKAYDRQLDSGDNPYLKYNHADAEFQERLKEDTSFGGNLGRAVFQAKKRVLEPLGLVEEPVKTAPGKKRPVEHSPAEPDSSSGTGKAGQQPARKRLNFGQTGDADSVPDPQPLGQPPAAPSGLGTNTMATGSGAPMADNNEGADGVGNSSGNWHCDSTWMGDRVITTSTRTWALPTYNNHLYKQISSQSGASNDNHYFGYSTPWGYFDFNRFHCHFSPRDWQRLINNNWGFRPKRLNFKLFNIQVKEVTQNDGTTTIANNLTSTVQVFTDSEYQLPYVLGSAHQGCLPPFPADVFMVPQYGYLTLNSGSQAVGRSSFYCLEYFPSQMLRTGNNFTFSYTFEDVPFHSSYAHSQSLDRLMNPLIDQYLYYLSKTNAPSGTTTMSRLQFSQAGASDIRDQSRNWLPGPCYRQQRVSKTAADNNNSDYSWTGATKYHLNGRDSLVNPGPAMASHKDDEEKYFPQSGVLIFGKQDSGKTNVDIEKVMITDEEEIRTTNPVATEQYGSVSTNLQSGNTQAATTDVNTQGVLPGMVWQDRDVYLQGPIWAKIPHTDGHFHPSPLMGGFGLKHPPPQILIKNTPVPANPSTTFSAAKFASFITQYSTGQVSVEIEWELQKENSKRWNPEIQYTSNYNKSVNVDFTVDTNGVYSEPRPIGTRYLTRNL

SEQ ID NO: 2393 - protein, 735 aa, Artificial Sequence
  source: /note="Description of Artificial Sequence: Synthetic polypeptide"
MAADGYLPDWLEDTLSEGIRQWWKLKPGPPPPKPAERHQDDSRGLVLPGYKYLGPFNGLDKGEPVNEADVAALEHDKAYDRQLDSGDNPYLKYNHADAEFQERLKEDTSFGGNLGRAVFQAKKRVLEPLGLVEEPVKTAPGKKRPVEHSPAEPDSSSGTGKAGQQPARKRLNFGQTGGADSVPDPQPLGQPPAAPSGLGTNTMATGSGAPMADNNEGADGVGNSSGNWHCDSTWMGDRVITTSTRTWALPTYNNHLYKQISSQSGASNDNHYFGYSTPWGYFDFNRFHCHFSPRDWQRLINNNWGFRPKRLNFKLFNIQVKEVTQNDGTTTIANNLTSTVQVFTDSEYQLPYVLGSAHQGCLPPFPADVFMVPQYGYLTLNNGSQAVGRSSFYCLEYFPSQMLRTGNNFTFSYTFEDVPFHSSYAHSQSLDRLMNPLIDQYLYYLSKTNAPSGTTTMSRLQFSQAGASDIRDQSRNWLPGPCYRQQRVSKTAADNNNSDYSWTGATKYHLNGRDSLVNPGPAMASHKDDEEKYFPQSGVLIFGKQDSGKTNVDIEKVMITDEEEIRTTNPVATEQYGSVSTNLQSGNTQAATTDVNTQGVLPGMVWQDRDVYLQGPIWAKIPHTDGHFHPSPLMGGFGLKHPPPQILIKNTPVPANPSTTFSAAKFASFITQYSTGQVSVEIEWELQKENSKRWNPEIQYTSNYNKSVNVDFTVDTNGVYSEPRPIGTRYLTRNL

SEQ ID NO: 2394 - protein, 735 aa, Artificial Sequence
  source: /note="Description of Artificial Sequence: Synthetic polypeptide"
MAADGYLPDWLEDTLSEGIRQWWKLKPGPPPPKPAERHQDDSRGLVLPGYKYLGPFNGLDKGEPVNEADAAALEHDKAYDRQLDSGDNPYLKYNHADAEFQERLKEDTSFGGNLGRAVFQAKKRVLEPLGLVEEPVKTAPGKKRPVEHSPAEPDSSSGTGKAGQQPARKRLNFGQTGDADSVPDPQPLGQPPAAPSGLGTNTMATGSGAPMADNNEGADGVGNSSGNWHCDSTWMGDRVITTSTRTWALPTYNNHLYKQISSQSGASNDNHYFGYSTPWGYFDFNRFHCHFSPRDWQRLINNNWGFRPKRLNFKLFNIQVKEVTQNDGTTTIANNLTSTVQVFTDSEYQLPYALGSAHQGCLPPFPADVFMVPQYGYLTLNNGSQAVGRSSFYCLEYFPSQMLRTGNNFTFSYTFEDVPFHSSYAHSQSLDRLMNPLIDQYLYYLSKTNAPSGTTTMSRLQFSQAGASDIRDQSRNWLPGPCYRQQRVSKTAADNNNSDYSWTGATKYHLNGRDSLVNPGPAMASHKDDEEKYFPQSGVLIFGKQDSGKTNVDIEKVMITDEEEIRTTNPVATEQYGSVSTNLQSGNTQAATTDVNTQGVLPGMVWQDRDVYLQGPIWAKIPHTDGHFHPSPLMGGFGLKHPPPQILIKNTPVPANPSTTFSAAKFASFITQYSTGQVSVEIEWELQKEDSKRWNPEIQYTSNYNKSVNVDFTVDTNGVYSEPRPIGTRYLTRNL

SEQ ID NO: 2395 - protein, 735 aa, Artificial Sequence
  source: /note="Description of Artificial Sequence: Synthetic polypeptide"
MAADGYLPDWLEDTLSEGIRQWWKLKPGPPPPKPAERHQDDSRGLVLPGYKYLGPFNGLDKGEPVNEADAAALEHDKAYDRQLDSGDNPYLKYNHADAEFQERLKEDTSFGGNLGRAVFQAKKRVLEPLGLVEEPVKTAPGKKRPVEHSPAEPDSSSGTGKAGQQPARKRLNFGQTGDADSVPDPQPLGQPPAAPSGLGTNTMATGSGAPMADNNEGADGVGNSSGNWHCDSTWMGDRVITTSTRTWALPTYNNHLYKQISSQSGASNDNHYFGYSTPWGYFDFNRFHCHFSPRDWQRLINNNWGFRPKRLNFKLFNIQVKEVTQNDGTTTIANNLTSTVQVFTDSEYQLPYVLGSAHQGCLPPFPADVFMVPQYGYLTLNNGSQAVGRSSFYCLEYFPSQMLRTGNNFTFSYTFEDVPFHSSYAHSQSLDRLMNPLIDQYLYYLSKTNAPSGTTTMSRLQFSQAGASDIRDQSRNWLPGPCYRQQRVSKTAADNNNSDYSWTGATKYHLNGRDSLVNPGPAMASHKDDEEKYFPQSGVLIFGKQDSGKTNVDIEKVMITDEEEIRTTNPVATEQYGSVSTNLQSGNTQAATTDVNTQGVLPGMVWQDRDVYLQGPIWAKIPHTDGHFHPSPLMGGFGLKHPPPQILIKNTPVPANPSTTSSAAKFASFITQYSTGQVSVEIEWELQKENSKRWNPEIQYTSNYNKSVNVDFTVDTNGVYSEPRPIGTRYLTRNL

SEQ ID NO: 2396 - protein, 735 aa, Artificial Sequence
  source: /note="Description of Artificial Sequence: Synthetic polypeptide"
MAADGYLPDWLEDTLSEGIRQWWKLKPGPPPLKPAERHQDDSRGLVLPGYKYLGPFNGLDKGEPVNEADAAALEHDKAYDRQLDSGDNPYLKYNHADAEFQERLKEDTSFGGNLGRAVFQAKKRVLEPLGLVEEPVKTAPGKKRPVEHSPAEPDSSSGTGKAGQQPARKRLNFGQTGDADSVPDPQPLGQPPAAPSGLGTNTMATGSGAPMADNNEGADGVGNSSGNWHCDSTWMGDRVITTSTRTWALPTYNNHLYKQISSQSGASNDNHYFGYSTPWGYFDFNRFHCHFSPRDWQRLINNNWGFRPKRLNFKLFNIQVKEVTQNDGTTTIANNLTSTVQVFTDSEYQLPYVLGSAHQGCLPPFPADVFMVPQYGYLTLNNGSQAVGRSSFYCLEYFPSQMLRTGNNFTFSYTFEDVPFHSSYAHSQSLDRLMNPLIDQYLYYLSKTNAPSGTTTMSRLQFSQAGASDIRDQSRNWLPGPCYRQQRVSKTAADNNNSDYSWTGATKYHLNGRDSLVNPGPAMASHKDDEEKYFPQSGVLIFGKQDSGKTNVDIEKVMITDEEEIRTTNPVATEQYGSVSTNLQSGNTQAATTDVNTQGVLPGMVWQDRDVYLQGPIWAKIPHTDGHFHPSPLMGGFGLKHPPPPILIKNTPVPANPSTTFSAAKFASFITQYSTGQVSVEIEWELQKENSKRWNPEIQYTSNYNKSVNVDFTVDTNGVYSEPRPIGTRYLTRNL

SEQ ID NO: 2397 - protein, 735 aa, Artificial Sequence
  source: /note="Description of Artificial Sequence: Synthetic polypeptide"
MAADGYLPDWLEDTLSEGIRQWWKLKPGPPPPKPAERHQDDSRGLVLPGYKYLGPFNGLDKGEPVNEADAAALEHDKAYDRQLDSGDNPYLKYNHADAEFQERLKEDTSFGGNLGRAVFQAKKRVLEPLGLVEEPVKTAPGKKRPVEHSPAEPDSSSGTGKAGQQPARKRLNFGQTGDADSVPDPQPLGQPPAAPSGLGTNTMATGSGAPMADNNEGADGVGNSSGNWHCDSTWMGDRVITTSTRTWALPTYNNHLYKQISSQSGASNDNHYFGYSTPWGYFDFNRFHCHFSPRDWQRLINNNWGFRPKRLNFKLFNIQVKEVTQNDGTTTIANNLTSTVQVFTDSEYQLPYVLGSAHQGCLPPFPADVFMVPQYGYLTLNNGSQAVGRSSFYCLEYFPSQMLRTGNNFTFSYTFEDVPFHSSYAHSQSLDRLMNPLIDQYLYYLSKTNAPSGTTTMSRLQFSQAGASDIRDQSRNWLPGPCYRQQRVSKTAADNNNSDYSWTGATKYHLNGRDSLVNPGPAMASHKDDEEKYFPQSGVLIFGKQDSGKTNVDIEKVMITDEEEIRATNPVATEQYGSVSTNLQSGNTQAATTDVNTQGVLPGMVWQDRDVYLQGPIWAKIPHTDGHFHPSPLMGGFGLKHPPPQILIKNTPVPANPSTTFSAAKFASFITQYSTGQVSVEIEWELQKENSKRWNPEIQYTSNYNKSVNVDFTVDTNGVYSEPRPIGTRYLTRNL

SEQ ID NO: 2398 - protein, 735 aa, Artificial Sequence
  source: /note="Description of Artificial Sequence: Synthetic polypeptide"
MAADGYLPDWLEDTLSEGIRQWWKLKPGPPPPKPAERHQDDSRGLVLPGYKYLGPFNGLDKGEPVNEADAAALEHDKAYDRQLDSGDNPYLKYNHADAEFQERLKEDTSFGGNLGRAVFQAKKRVLEPLGLVEEPVKTAPGKKRPVEHSPAEPDSSSGTGKAGQQPARKRLNFGQTGDADSVPDPQPLGQPPAAPSGLGTNTMATGSGAPMADNNEGADGVGNSSGNWHCDSTWMGDRVITTSTRTWALPTYNNHLYKQISSQSGASNDNHYFGYSTPWGYFDFNRFHCHFSPRDWQRLISNNWGFRPKRLNFKLFNIQVKEVTQNDGTTTIANNLTSTVQVFTDSEYQLPYVLGSAHQGCLPPFPADVFMVPQYGYLTLNNGSQAVGRSSFYCLEYFPSQMLRTGNNFTFSYTFEDVPFHSSYAHSQSLDRLMNPLIDQYLYYLSKTNAPSGTTTMSRLQFSQAGASDIRDQSRNWLPGPCYRQQRVSKTAADNNNSDYSWTGATKYHLNGRDSLVNPGPAMASHKDDEEKYFPQSGVLIFGKQDSGKTNVDIEKVMITDEEEIRTTNPVATEQYGSVSTNLQSGNTQAATTDVNTQGVLPGMVWQDRDVYLQGPIWAKIPHTDGHFHPSPLMGGFGLKHPPPQILIKNTPVPANPSTTFSAAKFASFITQYSTGQVSVEIEWEPQKENSKRWNPEIQYTSNYNKSVNVDFTVDTNGVYSEPRPIGTRYLTRNL

SEQ ID NO: 2399 - protein, 735 aa, Artificial Sequence
  source: /note="Description of Artificial Sequence: Synthetic polypeptide"
MAADGYLPDWLEDTLSEGIRQWWKLKPGPPPPKPAERHQDDSRGLVLPGYKYLGPFNGLDKGEPVNEADAAALEHDKAYDRQLDSGDNPYLKYNHADAEFQERLKEDTSFGGNLGRAVFQAKKGVLEPLGLVEEPVKTAPGKKRPVEHSPAEPDSSSGTGKAGQQPARKRLNFGQTGDADSVPDPQPLGQPPAAPSGLGTNTMATGSGAPMADNNEGADGVGNSSGNWHCDSTWMGDRVITTSTRTWALPTYNNHLYKQISSQSGASNDNHYFGYSTPWGYFDFNRFHCHFSPRDWQRLINNNWGFRPKRLNFKLFNIQVKEVTQNDGTTTIANNLTSTVQVFTDSEYQLPYVLGSAHQGCLPPFPADVFMVPQYGYLTLNNGSQAVGRSSFYCLEYFPSQMLRTGNNFTFSYTFEDVPFHSSYAHSQSLDRLMNPLIDQYLYYLSKTNAPSGTTTMSRLQFSQAGASDIRDQSRNWLPGPCYRQQRVSKTAADNNNSDYSWTGATKYHLNGRDSLVNPGPAMASHKDDEEKYFPQSGVLIFGKQDSGKTNVDIEKVMITDEEEIRTTNPVATEQYGSVSTNLQSGNTQAATTDVNTQGVLPGMVWQDRDVYLQGPIWAKIPHTDGHFHPSPLMGGFGLKHPPPQILIKNTPVPANPSTTFSAAKFASFITQYSTGQVSVEIEWELQKENSKRWNPEIQYTSNYNKSVNVDFTVDTNGVYSEPRPIGTRYLTRNL

SEQ ID NO: 2400 - protein, 735 aa, Artificial Sequence
  source: /note="Description of Artificial Sequence: Synthetic polypeptide"
MAADGYLPDWLEDTLSEGIRQWWKLKPGPPPPKPAERHQDDSRGLVLPGYKYLGPFNGLDKGEPVNEADAAALEHDKAYDRQLDSGDNPYLKYNHADAEFQERLKEDTSFGGNLGRAVFQAKKRVLEPLGLVEEPVKTAPGKKRPVEHSPAEPDSSSGTGKAGQQPARKRLNFGQTGDADSVPDPQPLGQPPAAPSGLGTNTMATGSGAPMADNNEGADGVGNSSGNWHCDSTWMGDRVITTSTRTWALPTYNNHLYKQISSQSGASNDNHYFGYSTPWGYFDFNRFHCHFSPRDWQRLINNNWGFRPKRLNFKLFNIQVKEVTQNDGTTTIANNLTSTVQVFTDSEYQLPYVLGSAHQGCLPPFPADVFMVPQYGYLTLNNGSQAVGRSSFYCLEYFPSQMLRTGNNFTFSYTFEDVPFHSSYAHSQSLDRLMNPLIDQYLYYLSRTNAPSGTTTMSRLQFSQAGASDIRDQSRNWLPGPCYRQQRVSKTAADNNNSDYSWTGATKYHLNGRDSLVNPGPAMASHKDDEEKYFPQSGVLIFGKQDSGKTNVDIEKVMITDEEEIRTTNPVATEQYGSVSTNLQSGNTQAATTDVNTQGVLPGMVWQDRDVYLQGPIWAKIPHTDGHFHPSPLMGGFGLKHPPPQILIKNTPVPANPSTTFSAAKFASFITQYSTGQVSVEIEWELQKENSKRWNPEIQYTSNYNKSVNVDFTVDTNGVYSEPRPIGTRYLTRNL

SEQ ID NO: 2401 - protein, 735 aa, Artificial Sequence
  source: /note="Description of Artificial Sequence: Synthetic polypeptide"
MAADGYLPDWLEDTLSEGIRQWWKLKPGPPPPKPAERHQDDSRGLVLPGYKYLGPFNGLDKGEPVNEADAAALEHDKAYDRQLDSGDNPYLKYNHADAEFQERLKEDTSFGGNLGRAVFQAKKRVLEPLGLVEEPVKTAPGKKRPVEHSPAEPDSSSGTGKAGQQPARKRLNFGQTGDADSVPDPQPLGQPPAAPSGLGTNTMATGSGAPMADNNEGADGVGNSSGNWHCDSTWMGDRVITTSTRTWALPTYNNHLYKQISSQSGASNDNHYFGYSTPWGYFDFNRFHCHFSPRDWQRLINNNWGFRPKRLNFKLFNIQVKEVTQNDGTTTIANNLTSTVQVFTDSEYQLPYVLGSAHQGCLPPFPADVFMVPQYGYLTLNNGSQAVGRSSFYCLEYFPSQMLRTGNNFTFSYTFEDVPFHSSYAHSQSLDRLMNPLIDQYLYYLSKTNAPSGTTTMSRLQFSQAGASDIRDQSRNWLPGPCYRQQRVSKTAADNNNSDYSWTGATKYHLNGRDSLVNPGPAMASHKDDEEKYFPQSGVLIFGKQDSGKTNVDIEKVMITDEEEIRTTNPVATEQYGSVSTNLQSGNTQAATTDVNTQGVLPGMVWQDRDVYLQGPIWAKIPHTDGHFHPSPLMGGFGLKHPPPQILIKNTPVPANPSTTFSAAKFASFITQYSTGQVSVEIEWELQKENSKRWNPEIQYTSNYNKSVNVDLTVDTNGVYSEPRPIGTRYLTRNL

SEQ ID NO: 2402 - protein, 735 aa, Artificial Sequence
  source: /note="Description of Artificial Sequence: Synthetic polypeptide"
MAADGYLPDWLEDTLSEGIRQWWKLKPGPPPLKPAERHQDDSRGLVLPGYKYLGPFNGLDKGEPVNEADAAALEHDKAYDRQLDSGDNPYLKYNHADAEFQERLKEDTSFGGNLGRAVFQAKKRVLEPLGLVEEPVKTAPGKKRPVEHSPAEPDSSSGTGKAGQQPARKRLNFGQTGDADSVPDPQPLGQPPAAPSGLGTNTMAAGSGAPMADNNEGADGVGNSSGNWHCDSTWMGDRVITTSTRTWALPTYNNHLYKQISSQSGASNDNHYFGYSTPWGYFDFNRFHCHFSPRDWQRLINNNWGFRPKRLNFKLFNIQVKEVTQNDGTTTIANNLTSTVQVFTDSEYQLPYVLGSAHQGCLPPFPADVFMVPQYGYLTLNNGSQAVGRSSFYCLEYFPSQMLRTGNNFTFSYTFEDVPFHSSYAHSQSLDRLMNPLIDQYLYYLSKTNAPSGTTTMSRLQFSQAGASDIRDQSRNWLPGPCYRQQRVSKTAADNNNSDYSWTGATKYHLNGRDSLVNPGPAMASHKDDEEKYFPQSGVLIFGKQDSGKTNVDIEKVMITDEEEIRTTNPVATEQYGSVSTNLQSGNTQAATTDVNTQGVLPGMVWQDRDVYLQGPIWAKIPHTDGHFHPSPLMGGFGLKHPPPQILIKNTPVPANPSTTFSAAKFASFITQYSTGQVSVEIEWELQKENSKRWNPEIQYTSNYNKSVNVDFTVDTNGVYSEPRPIGTRYLTRNL

SEQ ID NO: 2403 - protein, 735 aa, Artificial Sequence
  source: /note="Description of Artificial Sequence: Synthetic polypeptide"
MAADGYLPDWLEDTLSEGIRQWWKLKPGPPPPKPAERHQDDSRGLVLPGYKYLGPFNGLDKGEPVNEADAAALEHDKAYDRQLDSGDNPYLKYNHADAEFQERLKEDTSFGGNLGRAVFQAKKRVLEPLGLVEEPVKTAPGKKRPVEHSPAEPDSSSGTGKAGQQPARKRLNFGQTGDADSVPDPQPLGQPPAAPSGLGTNTMATGSGAPMADNNEGADGVGNSSGNWHCDSTWMGDRVITTSTRTWALPTYNNHLYKQISSQSGASNDNHYFGYSTPWGYFDFNRFHCHFSPRDWQRLINNNWGFRPKRLNFKLFNIQVKEVTQNDGTTTIANNLTSTVQVFTDSEYQLPYVLGSAHQGCLPPFPADVFMVPQYGYLTLNNGSQAVGRSSFYCLEYFPSQMLRTGNNFTFSYTFEDVPFHSSYAHSQSLDRLMNPLIDQYLYYLSKTNAPSGTTTMSRLQFSQAGASDIRDQSRNWLPGPCYRQQRVSKTAADNNNSDYSWTGATKYHLNGRDSLVNPGPAMASHKDDEEKYFPQSGVLIFGKQDSGKTNVDIEKVMITDEEEIRTTNPVATEQYGSVSTNLQSGDTQAATTDVNTQGVLPGMVWQDRDVYLQGPIWAKIPHTDGHFHPSPLMGGFGLKHPPPQILIKNTPVPANPSTTFSAAKFASFITQYSTGQVSVEIEWELQKENSKRWNPEIQYTSNYNKSVNVDFTVDTNGVYSEPRPIGTRYLTRNL

SEQ ID NO: 2404 - protein, 735 aa, Artificial Sequence
  source: /note="Description of Artificial Sequence: Synthetic polypeptide"
MAADGYLPDWLEDTLSEGIRQWWKLKPGPPPPKPAERHQDDSRGLVLPGYKYLGPFNGLDKGEPVNEADAAALEHDKAYDRQLDSGGNPYLKYNHADAEFQERLKEDTSFGGNLGRAVFQAKKRVLEPLGLVEEPVKTAPGKKRPVEHSPAEPDSSSGTGKAGQQPARKRLNFGQTGDADSVPDPQPLGQPPAAPSGLGTNTMATGSGAPMADNNEGADGVGNSSGNWHCDSTWMGDRVITTSTRTWALPTYNNHLYKQISSQSGASNDNHYFGYSTPWGYFDFNRFHCHFSPRDWQRLINNNWGFRPKRLNFKLFNIQVKEVTQNDGTTTIANNLTSTVQVFTDSEYQLPYVLGSAHQGCLPPFPADVFMVPQYGYLTLNNGSQAVGRSSFYCLEYFPSQMLRTGNNFTFSYTFEDVPFHSSYAHSQSLDRLMNPLIDQYLYYLSKTNAPSGTTTMSRLQFSQAGASDIRDQSRNWLPGPCYRQQRVSKTAADNNNSDYSWTGATKYHLNGRDSLVNPGPAMASHKDDEEKYFPQSGVLIFGKQDSGKTNVDIEKVMITDEEEIRTTNPVATEQYGSVSTNLQSGNTQAATTDVNTQGVLPGMVWQDRDVYLQGPIWAKIPHTDGHFHPSPLMGGFGLKHPPPQILIKNTPVPANPSTTFSAAKFASFITQYSTGQVSVEIEWELQKENSKRWNPEIQYTSNYNKSVNVDFTVDTNGVYSEPRPIGTRYLTRNL

SEQ ID NO: 2405 - protein, 735 aa, Artificial Sequence
  source: /note="Description of Artificial Sequence: Synthetic polypeptide"
MAADGYLPDWLEDTLSEGIRQWWKLKPGPPPPKPAERHQDDSRGLVLPGYKYLGPFNGLDKGEPVNEADAAALEHDKAYDRQLDSGDNPYLKYNHADAEFQERLKEDTSFGGNLGRAVFQAKKRVLEPLGLVEEPVKTAPGKKRPVEHSPAEPDSSSGTGKAGQQPARKRLNFGQTGDADSVPDPQPLGQPPAAPSGLGTNTMATGSGAPMADNNEGADGVGNSSGNWHCDSTWMGDRVITTSTRTWALPTYNNHLYKQISSQSGASNDNHYFGYSTPWGYFDFNRFHCHFSPRDWQRLINNNWGFRPKRLNFKLFNIQVKEVTQNDGTTTIANNLTSTVQVFTDSEYQLPYVLGSAHQGCLPPFPADVFMVPQYGYLTLNNGSQAVGRSSFYCLEYFPSQMLRTGNNFTFSYTFEDVPFHSSYAHSQSLDRLMNPLIDQYLYYLSKTNAPSGTTTMSRLQFSQAGASDIRDQSRNWLPGPCYRQQRVSKTAADNNNSDYSWTGATKYHLNGRDSLVNPGPAMASHKDDEEKYFPQSGVLIFGKQDSGKTNVDIEKVMITDEEEIRTTNPVATEQYGSVSTNLQSGNTQAATTDVNTQGVLPGMVWQDRDVYLQGPIWAKIPHTDGHFHPSPLMGGFGLKHPPPQILIKNTPVPANPSTTFSAAKLASFITQYSTGQVSVEIEWELQKENSKRWNPEIQYTSNYNKSVNVDFTVDTNGVYSEPRPIGTRYLTRNL

SEQ ID NO: 2406 - protein, 735 aa, Artificial Sequence
  source: /note="Description of Artificial Sequence: Synthetic polypeptide"
MAADGYLPDWLEDTLSEGIRQWWKLKPGPPPPKPAERHQDDSRGLVLPGYKYLGPFNGLDKGEPVNEADAAALEHDKAYDRQLDSGDNPYLKYNHADAEFQERLKEDTSFGGNLGRAVFQAKKRVLEPLGLVEEPVKTAPGKKRPVEHSPAEPDSSSGTGKAGQQPARKRLNFGQTGDADSVPDPQPLGQPPAAPSGLGTNTMATGSGAPMADNNEGADGVGNSSGNWHCDSTWMGDRVITTSTRTWALPTYNNHLYKQISSQSGASNDNHYFGYSTPWGYFDFNRFHCHFSPRDWQRLINNNWGFRPKRLNFKLFNIQVKEVTQSDGTTTIANNLTSTVQVFTDSEYQLPYVLGSAHQGCLPPFPADVFMVPQYGYLTLNNGSQAVGRSSFYCLEYFPSQMLRTGNNFTFSYTFEDVPFHSSYAHSQSLDRLMNPLIDQYLYYLSKTNAPSGTTTMSRLQFSQAGASDIRDQSRNWLPGPCYRQQRVSKTAADNNNSDYSWTGATKYHLNGRDSLVNPGPAMASHKDDEEKYFPQSGILIFGKQDSGKTNVDIEKVMITDEEEIRTTNPVATEQYGSVSTNLQSGNTQAATTDVNTQGVLPGMVWQDRDVYLQGPIWAKIPHTDGHFHPSPLMGGFGLKHPPPQILIKNTPVPANPSTTFSAAKFASFITQYPTGQVSVEIEWELQKENSKRWNPEIQYTSNYNKSVNVDFTVDTNGVYSEPRPIGTRYLTRNL

SEQ ID NO: 2407 - protein, 735 aa, Artificial Sequence
  source: /note="Description of Artificial Sequence: Synthetic polypeptide"
MAADGYLPDWLEDTLSEGIRQWWKLKPGPPPPKPAERHQDDSRGLVLPGYKYLGPFNGLDKGEPVNEADAAALEHDKAYDRQLDSGDNPYLKYNHADAEFQERLKEDTSFGGNLGRAVFQAKKRVLEPLGLVEEPVKTAPGKKRPVEHSPAEPDASSGTGKAGQQPARKRLNFGQTGDADSVPDPQPLGQPPAAPSGLGTNTMATGSGAPMADNNEGADGVGNSSGNWHCDSTWMGDRVITTSTRTWALPTYNNHLYKQISSQSGASNDNHYFGYSTPWGYFDFNRFHCHFSPRDWQRLINNNWGFRPKRLNFKLFNIQVKEVTQNDGTTTIANNLTSTVQVFTDSEYQLPYVLGSAHQGCLPPFPADVFMVPQYGYLTLNNGSQAVGRSSFYCLEYFPSQMLRTGNNFTFSYTFEDVPFHSSYAHSQSLDRLMNPLIDQYLYYLSKTNAPSGTTTMSRLQFSQAGASDIRDQSRNWLPGPCYRQQRVSKTAADNNNSDYSWTGATKYHLNGRDSLVNPGPAMASHKDDEEKYFPQSGVLIFGKQDSGKTNVDIEKVMITDEEEIRTTNPVATEQYGSVSTNLQSGNTQAATTDVNTQGVLPGMVWQDRDVYLQGPIWAKIPHTDGHFHPSPLMGGFGLKHPPPQILIKNTPVPANPSTTFSAAKFASFITQYSTGQVSVEIEWELQKENSKRWNPEIQYTSNYNKSVNVDFTVDTNGVYSEPRPIGTRYLTRNL

SEQ ID NO: 2408 - protein, 735 aa, Artificial Sequence
  source: /note="Description of Artificial Sequence: Synthetic polypeptide"
MAADGYLPDWLEDTLSEGIRQWWKLKPGPPPPKPAERHQDDSRGLVLPGYKYLGPFNGLDKGGPVNEADAAALEHDKAYDRQLDSGDNPYLKYNHADAEFQERLKEDTSFGGNLGRAVFQAKKRVLEPLGLVEEPVKTAPGKKRPVEHSPAEPDSSSGTGKAGQQPARKRLNFGQTGDADSVPDPQPLGQPPAAPSGLGTNTMATGSGAPMADNNEGADGVGNSSGNWHCDSTWMGDRVITTSTRTWALPTYNNHLYKQISSQSGASNDNHYFGYSTPWGYFDFNRFHCHFSPRDWQRLINNNWGFRPKRLNFKLFNIQVKEVTQNDGTTTIANNLTSTVQVFTDSEYQLPYVLGSAHQGCLPPFPADVFMVPQYGYLTLNNGSQAVGRSSFYCLEYFPSQMLRTGNNFTFSYTFEDVPFHSSYAHSQSLDRLMNPLIDQYLYYLSKTNAPSGTTTMSRLQFSQAGASDIRDQSRNWLPGPCYRQQRVSKTAADNNNSDYSWTGATKYHLNGRDSLVNPGPAMASHKDDEEKYFPQSGVLIFGKQDSGKTNVDIEKVMITDEEEIRTTNPVATEQYGSVSTNLQSGNTQAATTDVNTQGVLPGMVWQDRDVYLQGPIWAKIPHTDGHFHPSPLMGGFGLKHPPPQILIKNTPVPANPSTTFSAAKFASFITQYSTGQVSVEIEWELQKENSKRWNPEIQYTSNYNKSVNVDFTVDTNGVYSEPRPIGTRYLTRNL

SEQ ID NO: 2409 - protein, 735 aa, Artificial Sequence
  source: /note="Description of Artificial Sequence: Synthetic polypeptide"
MAADGYLPDWLEDTLSEGIRQWWKLKPGPPPPKPAERHQDDSRGLVLPGYKYLGPFNGLDKGEPVNEADAAALEHDKAYDRQLDSGDNPYLKHNHADAEFQERLKEDTSFGGNLGRAVFQAKKRVLEPLGLVEEPVKTAPGKKRPVEHSPAEPDSSSGTGKAGQQPARKRLNFGQTGDADSVPDPQPLGQPPAAPSGLGTNTMATGSGAPMADNNEGADGVGNSSGNWHCDSTWMGDRVITTSTRTWALPTYNNHLYKQISSQSGASNDNHYFGYSTPWGYFDFNRFHCHFSPRDWQRLINNNWGFRPKRLNFKLFNIQVKEVTQNDGTTTIANNLTSTVQVFTDSEYQLPYVLGSAHQGCLPPFPADVFMVPQYGYLTLNNGSQAVGRSSFYCLEYFPSQMLRTGNNFTFSYTFEDVPFHSSYAHSQSLDRLMNPLIDQYLYYLSKTNAPSGTTTMSRLQFSQAGASDIRDQSRNWLPGPCYRQQRVSKTAADNNNSDYSWTGATKYHLNGRDSLVNPGPAMASHKDDEEKYFPQSGVLIFGKQDSGKTNVDIEKVMITDEEEIRTTNPVATEQYGSVSTNLQSGNTQAATTDVNTQGVLPGMVWQDRDVYLQGPIWAKIPHTDGHFHPSPLMGGFGLKHPPPQILIKNTPVPANPSTTFSAAKFASFITQYSTGQVSVEIEWELQKENSKRWNPEIQYTSNYNKSVNVDFTVDTNGVYSEPRPIGTRYLTRNL

SEQ ID NO: 2410 - protein, 735 aa, Artificial Sequence
  source: /note="Description of Artificial Sequence: Synthetic polypeptide"
MAADGYLPDWLEDTLSEGIRQWWKLKPGPPPPKPAERHQDDSRGLVLPGYKYLGPFNGLDKGEPVNEADAAALEHDKAYDRQLDSGDNPYLKYNHADAEFQERLKEDTSFGGNLGRAVFQAKKRVLEPLGLVEEPVKTAPGKKRPVEHSPAEPDSSSGTGKAGQQPARKRLNFGQTGDADSVPDPQPLGQPPAAPSGLGTNTMATGSGAPMADNNEGADGVGNSSGNWHCDSTWMGDRVITTSTRTWALPTYNNHLYKQISSQSGASNDNHYFGYSTPWGYFDFNRFHCHFSPRDWQRLINNNWGFRPKRLNFKLFNIQVKEVTQNDGTTTIANNLTSTVQVFTDSEYQLPYVLGSAHQGCLPPFPAGVFMVPQYGYLTLNNGSQAVGRSSFYCLEYFPSQMLRTGNNFTFSYTFEDVPFHSSYAHSQSLDRLMNPLIDQYLYYLSKTNAPSGTTTMSRLQFSQAGASDIRDQSRNWLPGPCYRQQRVSKTAADNNNSDYSWTGATKYHLNGRDSLVNPGPAMASHKDDEEKYFPQSGVLIFGKQDSGKTNVDIEKVMITDEEEIRTTNPVATEQYGSVSTNLQSGNTQAATTDVNTQGVLPGMVWQDRDVYLQGPIWAKIPHTDGHFHPSPLMGGFGLKHPPPQILIKNTPVPANPSTTFSAAKFASFITQYSTGQVSVEIEWELQKENSKRWNPEIQYTSNYNKSVNVDFTVDTNGVYSEPRPIGTRYLTRNL

SEQ ID NO: 2411 - protein, 735 aa, Artificial Sequence
  source: /note="Description of Artificial Sequence: Synthetic polypeptide"
MAADGYLPDWLEDTLSEGIRQWWKLKPGPPPPKPAERHQDDSRGLVLPGYKYLGPFNGLDKGEPVNEADAAALEHDKAYDRQLDSGDNPYLKYNHADAEFQERLKEDTSFGGNLGRAVFQAKKRVLEPLGLVEEPVKTAPGKKRPVEHSPAEPDSSSGTGKAGQQPARKRLNFGQTGDADSVPDPQPLGQPPAAPSGLGTNTTATGSGAPMADNNEGADGVGNSSGNWHCDSTWMGDRVITTSTRTWALPTYNNHLYKQISSQSGASNDNHYFGYSTPWGYFDFNRFHCHFSPRDWQRLINNNWGFRPKRLNFKLFNIQVKEVTQNDGTTTIANNLTSTVQVFTDSEYQLPYVLGSAHQGCLPPFPADVFMVPQYGYLTLNNGSQAVGRSSFYCLEYFPSQMLRTGNNFTFSYTFEDVPFHSSYAHSQSLDRLMNPLIDQYLYYLSKTNAPSGTTTMSRLQFSQAGASDIRDQSRNWLPGPCYRQQRVSKTAADNNNSDYSWTGATKYHLNGRDSLVNPGPAMASHKDDEEKYFPQSGVLIFGKQDSGKTNVDIEKVMITDEEEIRTTNPVATEQYGSVSTNLQSGNTQAATTDVNTQGVLPGMVWQDRDVYLQGPIWAKIPHTDGHFHPSPLMGGFGLKHPPPQILIKNTPVPANPSTTFSAAKFASFITQYSTGQVSVEIEWELQKENSKRWNPEIQYTSNYNKSVNVDFTVDTNGVYSEPRPIGTRYLTRNL

SEQ ID NO: 2412 - protein, 735 aa, Artificial Sequence
  source: /note="Description of Artificial Sequence: Synthetic polypeptide"
MAADGYLPDWLEDTLSEGIRQWWKLKPGPPPPKPAERHQDDSRGLVLPGYKYLGPFNGLDKGEPVNEADAAALEHDKAYDRQLDSGDNPYLKYNHADAEFQERLKEDTSFGGNLGRAVFQAKKRVLEPLGLVEEPVKTAPGKKRPVEHSPAEPDSSSGTGKAGQQPARKRLNFGQTGDADSVPDPQPLGQPPAAPSGLGTNTMATGSGAPMADNNEGADGVGNSSGNWHCDSTWMGDRVITTSTRTWALPTYNNHLYKQISSQSGASNDNHYFGYSTPWGYFDFNRFHCHFSPRDWQRLIINNWGFRPKRLNFKLFNIQVKEVTQNDGTTTIANNLTSTVQVFTDSEYQLPYVLGSAHQGCLPPFPADVFMVPQYGYLTLNNGSQAVGRSSFYCLEYFPSQMLRTGNNFTFSYTFEDVPFHSSYAHSQSLDRLMNPLIDQYLYYLSKTNAPSGTTTMSRLQFSQAGASDIRDQSRNWLPGPCYRQQRVSKTAADNNNSDYSWTGATKYHLNGRDSLVNPGPAMASHKDDEEKYFPQSGVLIFGKQDSGKTNVDIEKVMITDEEEIRTTNPVATEQYGSVSTNLQSGNTQAATTDVNTQGVLPGMVWQDRDVYLQGPIWAKIPHTDGHFHPSPLMGGFGLKHPPPQILIKNTPVPANPSTTFSAAKFASFITQYSTGQVSVEIEWELQKENSKRWNPEIQYTSNYNKSVNVDFTVDTNGVYSEPRPIGTRYLTRNL

SEQ ID NO: 2413 - protein, 735 aa, Artificial Sequence
  source: /note="Description of Artificial Sequence: Synthetic polypeptide"
MAADGYLPDWLEDTLSEGIRQWWKLKPGPPPPKPAERHQDDSRGLVLPGYKYLGPFNGLDKGEPVNEADAAALEHDKAYDRQLDSGDNPYLKYNHADAEFQERLKEDTSFGGNLGRAVFQAKKRVLEPLGLVEEPVKTAPGKKRPVEHSPAEPDSSSGTGKAGQQPARKRLNFGQTGDADSVPDPQPLGQPPAAPSGLGTNTMATGSGAPMADNNEGADGVGNSSGNWHCDSTWMGDRVITTSTRTWALPTYNNHLYKQISSQSGASNDNHYFGYSTPWGYFDFNRFHCHFSPRDWQRLINNNWGFRPKRLNFKLFNIQVKEVTQNDGTTTIANNLTSTVQVFTDSEYQLPYVLGSAHQGCLPPFPADVFMVPQYGYLTLNNGSQAVGRSSFYCLEYFPSQMLRTGNNFTFSYTFEDVPFHSSYAHSQSLDRLMNPLIDQYLYYLSKTNAPSGTTTMSRLQFSQAGASDIRDQSRNWLPGPCYRQQRVSKTAADNNNSDYSWTGATKYHLNGRDSLVNPGPAMASHKDDEEKYFPQSGVLIFGKQDSGKTNVDIEKVMITDEEEIRTTNPVATEQYGSVSTNLQSGNTQAATTDVNTQGVLPGMVWQDRDVYQQGPIWAKIPHTDGHFHPSPLMGGFGLKHPPPQILIKNTPVPANPSTTFSAAKLASFITQYSTGQVSVEVEWELQKENSKRWNPEIQYTSNYNKSVNVDFTVDTNGVYSEPRPIGTRYLTRNL

SEQ ID NO: 2414 - protein, 735 aa, Artificial Sequence
  source: /note="Description of Artificial Sequence: Synthetic polypeptide"
MAADGYLPDWLEDTLSEGIRQWWKLKPGPPPPKPAERHQDDSRGLVLPGYKYLGPFNGLDKGEPVNEADAAALEHDKAYDRQLDSGDNPYLKYNHADAEFQERLKEDTSFGGNLGRAVFQAKKRVLEPLGLVEEPVKTAPGKKRPVEHSPAEPDSSSGTGKAGQQPARKRLNFGQTGDADSVPDPQPLGQPPAAPSGLGTNTMATGSGAPMADSNEGADGVGNSSGNWHCDSTWMGDRVITTSTRTWALPTYNNHLYKQISSQSGASNDNHYFGYSTPWGYFDFNRFHCHFSPRDWQRLINNNWGFRPKRLNFKLFNIQVKEVTQNDGTTTIANNLTSTVQVFTDSEYQLPYVLGSAHQGCLPPFPADVFMVPQYGYLTLNNGSQAVGRSSFYCLEYFPSQMLRTGNNFTFSYTFEDVPFHSSYAHSQSLDRLMNPLIDQYLYYLSKTNAPSGTTTMSRLQFSQAGASDIRDQSRNWLPGPCYRQQRVSKTAADNNNSDYSWTGATKYHLNGRDSLVNPGPAMASHKDDEEKYFPQSGVLIFGKQDSGKTNVDIEKVMITDEEEIRTTNPVATEQYGSVSTNLQSGNTQAATTDVNTQGVLPGMVWQDRDVYLQGPIWAKIPHTDGHFHPSPLMGGFGLKHPPPQILIKNTPVPANPSTTFSAAKFASFITQYSTGQVSVEIEWELQKENSKRWNPEIQYTSNYNKSVNVDFTVDTNGVYSEPRPIGTRYLTRNL

SEQ ID NO: 2415 - protein, 735 aa, Artificial Sequence
  source: /note="Description of Artificial Sequence: Synthetic polypeptide"
MAADGYLPDWLEDTLSEGIRQWWKLKPGPPPPKPAERHQDDSRGLVLPGYKYLGPFNGLDKGEPVNEADAAALEHDKAYDRQLDSGDNPYLKYNHADAEFQERLKEDTSFGGNLGRAVFQAKKRVLEPLGLVEEPVKTAPGKKRPVEHSPAEPDSSSGTGKAGQQPARKRLNFGQTGDADSVPDPQPLGQPPAAPSGLGTNTMATGSGAPMADNNEGADGVGNSSGNWHCDSTWMGDRVITTSTRTWALPTYNNHLYKQISSQSGASNDNHYFGYSTPWGYFDFNRFHCHFSPRDWQRLINNNWGFRPKRLNFKLFNIQVKEVTQNDGTTTIANNLTSTVQVFTDSEYQLPYVLGSAHQGCLPPFPADVSMVPQYGYLTLNNGSQAVGRSSFYCLEYFPSQMLRTGNNFTFSYTFEDVPFHSSYAHSQSLDRLMNPLIDQYLYYLSKTNAPSGTTTMSRLQFSQAGASDIRDQSRNWLPGPCYRQQRVSKTAADNNNSDYSWTGATKYHLNGRDSLVNPGPAMASHKDDEEKYFPQSGVLIFGKQDSGKTNVDIEKVMITDEEEIRTTNPVATEQYGSVSTNLQSGNTQAATTDVNTQGVLPGMVWQDRDVYLQGPIWAKIPHTDGHFHPSPLMGGFGLKHPPPQILIKNTPVPANPSTTFSAAKFASFITQYSTGQVSVEIEWELQKENSKRWNPEIQYTSNYNKSVNVDFTVDTNGVYSEPRPIGTRYLTRNL

SEQ ID NO: 2416 - protein, 735 aa, Artificial Sequence
  source: /note="Description of Artificial Sequence: Synthetic polypeptide"
MAADGYLPDWLEDTLSEGIRQWWKLKPGPPPPKPAERHQDDSRGLVLPGYKYLGPFNGLDKGEPVNEADVAALEHDKAYDRQLDSGDNPYLKYNHADAEFQERLKEDTSFGGNLGRAVFQAKKRVLEPLGLVEEPVKTAPGKKRPVEHSPAEPDSSSGTGKAGQQPARKRLNFGQTGDADSVPDPQPLGQPPAAPSGLGTNTMATGSGAPMADNNEGADGVGNSSGNWHCDSTWMGDRVITTSTRTWALPTYNNHLYKQISSQSGASNDNHYFGYSTPWGYFDFNRFHCHFSPRDWQRLINNNWGFRPKRLNFKLFNIQVKEVTQNDGTTTIANNLTSTVQVFTDSEYQLPYVLGSAHQGCLPPFPADVFMVPQYGYLTLNNGSQAVGRSSFYCLEYFPSQMLRTGNNFTFSYTFEDVPFHSSYAHSQSLDRLMNPLIDQYLYYLSKTNAPSGTTTMSRLQFSQAGASDIRDQSRNWLPGPCYRQQRVSKTAADNNNSDYSWTGATKYHLNGRDSLVNPGPAMASHKDDEEKYFPQSGVLIFGKQDSGKTNVDIEKVMITDEEEIRTTNPVATEQYGPVSTNLQSGNTQAATTDVNTQGVLPGMVWQGRDVYLQGPIWAKIPHTDGHFHPSPLMGGFGLKHPPPQILIKNTPVPANPSTTFSAAKFASFITQYSTGQVSVEIEWELQKENSKRWNPEIQYTSNYNKSVNVDFTVDTNGVYSEPRPIGTRYLTRNL

SEQ ID NO: 2417 - protein, 735 aa, Artificial Sequence
  source: /note="Description of Artificial Sequence: Synthetic polypeptide"
MAADGYLPDWLEGTLSEGIRQWWKLKPGPPPPKPAERHQDDSRGLVLPGYKYLGPFNGLDKGEPVNEADAAALEHDKAYDRQLDSGDNPYLKYNHADAEFQERLKEDTSFGGNLGRAVFQAKKRVLEPLGLVEEPVKTAPGKKRPVEHSPAEPDSSSGTGKAGQQPARKRLNFGQTGDADSVPDPQPLGQPPAAPSGLGTNTMATGSGAPMADNNEGADGVGNSSGNWHCDSTWMGDRVITTSTRTWALPTYNNHLYKQISSQSGASSDNHYFGYSTPWGYFDFNRFHCHFSPRDWQRLINNNWGFRPKRLNFKLFNIQVKEVTQNDGTTTIANNLTSTVQVFTDSEYQLPYVLGSAHQGCLPPFPADVFMVPQYGYLTLNNGSQAVGRSSFYCLEYFPSQMLRTGNNFTFSYTFEDVPFHSSYAHSQSLDRLMNPLIDQYLYYLSKTNAPSGTTTMSRLQFSQAGASDIRDQSRNWLPGPCYRQQRVSKTAADNNNSDYSWTGATKYHLNGRDSLVNPGPAMASHKDDEEKYFPQSGVLIFGKQDSGKTNVDIEKVMITDEEEIRTTNPVATEQYGSVSTNLQSGNTQAATTDVNTQGVLPGMVWQDRDVYLQGPIWAKIPHTDGHFHPSPLMGGFGLKHPPPQILIKNTPVPANPSTTFSAAKLASFITQYSTGQVSVEIEWELQKENSKRWNPEIQYTSNYNKSVNVDFTVDTNGVYSEPRPIGTRYLTRNL

SEQ ID NO: 2418 - protein, 735 aa, Artificial Sequence
  source: /note="Description of Artificial Sequence: Synthetic polypeptide"
MAADGYLPDWLEDTLSEGIRQWWKLKPGPPPPKPAERHQDDSRGLVLPGYKYLGPFNGLDKGEPVNEADVAALEHDKAYDRQLDSGDNPYLKYNHADAEFQERLKEDTSFGGNLGRAVFQAKKRVLEPLGLVEEPVKTAPGKKRPVEHSPAEPDSSSGTGKAGQQPARKRLNFGQTGDADSVPDPQPLGQPPAAPSGLGTNTMATGSGAPMADNNEGADGVGNSSGNWHCDSTWMGDRVITTSTRTWALPTYNNHLYKQISSQSGASNDNHYFGYSTPWGYFDFNRFHCHFSPRDWQRLINNNWGFRPKRPNFKLFNIQVKEVTQNDGTTTIANNLTSTVQVFTDSEYQLPYVLGSAHQGCLPPFPADVFMVPQYGYLTLNNGSQAVGRSSFYCLEYFPSQMLRTGNNFTFSYTFEDVPFHSSYAHSQSLDRLMNPLIDQYLYYLSKTNAPSGTTTMSRLQFSQAGASDIRDQSRNWLPGPCYRQQRVSKTAADNNNSDYSWTGATKYHLNGRDSLVNPGPAMASHKDDEEKYFPQSGVLIFGKQDSGKTNVDIEKVMITDEEEIRTTNPVATEQYGSVSTNLQSGNTQAATTDVNTQGVLPGMVWQDRDVYLQGPIWAKIPHTDGHFHPSPLMGGFGLKHPPPQILIKNTPVPANPSTTFSAAKFASFITQYSTGQVSVEIEWELQKENSKRWNPEIQYTSNYNKSVNVDFTVDTNGVYSEPRPIGTRYLTRNL

SEQ ID NO: 2419 - protein, 735 aa, Artificial Sequence
  source: /note="Description of Artificial Sequence: Synthetic polypeptide"
MAADGYLPDWLEDTLSEGIRQWWKLKPGPPPPKPAERHQDDSRGLELPGYKYLGPFNGLDKGEPVNEADAAALEHDKAYDRQLDSGDNPYLKYNHADAEFQERLKEDTSFGGNLGRAVFQAKKRVLEPLGLVEEPVKTAPGKKRPVEHSPAEPDSSSGTGKAGQQPARKRLNFGQTGDADSVPDPQPLGQPPAAPSGLGTNTMATGSGAPMADNNEGADGVGNSSGNWHCDSTWMGDRVITTSTRTWALPTYNNHLYKQISSQSGASNDNHYFGYSTPWGYFDFNRFHCHFSPRDWQRLINNNWGFRPKRLNFKLFNIQVKEVTQNDGTTTIANNLTSTVQVFTDSEYQLPYVLGSAHQGCLPPFPADVFMVPQYGYLTLNNGSQAVGRSSFYCLEYFPSQMLRTGNNFTFSYTFEDVPFHSSYAHSQSLDRLMNPLIDQYLYYLSKTNAPSGTTTMSRLQFSQAGASDIRDQSRNWLPGPCYRQQRVSKTAADNNNSDYSWTGATKYHLNGRDSLVNPGPAMASHKDDEEKYFPQSGVLIFGKQDSGKTNVDIEKVMITDEEEIRTTNPVATEQYGSVSTNLQSGNTQAATTDVNTQGVLPGMVWQDRDVYLQGPIWAKIPHTDGHFHPSPLMGGFGLKHPPPQILIKNTPVPANPSTTFSAAKFASFITQYSTGQVSVEIEWELQKENSKRWNPEIQYTSNYNKSVNVDFTVDTNGVYSEPRPIGTRYLTRNL

SEQ ID NO: 2420 - protein, 735 aa, Artificial Sequence
  source: /note="Description of Artificial Sequence: Synthetic polypeptide"
MAADGYLPDWLEDTLSEGIRQWWKLKPGPPPPKPAERHQDDSRGLVLPGYKYLGPFNGLDKGEPVNEADAAALEHDKAYDRQLDSGDNPYLKYNHADAEFQERLKEDTSFGGNLGRAVFQAKKRVLEPLGLVEEPVKTAPGKKRPVEHSPAEPDSSSGTGKAGQQPARKRLNFGQTGDADSVPDPQPLGQPPAAPSGLGTNTMATGSGAPMADNNEGADGVGNSSGNWHCDSTWMGDRVITTSTRTWALPTYNNHLYKQISSQSGASNDNHYFGYSTPWGYFDFNRFHCHFSPRDWQRLINNNWGFRPKRLNFKLFNIQVKEVTQNDGMTTIANNLTSTVQVFTDSEYQLPYVLGSAHQGCLPPFPADVFMVPQYGYLTLNNGSQAVGRSSFYCLEYFPSQMLRTGNNFTFSYTFEDVPFHSSYAHSQSLDRLMNPLIDQYLYYLSKTNAPSGTTTMSRLQFSQAGASDIRDQSRNWLPGPCYRQQRVSKTAADNNNSDYSWTGATKYHLNGRDSLVNPGPAMASHKDDEEKYFPQSGVLIFGKQDSGKTNVDIEKVMITDEEEIRTTNPVATEQYGSVSTNLQSGNTQAATTDVNTQGVLPGMVWQDRDVYLQGPIWAKIPHTDGHFHPSPLMGGFGLKHPPPQILIKNTPVPANPSTTFSAAKFASFITQYSTGQVSVEIEWELQKENSKRWNPEIQYTSNYNKSVNVDFTVDTNGVYSEPRPIGTRYLTRNL

SEQ ID NO: 2421 - protein, 735 aa, Artificial Sequence
  source: /note="Description of Artificial Sequence: Synthetic polypeptide"
MAADGYLPDWLEDTLSEGIRQWWKLKPGPPPLKPAERHQDDSRGLVLPGYKYLGPFNGLDKGEPVNEADAAALEHDKAYDRQLDSGDNPYLKYNHADAEFQERLKEDTSFGGNLGRAVFQAKKRVLEPLGLVEEPVKTAPGKKRPVEHSPAEPDSSSGTGKAGQQPARKRLNFGQTGDADSVPDPQPLGQPPAAPSGLGTNTMATGSGAPMADNNEGADGVGNSSGNWHCDSTWMGDRVITTSTRTWALPTYNNHLYKQISSQSGASNDNHYFGYSTPWGYFDFNRFHCHFSPRDWQRLINNNWGFRPKRLNFKLFNIQVKEVTQNDGTTTIANNLTSTVQVFTDSEYQLPYVLGSAHQGCLPPFPADVFMVPQYGYLTLNNGSQAVGRSSFYCLEYFPSQMLRTGNNFTFSYTFEDVPFHSSYAHSQSLDRLMNPLIDQYLYYLSKTNAPSGTTTMSRLQFSQAGASDIRDQSRNWLPGPCYRQQRVSKTAADNNNSDYSWTGATKYHLNGRDSLVNPGPAMASHKDDEEKYFPQSGVLIFGKQDSGKTNVDIEKVMITDEEEIRTTNPVATEQYGSVSTNLQSGNTQAATTDVNTQGVPPGMVWQDRDVYLQGPIWAKIPHTDGHFHPSPLMGGFGLKHPPPQILIKNTPVPANPSTTFSAAKFASFITQYSTGQVSVEIEWELQKENSKRWNPEIQYTSNYNKSVNVDFTVDTNGVYSEPRPIGTRYLTRNL

SEQ ID NO: 2422 - protein, 735 aa, Artificial Sequence
  source: /note="Description of Artificial Sequence: Synthetic polypeptide"
MAADGYLPDWLEDTLSEGIRQWWKLKPGPPPPKPAERHQDDSRGLVLPGYKYLGPFNGLDKGEPVNEADAAALEHDKAYDRQLDSGDNPYLKYNHADAEFQERLKEDTSFGGNLGRAVFQAKKRVLEPLGLVEEPVKTAPGKKRPVEHSPAEPDSSSGTGKAGQQPARKRLNFGQTGDADSVPDPQPLGQPPAAPSGLGTNTMATGSGAPMADNNEGADGVGNSSGNWHCDSTWMGDRVITTSTRTWALPTYNNHLYKQISSQSGASNDNHYFGYSTPWGYFDFNRFHCHFSPRDWQRLINNNWGFRPKRLNFKLFNIQVKEVTQNDGTTTIANNLTSTVQVFTDSEYQLPYVLGSAHQGCLPPFPADVFMVPQYGYLTLNNGSQAVGRSSFYCLEYFPSQMLRTGNNFTFSYTFEDVPFHSSYAHSQSLDRLMNPLIDQYLYYLSKTNAPSGTTTMSRLQFSQAGASDIRDQSRNWLPGPCYRQQRVSKTAADNNNSDYSWTGATKYHLNGRDSLVNPGPAMASHKDDEEKYFPQSGVLIFGKQDSGKTNVDIEKVMITDEEEIRTTNPVATEQYGSVSTNLQSGNTQAATTDVNTQGVLPGMAWQDRDVYLQGPIWAKIPHTDGHFHPSPLMGGFGLKHPPPQILIKNTPVPANPSTTLSAAKFASFITQYSTGQVSVEIEWELQKENSKRWNPEIQYTSNYNKSVNVDFTVDTNGVYSEPRPIGTRYLTRNL

SEQ ID NO: 2423 - protein, 735 aa, Artificial Sequence
  source: /note="Description of Artificial Sequence: Synthetic polypeptide"
MAADGYLPDWLEDTLSEGIRQWWKLKPGPPPPKPAERHQDDSRGLVLPGYKYLGPFNGLDKGEPVNEADAAALEHDKAHDRQLDSGDNPYLKYNHADAEFQERLKEDTSFGGNLGRAVFQAKKRVLEPLGLVEEPVKTAPGKKRPVEHSPAEPDSSSGTGKAGQQPARKRLNFGQTGDADSVPDPQPLGQPPAAPSGLGTNTMATGSGAPMADNNEGADGVGNSSGNWHCDSTWMGDRVITTSTRTWALPTYNNHLYKQISSQSGASNDNHYFGYSTPWGYFDFNRFHCHFSPRDWQRLINNNWGFRPKRLNFKLFNIQVKEVTQNDGTTTIANNLTSTVQVFTDSEYQLPYVLGSAHQGCLPPFPADVFMVPQYGYLTLNNGSQAVGRSSFYCLEYFPSQMLRTGNNFTFSYTFEDVPFHSSYAHSQSLDRLMNPLIDQYLYYLSKTNAPSGTTTMSRLQFSQAGASDIRDQSRNWLPGPCYRQQRVSKTAADNNNSDYSWTGATKYHLNGRDSLVSPGPAMASHKDDEEKYFPQSGVLIFGKQDSGKTNVDIEKVMITDEEEIRTTNPVATEQYGSVSTNLQSGNTQAATTDVNTQGVLPGMVWQDRDVYLQGPIWAKIPHTDGHFHPSPLMGGFGLKHPPPQILIKNTPVPANPSTTFSAAKFASFITQYSTGQVSVEIEWELQKENSKRWNPEIQYTSNYNKSVNVDFTVDTNGVYSEPRPIGTRYLTRNL

SEQ ID NO: 2424 - protein, 735 aa, Artificial Sequence
  source: /note="Description of Artificial Sequence: Synthetic polypeptide"
MAADGYLPDWLEDTLSEGIRQWWKLKPGPPPLKPAERHQDDSRGLVLPGYKYLGPFNGLDKGEPVNEADAAALEHDKAYDRQLDSGDNPYLKYNHADAEFQERLKEDTSFGGNLGRAVFQAKKRVLEPLGLVEEPVKTAPGKKRPVEHSPAEPDSSSGTGKAGQQPARKRLNFGQTGDADSVPDPQPLGQPPAAPSGLGTNTMATGSGAPMADNNEGADGVGNSSGNWHCDSTWMGDRVITTSTRTWALPTYNNHLYKQISSQSGASNDNHYFGYSTPWGYFDFNRFHCHFSPRDWQRLINNNWGFRPKRLNFKLFNIQVKEVTQNDGTTTIANNLTSTVQVFTDSEYQLPYVLGSAHQGCLPPFPADVFMVPQYGYLTLNNGSQAVGRSSFYCLEYFPSQMLRTGNNFTFSYTFEDVPFHSSYAHSQSLDRLMNPLIDQYLYYLSKTNAPSGTTTMSRLQFSQAGASDIRDQSRNWLPGPCYRQQRVSKTAADNNNSDYSWTGATKYHLNGRDSLVNPGPAMASHKDDEEKYFPQSGVLIFGKQDSGKTNVDIEKVMITDEEEIRTTNPVATEQYGSVSTNLQSGNTQAATTDVNTQGVLPGMVWQDRDVYLQGPIWAKIPHTDGHFHPSPLMGGFGLKHPPPQILIKNTPVPANPSTTFSAAKFASFITQYSTGQVSVGIEWELQKENSKRWNPEIQYTSNYNKSVNVDFTVDTNGVYSEPRPIGTRYLTRNL

SEQ ID NO: 2425 - protein, 735 aa, Artificial Sequence
  source: /note="Description of Artificial Sequence: Synthetic polypeptide"
MAADGYLPDWLEDTLSEGIRQWWKLKPGPPPPKPAERHQDDSRGLVLPGYKYLGPFNGLDKGEPVNEADAAALEHDKAYDRQLDSGDNPYLKYNHADAEFQERLKEDTSFGGNLGRAVFQAKKRVLEPLGLVEEPVKTAPGKKRPVEHSPAEPDSSSGTGKAGQQPARKRLNFGQTGDADSVPDPQPLGQPPAAPSGLGTNTMATGSGAPMADNNEGADGVGNSSGNWHCDSTWMGDRVITTSTRTWALPTYNNHLYKQISSQSGASNDNHYFGYSTPWGYFDFNRFHCHFSPRDWQRLINNNWGFRPKRLNFKLFNIQVKEVTQNDGTTTIANNLTSTVQVFTDSEYQLPYVLGSAHQGCLPPFPADVFMVPQYGYLTLNNGSQAVGRSSFYCLEYFPSQMLRTGNNFTFSYTFEDVPFHSSYAHSQSLDRLMNPLIDQYLYYLSKTNAPSGTTTMSRLQFSQAGASDIRDQSRNWLPGPCYRQQRVSKTAADNNNSDYSWTGATKYHLNGRDSLVNPGPAMASHKDDEEKYFPQSGVLIFGKQDSGKTNVDIEKVMITDEEEIRTTNPVATEQYGSVSTNLQSGNTQAATTDVNTQGVLPGMVWQDRDVCLQGPIWAKIPHTDGHFHPSPLMGGFGLKHPPPQILIKNTPVPANPSTTFSAAKFASFITQYSTGQVSVEIEWELQKENSKRWNPEIQYTSNYNKSVNVDFTVDTNGVYSEPRPIGTRYLTRNL

SEQ ID NO: 2426 - protein, 735 aa, Artificial Sequence
  source: /note="Description of Artificial Sequence: Synthetic polypeptide"
MAADGYLPDWLEDTLSEGIRQWWKLKPGPPPPKPAERHQDDSRGLVLPGYKYLGPFNGLDKGEPVNEADAAALEHDKAYDRQLDSGDNPYLKYNHADAEFQERLKEDTSFGGNLGRAVFQAKKRVLEPLGLVEEPVKTAPGKKRPVEHSPAEPDSSSGTGKAGQQPARKRLNFGQTGDADSVPDPQPLGQPPAAPSGLGTNTMATGSGAPMADNNEGADGVGNSSGNWHCDSTWMGDRVITTSTRTWALPTYNNHLYKQISSQSGASNDNHYFGYSTPWGYFDFNRFHCHFSPRDWQRLINNNWGFRPKRLNFKLFNIQVKEVAQNDGTTTIANNLTSTVQVFTDSEYQLPYVLGSAHQGCLPPFPADVFMVPQYGYLTLNNGSQAVGRSSFYCLEYFPSQMLRTGNNFTFSYTFEDVPFHSSYAHSQSLDRLMNPLIDQYLYYLSKTNAPSGTTTMSRLQFSQAGASDIRDQSRNWLPGPCYRQQRVSKTAADNNNSDYSWTGATKYHLNGRDSLVNPGPAMASHKDDEEKYFPQSGVLIFGKQDSGKTNVDIEKVMITDEEEIRTTNPVATEQYGSVSTNLQSGNTQAATTDVNTQGVLPGMVWQDRDVYLQGPIWAKIPHTDGHFHPSPLMGGFGLKHPPPQILIKNTPVPANPSTTFSAAKFASFITQYSTGQVSVEIEWELQKENSKRWNPEIQYTSNYNKSVNVDFTVDTNGVYSEPRPIGTRYLTRNL

SEQ ID NO: 2427 - protein, 735 aa, Artificial Sequence
  source: /note="Description of Artificial Sequence: Synthetic polypeptide"
MAADGYLPDWLEDTLSEGIRQWWKLKPGPPPPKPAERHKDDSRGLVLPGYKYLGPFNGLDKGEPVNEADAAALEHDKAYDRQLDSGDNPYLKYNHADAEFQERLKEDTSFGGNLARAVFQAKKRVLEPLGLVEEPVKTAPGKKRPVEHSPAEPDSSSGTGKSGQQPARKRLNFGQTGDADSVPDPQPLGQPPAAPSGLGTNTMASGSGAPMADNNEGADGVGNSSGNWHCDSTWMGDRVITTSTRTWALPTYNNHLYKQISSQSGASNDNHYFGYSTPWGYFDFNRFHCHFSPRDWQRLINNNWGFRPKRLNFKLFNIQVKEVTQNDGTTTIANNLTSTVQVFTDSEYQLPYVLGSAHQGCLPPFPADVFMVPQYGYLTLNNGSQAVGRSSFYCPEYLPSQMLRTGNNFTFSYTFEDVPFHSSYAHSQSLDRLMNPLIDQYLYYLSRTNTPSGTTTQSRLQFSQAGASDIRDQSRNWLPGPCYRQQRVSKTAADNNNSDYSWTGATKYHLNGRDSLVNPGTAMASHKDDEEKYFPQSGVLIFGKQDSGKTNVDIEKVMITDEEETRTTNPVATEQYGSVSTNLQSGNTQAATSDVNTQGVLPGMVWQDRDVYLQGPIWAKIPHTDGHFHPSPLMGGFGLKHPPPQILIKNTPVPANPSTAFSAAKFASFITQYSTGQVSVEIEWELQKENSERWNPEIQYTSNYNKSVNVDFTVDTNGVYSEPRPIGTRYLTRNL

SEQ ID NO: 2428 - protein, 735 aa, Artificial Sequence
  source: /note="Description of Artificial Sequence: Synthetic polypeptide"
MAADGYLPDWLEDTLSEGIRQWWKLKPGPPPPKPAERHKDDSRGLVLPGYKYLGPFNGLDKGEPVNEADAAALEHDKAYDRQLDSGDNPYLKYNHADAEFQERLKEDTSFGGNLARAVFQAKKRVLEPLGLVEEPVKTAPGKKRPVEHSPAEPDSSSGTGKSGQQPARKRLNFGQTGDADSVPDPQPLGQPPAAPSGLGTNTMASGSGAPMADNNEGADGVGNSSGNWHCDSTWMGDRVITTSTRTWALPTYNNHLYKQISSQSGASNDNHYFGYSTPWGYFDFNRFHCHFSPRDWQRLINNNWGFRPKRLNFKLFNIQVKEVTQNDGTTTIANNLTSTVQVFTDSEYQLPYVLGSAHQGCLPPFPADVLMVPQYGYLTLNNGSQAVGRSSFYCPEYLPSQMLRTGNNFTFSYTFEDVPFHSSYAHSQSLDRLMNPLIDQYLYYLSRTNTPSGTTTQSRLQFSQAGASDIRDQSRNWLPGPCYRQQRVSKTAADNNNSDYSWTGATKYHLNGRDSLVNPGTAMASHKDDEEKYFPQSGVLIFGKQDSGKTNVDIEKVMITDEEEIRTTNPVATEQYGSVSTNLQSGNTQAATSDVNTQGVLPGMVWQDRDVYLQGPIWAKIPHTDGHFHPSPLMGGFGLKHPPPQILIKNTPVPANPSTAFSAAKFASFITQYSTGQVSVEIEWELQKENSERWNPEIQYTSNYNKSVNVDFTADTNGVYSEPRPIGTRYLTRNL

SEQ ID NO: 2429 - protein, 735 aa, Artificial Sequence
  source: /note="Description of Artificial Sequence: Synthetic polypeptide"
MAADGYLPDWLEDTLSEGIRQWWKLKPGPPPPKPAERHKDDSRGLVLPGYKYLGPFNGLDKGEPVNEADAAALEHDKAYDRQLDSGDNPYLKYNHADAEFQERLKEDTSFGGNLARAVFQAKKRVLEPLGLVEEPVKTAPGKKRPVEHSPAEPDSSSGTGKSGQQPARKRLNFGQTGDADSVPDPQPLGQPPAAPSGLGTNTMASGSGAPMADNNEGADGVGNSSGNWHCDSTWMGDRVITTSTRAWALPTYNNHLYKQISSQSGASNDNHYFGYSTPWGYFDFNRFHCHFSPRDWQRLINNNWGFRPKRLNFKLFNIQVKEVTQNDGTTTIANNLTSTVQVFTDSEYQLPYVLGSAHQGCLPPFPADVLMVPQYGYLTLNNGSQAVGRSSFYCPEYLPSQMLRTGNNFTFSYTFEDVPFHSSYAHSQSLDRLMNPLIDQYLYYLSRTNTPSGTTTQSRLQFSQAGASDIRDQSRNWLPGPCYRQQRVSKTAADNNNSDYSWTGATKYHLNGRDSLVNPGTAMASHKDDEEKYFPQSGVLIFGKQDSGKTNVDIEKVMITDEEEIRTTNPVATEQYGSVSTNLQSGNTQAATSDVNTQGVLPGMVWQDRDVYLQGPIWAKIPHTDGHFHPSPLMGGFGLKHPPPQILIKNTPVPANPSTAFSAAKFASFITQYSTGQVSVEIEWELQKENSERWNPEIQYTSNYNKSVNVDFTVDTNGVYSEPRPIGTRYLTRNL

SEQ ID NO: 2430 - protein, 735 aa, Artificial Sequence
  source: /note="Description of Artificial Sequence: Synthetic polypeptide"
MAADGYLPDWLEDTLSEGIRQWWKLKPGPPPPKPAERHKDDSRGLVLPGYKYLGPFNGLDKGEPVNEADAAALEHDKAYDRQLDSGDNPYLKYNHADAEFQERLKEDTSFGGNLARAVFQAKKRVLEPLGLVEEPVKTAPGKKRPVEHSPAEPDSSSGTGKSGQQPARKRLNFGQTGDADSVPDPQPLGQPPAAPSGLGTNTMASGSGAPMADNNEGADGVGNSSGNWHCDSTWMGDRVITTSTRTWALPTYNNHLYKQISSQSGASNDNHYFGYSTPWGYFDFNRFHCHFSPRDWQRLINNNWGFRPKRLNFKLFNIQVKEVTQNDGTTTIANNLTSTVQVFTDSEYQLPYVLGSAHQGCLPPFPADVFMVPQYGYLTLNNGSQAVGRSSFYCPEYLPSQMLRTGNNFTFSYTFEDVPFHSSYAHSQSLDRLMNPLIDQYLYYLSRTNTPSGTTTQSRLQFSQAGASDIRDQSRNWLPGPCYRQQRVSKTAADNNNSDYSWTGATKYHLNGRDSLVNPGTATASHKDDEEKYFPQSGVLIFGKQDSGKTNVDIEKVMITDEEEIRTTNPVATEQYGSVSTNLQSGNTQAATSDVNTQGVLPGMVWQDRDVYLQGPIWAKIPHTDGHFHPSPLMGGFGLKHPPPQILIKNTPVPANPSTAFSAAKFASFITQYSTGQVSVEIEWELQKENSERWNPEIQYTSNYNKSVNVDFTVDTNGVYSEPRPIGTRYLTRNL

SEQ ID NO: 2431 - protein, 734 aa, Artificial Sequence
  source: /note="Description of Artificial Sequence: Synthetic polypeptide"
MAADGYLPDWLEDTLSEGIRQWWKLKPGPPPPKPAERHKDDSRGLVLPGYKYLGPFNGLDKGEPVNEADAAALEHDKAYDRQLDSGDNPYLKYNHADAEFQERLKEDTSFGGNLARAVFQAKKRVLEPLGLVEEPVKTAPGKKRPVEHSPAEPDSSSGTGKSGQQPARKRLNFGQTGDADSVPDPQPLGQPPAAPSGLGTNTMASGSGAPMADNNEGADGVGNSSGNWHCDSTWMGDRVITTSTRTWALPTYNNHLYKQISSQSGASNDNHYFGYSTPWGYFDFNRFHCHFSPRDWQRLINNNWGFRPKRLNFKLFNIQVKEVTQNDGTTTIANNLTSTVQVFTDSEYQLPYVLGSAHQGCLPPFPADVFMVPQYGYLTLNNGSQAVGRSSFYCPEYLPSQMLRTGNNFTFSYTFEDVPFHSSYAHSQSLDRLMNPLIDQYLYYLSRTNTPSGTTTQSRLQFSQAGASDIRDQSRNWLPGPCYRQQRVSKTAADNNSDYSWTGATKYHLNGRDSLVNPGTAMASHKDDEEKYFPQSGVLIFGKQDSGKTNVDIEKVMITDEEEIRTTNPVATEQYGSVSTNLQSGNTQAATSDVNTQGVLPGMVWQDRDVYLQGPIWAKIPHTDGHFHPSPLMGGFGLKHPPPQILIKNTPVPANPSTAFSAAKFASFITQYSTGQVSVEIEWELQKENSERWNPEIQYTSNYNKSVNVDFTVDTNGVYSEPRPIGTRYLTRNL

SEQ ID NO: 2432 - protein, 735 aa, Artificial Sequence
  source: /note="Description of Artificial Sequence: Synthetic polypeptide"
MAADGYLPDWLEDTLSEGIRQWWKLKPGPPPPKPAERHKDDSRGLVLPGYKYLGPFNGLDKGEPVNEADAAALEHDKAYDRQLDSGDNPYLKYNHADAEFQERLKEDTSFGGNLARAVFQAKKRVLDPLGLVEEPVKTAPGKKRPVEHSPAEPDSSSGTGKSGQQPARKRLNFGQTGDADSVPDPQPLGQPPAAPSGLGTNTMASGSGAPMADNNEGADGVGNSSGNWHCDSTWMGDRVITTSTRTWALPTYNNHLYKQISSQSGASNDNHYFGYSTPWGYFDFNRFHCHFSPRDWQRLINNNWGFRPKRLNFKLFNIQVKEVTQNDGTTTIANNLTSTVQVFTDSEYQLPYVLGSAHQGCLPPFPADVFMVPQYGYLTLNNGSQAVGRSSFYCPEYLPSQMLRTGNNFTFSYTFEDVPFHSSYAHSQSLDRLMNPLIDQYLYYLSRTNTPSGTTTQSRLQFSQAGASDIRDQSRNWLPGPCYRQQRVSKTAADNNNSDYSWTGATKYHLNGRDSLVNPGTAMASHKDDEEKYFPQSGVLIFGKQDSGKTNVDIEKVMITDEEEIRTTNPVATEQYGSVSTNLQSGNTQAATSDVNTQGVLPGMVWQDRDVYLQGPIWAKIPHTDGHFHPSPLMGGFGLKHPPPQILIKNTPVPANPSTAFSAAKFASFITQYSTGQVSVEIEWELQKENSERWNPEIQYTSNYNKSVNVDFTVDTNGVYSEPRPIGTRYLTRNL

SEQ ID NO: 2433 - protein, 735 aa, Artificial Sequence
  source: /note="Description of Artificial Sequence: Synthetic polypeptide"
MAADGYLPDWLEDTLSEGIRQWWKLKPGPPPPKPAERHKDDSRGLVLPGYKYLGPFNGLDKGEPVNEADAAALEHDKAYDRQLDSGDNPYLKYNHADAEFQERLKEDTSFGGNLARAVFQAKKRVLEPLGLVEEPVKTAPGKKRPVEHSPAEPDSSSGTGKSGQQPARKRLNFGQTGDADSVPDPQPLGQPPAAPSGLGTNTMASGSGAPMADNNEGADGVGNSSGNWHCDSTWMGDRVITTSTRTWALPTYNNHLYKQISSQSGASNDNHYFGYSTPWGYFDFNRFHCHFSPRDWQRLINNNWGFRPKRLNFKLFNIQVKEVTQNDGTTTIANNLTSTVQVFTDSEYQLPYVLGSAHQGCLPPFPADVFMVPQYGYLTLNNGSQAVGRSSFYCPEYLPSQMLRTGNNFTFSYTFEDVPFHSSYAHSQSLDRLMNPLIDQYLYYLSRTNTPSGTTTQSRLQFSQAGASDIRDQSRNWLPGPCYRQQRVSKTAADNNNSDYSWTGATKYHLNGRDSLVNPGTAMASHKDDEEKYFPQSGVLIFRKQDSGKTNVDIEKVMITDEEEIRTTNPVATEQYGSVSTNLQSGNTQAATSDVNTQGVLPGMVWQDRDVYLQGPIWAKIPHTDGHFHPSPLMGGFGLKHPPPQILIKNTPVPANPSTAFSAAKFASFITQYSTGQVSVEIEWELQKENSERWNPEIQYTSNYNKSVNVDFTVDTNGVYSEPRPIGTRYLTRNL

SEQ ID NO: 2434 - protein, 735 aa, Artificial Sequence
  source: /note="Description of Artificial Sequence: Synthetic polypeptide"
MAADGYLPDWLEDTLSEGIRQWWKLKPGPPPPKPAERHKDDSRGLVLPGYKYLGPFNGLDKGEPVNEADAAALEHDKAYDRQLDSGDNPYLKYNHADAEFQERLKEDTSFGGNLARAVFQAKKRVLEPLGLVEEPVKTAPGKKRPVEHSPAEPDSSSGTGKSGQQPARKRLNFGQTGDADSVPDPQPLGQPPAAPSGLGTNTMASGSGAPMADNNEGADGVGNSSGNWHCDSTWMGDRVITTSTRTWALPTYNNHLYKQISSQSGASNDNHYFGYSTPWGYFDFNRFHCHFSPRDWQRLINNNWGFRPKRLNFKLFNIQVKEVTQNDGTTTIANNLTSTVQVFTDSEYQLPYVLGSAHQGCLPPFPADVLMVPQYGYLTLNNGSQAVGRSSFYCPEYLPSQMLRTGNNFTFSYTFEDVPFHSSYAHSQSLDRLMNPLIDQYLYYLSRTNTPSGTTTQSRLQFSQAGASDIRDQSRNWLPGPCYRQQRVSKTAADNNNSDYSWTGATKYHLNGRDSLVNPGTAMASHKDDEEKYFPQSGVLIFRKQDSGKTNVDIEKVMITDEEEIRTTNPVATEQYGSVSTNLQSGNTQAATSDVNTQGVLPGMVWQDRDVYLQGPIWAKIPHTDGHFHPSPLMGGFGLKHPPPQILIKNTPVPANPSTAFSAAKFASFITQYSTGQVSVEIEWELQKENSERWNPEIQYTSNYNKSVNVDFTVDTNGVYSEPRPIGTRYLTRNL

SEQ ID NO: 2435 - protein, 735 aa, Artificial Sequence
  source: /note="Description of Artificial Sequence: Synthetic polypeptide"
MAADGYLPDWLEDTLSEGIRQWWKLKPGPPPPKPAERHKDDSRGLVLPGYKYLGPFNGLDKGEPVNEADAAALEHDKAYDRQLDSGDNPYLKYNHADAEFQERLKEDTSFGGNLARAVFQAKKRVLEPLGLVEEPVKTAPGKKRPVEHSPAEPDSSSGTGKSGQQPARKRLNFGQTGDADSVPDPQPLGQPPAAPSGLGTNTMASGSGAPMADNNEGADGVGNSSGNWHCDSTWMGDRVITTSTRTWALPTYNNHLYKQISSQSGASNDNHYFGYSTPWGYFDFNRFHCHFSPRDWQRLINNNWGFRPKRLNFKLFNIQVKEVTQNDGTTTIANNLTSTVQVFTDSEYQLPYVLGSAHQGCLPPFPADVLMVPQYGYLTLNNGSQAVGRSSFYCPEYLPSQMLRTGNNFTFSYTFEDVPFHSSYAHSQSLDRLMNPLIDQYLYYLSRTNTPSGTTTQSRLQFSQAGASDIRDQSRNWLPGPCYRQQRVSKTAADNNNSDYSWTGATKYHLNGRDSLVNPGTAMASHKDDEEKYFPQSGVLIFGKQDSGKTNVDIEKVMITDEEEIRTTNPVATEQYGSVSTNLQSGNTQAATSDVNTQGVLPGMVWQDRDVYLQGPIWAKIPHTDGHFHPSPLMGGFGLKHPPPQILIKNTPVPANPSTAFSAAKFASFITQYSTGQVSVEIEWELQKENSERWNPEIQYTSNYNKSVNVDFTVDTNGVYSEPRPIGTRYLTRNL

SEQ ID NO: 2436 - protein, 735 aa, Artificial Sequence
  source: /note="Description of Artificial Sequence: Synthetic polypeptide"
MAADGYLPDWLEDTLSEGIRQWWKLKPGPPPPKPAERHKDDSRGLVLPGYKYLGPFNGLDKGEPVNEADAAALEHDKAYDRQLDSGDNPYLKYNHADAEFQERLKEDTSFGGNLARAVFQAKKRVLEPLGLVEEPVKTAPGKKRPVEHSPAEPDSSSGTGKSGQQPARKRLNFGQTGDADSVPDPQPLGQPPAAPSGLGTNTMASGSGAPMADNNEGADGVGNSSGNWHCDSTWMGDRVITTSTRTWALPTYNNHLYKQISSQSGASNDNHYFGYSTPWGYFDFNRFHCHFSPRDWQRLINNNWGFRPKRLNFKLFNIQVKEVTQNDGTTTIANNLTSTVQVFTDSEYQLPYVLGSAHQGCLPPFPADVFMVPQYGYLTLNNGSQAVGRSSFYCPEYLPSQMLRTGNNFTFSYTFEDVPFHSSYAHSQSLDRLMNPLIDQYLYYLSRTNTPSGTTTQSRLQFSQAGASDIRDQSRNWLPGPCYRQQRVSKTAADNNNSDYSWTGATKYHLNGRDSLVNPGTAMASHKDDEEKYFPQSGVLIFGKQDSGKTNVDIEKVMITDEEEIRTTNPVATEQYGSVSTNLQSGNTQAATSDVNTQGVLPGMVWQDRDVYLQGPIWAKIPHTDGHFHPSPLMGGFGLKHPPPQILIKNTPVPANPSTAFSAAKFASFITQYSTGQVSVEIEWELQKENSERWNPEIQYTSNYNKSVNVDFTVDTNGVYSEPRPIGTRYLTRNL

SEQ ID NO: 2437 - protein, 735 aa, Artificial Sequence
  source: /note="Description of Artificial Sequence: Synthetic polypeptide"
MAADGYLPDWLEDTLSEGIRQWWKLKPGPPPPKPAERHKDDSRGLVLPGYKYLGPFNGLDKGEPVNEADAAALEHDKAYDRQLDSGDNPYLKYNHADAEFQERLKEDTSFGGNLARAVFQAKKRVLEPLGLVEEPVKTAPGKKRPVEHSPAEPDSSSGTGKSGQQPARKRLNFGQTGDADSVPDPQPLGQPPAAPSGLGTNTMASGSGAPMADNNEGADGVGNSSGNWHCDSTWMGDRVITTSTRTWALPTYNNHLYKQISSQSGASNDNHYFGYSTPWGYFDFNRFHCHFSPRDWQRLINNNWGFRPKRLNFKLFNIQVKEVTQNDGTTTIANNLTSTVQVFTDSEYQLPYVLGSAHQGCLPPFPADVLMVPQYGYLTLNNGSQAVGRSSFYCPEYLPSQMLRTGNNFTFSYTFEDVPFHSSYAHSQSLDRLMNPLIDQYLYYLSRTNTPSGTTTQSRLQFSQAGASDIRDQSRNWLPGPCYRQQRVSKTAADNNNSDYSWTGATKYHLNGRDSLVNPGTATASHKDDEEKYFPQSGVLIFGKQDSGKTNVDIEKVMITDEEEIRTTNPVATEQYGSVSTNLQSGNTQAATSDVNTQGVLPGMVWQDRDVYLQGPIWAKIPHTDGHFHPSPLMGGFGLKHPPPQILIKNTPVPANPSTAFSAAKFASFITQYSTGQVSVEIEWELQKENSERWNPEIQYTSNYNKSVNVDFTVDTNGVYSEPRPIGTRYLTRNL

SEQ ID NO: 2438 - protein, 735 aa, Artificial Sequence
  source: /note="Description of Artificial Sequence: Synthetic polypeptide"
MAADGYLPDWLEDTLSEGIRQWWKLKPGPPPPKPAERHKDDSRGLVLPGYKYLGPFNGLDKGEPVNEADAAALEHDKAYDRQLDSGDNPYLKYNHADAEFQERLKEDTSFGGNLARAVFQAKKRVLEPLGLVEEPVKTAPGKKRPVEHSPAEPDSSSGTGKSGQQPARKRLNFGQTGDADSVPDPQPLGQPPAAPSGLGTNTMASGSGAPMADNNEGADGVGNSSGNWHCDSTWMGDRVITTSTRTWALPTYNNHLYKQISSQSGASNDNHYFGYSTPWGYFDFNRFHCHFSPRDWQRLINNNWGFRPKRLNFKLFNIQVKEVTQNDGTTTIANNLTSTVQVFTDSEYQLPYVLGSAHQGCLPPFPADVFMVPQYGYLTLNNGSQAVGRSSFYCPEYLPSQMLRTGNNFTFSYTFEDVPFHSSYAHSQSLDRLMNPLIDQYLYYLSRTNTPSGTTTQSRLQFSQAGASDIRDQSRNWLPGPCYRQQRVSKTAADNNNSDYSWTGATKYHLNGRDSLVNPGTAMASHKDDGEKYFPQSGVLIFGKQDSGKTNVDIEKVMITDEEEIRTTNPVATEQYGSVSTNLQSGNTQAATSDVNTQGVLPGMVWQDRDVYLQGPIWAKIPHTDGHFHPSPLMGGFGLKHPPPQILIKNTPVPANPSTAFSAAKFASFITQYSTGQVSVEIEWELQKENSERWNPEIQYTSNYNKSVNVDLTVDTNGVYSEPRPIGTRYLTRNL

SEQ ID NO: 2439 - protein, 735 aa, Artificial Sequence
  source: /note="Description of Artificial Sequence: Synthetic polypeptide"
MAADGYLPDWLEDTLSEGIRQWWKLKPGPPPPKPAERHKDDSRGLVLPGYKYLGPFNGLDKGEPVNEADAAALEHDKAYDRQLDSGDNPYLKYNHADAEFQERLKEDTSFGGNLARAVFQAKKRVLEPLGLVEEPVKTAPGKKGPVEHSPAEPDSSSGTGKSGQQPARKRLNFGQTGDADSVPDPQPLGQPPAAPSGLGTNTMASGSGAPMADNNEGADGVGNSSGNWHCDSTWMGDRVITTSTRTWALPTYNNHLYKQISSQSGASNDNHYFGYSTPWGYFDFNRFHCHFSPRDWQRLINNNWGFRPKRLNFKLFNIQVKEVTQNDGTTTIANNLTSTVQVFTDSEYQLPYVLGSAHQGCLPPFPADVFMVPQYGYLTLNNGSQAVGRSSFYCLEYFPSQMLRTGNNFTFSYTFEDVPFHSSYAHSQSLDRLMNPLIDQYLYYLSRTNTPSGTTTQSRLRFSQAGASDIRDQSRNWLPGPCYRQQRVSKTAADNNNSDYSWTGATKYHLNGRDSLVNPGTAMASHKDDEEKYFPQSGVLIFGKQDSGKTNVDIERVMITDEEEIRTTNPVATEQYGSVSTNLQSGNTQAATSDVNTQGVLPGMVWQDRDVYLQGPIWAKIPHTDGHFHPSPLMGGFGLKHPPPQILIKNTPVPANPSTTFSAAKFASFITQYSTGQVSVEIEWELQKENSKRWNPEIQYTSNYNKSVNVDFTVDTNGVYSEPRPIGTRYLTRNL

SEQ ID NO: 2440 - protein, 735 aa, Artificial Sequence
  source: /note="Description of Artificial Sequence: Synthetic polypeptide"
MAADGYLPDWLEDTLSEGIRQWWKLKPGPPPPKPAERHKDDSRGLVLPGYKYLGPFNGLDKGEPVNEADAAALEHDKAYDRQLDSGDNPYLKYNHADAEFQERLKEDTSFGGNLARAVFQAKKRVLEPLGLVEEPVKTAPGKKRPVEHSPAGPDSSSGTGKSGQQPARKRLNFGQTGDADSVPDPQPLGQPPAAPSGLGTNTMASGSGAPMADNNEGADGVGNSSGNWHCDSTWMGDRVITTSTRTWALPTYNNHLYKQISSQSGASNDNHYFGYSTPWGYFDFNRFHCHFSPRDWQRLINNNWGFRPKRLNFELFNIQVKEVTQNDGTTTIANNLTSTVQVFTDSEYQLPYVLGSAHQGCLPPFPADVFMVPQYGYLTLNNGSQAVGRSSFYCLEYFPSQMLRTGNNFTFSYTFEDVPFHSSYAHSQSLDRLMNPLIDQYLYYLSRTNTPSGTTTQSRLQFSQAGASDIRDQSRNWLPGPCYRQQRVSKTAADNNNSDYSWTGATKYHLNGRDSLVNPGTAMASHKDDEEKYFPQSGVLIFGKQDSGKTNVDIEKVMITDEEEIRTTNPVATEQYGSVSTNLQSGNTQAATSDVNTQGVLPGMVWQDRDVYLQGPIWAKIPHTDGHFHPSPLMGGFGLKHPPPQILIKSTPVPANPSTTFSAAKFASFITQYSTGQVSVEIEWELQKENSKRWNPEIQYTSNYNKSVNVDFTVDTNGVYSDPRPIGTRYLTRNL

SEQ ID NO: 2441 - protein, 735 aa, Artificial Sequence
  source: /note="Description of Artificial Sequence: Synthetic polypeptide"
MAADGYLPDWLEDTLSEGIRQWWKLKPGPPPPRPAERHQDDSRGLVLPGYKYLGPFNGLDKGEPVNEADAAALEHDKAYDRQLDSGDNPYLKYNHADAEFQERLKEDTSFGGNLGRAVFQAKKRVLEPLGLVEEPVKTAPGKKRPVEHSPAEPDSSSGTGKAGQQPARKRLNFGQTGDADSVPDPQPLGQPPAAPTSLGSTTMATGSGAPMADNNEGADGVGNSSGNWHCDSQWLGDRVITTSTRTWALPTYNNHLYKQISSQSGASNDNHYFGYSTPWGYFDFNRFHCHFSPRDWQRLINNNWGFRPKRLNFKLFNIQVKEVTQNDGTTTIANNLTSTVQVFTDSEYQLPYVLGSAHQGCLPPFPADVFMVPQYGYLTLNNGSQAVGRSSFYCLEYFPSQMLRTGNNFTFSYTFEDVPFHSSYAHSQSLDRLMNPLIDQYLYYLSRTNTPSGTTTQSRLRFSQAGASDIRDQSRNWLPGPCYRQQRVSKTAADNNNSDYSWTGATKYHLNGRDSLVNPGTAMASHKDDEEKYFPQSGVLIFGKQDSGKTNVDIERVMITDEEEIRTTNPVATEQYGSVSTNLQSGNTQAATSDVNTQGVLPGMVWQDRDVYLQGPIWAKIPHTDGHFHPSPLMGGFGLKHPPPQILIKNTPVPANPSTTFSAAKFASFITQYSTGQVSVEIEWELQKENSKRWNPEIQYTSNYNKSVNVDFTVDTNGVYSEPRPIGTRYLTRNL

SEQ ID NO: 2442 - protein, 735 aa, Artificial Sequence
  source: /note="Description of Artificial Sequence: Synthetic polypeptide"
MAADGYLPDWLEDTLSEGIRQWWKLKPGPPPPRPAERHQDDSRGLVLPGYKYLGPFNGLDKGEPVNEADAAALEHDKAYDRQLDSGDNPYLKYNHADAEFQERLKEDTSFGGNLGRAVFQAKKRVLEPLGLVEEPVKTAPGKKRPVEHSPAEPDSSSGTGKAGQQPARKRLNFGQTGDADSVPDPQPLGQPPAAPSGLGTNTMASGSGAPMADNNEGADGVGNSSGNWHCDSTWMGDRVITTSTRTWALPTYNNHLYKQISSQSGASNDNHYFGYSTPWGYFDFNRFHCHFSPRDWQRLINNNWGFRPKRLNFKLFNIQVKEVTQNDGTTTIANNLTSTVQVFTDSEYQLPYVLGSAHQGCLPPFPADVFMVPQYGYLTLNNGSQAVGRSSFYCLEYFPSQMLRTGNNFTFSYTFEDVPFHSSYAHSQSLDRLMNPLIDQYLYYLSRTNTPSGTTTQSRLRFSQAGASDIRDQSRNWLPGPCYRQQRVSKTAADNNNSDYSWTGATKYHLNGRDSLVNPGTAMASHKDDEEKYFPQSGVLIFGKQDSGKTNVDIERVMITDEEEIRTTNPVATEQYGSVSTNLQSGNTQAATSDVNTQGVLPGMVWQDRDVYLQGPIWAKIPHTDGHFHPSPLMGGFGLKHPPPQILIKNTPVPANPSTTFSAAKFASFITQYSTGQVSVEIEWELQKENSKRWNPEIQYTSNYNKSVNVDFTVDTNGVYSEPRPIGTRYLTRNL

SEQ ID NO: 2443 - protein, 735 aa, Artificial Sequence
  source: /note="Description of Artificial Sequence: Synthetic polypeptide"
MAADGYLPDWLEDTLSEGIRQWWKLKPGPPPPKPAERHKDDSRGLVLPGYKYLGPFNGLDKGEPVNEADAAALEHDKAYDRQLDSGDNPYLKYNHADAEFQERLKEDTSFGGNLARAVFQAKKRVLEPLGLVEEPVKTAPGKKRPVEHSPAGPDSSSGTGKSGQQPARKRLNFGQTGDADSVPDPQPLGQPPAAPSGLGTNTMASGSGAPMADNNEGADGVGNSSGNWHCDSTWMGDRVITTSTRTWALPTYNNHLYKQISSQSGASNDNHYFGYSTPWGYFDFNRFHCHFSPRDWQRLINNNWGFRPKRLNFELFNIQVKEVTQNDGTTTIANNLTSTVQVFTDSEYQLPYVLGSAHQGCLPPFPADVFMVPQYGYLTLNNGSQAVGRSSFYCLEYFPSQMLRTGNNFTFSYTFEDVPFHSSYAHSQSLDRLMNPLIDQYLYYLSRTNTPSGTTTQSRLQFPQAGASDIRDQSRNWLPGPCYRQQRVSKTAADNNNSDYSWTGATKYHLNGRDSLVNPGTAMASHKDDEEKYFPQSGVLIFGKQDSGKTNVDIEKVMITDEEEIRTTNPVATEQYGSVSTNLQSGNTQAATSDVNTQGVLPGMVWQDRDVYLQGPIWAKIPHTDGHFHPSPLMGGFGLKHPPPQILIKSTPVPANPSTTFSAAKFASFITQYSTGQVSVEIEWELQKENSKRWNPEIQYTSNYNKSVNVDFTVDTNGVYSEPRPIGTRYLTRNL

SEQ ID NO: 2444 - protein, 735 aa, Artificial Sequence
  source: /note="Description of Artificial Sequence: Synthetic polypeptide"
MAADGYLPDWLEDTLSEGIRQWWKLKPGPPPPRPAERHQDDSRGLVLPGYKYLGPFNGLDKGEPVNEADAAALEHDKAYDRQLDSGDNPYLKYNHADAEFQERLKEDTSFGGNLGRAVFQAKKRVLEPLGLVEEPVKTAPGKKRPVEHSPAEPDSSSGTGKSGQQPARKRLNFGQTGDADSVPDPQPLGQPPAAPSGLGTNTMASGSGAPMADNNEGADGVGNSSGNWHCDSTWMGDRVITTSTRTWALPTYNNHLYKQISSQSGASNDNHYFGYSTPWGYFDFNRFHCHFSPRDWQRLINNNWGFRPKRLNFKLFNIQVKEVTQNDGTTTIANNLTSTVQVFTDSEYQLPYVLGSAHQGCLPPFPADVFMVPQYGYLTLNNGSQAVGRSSFYCLEYFPSQMLRTGNNFTFSYTFEDVPFHSSYAHSQSLDRLMNPLIDQYLYYLSRTNTPSGTTTQSRLRFSQAGASDIRDQSRNWLPGPCYRQQRVSKTAADNNNSDYSWTGATKYHLNGRDSLVNPGTAMASHKDDEEKYFPQSGVLIFGKQDSGKTNVDIERVMITDEEEIRTTNPVATEQYGSVSTNLQSGNTQAATSDVNTQGVLPGMVWQDRDVYLQGPIWAKIPHTDGHFHPSPLMGGFGLKHPPPQILIKNTPVPANPSTTFSAAKFASFITQYSTGQVSVEIEWELQKENSKRWNPEIQYTSNYNKSVNVDFTVDTNGVYSEPRPIGTRYLTRNL

SEQ ID NO: 2445 - protein, 735 aa, Artificial Sequence
  source: /note="Description of Artificial Sequence: Synthetic polypeptide"
MAADGYLPDWLEDTLSEGIRQWWKLKPGPPPPKPAERHKDDSRGLVLPGYKYLGPFNGLDKGEPVNEADAAALEHDKAYDRQLDSGDNPYLKYNHADAEFQERLKEDTSFGGNLARAVFQAKKRVLEPLGLVEEPVKTAPGKKRPVEHSPAEPDSSSGTGKSGQQPARKRLNFGQTGDADSVPDPQPLGQPPAAPSGLGTNTMASGSGAPMADNNEGADGVGNSSGNWHCDSTWMGDRVITTSTRTWALPTYNNHLYKQISSQSGASNDNHYFGYSTPWGYFDFNRFHCHFSPRDWQRLINNNWGFRPKRLNFKLFNIQVKEVTQNDGTTTIANNLTSTVQVFTDSEYQLPYVLGSAHQGCLPPFPADVFMVPQYGYLTLNNGSQAVGRSSFYCLEYFPSQMLRTGNNFTFSYTFEDVPFHSSYAHSQSLDRLMNPLIDQYLYYLSRTNTPSGTTTQSRLRFSQAGASDIRDQSRNWLPGPCYRQQRVSKTAADNNNSDYSWTGATKYHLNGRDSLVNPGTAMASHKDDEEKYFPQSGVLIFGKQDSGKTNVDIERVMITDEEEIRTTNPVATEQYGSVSTNLQSGNTQAATSDVNTQGVLPGMVWQDRDVYLQGPIWAKIPHTDGHFHPSPLMGGFGLKHPPPQILIKNTPVPANPSTTFSAAKFASFITQYSTGQVSVEIEWELQKENSKRWNPEIQYTSNYNKSVNVDFTVDTNGVYSEPRPIGTRYLTRNL

SEQ ID NO: 2446 - protein, 735 aa, Artificial Sequence
  source: /note="Description of Artificial Sequence: Synthetic polypeptide"
MAADGYLPDWLEDTLSEGIRQWWKLKPGPPPPKPAERHKDDSRGLVLPGYKYLGPFNGLDKGEPVNEADAAALEHDKAYDRQLDSGDNPYLKYNHADAEFQERLKEDTSFGGNLARAVFQAKKRVLEPLGLVEEPVKTAPGKKRPVEHSPAEPDSSSGTGKSGQQPARKRLNFGQTGDADSVPDPQPLGQPPAAPSGLGTNTMASGSGAPMADNNEGADGVGNSSGNWHCDSTWMGDRVITTSTRTWALPTYNNHLYKQISSQSGASNDNHYFGYSTPWGYFDFNRFHCHFSPRDWQRLINNNWGFRPKRLNFKLFNIQVKEVTQNDGTTTIANNLTSTVQVFTDSEYQLPYVLGSAHQGCLPPFPADVFMVPQYGYLTLNNGSQTVGRSSFYCLEYFPSQMLRTGNNFTFSYTFEDVPFHSSYAHSQSLDRLMNPLIDQYLYYLSRTNTPSGTTTQSRLRFSQAGASDIRDQSRNWLPGPCYRQQRVSKTAADNNNSDYSWTGATKYHLNGRDSLVNPGTAMASHKDDEEKYFPQSGVLIFGKQDSGKTNVDIERVMITDEEEIRTTNPVATEQYGSVSTNLQSGNTQAATSDVNTQGVLPGMVWQDRDVYLQGPIWAKIPHTDGHFHPSPLMGGFGLKHPPPQILIKNTPVPANPSTTFSAAKFASFITQYSTGQVSVEIEWELQKENSKRWNPEIQYTSNYNKSVNVDFTVDTNGVYSEPRPIGTRYLTRNL

SEQ ID NO: 2447 - protein, 735 aa, Artificial Sequence
  source: /note="Description of Artificial Sequence: Synthetic polypeptide"
MAADGYLPDWLEDTLSEGIRQWWKLKPGPPPPKPAERHKDDSRGLVLPGYKYLGPFNGLDKGEPVNEADAAALEHDKAYDRQLDSGDNPYLKYNHADAEFQERLKEDTSFGGNLARAVFQAKKRVLEPLGLVEEPVKTAPGKKRPVEHSPAEPDSSSGTGKSGQQPARKRLNFGQTGDADSVPDPQPLGQPPAAPSGLGTNTMASGSGAPMADNNEGADGVGNSSGNWHCDSTWMGDRVIPTSTRTWALPTYNNHLYKQISSQSGASNDNHYFGYSTPWGYFDFNRFHCHFSPRDWQRLINNNWGFRPKRLNFKLFNIQVKEVTQNDGTTTIANNLTSTVQVFTDSGYQLPYVLGSAHQGCLPPFPADVFMVPQYGYLTLNNGSQAVGRSSFYCLEYFPSQMLRTGNNFTFSYTFEDVPFHSSYAHSQSLDRLMNPLIDQYLYYLSRTNTPSGTTTQSRLRFSQAGASDIRDQSRNWLPGPCYRQQRVSKTAADNNNSDYSWTGATKYHLNGRDSLVNPGTAMASHKDDEEKYFPQSGVLIFGKQDSGKTNVDIERVMITDEEEIRTTNPVATEQYGSVSTNLQSGNTQAATSDVNTQGVLPGMVWQDRDVYLQGPIWAKIPHTDGHFHPSPLMGGFGLKHPPPQILIKNTPVPANPSTTFSAAKFASFITQYSTGQVSVEIEWELQKENSKRWNPEIQYTSNYNKSVNVDFTVDTNGVYSEPRPIGTRYLTRNL

SEQ ID NO: 2448 - protein, 735 aa, Artificial Sequence
  source: /note="Description of Artificial Sequence: Synthetic polypeptide"
MAADGYLPDWLEDTLSEGIRQWWKLKPGPPPPKPAERHKDDSRGLVLPGYKYLGPFNGLDKGEPVNEADAAALEHDKAYDRQLDSGDNPYLKYNHADAEFQERLKEDTSFGGNLARAVFQAKKRVLEPLGLVEEPVKTAPGKKRPVEHSPAEPDSSSGTGKSGQQPARKRLNFGQTGDADSVPDPQPLGQPPAAPSGLGTNTMASGSGAPMADNNEGADGVGNSSGNWHCDSTWMGDRVITTSTRTWALPTYNNHLYKQISSQSGASNDNHYFGYSTPWGYFDFNRFHCHFSPRDWQRLINNNWGFRPKRLNFKLFNIQVKEVTQNDGTTTIANNLTSTVQVFTDSEYQLPYVLGSAHQGCLPPFPADVFMVPQYGYLTLNNGSQAVGRSSFYCLEYFPSQMLRTGNNFTFSYTFEDVPFHSSYAHSQSLDRLMNPLIDQYLYYLSRTNTPSGTTTQSRLRFSQAGASDIRDQSRNWLPGPCYRQQRVSKTAADNNNSDYSWTGATKYHLNGRDSLVNPGTAMASHKDDEEKYFPQSGVLIFGKQDSGKTNVDIERVMITDEEEIRTTNPVATEQYGSVSTNLQSGDTQAATSDVNTQGVLPGMVWQDRDVYLQGPIWAKIPHTDGHFHPSPLMGGFGLKHPPPQILIKNTPVPANPSTTFSAAKFASFITQYSTGQVSVEIEWELQKENSKRWNPEIQYTSNYNKSVNVDFTVDTNGVYSEPRPIGTRYLTRNL

SEQ ID NO: 2449 - protein, 734 aa, Artificial Sequence
  source: /note="Description of Artificial Sequence: Synthetic polypeptide"
MAADGYLPDWLEDTLSEGIRQWWKLKPGPPPPKPAERHKDDSRGLVLPGYKYLGPFNGLDKGEPVNEADAAALEHDKAYDRQLDSGDNPYLKYNHADAEFQERLKEDTSFGGNLARAVFQAKKRVLEPLGLVEEPVKTAPGKKRPVEHSPAEPDSSSGTGKSGQQPARKRLNFGQTGDADSVPDPQPLGQPPAAPSGLGTNTMASGSGAPMADNNEGADGVGNSSGNWHCDSTWMGDRVITTSTRTWALPTYNNHLYKQISSQSGASNDNHYFGYSTPWGYFDFNRFHCHFSPRDWQRLINNNWGFRPKRLNFKLFNIQVKEVTQNDGTTTIANNLTSTVQVFTDSEYQLPYVLGSAHQGCLPPFPADVFMVPQYGYLTLNNGSQAVGRSSFYCLEYFPSQMLRTGNNFTFSYTFEDVPFHSSYAHSQSLDRLMNPLIDQYLYYLSRTNTPSGTTTQSRLRFSQAGASDIRDQSRNWLPGPCYRQQRVSKTAADNNSDYSWTGATKYHLNGRDSLVNPGTAMASHKDDEEKYFPQSGVLIFGKQDSGKTNVDIERVMITDEEEIRTTNPVATEQYGSVSTNLQSGNTQAATSDVNTQGVLPGMVWQDRDVYLQGPIWAKIPHTDGHFHPSPLMGGFGLKHPPPQILIKNTPVPANPSTTFSAAKFASFITQYSTGQVSVEIEWELQKENSKRWNPEIQYTSNYNKSVNVDFTVDTNGVYSEPRPIGTRYLTRNL

SEQ ID NO: 2450 - protein, 735 aa, Artificial Sequence
  source: /note="Description of Artificial Sequence: Synthetic polypeptide"
MAADGYLPDWLEDTLSEGIRQWWKLKPGPPPPKPAERHKDDSRGLVLPGYKYLGPFNGLDKGEPVNEADAAALEHDKAYDRQLDSGDNPYLKYNHADAEFQERLKEDTSFGGNLARAVFQAKKRVLEPLGLVEEPVKTAPGKKRPVEHSPAEPDSSSGTGKSGQQPARKRLNFGQTGDADSVPDPQPLGQPPAAPSGLGTNTMASGSGAPMADNNEGADGVGNSSGNWHCDSTWMGDRVITTSTRTWALPTYNNHLYKQISSQSGASNDNHYFGYSTPWGYFDFNRFHCHFSPRDWQRLINNNWGFRPKRLNFKLFNIQVKEVTQNDGTTTIANNLTSTVQVFTDSEYQLPYVLGSAHQGCLPPFPADVFMVPQYGYLTLNNGSQAVGRSSFYCLEYFPSQMLRTGNNFTFSYTFEDVPFHSSYAHSQSSDRLMNPLIDQYLYYLSRTNTPSGTTTQSRLRFSQAGASDIRDQSRNWLPGPCYRQQRVSKTAADNNNSDYSWTGATKYHLNGRDSLVNPGTAMASHKDDEEKYFPQSGVLIFGKQDSGKTNVDIERVMITDEEEIRTTNPVATEQYGSVSTNLQSGNTQAATSDVNTQGVLPGMVWQDRDVYLQGPIWAKIPHTDGHFRPSPLMGGFGLKHPPPQILIKNTPVPANPSTTFSAAKFASFITQYSTGQVSVEIEWELQKENSKRWNPEIQYTSNYNKSVNVDFTVDTNGVYSEPRPIGTRYLTRNL

SEQ ID NO: 2451 - protein, 735 aa, Artificial Sequence
  source: /note="Description of Artificial Sequence: Synthetic polypeptide"
MAADGYLPDWLEDTLSEGIRQWWKLKPGPPPPKPAERHKDDSRGLVLPGYKYLGPFNGLDKGEPVNEADAAALEHDKAYDRQLDSGDNPYLKYNHADAEFQERLKEDTSFGGNLARAVFQAKKRVLEPLGLVEEPVKTAPGKKRPVEHSPAGPDSSSGTGKSGQQPARKRLNFGQTGDADSVPDPQPLGQPPAAPSGLGTNTMASGSGAPMADNNEGADGVGNSSGNWHCDSTWMGDRVITTSTRTWALPTYNNHLYKQISSQSGASNDNHYFGYSTPWGYFDFNRFHCHFSPRDWQRLINNNWGFRPKRLNFELFNIQVKEVTQNDGTTTIANNLTSTVQVFTDSEYQLPYVLGSAHQGCLPPFPADVFMVPQYGYLTLNNGSQAVGRSSFYCLEYFPSQMLRTGNNFTFSYTFEDVPFHSSYAHSQSLDRLMNPLIDQYLYYLSRTNTPSGTTTQSRLQFSQAGASDIRDQSRNWLPGPCYRQQRVSKTAADNNNSDYSWTGATKYHLNGRDSLVNPGTAMASHKDDEEKYFPQSGVLIFGKQDSGKTNVDIEKVMITDEEEIRTTNPVATEQYGSVSTNLQSGNTQAATSDVNTQGVLPGMVWQDRGVYLQGPIWAKIPHTDGHFHPSPLMGGFGLKHPPPQILIKSTPVPANPSTTFSAAKFASFITQYSTGQVSVEIEWELQKENSKRWNPEIQYTSNYNKSVNVDFTVDTNGVYSDPRPIGTRYLTRNL

SEQ ID NO: 2452 - protein, 735 aa, Artificial Sequence
  source: /note="Description of Artificial Sequence: Synthetic polypeptide"
MAADGYLPDWLEDTLSEGIRQWWKLKPGPPPPKPAERHKDDSRGLVLPGYKYLGPFNGLDKGEPVNEADAAALEHDKAYDRQLDSGDNPYLKYNHADAEFQERLKEDTSFGGNLARAVFQAKKRVLEPLGLVEEPVKTAPGKKRPVEHSPAEPDSSSGTGKSGQQPARKRLNFGQTGDADSVPDPQPLGQPPAAPSGLGTNTMASGSGAPMADNNEGADGVGNSSGNWHCDSTWMGDRVITTSTRTWALPTYNNHLYKQISSQSGASNDNHYFGYSTPWGYFDFNRFHCHFSPRGWQRLINNNWGFRPKRLNFKLFNIQVKEVTQNDGTTTIANNLTSTVQVFTDSEYQLPYVLGSAHQGCLPPFPADVFMVPQYGYLTLNNGSQAVGRSSFYCLEYFPSQMLRTGSNFTFSYTFEDVPFHSSYAHSQSLDRLMNPLIDQYLYYLSRTNTPSGTTTQSRLRFSQAGASDIRDQSRNWLPGPCYRQQRVSKTAADNNNSDYSWTGATKYHLNGRDSLVNPGTAMASHKDDEEKYFPQSGVLIFGKQDSGKTNVDIERVMITDEEEIRTTNPVATEQYGSVSTNLQSGNTQAATSDVNTQGVLPGMVWQDRDVYLQGPIWAKIPHTDGHFHPSPLMGGFGLKHPPPQILIKNTPVPANPSTTFSAAKFASFITQYSTGQVSVEIEWELQKENSKRWNPEIQYTSNYNKSVNVDFTVDTNGVYSEPRPIGTRYLTRNL

SEQ ID NO: 2453 - protein, 735 aa, Artificial Sequence
  source: /note="Description of Artificial Sequence: Synthetic polypeptide"
MAADGYLPDWLEDTLSEGIRQWWKLKPGPPPPRPAERHQDDSRGLVLPGYKYLGPFNGLDKGEPVNEADAAALEHDKAYDRQLDSGDNPYLKYNHADAEFQERLKEDTSFGGNLARAVFQAKKRVLEPLGLVEEPVKTAPGKKRPVEHSPAEPDSSSGTGKSGQQPARKRLNFGQTGDADSVPDPQPLGQPPAAPSGLGTNTMASGSGAPMADNNEGADGVGNSSGNWHCDSTWMGDRVITTSTRTWALPTYNNHLYKQISSQSGASNDNHYFGYSTPWGYFDFNRFHCHFSPRDWQRLINNNWGFRPKRLNFKLFNIQVKEVTQNDGTTTIANNLTSTVQVFTDSEYQLPYVLGSAHQGCLPPFPADVFMVPQYGYLTLNNGSQAVGRSSFYCLEYFPSQMLRTGNNFTFSYTFEDVPFHSSYAHSQSLDRLMNPLIDQYLYYLSRTNTPSGTTTQSRLRFSQAGASDIRDQSRNWLPGPCYRQQRVSKTAADNNNSDYSWTGATKYHLNGRDSLVNPGTAMASHKDDEEKYFPQSGVLIFGKQDSGKTNVDIERVMITDEEEIRTTNPVATEQYGSVSTNLQSGNTQAATSDVNTQGVLPGMVWQDRDVYLQGPIWAKIPHTDGHFHPSPLMGGFGLKHPPPQILIKNTPVPANPSTTFSAAKFASFITQYSTGQVSVEIEWELQKENSKRWNPEIQYTSNYNKSVNVDFTVDTNGVYSEPRPIGTRYLTRNL

SEQ ID NO: 2454 - protein, 735 aa, Artificial Sequence
  source: /note="Description of Artificial Sequence: Synthetic polypeptide"
MAADGYLPDWLEDTLSEGIRQWWKLKPGPPPPKPAERHKDDSRGLVLPGYKYLGPFNGLDKGEPVNEADAAALEHDKAYDRQLDSGDNPYLKYNHADAEFQERLKEDTSFGGNLARAVFQAKKRVLEPLGLVEEPVKTAPGKKRPVEHSPAEPDSSSGTGKSGQQPARKRLNFGQTGDADSVPDPQPLGQPPAAPSGLGTNTMASGSGAPMADNNEGADGVGNSSGNWHCDSTWMGDRVITTSTRTWALPTYNNHLYKQISSQSGASNDNHYFGYSTPWGYFDFNRFHCHFSPRDWQRLINNNWGFRPKRLNFKLFNIQVKEVTQNDGTTTIANNLTSTVQVFTDSEYQLPYVPGSAHQGCLPPFPADVFMVPQYGYLTLNNGSQAVGRSSFYCLEYFPSQMLRTGNNFTFSYTFEDVPFHSSYAHSQSLDRLMNPLIDQYLYYLSRTNTPSGTTTQSRLRFSQAGASDIRDQSRNWLPGPCYRQQRVSKTAADNNNSDYSWTGATKYHLNGRDSLVNPGTAMASHKDDEEKYFPQSGVLIFGKQDSGKTNVDIERVMITDEEEIRTTNPVATEQYGSVSTNLQSGNTQAATSDVNTQGVLPGMVWQDRDVYLQGPIWAKIPHTDGHFHPSPLMGGFGLKHPPPQILIKNTPVPANPSTTFSAAKFASFITQYSTGQVSVEIEWELQKENSKRWNPEIQYTSNYNKSVNVDFTVDTNGVYSEPRPIGTRYLTRNL

SEQ ID NO: 2455 - protein, 735 aa, Artificial Sequence
  source: /note="Description of Artificial Sequence: Synthetic polypeptide"
MAADGYLPDWLEDTLSEGIRQWWKLKPGPPPPKPAERHKDDSRGLVLPGYKYLGPFNGLDKGEPVNEADAAALEHDKAYDRQLDSGDNPYLKYNHADAEFQERLKEDTSFGGNLARAVFQAKKRVLEPLGLVEEPVKTAPGKKRPVEHSPAEPDSSSGTGKSGQQPARKRLNFGQTGDADSVPDPQPLGQPPAAPSGLGTNTMASGSGAPMADNNEGADGVGNSSGNWHCDSTWMGDRVITTSTRTWALPTYDNHLYKQISSQSGASNDNHYFGYSTPWGYFDFNRFHCHFSPRDWQRLINNNWGFRPKRLNFKLFNIQVKEVTQNDGTTTIANNLTSTVQVFTDSEYQLPYVLGSAHQGCLPPFPADVFMVPQYGYLTLNNGSQAVGRSSFYCLEYFPSQMLRTGNNFTFSYTFEDVPFHSSYAHSQSLDRLMNPLIDQYLYYLSRTNTSSGTTTQSRLRFSQAGASDIRDQSRNWLPGPCYRQQRVSKTAADNNNSDYSWTGATKYHLNGRDSLVNPGTAMASHKDDEEKYFPQSGVLIFGKQDSGKTNVDIERVMITDEEEIRTTNPVATEQYGSVSTNLQSGNTQAATSDVNTQGVLPGMVWQDRDVYLQGPIWAKIPHTDGHFHPSPLMGGFGLKHPPPQILIKNTPVPANPSTTFSAAKFASFITQYSTGQVSVEIEWELQKENSKRWNPEIQYTSNYNKSVNVDFTVDTNGVYSEPRPIGTRYLTRNL

SEQ ID NO: 2456 - protein, 735 aa, Artificial Sequence
  source: /note="Description of Artificial Sequence: Synthetic polypeptide"
MAADGYLPDWLEDTLSEGIRQWWKLKPGPPPPRPAERHQDDSRGLVLPGYKYLGPFNGLDKGEPVNEADAAALEHDKAYDRQLDSGDNPYLKYNHADAEFQERLKEDTSFGGNLGRAVFQAKKRVLEPLGLVEEPVKTAPGKKRPVEHSPAEPDSSSGTGKAGQQPARKRLNFGQTGDADSVPDPQPLGQPPAAPTSLGSTTMATGSGAPMADNNEGADGVGNSSGNWHCDSQWLGDRVITTSTRTWALPTYNNHLYKQISSQSGASNDNHYFGYSTPWGYFDFNRFHCHFSPRDWQRLINNNWGFRPKRLNFKLFNIQVKEVTQNDGTTTIANNLTSTVQVFTDSEYQLPYVLGSAHQGCLPPFPADVFMVPQYGYLTLNNGSQAVGRSSFYCLEYFPSQMLRTGNNFTFSYTFEDVPFHSSYAHSQSLDRLMNPLIDQYLYYLSRTNTPSGTTTQSRLQFSQAGASDIRDQSRNWLPGPCYRQQRVSKTAADNNNSDYSWTGATKYHLNGRDSLVNPGTAMASHKDDEEKYFPQSGVLIFGKQDSGKTNVDIEKVMITDEEEIRTTNPVATEQYGSVSTNLQSGNTQAATSDVNTQGVLPGMVWQDRDVYLQGPIWAKIPHTDGHFHPSPLMGGFGLKHPPPQILIKSTPVPANPSTTFSAAKFASFITQYSTGQVSVEIEWELQKENSKRWNPEIQYTSNYNKSVNVDFTVDTNGVYSEPRPIGTRYLTRNL

SEQ ID NO: 2457 - protein, 735 aa, Artificial Sequence
  source: /note="Description of Artificial Sequence: Synthetic polypeptide"
MAADGYLPDWLEDTLSEGIRQWWKLKPGPPPPKPAERHKDDSRGLVLPGYKYLGPFNGLDKGEPVNEADAAALEHDKAYDRQLDSGDNPYLKYNHADAEFQERLKEDTSFGGNLARAVFQAKKRVLEPLGLVEEPVKTAPGKKRPVEHSPAEPDSSSGTGKSGQQPARKRLNFGQTGDADSVPDPQPLGQPPAAPSGLGTNTMASGSGAPMADNNEGADGVGNSSGNWHCDSTWMGDRVITTSTRTWALPTYNNHLYKQISSQSGASNDNHYFGYSTPWGYFDFNRFHCHFSPRDWQRLINNNWGFRPKRLNFKLFNIQVKEVTQNDGTTTIANNLTSTVQVFTDSEYQLPYVLGSAHQGCLPPFPADVFMVPQYGYLTLNNGSQAVGRSSFYCLEYFPSQMLRTGNNFTFSYTFEDVPFHSSYAHSQSSDRLMNPLIDQYLYYLSRTNTPSGTTTQSRLRFSQAGASDIRDQSRNWLPGPCYRQQRVSKTAADNNNSDYSWTGATKYHLNGRDSLVNPGTAMASHKDDEEKYFPQSGVLIFGKQDSGKTNVDIERVMITDEEEIRTTNPVATEQYGSVSTNLQSGNTQAATSDVNTQGVLPGMVWQDRDVYLQGPIWAKIPHTDGHFHPSPLMGGFGLKHPPPQILIKNTPVPANPSTTFSAAKLASFITQYSTGQVSVEIEWELQKENSKRWNPEIQYTSNYNKSVNVDFTVDTNGVYSEPRPIGTRYLTRNL

SEQ ID NO: 2458 - protein, 735 aa, Artificial Sequence
  source: /note="Description of Artificial Sequence: Synthetic polypeptide"
MAADGYLPDWLEDTLSEGIRQWWKLKPGPPPPKPAERHKDDSRGLVLPGYKYLGPFNGLDKGEPVNEADAAALEHDKAYDRQLDSGDNPYLKYNHADAEFQERLKEDTSFGGNLARAVFQAKKRVLEPLGLVEEPVKTAPGKKRPVEHSPAEPDSSSGTGKSGQQPARKRLNFGQTGDADSVPDPQPLGQPPAAPSGLGTNTMASGSGAPMADNNEGADGVGNSSGNWHCDSTWMGDRVITTSTRTWALPTYNNHLYKQISSQSGASNDNHYFGYSTPWGYFDFNRFHCHFSPRDWQRLINNNWGFRPKRLNFKLFNIQVKEVTQNDGTTTIANNLTSTVQVFTDSEYQLPYVLGSAHQGCLPPFPADVFMVPQYGYLTLNNGSQAVGRSSFYCLEYFPSQMLRTGNNFTFSYTFEDVPFHSSYAHSQSLDRLMNPLIDQYLYYLSRTNTPSGTTTQSRLRFSQAGASDIRDQSRNWLPGPCYRQQRVSKTAADNNNSDYSWTGATKYHLNGRDSLVNPGTAMASHKDDEEKYFPQSGVLIFGKQDSGKTNVDIERVMITDEEEIRTTNPVATEQYGSVSTNLQSGNTQAATSDVNTQGVLPGMVWQDRDVYLQGPIWAKIPHTDGHFHPSPLMGGFGLKHPPPQILIKNTPVPANPSTTFSAAKFASFITQYSTGQVSVEIEWELQKENSKRWNPEIQYTSNYNKSVNVDFTVDANGVYSEPRPIGTRYLTRNL

SEQ ID NO: 2459 - protein, 735 aa, Artificial Sequence
  source: /note="Description of Artificial Sequence: Synthetic polypeptide"
MAADGYLPDWLEDTLSEGIRQWWKLKPGPPPPKPAERHKDDSRGLVLPGYKYLGPFNGLDKGEPVNEADAAALEHDKAYDRQLDSGDNPYLKYNHADAEFQERLKEDTSFGGNLARAVFQAKKRVLEPLGLVEEPVKTAPGKKRPVEHSPAGPDSSSGTGKSGQQPARKRLNFGQTGDADSVPDPQPLGQPPAAPSGLGTNTMASGSGAPMADNNEGADGVGNSSGNWHCDSTWMGDRVITTSTRTWALPTYNNHLYKQISSQSGASNDNHYFGYSTPWGYFDFNRFHCHFSPRDWQRLINNNWGFRPKRLNFELFNIQVKEVTQNDGTTTIANNLTSTVQVFTDSEYQLPYVLGSAHQGCLPPFPADVFMVPQYGYLTLNNGSQAVGRSSFYCLEYFPSQMLRTGNNFTFSYTFEDVPFHSSYAHSQSLDRLMNPLIDQYLYYLSRTNTPSGTTTQSRLQFSQAGASDIRDQSRNWLPGPCYRQQRVSKTAADNNNSDYSWTGATKYHLNGRDSLVNPGTAMASHKDDEEKYFPQSGVLIFGKQDSGKTNVDIEKVMITDEEEIRTTNPVATEQYGSVSTNLQSGNTQAATSDVNTQGVLPGMVWQDRDVYLQGPIWAKIPHTDGHFHPSPLMGGFGLKHPPPQILIKSTPVPANPSTTFSAAKFASFITQYSTGQVSVEIEWELQKENSKRWNPEIQYTSNCNKSVNVDFTVDTNGVYSDPRPIGTRYLTRNL

SEQ ID NO: 2460 - protein, 735 aa, Artificial Sequence
  source: /note="Description of Artificial Sequence: Synthetic polypeptide"
MAADGYLPDWLEDTLSEGIRQWWKLKPGPPPPKPAERHKDDSRGLVLPGYKYLGPFNGLDKGEPVNEADAAALEHDKAYDRQLDSGDNPYLKYNHADAELQERLKEDTSFGGNLARAVFQAKKRVLEPLGLVEEPVKTAPGKKRPVEHSPAEPDSSSGTGKSGQQPARKRLNFGQTGDADSVPDPQPLGQPPAAPSGLGTNTMASGSGAPMADNNEGADGVGNSSGNWHCDSTWMGDRVITTSTRTWALPTYNNHLYKQISSQSGASNDNHYFGYSTPWGYFDFNRFHCHFSPRDWQRLINNNWGFRPKRLNFKLFNIQVKEVTQNDGTTTIANNLTSTVQVYTDSEYQLPYVLGSAHQGCLPPFPADVFMVPQYGYLTLNNGSQAVGRSSFYCLEYFPSQMLRTGNNFTFSYTFEDVPFHSSYAHSQSLDRLMNPLIDQYLYYLSRTNTPSGTTTQSRLRFSQAGASDIRDQSRNWLPGPCYRQQRVSKTAADNNNSDYSWTGATKYHLNGRDSLVNPGTAMASHKDDEEKYFPQSGVLIFGKQDSGKTNVDIERVMITDEEEIRTTNPVATEQYGSVSTNLQSGNTQAATSDVNTQGVLPGMVWQDRDVYLQGPIWAKIPHTDGHFHPSPLMGGFGLKHPPPQILIKNTPVPANPSTTFSAAKFASFITQYSTGQVSVEIEWELQKENSKRWNPEIQYTSNYNKSVNVDFTVDTNGVYSEPRPIGTRYLTRNL

SEQ ID NO: 2461 - protein, 735 aa, Artificial Sequence
  source: /note="Description of Artificial Sequence: Synthetic polypeptide"
MAADGYLPDWLEDTLSEGIRQWWKLKPGPPPPKPAERHKDDSRGLVLPGYKYLGPFNGLDKGEPVNEADAAALEHDKAYDRQLDSGDNPYLKYNHADAEFQERLKEDTSFGGNLARAVFQAKKRVLEPLGLVEEPVKTAPGKKRPVEHSPAEPDSSSGTGKSGQQPVRKRLNFGQTGDADSVPDPQPLGQPPAAPSGLGTNTMASGSGAPMADNNEGADGVGNSSGNWHCDSTWMGDRVITTSTRTWALPTYNNHLYKQISSQSGASNDNHYFGYSTPWGYFDFNRFHCHFSPRDWQRLINNNWGFRPKRLNFKLFNIQVKEVTQNDGTTTIANNLTSTVQVFTDSEYQLPYVLGSAHQGCLPPFPADVFMVPQYGYLTLNNGSQAVGRSSFYCLEYFPSQMLRTGSNFTFSYTFEDVPFHSSYAHSQSLDRLMNPLIDQYLYYLSRTNTPSGTTTQSRLRFSQAGASDIRDQSRNWLPGPCYRQQRVSKTAADNNNSDYSWTGATKYHLNGRDSLVNPGTAMASHKDDEEKYFPQSGVLIFGKQDSGKTNVDIERVMITDEEEIRTTNPVATEQYGSVSTNLQSGNTQAATSDVNTQGVLPGMVWQDRDVYLQGPIWAKIPHTDGHFHPSPLMGGFGLKHPPPQILIKNTPVPANPSTTFSAAKFASFITQYSTGQVSVEIEWELQKENSKRWNPEIQYTSNYNKSVNVDFTVDTNGVYSEPRPIGTRYLTRNL

SEQ ID NO: 2462 - protein, 735 aa, Artificial Sequence
  source: /note="Description of Artificial Sequence: Synthetic polypeptide"
MAADGYLPDWLEDTLSEGIRQWWKLKPGPPPPRPAERHQDDSRGLVLPGYKYLGPFNGLDKGEPVNEADAAALEHDKAYDRQLDSGDNPYLKYNHADAEFQERLKEDTSFGGNLGRAVFQAKKRVLEPLGLVEEPVKTAPGKKRPVEHSPAGPDSSSGTGKSGQQPARKRLNFGQTGDADSVPDPQPLGQPPAAPSGLGTNTMASGSGAPMADNNEGADGVGNSSGNWHCDSTWMGDRVITTSTRTWALPTYNNHLYKQISSQSGASNDNHYFGYSTPWGYFDFNRFHCHFSPRDWQRLINNNWGFRPKRLNFELFNIQVKEVTQNDGTTTIANNLTSTVQVFTDSEYQLPYVLGSAHQGCLPPFPADVFMVPQYGYLTLNNGSQAVGRSSFYCLEYFPSQMLRTGNNFTFSYTFEDVPFHSSYAHSQSLDRLMNPLIDQYLYYLSRTNTPSGTTTQSRLQFSQAGASDIRDQSRNWLPGPCYRQQRVSKTAADNNNSDYSWTGATKYHLNGRDSLVNPGTAMASHKDDEEKYFPQSGVLIFGKQDSGKTNVDIEKVMITDEEEIRTTNPVATEQYGSVSTNLQSGNTQAATSDVNTQGVLPGMVWQDRDVYLQGPIWAKIPHTDGHFHPSPLMGGFGLKHPPPQILIKSTPVPANPSTTFSAAKFASFITQYSTGQVSVEIEWELQKENSKRWNPEIQYTSNYNKSVNVDFTVDTNGVYSEPRPIGTRYLTRNL

SEQ ID NO: 2463 - protein, 735 aa, Artificial Sequence
  source: /note="Description of Artificial Sequence: Synthetic polypeptide"
MAADGYLPDWLEDTLSEGIRQWWKLKPGPPPPKPAERHKDDSRGLVLPGYKYLGPFNGLDKGEPVNEADAAALEHDKAYDRQLDSGDNPYLKYNHADAEFQERLKEDTSFGGNLARAVFQAKKRVLEPLGLVEEPVKTAPGKKRPVEHSPAEPDSSSGTGKSGQQPARKRLNFGQTGDADSVPDPQPLGQPPAAPSGLGTNTMASGSGAPMADNNEGADGVGNSSGNWHCDSTWMGDRVITTSTRTWALPTYNNHLYKQISSQSGASNDNHYFGYSTPWGYFDFNRFHGHFSPRDWQRLINNNWGFRPKRLNFKLFNIQVKEVTQNDGTTTIANNLTSTVQVFTDSEYQLPYVLGSAHQGCLPPFPADVFMVPQYGYLTLNNGSQAVGRSSFYCLEYFPSQMLRTGNNFTFSYTFEDVPFHSSYAHSQSLDRLMNPLIDQYLYYLSRTNTPSGTTTQSRLRFSQAGASDIRDQSRNWLPGPCYRQQRVSKTAADNNNSDYSWTGATKYHLNGRDSLVNPGTAMASHKDDEEKYFPQSGVLIFGKQDSGKTNVDIERVMITDEEEIRTTNPVATEQYGSVSTNLQSGNTQAATSDVNTQGVLPGMVWQDRDVYLQGPIWAKIPHTDGHFHPSPLMGGFGLKHPPPQILIKNTPVPANPSTTFSAAKFASFITQYSTGQVSVEIEWELQKENSKRWNPEIQYTSNYNKSVNVDFTVDTNGVYSEPRPIGTRYLTRNL

SEQ ID NO: 2464 - protein, 735 aa, Artificial Sequence
  source: /note="Description of Artificial Sequence: Synthetic polypeptide"
MAADGYLPDWLEDTLSEGIRQWWKLKPGPPPPKPAERHKDDSRGLVLPGYKYLGPFNGLDKGEPVNEADAAALEHDKAYDRQLDSGDNPYLKYNHADAEFQERLKEDTSFGGNLARAVFQAKKRVLEPLGLVEEPVKTAPGKKRPVEHSPAEPDSSSGTGKSGQQPARKRLNFGQTGDADSVPDPQPLGQPPAAPSGLGTNTMASGSGAPMADNNEGADGVGNSSGNWHCDSTWMGDRVITTSTRTWALPTYNNHLYKQISSQSGASNDNHYFGYSTPWGYFDFNRFHCHFSPRDWQRLINNNWGFRPKRLNFKLFNIQVKEVTQNDGTTTIANNLTSTVQVFTDSEYQLPYVLGSAHQGCLPPFPADVFMVPQYGYLTLNNGSQAVGRSSFYCLEYFPSQMLRTGNNFTFSYTFEDVPFHSSYAHSQSLDRLMNPLIDQYLYYLSRTNTPSGTTTQSRLRFSQAGASDIRDQSRNWLPGPCYRQQRVSKTAADNNNSDYSWTGATKYHLNGRDSLVNPGTAMASHKDDEEKYFPQSGVLIFGKQDSGKTNVDIERVMITDEEEIRTTNPVATEQYGSVSTNLQSGNTQAATSDVNTQGVLPGMVWQDRDVYLQGPIWAKIPHTDGHFRPSPLMGGFGLKHPPPQILIKNTPVPANPSTTFSAAKFASFITQYSTGQVSVEIEWELQKENSKRWNPEIQYTSNYNKSVNVDFTVDTNGVYSEPRPIGTRYLTRNL

SEQ ID NO: 2465 - protein, 735 aa, Artificial Sequence
  source: /note="Description of Artificial Sequence: Synthetic polypeptide"
MAADGYLPDWLEDTLSEGIRQWWKLKPGPPPPKPAERHKDDSRGLVLPGYKYLGPFNGLDKGEPVNEADAAALEHDKAYDRQLDSGDNPYLKYNHADAEFQERLKEDTSFGGNLGRAVFQAKKRALEPLGLVEEPVKTAPGKKRPVEHSPVEPDSSSGTGKAGQQPARKRLNFGQTGDADSVPDPQPLGQPPAAPSGLGTNTMATGSGAPMADNNEGADGVGNSSGNWHCDSTWMGDRVITTSTRTWALPTYNNHLYKQISSQSGASNDNHYFGYSTPWGYFDFNRFHCHFSPRDWQRLINNNWGFRPKRLNFKLFNIQVKEVTQNDGTTTIANNLTSTVQVFTDSEYQLPYVLGSAHQGCLPPFPADVFMVPQYGYLTLNNGSQAVGRSSFYCLEYFPSQMLRTGNNFTFSYTFEDVPFHSSYAHSQSLDRLMNPLIDQYLYYLSRTNTPSGTTTQSRLQFSQAGASDIRDQSRNWLPGPCYRQQRVSKTSADNNNSEYSWTGATKYHLNGRDSLVNPGPAMASHKDDEEKFFPQSGVLIFGKQGSEKTNVDIEKVMITDEEEIRTTNPVATEQYGSVSTNLQRGNRQAATADVNTQGVLPGMVWQDRDVYLQGPIWAKIPHTDGHFHPSPLMGGFGLKHPPPQILIKNTPVPANPSTTFSAAKFASFITQYSTGQVSVEIEWELQKENSKRWNPEIQYTSNYNKSVNVDFTVDTNGVYSEPRPIGTRYLTRNL

SEQ ID NO: 2466 - protein, 735 aa, Artificial Sequence
  source: /note="Description of Artificial Sequence: Synthetic polypeptide"
MAADGYLPDWLEDTLSEGIRQWWKLKPGPPPPKPAERHKDDSRGLVLPGYKYLGPFNGLDKGEPVNEADAAALEHDKAYDRQLDSGDNPYLKYNHADAEFQERLKEDTSFGGNLGRAVFQAKKRVLEPLGLVEEPVKTAPGKKRPVEHSPVEPDSSSGTGKAGQQPARKRLNFGQTGDADSVPDPQPLGQPPAAPSGLGTNTMATGSGAPMADNNEGADGVGNSSGNWHCDSTWMGDRVITTSTRTWALPTYNNHLYKQISSQSGASNDNHYFGYSTPWGYFDFNRFHCHFSPRDWQRLINNNWGFRPKRLNFKLFNIQVKEVTQNDGTTTIANNLTSTVQVFTDSEYQLPYVLGSAHQGCLPPFPADVFMVPQYGYLTLNNGSQAVGRSSFYCLEYFPSQMLRTGNNFTFSYTFEDVPFHSSYAHSQSLDRLMNPLIDQYLYYLSRTNTPSGTTTQSRLQFSQAGASDIRDQSRNWLPGPCYRQQRVSKTSADNNNSEYSWTGATKYHLNGRDSLVNPGPAMASHKDDEEKFFPQSGVLIFGKQGSEKTNVDIEKVMITDEEEIRTTNPVATEQYGSVSTNLQRGNRQAATADVNTQGVLPGTVWQDRDVYLQGPIWAKIPHTDGHFHPSPLMGGFGLKHPPPQILIKNTPVPANPSTTFSAAKFASFITQYSTGQVSVEIEWELQKENSKRWNPEIQYTSNYNKSVNVDFTVDTNGVYSEPRPIGTRYLTRNL

SEQ ID NO: 2467 - protein, 735 aa, Artificial Sequence
  source: /note="Description of Artificial Sequence: Synthetic polypeptide"
MAADGYLPDWLEDTLSEGIRQWWKLKPGPPPPKPAERHKDDSRGLVLPGYKYLGPFNGLDKGEPVNEADAAALEHDKAYNRQLDSGDNPYLKYNHADAEFQERLKEDTSFGGNLGRAVFQAKKRVLEPLGLVEEPVKTAPGKKRPVEHSPVEPDSSSGTGKAGQQPARKRLNFGQTGDADSVPDPQPLGQPPAAPSGLGTNTMATGSGAPMADNNEGADGVGNSSGNWHCDSTWMGDRVITTSTRTWALPTYNNHLYKQISSQSGASNDNHYFGYSTPWGYFDFNRFHCHFSPRDWQRLINNNWGFRPKRLNFKLFNIQVKEVTQNDGTTTIANNLTSTVQVFTDSEYQLPYVLGSAHQGCLPPFPADVFMVPQYGYLTLNNGSQAVGRSSFYCLEYFPSQMLRTGNNFTFSYTFEDVPFHSSYAHSQSLDRLMNPLIDQYLYYLSRTNTPSGTTTQSRLQFSQAGASDIRDQSRNWLPGPCYRQQRVSKTSADNNNSEYSWTGATKYHLNGRDSLVNPGPAMASHKDDEEKFFPQSGVLIFGKQGSEKTNVDIEKVMITDEEEIRTTNPVATEQYGSVSTNLQRGNRQAATADVNTQGVLPGMVWQDRDVYLQGPIWAKIPHTDGHFHPSPLMGGFGLKHPPPQILIKNTPVPANPSTTFSAAKFASFITQYSTGQVSVEIEWELQKENSKRGNPEIQYTSNYNKSVNVDFTVDTNGVYSEPRPIGTRYLTRNL

SEQ ID NO: 2468 - protein, 735 aa, Artificial Sequence
  source: /note="Description of Artificial Sequence: Synthetic polypeptide"
MAADGYLPDWLEDTLSEGIRQWWKLKPGPPPPKPAERHKDDSRGLVLPGYKYLGPFNGLDKGEPVNEADAAALEHDKAYDRQLDSGDNPYLKYNHADAEFQERLKEDTSFGGNLGRAVFQAKKRVLEPLGLVEEPVKTAPGKKRPVEHSPVEPDSSSGTGKAGQQPARKRLNFGQTGDADSVPDPQPLGQPPAAPSGLGTNTMATGSGAPMADNNEGADGVGNSSGNWHCDSTWMGDRVITTSTRTWALPTYNNHLYKQISSQSGASNDNHYFGYSTPWGYFDFNRFHCHFSPRDWQRLINNNWGFRPKRLNFKLFNIQVKEVTQNDGTTTIANNLTSTVQVFTDSEYQLPYVLGSAHQGCLPPFPADVFMVPQYGYLTLNNGSQAVGRSSFYCLEYFPSQMLRTGNNFTFSYTFEDVPFHSSYAHSQSLDRLMNPLIDQYLYYLSRTNTPSGTTTQSRLQFSQAGASDIRDQSRNWLPGPCYRQQRVSKTSADNNNSEYPWTGATKYHLNGRDSLVNPGPAMASHKDDEEKFFPQSGVLIFGKQGSEKTNVDIEKVMITDEEEIRTTNPVATEQYGSVSTNLQRGNRQAATADVNTQGVLPGTVWQDRDVYLQGPIWAKIPHTDGHFHPSPLMGGFGLKHPPPQILIKNTPVPANPSTTFSAAKFASFITQYSTGQVSVEIEWELQKENSKRWNPEIQYTSNYNKSVNVDFTVDTNGVYSEPRPIGTRYLTRNL

SEQ ID NO: 2469 - protein, 735 aa, Artificial Sequence
  source: /note="Description of Artificial Sequence: Synthetic polypeptide"
MAADGYLPDWLEDTLSEGIRQWWKLKPGPPPPKPAERHKDDSRGLVLPGYKYLGPFNGLDKGEPVNEADAAALEHDKAYDRQLDSGDNPYLKYNHADAEFQERLKEDTSFGGNLGRAVFQAKKRVLEPLGLVEEPVKTAPGKKRPVEHSPVEPDSSSGTGKAGQQPARKRLNFGQTGDADSVPDPQPLGQPPAAPSGLGTNTMATGSGAPMADNNEGADGVGNSSGNWHCDSTWMGDRVITTSTRTWALPTYNNHLYKQISSQSGASNDNHYFGYSTPWGYFDFNRFHCHFSPRDWQRLINNNWGFRPKRLNFKLFNIQVKEVTQNDGTTTIANNLTSTVQVFTDSEYQLPYVLGSAHQGCLPPFPADVFMVPQYGYLTLNNGSQAVGRSSFYCLEYFPSQMLRTGNNFTFSYTFEDVPFHSSYAHSQSLDRLMNPLIDQYLYYLSRTNTPSGTTTQSRLQFSQAGASDIRDQSRNWLPGPCYRQQRVSKTSADNNNSEYSWTGATKYHLNGRDSLVNPGPAMASHKDDEEKFFPQSGVLIFGKQGSEKTNVGIEKVMITDEEEIRTTNPVATEQYGSVSTNLQRGNRQAATADVNTQGVLPGTVWQDRDVYLQGPIWAKIPHTDGHFHPSPLMGGFGLKHPPPQILIKNTPVPANPSTTFSAAKFASFITQYSTGQVSVEIEWELQKENSKRWNPEIQYTSNYNKSVNVDFTVDTNGVYSEPRPIGTRYLTRNL

SEQ ID NO: 2470 - protein, 735 aa, Artificial Sequence
  source: /note="Description of Artificial Sequence: Synthetic polypeptide"
MAADGYLPDWLEDTLSEGIRQWWKLKPGPPPPKPAGRHKDDSRGLVLPGYKYLGPFNGLDKGEPVNEADAAALEHDKAYDRQLDSGDNPYLKYNHADAEFQERLKEDTSFGGNLGRAVFQAKKRALEPLGLVEEPVKTAPGKKRPVEHSPVEPDSSSGTGKAGQQPARKRLNFGQTGDADSVPDPQPLGQPPAAPSGLGTNTMATGSGAPMADNNEGADGVGNSSGNWHCDSTWMGDRVITTSTRTWALPTYNNHLYKQISSQSGASNDNHYFGYSTPWGYFDFNRFHCHFSPRDWQRLINNNWGFRPKRLNFKLFNIQVKEVTQNDGTTTIANNLTSTVQVFTDSEYQLPYVLGSAHQGCLPPFPADVFMVPQYGYLTLNNGSQAVGRSSFYCLEYFPSQMLRTGNNFTFSYTFEDVPFHSSYAHSQSLDRLMNPLIDQYLYYLSRTNTPSGTTTQSRLQFSQAGASDIRDQSRNWLPGPCYRQQRVSKTSADNNNSEYSWTGATKYHLNGRDSLVNPGPAMASHKDDEEKFFPQSGVLIFGKQGSEKTNVDIEKVMITDEEEIRTTNPVATEQYGSVSTNLQRGNRQAATADVNTQGVLPGMVWQDRDVYLQGPIWAKIPHTDGHFHPSPLMGGFGLKHPPPQILIKNTPVPANPSTTFSAAKFASFITQYSTGQVSVEIEWELQKENSKRWNPEIQYTSNYNKSVNVDFTVDTNGVYSEPRPIGTRYLTRNL

SEQ ID NO: 2471 - protein, 735 aa, Artificial Sequence
  source: /note="Description of Artificial Sequence: Synthetic polypeptide"
MAADGYLPDWLEDTLSEGIRQWWKLKPGPPPPKPAERHKDDSRGLVLPGYKYLGPFNGLDKGEPVNEADAAALEHDKAYDRQLDSGDNPYLKYNHADAEFQERLKEDTSFGGNLGRAVFQAKKRVLEPLGLVEEPVKTAPGKKRPVEHSPVEPDSSSGTGKAGQQPARKRLNFGQTGDADSVPDPQPLGQPPAAPSGLGTNTMATGSGAPMADNNEGADGVGNSSGNWHCDSTWMGDRVITTSTRTWALPTYNNHLYKQISSQSGASNDNHYFGYSTPWGYFDFNRFHCHFSPRDWQRLINNNWGFRPKRLNFKLFNIQVKEVTQNDGTTTIANNLTSTVQVFTDSEYQLPYVLGSAHQGCLPPFPADVFMVPQYGYLTLNNGSQAVGRSSFYCLEYFPSQMLRTGNNFTFSYTFEDVPFHSSYAHSQSLDRLMNPLIDQYLYYLSRTNTPSGTTTQSRPQFSQAGASDIRDQSRNWLPGPCYRQQRVSKTSADNNNSEYSWTGATKYHLNGRDSLVNPGPAMASHKDDEEKFFPQSGVLIFGKQGSEKTNVDIEKVMITDEEEIRTTNPVATEQYGSVSTNLQRGNRQAATADVNTQGVLPGTVWQDRDVYLQGPIWAKIPHTDGHFHPSPLMGGFGLKHPPPQILIKNTPVPANPSTTFSAAKFASFITQYSTGQVSVEIEWELQKENSKRWNPEIQYTSNYNKSVNVDFTVDTNGVYSEPRPIGTRYLTRNL

SEQ ID NO: 2472 - protein, 735 aa, Artificial Sequence [sequence omitted]

SEQ ID NO: 2473 - protein, 735 aa, Artificial Sequence
  source: /note="Description of Artificial Sequence: Synthetic polypeptide"
MAADGYLPDWLEDTLSEGIRQWWKLKPGPPPPKPAERHKDDSRGLVLPGYKYLGPFNGLDKGEPVNEADAAALEHDKAYNRQLDSGDNPYLKYNHADAEFQERLKEDTSFGGNLGRAVFQAKKRVLEPLGLVEEPVKTAPGKKRPVEHSPVEPDSSSGTGKAGQQPARKRLNFGQTGDADSVPDPQPLGQPPAAPSGLGTNTMATGSGAPMADNNEGADGVGNSSGNWHCDSTWMGDRVITTSTRTWALPTYNNHLYKQISSQSGASNDNHYFGYSTPWGYFDFNRFHCHFSPRDWQRLINNNWGFRPKRLNFKLFNIQVKEVTQNDGTTTIANNLTSTVQVFTDSEYQLPYVLGSAHQGCLPPFPADVFMVPQYGYLTLNNGSQAVGRSSFYCLEYFPSQMLRTGNNFTFSYTFEDVPFHSSYAHSQSLDRLMNPLIDQYLYYLSRTNTPSGTTTQSRLQFSQAGASDIRDQSRNWLPGPCYRQQRVSKTSADNNNSEYSWTGATKYHLNGRDSLVNPGPAMASHKDDEEKFFPQSGVLIFGKQGSEKTNVDIEKVMITDEEEIRTTNPVATEQYGSVSTNLQRGNRQAATADVNTQGVLPGMVWQDRDVYLQGPIWAKIPHTDGHFHPSPLMGGFGLKHPPPQILIKNTPVPANPSTTFSAAKFASFITQYSTGQVSVEIEWELQKENSKRWNPEIQYTSNYNKSVNVDFTVDTNGVYSEPRPIGTRYLTRNL

SEQ ID NO: 2474 - protein, 735 aa, Artificial Sequence
  source: /note="Description of Artificial Sequence: Synthetic polypeptide"
MAADGYLPDWLEDTLSEGIRQWWKLKPGPPPPKPAERHKDDSRGLVLPGYKYLGPFNGLDKGEPVNEADAAALEHDKAYDRQLDSGDNPYLKYNHADAEFQERLKEDTSFGGNLGRAVFQAKKRVLEPLGLVEEPVKTAPGKKRPVEHSPVEPDSSSGTGKAGQQPARKRLNFGQTGDADSVPDPQPLGQPPAAPSGLGTNTMATGSGAPMADNNEGADGVGNSSGNWHCDSTWMGDRVITTSTRTWALPTYNNHLYKQISSQSGASNDNHYFGYSTPWGYFDFNRFHCHFSPRDWQRLINNNWGFRPKRLNFKLFNIQVKEVTQNDGTTTIANNLTSTVRVFTDSEYQLPYVLGSAHQGCLPPFPADVFMVPQYGYLTLNNGSQAVGRSSFYCLEYFPSQMLRTGNNFTFSYTFEDVPFHSSYAHSQSLDRLMNPLIDQYLYYLSRTNTPSGTTTQSRLQFSQAGASDIRDQSRNWLPGPCYRQQRVSKTSADNNNSEYSWTGATKYHLNGRDSLVNPGPAMASHKDDEEKFFPQSGVLIFGKQGSEKTNVDIEKVMITDEEEIRTTNPVATEQYGSVSTNLQRGNRQAATADVNTQGVLPGTVWQDRDVYLQGPIWAKIPHTDGHFHPSPLMGGFGLKHPPPQILIKNTPVPANPSTTFSAAKFASFITQYSTGQVSVEIEWELQKENSKRWNPEIQYTSNYNKSVNVDFTVDTNGVYSEPRPIGTRYLTRNL

SEQ ID NO: 2475 - protein, 735 aa, Artificial Sequence
  source: /note="Description of Artificial Sequence: Synthetic polypeptide"
MAADGYLPDWLEDTLSEGIRQWWKLKPGPPPPKPAERHKDDSRGLVLPGYKYLGPFNGLDKGEPVNEADAAALEHDKAYDRQLDSGDNPYLKYNHADAEFQERLKEDTSFGGNLGRAVFQAKKRVLEPLGLVEEPVKTAPGKKRPVEHSPVEPDSSSGTGKAGQQPARKRLNFGQTGDADSVPDPQPLGQPPAAPSGLGTNTMATGSGAPMADNNEGADGVGNSSGNWHCDSTWMGDRVITTSTRTWALPTYNNHLYKQISSQSGASNDNHYFGYSTPWGYFDFNRFHCHFSPRDWQRLINNNWGFRPKRLNFKLFNIQVKEVTQNDGTTTIANNLTSTVQVFTDSEYQLPYVLGSAHQGCLPPFPADVFMVPQYGYLTLNNGSQAVGRSSFYCLEYFPSQMLRTGNNFTFSYTFEDAPFHSSYAHSQSLDRLMNPLIDQYLYYLSRTNTPSGTTTQSRLQFSQAGASDIRDQSRNWLPGPCYRQQRVSKTSADNNNSEYSWTGATKYHLNGRDSLVNPGPAMASHKDDEEKFFPQSGVLIFGKQGSEKTNVDIEKVMITDEEEIRTTNPVATEQYGSVSTNLQRGNRQAATADVNTQGVLPGTVWQDRDVYLQGPIWAKIPHTDGHFHPSPLMGGFGLKHPPPQILIKNTPVPANPSTTFSAAKFASFITQYSTGQVSVEIEWELQKENSKRWNPEIQYTSNYNKSVNVDFTVDTNGVYSEPRPIGTRYLTRNL

SEQ ID NO: 2476 - protein, 734 aa, Artificial Sequence
  source: /note="Description of Artificial Sequence: Synthetic polypeptide"
MAADGYLPDWLEDTLSEGIRQWWKLKPGPPPKPAERHKDDSRGLVLPGYKYLGPFNGLDKGEPVNEADAAALEHDKAYDRQLDSGDNPYLKYNHADAEFQERLKEDTSFGGNLGRAVFQAKKRVLEPLGLVEEPVKTAPGKKRPVEHSPVEPDSSSGTGKAGQQPARKRLNFGQTGDADSVPDPQPLGQPPAAPSGLGTNTMATGSGAPMADNNEGADGVGNSSGNWHCDSTWMGDRVITTSTRTWALPTYNNHLYKQISSQSGASNDNHYFGYSTPWGYFDFNRFHCHFSPRDWQRLINNNWGFRPKRLNFKLFNIQVKEVTQNDGTTTIANNLTSTVQVFTDSEYQLPYVLGSAHQGCLPPFPADVFMVPQYGYLTLNNGSQAVGRSSFYCLEYFPSQMLRTGNNFTFSYTFEDVPFHSSYAHSQSLDRLMNPLIDQYLYYLSRTNTPSGTTTQSRLQFSQAGASDIRDQSRNWLPGPCYRQQRVSKTSADNNNSEYSWTGATKYHLNGRDSLVNPGPAMASHKDDEEKFFPQSGVLIFGKQGSEKTNVDIEKVMITDEEEIRTTNPVATEQYGSVSTNLQRGNRQAATADVNTQGVLPGTVWQDRDVYLQGPIWAKIPHTDGHFHPSPLMGGFGLKHPPPQILIKNTPVPANPSTTFSAAKFASFITQYSTGQVSVEIEWELQKENSKRWNPEIQYTSNYNKSVNVDFTVDTNGVYSEPRPIGTRYLTRNL

SEQ ID NO: 2477 - protein, 735 aa, Artificial Sequence
  source: /note="Description of Artificial Sequence: Synthetic polypeptide"
MAADGYLPDWLEDTLSEGIRQWWKLKPGPPPPKPAERHKDDSRGLVLPGYKYLGPFNGLDKGEPVNEADAAALEHDKAYDRQLDSGDNPYLKYNHADAEFQERLKEDTSFGGNLGRAVFQAKKRALEPLGLVEEPVKTAPGKKRPVEHSPVEPDSSSGTGKAGQQPARKRLNFGQTGDADSVPDPQPLGQPPAAPSGLGTNTMATGSGAPMADNNEGADGVGNSSGNWHCDSTWMGDRVITTSTRTWALPTYNNHLYKQISSQSGASNDNHYFGYSTPWGYFDFNRFHCHFSPRDWQRLINNNWGFRPKRLNFKLFNIQVKEVTQNDGTTTIANNLTSTVQVFTDSEYQLPYVLGSAHQGCLPPFPADVFMVPQYGYLTLNNGSQAVGRSSFYCLEYFPSQMLRTGNNFTFSYTFEDVPFHSSYAHSQSLDRLMNPLIDQYLYYLSRTNTPSGTTTQSRLRFSQAGASDIRDQSRNWLPGPCYRQQRVSKTSADNNNSEYSWTGATKYHLNGRDSLVNPGPAMASHKDDEEKFFPQSGVLIFGKQGSEKTNVDIEKVMITDEEEIRTTNPVATEQYGSVSTNLQRGNRQAATADVNTQGVLPGMVWQDRDVYLQGPIWAKIPHTDGHFHPSPLMGGFGLKHPPPQILIKNTPVPANPSTTFSAAKFASFITQYSTGQVSVEIEWELQKENSKRWNPEIQYTSNYNKSVNVDFTVDTNGVYSEPRPIGTRYLTRNL

SEQ ID NO: 2478 - protein, 735 aa, Artificial Sequence
  source: /note="Description of Artificial Sequence: Synthetic polypeptide"
MAADGYLPDWLEDTLSEGIRQWWKLKPGPPPPKPAERHKDDSRGLVLPGYKYLGPFNGLDKGEPVNEADAAALEHDKAYDRQLDSGDNPYLKYNHADAEFQERLKEDTSFGGNLGRAVFQAKKRVLEPLGLVEEPVKTAPGKKRPVEHSPVEPDSSSGTGKAGQRPARKRLNFGQTGDADSVPDPQPLGQPPAAPSGLGTNTMATGSGAPMADNNEGADGVGNSSGNWHCDSTWMGDRVITTSTRTWALPTYNNHLYKQISSQSGASNDNHYFGYSTPWGYFDFNRFHCHFSPRDWQRLINNNWGFRPKRLNFKLFNIQVKEVTQNDGTTTIANNLTSTVQVFTDSEYQLPYVLGSAHQGCLPPFPADVFMVPQYGYLTLNNGSQAVGRSSFYCLEYFPSQMLRTGNNFTFSYTFEDVPFHSSYAHSQSLDRLMNPLIDQYLYYLSRTNTPSGTTTQSRLQFSQAGASDIRDQSRNWLPGPCYRQQRVSKTSADNNNSEYSWTGATKYHLNGRDSLVNPGPAMASHKDDEEKFFPQSGVLIFGKQGSEKTNVDIEKVMITDEEEIRTTNPVATEQYGSVSTNLQRGNRQAATADVNTQGVLPGTVWQDRDVYLQGPIWAKIPHTDGHFHPSPLMGGFGLKHPPPQILIKNTPVPANPSTTFSAAKFASFITQYSTGQVSVEIEWELQKENSKRWNPEIQYTSNYNKSVNVDFTVDTNGVYSEPRPIGTRYLTRNL

SEQ ID NO: 2479 - protein, 735 aa, Artificial Sequence
  source: /note="Description of Artificial Sequence: Synthetic polypeptide"
MAADGYLPDWLEDTLSEGIRQWWKLKPGPPPPKPAERHKDDSRGLVLPGYKYLGPFNGLDKGEPVNEADAAALEHDKAYDRQLDSGDNPYLKYNHADAEFQERLKEDTSFGGNLGRAVFQAKKRVLEPLGLVEEPVKTAPGKKRPVEHSPVEPDSSSGTGKAGQQPARKRLNFGQTGDADSVPDPQPLGQPPAAPSGLGTNTMATGSGAPMADNNEGADGVGNSSGNWHCDSTWMGDRVITTSTRTWALPTYNNHLYKQISSQSGASNDNHYFGYSTPWGYFDFNRFHCHFSPRDWQRLINNNWGFRPKRLNFKLFNIQVKEVTQNDGTTTIANNLTSTVQVFTDSEYQLPYVLGSAHQGCLPPFPADVFMVPQYGYLTLNNGSQAVGRSSFYCLEYFPSQMLRTGNNFTFSYTFEDVPFHSSYAHSQSLDRLMNPLIDQYLYYLSRTNTPSGTTTQSRLQFSQAGASDIRDQSRNWLPGPCYRQQRVSKTSADNNNSEYSWTGATKYHLNGRDSLVNPGPAMASHKDDEEKFFPQSGVLIFGKQGSEKTNVDIEKVMITDEEEIRTTNPVATEQYGSVSTNLQRGNRQAATADVNTQGVLPGMVWQDRDVYLQGPIWAKIPHTDGHFHPSPLMGGFGLKHPPPQILIKNTPVPANPSTTFSAAKFASFITQYSTGQVSVEIEWELQKENSNRWNPEIQYTSNYNKSVNVDFTVDTNGVYSEPRPIGTRYLTRNL

SEQ ID NO: 2480 - protein, 735 aa, Artificial Sequence
  source: /note="Description of Artificial Sequence: Synthetic polypeptide"
MAADGYLPDWLEDTLSEGIRQWWKLKPGPPPPKPAERHKDDSRGLVLPGYKYLGPFNGLDKGEPVNEADAAALEHDKAYDRQLDSGDNPYLKYNHADAEFQERLKEDTSFGGNLGRAVFQAKKRVLEPLGLVEEPVKTAPGKKRPVEHSPVEPDSSSGTGKAGQQPARKRLNFGQTGDADSVPDPQPLGQPPAAPSGLGTNTMATGSGAPMADNNEGADGVGNSSGNWHCDSTWMGDRVITTSTRTWALPTYNNHLYKQISSQSGASNDNHYFGYSTPWGYFDFNRFHCHFSPRDWQRLINNNWGFRPKRLNFKLFNIQVKEVTQNDGTTTIANNLTSTVQVFTDSEYQLPYVLGSAHQGCLPPFPADVFMVPQYGYLTLNNGSQAVGRSSFYCLEYFPSQMLRTGNNFTFSYTFEDVPFHSSYAHSQSLDRLMNPLIDQYLYYLSRTNTPSGTTTQSRLQFSQAGASDIRDQSRNWLPGPCYRQQRVSKTSADNNNSEYSWTGATKYHLNGRDSLVNPGPAMASHKDDEEKFFPQSGVLIFGKQGSEKTNVDIEKVMITDEEEIRTTNPVATEQYGSVSTNLQRGNRQAATADVNTQGVLPGTVWQDRDVYLQGPIWAKIPHTDGHFHPSPLMGGFGLKHPPPQILIKNTPVPANPSTTFSAAKFASFITQYSTGQVGVEIEWELQKENSKRWNPEIQYTSNYNKSVNVDFTVDTNGVYSEPRPIGTRYLTRNL

SEQ ID NO: 2481 - protein, 735 aa, Artificial Sequence
  source: /note="Description of Artificial Sequence: Synthetic polypeptide"
MAADGYLPDWLEDTLSEGIRQWWKLKPGPPPPKPAERHKDDSRGLVLPGYKYLGPFNGLDKGEPVNEADAAALEHDKAYDRQLDSGDNPYLKYNHADAEFQERLKEDTSFGGNLGRAVFQAKKRVLEPLGLVEEPVKTAPGKKRPVEHSPVEPDSSSGTGKAGQQPARKRLNFGQTGDADSVPDPQPLGQPPAAPSGLGTNTMATGSGAPMADNNEGADGVGNSSGNWHCDSTWMGDRVITTSTRTWALPTYNNHLYKQISSQSGASNDNHYFGYSTPWGYFDFNRFHCHFSPRDWQRLINNNWGFRPKRLNFKLFNIQVKEVTQNDGTTTIANNLTSTVQVFTDSEYQLPYVLGSAHQGCLPPFPADVFMVPQYGYLTLNNGSQAVGRSSFYCLEYFPSQMLRTGNNFTFSYTFEDVPFHSSYAHSQSLDRLMNPLIDQYLYYLSRTNTPSGTTTQSRLQFSQAGASDIRDQSRNWLPGPCYRQQRVSKTSADNNNSEYSWTGATKYHLNGRDSLVNPGPAMASHKDDEEKFFPQSGVLIFGKQGSEKTNVDIEKVMITDEEEIRATNPVATEQCGSVSTNLQRGNRQAATADVNTQGVLPGTVWQDRDVYLQGPIWAKIPHTDGHFHPSPLMGGFGLKHPPPQILIKNTPVPANPSTTFSAAKFASFITQYSTGQVSVEIEWELQKENSKRWNPEIQYTSNYNKSVNVDFTVDTNGVYSEPRPIGTRYLTRNL

SEQ ID NO: 2482 - protein, 735 aa, Artificial Sequence
  source: /note="Description of Artificial Sequence: Synthetic polypeptide"
MAADGYLPDWLEDTLSEGIRQWWKLKPGPPPPKPAERHKDDSRGLVLPGYKYLGPFNGLDKGEPVNEADAAALEHDKAYDRQLDSGDNPYLKYNHADAEFQERLKEDTSFGGNLGRAVFQAKKRALEPLGLVEEPVKTAPGKKRPVEHSPVEPDSSSGTGKAGQQPARKRLNFGQTGDADSVPDPQPLGQPPAAPSGLGTNTMATGSGAPMADNNEGADGVGNSSGNWHCDSTWMGDRVITTSTRTWALPTYNNHLYKQISSQSGASNDNHYFGYSTPWGYFDFNRFHCHFSPRDWQRLINNNWGFRPKRLNFKLFNIQVKEVTQNDGTTTIANNLTSTVQVFTDSEYQLPYVLGSAHQGCLPPFPADVFVVPQYGYLTLNNGSQAVGRSSFYCLEYFPSQMLRTGNNFTFSYTFEDVPFHSSYAHSQSLDRLMNPLIDQYLYYLSRTNTPSGTTTQSRLQFSQAGASDIRDQSRNWLPGPCYRQQRVSKTSADNNNSEYSWTGATKYHLNGRDSLVNPGPAMASHKDDEEKFFPQSGVLIFGKQGSEKTNVDIEKVMITDEEEIRTTNPVATEQYGSVSTNLQRGNRQAATADVNTQGVLPGMVWQDRDVYLQGPIWAKIPHTDGHFHPSPLMGGFGLKHPPPQILIKNTPVPANPSTTFSAAKFASFITQYSTGQVSVEIEWELQKENSKRWNPEIQYTSNYNKSVNVDFTVDTNGVYSEPRPIGTRYLTRNL

SEQ ID NO: 2483 - protein, 735 aa, Artificial Sequence
  source: /note="Description of Artificial Sequence: Synthetic polypeptide"
MAADGYLPDWLEDTLSEGIRQWWKLKPGPPPPKPAERHKDDSRGLVLPGYKYLGPFNGLDKGEPVNEADAAALEHDKAYDRQLDSGDNPYLKYNHADAEFQERLKEDTSFGGNLGRAVFQAKKRVLEPLGLVEEPVKTAPGKKRPVEHSPVEPDSSSGTGKAGQQPARKRLNFGQTGDADSVPDPQPLGQPPAAPSGLGTNTMATGSGAPMADNNEGADGVGNSSGNWHCDSTWMGDRVITTSTRTWALPTYNNHLYKQISSQSGASNDNHYFGYSTPWGYFDFNRFHCHFSPRDWQRLINNNWGFRPKRLNFKLFNIQVKEVTQNDGTTTIANNLTSTVQVFTDSEYQLPYVLGSAHQGCLPPFPADVFMVPQYGYLTLNNGSQAVGRSSFYCLEYFPSQMLRTGNNFTFSYTFEDVPFHSSYAHSQSLDRLMNPLIDQYLYYLSRTNTPSGTTTQSRLQFSQAGASDIRDQSRNWLPGPCYRQQRVSKTSADNNNSEYSWTGATKYHLNGRDSLVNPGPAMASHKDDEEKFFPQSGVLIFGKQGSEKTNVDIEKVMITDEEEIRTTNPVATEQYGSVSTNLQRGNRQAATADVNTQGVLPGTVWQDRDVYLQGPIWAKIPHTDGHFHPSPLVGGFGLKHPPPQILIKNTPVPANPSTTFSAAKFASFITQYSTGQVSVEIEWELQKENSKRWNPEIQYTSNYNKSVNVDFTVDTNGVYSEPRPIGTRYLTRNL

SEQ ID NO: 2484 - protein, 735 aa, Artificial Sequence
  source: /note="Description of Artificial Sequence: Synthetic polypeptide"
MAADGYLPDWLEDTLSEGIRQWWKLKPGPPPPKPAERHKDDSRGLVLPGYKYLGPFNGLDKGEPVNEADAAALEHDKAYDRQLDSGDNPYLKYNHADAEFQERLKEDTSFGGNLGRAVFQAKKRVLEPLGLVEEPVKTAPGKKRPVEHSPVEPDSSSGTGKAGQQPARKRLNFGQTGDADSVPDPQPLGQPPAAPSGLGTNTMATGSGAPMADNNEGADGVGNSSGNWHCDSTWMGDRVITTSTRTWALPTYNNHLYKQISSQSGASNDNHYFGYSTPWGYFDFNRFHCHFSPRDWQRLINNNWGFRPKRLNFKLFNIQVKEVTQNDGTTTIANNLTSTVQVFTDSEYQLPYVLGSAHQGCLPPFPADVFMVPQYGYLTLNNGSQAVGRSSFYCLEYFPSQMLRTGNNFTFSYTFEDVPFHSSYAHSQSLDRLMNPLIDQYLYYLSRTNTPSGTTTQSRLQFSQAGASDIRDQSRNWLPGPCYRQQRVSKTSADNNNSEYSWTGATKYHLNGRDSLVNPGPAMASHKDDEEKFFPQSGVLIFGKQGSEKTNVDIEKVMITDEEEIRTTNPVATEQYGSVSTNLQRGNRQAATADVNTQGVLPGTVWQDRDVYLQGPIWAKIPHTDGHFHPSPLMGGFGLKHPPPQILIKNTPVPANPSTTLSAAKFASFITQYSTGQVSVEIEWELQKENSKRWNPEIQYTSNYNKSVNVDFTVDTNGVYSEPRPIGTRYLTRNL

SEQ ID NO: 2485 - protein, 735 aa, Artificial Sequence
  source: /note="Description of Artificial Sequence: Synthetic polypeptide"
MAADGYLPDWLEDTLSEGIRQWWKLKPGPPPPKPAERHKDDSRGLVLPGYKYLGPFNGLDKGEPVNEADAAALEHDKAYDRQLDSGDNPYLKYNHADAEFQERLKEDTSFGGNLGRAVFQAKKRVLEPLGLVEEPVKTAPGKKRPVEHSPVEPDSSSGTGKAGQQPARKRLNFGQTGDADSVPDPQPLGQPPAAPSGLGTNTMATGSGAPMADNNEGADGVGNSSGNWHCDSTWMGDRVITTSTRTWALPTYNNHLYKQISSQSGASNDNHYFGYSTPWGYFDFNRFHCHFSPRDWQRLINNNWGFRPKRLNFKLFNIQVKEVTQNDGTTTIANNLTSTVQVFTDSEYQLPYVLGSAHQGCLPPFPADVFMVPQYGYLTLNNGSQAVGRSSFYCLEYFPSQMLRTGNNFTFSYTFEDVPFHSSYAHSQSLDRLMNPLIDQYLYYLSRTNTPSGTTTQSRLQFSQAGASDIRDQSRNWLPGPCYRQQRVSKTSADNNNSEYSWTGATKYHLNGRDSLVNPGPAMASHKDDEEKFFPQSGVLIFGKQGSEKTNVDIEKVMITDEGEIRTTNPVATEQYGSVSTNLQRGNRQAATADVNTQGVLPGTVWQDRDVYLQGPIWAKIPHTDGHFHPSPLMGGFGLKHPPPQILIKNTPVPANPSTTFSAAKFASFITQYSTGQVSVEIEWELQKENSKRWNPEIQYTSNYNKSVNVDFTVDTNGVYSEPRPIGTRYLTRNL

SEQ ID NO: 2486 - protein, 735 aa, Artificial Sequence
  source: /note="Description of Artificial Sequence: Synthetic polypeptide"
MAADGYLPDWLEDTLSEGIRQWWKLKPGPPPPKPAERHKDDSRGLVLPGYKYLGPFNGLDKGEPVNEADAAALEHDKAYDRQLDSGDNPYLKYNHADAEFQERLKEDTSFGGNLGRAVFQAKKRALEPLGLVEEPVKTAPGKKRPVEHSPVEPDSSSGTGKAGQQPARKRLNFGQTGDADSVPDPQPLGQPPAAPSGLGTNTMATGSGAPMADNNEGADGVGNSSGNWHCDSTWMGDRVITTSTRTWALPTYNNHLYKQISSQSGASNDNHYFGYSTPWGYFDFNRFHCHFSPRDWQRLINNNWGFRPKRLNFKLFNIQVKEVTQNDGTTTIANNLTSTVQVFTDSEYQLPYVLGSAHQGCLPPFPADVFMVPQYGYLTLNNGSQAVGRSSFYCLEYFPSQMLRTGNNFTFSYTFEDVPFHSSYAHSQSLDRLMNPLIDQYLYYLSRTNTPSGTTTQSRLQFSQAGASDIRDQSRNWLPGPCYRQQRVSKTSADNNNSEYSWTGATKYHLNGRDSLVNPGPAMASHKDDEEKFFPQSGVLIFGKQGSEKTNVDIEKVMITDEEEIRTTNPVATEQYGSVSTNLQRGNRQAATADVNTQGVLPGMVWQDRDVYLQGPIWAKIPHTDGHFHPSPLMGGFGLKHPPPQILIKNTPVPANPSTTFSAAKFASFITQYSAGQVSVEIEWELQKENSKRWNPEIQYTSNYNKSVNVDFTVDTNGVYSEPRPIGTRYLTRNL

SEQ ID NO: 2487 - protein, 735 aa, Artificial Sequence
  source: /note="Description of Artificial Sequence: Synthetic polypeptide"
MAADGYLPDWLEDTLSEGIRQWWKLKPGPPPPKPAERHKDDSRGLVLPGYKYLGPFNGLDKGEPVNEADAAALEHDKAYDRQLDSGDNPYLKYNHADAEFQERLKEDTSFGGNLGRAVFQAKKRVLEPLGLVEEPVKTAPGKKRPVEHSPVEPDSSSGTGKAGQQPARKRLNFGQTGDADSVPDPQPLGQPPAAPSGLGTNTMATGSGAPMADNNEGADGVGNSSGNWHCDSTWMGDRVITTSTRTWALPTYNNHLYKQISSQSGASNDNHYFGYSTPWGYFDFNRFHCHFSPRDWQRLINNNWGFRPKRLNFKLFNIQVKEVTQNDGTTTIANNLTSTVQVFTDSEYQLPYVLGSAHQGCLPPFPADVFMVPQYGYLTLNNGSQAVGRSSFYCLEYFPSQMLRTGNNFTFSYTFEDVPFHSSYAHSQSLDRLMNPLIDQYLYYLSRTNTPSGTTTQSRLQFSQAGASDIRDQSRNWLPGPCYRQQRVSKTSADNNNSEYSWTGATEYHLNGRDSLVNPGPAMASHKDDEEKFFPQSGVLIFGKQGSEKTNVDIEKVMITDEEEIRTTNPVATEQYGSVSTNLQRGNRQAATADVNTQGVLPGTVWQDRDVYLQGPIWAKIPHTDGHFHPSPLMGGFGLKHPPPQILIKNTPVPANPSTTFSAAKFASFITQYSTGQVSVEIEWELQKENSKRWNPEIQYTSNYNKSVNVDFTVDTNGVYSEPRPIGTRYLTRNL

SEQ ID NO: 2488 - protein, 735 aa, Artificial Sequence
  source: /note="Description of Artificial Sequence: Synthetic polypeptide"
MAADGYLPDWLEDTLSEGIRQWWKLKPGPPPPKPAERHKDDSRGLVLPGYKYLGPFNGLDKGEPVNEADAAALEHGKAYDRQLDSGDNPYLKYNHADAEFQERLKEDTSFGGNLGRAVFQAKKRVLEPLGLVEEPVKTAPGKKRPVEHSPVEPDSSSGTGKAGQQPARKRLNFGQTGDADSVPDPQPLGQPPAAPSGLGTNTMATGSGAPMADNNEGADGVGNSSGNWHCDSTWMGDRVITTSTRTWALPTYNNHLYKQISSQSGASNDNHYFGYSTPWGYFDFNRFHCHFSPRDWQRLINNNWGFRPKRLNFKLFNIQVKEVTQNDGTTTIANNLTSTVQVFTDSEYQLPYVLGSAHQGCLPPFPADVFMVPQYGYLTLNNGSQAVGRSSFYCLEYFPSQMLRTGNNFTFSYTFEDVPFHSSYAHSQSLDRLMNPLIDQYLYYLSRTNTPSGTTTQSRLQFSQAGASDIRDQSRNWLPGPCYRQQRVSKTSADNNNSEYSWTGATKYHLNGRDSLVNPGPAMASHKDDEEKFFPQSGVLIFGKQGSEKTNVDIEKVMITDEEEIRTTNPVATEQYGSVSTNLQRGNRQAATADVNTQGVLPGTVWQDRDVYLQGPIWAKIPHTDGHFHPSPLMGGFGLKHPPPQILIKNTPVPANPSTTFSAAKFASFITQYSTGQVSVEIEWELQKENSKRWNPEIQYTSNYNKSVNVDFTVDTNGVYSEPRPIGTRYLTRNL

SEQ ID NO: 2489 - protein, 735 aa, Artificial Sequence
  source: /note="Description of Artificial Sequence: Synthetic polypeptide"
MAADGYLPDWLEDTLSEGIRQWWKLKPGPPPPKPAERHKDDSRGLVLPGYKYLGPFNGLDKGEPVNEADAAALEHDKAYDRQLDSGDNPYLKYNHADAEFQERLKEDTSFGGNLGRAVFQAKKRALEPLGLVEEPVKTAPGKKRPVEHSPVEPDSSSGTGKAGQQPARKRLNFGQTGDADSVPDPQPLGQPPAAPSGLGTNTMATGSGAPMADNNEGADGVGNSSGNWHCDSTWMGDRVITTSTRTWALPTYNNHLYKQISSQSGASNDNHYFGYSTPWGYFDFNRFHCHFSPRDWQRLINNNWGFRPKRLNFKLFNIQVKEVTQNDGTTTIANNLTSTVQVFTDSEYQLPYVLGSAHQGCLPPFPADVFMVPQYGYLTLNNGSQAVGRSSFYCLEYFPSQMLRTGNNFTFSYTFEDVPFHSSYAHSQSLDRLMNPLVDQYLYYLSRTNTPSGTTTQSRLQFSQAGASDIRDQSRNWLPGPCYRQQRVSKTSADNNNSEYSWTGATKYHLNGRDSLVNPGPAMASHKDDEEKFFPQSGVLIFGKQGSEKTNVDIEKVMITDEEEIRTTNPVATEQYGSVSTNLQRGNRQAATADVNTQGVLPGMVWQDRDVYLQGPIWAKIPHTDGHFHPSPLMGGFGLKRPPPQILIKNTPVPANPSTTFSAAKFASFITQYSTGQVSVEIEWELQKENSKRWNPEIQYTSNYNKSVNVDFTVDTNGVYSEPRPIGTRYLTRNL

SEQ ID NO: 2490 - protein, 735 aa, Artificial Sequence
  source: /note="Description of Artificial Sequence: Synthetic polypeptide"
MAADGYLPDWLEDTLSEGIRQWWKLKPGPPPPKPAERHKDDSRGLVLPGYKYLGPFNGLDKGEPVNEADAAALEHDKAYDRQLDSGDNPYLKYNHADAEFQERLKEDTSFGGNLGRAVFQAKKRVLEPLGLVEEPVKTAPGKKRPVEHSPVEPDSSSGTGKAGQQPARKRLNFGQTGDADSVPDPQPLGQPPAAPSGLGTNTMATGSGAPMADNNEGADGVGNSSGNWHCDSTWMGDRVITTSTRTWALPTYNNHLYKQISSQSGASNDNHYFGYSTPWGYFDFNRFHCHFSPRDWQRLINNNWGFRPKRLNFKLFNIQVKEVTQNDGTTTIANNLTSTVQVFTDSEYQLPYVLGSAHQGCLPPFPADVFMVPQYGYLTLNNGSQAVGRSSFYCLEYFPSQMLRTGNNFTFSYTFEDVPFHSSYAHSQSLDRLMNPLIDQYLYYLSRTNTPSGTTTQSRLQFSQAGASDIRDQSRNWLPGPCYRQQRVSKTSADNNNSEYSWTGATKYHLNGRDSLVNPGPAMASHKDDEEKFFPQSGVLIFGKQGSEKTNVDIEKVMITDEEEIRTTNPVATEQYGSVSTNLQRGNRQAATADVNTQGVLPGTVWQDRDVYLQGPIWAKIPHTDGHFHPSPLMGGFGLKHPPPQILIKNTPVPANPSTTFSAAKFASFITQHSTGQVSVEIEWELQKENSKRWNPEIQYTSNYNKSVNVDFTVDTNGVYSEPRPIGTRYLTRNL

SEQ ID NO: 2491 - protein, 735 aa, Artificial Sequence
  source: /note="Description of Artificial Sequence: Synthetic polypeptide"
MAADGYLPDWLEDTLSEGIRQWWKLKPGPPPPKPAERHKDDSRGLVLPGYKYLGPFNGLDKGEPVNEADAAALEHDKAYDRQLDSGDDPYLKYNHADAEFQERLKEDTSFGGNLARAVFQAKKRVLEPLGLVEEPVKTAPGKKRPVEHSPAEPDSSSGTGKAGQQPARKRLNFGQTGDADSVPDPQPLGQPPAAPSGLGTNTMATGSGAPMADNNEGADGVGNSSGNWHCDSTWMGDRVITTSTRTWALPTYNNHLYKQISSQSGASNDNHYFGYSTPWGYFDFNRFHCHFSPRDWQRLINNNWGFRPKRLSFKLFNIQVKEVTQNDGTTTIANNLTSTVQVFTDSEYQLPYVLGSAHQGCLPPFPADVFMVPQYGYLTLNNGSQAVGRSSFYCLEYFPSQMLRTGNNFTFSYTFEDVPFHSSYAHSQSLDRLMNPLIDQYLYYLSKTNAPSGTTTMSRLQFSQAGASDIRDQSRNWLPGPCYRQQRVSKTAADNNNSDYSWTGATKYHLNGRDSLVNPGPAMASHKDDEEKYFPQSGVLIFGKQGSNKTNVDIEKVMITDEEEIRTTNPVATEQYGSVSTNLQSGNTQAATSDVNTQGVLPGMVWQDRDVYLQGPIWAKIPHTDGHFHPSPLMGGFGLKHPPPQILIKNTPVPANPSTTFSAAKFASFITQYSTGQVSVEIEWELQKENSKRWNPEIQYTSNYNKSVNVDFTVDTNGVYSEPRPIGTRYLTRNL

SEQ ID NO: 2492 - protein, 735 aa, Artificial Sequence
  source: /note="Description of Artificial Sequence: Synthetic polypeptide"
MAADGYLPDWLEDTLSEGIRQWWKLKPGPPPPKPAERHKDDSRGLVLPGYKYLGPFNGLDKGEPVNEADAAALEHDKAYDRQLDSGDNPYLKYNHADAEFQERLKEDTSFGGNLGRAVFQAKKRVLEPLGLVEEPVKTAPGKKRPVEHSPVEPDSSSGTGKAGQQPARKRLNFGQTGDADSVPDPQPLGQPPAAPSGLGTNTMATGSGAPMADNNEGADGVGNSSGNWHCDSTWMGDRVITTSTRTWALPTYNNHLYKQISSQSGASNDNHYFGYSTPWGYFDFNRFHCHFSPRDWQRLINNNWGFRPKRLNFKLFNIQVKEVTQNDGTTTIANNLTSTVQVFTDSEYQLPYVLGSAHQGCLPPFPADVFMVPQYGYLTLNNGSQAVGRSSFYCLEYFPSQMLRTGNNFTFSYTFEDVPFHSSYAHSQSLDRLMNPLIDQYLYYLSRTNTPSGTTTQPRLQFSQAGASDIRDQSRNWLPGPCYRQQRVSKTSADNNNSEYSWTGATKYHLNGRDSLVNPGPAMASHKDDEEKFFPQSGVLIFGKQGSEKTNVDIEKVMITDEEEIRTTNPVATEQYGSVSTNLQRGNRQAATADVNTQGVLPGTVWQDRDVYLQGPIWAKIPHTDGHFHPSPLMGGFGLKHPPPQILIKNTPVPANPSTTFSAAKFASFITQYSTGQVSVEIEWELQKENSKRWNPEIQYTSNYNKSVNVDFTVDTNGVYSEPRPIGTRYLTRNL

SEQ ID NO: 2493 - protein, 735 aa, Artificial Sequence
  source: /note="Description of Artificial Sequence: Synthetic polypeptide"
MAADGYLPDWLEDTLSEGIRQWWKLKPGPPPPKPAERHKDDSRGLVLPGYKYLGPFNGLDKGEPVNEADAAALEHDKAYDRQLDSGDNPYLKYNHADAEFQERLKEDTSFGGNLGRAVFQAKKRVLEPLGLVEEPVKTAPGKKRPVEHSPVEPDSSSGTGKAGQQPARKRLNFGQTGDADSVPDPQPLGQPPAAPSGLGTNTMATGSGAPMADNNEGADGVGNSSGNWHCDSTWMGDRVITTSTRTWALPTYNNHLYKQISSQSGASNDNHYFGYSTPWGYFDFNRFHCHFSPRDWQRLINNNWGFRPKRLNFKLFNIQVKEVTQNDGTTTIANNLTSTVQVFTDSEYQLPYVLGSAHQGCLPPFPADVFMVPQYGYLTLNNGSQAVGRSSFYCLEYFPSQMLRTGNNFTFSYTFEDVPFHSSYAHSQSLDRLMNPLIDQYLYYLSRTNTPSGTTTQSRLQFSQAGASDIRDQSRNWLPGPCYRQQRVSKTSADNNNSEYLWTGATKYHLNGRDSLVNPGPAMASHKDDEEKFFPQSGVLIFGKQGSEKTNVDIEKVMITDEEEIRTTNPVATEQYGSVSTNLQRGNRQAATADVNTQGVLPGTVWQDRDVYLQGPIWAKIPHTDGHFHPSPLMGGFGLKHPPPQILIKNTPVPANPSTTFSAAKFASFITQYSTGQVSVEIEWELQKENSKRWNPEIQYTSNYNKSVNVDFTVDTNGVYSEPRPIGTRYLTRNL

SEQ ID NO: 2494 - protein, 735 aa, Artificial Sequence
  source: /note="Description of Artificial Sequence: Synthetic polypeptide"
MAADGYLPDWLEDTLSEGIRQWWKLKPGPPPPKPAERHKDDSRGLVLPGYKYLGPFNGLDKGEPVNEADAAALEHDKAYDRQLDSGDNPYLKYNHADAEFQERLKEDTSFGGNLGRAVFQAKKRVLEPLGLVEEPVKTAPGKKRPVEHSPVEPDSSSGTGKAGQQPARKRLNFGQTGDADSVPDPQPLGQPPAAPSGLGTNTMATGSGAPMADNNEGADGVGNSSGNWHCDSTWMGDRVITTSTRTWALPTYNNHLYKQISSQSGASNDNHYFGYSTPWGYFDFNRFHCHFSPRDWQRLINNNWGFRPKRLNFKPFNIQVKEVTQNDGTTTIANNLTSTVQVFTDSEYQLPYVLGSAHQGCLPPFPADVFMVPQYGYLTLNNGSQAVGRSSFYCLEYFPSQMLRTGNNFTFSYTFEDVPFHSSYAHSQSLDRLMNPLIDQYLYYLSRTNTPSGTTTQSRLQFSQAGASDIRDQSRNWLPGPCYRQQRVSKTSADNNNSEYSWTGATKYHLNGRDSLVNPGPAMASHKDDEEKFFPQSGVLIFGKQGSEKTNVDIEKVMITDEEEIRTTNPVATEQYGSVSTNLQRGNRQAATADVNTQGVLPGTVWQDRDVYLQGPIWAKIPHTDGHFHPSPLMGGFGLKHPPPQILIKNTPVPANPSTTFSAAKFASFITQYSTGQVSVEIEWELQKENSKRWNPEIQYTSNYNKSVNVDFTVDTNGVYSEPRPIGTRYLTRNL

SEQ ID NO: 2495 - protein, 735 aa, Artificial Sequence
  source: /note="Description of Artificial Sequence: Synthetic polypeptide"
MAADGYLPDWLEDTLSEGIRQWWKLKPGPPPPKPAERHKDDSRGLVLPGYKYLGPFNGLDKGEPVNEADAAALEHDKAYDRQLDSGDNPYLKYNHADAEFQERLKEDTSFGGNLGRAVFQAKKRVLEPLGLVEEPVKTAPGKKRPVEHSPVEPDSSSGTGKAGQQPARKRLNFGQTGDADSVPDPQPLGQPPAAPSGLGTNTMATGSGAPMADNNEGADGVGNSSGNWHCDSTWMGDRVITTSTRTWALPTYNNHLYKQISSQSGASNDNHYFGYSTPWGYFDFNRFHCHFSPRDWQRLINNNWGFRPKRLNFKLFNIQVKEVTQNDGTTTIANNLTSTVQVFTDSEYQLPYVLGSAHQGCLPPFPADVFMVPQYGYLTLNNGSQAVGRSSFYCLEYFPSQMLRTGNNFTFSYTFEDVPFHSSYAHSQSLDRLMNPLIDQYPYYLSRTNTPSGTTTQSRLQFSQAGASDIRDQSRNWLPGPCYRQQRVSKTSADNNNSEYSWTGATKYHLNGRDSLVNPGPAMASHKDDEEKFFPQSGVLIFGKQGSEKTNVDIEKVMITDEEEIRTTNPVATEQYGSVSTNLQRGNRQAATADVNTQGVLPGTVWQDRDVYLQGPIWAKIPHTDGHFHPSPLMGGFGLKHPPPQILIKNTPVPANPSTTFSAAKFASFITQYSTGQVSVEIEWELQKENSKRWNPEIQYTSNYNKSVNVDFTVDTNGVYSEPRPIGTRYLTRNL

SEQ ID NO: 2496 - protein, 735 aa, Artificial Sequence
  source: /note="Description of Artificial Sequence: Synthetic polypeptide"
MAADGYLPDWLEDTLSEGIRQWWKLKPGPPPPKPAERHKDDSRGLVLPGYKYLGPFNGLDKGEPVNEADAAALEHDKAYDRQLDSGDNPYLKYNHADAEFQERLKEDTSFGGNLGRAVFQAKKRALEPLGLVEEPVKTAPGKKRPVEHSPVEPDSSSGTGKAGQQPARKRLNFGQTGDADSVPDPQPLGQPPAAPSGLGTNTMATGSGAPMADNNEGADGVGNSSGNWHCDSTWMGDRVITTSTRTWALPTYNNHLYKQISSQSGASNDNHYFGYSTPWGYFDFNRFHCHFSPRDWQRLINNNWGFRPKRLNFKLFNIQVKEVTQNDGTTTIANNLTSTVQVFTDSEYQLPYVLGSAHQGCLPPFPADVFMVPQYGYLTLNNGSQAVGRSSFYCLEYFPSQMLRTGNNFTFSYTFEDVPFHSSYAHSQSLDRLMNPLIDQYLYYLSRTNTPSGTTTQSRLQFSQAGASDIRDQSRNWLPGPCYRQQRVSKTSADNNNSEYSWTGATKYHLNGRDSLVNPGPAMASHKDDEEKFFPQSGVLIFGKQGSEKTNVDIEKVMITDEEEIRTTNPVATEQYGSVSTNLQRGNRQAATADVNTQGVLPGTVWQDRDVYLQGPIWAKIPHTDGHFHPSPLMGGFGLKHPPPQILIKNTPVPANPSTTFSAAKFASFITQYSTGQVSVEIEWELQKENSKRWNPEIQYTSNYNKSVNVDFTVDTNGVYSEPRPIGTRYLTRNL

SEQ ID NO: 2497 - protein, 735 aa, Artificial Sequence
  source: /note="Description of Artificial Sequence: Synthetic polypeptide"
MAADGYLPDWLEDTLSEGIRQWWKLKPGPPPPKPAERHKDDSRGLVLPGYKYLGPFNGLDKGEPVNEADAAALEHDKAYDRQLDSGDNPYLKYNHADAEFQERLKEDTSFGGNLGRAVFQAKKRVLEPLGLVGEPVKTAPGKKRPVEHSPVEPDSSSGTGKAGQQPARKRLNFGQTGDADSVPDPQPLGQPPAAPSGLGTNTMATGSGAPMADNNEGADGVGNSSGNWHCDSTWMGDRVITTSTRTWALPTYNNHLYKQISSQSGASNDNHYFGYSTPWGYFDFNRFHCHFSPRDWQRLINNNWGFRPKRLNFKLFNIQVKEVTQNDGTTTIANNLTSTVQVFTDSEYQLPYVLGSAHQGCLPPFPADVFMVPQYGYLTLNNGSQAVGRSSFYCLEYFPSQMLRTGNNFTFSYTFEDVPFHSSYAHSQSLDRLMNPLIDQYLYYLSRTNTPSGTTTQSRLQFSQAGASDIRDQSRNWLPGPCYRQQRVSKTSADNNNSEYSWTGATKYHLNGRDSLVNPGPAMASHKDDEEKFFPQSGVLIFGKQGSEKTNVDIEKVMITDEEEIRTTNPVATEQYGSVSTNLQRGNRQAATADVNTQGVLPGMVWQDRDVYLQGPIWAKIPHTDGHFHPSPLMGGFGLKHPPPQILIKNTPVPANPSTTFSAAKFASFITQYSTGQVSVEIEWELQKENSKRWNPEIQYTSNYNKSVNVDFTVDTNGVYSEPRPIGTRYLTRNL

SEQ ID NO: 2498 - protein, 735 aa, Artificial Sequence
  source: /note="Description of Artificial Sequence: Synthetic polypeptide"
MAADGYLPDWLEDTLSEGIRQWWKLKPGPPPPKPAERHKDDSRGLVLPGYKYLGPFNGLDKGEPVNEADAAALEHDKAYDRQPDSGDNPYLKYNHADAEFQERLKEDTSFGGNLGRAVFQAKKRVLEPLGLVEEPVKTAPGKKRPVEHSPVEPDSSSGTGKAGQQPARKRLNFGQTGDADSVPDPQPLGQPPAAPSGLGTNTMATGSGAPMADNNEGADGVGNSSGNWHCDSTWMGDRVITTSTRTWALPTYNNHLYKQISSQSGASNDNHYFGYSTPWGYFDFNRFHCHFSPRDWQRLINNNWGFRPKRLNFKLFNIQVKEVTQNDGTTTIANNLTSTVQVFTDSEYQLPYVLGSAHQGCLPPFPADVFMVPQYGYLTLNNGSQAVGRSSFYCLEYFPSQMLRTGNNFTFSYTFEDVPFHSSYAHSQSLDRLMNPLIDQYLYYLSRTNTPSGTTTQSRLQFSQAGASDIRDQSRNWLPGPCYRQQRVSKTSADNNNSEYSWTGATKYHLNGRDSLVNPGPAMASHKDDEEKFFPQSGVLIFGKQGSEKTNVDIEKVMITDEEEIRTTNPVATEQYGSVSTNLQRGNRQAATADVNTQGVLPGTVWQDRDVYLQGPIWAKIPHTDGHFHPSPLMGGFGLKHPPPQILIKNTPVPANPSTTFSAAKFASFITQYSTGQVSVEIEWELQKENSKRWNPEIQYTSNYNKSVNVDFTVDTNGVYSEPRPIGTRYLTRNL

SEQ ID NO: 2499 - protein, 735 aa, Artificial Sequence
  source: /note="Description of Artificial Sequence: Synthetic polypeptide"
MAADGYLPDWLEDTLSEGIRQWWKLKPGPPPPKPAERHKDDSRGLVLPGYKYLGPFNGLDKGEPVNEADAAALEHDKAYDRQLDSGDNPYLKYNHADAEFQERLKEDTSFGGNLGRAVFQAKKRVLEPLGLVEEPVKTAPGKKRPVEHSPVEPDSSSGTGKAGQQPARKRLNFGQTGDADSVPDPQPLGQPPAAPSGLGTNTMATGSGAPMADNNEGADGVGNSSGNWHCDSTWMGDRVITTSTRTWALPTYNNHLYKQISSQSGASNDNHYFGYSTPWGYFDFNRFHCHFSPRDWQRLINNNWGFRPKRLNFKLFNIQVKEVTQNDGTTTIANNLTSTVQVFTDSEYQLPYVLGSAHQGCLPPFPADVFMVPQYGYLTLNNGSQAVGRSSFYCLEYFPSQMLRTGNNFTFSYTFEDVPFHSSYAHSQSLDRLMNPLIDQYLYYLSRTNTPSGTTTQSRLQFSQAGASDIRDQSRNWLPGPCYRQQRVSKTSADNNNSEYSWTGATKYHLNGRDSLVNPGPAMASHKDDEEKFFPQSGVLIFGKQGSEKTNVDIEKVMITDEEEIRTTNPVATEQYGSVSTNLQRGNRQAATADVNTQGVLPGMVWQDRDVYLQGPIWAKIPHTDGHFHPSPLMGGFGLKHPPPQILIKNTPVPANPSTTFSAAKFASSITQYSTGQVSVEIEWELQKENSKRWNPEIQYTSNYNKSVNVDFTVDTNGVYSEPRPIGTRYLTRNL

SEQ ID NO: 2500 - protein, 735 aa, Artificial Sequence
  source: /note="Description of Artificial Sequence: Synthetic polypeptide"
MAADGYLPDWLEDTLSEGIRQWWKLKPGPPPPKPAERHKDDSRGLVLPGYKYLGPFNGLDKGEPVNEADAAALEHDKAYDRQLDSGDNPYLKYNHADAEFQERLKEDTSFGGNLGRAVFQAKKRVLEPLGLVEEPVKTAPGKKRPVEHSPVEPDSSSGTGKAGQQPARKRLNFGQTGDADSVPDPQPLGQPPAAPSGLGTNTMATGSGAPMADNNEGADGVGNSSGNWHCDSTWMGDRVITTSTRTWALPTYNNHLYKQISSQSGASNDNHYFGYSTPWGYFDLNRFHCHFSPRDWQRLINNNWGFRPKRLNFKLFNIQVKEVTQNDGTTTIANNLTSTVQVFTDSEYQLPYVLGSAHQGCLPPFPADVFMVPQYGYLTLNNGSQAVGRSSFYCLEYFPSQMLRTGNNFTFSYTFEDVPFHSSYAHSQSLDRLMNPLIDQYLYYLSRTNTPSGTTTQSRLQFSQAGASDIRDQSRNWLPGPCYRQQRVSKTSADNNNSEYSWTGATKYHLNGRDSLVNPGPAMASHKDDEEKFFPQSGVLIFGKQGSEKTNVDIEKVMITDEEEIRTTNPVATEQYGSVSTNLQRGNRQAATADVNTQGVLPGTVWQDRDVYLQGPIWAKIPHTDGHFHPSPLMGGFGLKHPPPQILIKNTPVPANPSTTFSAAKFASFITQYSTGQVSVEIEWELQKENSKRWNPEIQYTSNYNKSVNVDFTVDTNGVYSEPRPIGTRYLTRNL

SEQ ID NO: 2501 - protein, 735 aa, Artificial Sequence
  source: /note="Description of Artificial Sequence: Synthetic polypeptide"
MAADGYLPDWLEDTLSEGIRQWWKLKPGPPPPKPAERHKDDSRGLVLPGYKYLGPFNGLDKGEPVNEADAAALEHDKAYDRQLDSGDNPYLKYNHADAEFQERLKEDTSFGGNLGRAVFQAKKRVLEPLGLVEEPVKTAPGKKRPVEHSPVEPDSSSGTGKAGQQPARKRLNFGQTGDADSVPDPQPLGQPPAAPSGLGTNTMATGSGAPMADNNEGADGVGNSSGNWHCDSTWMGDRVITTSTRTWALPTYNNHLYKQISSQSGASNDNRYFGYSTPWGYFDFNRFHCHFSPRDWQRLINNNWGFRPKRLNFKLFNIQVKEVTQNDGTTTIANNLTSTVQVFTDSEYQLPYVLGSAHQGCLPPFPADVFMVPQYGYLTLNNGSQAVGRSSFYCLEYFPSQMLRTGNNFTFSYTFEDVPFHSSYAHSQSLDRLMNPLIDQYLYYLSRTNTPSGTTTQSRLQFSQAGASDIRDQSRNWLPGPCYRQQRVSKTSADNNNSEYSWTGATKYHLNGRDSLVNPGPAMASHKDDEEKFFPQSGVLIFGKQGSEKTNVDIEKVMITDEEEIRTTNPVATEQYGSVSTNLQRGNRQAATADVNTQGVLPGTVWQDRDVYLQGPIWAKIPHTDGHFHPSPLMGGFGLKHPPPQILIKNTPVPANPSTTFSAAKFASFITQYSTGQVSVEIEWELQKENSKRWNPEIQYTSNYNKSVNVDFTVDTNGVYSEPRPIGTRYLTRNL

SEQ ID NO: 2502 - protein, 735 aa, Artificial Sequence
  source: /note="Description of Artificial Sequence: Synthetic polypeptide"
MAADGYLPDWLEDTLSEGIRQWWKLKPGPPPPKPAERHKDDSRGLVLPGYKYLGPFNGLDKGEPVNEADAAALEHDKAYDRQLDSGDNPYLKYNHADAEFQERLKEDTSFGGNLGRAVFQAKKRVLEPLGLVEEPVKTAPGKKRPVEHSPVEPDSSSGTGKAGQQPARKRLNFGQTGDADSVPDPQPLGQPPAAPSGLGTNTMATGSGAPMADNNEGADGVGNSSGNWHCDSTWMGDRVITTSTRTWALPTYNNHLYKQISSQSGASNDNHYFGYSTPWGYFDFNRFHCHFSPRDWQRLINNNWGFRPKRLNFKLFNIQVKEVTQNDGTTTIANNLTSTVQVFTDSEYQLPYVLGSAHQGCLPPFPADVFMVPQYGYLTLNNGSQAVGRSSFYCLEYFPSQMLRTGNNFTFSYTFEDVPFHSSYAHSQSLDRLMNPLIDQYLYYLSRTNTPSGTTTQSRLQFSQAGASDIRDQSRNWLPGPCYRQQRVSKTSADNNNSEYSWTGATKYHLNGRDSLVNPGPAMASHKDDEEKFFPQSGVLIFGKQGSEKTNVDIEKVMITDEEEIRTTNPVATEQYGSVSTNLQRGNRQAATADVNTQGVLPGTVWQDRDVYLQGPIWAKIPHTDGHFHPSPLMGGFGLKHPPPQILIKNTPVPANPSTTFSAAKFASFITQYSTGQVSVEIEWELQKENSKRWNPEIQYTSNYNKSANVDFTVDTNGVYSEPRPIGTRYLTRNL

SEQ ID NO: 2503 - protein, 735 aa, Artificial Sequence
  source: /note="Description of Artificial Sequence: Synthetic polypeptide"
MAADGYLPDWLEDTLSEGIRQWWKLKPGPPPPKPAERHKDDSRGLVLPGYKYLGPFNGLDKGEPVNEADAAALEHDKAYDRQLDSGDNPYLKYNHADAEFQERLKEDTSFGGNLGRAVFQAKKRVLEPLGLVEEPVKTAPGKKRPVEHSPVEPDSSSGTGKAGQQPARKRLNFGQTGDADSVPDPQPLGQPPAAPSGLGTNTMATGSGAPMAGNNEGADGVGNSSGNWHCDSTWMGDRVITTSTRTWALPTYNNHLYKQISSQSGASNDNHYFGYSTPWGYFDFNRFHCHFSPRDWQRLINNNWGFRPKRLNFKLFNIQVKEVTQNDGTTTIANNLTSTVQVFTDSEYQLPYVLGSAHQGCLPPFPADVFMVPQYGYLTLNNGSQAVGRSSFYCLEYFPSQMLRTGNNFTFSYTFEDVPFHSSYAHSQSLDRLMNPLIDQYLYYLSRTNTPSGTTTQSRLQFSQAGASDIRDQSRNWLPGPCYRQQRVSKTSADNNNSEYSWTGATKYHLNGRDSLVNPGPAMASHKDDEEKFFPQSGVLIFGKQGSEKTNVDIEKVMITDEEEIRTTNPVATEQYGSVSTNLQRGNRQAATADVNTQGVLPGTVWQDRDVYLQGPIWAKIPHTDGHFHPSPLMGGFGLKHPPPQILIKNTPVPANPSTTFSAAKFASFITQYSTGQVSVEIEWELQKENSKRWNPEIQYTSNYNKSVNVDFTVDTNGVYSEPRPIGTRYLTRNL

SEQ ID NO: 2504 - protein, 735 aa, Artificial Sequence
  source: /note="Description of Artificial Sequence: Synthetic polypeptide"
MAADGYLPDWLEDTLSEGIRQWWKLKPGPPPPKPAERHKDDSRGLVLPGYKYLGPFNGLDKGEPVNEADAAALEHDKAYNRQLDSGDNPYLKYNHADAEFQERLKEDTSFGGNLGRAVFQAKKRVLEPLGLVEEPVKTAPGKKRPVEHSPVEPDSSSGTGKAGQQPARKRLNFGQTGDADSVPDPQPLGQPPAAPSGLGTNTMATGSGAPMADNNEGADGVGNSSGNWHCDSTWMGDRVITTSTRTWALPTYNNHLYKQISSQSGASNDNHYFGYSTPWGYFDFNRFHCHFSPRDWQRLINNNWGFRPKRLNFKLFNIQVKEVTQNDGTTTIANNLTSTVQVFTDSEYQLPYVLGSAHQGCLPPLPADVFMVPQYGYLTLNNGSQAVGRSSFYCLEYFPSQMLRTGNNFTFSYTFEDVPFHSSYAHSQSLDRLMNPLIDQYLYYLSRTNTPSGTTTQSRLQFSQAGASDIRDQSRNWLPGPCYRQQRVSKTSADNNNSEYSWTGATKYHLNGRDSLVNPGPAMASHKDDEEKFFPQSGVLIFGKQGSEKTNVDIEKVMITDEEEIRTTNPVATEQYGSVSTNLQRGNRQAATADVNTQGVLPGMVWQDRDVYLQGPIWAKIPHTDGHFHPSPLMGGFGLKHPPPQILIKNTPVPANPSTTFSAAKFASFITQYSTGQVSVEIEWELQKENSKRWNPEIQYTSNYNKSVNVDFTVDTNGVYSEPRPIGTRYLTRNL

SEQ ID NO: 2505 - protein, 735 aa, Artificial Sequence
  source: /note="Description of Artificial Sequence: Synthetic polypeptide"
MAADGYLPDWLEDTLSEGIRQWWKLKPGPPPPKPAERHKDDSRGLVLPGYKYLGPFNGLDKGEPVNEADAAALEHDKAYDRQLDSGDNPYLKYNHADAEFQERLKEDTSFGGNLARAVFQAKKRVLEPLGLVEEPVKTAPGKKRPVEHSPAEPDSSSGTGKAGQQPARKRLNFGQTGDADSVPDPQPLGQPPAAPSGLGTNTMATGSGAPMADNNEGADGVGNSSGNWHCDSTWMGDRVITTSTRTWALPTYNNHLYKQISSQSGASNDNHYFGYSTPWGYFDFNRFHCHFSPRDWQRLINNNWGFRPKRLSFKLFNIQVKEVTQNDGATTIANNLTSTVQVFTDSEYQLPYVLGSAHQGCLPPFPADVFMVPQYGYLTLNNGSQAVGRSSFYCLEYFPSQMLRTGNNFTFSYTFEDVPFHSSYAHSQSLDRLMNPLIDQYLYYLSKTNAPSGTTTMSRLQFSQAGASDIRDQSRNWLPGPCYRQQRVSKTAADNNNSDYSWTGATKYHLNGRDSLVNPGPAMASHKDDEEKYFPQSGVLIFGKQGSNKTNVDIEKVMITDEEEIRTTNPVATEQYGSVSTNLQSGNTQAATSDVNTQGVLPGMVWQDRDVYLQGPIWAKIPHTDGHFHPSPLMGGFGLKHPPPQILIKNTPVPANPSTTFSAAKFASFITQYSTGQVSVEIEWELQKENSKRWNPEIQYTSNYNKSVNVDFTVDTNGVYSEPRPIGTRYLTRNL

SEQ ID NO: 2506 - protein, 734 aa, Artificial Sequence
  source: /note="Description of Artificial Sequence: Synthetic polypeptide"
MAADGYLPDWLEDTLSEGIRQWWKLKPGPPPKPAERHKDDSRGLVLPGYKYLGPFNGLDKGEPVNEADAAALEHDKAYDRQLDSGDNPYLKYNHADAEFQERLKEDTSFGGNLGRAVFQAKKRALEPLGLVEEPVKTAPGKKRPVEHSPVEPDSSSGTGKAGQQPARKRLNFGQTGDADSVPDPQPLGQPPAAPSGLGTNTMATGSGAPMADNNEGADGVGNSSGNWHCDSTWMGDRVITTSTRTWALPTYNNHLYKQISSQSGASNDNHYFGYSTPWGYFDFNRFHCHFSPRDWQRLINNNWGFRPKRLNFKLFNIQVKEVTQNDGTTTIANNLTSTVQVFTDSEYQLPYVLGSAHQGCLPPFPADVFMVPQYGYLTLNNGSQAVGRSSFYCLEYFPSQMLRTGNNFTFSYTFEDVPFHSSYAHSQSLDRLMNPLIDQYLYYLSRTNTPSGTTTQSRLQFSQAGASDIRDQSRNWLPGPCYRQQRVSKTSADNNNSEYSWTGATKYHLNGRDSLVNPGPAMASHKDDEEKFFPQSGVLIFGKQGSEKTNVDIEKVMITDEEEIRTTNPVATEQYGSVSTNLQRGNRQAATADVNTQGVLPGMVWQDRDVYLQGPIWAKIPHTDGHFHPSPLMGGFGLKHPPPQILIKNTPVPANPSTTFSAAKFASFITQYSTGQVSVEIEWELQKENSKRWNPEIQYTSNYNKSVNVDFTVDTNGVYSEPRPIGTRYLTRNL

SEQ ID NO: 2507 - protein, 735 aa, Artificial Sequence
  source: /note="Description of Artificial Sequence: Synthetic polypeptide"
MAADGYLPDWLEDTLSEGIRQWWKLKPGPPPPKPAERHKDDSRGLVLPGYKYLGPFNGLDKGEPVNEADAAALEHDKAYDRQLDSGDNPYLKYNHADAEFQERLKEDTSFGGNLARAVFQAKKRVLEPLGLVEEPVKTAPGKKRPVEHSPAEPDSSSGTGKAGQQPARKRLNFGQTGDADSVPDPQPLGQPPAAPSGLGTNTMATGSGAPMADNNEGADGVGNSSGNWHCDSTWMGDRVITTSTRTWALPTYNNHLYKQISSQSGASNDNHYFGYSTPWGYFDFNRFHCHFSPRDWQRLINNNWGFRPKRLSFKLFNIQVKEVTQNDGTTTIANNLTSTVQVFTDSEYQLPYVLGSAHQGCLPPFPADVFMVPQYGYLTLNNGSQAVGRSSFYCLEYFPSQMLRTGNNFTFSYTFEDVPFHSSYAHSQSLDRLMNPLIDQYLYYLSKTNAPSGTTTMSRLQFSQAGASDIRDQSRNWLPGPCYRQQRVSKTAADNNNSDYSWTGATKYHLNGRDSLVNPGPAMASHKDDEEKYFPQSGVLIFGKQGSNKTNVDIEKVMITDEEEIRTTNPVATEQYGSVSTNLQSGNTQAATSDVNTQGVLPGMVWQDRDVYLQGPIWAKIPHTDGHFHPSPLMGGFGLKHPPPQILIKNTPVPANPSTTFSAAKFASFITQYSTGQVSVEIEWELQKENGKRWNPEIQYTSNYNKSVNVDFTVDTNGVYSEPRPIGTRYLTRNL

SEQ ID NO: 2508 - protein, 735 aa, Artificial Sequence
  source: /note="Description of Artificial Sequence: Synthetic polypeptide"
MAADGYLPDWLEDTLSEGIRQWWKLKPGPPPPKPAERHKDDSRGLVLPGYKYLGPFNGLDKGEPVNEADAAALEHDKAYDRQLDSGDNPYLKYNHADAEFQERLKEDTSFGGNLGRAVFQAKKRVLEPLGLVEEPVKTAPGKKRPVEHSPVEPDSSSGTGKAGQQPARKRLNFGQTGDADSVPDPQPLGQPPAAPSGLGTNTMATGSGAPMADNNEGADGVGNSSGNWHCDSTWMGDRVITTSTRTWALPTYNNHLYKQISSQSGASNDNHYFGYSTPWGYFDFNRFHCHFSPRDWQRLINNNWGFRPKRLNFKLFNIQVKEVTQNDGTTTIANNLTSTVQVFTDSEYQLPYVLGSAHQGCLPPFPADVFMVPQYGYLTLNNGSQAVGRSSFYCLEYFPSQMLRTGNNFTFSYTFEDVPFHSSYAHSQSLDRLMNPLIDQYLYYLSRTNTPSGTTTQSRLQFSQAGASDIRDQSRNWLPRPCYRQQRVSKTSADNNNSEYSWTGATKYHLNGRDSLVNPGPAMASHKDDEEKFFPQSGVLIFGKQGSEKTNVDIEKVMITDEEEIRTTNPVATEQYGSVSTNLQRGNRQAATADVNTQGVLPGTVWQDRDVYLQGPIWAKIPHTDGHFHPSPLMGGFGLKHPPPQILIKNTPVPANPSTTFSAAKFASFITQYSTGQVSVEIEWELQKENSKRWNPEIQYTSNYNKSVNVDFTVDTNGVYSEPRPIGTRYLTRNL

SEQ ID NO: 2509 - protein, 735 aa, Artificial Sequence
  source: /note="Description of Artificial Sequence: Synthetic polypeptide"
MAADGYLPDWLEDTLSEGIRQWWKLKPGPPPPKPAERHKDDSRGLVLPGYKYLGPFNGLDKGEPVNEADAAALEHDKAYDRQLDSGDNPYLKYNHADAEFQERLKEDTSFGGNLGRAVFQAKKRALEPLGLVEEPVKTAPGKKRPVEHSPVEPDSSSGTGKAGQQPARKRLNFGQTGDADSVPDPQPLGQPPAAPSGLGTNTMATGSGAPMADNNEGADGVGNSSGNWHCDSTWMGDRVITTSTRTWALPTYNNHLYKQISSQSGASNDNHYFGYSTPWGYFDFNRFHCHFSPRDWQRLINNNWGFRPKRLNFKLFNIQVKEVTQNDGTTTIANNLTSTVQVFTDSEYQLPYVLGSAHQGCLPPFPADVFMVPQYGYLTLNNGSQAVGRSSFYCLEYFPSQMLRTGNNFTFSYTFEDVPFHSSYAHSQSLDRLMNPLIDQYLYYLSRTNTPSGTTTQSRLQFSQAGASDIRDQSRNWLPGPCYRQQRVSKTSADNNNSEYSWTGATKYHLNGRDSLVNPGPAMASHKDDEEKFFPQSGVLIFGKQGSEETNVDIEKVMITDEEEIRTTNPVATEQYGSVSTNLQRGNRQAATADVNTQGVLPGMVWQDRDVYLQGPIWAKIPHTDGHFHPSPLMGGFGLKHPPPQILIKNTPVPANPSTTFSAAKFASFITQYSTGQVSVEIEWELQKENSKRWNPEIQYTSNYNKSVNVDFTVDTNGVYSEPRPIGTRYLTRNL

SEQ ID NO: 2510 - protein, 735 aa, Artificial Sequence
  source: /note="Description of Artificial Sequence: Synthetic polypeptide"
MAADGYLPDWLEDTLSEGIRQWWKLKPGPPPPKPAERHKDDSRGLVLPGYKYLGPFNGLDKGEPANEADAAALEHDKAYDRQLDSGDNPYLKYNHADAEFQERLKEDTSFGGNLGRAVFQAKKRVLEPLGLVEEPVKTAPGKKRPVEHSPVEPDSSSGTGKAGQQPARKRLNFGQTGDADSVPDPQPLGQPPAAPSGLGTNTMATGSGAPMADNNEGADGVGNSSGNWHCDSTWMGDRVITTSTRTWALPTYNNHLYKQISSQSGASNDNHYFGYSTPWGYFDFNRFHCHFSPRDWQRLINNNWGFRPKRLNFKLFNIQVKEVTQNDGTTTIANNLTSTVQVFTDSEYQLPYVLGSAHQGCLPPFPADVFMVPQYGYLTLNNGSQAVGRSSFYCLEYFPSQMLRTGNNFTFSYTFEDVPFHSSYAHSQSLDRLMNPLIDQYLYYLSRTNTPSGTTTQSRLQFSQAGASDIRDQSRNWLPGPCYRQQRVSKTSADNNNSEYSWTGATKYHLNGRDSLVNPGPAMASHKDDEEKFFPQSGVLIFGKQGSEKTNVDIEKVMITDEEEIRTTNPVATEQYGSVSTNLQRGNRQAATADVNTQGVLPGTVWQDRDVYLQGPIWAKIPHTDGHFHPSPLMGGFGLKHPPPQILIKNTPVPANPSTTFSAAKFASFITQYSTGQVSVEIEWELQKENSKRWNPEIQYTSNYNKSVNVDFTVDTNGVYSEPRPIGTRYLTRNL

SEQ ID NO: 2511 - protein, 735 aa, Artificial Sequence
  source: /note="Description of Artificial Sequence: Synthetic polypeptide"
MAADGYLPDWLEDTLSEGIRQWWKLKPGPPPPKPAERHKDDSRGLVLPGYKYLGPFNGLDKGEPVNEADAAALEHDKAYDRQLDSGDNPYLKYNHADAEFQERLKEDTSFGGNLGRAVFQAKKRVLEPLGLVEEPVKTAPGKKRPVEHSPVEPDSSSGTGKAGQQPARKRLNFGQTGDADSVPDPQPLGQPPAAPSGLGTNTMATGSGAPMADNNEGADGVGNSSGNWHCDSTWMGDRVITTSTRTWALPTYNNHLYKQISSQSGASNDNHYFGYSTPWGYFDFNRFHCHFSPRDWQRLINNNWGFRPKRLNFKLFNIQVKEVTQNDGTTTIANNLTSTVQVFTDSEYQLPYVLGSAHQGCLPPFPADVFMVPQYGYLTLNNGSQAVGRSSFYCLEYFPSQMLRTGNNFTFSYTFEDVPFHSSYAHSQSLDRLMNPLIDQYLYYLSRTNTPSGTTTQSRLQFSQAGASDIRDQSRNWLPGPCYRQQRVSKTSADNNNSEYSWTGATKYHLNGRDSLVNPGPAMASHKDDEEKFFPQSGVLIFGKQGSEKTNVDIEKVMVTDEEEIRTTNPVATEQYGSVSTNLQRGNRQAATADVNTQGVLPGTVWQDRDVYLQGPIWAKIPHTDGHFHPSPLMGGFGLKHPPPQILIKNTPVPANPSTTFSAAKFASFITQYSTGQVSVEIEWELQKENSKRWNPEIQYTSNYNKSVNVDFTVDTNGVYSEPRPIGTRYLTRNL

SEQ ID NO: 2512 - protein, 735 aa, Artificial Sequence
  source: /note="Description of Artificial Sequence: Synthetic polypeptide"
MAADGYLPDWLEDTLSEGIRQWWKLKPGPPPPKPAERHKDDSRGLVLPGYKYLGPFNGLDKGEPVNEADAAALEHDKAYDRQLDSGDNPYLKYNHADAEFQERLKEDTSFGGNLGRAVFQAKKRVLEPLGLVEEPVKTAPGKKRPVEHSPVEPDSSSGTGKAGQQPARKRLNFGQTGDADSVPDPQPLGQPPAAPSGLGTNTMATGSGAPMADNNEGADGVGNSSGNWHCDSTWMGDRVITTSTRTWALPTYNNHLYKQISSQSGASNDNHYFGYSTPWGYFDFNRFHCHFSPRDWQRLINNNWGFRPKRLNFKLFNIQVKEVTQNDGTTTIANNLTSTVQVFTDSEYQLPYVLGSAHQGCLPPFPADVFMAPQYGYLTLNNGSQAVGRSSFYCLEYFPSQMLRTGNNFTFSYTFEDVPFHSSYAHSQSLDRLMNPLIDQYLYYLSRTNTPSGTTTQSRLQFSQAGASDIRDQSRNWLPGPCYRQQRVSKTSADNNNSEYSWTGATKYHLNGRDSLVNPGPAMASHKDDEEKFFPQSGVLIFGKQGSEKTNVDIEKVMITDEEEIRTTNPVATEQYGSVSTNLQRGNRQAATADVNTQGVLPGTVWQDRDVYLQGPIWAKIPHTDGHFHPSPLMGGFGLKHPPPQILIKNTPVPANPSTTFSAAKFASFITQYSTGQVSVEIEWELQKENSKRWNPEIQYTSNYNKSVNVDFTVDTNGVYSEPRPIGTRYLTRNL

SEQ ID NO: 2513 - protein, 735 aa, Artificial Sequence
  source: /note="Description of Artificial Sequence: Synthetic polypeptide"
MAADGYLPDWLEDTLSEGIRQWWKLKPGPPPPKPAERHKDDSRGLVLPGYKYLGPFNGLDKGEPVNEADAAALEHDKAYDRQLDSGDNPYLKYNHADAEFQERLKEDTSFGGNLGRAVFQAKKRVLEPLGLVEEPVKTAPGKKRPVEHSPVEPDSSSGTGKTGQQPARKRLNFGQTGDADSVPDPQPLGQPPAAPSGLGTNTMATGSGAPMADNNEGADGVGNSSGNWHCDSTWMGDRVITTSTRTWALPTYNNHLYKQISSQSGASNDNHYFGYSTPWGYFDFNRFHCHFSPRDWQRLINNNWGFRPKRLNFKLFNIQVKEVTQNDGTTTIANNLTSTVQVFTDSEYQLPYVLGSAHQGCLPPFPADVFMVPQYGYLTLNNGSQAVGRSSFYCLEYFPSQMLRTGNNFTFSYTFEDVPFHSSYAHSQSLDRLMNPLIDQYLYYLSRTNTPSGTTTQSRLQFSQAGASDIRDQSRNWLPGPCYRQQRVSKTSADNNNSEYSWTGATKYHLNGRDSLVNPGPAMASHKDDEEKFFPQSGVLIFGKQGSEKTNVDIEKVMITDEEEIRTTNPVATEQYGSVSTNLQRGNRQAATADVNTQGVLPGMVWQDRDVYLQGPIWAKIPHTDGHFHPSPLMGGFGLKHPPPQILIKNTPVSANPSTTFSAAKFASFITQYSTGQVSVEIEWELQKENSKRWDPEIQYTSNYNKSVNVDFTVDTNGVYSEPRPIGTRYLTRNL

SEQ ID NO: 2514 - protein, 734 aa, Artificial Sequence
  source: /note="Description of Artificial Sequence: Synthetic polypeptide"
MAADGYLPDWLEDTLSEGIRQWWKLKPGPPPPKPAERHKDDSRGLVLPGYKYLGPFNGLDKGEPVNEADAAALEHDKAYDRQLDSGDNPYLKYNHADAEFQERLKEDTSFGGNLGRAVFQAKKRVLEPLGLVEEPVKTAPGKKRPVEHSPVEPDSSSGTGKAGQQPARKRLNFGQTGDADSVPDPQPLGQPPAAPSGLGTNTMATGSGAPMADNNEGADGVGNSSGNWHCDSTWMGDRVITTSTRTWALPTYNNHLYKQISSQSGASNDNHYFGYSTPWGYFDFNRFHCHFSPRDWQRLINNWGFRPKRLNFKLFNIQVKEVTQNDGTTTIANNLTSTVQVFTDSEYQLPYVLGSAHQGCLPPFPADVFMVPQYGYLTLNNGSQAVGRSSFYCLEYFPSQMLRTGNNFTFSYTFEDVPFHSSYAHSQSLDRLMNPLIDQYLYYLSRTNTPSGTTTQSRLQFSQAGASDIRDQSRNWLPGPCYRQQRVSKTSADNNNSEYSWTGATKYHLNGRDSLVNPGPAMASHKDDEEKFFPQSGVLIFGKQGSEKTNVDIEKVMITDEEEIRTTNPVATEQYGSVSTNLQRGNRQAATADVNTQGVLPGTVWQDRDVYLQGPIWAKIPHTDGHFHPSPLMGGFGLKHPPPQILIKNTPVPANPSTTFSAAKFASFITQYSTGQVSVEIEWELQKENSKRWNPEIQYTSNYNKSVNVDFTVDTNGVYSEPRPIGTRYLTRNL

SEQ ID NO: 2515 - protein, 735 aa, Artificial Sequence
  source: /note="Description of Artificial Sequence: Synthetic polypeptide"
MAADGYLPDWLEDTLSEGIRQWWKLKPGPPPPKPAERHKDDSRGLVLPGYKYLGPFNGLDKGEPVNEADAAALEHDKAYDRQLDSGDNPYLKYNHADAEFQERLKEDTSFGGNLGRAVFQAKKRVLEPLGLVEEPVKTAPGKKRPVEHSPVEPDSSSGTGKAGQQPARKRLNFGQTGDADSVPDPQPLGQPPAAPSGLGTNTMATGSGAPMADNNEGADGVGNSSGNWHCDSTWMGDRVITTSTRTWALPTYNNHLYKQISSQSGASNDNHYFGYSTPWGYFDFNRFHCHFSPRDWQRLINNNWGFRPKRLNFKLFNIQVKEVTQNDGTTTIANNLTSTVQVFTDSEYQLPYVLGSAHQGCLPPFPADVFMVPQYGYLTLNNGSQAVGRSSFYCLEYFPSQMLRTGNNFTFSYTFEDVPFHSSYAHSQSLDRLMNPLIDQYLYYLSRTNTPSGTTTQSRLQFSQAGASDIRDQSRNWLPGPCYRQQRVSKTSADNNNSEYSWTGATKYHLNGRDSLVNPGPAMASHKDDEEKFFPQSGVLIFGKQGSEKTNVDIEKVMITDEEEIRTTNPVATEQYGSVSTNLQRGNRQAATADVNTQGVLPGTVWQDRDVYLQGPIWAKIPHTDGHFHPSPLMGGFGLKHPPPQILIKNTPVPANPSTTFSAAKFASFITQYSTGQVSVEIEWELQKENGKRWNPEIQYTSNYNKSVNVDFTVDTNGVYSEPRPIGTRYLTRNL

SEQ ID NO: 2516 - protein, 735 aa, Artificial Sequence
  source: /note="Description of Artificial Sequence: Synthetic polypeptide"
MAADGYLPDWLEDTLSEGIRQWWKLKPGPPPPKPAERHKDDSRGLVLPGYKYLGPFNGLDKGEPVNEADAAALEHDKAYDRQLDSGDNPYLKYNHADAEFQERPKEDTSFGGNLGRAVFQAKKRVLEPLGLVEEPVKTAPGKKRPVEHSPVEPDSSSGTGKAGQQPARKRLNFGQTGDADSVPDPQPLGQPPAAPSGLGTNTMATGSGAPMADNNEGADGVGNSSGNWHCDSTWMGDRVITTSTRTWALPTYNNHLYKQISSQSGASNDNHYFGYSTPWGYFDFNRFHCHFSPRDWQRLINNNWGFRPKRLNFKLFNIQVKEVTQNDGTTTIANNLTSTVQVFTDSEYQLPYVLGSAHQGCLPPFPADVFMVPQYGYLTLNNGSQAVGRSSFYCLEYFPSQMLRTGNNFTFSYTFEDVPFHSSYAHSQSLDRLMNPLIDQYLYYLSRTNTPSGTTTQSRLQFSQAGASDIRDQSRNWLPGPCYRQQRVSKTSADNNNSEYLWTGATKYHLNGRDSLVNPGPAMASHKDDEEKFFPQSGVLIFGKQGSEKTNVDIEKVMITDEEEIRTTNPVATEQYGSVSTNLQRGNRQAATADVNTQGVLPGTVWQDRDVYLQGPIWAKIPHTDGHFHPSPLMGGFGLKHPPPQILIKNTPVPANPSTTFSAAKFASFITQYSTGQVSVEIEWELQKENSKRWNPEIQYTSNYNKSVNVDFTVDTNGVYSEPRPIGTRYLTRNL

SEQ ID NO: 2517 - protein, 735 aa, Artificial Sequence
  source: /note="Description of Artificial Sequence: Synthetic polypeptide"
MAADGYLPDWLEDTLSEGIRQWWKLKPGPPPPKPAERHKDDSRGLVLPGYKYLGPFNGLDKGEPVNEADAAALEHDKAYDRQLDSGDNPYLKYNHADAEFQERLKEDTSFGGNLGRAVFQAKKRALEPLGLVEEPVKTAPGKKRPVEHSPVEPDSSSGTGKAGQQPARKRLDFGQTGDADSVPDPQPLGQPPAAPSGLGTNTMATGSGAPMADNNEGADGVGNSSGNWHCDSTWMGDRVITTSTRTWALPTYNNHLYKQISSQSGASNDNHYFGYSTPWGYFDFNRFHCHFSPRDWQRLINNNWGFRPKRLNFKLFNIQVKEVTQNDGTTTIANNLTSTVQVFTDSEYQLPYVLGSAHQGCLPPFPADVFMVPQYGYLTLNNGSQAVGRSSFYCLEYFPSQMLRTGNNFTFSYTFEDVPFHSSYAHSQSLDRLMNPLIDQYLYYLSRTNTPSGTTTQSRLQFSQAGASDIRDQSRNWLPGPCYRQQRVSKTSADNNNSEYSWTGATKYHLNGRDSLVNPGPAMASHKDDEEKFFPQSGVLIFGKQGSEKTNVDIEKVMITDEEEIRTTNPVATEQYGSVSTNLQRGNRQAATADVNTQGVLPGMVWQDRDVYLQGPIWAKIPHTDGHFHPSPLMGGFGLKHPPPQILIKNTPVPANPSTTFSAAKFASFITQYSTGQVSVEIEWELQKENSKRWNPEIQYTSNYNKSVNVDFTVDTNGVYSEPRPIGTRYLTRNL

SEQ ID NO: 2518 - protein, 735 aa, Artificial Sequence
  source: /note="Description of Artificial Sequence: Synthetic polypeptide"
MAADGYLPDWLEDTLSEGIRQWWKLKPGPPPPKPAERHKDDSRGLVLPGYKYLGPFNGLDKGEPVNEADAAALEHDKAYDRQLDSGDNPYLKYNHADAEFQERLKEDTSFGGNLARAVFQAKKRVLEPLGLVEEPVKTAPGKKRPVEHSPAEPDSSSGTGKAGQQPARKRLNFGQTGDADSVPDPQPLGQPPAAPSGLGTNTMATGSGAPMADNNEGADGVGNSSGNWHCDSTWMGDRVITTSTRTWALPTYNNHLYKQISSQSGASNDNHYFGYSTPWGYFDFNRFHCHFSPRDWQRLINNNWGFRPKRLSFKLFNIQVKEVTQNDGTTTIANNLTSTVQVFTDSEYQLPYVLGSAHQGCLPPFPADVFMVPQYGYLTLNNGSQAVGRSSFYCLEYFPSQMLRTGNNFTFSYTFEDVPFHSSYAHSQSLDRLMNPLIDQYLYYLSKTNAPSGTTTMSRLQFSQAGASDIRDQSRNWLPGPCYRQQRVSKTAADNNNSDYSWTGATKYHLNGRDSLVNPGPAMASHKDDEEKYFPQSGVLIFGKQGSNKTNVDIEKVMITDEEEIRTTNPVATEQYGSVSTNLQSGNTQAATSDVNTQGVLPGMVWQDRDVYLQGPIWAKIPHTDGHFHPSPLMGGFGLKHPPPQILIKNTPVPANPSTTFSAAKFASFITQYSTGQVSVEIEWELQKENSKRWNPEIQYTSNYNKSVNVDFTVDTNGVYSEPRPIGTRYLTRNL

SEQ ID NO: 2519 - protein, 735 aa, Artificial Sequence
  source: /note="Description of Artificial Sequence: Synthetic polypeptide"
MAADGYLPDWLEDTLSEGIRQWWKLKPGPPPPKPAERHKDDSRGLVLPGYKYLGPFNGLDKGEPVNEADAAALEHDKAYDRQLDSGDNPYLKYNHADAEFQERLKEDTSFGGNLGRAVFQAKKRVLEPLGLVEEPVKTAPGKKRPVEHSPVEPDSSSGTGKAGQQPARKRLNFGQTGDADSVPDPQPLGQPPAAPSGLGTNTMATGSGAPMADNNEGADGVGNSSGNWHCDSTWMGDRVITTSTRTWALPTYNNHLYKQISSQSGASNDNHYFGYSTPWGYFDFNRFHCHFSPRDWQRLINNNWGFRPKRLNFKLFNIQVKEVTQNDGTTTIANNLTSTVQVFTDSEYQLPYVLGSAHQGCLPPFPADVSMVPQYGYLTLNNGSQAVGRSSFYCLEYFPSQMLRTGNNFTFSYTFEDVPFHSSYAHSQSLDRLMNPLIDQYLYYLSRTNTPSGTTTQSRLQFSQAGASDIRDQSRNWLPGPCYRQQRVSKTSADNNNSEYSWTGATKYHLNGRDSLVNPGPAMASHKDDEEKFFPQSGVLIFGKQGSEKTNVDIEKVMITDEEEIRTTNPVATEQYGSVSTNLQRGNRQAATADVNTQGVLPGTVWQDRDVYLQGPIWAKIPHTDGHFHPSPLMGGFGLKHPPPQILIKNTPVPANPSTTFSAAKFASFITQYSTGQVSVEIEWELQKENSKRWNPEIQYTSNYNKSVNVDFTVDTNGVYSEPRPIGTRYLTRNL

SEQ ID NO: 2520 - protein, 735 aa, Artificial Sequence
  source: /note="Description of Artificial Sequence: Synthetic polypeptide"
MAADGYLPDWLEDTLSEGIRQWWKLKPGPPPPKPAERHKDDSRGLTLPGYKYLGPFNGLDKGEPVNEADAAALEHDKAYDRQLDSGDNPYLKYNHADAEFQERLKEDTSFGGNLARAVFQAKKRVLEPLGLVEEPVKTAPGKKRPVEHSPAELDSSSGTGKSGQQPARKRLNFGQTGDADSVPDPQPLGQPPAAPSGLGTNTMASGSGAPMADNNEGADGVGNSSGNWHCDSTWMGDRVITTSTRTWALPTYNNHLYKQISSQSGASNDNHYFGYSTPWGYFDFNRFHCHFSPRDWQRLINNNWGFRPKRLNFKLFNIQVKEVTQNDGTTTIANNLTSTVQVFTDSEYQLPYVLGSAHQGCLPPFPADVFMVPQYGYLTLNNGSQAVGRSSFYCLEYFPSQMLRTGNNFTFSYTFEDVPFHSSYAHSQSLDRLMNPLIDQYLYYLSRTNTPSGTTTQSRLQFSQAGASDIRDQSRNWLPGPCYRQQRVSKTAADNNNSDYSWTGATKYHLNGRDSLVNPGTAMASHKDDEEKYFPQSGVLIFGKQDSGKTNVDIEKVMITDEEEIRTTNPVATEQYGSVSTNLQSGNTQAATSDVNTQGVLPGMVWQDRDVYLQGPIWAKIPHTDGHFHPSPLMGGFGPKHPPPQILIKNTPVPANPSTTFSAAKFASFITQYSTGQVSVEIEWELQKENSKRWNPEIQYTSNYNKSVNVDFTVDTNGVYSEPRPIGTRYLTRNL

SEQ ID NO: 2521 - protein, 735 aa, Artificial Sequence
  source: /note="Description of Artificial Sequence: Synthetic polypeptide"
MAADGYLPDWLEDTLSEGIRQWWKLKPGPPPPKPAERHKDDSRGLVLPGYKYLGPFNGLDKGEPVNEADAAALEHDKAYDRQLDSGDNPYLKYNHADAEFQERLKEDTSFGGNLARAVFQAKKRVLEPLGLVEEPVKTAPGKKRPVEHSPAEPDSSSGTGESGQQPARKRLNFGQTGDADSVPDPQPLGQPPAAPSGLGTNTMASGSGAPMADNNEGADGVGNSSGNWHCDSTWMGDRVITTSTRTWALPTYNNHLYKQISSQSGASNDNHYFGYSTPWGYFDFNRFHCHFSPRDWQRLINNNWGFRPKRLNFKLFNIQVKEVTQNDGTTTIANNLTSTVQVFTDSEYQLPYVLGSAHQGCLPPFPADVFMVPQYGYLTLNNGSQAVGRSSFYCLEYFPSQMLRTGNNFTFSYTFEDVPFHSSYAHSQSLDRLMNPLIDQYLYYLSRTNTPSGTTTQSRLQFSQAGASDIRDQSRNWLPGPCYRQQRVSKTAADNNNSDYSWTGATKYHLNGRDSLVNPGTAMASHKDDEEKYFPQSGVLIFGKQDSGKTNVDIEKVMITDEEEIRTTNPVATEQYGSVSTNLQSGNTQAATSDVNTQGVLPGMVRQDRDVYLQGPIWAKIPHTDGHFHPSPLMGGFGLKHPPPQILIKNTPVPANPSTTFSAAKFASFITQYSTGQVSVEIEWEPQKENSKRWNPEIQYTSNYNKSVNVDFTVDTNGVYSEPRPIGTRYLTRNL

SEQ ID NO: 2522 - protein, 735 aa, Artificial Sequence
  source: /note="Description of Artificial Sequence: Synthetic polypeptide"
MAADGYLPDWLEDTLSEGIRQWWKLKPGPPPPKPAERHKDDSRGLALPGYKYLGPFNGLDKGEPVNEADAAALEHDKAYDRQLDSGDNPYLKYNHADAEFQERLKEDTSFGGNLARAVFQAKKRVLEPLGLVEEPVKTAPGKKRPVEHSPAELDSSSGTGKSGQQPARKRLNFGQTGDADSVPDPQPLGQPPAAPSGLGTNTMASGSGAPMADNNEGADGVGNSSGNWHCDSTWMGDRVITTSTRTWALPTYNNHLYKQISSQSGASNDNHYFGYSTPWGYFDFNRFHCHFSPRDWQRLINNNWGFRPKRLNFKLFNIQVKEVTQNDGTTTIANNLTSTVQVFTDSEYQLPYVLGSAHQGCLPPFPADVFMVPQYGYLTLNNGSQAVGRSSFYCLEYFPSQMLRTGNNFTFSYTFEDVPFHSSYAHSQSLDRLMNPLIDQYLYYLSRTNTPSGTTTQSGLQFSQAGASDIRDQSRNWLPGPCYRQQRVSKTAADNNNSDYSWTGATKYHLNGRDSLVNPGTAMASHKDDEEKYFPQSGVLIFGKQDSGKTNVDIEKVMITDEEEIRTTNPVATEQYGSVSTNLQSGNTQAATSDVNTQGVLPGMVWQDRDVYLQGPIWAKIPHTDGHFHPSPLMGGFGPKHPPPQILIKNTPVPANPSTTFSAAKFASFITQYSTGQVSVEIEWELQKENSKRWNPEIQYTSNYNKSVNVDFTVDTNGVYSEPRPIGTRYLTRNL

SEQ ID NO: 2523 - protein, 735 aa, Artificial Sequence
  source: /note="Description of Artificial Sequence: Synthetic polypeptide"
MAADGYLPDWLEDTLSEGIRQWWKLKPGPPPPKPAERHKDDSRGLVLPGYKYLGPFNGLDKGEPVNEADAAALEHDKAYDRQLDSGDNPYLKYNHADAEFQERLKEDTSFGGNLARAVFQAKKRVLEPLGLVEEPVKTAPGKKRPVEHSPAEPDSSSGTGKSGQQPARKRLNFGQTGDADSVPDPQPLGQPPAAPSGLGTNTMASGSGAPMADNNEGADGVGNSSGNWHCDSTWMGDRVITTSTRTWALPTYNNHLYKQISSQSGASNDNHYFGYSTPWGYFDFNRFHCHFSPRDWQRLINNNWGFRPKRLNFKLFNIQVKEVTQNDGTTTVANNLTSTVQVFTDSEYQLPYVLGSAHQGCLPPFPADVFMVPQYGYLTLNNGSQAVGRSSFYCLEYFPSQMLRTGNNFTFSYTFEDVPFHSSYAHSQSLDRLMNPLIDQYLYYLSRTNTPSGTTTQSRLQFSQAGASDIRDQSRNWLPGPCYRQQRVSKTAADNNNSDYSWTGATKYHLNGRDSLVNPGTAMASHKDDEEKYFPQSGVLIFGKQDSGKTNVDIEKVMITDEEEIRTTNPVATEQYGSVSTNLQSGNTQAATSDVNTQGVLPGMVRQDRDVYLQGPIWAKIPHTDGHFHPSPLMGGFGLKHPPPQILIKNTPVPANPSTTFSAAKFASFITQYSTGQVSVEIEWEPQKENSKRWNPEIQYTSNYNKSVNVDFTVDTNGVYSEPRPIGTRYLTRNL

SEQ ID NO: 2524 - protein, 735 aa, Artificial Sequence
  source: /note="Description of Artificial Sequence: Synthetic polypeptide"
MAADGYLPDWLEDTLSEGIRQWWKLKPGPPPPKPAERHKDDSRGLVLPGYKYLGPFNGLDKGEPVNEADAAALEHDKAYDRQLDSGDNPYLKYNHADAEFQERLKEDTSFGGNLARAVFQAKKRVLEPLGLVEEPVKTAPGKKRPVEHSPAEPDSSSGTGKSGQQPARKRLNFGQTGDADSVPDPQPLGQPPAAPSGLGTNTMASGSGAPMADNNEGADGVGNSSGNWHCDSTWMGDRVITTSTRTWALPTYNNHLYKQISSQSGASNDNHYFGYSTPWGYFDFNRFHCHFSPRDWQRLINNNWGFRPKRLNFKLFNIQVKEVTQNDGTTTIANNLTSTVQVFTDSEYQLPYVLGSAHQGCLPPFPADVFMVPQYGYLTLNNGSQAVGRSSFYCLEYFPSQMLRTGNNFTFSYTFEDVPFHSSYAHSQSLDRLMNPLIDQYLYYLSRTNTPSGTTTQSRLQFSQAGASDIRDQSRNWLPGPCYRQQRVSKTAADNNNSDYSWTGATKYHLNGRDSLVNPGTAMASHKDDEEKYFPQGGVLIFGKQDSGKTNVDIEKVMITDEEEIRTTNPVATEQYGSVSTNLQSGNTQAATSDVNTQGVLPGMVRQDRDVYLQGPIWAKIPHTDGHFHPSPLMGGFGLKHPPPQILIKNTPVPANPSTTFSAAKFASFITQYSTGQVSVEIEWEPQKENSKRWNPEIQYTSNYNKSVNVDFTVDTNGVYSEPRPIGTRYLTRNL

SEQ ID NO: 2525 - protein, 735 aa, Artificial Sequence
  source: /note="Description of Artificial Sequence: Synthetic polypeptide"
MAADGYLPDWLEDTLSEGIRQWWKLKPGPPPPKPAERHKDDSRGLALPGYKYLGPFNGLDKGEPVNEADAAALEHDKAYDRQLDSGDNPYLKYNHADAEFQERLKEDTSFGGNLARAVFQAKKRVLEPLGLVEEPVKTAPGKKRPVEHSPAELDSSSGTGKSGQQPARKRLNFGQTGDADSVPDPQPLGQPPAAPSGLGTNTMASGSGAPMADNNEGADGVGNSSGNWHCDSTWMGDRVITTSTRTWALPTYNNHLYKQISSQSGASNDNHYFGYSTPWGYFDFNRFHCHFSPRDWQRLINNNWGFRPKRLNFKLFNIQVKEVTQNDGTTTIANNLTSTVQVFTDSEYQLPYVLGSAHQGCLPPFPADVFMVPQYGYLTLNNGSQAVGRSSFYCLEYFPSQMLRTGNNFTFSYTFEDVPFHSSYAHSQSLDRLMNPLIDQYLYYLSRTNTPSGTTTQSRLQFSQAGASDIRDQSRNWLPGPCYRQQRVSKTAADNNNSDYSWTGATKYHLNGRDSLVNPGTAMAGHKDDEEKYFPQSGVLIFGKQDSGKTNVDIEKVMITDEEEIRTTNPVATEQYGSVSTNLQSGNTQAATSDVNTQGVLPGMVWQDRDVYLQGPIWAKIPHTDGHFHPSPLMGGFGPKHPPPQILIKNTPVPANPSTTFSAAKFASFITQYSTGQVSVEIEWELQKENSKRWNPEIQYTSNYNKSVNVDFTVDTNGVYSEPRPIGTRYLTRNL

SEQ ID NO: 2526 - protein, 735 aa, Artificial Sequence
  source: /note="Description of Artificial Sequence: Synthetic polypeptide"
MAADGYLPDWLEDTLSEGIRQWWKLKPGPPPPKPAERHKDDSRGLALPGYKYLGPFNGLDKGEPVNEADAAALEHDKAYDRQLDSGDNPYLKYNHADAEFQERLKEDTSFGGNLARAVFQAKKRVLEPLGLVEEPVKTAPGKKRPVEHSPAELDSSSGTGKSGQQPARKRLNFGQTGDADSVPDPQPLGQPPAAPSGLGTNTMASGSGAPMADNNEGADGVGNSSGNWHCDSTWMGDRVITTSTRTWALPTYNNHLYKQISSQSGASNDNHYFGYSTPWGYFDFNRFHCHFSPRDWQRLINNNWGFRPKRLNFKLFNIQVKEVTQNDGTTTIANNLTSTVQVFTDSEYQLPYVLGSAHQGCLPPFPADVFMVPQYGYLTLNNGSQAVGRSSFYCLEYFPSQMLRTGNNFTFSYTFEDVPFHSSYAHSQSLDRLMNPLIDQYLYYLSRTNTPSGTTTQSRLQFSQAGASDIRDQSRNWLPGPCYRQQRVSKTAADNNNSDYSWTGATKYHLNGRDSLVNPGTAMASHKDDEEKYFPQSGVLIFGKQDSGKTNVDIEKVMITDEEEIRTTNPVATEQYGSVSTNLQSGNTQAATSDVNTQGVLPGMVWQDRDVYLQGPIWAKIPHTDGHFHPSPLMGGFGPKHPPPQILIKNTPVPANPSTTFSAAKFASFITQYSTGQVSVEIEWELQKENSKRWNPEIQYTSNYNKSVNVDFTVDTNGVYSEPRPIGTRYLTRNL

SEQ ID NO: 2527 - protein, 735 aa, Artificial Sequence
  source: /note="Description of Artificial Sequence: Synthetic polypeptide"
MAADGYLPDWLEDTLSEGIRQWWKLKPGPPPPKPAERHKDDSRGLVLPGYKYLGPFNGLDKGEPVNEADAAALEHDKAYDRQLDSGDNPYLKYNHADAEFQERLKEDTSFGGNLARAVFQAKKRVLEPLGLVEEPVKTAPGKKRPVEHSPAEPDSSSGTGKSGQQPARKRLNFGQTGDADSVPGPQPLGQPPAAPSGLGTNTMASGSGAPMADNNEGADGVGNSSGNWHCDSTWMGDRVITTSTRTWALPTYNNHLYKQISSQSGASNDNHYFGYSTPWGYFDFNRFHCHFSPRDWQRLINNNWGFRPKRLNFKLFNIQVKEVTQNDGTTTVANNLTSTVQVFTDSEYQLPYVLGSAHQGCLPPFPADVFMVPQYGYLTLNNGSQAVGRSSFYCLEYFPSQMLRTGNNFTFSYTFEDVPFHSSYAHSQSLDRLMNPLIDQYLYYLSRTNTPSGTTTQSRLQFSQAGASDIRDQSRNWLPGPCYRQQRVSKTAADNNNSDYSWTGATKYHLNGRDSLVNPGTAMASHKDDEEKYFPQSGVLIFGKQDSGKTNVDIEKVMITDEEEIRTTNPVATEQYGSVSTNLQSGNTQAATSDVNTQGVLPGMVRQDRDVYLQGPIWAKIPHTDGHFHPSPLMGGFGLKHPPPQILIKNTPVPANPSTTFSAAKFASFITQYSTGQVSVEIEWEPQKENSKRWNPEIQYTSNYNKSVNVDFTVDTNGVYSEPRPIGTRYLTRNL

SEQ ID NO: 2528 - protein, 735 aa, Artificial Sequence
  source: /note="Description of Artificial Sequence: Synthetic polypeptide"
MAADGYLPDWLEDTLSEGIRQWWKLKPGPPPPKPAERHKDDSRGLVLPGYKYLGPFNGLDKGEPVNEADAAALEHDKAYDRQLDSGDNPYLKYNHADAEFQERLKEDTSFGGNLARAVFQAKKRVLEPLGLVEEPVKTAPGKKRPVEHSPAEPDSSSGTGKSGQQPARKRLNFGQTGDADSVPDPQPLGQPPAAPSGLGTNTMASGSGAPMADNNEGADGVGNSSGNWHCDSTWMGDRVITTSTRTWALPTYNNHLYKQISSQSGASNDNHYFGYSTPWGYFDFNRFHCHFSPRDWQRLINNNWGFRPKRLNFKLFNIQVKEVTQNDGTTTIANNLTSTVQVFTDSEYQLPYVLGSAHQGCLPPFPADVFMVPQYGYLTLNNGSQAVGRSSFYCLEYFPSQMLRTGNNFTFSYTFEDAPFHSSYAHSQSLDRLMNPLIDQYLYYLSRTNTPSGTTTQSRLQFSQAGASDIRDQSRNWLPGPCYRQQRVSKTAADNNNSDYSWTGATKYHLNGRDSLVNPGTAMASHKDDEEKYFPQSGVLIFGKQDSGKTNVDIEKVMITDEEEIRTTNPVATEQYGSVSTNLQSGNTQAATSDVNTQGVLPGMVRQDRDVYLQGPIWAKIPHTDGHFHPSPLMGGFGLKHPPPQILIKNTPVPANPSTTFSAAKFASFITQYSTGQVSVEIEWEPQKENSKRWNPEIQYTSNYNKSVNVDFTVDTNGVYSEPRPIGTRYLTRNL

SEQ ID NO: 2529 - protein, 735 aa, Artificial Sequence
  source: /note="Description of Artificial Sequence: Synthetic polypeptide"
MAADGYLPDWLEDTLSEGIRQWWKLKPGPPPPKPAERHKDDSRGLVLPGYKYLGPFNGLDKGEPVNEADAAALEHDKAYDRQLDSGDNPYLKYNHADAEFQERLKEDTSFGGNLARAVFQAKKRVLEPLGLVEEPVKTAPGKKRPVEHSPAEPDSSSGTGKSGQQPARKRLNFGQTGDADSVPDPQPLGQPPAAPSGLGTNTMASGSGAPMADNNEGADGVGNSSGNWHCDSTWMGDRVIPTSTRTWALPTYNNHLYKQISSQSGASNDNHYFGYSTPWGYFDFNRFHCHFSPRDWQRLINNNWGFRPKRLNFKLFNIQVKEVTQNDGTTTIANNLTSTVQVFTDSEYQLPYVLGSAHQGCLPPFPADVFMVPQYGYLTLNNGSQAVGRSSFYCLEYFPSQMLRTGNNFTFSYTFEDVPFHSSYAHSQSLDRLMNPLIDQYLYYLSRTNTPSGTTTQSRLQFSQAGASDIRDQSRNWLPGPCYRQQRVSKTAADNNNSDYSWTGATKYHLNGRDSLVNPGTAMASHKDDEEKYFPQSGVLIFGKQDSGKTNVDIEKVMITDEEEIRTTNPVATEQYGSVSTNLQSGNTQAATSDVNTQGVLPGMVRQDRDVYLQGPIWAKIPHTDGHFHPSPLMGGFGLKHPPPQILIKNTPVPANPSTTFSAAKFASFITQYSTGQVSVEIEWEPQKENSKRWNPEIQYTSNYNKSVNVDFTVDTNGVYSEPRPIGTRYLTRNL

SEQ ID NO: 2530 - protein, 735 aa, Artificial Sequence
  source: /note="Description of Artificial Sequence: Synthetic polypeptide"
MAADGYLPDWLEDTLSEGIRQWWKLKPGPPPPKPAERHKDDSRGLVLPGYKYLGPFNGLDKGEPVNEADAAALEHDKAYDRQLDSGDNPYLKYNHADAEFQERLKEDTSFGGNLARAVFQAKKRVLEPLGLVEEPVKTAPGKKRPAEHSPAEPDSSSGTGKSGQQPARKRLNFGQTGDADSVPDPQPLGQPPAAPSGLGTNTMASGSGAPMADNNEGADGVGNSSGNWHCDSTWMGDRVITTSTRTWALPTYNNHLYKQISSQSGASNDNHYFGYSTPWGYFDFNRFHCHFSPRDWQRLINNNWGFRPKRLNFKLFNIQVKEVTQNDGTTTIANNLTSTVQVFTDSEYQLPYVLGSAHQGCLPPFPADVFMVPQYGYLTLNNGSQAVGRSSFYCLEYFPSQMLRTGNNFTFSYTFEDVPFHSSYAHSQSLDRLMNPLIDQYLYYLSRTNTPSGTTTQSRLQFSQAGASDIRDQSRNWLPGPCYRQQRVSKTAADNNNSDYSWTGATKYHLNGRDSLVNPGTAMASHKDDEEKYFPQSGVLIFGKQDSGKTNVDIEKVMITDEEEIRTTNPVATEQYGSVSTNLQSGNTQAATSDVNTQGVLPGMVRQDRDVYLQGPIWAKIPHTDGHFHPSPLMGGFGLKHPPPQILIKNTPVPANPSTTFSAAKFASFITQYSTGQVSVEIEWEPQKENSKRWNPEIQYTSNYNKSVNVDFTVDTNGVYSEPRPIGTRYLTRNL

SEQ ID NO: 2531 - protein, 735 aa, Artificial Sequence
  source: /note="Description of Artificial Sequence: Synthetic polypeptide"
MAADGYLPDWLEDTLSEGIRQWWKLKPGPPPPKPAERHKDDSRGLVLPGYKYLGPFNGLDKGEPVNEADAAALEHDKAYDRQLDSGDNPYLKYNHADAEFQERLKEDTSFGGNLARAVFQAKKRVLEPLGLVEEPVKTAPGKKRPVEHSPAEPDSSSGTGKSGQQPARKRLNFGQTGDADSVPDPQPLGQPPAAPSGLGTNTMASGSGAPMADNNEGADGVGNSSGNWHCDSTWMGDRVITTSTRTWALPTYNNHLYKQISSQSGASNDNHYFGYSTPWGYFDFNRFHCHFSPRDWQRLINNNWGFRPKRLNFKLFNIQVKEVTQNDGTTTIANNLTSTVQVFTDSEYQLPYVLGSAHQGCLPPFPADVFMVPQYGYLTLNNGSQAVGRSSFYCLEYFPSQMLRTGNNFTFSYTFEDVPFHSSYAHSQSLDRLMNPLIDQYLYYLSRTNTPSGTTTQSRLQFSQAGASDIRDQSRNWLPGPCYRQQRVSRTAADNNNSDYSWTGATKYHLNGRDSLVNPGTAMASHKDDEEKYFPQSGVLIFGKQDSGKTNVDIEKVMITDEEEIRTTNPVATEQYGSVSTNLQSGNTQAATSDVNTQGVLPGMVRQDRDVYLQGPIWAKIPHTDGHFHPSPLMGGFGLKHPPPQILIKNTPVPANPSTTFSAAKFASFITQYSTGQVSVEIEWEPQKENSKRWNPEIQYTSNYNKSVNVDFTVDTNGVYSEPRPIGTRYLTRNL

SEQ ID NO: 2532 - protein, 735 aa, Artificial Sequence
  source: /note="Description of Artificial Sequence: Synthetic polypeptide"
MAADGYLPDWLEDTLSEGIRQWWKLKPGPPPPKPAERHKDDSRGLVLPGYKYLGPFNGLDKGEPVNEADAAALEHDKAYDRQLDSGDNPYLKYNHADAEFQERLKEDTSFGGNLARAVFQAKKRVLEPLGLVEEPVKTAPGKKRPVEHSPAGPDSSSGTGKSGQQPARKRLNFGQTGDADSVPDPQPLGQPPAAPSGLGTNTMASGSGAPMADNNEGADGVGNSSGNWHCDSTWMGDRVITTSTRTWALPTYNNHLYKQISSQSGASNDNHYFGYSTPWGYFDFNRFHCHFSPRDWQRLINNNWGFRAKRLNFELFNIQVKEVTQNDGTTTIANNLTSTVQVFTDSEYQLPYVLGSAHQGCLPPFPADVFMVPQYGYLTLNNGSQAVGRSSFYCLEYFPSQMLRTGNNFTFSYTFEDVPFHSSYAHSQSLDRLMNPLIDQYLYYLSRTNTPSGTTTQSRLQFSQAGASDIRDQSRNWLPGPCYRQQRVSKTAADNNNSDYSWTGATKYHLNGRDSLVNPGTAMASHKDDEEKYFPQSGVLIFGKQDSGKTNVDIEKVMITDEEEIRTTNPVATEQYGSVSTNLQSGNTQAATSDVNTQGVLPGMVWQDRDVYLQGPIWAKIPHTDGHFHPSPLMGGFGLKHPPPQILIKSTPVPANPSTTFSAAKFASFITQYSTGQVSVEIEWELQKENSKRWNPEIQYTSNYNKSVNVDFTVDTNGVYSEPRPIGTRYLTRNL

SEQ ID NO: 2533 - protein, 735 aa, Artificial Sequence
  source: /note="Description of Artificial Sequence: Synthetic polypeptide"
MAADGYLPDWLEDTLSEGIRQWWKLKPGPPPPKPAERHKDDSRGLVLPGYKYLGPFNGLDKGEPVNEADAAALEHDKAYDRQLDSGDNPYLKYNHADAEFQERLKEDTSFGGNLARAVFQAKKRVLEPLGLVEEPVKTAPGKKRPVEHSPAEPDSSSGTGKSGQQPARKRLNFGQTGDADSVPDPQPLGQPPAAPSGLGTNTMASGSGAPMADNNEGADGVGNSSGNWHCDSTWMGDRVITTSTRTWALPTYNNHLYKQISSQSGASNDNHYFGYSTPWGYFDFNRFHCHFSPRDWQRLINNNWGFRPKRLNFKLFNIQVKEVTQNDGTTTIANNLTSTVQVFTDSEYQLPYVLGSAHQGCLPPFPADVFMVPQYGYLTLNNGSQAVGRSSFYCLEYFPSQMLRTGNNFTFSYTFEDVPFHSSYAHSQSLDRLMNPLIDQYLYYLSRTNTPSGTTTQSRLRFSQAGASDIRDQSRNWLPGPCYRQQRVSKTAADNNNSDYSWTGATKYHLNGRDSLVNPGTAMASHKDDEEKYFPQSGVLIFRKQDSGKTNVDIERVMITDEEEIRTTNPVATEQYGSVSTNLQSGNTQAATSDVNTQGVLPGMVWQDRDVYLQGPIWAKIPHTDGHFHPSPLMGGFGLKHPPPQILIKNTPVPANPSTTFSAAKFASFITQYSTGQVSVEIEWELQKENSKRWNPEIQYTSNYNKSVNVDFTVDTNGVYSEPRPIGTRYLTRNL

SEQ ID NO: 2534 - protein, 735 aa, Artificial Sequence
  source: /note="Description of Artificial Sequence: Synthetic polypeptide"
MAADGYLPDWLEDTLSEGIRQWWKLKPGPPPPKPAERHKDDSRGLVLPGYKYLGPFNGLDKGEPVNEADAAALEHDKAYDRQLDSGDNPYLKYNHADAEFQERLKEDTSFGGNLARAVFQAKKRVLEPLGLVEEPVKTAPGKKRPVEHSPAEPDSSSGTGKSGQQPARKRLNFGQTGDADSVPDPQPLGQPPAAPSGLGTNTMASGSGAPMADNNEGADGVGNSSGNWHCDSTWMGDRVITTSTRTWALPTYNNHLYKQISSQSGASNDNHYFGYSTPWGYFDFNRFHCHFSPRDWQRLINNNWGFRAKRLNFKLFNIQVKEVTQNDGTTTIANNLTSTVQVFTDSEYQLPYVLGSAHQGCLPPFPADVFMVPQYGYLTLNNGSQAVGRSSFYCLEYFPSQMLRTGNNFTFSYTFEDVPFHSSYAHSQSLDRLMNPLIDQYLYYLSRTNTPSGTTTQSRLRFSQAGASDIRDQSRNWLPGPCYRQQRVSKTAADNNNSDYSWTGATKYHLNGRDSLVNPGTAMASHKDDEEKYFPQSGVLIFGKQDSGKTNVDIERVMITDEEEIRTTNPVATEQYGSVSTNLQSGNTQAATSDVNTQGVLPGMVWQDRDVYLQGPIWAKIPHTDGHFHPSPLMGGFGLKHPPPQILIKNTPVPANPSTTFSAAKFASFITQYSTGQVSVEIEWELQKENSKRWNPEIQYTSNYNKSVNVDFTVDTNGVYSEPRPIGTRYLTRNL

SEQ ID NO: 2535 - protein, 735 aa, Artificial Sequence
  source: /note="Description of Artificial Sequence: Synthetic polypeptide"
MAADGYLPDWLEDTLSEGIRQWWKLKPGPPPPRPAERHQDDSRGLVLPGYKYLGPFNGLDKGEPVNEADAAALEHDKAYDRQLDSGDNPYLKYNHADAEFQERLKEDTSFGGNLGRAVFQAKKRVLEPLGLVEEPVKTAPGKKRPVEHSPAEPDSSSGTGKAGQQPARKRLNFGQTGDADSVPDPQPLGQPPAAPTSLGSTTMATGSGAPMADNNEGADGVGNSSGNWHCDSQWLGDRVITTSTRTWALPTYNNHLYKQISSQSGASNDNHYFGYSTPWGYFDFNRFHCHFSPRDWQRLINNNWGFRPKRLNFELFNIQVKEVTQNDGTTTIANNLTSTVQVFTDSEYQLPYVLGSAHQGCLPPFPADVFMVPQYGYLTLNNGSQAVGRSSFYCLEYFPSQMLRTGNNFTFSYTFEDVPFHSSYAHSQSLDRLMNPLIDQYLYYLSRTNTPSGTTTQSRLQFSQAGASDIRDQSRNWLPGPCYRQQRVSKTAADNNNSDYSWTGATKYHLNGRDSLVNPGTAMASHKDDEEKYFPQSGVLIFGKQDSGKTNVDIEKVMITDEEEIRTTNPVATEQYGSVSTNLQSGNTQAATSDVNTQGVLPGMVWQDRDVYLQGPIWAKIPHTDGHFHPSPLMGGFGLKHPPPQILIKSTPVPANPSTTFSAAKFASFITQYSTGQVSVEIEWELQKENSKRWNPEIQYTSNYNKSVNVDFTVDTNGVYSEPRPIGTRYLTRNL

SEQ ID NO: 2536 - protein, 735 aa, Artificial Sequence
  source: /note="Description of Artificial Sequence: Synthetic polypeptide"
MAADGYLPDWLEDTLSEGIRQWWKLKPGPPPPKPAERHKDDSRGLVLPGYKYLGPFNGLDKGEPVNEADAAALEHDKAYDRQLDSGDNPYLKYNHADAEFQERLKEDTSFGGNLARAVFQAKKRVLEPLGLVEEPVKTAPGKKRPVEHSPAGPDSSSGTGKSGQQPARKRLNFGQTGDADSVPDPQPLGQPPAAPSGLGTNTMASGSGAPMADNNEGADGVGNSSGNWHCDSTWMGDRVITTSTRTWALPTYNNHLYKQISSQSGASNDNHYFGYSTPWGYFDFNRFHCHFSPRDWHRLINNNWGFRPKRLNFELFNIQVKEVTQNDGTTTIANNLTSTVQVFTDSEYQLPYVLGSAHQGCLPPFPADVFMVPQYGYLTLNNGSQAVGRSSFYCLEYFPSQMLRTGNNFTFSYTFEDVPFHSSYARSQSLDRLMNPLIDQYLYYLSRTNTPSGTTTQSRLQFSQAGASDIRDQSRNWLPGPCYRQQRVSKTAADNNNSDYSWTGATKYHLNGRDSLVNPGTAMASHKDDEEKYFPQSGVLIFGKQDSGKTNVDIEKVMITDEEEIRTTNPVATEQYGSVSTNLQSGNTQAATSDVNTQGVLPGMVWQDRDVYLQGPIWAKIPHTDGHFHPSPLMGGFGLKHPPPQILIKSTPVPANPSTTFSAAKFASFITQYSTGQVSVEIEWELQKENSKRWNPEIQYTSNYNKSVNVDFTVDTNGVYSEPRPIGTRYLTRNL

SEQ ID NO: 2537 - protein, 735 aa, Artificial Sequence
  source: /note="Description of Artificial Sequence: Synthetic polypeptide"
MAADGYLPDWLEDTLSEGIRQWWKLKPGPPPPKPAERHKDDSRGLVLPGYKYLGPFNGLDKGEPVNEADAAALEHDKAYDRQLDSGDNPYLKYNHADAEFQERLKEDTSFGGNLARAVFQAKKRVLEPLGLVEEPVKTAPGKKRPVEHSPAGPDSSSGTGKSGQQPARKRLNFGQTGDADSVPDPQPLGQPPAAPSGLGTNTMASGSGAPMADNNEGADGVGNSSGNWHCDSTWMGDRVITTSTRTWALPTYNNHLYKQISSQSGASNDNHYFGYSTPWGYFDFNRFHCHFSPRDWQRLINNNWGFRPKRLNFELFNIQVKEVTQNDGTTTIANNLTSTVQVFTDSEYQLPYVLGSAHQGCLPPFPADVFMVPQYGYLTLNNGSQAVGRSSFYCLEYFPSQMLRTGNNFTFSYTFEDVPFHSSYAHSQSLDRLMNPLIDQYLYYLSRTNTPSGTTTQSRLQFSQAGASDIRDQSRNWLPGPCYRQQRVSKTAADNNNSDYSWTGATKYHLNGRDSLVNPGTAMASHKDDEEKYFPQSGVLIFGKQDSGKTNVDIEKVMITDEEEIRTTNPVATEQYGSVSTNLQSGNTQAATSDVNTQGVLPGMVWQDRDVYLQGPIWAKIPHTDGHFHPSPLMGGFGLKHPPPQILIKSTPVPANPSTTFSAAKFASFITQYSTGQVSVEIEWELQKENSKRWNPEIQYTSNYNKSVNVDFTVDANGVYSEPRPIGTRYLTRNL

SEQ ID NO: 2538 - protein, 735 aa, Artificial Sequence
  source: /note="Description of Artificial Sequence: Synthetic polypeptide"
MAADGYLPDWLEDTLSEGIRQWWKLKPGPPPPKPAERHKDDSRGLVLPGYKYLGPFNGLDKGEPVNEADAAALEHDKAYDRQLDSGDNPYLKYNHADAEFQERLKEDTSFGGNLARAVFQAKKRVLEPLGLVEEPVKTAPGKKRPVEHSPAGPDSSSGTGKSGQQPARKRLNFGQTGDADSVPDPQPLGQPPAAPSGLGTNTMASGSGAPMADNNEGADGVGNSSGNWHCDSTWMGDRVITTSTRTWALPTYNNHLYKQISSQSGASNDNHYFGYSTPWGYFDFNRFHCHFSPRDWQRLINNNLGFRAKRLNFELFNIQVKEVTQNDGTTTIANNLTSTVQVFTDSEYQLPYVLGSAHQGCLPPFPADVFMVPQYGYLTLNNGSQAVGRSSFYCLEYFPSQMLRTGNNFTFSYTFEDVPFHSSYAHSQSLDRLMNPLIDQYLYYLSRTNTPSGTTTQSRLQFSQAGASDIRDQSRNWLPGPCYRQQRVSKTAADNNNSDYSWTGATKYHLNGRDSLVNPGTAMASHKDDEEKYFPQSGVLIFGKQDSGKTNVDIEKVMITDEEEIRTTNPVATEQYGSVSTNLQSGNTQAATSDVNTQGVLPGMVWQDRDVYLQGPIWAKIPHTDGHFHPSPLMGGFGLKHPPPQILIKSTPVPANPSTTFSAAKFASFITQYSTGQVSVEIEWELQKENSKRWNPEIQYTSNYNKSVNVDFTVDTNGVYSEPRPIGTRYLTRNL

SEQ ID NO: 2539 - protein, 735 aa, Artificial Sequence
  source: /note="Description of Artificial Sequence: Synthetic polypeptide"
MAADGYLPDWLEDTLSEGIRQWWKLKPGPPPPKPAERHKDDSRGLVLPGYKYLGPFNGLDKGEPVNEADAAALEHDKAYDRQLDSGDNPYLKYNHADAEFQERLKEDTSFGGNLARAVFQAKKRVLEPLGLVEEPVKTAPGKKRPVEHSPAEPDSSSGTGKSGQQPARKRLNFGQTGDADSVPDPQPLGQPPAAPSGLGTNTMASGSGAPMADNNEGADGVGNSSGNWHCDSTWMGDRVITTSTRTWALPTYNNHLYKQISSQSGASNDNHYFGYSTPWGYFDFNRFHCHFSPRDWQRLINNNWGFRPKRLNFELFNIQVKEVTQNDGTTTIANNLTSTVQVFTDSEYQLPYVLGSAHQGCLPPFPADVFMVPQYGYLTLNNGSQAVGRSSFYCLEYFPSQMLRTGNNFTFSYTFEDVPFHSSYAHSQSLDRLMNPLIDQYLYYLSRTNTPSGTTTQSRLQFSQAGASDIRDQSRNWLPGPCYRQQRVSKTAADNNNSDYSWTGATKYHLNGRDSLVNPGTAMASHKDDEEKYFPQSGVLIFRKQDSGKTNVDIEKVMITDEEEIRTTNPVATEQYGSVSTNLQSGNTQAATSDVNTQGVLPGMVWQDRDVYLQGPIWAKIPHTDGHFHPSPLMGGFGLKHPPPQILIKSTPVPANPSTTFSAAKFASFITQYSTGQVSVEIEWELQKENSKRWNPEIQYTSNYNKSVNVDFTVDTNGVYSEPRPIGTRYLTRNL

SEQ ID NO: 2540 - protein, 735 aa, Artificial Sequence
  source: /note="Description of Artificial Sequence: Synthetic polypeptide"
MAADGYLPDWLEDTLSEGIRQWWKLKPGPPPPKPAERHQDDSRGLVLPGHKYLGPFNGLDKGEPVNEADAAALEHDKAYDRQLDSGDNPYLKYNHADAEFQERLKEDTSFGGNLGRAVFQAKKRVLEPLGLVEEPVKTAPGKKRPVEHSPAGPDSSSGTGKSGQQPARKRLNFGQTGDADSVPDPQPLGQPPAAPSGLGTNTMASGSGAPMADNNEGADGVGNSSGNWHCDSTWMGDRVITTSTRTWALPTYNNHLYKQISSQSGASNDNHYFGYSTPWGYFDFNRFHCHFSPRDWQRLINNNWGFRPKRLNFELFNIQVKEVTQNDGTTTIANNLTSTVQVFTDSEYQLPYVLGSAHQGCLPPFPADVFMVPQYGYLTLNNGSQAVGRSSFYCLEYFPSQMLRTGNNFTFSYTFEDVPFHSSYAHSQSLDRLMNPLIDQYLYYLSRTNTPSGTTTQSRLQFSQAGASDIRDQSRNWLPGPCYRQQRVSKTAADNNNSDYSWTGATKYHLNGRDSLVNPGTAMASHKDDEEKYFPQSGVLIFGKQDSGKTNVDIEKVMITDEEEIRTTNPVATEQYGSVSTNLQSGNTQAATSDVNTQGVLPGMVWQDRDVYLQGPIWAKIPHTDGHFHPSPLMGGFGLKHPPPQILIKSTPVPANPSTTFSAAKFASFITQYSTGQVSVEIEWELQKENSKRWNPEIQYTSNYNKSVNVDFTVDTNGVYSEPRPIGTRYLTRNL

SEQ ID NO: 2541 - protein, 735 aa, Artificial Sequence
  source: /note="Description of Artificial Sequence: Synthetic polypeptide"
MAADGYLPDWLEDTLSEGIRQWWKLKPGPPPPKPAERHKDDSRGLVLPGYKYLGPFNGLDKGEPVNEADAAALEHDKAYDRQLDSGDNPYLKYNHADAEFQERLKEDTSFGGNLARAVFQAKKRVLEPLGLVEEPVKTAPGKKRPVEHSPAGPDSSSGTGKSGQQPARKRLNFGQTGDADSVPDPQPLGQPPAAPSGLGTNTMASGSGAPMADNNEGADGVGNSSGNWHCDSTWMGDRVITTSTRTWALPTYNNHLYKQISSQSGASNDNHYFGYSTPWGYFDFNRFHCHFSPRDWHRLINNNWGFRPKRLNFELFNIQVKEVTQNDGTTTIANNLTSTVQVFTDSEYQLPYVLGSAHQGCLPPFPADVFMVPQYGYLTLNNGSQAVGRSSFYCLEYFPSQMLRTGNNFTFSYTFEDVPFHSSYAHSQSLDRLMNPLIDQYLYYLSRTNTPSGTTTQSRLQFSQAGASDIRDQSRNWLPGPCYRQQRVSKTAADNNNSDYSWTGATKYHLNGRDSLVNPGTAMASHKDDEEKYFPQSGVLIFGKQDSGKTNVDIEKVMITDEEEIRTTNPVATEQYGSVSTNLQSGNTQAATSDVNTQGVLPGMVWQDRDVYLQGPIWAKIPHTDGHFHPSPLMGGFGLKHPPPQILIKSTPVPANPSTTFSAAKFASFITQYSTGQVSVEIEWELQKENSKRWNPEIQYTSNYNKSVNVDFTVDTNGVYSEPRPIGTRYLTRNL

SEQ ID NO: 2542 - protein, 735 aa, Artificial Sequence
  source: /note="Description of Artificial Sequence: Synthetic polypeptide"
MAADGYLPDWLEDTLSEGIRQWWKLKPGPPPPKPAERHKDDSRGLVLPGYKYLGPFNGLDKGEPVNEADAAALEHDKAYDRQLDSGDNPYLKYNHADAEFQERLKEDTSFGGNLGRAVFQAKKRVLEPLGLVEEPVKTAPGKKRPVEHSPVEPDSSSGTGKAGQQPARKRLNFGQTGDADSVPDPQPLGQPPAAPSGLGTNTMATGSGAPMADNNEGADGVGNSSGNWHCDSTWMGDRVITTSTRTWALPTYNNHLYKQISSQSGASNDNHYFGYSTPWGYFDFNRFHCHFSPRDWQRLINNNWGFRPKRLSFKLFNIQVKEVTQNDGTTTIANNLTSTVQVFTDSEYQLPYVLGSAHQGCLPPFPADVFMVPQYGYLTLNNGSQAVGRSSFYCLEYFPSQMLRTGNNFTFSYTFEDVPFHSGYAHSQSLDRLMNPLIDQYLYYLSKTNAPSGTTTMSRLQFSQAGASDIRDQSRNWLPGPCYRQQRVSKTAADNNNSDYSWTGATKYHLNGRDSLVNPGPAMASHKDDEEKYFPQSGVLIFGKQGSNKTNVDIEKVMITDEEEIRTTNPVATEQYGSVSTNLQSGNTQAATSDVNTQGVLPGMVWQDRDVYLQGPIWAKIPHTDGHFHPSPLMGGFGLKHPPPQILIKNTPVPANPSTTFSAAKFASFITQYSTGQVSVEIEWELQKENSKRWNPEIQYTSNYNKSVNVDFTVDTNGVYSEPRPIGTRYLTRNL

SEQ ID NO: 2543 - protein, 735 aa, Artificial Sequence
  source: /note="Description of Artificial Sequence: Synthetic polypeptide"
MAADGYLPDWLEDTLSEGIRQWWKLKPGPPPPRPAERHQDDSRGLVLPGYKYLGPFNGLDKGEPVNEADAAALEHDKAYDRQLDSGDNPYLKYNHADAEFQERLKEDTSFGGNLGRAVFQAKKRVLEPLGLVEEPVKTAPGKKRPVEHSPAEPDSSSGTGKAGQQPARKRLNFGQTGDADSVPDPQPLGQPPAAPTSLGSTTMATGSGAPMADNNEGADGVGNSSGNWHCDSTWMGDRVITTSTRTWALPTYNNHLYKQISSQSGASNDNHYFGYSTPWGYFDFNRFHCHFSPRDWQRLINNNWGFRPKRLNFELFNIQVKEVTQNDGTTTIANNLTSTVQVFTDSEYQLPYVLGSAHQGCLPPFPADVFMVPQYGYLTLNNGSQAVGRSSFYCLEYFPSQMLRTGNNFTFSYTFEDVPFHSSYAHSQSLDRLMNPLIDQYLYYLSRTNTPSGTTTQSRLQFSQAGASDIRDQSRNWLPGPCYRQQRVSKTAADNNNSDYSWTGATKYHLNGRDSLVNPGTAMASHKDDEEKYFPQSGVLIFGKQDSGKTNVDIEKVMITDEEEIRTTNPVATEQYGSVSTNLQSGNTQAATSDVNTQGVLPGMVWQDRDVYLQGPIWAKIPHTDGHFHPSPLMGGFGLKHPPPQILIKSTPVPANPSTTFSAAKFASFITQYSTGQVSVEIEWELQKENSKRWNPEIQYTSNYNKSVNVDFTVDTNGVYSEPRPIGTRYLTRNL

SEQ ID NO: 2544 - protein, 735 aa, Artificial Sequence
  source: /note="Description of Artificial Sequence: Synthetic polypeptide"
MAADGYLPDWLEDTLSEGIRQWWKLKPGPPPPKPAERHQDDSRGLVLPGHKYLGPFNGLDKGEPVNEADAAALEHDKAYDRQLDSGDNPYLKYNHADAEFQERLKEDTSFGGNLGRAVFQAKKRVLEPLGLVEEPVKTAPGKKRPVEHSPAEPDSSSGTGKAGQQPARKRLNFGQTGDADSVPDPQPLGQPPAAPSGLGTNTMASGSGAPMADNNEGADGVGNSSGNWHCDSTWMGDRVITTSTRTWALPTYNNHLYKQISSQSGASNDNHYFGYSTPWGYFDFNRFHCHFSPRDWQRLINNNWGFRPKRLNFELFNIQVKEVTQNDGTTTIANNLTSTVQVFTDSEYQLPYVLGSAHQGCLPPFPADVFMVPQYGYLTLNNGSQAVGRSSFYCLEYFPSQMLRTGNNFTFSYTFEDVPFHSSYAHSQSLDRLMNPLIDQYLYYLSRTNTPSGTTTQSRLQFSQAGASDIRDQSRNWLPGPCYRQQRVSKTAADNNNSDYSWTGATKYHLNGRDSLVNPGTAMASHKDDEEKYFPQSGVLIFGKQDSGKTNVDIEKVMITDEEEIRTTNPVATEQYGSVSTNLQSGNTQAATSDVNTQGVLPGMVWQDRDVYLQGPIWAKIPHTDGHFHPSPLMGGFGLKHPPPQILIKSTPVPANPSTTFSAAKFASFITQYSTGQVSVEIEWELQKENSKRWNPEIQYTSNYNKSVNVDFTVDTNGVYSEPRPIGTRYLTRNL

SEQ ID NO: 2545 - protein, 735 aa, Artificial Sequence
  source: /note="Description of Artificial Sequence: Synthetic polypeptide"
MAADGYLPDWLEDTLSEGIRQWWKLKPGPPPPKPAERHKDDSRGLVLPGYKYLGPFNGLDKGEPVNEADAAALEHDKAYDRQLDSGDNPYLKYNHADAEFQERLKEDTSFGGNLARAVFQAKKRVLEPLGLVEEPVKTAPGKKRPVEHSPAEPDSSSGTGKSGQQPARKRLNFGQTGDADSVPDPQPLGQPPAAPSGLGTNTMASGSGAPMADNNEGADGVGNSSGNWHCDSTWMGDRVITTSTRTWALPTYNNHLYKQISSQSGASNDNHYFGYSTPWGYFDFNRFHCHFSPRDWQRLINNNWGFRPKRLNFKLFNIQVKEVTQNDGTTTIANNLTSTVQVFTDSEYQLPYVLGSAHQGCLPPFPADVFMVPQYGYLTLNNGSQAVGRSSFYCLEYFPSQMLRTGNNFTFSYTFEDVPFHSSYAHSQSLDRLMNPLIDQYLYYLSRTNTPSGTTTQSRLRFSQAGASDIRDQSRNWLPGPCYRQQRVSKTAADNNNSDYSWTGATKYHLNGRDSLVNPGTAMASHKDDEEKYFPQSGVLIFGKQDSEKTNVDIERVMITDEEEIRTTNPVATEQYGSVSTNLQSGNTQAATSDVNTQGVLPGMVWQDRDVYLQGPIWAKIPHTDGHFHPSPLMGGFGLKHPPPQILIKNTPVPANPSTTFSAAKFASFITQYSTGQVSVEIEWELQKENSKRWNPEIQYTSNYNKSVNVDFTVDTNGVYSEPRPIGTRYLTRNL

SEQ ID NO: 2546 - protein, 735 aa, Artificial Sequence
  source: /note="Description of Artificial Sequence: Synthetic polypeptide"
MAADGYLPDWLEDTLSEGIRQWWKLKPGPPPPKPAERHQDDSRGLVLPGYKYLGPFNGLDKGEPVNEADAAALEHDKAYDRQLDSGDNPYLKYNHADAEFQERLKEDTSFGGNLGRAVFQAKKRVLEPLGLVEEPVKTAPGKKRPVEHSPVEPDSSSGTGKAGQQPARKRLNFGQTGDADSVPDPQPLGQPPAAPSGLGTNTMATGSGAPMADNNEGADGVGNSSGNWHCDSTWMGDRVITTSTRTWALPTYNNHLYKQISSQSGASNDNHYFGYSTPWGYFDFNRFHCHFSPRDWQRLINNNWGFRPKRLSFKLFNIQVKEVTQNDGTTTIANNLTSTVQVFTDSEYQLPYVLGSAHQGCLPPFPADVFMVPQYGYLTLNNGSQAVGRSSFYCLEYFPSQMLRTGNNFTFSYTFEDVPFHSSYAHSQSLDRLMNPLIDQYLYYLSKTNAPSGTTTMSRLQFSQAGASDIRDQSRNWLPGPCYRQQRVSKTAADNNNSDYSWTGATKYHLNGRDSLVNPGPAMASHKDDEEKYFPQSGVLIFGKQGSNKTNVDIEKVMITDEEEIRTTNPVATEQYGSVSTNLQSGNTQAATSDVNTQGVLPGMVWQDRDVYLQGPIWAKIPHTDGHFHPSPLMGGFGLKHPPPQILIKNTPVPANPSTTFSAAKFASFITQYSTGQVSVEIEWELQKENSKRWNPEIQYTSNYNKSVNVDFTVDTNGVYSEPRPIGTRYLTRNL

SEQ ID NO: 2547 - protein, 735 aa, Artificial Sequence
  source: /note="Description of Artificial Sequence: Synthetic polypeptide"
MAADGYLPDWLEDTLSEGIRQWWKLKPGPPPPRPAERHQDDSRGLVLPGYKYLGPFNGLDKGEPVNEADAAALEHDKAYDRQLDSGDNPYLKYNHADAEFQERLKEDTSFGGNLGRAVFQAKKRVLEPLGLVEEPVKTAPGKKRPVEHSPAGPDSSSGTGKSGQQPARKRLNFGQTGDADSVPDPQPLGQPPAAPSGLGTNTMASGSGAPMADNNEGADGVGNSSGNWHCDSTWMGDRVITTSTRTWALPTYNNHLYKQISSQSGASNDNHYFGYSTPWGYFDFNRFHCHFSPRDWQRLINNNWGFRAKRLNFELFNIQVKEVTQNDGTTTIANNLTSTVQVFTDSEYQLPYVLGSAHQGCLPPFPADVFMVPQYGYLTLNNGSQAVGRSSFYCLEYFPSQMLRTGNNFTFSYTFEDVPFHSSYAHSQSLDRLMNPLIDQYLYYLSRTNTPSGTTTQSRLQFSQAGASDIRDQSRNWLPGPCYRQQRVSKTAADNNNSDYSWTGATKYHLNGRDSLVNPGTAMASHKDDEEKYFPQSGVLIFGKQDSGKTNVDIEKVMITDEEEIRTTNPVATEQYGSVSTNLQSGNTQAATSDVNTQGVLPGMVWQDRDVYLQGPIWAKIPHTDGHFHPSPLMGGFGLKHPPPQILIKSTPVPANPSTTFSAAKFASFITQYSTGQVSVEIEWELQKENSKRWNPEIQYTSNYNKSVNVDFTVDTNGVYSEPRPIGTRYLTRNL

SEQ ID NO: 2548 - protein, 735 aa, Artificial Sequence
  source: /note="Description of Artificial Sequence: Synthetic polypeptide"
MAADGYLPDWLEDTLSEGIRQWWKLKPGPPPPKPAERHKDDSRGLVLPGYKYLGPFNGLDKGEPVNEADAAALEHDKAYDRQLDSGDNPYLKYNHADAEFQERLKEDTSFGGNLARAVFQAKKRVLEPLGLVEEPVKTAPGKKRPVEHSPAGPDSSSGTGKSGQQPARKRLNFGQTGDADSVPDPQPLGQPPAAPSGLGTNTMASGSGAPTADNNEGADGVGNSSGNWHCDSTWMGDRVITTSTRTWALPTYNNHLYKQISSQSGASNDNHYFGYSTPWGYFDFNRFHCHFSPRDWQRLINNNWGFRPKRLNFELFNIQVKEVTQNDGTTTIANNLTSTVQVFTDSEYQLPYVLGSAHQGCLPPFPADVFMVPQYGYLTLNNGSQAVGRSSFYCLEYFPSQMLRTGNNFTFSYTFEDVPFHSSYAHSQSLDRLMNPLIDQYLYYLSRTNTPSGTTTQSRLQFSQAGASDIRDQSRNWLPGPCYRQQRVSKTAADNNNSDYSWTGATKYHLNGRDSLVNPGTAMASHKDDEEKYFPQSGVLIFGKQDSGKTNVDIEKVMITDEEEIRTTNPVATEQYGSVSTNLQSGNTQAATSDVNTQGVLPGMVWQDRDVYLQGPIWAKIPHTDGHFHPSPLMGGFGLKHPPPQILIKSTPVPANPSTTFSAAKFASFITQYSTGQVSVEIEWELQKENSKRWNPEIQYTSNYNKSVNVDFTVDTNGVYSEPRPIGTRYLTRNL

SEQ ID NO: 2549 - protein, 735 aa, Artificial Sequence
  source: /note="Description of Artificial Sequence: Synthetic polypeptide"
MAADGYLPDWLEDTLSEGIRQWWKLKPGPPPPKPAERHKDDSRGLVLPGYKYLGPFNGLDKGEPVNEADAAALEHDKAYDRQLDSGDNPYLKYNHADAEFQERLKEDTSFGGNLARAVFQAKKRVLEPLGLVEEPVKTAPGKKRPVEHSPAGPDSSSGTGKSGQQPARKRLNFGQTGDADSVPDPQPLGQPPAAPSGLGTNTMASGSGAPMADNNEGADGVGNSSGNWHCDSTWMGDRVITTSTRTWALPTYNNHLYKQISSQSGASNDNHYFGYSTPWGYFDFNRFHCHFSPRDWQRLINNNWGFRPKRLNFELFNIQVKEVTQNDGTTTIANNLTSTVQVFTDSEYQLPYVLGSAHQGCLPPFPADVFMVPQYGYLTLNNGSQAVGRSSFYCLEYFPSQMLRTGNNFTFSYTFEDVPFHSSYAHSQSLDRLMNPLIDQYLYYLSRTNTPSGTTTQSRLQFSQAGASDIRDQSRNWLPGPCYRQQRVSKTAADNNNSDYSWTGATKYHLNGRDSLVNPGTAMASHKDDEEKYFPQSGVLIFRKQDSGKTNVDIEKVMITDEEEIRTTNPVATEQYGSVSTNLQSGNTQAATSDVNTQGVLPGMVWQDRDVYLQGPIWAKIPHTDGHFHPSPLMGGFGLKHPPPQILIKSTPVPANPSTTFSAAKFASFITQYSTGQVSVEIEWELQKENSKRWNPEIQYTSNYNKSVNVDFTVDTNGVYSEPRPIGTRYLTRNL

SEQ ID NO: 2550 - protein, 735 aa, Artificial Sequence
  source: /note="Description of Artificial Sequence: Synthetic polypeptide"
MAADGYLPDWLEDTLSEGIRQWWKLKPGPPPPKPAERHKDDSRGLVLPGYKYLGPFNGLDKGEPVNEADAAALEHDKAYDRQLDSGDNPYLKYNHADAEFQERLKEDTSFGGNLARAVFQAKKRVLEPLGLVEEPVKTAPGKKRPVEHSPAEPDSSSGTGKSGQQPARKRLNFGQTGDADSVPDPQPLGQPPAAPSGLGTNTMASGSGAPMADNNEGADGVGNSSGNWHCDSTWMGDRVITTSTRTWALPTYNNHLYKQISSQSGASNDNHYFGYSTPWGYFDFNRFHCHFSPRDWQRLINNNWGFRPKRLNFKLFNIQVKEVTQNDGTTTIANNLTSTVQVFTDSEYQLPYVLGSAHQGCLPPFPADVFMVPQYGYLTLNNGSQAVGRSSFYCLEYFPSQMLRTGNNFTFSYTFEDVPFHSSYAHSQSLDRLMNPLIDQYLYYLSRTNTPSGTTTQSRLQFSQAGASDIRDQSRNWLPGPCYRQQRVSKTAADNNNSDYSWTGATKYHLNGRDSLVNPGTAMASHKDDEEKYFPQSGALIFGKQDSGKTNVDIEKVMITDEEEIRTTNPVATEQYGSVSTNLQSGNTQAATSDVNTQGVLPGMVWQDRDVYLQGPIWAKIPHTDGHFHPSPLMGGFGLKHPPPQILIKNTPVPANPSTTFSAAKFASFITQYSTGQVSVEIEWELQKENSKRWNPEIQYTSNYNKSVNVDFTVDTNGVYSEPRPIGTRYLTRNL

SEQ ID NO: 2551 - protein, 735 aa, Artificial Sequence
  source: /note="Description of Artificial Sequence: Synthetic polypeptide"
MAADGYLPDWLEDTLSEGIRQWWKLKPGPPPPKPAERHKDDSRGLVLPGYKYLGPFNGLDKGEPVNEADAAALEHDKAYDRQLDSGDNPYLKYNHADAEFQERLKEDTSFGGNLARAVFQAKKRVLEPLGLVEEPVKTAPGKKRPVEHSPAEPGSSSGTGKSGQQPARKRLNFGQTGDADSVPDPQPLGQPPAAPSGLGTNTMASGSGAPMADNNEGADGVGNSSGNWHCDSTWMGDRVITTSTRTWALPTYNNHLYKQISSQSGASNDNHYFGYSTPWGYFDFNRFHCHFSPRDWQRLINNNWGFRPKRLNFKLFNIQVKEVTQNDGTTTIANNLTSTVQVFTDSEYQLPYVLGSAHQGCLPPFPADVFMVPQYGYLTLNNGSQAVGRSSFYCLEYFPSQMLRTGNNFTFSYTFEDVPFHSSYARSQSLDRLMNPLIDQYLYYLSRTNTPSGTTTQSRLRFSQAGASDIRDQSRNWLPGPCYRQQRVSKTAADNNNSDYSWTGATKYHLNGRDSLVNPGTAMASHKDDEEKYFPQSGVLIFGKQDSGKTNVDIERVMITDEEEIRTTNPVATEQYGSVSTNLQSGNTQAATSDVNTQGVLPGMVWQDRDVYLQGPIWAKIPHTDGHFHPSPLMGGFGLKHPPPQILIKNTPVPANPSTTFSAAKFASFITQYSTGQVSVEIEWELQKENSKRWNPEIQYTSNYNKSVNVDFTVDTKGVYSEPRPIGTRYLTRNL

SEQ ID NO: 2552 - protein, 735 aa, Artificial Sequence
  source: /note="Description of Artificial Sequence: Synthetic polypeptide"
MAADGYLPDWLEDTLSEGIRQWWKLKPGPPPPKPAERHKDDSRGLVLPGYKYLGPFNGLDKGEPVNEADAAALEHDKAYDRQLDSGDNPYLKYNHADAEFQERLKEDTSFGGNLARAVFQAKKRVLEPLGLVEEPVKTAPGKKRPVEHSPAEPDSSSGTGKSGQQPARKRLNFGQTGDADSVPDPQPLGQPPAAPSGLGTNTMASGSGAPMADNNEGADGVGNSSGNWHCDSTWMGDRVITTSTRTWALPTYNNHLYKQISSQSGASNDNHYFGYSTPWGYFDFNRFHCHFSPRDWQRLINNNWGFRPKRLNFKLFNIQVKEVTQNDGTTTIANNLTSTVQVFTDSEYQLPYVLGSAHQGCLPPFPADVFMVPQYGYLTLNNGSQAVGRSSFYCLEYFPSQMLRTGNNFTFSYTFEDVPFHSSYAHSQSLDRLMNPLIDQYLYYLSRTNTPSGTTTQSRLQFSQAGASDIRDQSRNWLPGPCYRQQRVSKTAADNNNSDYSWTGATKYHLNGRDSLVNPGTAMASHKDDEEKYFPQSGVLIFGKQDSGKTNVDIEKVMITDEEEIRTTNPVATEQYGSVSTNLQSGNTQAATSDVNTQGVLPGMVWQDRDVYLQGPIWAKIPHTDGHFHPSPLMGGFGLKHPPPQILIKSTPVPANPSTTFSAAKFASFITQYSTGQVSVEIEWELQKENSKRWNPEIQYTSNYNKSVNVDFTVDTNGVYSEPRPIGTRYLTRNL

SEQ ID NO: 2553 - protein, 735 aa, Artificial Sequence
  source: /note="Description of Artificial Sequence: Synthetic polypeptide"
MAADGYLPDWLEDTLSEGIRQWWKLKPGPPPPKPAERHKDDSRGLVLPGYKYLGPFNGLDKGEPVNEADAAALEHDKAYDRQLDSGDNPYLKYNHADAEFQERLKEDTSFGGNLARAVFQAKKRVLEPLGLVEEPVKTAPGKKRPVEHSPAELDSSSGTGKSGQQPARKRLNFGQTGDADSVPDPQPLGQPPAAPSGLGTNTMASGSGAPMADNNEGADGVGNSSGNWHCDSTWMGDRVITTSTRTWALPTYNNHLYKQISSQSGASNDNHYFGYSTPWGYFDFNRFHCHFSPRDWQRLINNNWGFRPKRLNFKLFNIQVKEVTQNDGTTTIANNLTSTVQVFTDSEYQLPYVLGSAHQGCLPPFPADVFMVPQYGYLTLNNGSQAVGRSSFYCLEYFPSQMLRTGNNFTFSYTFEDVPFHSSYAHSQSLDRLMNPLIDQYLYYLSRTNTPSGTTTQSRLQFSQAGASDIRDQSRNWLPGPCYRQQRVSKTAADNNNSDYSWTGATKYHLNGRDSLVNPGTAMASHKDDEEKYFPQSGVLIFGKQDSGKTNVDIEKVMITDEEEIRTTNPVATEQYGSVSTNLQSGNTQAATSDVNTQGVLPGMVWQDRDVYLQGPIWAKIPHTDGHFHPSPLMGGFGPKHPPPQILIKNTPVPANPSTTFSAAKFASFITQYSTGQVSVEIEWELQKENSKRWNPEIQYTSNYNKSVNVDFTVDANGVYSEPRPIGTRYLTRNL

SEQ ID NO: 2554 - protein, 735 aa, Artificial Sequence
  source: /note="Description of Artificial Sequence: Synthetic polypeptide"
MAADGYLPDWLEDTLSEGIRQWWKLKPGPPPPKPAERHKDDSRGLVLPGYKYLGPFNGLDKGEPVNEADAAALEHDKAYDRQLDSGDNPYLKYNHADAEFQERLKEDTSFGGNLARAVFQAKKRVLEPLGLVEEPVKTAPGKKRPVEHSPAELDSSSGTGKSGQQPARKRLNFGQTGDADSVPDPQPLGQPPAAPSGLGTNTMASGSGAPMADNNEGADGVGNSSGNWHCDSTWMGDRVITTSTRTWALPTYNNHLYKQISSQSGASNDNHYFGYSTPWGYFDFNRFHCHFSPRDWQRLINNNWGFRPKRLNFKLFNIQVKEVTQNDGTTTIANNLTSTVQVFTDSEYQLPYVLGSAHQGCLPPFPADVFMVPQYGYLTLNNGSQAVGRSSFYCLEYFPSQMLRTGNNFTFSYTFEDVPFHSSYAHSQSLDRLMNPLIDQYLYYLSRTNTPSGTTTQSRLQFSQAGASDIRDQSRNWLPGPCYRQQRVSKTAADNNNSDYSWTGATKYHLNGRDSLVNPGTAMASHKDDEEKYFPQSGVLIFGKQDSGKTNVDIEKVMITDEEEIRTTNPVATEQYGSVSTNLRSGNTQAATSDVNTQGVLPGMVWQDRDVYLQGPIWAKIPHTDGHFHPSPLMGGFGPKHPPPQILIKNTPVPANPSTTFSAAKFASFITQYSTGQVSVEIEWELQKENSKRWNPEIQYTSNYNKSVNVDFTVDTNGVYSEPRPIGTRYLTRNL

SEQ ID NO: 2555 - protein, 735 aa, Artificial Sequence
  source: /note="Description of Artificial Sequence: Synthetic polypeptide"
MAADGYLPDWLEDTLSEGIRQWWKLKPGPPPPKPAERHKDDSRGLVLPGYKYLGPFNGLDKGEPVNEADAAALEHDKAYDRQLDSGDNPYLKYNHADAEFQERLKEDTPFGGNLARAVFQAKKRVLEPLGLVEEPVKTAPGKKRPVEHSPAELDSSSGTGKSGQQPARKRLNFGQTGDADSVPDPQPLGQPPAAPSGLGTNTMASGSGAPMADNNEGADGVGNSSGNWHCDSTWMGDRVITTSTRTWALPTYNNHLYKQISSQSGASNDNHYFGYSTPWGYFDFNRFHCHFSPRDWQRLINNNWGFRPKGLNFKLFNIQVKEVTQNDGTTTIANNLTSTVQVFTDSEYQLPYVLGSAHQGCLPPFPADVFMVPQYGYLTLNNGSQAVGRSSFYCLEYFPSQMLRTGNNFTFSYTFEDVPFHSSYAHSQSLDRLMNPLIDQYLYYLSRTNTPSGTTTQSRLQFSQAGASDIRDQSRNWLPGPCYRQQRVSKTAADNNNSDYSWTGATKYHLNGRDSLVNPGTAMASHKDDEEKYFPQSGVLIFGKQDSGKTNVDIEKVMITDEEEIRTTNPVATEQYGSVSTNLQSGNTQAATSDVNTQGVLPGMVWQDRDVYLQGPIWAKIPHTDGHFHPSPLMGGFGPKHPPPQILIKNTPVPANPSTTFSAAKFASFITQYSTGQVSVEIEWELQKENSKRWNPEIQYTSNYNKSVNVDFTVDTNGVYSEPRPIGTRYLTRNL

SEQ ID NO: 2556 - protein, 735 aa, Artificial Sequence
  source: /note="Description of Artificial Sequence: Synthetic polypeptide"
MAADGYLPDWLEDTLSEGIRQWWKLKPGPPPPKPAERHKDDSRGLVLPGYKYLGPFNGLDKGEPVNEADAAALEHDKAYDRQLDSGDNPYLKYNHADAEFQERLKEDTSFGGNLARAVFQAKKRVLEPLGLVEEPVKTAPGKKRPVEHSPAELDSSSGTGKSGQQPARKRLNFGQTGDADSVPDPQPLGQPPAAPSGLGTNTMASGSGAPMADNNEGADGVGNSSGNWHCDSTWMGDRVITTSTRTWALPTYNNHLYKQISSQSGASNDNHYLGYSTPWGYFDFNRFHCHFSPRDWQRLINNNWGFRPKRLNFKLFNIQVKEVTQNDGTTTIANNLTSTVQVFTDSEYQLPYVLGSAHQGCLPPFPADVFMVPQYGYLTLNNGSQAVGRSSFYCLEYFPSQMLRTGNNFTFSYTFEDVPFHSSYAHSQSLDRLMNPLIDQYLYYLSRTNTPSGTTTQSRLQFSQAGASGIRDQSRNWLPGPCYRQQRVSKTAADNNNSDYSWTGATKYHLNGRDSLVNPGTAMASHKDDEEKYFPQSGVLIFGKQDSGKTNVDIEKVMITDEEEIRTTNPVATEQYGSVSTNLQSGNTQAATSDVNTQGVLPGMVWQDRDVYLQGPIWAKIPHTDGHFHPSPLMGGFGPKHPPPQILIKNTPVPANPSTTFSAAKFASFITQYSTGQVSVEIEWELQKGNSKRWNPEIQYTSNYNKSVNVDFTVDTNGVYSEPRPIGTRYLTRNL

SEQ ID NO: 2557 - protein, 735 aa, Artificial Sequence
  source: /note="Description of Artificial Sequence: Synthetic polypeptide"
MAADGYLPDWLEDTLSEGIRQWWKLKPGPPPPKPAERHKDDSRGLVLPGYKYLGPFNGLDKGEPVNEADAAALEHDKAYDRQLDSGDNPYLKYNHADAEFQERLKEDTSFGGNLARAVFQAKKRVLEPLGLVEEPVKTAPGKKRPVEHSPAELDSSSGTGKSGQQPARKRLNFGQTGDADSVPDPQPLGQPPAAPSGLGTNTMASGSGAPMADNNEGADGVGNSSGNWHCDSTWMGDRVITTSTRTWALPTYNNHLYKQISSQSGASNDNHYFGYSTPWGYFDFNRFHCHFSPRDWQRLINNNWGFRPKRLNFKLFNIQVKEVTQNDGTTTIANNLTSTVQVFTDSEYQLPYVLGSAHQGCLPPFPADVFMVPQYGYLTLNNGSQAVGRSSFYCLEYFPSQMLRTGNNFTFSYTFEDVPFHSSYAHSQSLDRLMNPLIDQYLYYLSRTNTPSGTTTQSRLQFSQAGASDIRDQSRNWLPGPCYRQQRVSKTAADNNNSDYSWTGATKYHLNGRDSLVNPGTAMASHKDDEEKYFPQSGVLIFGKQDSGKTNVDIEKVMITDEEEIRTTNPVATEQYGSVSTNLQSGNTQAATSDVNTQGVLPGMVWQDRDVYLQGPIWAKIPHTDGHFHPSPLMGGFGPKHPPPQILIKNTPVPANPSTTFSAAKFASFITQYSTGQVSVEIEWELQKENSKRWNPEIQYTSNYNKSVNVDFTVDTNGVYSEPRPIGTRYPTRNL

SEQ ID NO: 2558 - protein, 735 aa, Artificial Sequence
  source: /note="Description of Artificial Sequence: Synthetic polypeptide"
MAADGYLPDWLEDTLSEGIRQWWKLKPGPPPPKPAERHKDDSRGLVLPGYKYLGPFNGLDKGEPVNEADAAALEHDKAYDRQLDSGDNPYLKYNHADAEFQERLKEDTSFGGNLARAVFQAKKRVLEPLGLVEEPVKTAPGKKRPVEHSPAELDSSSGTGKSGQQPARKRLNFGQTGDADSVPDPQPLGQPPAAPSGLGTNTMASGSGAPMADNNEGADGVGNSSGNWHCDSTWMGDRVITTSTRTWALPTYNNHLYKQISSQSGASNDNHYFGYSTPWGYFDFNRFHCHFSPRDWQRLINNNWGFRPKRLNFKLFNIQVKEVTQNDGTTTIANNLTSTVQVFTDSEYQLPYVLGSAHQGCLPPFPADVFMVPQYGYLTLNNGSQAVGRSSFYCLEYFPSQMLRTGNNFTFSYTFEDVPFHSSYAHSQSLDRLMNPLIDQYLYYLSRTNTPSGTTTQSRLQFSQAGASDIRDQSRNWLPGPCYRQQRVSKTAADNNNSDYSWTGATKYHLNGRDSLVNPGTAMASHKDDEEKYFPQSGVLIFGKQDSGKTNVDIEKVMITDEEEIRTTNPVATEQYGSVSTNLQSGNTQAATSDVNTQGVLPGMVWQDRDVYLQGPIWAKIPHTDGHFHPSPLMGGFGPKHPPPQILIKNTPVPANPSTTFSAAKLASFITQYSTGQVSVEIEWELQKENSKRWNPEIQYTSNYNKSVNVDFTVDTNGVYSEPRPIGTRYLTRNL

SEQ ID NO: 2559 - protein, 735 aa, Artificial Sequence
  source: /note="Description of Artificial Sequence: Synthetic polypeptide"
MAADGYLPDWLEDTLSEGIRQWWKLKPGPPPPKPAERHKDDSRGLVLPGYKYLGPFNGLDKGEPVNEADAAALEHDKAYDRQLDSGDNPYLKYNHADAEFQERLKEDTSFGGNLARAVFQAKKRVLEPLGLVEEPVKTAPGKKRPVEHSPAELDSSSGTGKSGQQPARKRLNFGQTGDADSVPDPQPLGQPPAAPSGLGTNTMASGSGAPMADNNEGADGVGNSSGNWHCDSTWMGDRVITTSTRTWALPTYNNHLYKQISSQSGASNDNHYFGYSTPWGYFDFNRFHCHFSPRDWQRLINNNWGFRPKRLNFKLFNIQVKEVTQNDGTTTIANNLTSTVQVFTDSEYQLPYVLGSAHQGCLPPFPADVFMVPQYGYLTLNNGSQAVGRSSFYCLEYFPSQMLRTGNNFTFSYTFEDVPFHSSYAHSQSLDRLMNPLIDQYLYYLSRTNTPSGTTTQSRLQFSQAGASDIRDQSRNWLPGPCYRQQRVSKTAADNNNSDYSWTGATKYHLNGRDSLVNPGTAMASHKDDEEKYFPQSGVLIFGKQDSGKTNVDIEKVMITDEEEIRTTNPVATEQYGSVSTNLQSGNTQAATSDVNTQGVLPGMVWQDRDVYLQGPIWAKIPHTDGHFHPSPLMGGFGPKHPPPQILIKNTPVPANPSTTFSAAKFASFTTQYSTGQVSVEIEWELQKENSKRWNPEIQYTSNYNKSVNVDFTVDTNGVYSEPRPIGTRYLTRNL

SEQ ID NO: 2560 - protein, 735 aa, Artificial Sequence
  source: /note="Description of Artificial Sequence: Synthetic polypeptide"
MAADGYLPDWLEDTLSEGIRQWWKLKPGPPPPKPAERHKDDSRGLVLPGYKYLGPFNGLDKGEPVNEADAAALEHDKAYDRQLDSGDNPYLKYNHADAEFQERLKEDTSFGGNLARAVFQAKKRVLEPLGLVEEPVKTAPGKKRPVEHSPAELDSSSGTGKSGQQPARKRLNFGQTGDADSVPDPQPLGQPPAAPSGLGTNTMASGSGAPMADNNEGADGVGNSSGNWHCDSTWMGDRVITTSTRTWALPTYNNHLYKQISSQSGASNDNHYFGYSTPWGYFDFNRFHCHFSPRDWQRLINNNWGFRPKRLNFKLFNIQVKEVTQNDGTTTIANNLTSTVQVFTDSEYQLPYVLGSAHQGCLPPFPADVFMVPQYGYLTLNNGSQAVGRSSFYCLEYFPSQMLRTGNNFTFSYTFEDVPFHSSYAHSQSLDRLMNPLIDQYLYYLSRTNTPSGTTTQSRLQFSQAGASDIRDQSRNWLPGPCYRQQRVSKTAADNNNSDYSWTGATKYHLNGRDSLVNPGTAMASHKDDEEKYFPRSGVLIFGKQDSGKTNVDIEKVMITDEEEIRTTNPVATEQYGSVSTNLQSGNTQAATSDVNTQGVLPGMVWQDRDVYLQGPIWAKIPHTDGHFHPSPLMGGFGPKHPPPQILIKNTPVPANPSTTFSAAKFASFITQYSTGQVSVEIEWELQKENSKRWNPEIQYTSNYNKSVNVDFTVDTNGVYSEPRPIGTRYLTRNL

SEQ ID NO: 2561 - protein, 735 aa, Artificial Sequence
  source: /note="Description of Artificial Sequence: Synthetic polypeptide"
MAADGYLPDWLEDTLSEGIRQWWKLKPGPPPPKPAERHKDDSRGLVLPGYKYLGPFNGLDKGEPVNEADAAALEHDKAYDRQLDSGDNPYLKYNHADAEFQERLKEDTSFGGNLARAVFQAKKRVLEPLGLVEEPVKTAPGKKRPVEHSPAELDSSSGTGKSGQQPARKRLNFGQTGDADSVPDPQPLGQPPAAPSGLGTNTMASGSGAPMADNNEGADGVGNSSGNWHCDSTWMGDRVITTSTRTWALPTYNNHLYKQISSQSGASNDNHYFGYSTPWGYFDFNRFHCHFSPRDWQRLINNNWGFRPKRLNFKLFNIQVKEVTQNDGTATIANNLTSTVQVFTDSEYQLPYVLGSAHQGCLPPFPADVFMVPQYGYLTLNNGSQAVGRSSFYCLEYFPSQMLRTGNNFTFSYTFEDVPFHSSYAHSQSLDRLMNPLIDQYLYYLSRTNTPSGTTTQSRLQFSQAGASDIRDQSRNWLPGPCYRQQRVSKTAADNNNSDYSWTGATKYHLNGRDSLVNPGTAMASHKDDEEKYFPQSGVLIFGKQDSGKTNVDIEKVMITDEEEIRTTNPVATEQYGSVSTNLQSGNTQAATSDVNTQGVLPGMVWQDRDVYLQGPIWAKIPHTDGHFHPSPLMGGFGPKHPPPQILIKNTPVPANPSTTFSAAKFASFITQYSTGQVSVEIEWELQKENSKRWNPEIQYTSNYNKSVNVDFTVDTNGVYSEPRPIGTRYLTRNL

SEQ ID NO: 2562 - protein, 735 aa, Artificial Sequence
  source: /note="Description of Artificial Sequence: Synthetic polypeptide"
MAADGYLPDWLEDTLSEGIRQWWKLKPGPPPPKPAERHKDDSRGLVLPGYKYLGPFNGLDKGEPVNEADAAALEHDKAYDRQPDSGDNPYLKYNHADAEFQERLKEDTSFGGNLARAVFQAKKRVLEPLGLVEEPVKTAPGKKRPVEHSPAELDSSSGTGKSGQQPARKRLNFGQTGDADSVPDPQPLGQPPAAPSGLGTNTMASGSGAPMADNNEGADGVGNSSGNWHCDSTWMGDRVITTSTRTWALPTYNNHLYKQISSQSGASNDNHYFGYSTPWGYFDFNRFHCHFSPRDWQRLINNNWGFRPKRLNFKLFNIQVKEVTQNDGTTTIANNLTSTVQVFTDSEYQLPYVLGSAHQGCLPPFPADVFMVPQYGYLTLNNGSQAVGRSSFYCLEYFPSQMLRTGNNFTFSYTFEDVPFHSSYAHSQSLDRLMNPLIDQYLYYLSRTNTPSGTTTQSRLQFSQAGASDIRDQSRNWLPGPCYRQQRVSKTAADNNNSDYSWTGATKYHLNGRDSLVNPGTAMASHKDDEEKYFPQSGVLIFGKQDSGKTNVDIEKVMITDEEEIRTTNPVATEQYGSVSTNLQSGNTQAATSDVNTQGVLPGMVWQDRDVYLQGPIWAKIPHTDGHFHPSPLMGGFGPKHPPPQILIKNTPVPANPSTTFSAAKFASFITQYSTGQVSVEIEWELQKENSKRWNPEIQYTSNYNKSVNVDFTVDTNGVYSEPRPIGTRYLTRNL

SEQ ID NO: 2563 - protein, 735 aa, Artificial Sequence
  source: /note="Description of Artificial Sequence: Synthetic polypeptide"
MAADGYLPDWLEDTLSEGIRQWWKLEPGPPPPKPAERHKDDSRGLVLPGYKYLGPFNGLDKGEPVNEADAAALEHDKAYDRQLDSGDNPYLKYNHADAEFQERLKEDTPFGGNLARAVFQAKKRVLEPLGLVEEPVKTAPGKKRPVEHSPAELDSSSGTGKSGQQPARKRLNFGQTGDADSVPDPQPLGQPPAAPSGLGTNTMASGSGAPMADNNEGADGVGNSSGNWHCDSTWMGDRVITTSTRTWALPTYNNHLYKQISSQSGASNDNHYFGYSTPWGYFDFNRFHCHFSPRDWQRLINNNWGFRPKRLNFKLFNIQVKEVTQNDGTTTIANNLTSTVQVFTDSEYQLPYVLGSAHQGCLPPFPADVFMVPQYGYLTLNNGSQAVGRSSFYCLEYFPSQMLRTGNNFTFSYTFEDVPFHSSYAHSQSLDRLMNPLIDQYLYYLSRTNTPSGTTTQSRLQFSQAGASDIRDQSRNWLPGPCYRQQRVSKTAADNNNSDYSWTGATKYHLNGRDSLVNPGTAMASHEDDEEKYFPQSGVLIFGKQDSGKTNVDIEKVMITDEEEIRTTNPVATEQYGSVSTNLQSGNTQAATSDVNTQGVLPGMVWQDRDVYLQGPIWAKIPHTDGHFHPSPLMGGFGPKHPPPQILIKNTPVPANPSTTFSAAKFASFITQYSTGQVSVEIEWELQKENSKRWNPEIQYTSNYNKSVNVDFTVDTNGVYSEPRPIGTRYLTRNL

SEQ ID NO: 2564 - protein, 734 aa, Artificial Sequence
  source: /note="Description of Artificial Sequence: Synthetic polypeptide"
MAADGYLPDWLEDTLSEGIRQWWKLKPGPPPPKPAERHKDDSRGLVLPGYKYLGPFNGLDKGEPVNEADAAALEHDKAYDRQLDSGDNPYLKYNHADAEFQERLKEDTSFGGNLARAVFQAKKRVLEPLGLVEEPVKTAPGKKRPVEHSPAELDSSSGTGKSGQQPARKRLNFGQTGDADSVPDPQPLGQPPAAPSGLGTNTMASGSGAPMADNNEGADGVGNSSGNWHCDSTWMGDRVITTSTRTWALPTYNNHLYKQISSQSGASNDNHYFGYSTPWGYFDFNRFHCHFSPRDWQRLINNNWGFRPKRLNFKLFNIQVKEVTQNDGTTTIANNLTSTVQVFTDSEYQLPYVLGSAHQGCLPPFPADVFMVPQYGYLTLNNGSQAVGRSSFYCLEYFPSQMLRTGNNFTFSYTFEDVPFHSSYAHSQSLDRLMNPLIDQYLYYLSRTNTPSGTTTQSRLQFSQAGASDIRDQSRNWLPGPCYRQQRVSKTAADNNSDYSWTGATKYHLNGRDSLVNPGTAMASHKDDEEKYFPQSGVLIFGKQDSGKTNVDIEKVMITDEEEIRTTNPVATEQYGSVSTNLQSGNTQAATSDVNTQGVLPGMVWQDRDVYLQGPIWAKIPHTDGHFHPSPLMGGFGPKHPPPQILIKNTPVPANPSTTFSAAKFASFITQYSTGQVSVEIEWELQKENSKRWNPEIQYTSNYNKSVNVDFTVDTNGVYSEPRPIGTRYLTRNL

SEQ ID NO: 2565 - protein, 735 aa, Artificial Sequence
  source: /note="Description of Artificial Sequence: Synthetic polypeptide"
MAADGYLPDWLEDTLSEGIRQWWKLKPGPPPPKPAERHKDDSRGLVLPGYKYLGPFNGLDKGEPVNEADAAALEHDKAYDRQLDSGDNPYLKYNHADAEFQERLKEDTPFGGNLARAVFQAKKRVLEPLGLVEEPVKTAPGKKRPVEHSPAELDSSSGTGKSGQQPARKRLNFGQTGDADSVPDPQPLGQPPAAPSGLGTNTMASGSGAPMADNNEGADGVGNSSGNWHCDSTWMGDRVITTSTRTWALPTYNNHLYKQISSQSGASNDNHYFGYSTPWGYFDFNRFHCHFSPRDWQRLINNNWGFRPKRLNFKLFNIQVKEVTQNGGTTTIANNLTSTVQVFTDSEYQLPYVLGSAHQGCLPPFPADVFMVPQYGYLTLNNGSQAVGRSSFYCLEYFPSQMLRTGNNFTFSYTFEDVPFHSSYAHSQSLDRLMNPLIDQYLYYLSRTNTPSGTTTQSRLQFSQAGASDIRDQSRNWLPGPCYRQQRVSKTAADNNNSDYSWTGATKYHLNGRDSLVNPGTAMASHKDDEEKYFPQSGVLIFGKQDSGKTNVDIEKVMITDEEEIRTTNPVATEQYGSVSTNLQSGNTQAATSDVNTQGVLPGMVWQDRDVYLQGPIWAKIPHTDGHFHPSPLMGGFGPKHPPPQILIKNTPVPANPSTTFSAAKFASFITQYSTGQVSVEIEWELQKENSKRWNPEIQYTSNYNKSVNVDFTVDTNGVYSEPRPIGTRYLTRNL

SEQ ID NO: 2566 - protein, 735 aa, Artificial Sequence
  source: /note="Description of Artificial Sequence: Synthetic polypeptide"
MAADGYLPDWLEDTLSEGIRQWWKLKPGPPPPKPAERHKDDSRGLVLPGYKYLGPFNGLDKGEPVNEADAAALEHDKAYDRQLDSGDNPYLKYNHADAEFQERLKEDTSFGGNLARAVFQAKKGVLEPLGLVEEPVKTAPGKKRPVEHSPAELDSSSGTGKSGQQPARKRLNFGQTGDADSVPDPQPLGQPPAAPSGLGTNTMASGSGAPMADNNEGADGVGNSSGNWHCDSTWMGDRVITTSTRTWALPTYNNHLYKQISSQSGASNDNHYFGYSTPWGYFDFNRFHCHFSPRDWQRLINNNWGFRPKRLNFKLFNIQVKEVTQNDGTTTIANNLTSTVQVFTDSEYQLPYVLGSAHQGCLPPFPADVFMVPQYGYLTLNNGSQAVGRSSFYCLEYFPSQMLRTGNNFTFSYTFEDVPFHSSYAHSQSLDRLMNPLIDQYLYYLSRTNTPSGTTTQSRLQFSQAGASDIRDQSRNWLPGPCYRQQRVSKTAADNNNSDYSWTGATKYHLNGRDSLVNPGTAMASHKDDEEKYFPQSGVLIFGKQDSGKTNVDIEKVMITDEEEIRTTNPVATEQYGSVSTNLQSGNTQAATSDVNTQGVLPGMVWQDRDVYLQGPIWAKIPHTDGHFHPSPLMGGFGPKHPPPQILIKNTPVPANPSTTFSAAKFASFITQYSTGQVSVEIEWELQKENSKRWNPEIQYTSNYNKSVNVDFTVDTNGVYSEPRPIGTRYLTRNL

SEQ ID NO: 2567 - protein, 735 aa, Artificial Sequence
  source: /note="Description of Artificial Sequence: Synthetic polypeptide"
MAADGYLPDWLEDTLSEGIRQWWKLKPGPPPPKPAERHKDDSRGLVLPGYKYLGPFNGLDKGEPVNEADAAALEHDKAYDRQLDSGDNPYLKYNHADAEFQERLKEDTSFGGNLARAVFQAKKRVLEPLGLVEEPVKTAPGKKRPVEHSPAELDSSSGTGKSGQQPARKRLNFGQTGDADSVPDPQPLGQPPAAPSGLGTNTMASGSGAPMADNNEGADGVGNSSGNWHCDSTWMGDRVITTSTRTWALPTYNNHLYKQISSQSGASNDNHYFGYSTPWGYFDFNRFHCHFSPRDWQRLINNNWGFRPKRLNFKLFNIQVKEVTQNDGTTTIANNLTSTVQVFTDSEYQLPYVLGSAHQGCLPPFPADVFMVPQYGYLTLNNGSQAVGRSSFYCLEYFPSQMLRTGNNFTFSYTFEDVPFHSSYAHSQSLDRLMNPLIDQYLYYLSRTNTPSGTTTQSRLQFSQAGASDIRDQSRNWLPGPCYRQQRVSKTAADNNNSDYSWTGATKYHLNGRDSLVNPGTAMASHKDDEEKYFPQSGVLIFGKQDSGKTNVDIEKVMITDEEEIRTTNPVATEQYGSVSTNLQSGNTQAATSDVNTQGVLPGMVWQDRDVYLQGPIWARIPHTDGHFHPSPLMGGFGPKHPPPQILIKNTPVPANPSTTFSAAKFASFITQYSTGQVSVEIEWELQKENSKRWNPEIQYTSNYNKSVNVDFTVDTNGVYSEPRPIGTRYLTRNL

SEQ ID NO: 2568 - protein, 735 aa, Artificial Sequence
  source: /note="Description of Artificial Sequence: Synthetic polypeptide"
MAADGYLPDWLEDTLSEGIRQWWKLKPGPPPPKPAERHKDDSRGLVLPGYKYLGPFNGLDKGEPVNEADAAALEHDKAYDRQLDSGDNPYLKYNHADAEFQERLKEDTSFGGNLARAVFQAKKRVLEPLGLVEEPVKTAPGKKRPVGHSPAELDSSSGTGKSGQQPARKRLNFGQTGDADSVPDPQPLGQPPAAPSGLGTNTMASGSGAPMADNNEGADGVGNSSGNWHCDSTWMGDRVITTSTRTWALPTYNNHLYKQISSQSGASNDNHYFGYSTPWGYFDFNRFHCHFSPRDWQRLINNNWGFRPKRLNFKLFNIQVKEVTQNDGTTTIANNLTSTVQVFTDSEYQLPYVLGSAHQGCLPPFPADVFMVPQYGYLTLNNGSQAVGRSSFYCLEYFPSQMLRTGNNFTFSYTFEDVPFHSSYAHSQSLDRLMNPLIDQYLYYLSRTNTPSGTTTQSRLQFSQAGASDIRDQSRNWLPGPCYRQQRVSKTAADNNNSDYSWTGATKYHLNGRDSLVNPGTAMASHKDDEEKYFPQSGVLIFGKQDSGKTNVDIEKVMITDEEEIRTTNPVATEQYGSVSTNLQSGNTQAATSDVNTQGVLPGMVWQDRDVYLQGPIWAKIPHTDGHFHPSPLMGGFGPKHPPPQILIKNTPVPANPSTTFSAAKFASFITQYSTGQVSVEIEWELQKENSKRWNPEIQYTSNYNKSVNVDFTVDTNGVYSEPRPIGTRYLTRNL

SEQ ID NO: 2569 - protein, 735 aa, Artificial Sequence
  source: /note="Description of Artificial Sequence: Synthetic polypeptide"
MAADGYLPDWLEDTLSEGIRQWWKLKPGPPPPKPAERHKDDSRGLVLPGYKYLGPFNGLDKGEPVNEADAAALEHDKAYDRQLDSGDNPYLKYNHADAEFQERLKEDTSFGGNLARAVFQAKKRVLEPLGLVEEPVKTAPGKKRPVEHSPAELDSSSGTGKSGQQPARKRLNFGQTGDADSVPDPQPLGQPPAAPSGLGTNTMASGSGAPMADNNEGADGVGNSSGNWHCDSTWMGDRVITTSTRTWALPTYNNHLYKQISSQSGASNDNHYFGYSTPWGYFDFNRFHCHFSPRDWQRLINNNWGFRPKRLNFKLFNIQVKEVTQNDGTTTIANNLTSTVQVFTDSEYQLPYVLGSAHQGCLPPFPADVFMVPQYGYLTLNNGSQAVGRSSFYCLEYFPSQMLRTGNNFTFSYTFEDVPFHSSYAHSQSLDRLMNPLIDQYLYYLSRTNTPSGTTTQSRLQFSQAGASDIRDQSRNWLPGPCYRQQRVSKTAADNNNSDYSWTGATKYHLNGRDSLVNPGTAMASHKDDEEKYFPQSGVLIFGKQDSGKTNVDIEKVMITDEEEIRTTNPVATEQYGSVSTNLQSGNTQAATSDVNTQGVLPGMVWQDRDVYLQGPIWAKIPHTDGHFHPSPLMGGFGPKHPPPQILIKNTPVPANPSTTFSAAKFASFITQYSTGQVSVEIEWELQKGNSKRWNPEIQYTSNYNKSVNVDFTVDTNGVYSEPRPIGTRYLTRNL

SEQ ID NO: 2570 - protein, 735 aa, Artificial Sequence
  source: /note="Description of Artificial Sequence: Synthetic polypeptide"
MAADGYLPDWLEDTLSEGIRQWWKLKPGPPPPKPAERHKDDSRGLVLPGYKYLGPFNGLDKGEPVNEADAAALEHDKAYDRQLDSGDNPYLKYNHADAEFQERLKEDTPFGGNLARAVFQAKKRVLEPLGLVEEPVKTAPGKKGPVEHSPAELDSSSGTGKSGQQPARKRLNFGQTGDADSVPDPQPLGQPPAAPSGLGTNTMASGSGAPMADNNEGADGVGNSSGNWHCDSTWMGDRVITTSTRTWALPTYNNHLYKQISSQSGASNDNHYFGYSTPWGYFDFNRFHCHFSPRDWQRLINNNWGFRPKRLNFKLFNIQVKEVTQNDGTTTIANNLTSTVQVFTDSEYQLPYVLGSAHQGCLPPFPADVFMVPQYGYLTLNNGSQAVGRSSFYCLEYFPSQMLRTGNNFTFSYTFEDVPFHSSYAHSQSLDRLMNPLIDQYLYYLSRTNTPSGTTTQSRLQFSQAGASDIRDQSRSWLPGPCYRQQRVSKTAADNNNSDYSWTGATKYHLNGRDSLVNPGTAMASHKDDEEKYFPQSGVLIFGKQDSGKTNVDIEKVMITDEEEIRTTNPVATEQYGSVSTNLQSGNTQAATSDVNTQGVLPGMVWQDRDVYLQGPIWAKIPHTDGHFHPSPLMGGFGPKHPPPQILIKNTPVPANPSTTFSAAKFASFITQYSTGQVSVEIEWELQKENSKRWNPEIQYTSNYNKSVNVDFTMDTNGVYSEPRPIGTRYLTRNL

SEQ ID NO: 2571 - protein, 735 aa, Artificial Sequence
  source: /note="Description of Artificial Sequence: Synthetic polypeptide"
MAADGYLPDWLEDTLSEGIRQWWKLKPGPPPPKPAERHKDDSRGLVLPGYKYLGPFNGLDKGEPVNEADAAALEHDKAYDRQLDSGDNPYLKYNHADAEFQERLKEDTSFGGNLARAVFQAKKRVLEPLGLVEEPVKTAPGKKRPVEHSPAELDSSSGTGKSGQQPARKRLNFGQTGDADSVPDPQPLGQPPAAPSGLGTNTMASGSGAPMADNNEGADGVGNSSGNWHCDSTWMGDRVITTSTRTWALPTYNNHLYKQISSQSGASNDNHYFGYSTPWGYFDFNRFHCHFSPRDWQRLINNNWGFRPKRLNFKLFNIQVKEVTQNDGTTTIANNLTSTVQVFTDSEYQLPYVLGSAHQGCLPPFPADVFMVPQYGYLTLNNGSQAVGRSSFYCLEYFPSQMLRTGNNFTFSYTFEDVPFHSSYAHSQSLDRLMNPLIDQYLYYLSRTNTPSGTTTQSRLQFSQAGASDIRDQSRNWLPGPCYRQQRVSKTAADNNNSDYSWTGATKYHLNGRDSLVNPGTAMASHKDDEEKYFPQSGVLIFGKQDSGKTNADIEKVMITDEEEIRTTNPVATEQYGSVSTNLQSGNTQAATSDVNTQGVLPGMVWQDRDVYLQGPIWAKIPHTDGHFHPSPLMGGFGPKHPPPQILIKNTPVPANPSTTFSAAKFASFITQYSTGQVSVEIEWELQKENSKRWNPEIQYTSNYNKSVNVDFTVDTNGVYSEPRPIGTRYLTRNL

SEQ ID NO: 2572 - protein, 735 aa, Artificial Sequence
  source: /note="Description of Artificial Sequence: Synthetic polypeptide"
MAADGYLPDWLEDTLSEGIRQWWKLKPGPPPPKPAERHKDDSRGLVLPGYKYLGPFNGLDKGEPVNEADAAALEHDKAYDRQLDSGDNPYLKYNHADAEFQERLKEDTSFGGNLARAVFQAKKRVLEPLGLVEEPVKTAPGKKRPVEHSPAELDSSSGTGKSGQQPARKRLNFGQTGDADSVPDPQPLGQPPAAPSGLGTNTMASGSGAPMADNNEGGDGVGNSSGNWHCDSTWMGDRVITTSTRTWALPTYNNHLYKQISSQSGASNDNHYFGYSTPWGYFDFNRFHCHFSPRDWQRLINNNWGFRPKRLNFKLFNIQVKEVTQNDGTTTIANNLTSTVQVFTDSEYQLPYVLGSAHQGCLPPFPADVFMVPQYGYLTLNNGSQAVGRSSFYCLEYFPSQMLRTGNNFTFSYTFEDVPFHSSYAHSQSLDRLMNPLIDQYLYYLSRTNTPSGTTTQSRLQFSQAGASDIRDQSRNWLPGPCYRQQRVSKTAADNNNSDYSWTGATKYHLNGRDSLVNPGTAMASHKDDEEKYFPQSGVLIFGKQDSGKTNVDIEKVMITDEEEIRTTNPVATEQYGSVSTNLQSGNTQAATSDVNTQGVLPGMVWQDRDVYLQGPIWAKIPHTDGHFHPSPLMGGFGPKHPPPQILIKNTPVPANPSTTFSAAKFASFITQYSTGQVSVEIEWELQKENSKRWNPEIQYTSNYNKSVNVDFTVDTNGVYSEPRPIGTRYLTRNL

SEQ ID NO: 2573 - protein, 735 aa, Artificial Sequence
  source: /note="Description of Artificial Sequence: Synthetic polypeptide"
MAADGYLPDWLEDTLSEGIRQWWKLKPGPPPPKPAERHKDDSRGLVLPGYKYLGPFNGLDKGEPVNEADAAALEHDKAYDRQLDSGDNPYLKYNHADAEFQERLKEDTSFGGNLARAVFQAKKRVLEPLGLVEEPVKTAPGKKRPVEHSPAELDSSSGTGKSGQQPARKRLNFGQTGDADSVPDPQPLGQPPAAPSGLGTNTMASGSGAPMADNNEGADGVGNSSGNWHCDSTWMGDRVITTSTRTWALPTYNNHLYKQISSQSGASNDNHYFGYSTPWGYFDFNRFHCHFPPRDWQRLINNNWGFRPKRLNFKLFNIQVKEVTQNDGTTTIANNLTSTVQVFTDSEYQLPYVLGSAHQGCLPPFPADVFMVPQYGYLTLNNGSQAVGRSSFYCLEYFPSQMLRTGNNFTFSYTFEDVPFHSSYAHSQSLDRLMNPLIDQYLYYLSRTNTPSGTTTQSRLQFSQAGASDIRDQSRNWLPGPCYRQQRVSKTAADNNNSDYSWTGATKYHLNGRDSLVNPGTAMASHKDDEEKYFPQSGVLIFGKQDSGKTNVDIEKVMITDEEEIRTTNPVATEQYGSVSTNLQSGNTQAATSDVNTQGVLPGMVWQDRDVYLQGPIWAKIPHTDGHFHPSPLMGGFGPKHPPPQILIKNTPVPANPSTTFSAAKFASFITQYSTGQVSVEIEWELQKENSKRWNPEIQYTSNYNKSVNVDFTVDTNGVYSEPRPIGTRYLTRNL

SEQ ID NO: 2574 - protein, 735 aa, Artificial Sequence
  source: /note="Description of Artificial Sequence: Synthetic polypeptide"
MAADGYLPDWLEDTLSEGIRQWWKLKPGPPPPKPAERHKDDSRGLVLPGYKYLGPFNGLDKGEPVNEADAAALEHDKAYDRQLDSGDNPYLKYNHADAEFQERLKEDTSFGGNLARAVFQAKKRVLEPLGLVEEPVKTAPGKKRPVEHSPAELDSSSGAGKSGQQPARKRLNFGQTGDADSVPDPQPLGQPPAAPSGLGTNTMASGSGAPMADNNEGADGVGNSSGNWHCDSTWMGDRVITTSTRTWALPTYNNHLYKQISSQSGASNDNHYLGYSTPWGYFDFNRFHCHFSPRDWQRLINNNWGFRPKRLNFKLFNIQVKEVTQNDGTTTIANNLTSTVQVFTDSEYQLPYVLGSAHQGCLPPFPADVFMVPQYGYLTLNNGSQAVGRSSFYCLEYFPSQMLRTGNNFTFSYTFEDVPFHSSYAHSQSLDRLMNPLIDQYLYYLSRTNTPSGTTTQSRLQFSQAGASDIRDQSRNWLPGPCYRQQRVSKTAADNNNSDYSWTGATKYHLNGRDSLVNPGTAMASHKDDEEKYFPQSGVLIFGKQDSGKTNVDIEKVMITDEEEIRTTNPVATEQYGSVSTNLQSGNTQAATSDVNTQGVLPGMVWQDRDVYLQGPIWAKIPHTDGHFHPSPLMGGFGPKHPPPQILIKNTPVPANPSTTFSAAKFASFITQYSTGQVSVEIEWELQKENSKRWNPEIQYTSNYNKSVNVDFTVDTNGVYSEPRPIGTRYLTRNL

SEQ ID NO: 2575 - protein, 735 aa, Artificial Sequence
  source: /note="Description of Artificial Sequence: Synthetic polypeptide"
MAADGYLPDWLEDTLSEGIRQWWKLKPGPPPPKPAERHKDDSRGLVLPGYKYLGPFNGLDKGEPVNEADAAALEHDKAYDRQLDSGDNPYLKYNHADAEFQERLKEDTPFGGNLARAVFQAKKRVLEPLGLVEEPVKTAPGKKRPVEHSPAELDSSSGTGKSGQQPARKRLNFGQTGDADSVPDPQPLGQPPAAPSGLGTNTMVSGSGAPMADNNEGADGVGNSSGNWHCDSTWMGDRVITTSTRTWALPTYNNHLYKQISSQSGASNDNHYFGYSTPWGYFDFNRFHCHFSPRDWQRLINNNWGFRPKRLNFKLFNIQVKEVTQNDGTTTIANNLTSTVQVFTDSEYQLPYVLGSAHQGCLPPFPADVFMVPQYGYLTLNNGSQAVGRSSFYCLEYFPSQMLRTGNNFTFSYTFEDVPFHSSYAHSQSLDRLMNPLIDQYLYYLSRTNTPSGTTTQSRLQFSQAGASDIRDQSRNWLPGPCYRQQRVSKTAADNNNSDYSWTGATKYHLNGRDSLVNPGTAMASHKDDEEKYFPQSGVLIFGKQDSGKTNVDIEKVMITDEEEIRTTNPVATEQYGSVSTNLQSGNTQAATSDVNTQGVLPGMVWQDRDVYLQGPIWAKIPHTDGHFHPSPLMGGFGPKHPPPQILIKNTPVPANPSTTFSAAKFASFITQYSTGQVSVEIEWELQKENSKRWNPEIQYTSNYNKSVNVDFTVDTNGVYSEPRPIGTRYLTRNL

SEQ ID NO: 2576 - protein, 735 aa, Artificial Sequence
  source: /note="Description of Artificial Sequence: Synthetic polypeptide"
MAADGYLPDWLEDTLSEGIRQWWELKPGPPPPKPAERHKDDSRGLVLPGYKYLGPFNGLDKGEPVNEADAAALEHDKAYDRQLDSGDNPYLKYNHADAEFQERLKEDTSFGGNLARAVFQAKKRVLEPLGLVEEPVKTAPGKKRPVEHSPAELDSSSGTGKSGQQPARKRLNFGQTGDADSVPDPQPLGQPPAAPSGLGTNTMASGSGAPMADNNEGADGVGNSSGNWHCDSTWMGDRVITTSTRTWALPTYNNHLYKQISSQSGASNDNHYFGYSTPWGYFDFNRFHCHFSPRDWQRLINNNWGFRPKRLNFKLFNIQVKEVTQNDGTTTIANNLTSTVQVFTDSEYQLPYVLGSAHQGCLPPFPADVFMVPQYGYLTLNNGSQAVGRSSFYCLEYFPSQMLRTGNNFTFSYTFEDVPFHSSYAHSQSLDRLMNPLIDQYLYYLSRTNTPSGTTTQSRLQFSQAGASDIRDQSRNWLPGPCYRQQRVSKTAADNNNSDYSWTGATKYHLNGRDSLVNPGTAMASHKDDEEKYFPQSGVLIFGKQDSGKTNVDIEKVMITDEEEIRTTNPVATEQYGSVSTNLQSGNTQAATSDVNTQGVLPGMVWQDRDVYLQGPIWAKIPHTDGHFHPSPLMGGFGPKHPPPQILIKNTPVPANPSTTFSAAKFASFITQYSTGQVSVEIEWELQKENSKRWNPEIQYTSNYNKSVNVDFTVDTNGVYSEPRPIGTRYLTRNL

SEQ ID NO: 2577 - protein, 735 aa, Artificial Sequence
  source: /note="Description of Artificial Sequence: Synthetic polypeptide"
MAADGYLPDWLEDTLSEGIRQWWKLKPGPPPPKPAERHKDDSRGLVLPGYKYLGPFNGLDKGEPVNEADAAALEHDKAYDRQLDSGDNPYLKYNHADAEFQERLKEDTPFGGNLARAVFQAKKRVLEPLGLVEEPVKTAPGKKRPVGHSPAELDSSSGTGKSGQQPARKRLNFGQTGDADSVPDPQPLGQPPAAPSGLGTNTMASGSGAPMADNNEGVDGVGNSSGNWHCDSTWMGDRVITTSTRTWALPTYNNHLYKQISSQSGASNDNHYFGYSTPWGYFDFNRFHCHFSPRDWQRLINNNWGFRPKRLNFKLFNIQVKEVTQNDGTTTIANNLTSTVQVFTDSEYQLPYVLGSAHQGCLPPFPADVFMVPQYGYLTLNNGSQAVGRSSFYCLEYFPSQMLRTGNNFTFSYTFEDVPFHSSYAHSQSLDRLMNPLIDQYLYYLSRTNTPSGTTTQSRLQFSQAGASDIRDQSRNWLPGPCYRQQRVSKTAADNNNSDYSWTGATKYHLNGRDSLVNPGTAMASHKDDEEKYFPQSGVLIFGKQDSGKTNVDIEKVMITDEEEIRTTNPVATEQYGSVSTNLQSGNTQAATSDVNTQGVLPGMVWQDRDVYLQGPIWAKIPHTDGHFHPSPLMGGFGPKHPPPQILIKNTPVPANPSTTFSAAKFASFITQYSTGQVSVEIEWELQKENSKRWNPEIQYTSNYNKSVNVDFTVDTNGVYSEPRPIGTRYLTRNL

SEQ ID NO: 2578 - protein, 735 aa, Artificial Sequence
  source: /note="Description of Artificial Sequence: Synthetic polypeptide"
MAADGYLPDWLEDTLSEGIRQWWELKPGPPPPKPAERHKDDSRGLVLPGYKYLGPFNGLDKGEPVNEADAAALEHDKAYDRQLDSGDNPYLKYNHADAEFQERLKEDTSFGGNLARAVFQAKKRVLEPLGLVEEPVKTAPGKKRPVEHSPAELDSSSGTGKSGQQPARKRLNFGQTGDADSVPDPQPLGQPPAAPSGLGTNTMASGSGAPMADNNEGADGVGNSSGNWHCDSTWMGDRVITTSTRTWALPTYNNHLYKQISSQSGASNDNHYFGYSTPWGYFDFNRFHCHFSPRDWQRLINNNWGFRPKRLNFKLFNIQVKEVTQNDGTTTIANNLTSTVQVFTDSEYQLPYVLGSAHQGCLPPFPADVFMVPQYGYLTLNNGSQAVGRSSFYCLEYFPSQMLRTGNNFTFSYTFEDVPFHSSYAHSQSLDRLMNPLIDQYLYYFSRTNTPSGTTTQSRLQFSQAGASDIRDQSRNWLPGPCYRQQRVSKTAADNNNSDYSWTGATKYHLNGRDSLVNPGTAMASHKDDEEKYFPQSGVLIFGKQDSGKTNVDIEKVMITDEEEIRTTNPVATEQYGSVSTNLQSGNTQAATSDVNTQGVLPGMVWQDRDVYLQGPIWAKIPHTDGHFHPSPLMGGFGPKHPPPQILIKNTPVPANPSTTFSAAKFASFITQYSTGQVSVEIEWELQKENSKRWNPEIQYTSNYNKSVNVDFTVDTNGVYSEPRPIGTRYLTRNL

SEQ ID NO: 2579 - protein, 735 aa, Artificial Sequence
  source: /note="Description of Artificial Sequence: Synthetic polypeptide"
MAADGYLPDWLEDTLSEGIRQWWKLKPGPPPPKPAERHKDDSRGLVLPGYKYLGPFNGLDKGEPVNEADAAALEHDKAYDRQLDSGDNPYLKYNHADAEFQERLKEDTSFGGNLARAVFQAKKRVLEPLGLVEEPVKTAPGKKRPVEHSPAELDSSSGTGKSGQQPARKRLNFGQTGDADSVPDPQPLGQPPAAPSGLGTNTMASGSGAPMADNNEGADGVGNSSGNWHCDSTWMGDRVITTSTRTWALPTYNNHLYKQISSQSGASNDNHYFGYSTPWGYFDFNRFHCHFSPRDWQRLINNNWGFRPKRLNFKLFNIQVKEVTQNDGTTTIANNLTSTVQVFTDSEYQLPYVLGSAHQGCLPPFPADVFMVPQYGYLTLNNGSQAVGRSSFYRLEYFPSQMLRTGNNFTFSYTFEDVPFHSSYAHSQSLDRLMNPLIDQYLYYLSRTNTPSGTTTQSRLQFSQAGASDIRDQSRNWLPGPCYRQQRVSKTAADNNNSDYSWTGATKYHLNGRDSLVNPGTAMASHKDDEEKYFPQSGVLIFGKQDSGKTNVDIEKVMITDEEEIRTTNPVATEQYGSVSTNLQSGNTQAATSDVNTQGVLPGMVWQDRDVYLQGPIWAKIPHTDGHFHPSPLMGGFGPKHPPPQILIKNTPVPANPSTTFSAAKFASFITQYSTGQVSVEIEWELQKENSKRWNPEIQYTSNYNKSVNVDFTVDTNGVYSEPRPIGTRYLTRNL

SEQ ID NO: 2580 - protein, 735 aa, Artificial Sequence
  source: /note="Description of Artificial Sequence: Synthetic polypeptide"
MAADGYLPDWLEDTLSEGIRQWWKLKPGPPPPKPAERHKDDSRGLVLPGYKYLGPFNGLDKGEPVNEADAAALEHDKAYDRQLDSGDNPYLKYNHADAEFQERLKEDTSFGGNLARAVFQAKKRVLEPLGLVEEPVKTAPGKKRPVEHSPAELDSSSGTGKSGQQPARKRLNFGQTGDADSVPDPQPLGQPPAAPSGLGTNTMASGSGAPMADNNEGADGVGNSSGNWHCDSTWMGDRVITTSTRTWALPTYNNHLYKQISSQSGASNDNHYLGYSTPWGYFDFNRFHCHFSPRDWQRLINNNWGFRPKRLNFKLFNIQVKEVTQNDGTTTIANNLTSTVQVFTDSEYQLPYVLGSAHQGCLPPFPADVFMVPQYGYLTLNNGSQAVGRSSFYCLEYFPSQMLRTGNNFTFSYTFEDVPFHSSYAHSQSLDRLMNPLIDQYLYYLSRTNTPSGTTTQSRLQFSQAGASDIRDQSRNWLPGPCYRQQRVSKTAADNNNSDYSWTGATKYHLNGRDSLVNPGTAMASHKDDEEKYFPQSGVLIFGKQDSGKTNVDIEKVMITDEEEIRTTNPVATEQYGSVSTNLQSGNTQAATSDVNTQGVLPGMVWQDGDVYLQGPIWAKIPHTDGHFHPSPLMGGFGPKHPPPQILIKNTPVPANPSTTFSAAKFASFITQYSTGQVSVEIEWELQKENSKRWNPEIQYTSNYNKSVNVDFTVDTNGVYSEPRPIGTRYLTRNL

SEQ ID NO: 2581 - protein, 735 aa, Artificial Sequence
  source: /note="Description of Artificial Sequence: Synthetic polypeptide"
MAADGYLPDWLEDTLSEGIRQWWKLKPGPPPPKPAERHKDDSRGLVLPGYKYLGPFNGLDKGEPVNEADAAALEHDKAYDRQLDSGDNPYLKYNHADAEFQERLKEDTSFGGNLARAVFQAKKRVLEPLGLVEEPVKTAPGKKRPVEHSPAELDSSSGTGKSGQQPARKRLNFGQTGDADSVPDPQPLGQPPAAPSGLGTNTMASGSGAPMADNNEGADGVGNSSGNWHCDSTWMGDRVITTSTRTWALPTYNNHLYKQISSQSGASNDNHYFGYSTPWGYFDFNRFHCHFSPRDWQRLINNNWGFRPKRLNFKLFNIQVKEVTQNDGTTTIANNLTSTVQVFTDSEYQLPYVLGSAHQGCLPPFPADVFMVPQYGYLTLNNGSQAVGRSSFYCLEYFPPQMLRTGNNFTFSYTFEDVPFHSSYAHSQSLDRLMNPLIDQYLYYLSRTNTPSGTTTQSRLQFSQAGASDIRDQSRNWLPGPCYRQQRVSKTAADNNNSDYSWTGATKYHLNGRDSLVNPGTAMASHKDDEEKYFPQSGVLIFGKQDSGKTNVDIEKVMITDEEEIRTTNPVATEQYGSVSTNLQSGNTQAATSDVNTQGVLPGMVWQDRDVYLQGPIWAKIPHTDGHFHPSPLMGGFGPKHPPPQILIKNTPVPANPSTTFSAAKFASFITQYSTGQVSVEIEWELQKENSKRWNPEIQYTSNYNKSVNVDFTVDTNGVYSEPRPIGTRYLTRNL

SEQ ID NO: 2582 - protein, 735 aa, Artificial Sequence
  source: /note="Description of Artificial Sequence: Synthetic polypeptide"
MAADGYLPDWLEDTLSEGIRQWWKLKPGPPPPKPAERHKDDSRGLVLPGYKYLGPFNGLDKGEPVNEADAAALEHDKAYDRQLDSGDNPYLKYNHADAEFQERLKEDTSFGGNLARAVFQAKKRVLEPLGLVEEPVKTAPGKKRPVEHSPAELDSSSGTGKSGQQPARKRLNFGQTGDADSVPDPQPLGQPPAAPSGLGTNTMASGSGAPMADNNEGADGVGNSSGNWHCDSTWMGDRVITTSTRAWALPTYNNHLYKQISSQSGASNDNHYLGYSTPWGYFDFNRFHCHFSPRDWQRLINNNWGFRPKRLNFKLFNIQVKEVTQNDGTTTIANNLTSTVQVFTDSEYQLPYVLGSAHQGCPPPFPADVFMVPQYGYLTLNNGSQAVGRSSFYCLEYFPSQMLRTGNNFTFSYTFEDVPFHSSYAHSQSLDRLMNPLIDQYLYYLSRTNTPSGTTTQSRLQFSQAGASDIRDQSRNWLPGPCYRQQRVSKTAADNNNSDYSWTGATKYHLNGRDSLVNPGTAMASHKDDEEKYFPQSGVLIFGKQDSGKTNVDIEKVMITDEEEIRTTNPVATEQYGSVSTNLQSGNTQAATSDVNTQGVLPGMVWQDRDVYLQGPIWAKIPHTDGHFHPSPLMGGFGPKHPPPQILIKNTPVPANPSTTFSAAKFASFITQYSTGQVSVEIEWELQKENSKRWNPEIQYTSNYNKSVNVDFTVDTNGVYSEPRPIGTRYLTRNL

SEQ ID NO: 2583 - protein, 735 aa, Artificial Sequence
  source: /note="Description of Artificial Sequence: Synthetic polypeptide"
MAADGYLPDWLEDTLSEGIRQWWKLKPGPPPPKPAERHKDDSRGLVLPGYKYLGPFNGLDKGEPVNEADAAALEHDKAYDRQLDSGDNPYLKYNHADAEFQERLKEDTSFGGNLARAVFQAKKRVLEPLGLVEEPVKTAPGKKRPVEHSPAELDSSSGTGKSGQQPARKRLNFGQTGDADSVPDPQPLGQPPAAPSGLGTNTMASGSGAPMADNNEGADGVGNSSGNWHCDSTWMGDRVITTSTRTWALPTYNNHLYKQISSQSGASNDNHYFGYSTPWGYFDFNRFHCHFSPRDWQRLINNNWGFRPKRLNFKLFNIQVKEVTQNDGTTTIANNLTSTVQVFTDSEYQLPYVLGSAHQGCLPPFPADVFMVPQYGYLTLNNGSQAVGRSSFYCLEYFPSQMLRTGNNFTFSYTFEDVPFHSSYAHSQSLDRLMNPLIDQYLYYLSRTNTPSGTTTQSRLQFSQAGASDIRDQSRNWLPGPCYRQQRVSKTAADNNNSDYSWTGATKYHLNGRDSLVNPGTAMASHKDDEEKYFPQSGVLIFGKQDSGKTNVDIEKVMITDEEEIRTTNPVATEQYGSVSTNLQSGNTQAATSDVNTQGVLPGMVWQDRDVYLQGPIWAKIPHTDGHFHPSPLMGGFGPKHPPPQILIKNTPVPANPSTTFSAAKFAFFITQYSTGQVSVEIEWELQKENSKRWNPEIQYTSNYNKSVNVDFTVDTNGVYSEPRPIGTRYLTRNL

SEQ ID NO: 2584 - protein, 735 aa, Artificial Sequence
  source: /note="Description of Artificial Sequence: Synthetic polypeptide"
MAADGYLPDWLEDTLSEGIRQWWKLKPGPPPPKPAERHKDDSRGLVLPGYKYLGPFNGLDKGEPVNEADAAALEHDKAYDRQLDSGDNPYLKYNHADAEFQERLKEDTSFGGNLARAVFQAKKRVLEPLGLVEEPVKTAPGKKRPVEHSPAELDSSSGTGKSGQQPARKRLNFGQTGDADSVPDPQPLGQPPAAPSGLGTNTMASGSGAPMADNNEGADGVGNSSGNWHCDSTWMGDRVITTSTRTWALPTYNNHLYKQISSQSGASNDNHYLGYSTPWGYFDFNRFHCHFSPRDWQRLINNNWGFRPKRLNFKLFNIQVKEVTQNDGTTTIANNLTSTVQVFTDSEYQLPYVLGSAHQGCLPPFPADVFMVPQYGYLTLNNGSQAVGRSSFYRLEYFPSQMLRTGNNFTFSYTFEDVPFHSSYAHSQSLDRLMNPLIDQYLYYLSRTNTPSGTTTQSRLQFSQAGASDIRDQSRNWLPGPCYRQQRVSKTAADNNNSDYSWTGATKYHLNGRDSLVNPGTAMASHKDDEEKYFPQSGVLIFGKQDSGKTNVDIEKVMITDEEEIRTTNPVATEQYGSVSTNLQSGNTQAATSDVNTQGVLPGMVWQDRDVYLQGPIWAKIPHTDGHFHPSPLMGGFGPKHPPPQILIKNTPVPANPSTTFSAAKFASFITQYSTGQVSVEIEWELQKENSKRWNPEIQYTSNYNKSVNVDFTVDTNGVYSEPRPIGTRYLTRNL

SEQ ID NO: 2585 - protein, 734 aa, Artificial Sequence
  source: /note="Description of Artificial Sequence: Synthetic polypeptide"
MAADGYLPDWLEDTLSEGIRQWWKLKPGPPPPKPAERHKDDSRGLVLPGYKYLGPFNGLDKGEPVNEADAAALEHDKAYDRQLDSGDNPYLKYNHADAEFQERLKEDTSFGGNLARAVFQAKKRVLEPLGLVEEPVKTAPGKKRPVEHSPAELDSSSGTGKSGQQPARKRLNFGQTGDADSVPDPQPLGQPPAAPSGLGTNTMASGSGAPMADNNEGADGVGNSSGNWHCDSTWMGDRVITTSTRTWALPTYNNHLYKQISSQSGASNDNHYLGYSTPWGYFDFNRFHCHFSPRDWQRLINNNWGFRPKRLNFKLFNIQVKEVTQNDGTTTIANNLTSTVQVFTDSEYQLPYVLGSAHQGCLPPFPADVFMVPQYGYLTLNNGSQAVGRSSFYCLEYFPSQMLRTGNNFTFSYTFEDVPFHSSYAHSQSLDRLMNPLIDQYLYYLSRTNTPSGTTTQSRLQFSQAGASDIRDQSRNWLPGPCYRQQRVSKTAADNNSDYSWTGATKYHLNGRDSLVNPGTAMASHKDDEEKYFPQSGVLIFGKQDSGKTNVDIEKVMITDEEEIRTTNPVATEQYGSVSTNLQSGNTQAATSDVNTQGVLPGMVWQDRDVYLQGPIWAKIPHTDGHFHPSPLMGGFGPKHPPPQILIKNTPVPANPSTTFSAAKFASFITQYSTGQVSVEIEWELQKENSKRWNPEIQYTSNYNKSVNVDFTVDTNGVYSEPRPIGTRYLTRNL

SEQ ID NO: 2586 - protein, 734 aa, Artificial Sequence
  source: /note="Description of Artificial Sequence: Synthetic polypeptide"
MAADGYLPDWLEDTLSEGIRQWWKLKPGPPPPKPAERHKDDSRGLVLPGYKYLGPFNGLDKGEPVNEADAAALEHDKAYDRQLDSGDNPYLKYNHADAEFQERLKEDTSLGNLARAVFQAKKRVLEPLGLVEEPVKTAPGKKRPVEHSPAELDSSSGTGKSGQQPARKRLNFGQTGDADSVPDPQPLGQPPAAPSGLGTNTMASGSGAPMADNNEGADGVGNSSGNWHCDSTWMGDRVITTSTRTWALPTYNNHLYKQISSQSGASNDNHYFGYSTPWGYFDFNRFHCHFSPRDWQRLINNNWGFRPKRLNFKLFNIQVKEVTQNDGTTTIANNLTSTVQVFTDSEYQLPYVLGSAHQGCLPPFPADVFMVPQYGYLTLNNGSQAVGRSSFYCLEYFPSQMLRTGNNFTFSYTFEDVPFHSSYAHSQSLDRLMNPLIDQYLYYLSRTNTPSGTTTQSRLQFSQAGASDIRDQSRNWLPGPCYRQQRVSKTAADNNNSDYSWTGATKYHLNGRDSLVNPGTAMASHKDDEEKYFPQSGVLIFGKQDSGKTNVDIEKVMITDEEEIRTTNPVATEQYGSVSTNLQSGNTQAATSDVNTQGVLPGMVWQDRDVYLQGPIWAKIPHTDGHFHPSPLMGGFGPKHPPPQILIKNTPVPANPSTTFSAAKFASFITQYSTGQVSVEIEWELQKENSKRWNPEIQYTSNYNKSVNVDFTVDTNGVYSEPRPIGTRYLTRNL

SEQ ID NO: 2587 - protein, 735 aa, Artificial Sequence
  source: /note="Description of Artificial Sequence: Synthetic polypeptide"
MAADGYLPDWLEDTLSEGIRQWWKLKPGPPPPKPAERHKDDSRGLVLPGYKYLGPFNGLDKGEPVNEADAAALEHDKAYDRQLDSGDNPYLKYNHADAEFQERLKEDTSFGGNLARAVFQAKKRVLEPLGLVEEPVKTAPGKKRPVEHSPAELDSSSGTGKSGQQPARKRLNFGQTGDADSVPDPQPLGQPPAAPSGLGTNTMASGSGAPMADNNEGADGVGNSSGNWHCDSTWMGDRVITTSTRTWALPTYNNHLYKQISSQSGASNDNHYFGYSTPWGYFDFNRFHCHFSPRDWQRLINNNWGFRPKRLNFKLFNIQVKEVTQNDGTTTIANNLTSTVQVFTDSEYQLPYVLGSAHQGCLPPFPADVFMVPQYGYLTLNNGSQAVGRSSFYCLEYFPSQMLRTGNNFTFSYTFEDVPFHSSYAHSQSLDRLMNPLIDQYLYYLSRTNTPSGTTTQSRLQFSQAGASDIRDQSRNWLPGPCYRQQRVSKTAADNNNSDYSWTGATKYHLNGRDSLVNPGTAMASHKDDEEKYFPQSGVLIFGKQDSGKTNVDIEKVMITDEEEIRTTNPVATEQYGSVSTNLQSGNTQAATSDVNTQGVLPGMVWQDRDVYLQGPIWAKIPHTDGHFHPSPLMGGFGPKHPPPQILIKNTPVPANPSTTFSAAKFASFITQYSTGQVGVEIEWELQKENSKRWNPEIQYTSNYNKSVNVDFTVDTNGVYSEPRPIGTRYLTRNL

SEQ ID NO: 2588 - protein, 735 aa, Artificial Sequence
  source: /note="Description of Artificial Sequence: Synthetic polypeptide"
MAADGYLPDWLEDTLSEGIRQWWKLKPGPPPPKPAERHKDDSRGLVLPGYKYLGPFNGLDKGEPVNEADAAALEHDKAYDRQLDSGDNPYLKYNHADAEFQERLKEDTSFGGNLARAVFQAKKRVLEPLGLVEEPVKTAPGKKRPVEHSPAELDSSSGTGKSGQQPARKRLNFGQTGDADSVPDPQPLGQPPAAPSGLGTNTMASGSGAPMADNNEGADGVGNSSGNWHCDSTWMGDRVITTSTRTWALPTYNNHLYKQISSQSGASNDNHYFGYSTPWGYFDFNRFHCHFSPRDWQRLINNNWGFRPKRLNFKLFNIQVKEVTQNDSTTTIANNLTSTVQVFTDSEYQLPYVLGSAHQGCLPPFPADVFMVPQYGYLTLNNGSQAVGRSSFYCLEYFPSQMLRTGNNFTFSYTFEDVPFHSSYAHSQSLDRLMNPLIDQYLYYLSRTNTPSGTTTQSRLQFSQAGASDIRDQSRNWLPGPCYRQQRVSKTAADNNNSDYSWTGATKYHLNGRDSLVNPGTAMASHKDDEEKYFPQSGVLIFGKQDSGKTNVDIEKVMITDEEEIRTTNPVATEQYGSVSTNLQSGNTQAATSDVNTQGVLPGMVWQDRDVYLQGPIWAKIPHTDGHFHPSPLMGGFGPKHPPPQILIKNTPVPANPSTTFSAAKFASFITQYSTGQVSVEIEWELQKENSKRWNPEIQYTSNYNKSVNVDFTVDTNGVYSEPRPIGTRYLTRNL

SEQ ID NO: 2589 - protein, 735 aa, Artificial Sequence
  source: /note="Description of Artificial Sequence: Synthetic polypeptide"
MAADGYLPDWLEDTLSEGIRQWWKLKPGPPPPKPAERHKDDSRGLVLPGYKYLGPFNGLDKGEPVNEADAAALEHDKAYDRQLDSGDNPYLKYNHADAEFQERLKEDTSFGGNLARAVFQAKKRVLEPLGLVEEPVKTAPGKKRPVEHSPAELDSSSGTGKSGQQPARKRLNFGQTGDADSVPDPQPLGQPPAAPSGLGTNTMASGSGAPMADNNEGADGVGNSSGNWHCDSTWMGDRVITTSTRTWALPTYNNHLYKQISSQSGASNDNHYFGYSTPWGYFDFNRFHCHFSPRDWQRLINNNWGFRPKRLNFKLFNIQVKEVTQNDGTTTIANNLTSTVQVFTDSEYQLPYVLGSAHQGCLPPFPADVFMVPQYGYLTLNNGSQAVGRSSFYCLEYFPSQMLRTGNNFTFSYTFEDVPFHSSYAHSQSLDRLMNPLIDQYLYYLSRTNTPSGTTTQSRLQFSQAGASDIRDQSRNWLPGPCYRQQRVSKTAADNNNSDYSWTGATKYHLNGRDSLVNPGTAMASHKDDEEKYFPQSGVLIFRKQDSGKTNVDIEKVMITDEEEIRTTNPVATEQYGSVSTNLQSGNTQAATSDVNTQGVLPGMVWQDRDVYLQGPIWAKIPHTDGHFHPSPLMGGFGPKHPPPQILIKNTPVPANPSTTFSAAKFAYFITQYSTGQVSVEIEWELQKENSKRWNPEIQYTSNYNKSVNVDFTVDTNGVYSEPRPIGTRYLTRNL

SEQ ID NO: 2590 - protein, 735 aa, Artificial Sequence
  source: /note="Description of Artificial Sequence: Synthetic polypeptide"
MAADGYLPDWLEDTLSEGIRQWWKLKPGPPPPKPAERHKDDSRGLVLPGYKYLGPFNGLDKGEPVNEADAAALEHDKAYDRQLDSGDNPYLKYNHADAEFQERLKEDTSFGGNLARAVFQAKKRVLEPLGLVEEPVKTAPGKKRPVEHSPAELDSSSGTGKSGQQPARKRLNFGQTGDADSVPDPQPLGQPPAAPSGLGTNTMASGSGAPMADNNEGADGVGNSSGNWHCDSTWMGDRVITTSTRTWALPTYNNHLYKQISSQSGASNDNHYFGYSTPWGYFDFNRFHCHFSPRDWQRLINNNWGFRPKRLDFKLFNIQVKEVTQNDGTTTIANNLTSTVQVFTDSEYQLPYVLGSAHQGCLPPFPADVFMVPQYGYLTLNNGSQAVGRSSFYCLEYFPSQMLRTGNNFTFSYTFEDVPFHSSYAHSQSLDRLMNPLIDQYLYYLSRTNTPSGTTTQSRLQFSQAGASDIRDQSRNWLPGPCYRQQRVSKTAADNNNSDYSWTGATKYHLNGRDSLVNPGTAMASHKDDEEKYFPQSGVLIFGKQDSGKTNVDIEKVMITDEEEIRTTNPVATEQYGSVSTNLQSGNTQAATSDVNTQGVLPGMVWQDRDVYLQGPIWAKIPHTDGHFHPSPLMGGFGPKHPPPQILIKNTPVPANPSTTFSAAKFASFITQYSTGQVSVEIEWELQKENSKRWNPEIQYTSNYNKSVNVDFTVDTNGVYSEPRPIGTRYLTRNL

SEQ ID NO: 2591 - protein, 735 aa, Artificial Sequence
  source: /note="Description of Artificial Sequence: Synthetic polypeptide"
MAADGYLPDWLEDTLSEGIRQWWKLKPGPPPPKPAERHKDDSRGLVLPGYKYLGPFNGLDKGEPVNEADAAALEHDKAYDRQLDSGDNPYLKYNHADAEFQERLKEDTSFGGNLARAVFQAKKRVLEPLGLVEEPVKTAPGKKRPVEHSPAELDSSSGTGKSGQQPARKRLNFGQTGGADSVPDPQPLGQPPAAPSGLGTNTMASGSGAPMADNNEGADGVGNSSGNWHCDSTWMGDRVITTSTRTWALPTYNNHLYKQISSQSGASNDNHYFGYSTPWGYFDFNRFHCHFSPRDWQRLINNNWGFRPKRLNFKLFNIQVKEVTQNDGTTTIANNLTSTVQVFTDSEYQLPYVLGSAHQGCLPPFPADVFMVPQYGYLTLNNGSQAVGRSSFYCLEYFPSQMLRTGNNFTFSYTFEDVPFHSSYAHSQSLDRLMNPLIDQYLYYLSRTNTPSGTTTQSRLQFSQAGASDIRDQSRNWLPGPCYRQQRVSKTAADNNNSDYSWTGATKYHLNGRDSLVNPGTAMASHKDDEEKYFPQSGVLIFGKQDSGKTNVDIEKVMITDEEEIRTTNPVATEQYGSVSTNLQSGNTQAATSDVNTQGVLPGMVWQDRDVYLQGPIWAKIPHTDGHFHPSPLMGGFGPKHPPPQILIKNTPVPANPSTTFSAAKFASFITQYSTGQVSVEIEWELQKENSKRWNPEIQYTSNYNKSVNVDFTVDTNGVYSEPRPIGTRYLTRNL

SEQ ID NO: 2592 - protein, 735 aa, Artificial Sequence
  source: /note="Description of Artificial Sequence: Synthetic polypeptide"
MAADGYLPDWLEDTLSEGIRQWWKLKPGPPPPKPAERHKDDSRGLVLPGYKYLGPFNGLDKGEPVNEADAAALEHDKAYDRQLDSGDNPYLKYNHADAEFQERLKEDTSFGGNLARAVFQAKKRVLEPLGLVEEPVKTAPGKKRPVEHSPAELDSSSGTGKSGQQPARKRLNFGQTGDADSVPDPQPLGQPPAAPSGLGTNTMASGSGAPMADNNEGADGVGNSSGNWHCDSTWMGDRVITTSTRTWALPTYNNHLYKQISSQSGASNDNHYFGYSTPWGYFDFNRFHCHFSPRDWQRLINNNWGFRPKRLNFKLFNIQVKEVTQNDGTTTIANNLTSTVQVFTDSEYQLPYVLGSAHQGCLPPFPADVFMVPQYGYLTLNNGSQAVGRSSFYCLEYFPSQMLRTGNNLTFSYTFEDVPFHSSYAHSQSLDRLMNPLIDQYLYYLSRTNTPSGTTTQSRLQFSQAGASDIRDQSRNWLPGPCYRQQRVSKTAADNNNSDYSWTGATKYHLNGRDSLVNPGTAMASHKDDEEKYFPQSGVLIFGKQDSGKTNVDIEKVMITDEEEIRTTNPVATEQYGSVSTNLQSGNTQAATSDVNTQGVLPGMVWQDRDVYLQGPIWAKIPHTDGHFHPSPLMGGFGPKHPPPQILIKNTPVPANPSTTFSAAKFASFITQYSTGQVSVEIEWELQKENSKRWNPEIQYTSNYNKSVNVDFTVDTNGVYSEPRPIGTRYLTRNL

SEQ ID NO: 2593 - protein, 735 aa, Artificial Sequence
  source: /note="Description of Artificial Sequence: Synthetic polypeptide"
MAADGYLPDWLEDTLSEGIRQWWKLKPGPPPPKPAERHKDDSRGLVLPGYKYLGPFNGLDKGEPVNEADAAALEHDKAYDRQLDSGDNPYLKYNHADAEFQERLKEDTSFGGNLARAVFQAKKRVLEPLGLVEEPVKTAPGKKRPVEHSPAELDSSSGTGKSGQQPARKRLNFGQTGDADSVPDPQPLGQPPAAPSGLGTNTMASGSGAPMADNNEGADGVGNSSGNWHCDSTWMGDRVITTSTRTWALPTYNNHLYKQISSQSGASNDNHYFGYSTPWGYFDFNRFHCHFSPRDWQRLINNNWGFRPKRLNFKLFNIQVKEVTQNDGTTTIANNLTSTVQVFTDSEYQLPYVLGSAHQGCLPPFPADVFMVPQYGYHTLNNGSQAVGRSSFYCLEYFPSQMLRTGNNFTFSYTFEDVPFHSSYAHSQSLDRLMNPLIDQYLYYLSRTNTPSGTTTQSRLQFSQAGASDIRDQSRNWLPGPCYRQQRVSKTAADNNNSDYSWTGATKYHLNGRDSLVNPGTAMASHKDDEEKYFPQSGVLIFGKQDSGKTNVDIEKVMITDEEEIRTTNPVATEQYGSVSTNLQSGNTQAATSDVNTQGVLPGMVWQDRDVYLQGPIWAKIPHTDGHFHPSPLMGGFGPKHPPPQILIKNTPVPANPSTTFSAAKFASFITQYSTGQVSVEIEWELQKENSKRWNPEIQYTSNYNKSVNVDFTVDTNGVYSEPRPIGTRYLTRNL

SEQ ID NO: 2594 - protein, 735 aa, Artificial Sequence
  source: /note="Description of Artificial Sequence: Synthetic polypeptide"
MAADGYLPDWLEDTLSEGIRQWWKLKPGPPPPKPAERHKDDSRGLVLPGYKYLGPFNGLDKGEPVNEADAAALEHDKAYDRQLDSGDNPYLKYNHADAEFQERLKEDTSFGGNLARAVFQAKKRVLEPLGLVEEPVKTAPGKKRPVEHSPAELDSSSGTGKSGQQPARKRLNFGQTGDADSVPDPQPLGQPPAAPSGLGTNTMASGSGAPMADNNEGADGVGNSSGNWHCDSTWMGDRVITTSTRTWALPTYNNHLYKQISSQSGASNDNHYFGYSTPWGYFDFNRFHCHFSPRDWQRLINNNWGFRPKRLNFKLFNIQVKEVTQNDGTTTIANNLTSTVQVFTDSEYQLPYVLGSAHQGCLPPFPADVFMVPQYGYLTLNNGSQAVGRSSFYCLEYFPSQMLRTGNNFTFSYTFEDVPFHSSYAHSQSLDRLMNPLIDQYPYYLSRTNTPSGTTTQSRLQFSQAGASDIRDQSRNWLPGPCYRQQRVSKTAADNNNSDYSWTGATKYHLNGRDSLVNPGTAMASHKDDEEKYFPQSGVLIFGKQDSGKTNVDIEKVMITDEEEIRTTNPVATEQYGSVSTNLQSGNTQAATSDVNTQGVLPGMVWQDRDVYLQGPIWAKIPHTDGHFHPSPLMGGFGPKHPPPQILIKNTPVPANPSTTFSAAKFASFITQYSTGQVSVEIEWELQKENSKRWNPEIQYTSNYNKSVNVDFTVDTNGVYSEPRPIGTRYLTRNL

SEQ ID NO: 2595 - protein, 735 aa, Artificial Sequence
  source: /note="Description of Artificial Sequence: Synthetic polypeptide"
MAADGYLPDWLEDTLSEGIRQWWKLKPGPPPPKPAERHKDDSRGLVLPGYKYLGPFNGLDKGEPVNEADAAALEHDKAYDRQLDSGDNPYLKYNHADAEFQERLKEDTSFGGNLARAVFQAKKRVLEPLGLVEEPVKTAPGKKRPVEHSPAELDSSSGTGKSGQQPARKRLNFGQTGDADSVPDPQPLGQPPAAPSGLGTNTMASGSGAPMADNNEGADGVGNSSGNWHCDSTWMGDRVITTSTRTWALPTYNNHLYKQISSQSGASNDNHYFGYSTPWGYFDFNRFHCHFSPRDWQRLINNNWGFRPKRLNFKLFNIQVKEVTQNDGTTTIANNLTSTVQVFTDSEYQLPYVLGSAHQGCLPPFPADVFMVPQYGYLTLNNGSQAVGRSSFYCLEYFPSQMLRTGNNFTFSYTFEDVPFHSSYAHSQSLDRLMNPLIDQYLYYLSRTNTPSGTTTQSRLQFSQAGASDIRDQSRNWLPGPCYRQQRVSKTAADNNNSDYSWTGATKYHLNGRDSLVNPGTAMASHKDDEEKYFPQSGVLIFGKQDSGKTNVDIEKVMITDEEEIRTTNPVATEQYGSVSTNLQSGNTQAATSDVNTQGVLPGMVWQDRDVYLQGPIWAKIPHTDGHFHPSPLMGGFGPKHPPPQILIKNTPVPANPPTTFSAAKFASFITQYSTGQVSVEIEWELQKENSKRWNPEIQYTSNYNKSVNVDFTVDTNGVYSEPRPIGTRYLTRNL

SEQ ID NO: 2596 - protein, 735 aa, Artificial Sequence
  source: /note="Description of Artificial Sequence: Synthetic polypeptide"
MAADGYLPDWLEDTLSEGIRQWWKLKPGPPPPKPAERHKDDSRGLVLPGYKYLGPFNGLDKGEPVNEADAAALEHDKAYDRQLDSGDNPYLKYNHADAEFQERLKEDTSFGGNLARAVFQAKKRVLEPLGLVEEPVKTAPGKKRPVEHSPAELDSSSGTGKSGQQPARKRLNFGQTGDADSVPDPQPLGQPPAAPSGLGTNTMASGSGAPMADNNEGADGVGNSSGNWHCDSTWMGDRVITTSTRTWALPTYNNHLYKQISSQSGASNDNHYFGYSTPWGYFDFNRFHCHFSPRDWQRLINNNWGFRPKRLNFKLFNIQVKEVTQNDGTTTIANNLTSTVQVFTDSEYQLPYVLGSAHQGCLPPFPADVFMVPQYGYLTLNNGSQAVGRSSFYCLEYFPSQMLRTGNNFTFSYTFEDVPFHSSYAHSQSLDRLMNPLIDQYLYYLSRTNTPSGTTTQSRLQFSQAGASDIRDQSRNWLPGPCYRQQRVPKTAADNNNSDYSWTGATKYHLNGRDSLVNPGTAMASHKDDEEKYFPQSGVLIFGKQDSGKTNVDIEKVMITDEEEIRTTNPVATEQYGSVSTNLQSGNTQAATSDVNTQGVLPGMVWQDRDVYLQGPIWAKIPHTDGHFHPSPLMGGFGPKHPPPQILIKNTPVPANPSTTFSAAKFASFITQYSTGQVSVEIEWELQKENSKRWNPEIQYTSNYNKSVNVDFTVDTNGVYSEPRPIGTRYLTRNL

SEQ ID NO: 2597 - protein, 735 aa, Artificial Sequence
  source: /note="Description of Artificial Sequence: Synthetic polypeptide"
MAADGYLPDWLEDTLSEGIRQWWKLKPGPPPPKPAERHKDDSRGLVLPGYKYLGPFNGLDKGEPVNEADAAALEHDKAYDRQLDSGDNPYLKYNHADAEFQERLKEDTSFGGNLARAVFQAKKRVLEPLGLVEEPVKTAPGKKRPVEHSPAELDSSSGTGKSGQQPARKRLNFGQTGDADSVPDPQPLGQPPAAPSGLGTNTMASGSGAPMADNNEGADGVGNSSGNWHCDSTWMGDRVITTSTRTWALPTYNNHLYKQISSQSGASNDNHYFGYSTPWGYFDFNRFHCHFSPRDWQRLINNNWGFRPKRLNFKLFNIQVKEVTQNDGTTTIANNLTSTVQVFTDSEYQLPYVLGSAHQGCLPPFPADVFMVPQYGYLTLNNGSQAVGRSSFYCLEYFPSQMLRTGNNFTFSYTFEDVPFHSSYAHSQSLDRLMNPLIDQYLYYLSRTNTPSGTTTQSRLQFSQAGASDIRDQSRNWLPGPCYRQQRVSKTAADNNNSDYSWTGATKYHLNGRDSLVNPGTAMASHKDDEEKYFPQSGVLIFGKQDSGKTNVDIEKVMITDEEEIRTTNPVATEQYGSVSTNLQSGNTQAATSDVNTQGVLPGMVWQDRDVYLQGPIWAKIPHTDGHFHPSPLMGGFGPKHPPPQILIKNTPVPANPSTTFSAAKFASFITQYSTGQVSVEIEWELQKENSKRWNPEIQYTSNYNKSVNVDFTVDTNGVYSEPRPIGTRYLTRNL

SEQ ID NO: 2598 - protein, 735 aa, Artificial Sequence
  source: /note="Description of Artificial Sequence: Synthetic polypeptide"
MAADGYLPDWLEDTLSEGIRQWWKLKPGPPPPKPAERHKDDSRGLVLPGYKYLGPFNGLDKGEPVNEADAAALEHDKAYDRQLDSGDNPYLKYNHADAEFQERLKEDTPFGGNLARAVFQAKKRVLEPLGLVEEPVKTAPGKKRPVEHSPAELDSSSGTGKSGQQPARKRLNFGQTGDADSVPDPQPLGQPPAAPSGLGTNTMASGSGAPMADNNEGADGVGNSSGNWHCDSTWMGDRVITTSTRTWALPTYNNHLYKQISSQSGASNDNHYFGYSTPWGYFDFNRFHCHFSPRDWQRLINNNWGFRPKRLNFKLFNIQVKEVTQNDGTTTIANNLTSTVQVFTDSEYQLPYVLGSAHQGCLPPFPADVFMVPQYGYLTLNNGSQAVGRSSFYCLEYFPSQMLRTGNNFTFSYTFEDVPFHSSYAHSQSLDRLMNPLIDQYLYYLSRTNTPSGTTTQSRLQFSQAGASDIRDQSRNWLPGPCYRQQRVSKTAADNNNSDYSWTGATKYHLNGRDSLVNPGTAMASHKDDEEKYFPQSGVLIFGKQDSGKTNVDIEKVMITDEEEIRTTNPVATEQYGSVSTNLQSGNTQAATSDVNTQGVLPGMVWQDRDVYLQGPIWAKIPHTDGHFHPSPLMGGFGPKHPPPQILIKNTPVPANPSTTFSAAKFASFITQYSTGQVSVEIEWELQKENSKRWNPEIQYTSNYNKSVNVDFTVDTNGVYSEPRPIGTRYLTRNL

SEQ ID NO: 2599 - protein, 735 aa, Artificial Sequence
  source: /note="Description of Artificial Sequence: Synthetic polypeptide"
MAADGYLPDWLEDTLSEGIRQWWKLKPGPPPPKPAERHKDDSRGLVLPGYKYLGPFNGLDKGEPVNEADAAALEHDKAYDRQLDSGDNPYLKYNHADAEFQERLKEDTSFGGNLARAVFQAKKRVLEPLGLVEEPVKTAPGKKRPVEHSPAELDSSSGTGKSGQQPARKRLNFGQTGDADSVPDPQPLGQPPAAPSGLGTNTMASGSGAPMADNNEGADGVGNSSGNWHCDSTWMGDRVITTSTRTWALPTYNNHLYKQISSQSGASNDNHYFGYSTPWGYFDFNRFHCHFSPRDWQRLINNNWGFRPKRLNSKLFNIQVKEVTQNDGTTTIANNLTSTVQVFTDSEYQLPYVLGSAHQGCLPPFPADVFMVPQYGYLTLNNGSQAVGRSSFYCLEYFPSQMLRTGNNFTFSYTFEDVPFHSSYAHSQSLDRLMNPLIDQYLYYLSRTNTPSGTTTQSRLQFSQAGASDIRDQSRNWLPGPCYRQQRVSKTAADNNNSDYSWTGATKYHLNGRDSLVNPGTAMASHKDDEEKYFPQSGVLIFGKQDSGKTNVDIEKVMITDEEEIRTTNPVATEQYGSVSTNLQSGNTQAATSDVNTQGVLPGMVWQDRDVYLQGPIWAKIPHTDGHFHPSPLMGGFGPKHPPPQILIKNTPVPANPSTTFSAAKFASFITQYSTGQVSVEIEWELQKENSKRWNPEIQYTSNYNKSVNVDFTVDTNGVYSEPRPIGTRYLTRNL

SEQ ID NO: 2600 - protein, 735 aa, Artificial Sequence
  source: /note="Description of Artificial Sequence: Synthetic polypeptide"
MAADGYLPDWLEDTLSEGIRQWWKLKPGPPPPKPAERHKDDSRGLVLPGYKYLGPFNGLDKGEPVNEADAAALEHDKAYDRQLDSGDNPYLKYNHADAEFQERLKEDTSFGGNLARAVFQAKKRVLEPLGLVEEPVKTAPGKKRPVEHSPAELDSSSGTGKSGQQPARKRLNFGQTGDADSVPDPQPLGQPPAAPSGLGTNTMASGSGAPMADNNEGADGVGNSSGNWHCDSTWMGDRVITTSTRTWALPTYNNHLYKQISSQSGASNDNHYFGYSTPWGYFDFNRFHCHFSPRDWQRLINNNWGFRPKRLNFKLFNIQVKEVTQNDGTTTIANNLTSTVQVFTDSEYQLPYVLGSAHQGCLPPFPADVFMVPQYGYLTLNNGSQAVGRSSFYCLEYFPSQMLRTGNNFTFSYTFEDVPFHSSYAHSQGLDRLMNPLIDQYLYYLSRTNTPSGTTTQSRLQFSQAGASDIRDQSRNWLPGPCYRQQRVSKTAADNNNSDYSWTGATKYHLNGRDSLVNPGTAMASHKDDEEKYFPQSGVLIFGKQDSGKTNVDIEKVMITDEEEIRTTNPVATEQYGSVSTNLQSGNTQAATSDVNTQGVLPGMVWQDRDVYLQGPIWAKIPHTDGHFHPSPLMGGFGPKHPPPQILIKNTPVPANPSTTFSAAKFASFITQYSTGQVSVEIEWELQKENSKRWNPEIQYTSNYNKSVNVDFTVDTNGVYSEPRPIGTRYLTRNL

SEQ ID NO: 2601 - protein, 735 aa, Artificial Sequence
  source: /note="Description of Artificial Sequence: Synthetic polypeptide"
MAADGYLPDWLEDTLSEGIRQWWKLKPGPPPPKPAERHKDDSRGLVLPGYKYLGPFNGLDKGEPVNEADAAALEHDKAYDRQLDSGDNPYLKYNHADAEFQERLKEDTSFGGNLARAVFQAKKRVLEPLGLVEEPVKTAPGKKRPVEHSPAELDSSSGTGKSGQQPARKRLNFGQTGDADSVPDPQPLGQPPAAPSGLGTNTMASGSGAPMADNNEGADGVGNSSGNWHCDSTWMGDRVITTSTRTWALPTYNNHLYKQISSQSGASNDNHYFGYSTPWGYFDFNRFHCHFSPRDWQRLINNNWGFRPKRLNFKLFNIQVKEVTQNDGTTTIANNLTSTVQVFTDSEYQLPYVLGSAHQGCLPPLPADVFMVPQYGYLTLNNGSQAVGRSSFYCLEYFPSQMLRTGNNFTFSYTFEDVPFHSSYAHSQSLDRLMNPLIDQYLYYLSRTNTPSGTTTQSRLQFSQAGASDIRDQSRNWLPGPCYRQQRVSKTAADNNNSDYSWTGATKYHLNGRDSLVNPGTAMASHKDDEEKYFPQSGVLIFGKQDSGKTNVDIEKVMITDEEEIRTTNPVATEQYGSVSTNLQSGNTQAATSDVNTQGVLPGMVWQDRDVYLQGPIWAKIPHTDGHFHPSPLMGGFGPKHPPPQILIKNTPVPANPSTTFSAAKFASFITQYSTGQVSVEIEWELQKENSKRWNPEIQYTSNYNKSVNVDFTVDTNGVYSEPRPIGTRYLTRNL

SEQ ID NO: 2602 - protein, 735 aa, Artificial Sequence
  source: /note="Description of Artificial Sequence: Synthetic polypeptide"
MAADGYLPDWLEDTLSEGIRQWWKLKPGPPPPKPAERHKDDSRGLVLPGYKYLGPFNGLDKGEPVNEADAAALEHDKAYDRQLDSGDNPYLKYNHADAEFQERLKEDTSFGGNLARAVFQAKKRVLEPLGLVEEPVKTAPGKKRPVEHSPAELDSSSGTGKSGQQPARKRLNFGQTGDADSVPDPQPLGQPPAAPSGLGTNTMASGSGAPMADNNEGADGVGNSSGNWHCDSTWMGDRVITTSTRTWALPTYNNHLYKQISSQSGASNDNHYFGYSTPWGYFDFNRFHCHFSPRDWQRPINNNWGFRPKRLNFKLFNIQVKEVTQNDGTTTIANNLTSTVQVFTDSEYQLPYVLGSAHQGCLPPFPADVFMVPQYGYLTLNNGSQAVGRSSFYCLEYFPSQMLRTGNNFTFSYTFEDVPFHSSYAHSQSLDRLMNPLIDQYLYYLSRTNTPSGTTTQSRLQFSQAGASDIRDQSRNWLPGPCYRQQRVSKTAADNNNSDYSWTGATKYHLNGRDSLVNPGTAMASHKDDEEKYFPQSGVLIFGKQDSGKTNVDIEKVMITDEEEIRTTNPVATEQYGSVSTNLQSGNTQAATSDVNTQGVLPGMVWQDRDVYLQGPIWAKIPHTDGHFHPSPLMGGFGPKHPPPQILIKNTPVPANPSTTFSAAKFASFITQYSTGQVSVEIEWELQKENSKRWNPEIQYTSNYNKSVNVDFTVDTNGVYSEPRPIGTRYLTRNL

SEQ ID NO: 2603 - protein, 735 aa, Artificial Sequence
  source: /note="Description of Artificial Sequence: Synthetic polypeptide"
MAADGYLPDWLEDTLSEGIRQWWKLKPGPPPPKPAERHKDDSRGLVLPGYKYLGPFNGLDKGEPVNEADAAALEHDEAYDRQLDSGDNPYLKYNHADAEFQERLKEDTSFGGNLARAVFQAKKRVLEPLGLVEEPVKTAPGKKRPVEHSPAELDSSSGTGKSGQQPARKRLNFGQTGDADSVPDPQPLGQPPAAPSGLGTNTMASGSGAPMADNNEGADGVGNSSGNWHCDSTWMGDRVITTSTRTWALPTYNNHLYKQISSQSGASNDNHYFGYSTPWGYFDFNRFHCHFSPRDWQRLINNNWGFRPKRLNFKLFNIQVKEVTQNDGTTTIVNNLTSTVQVFTDSEYQLPYVLGSAHQGCLPPFPADVFMVPQYGYLTLNNGSQAVGRSSFYCLEYFPSQMLRTGNNFTFSYTFEDVPFHSSYAHSQSLDRLMNPLIDQYLYYLSRTNTPSGTTTQSRLQFSQAGASDIRDQSRNWLPGPCYRQQRVSKTAADNNNSDYSWTGATKYHLNGRDSLVNPGTAMASHKDDEEKYFPQSGVLIFGKQDSGKTNVDIEKVMITDEEEIRTTNPVATEQYGSVSTNLQSGNTQAATSDVNTQGVLPGMVWQDRDVYLQGPIWAKIPHTDGHFHPSPLMGGFGPKHPPPQILIKNTPVPANPSTTFSAAKFAYFITQYSTGQVSVEIEWELQKGNSKRWNPEIQYTSNYNKSVNVDFTVDTNGVYSEPRPIGTRYLTRNL

SEQ ID NO: 2604 - protein, 735 aa, Artificial Sequence
  source: /note="Description of Artificial Sequence: Synthetic polypeptide"
MAADGYLPDWLEDTLSEGIRQWWKLKPGPPPPKPAERHKDDSRGLVLPGYKYLGPFNGLDKGEPVNEADAAALEHDKAYDRQLDSGDNPYLKYNHADAEFQERLKEDTSFGGNLARAVFQAKKRVLEPLGLVEEPVKTAPGKKRPVEHSPAELDSSSGTGKSGQQPARKRLNFGQTGDADSVPDPQPLGQPPAAPSGLGTNTMASGSGAPMADNNEGADGVGNSSGNWHCDSTWMGDRVITTSTRTWALPTYNNHLYKQISSQSGASNDNHYFGYSTPWGYFDFNRFHCHFSPRDWQRLINNNWGFRPKRLNFKLFNIQVKEVTQNDGTTTIANNLTSTVQVFTDSEYQLPYVLGSAHQGCLPPFPADVFMVPQYGYLTLNNGSQAVGRSSFYCLEYFPSQMLRTGNNCTFSYTFEDVPFHSSYAHSQSLDRLMNPLIDQYLYYLSRTNTPSGTTTQSRLQFSQAGASDIRDQSRNWLPGPCYRQQRVSKTAADNNNSDYSWTGATKYHLNGRDSLVNPGTAMASHKDDEEKYFPQSGVLIFGKQDSGKTNVDIEKVMITDEEEIRTTNPVATEQYGSVSTNLQSGNTQAATSDVNTQGVLPGMVWQDRDVYLQGPIWAKIPHTDGHFHPSPLMGGFGPKHPPPQILIKNTPVPANPSTTFSAAKFASFITQYSTGQVSVEIEWELQKENSKRWNPEIQYTSNYNKSVNVDFTVDTNGVYSEPRPIGTRYLTRNL

SEQ ID NO: 2605 - protein, 735 aa, Artificial Sequence
  source: /note="Description of Artificial Sequence: Synthetic polypeptide"
MAADGYLPDWLEDTLSEGIRQWWKLKPGPPPPKPAERHKDDSRGLVLPGYKYLGPFNGLDKGEPVNEADAAALEHDKAYDRQLDSGDNPYLKYNHADAEFQERLKEDTSFGGNLARAVFQAKKRVLEPLGLVEEPVKTAPGKKRPVEHSPAELDSSSGTGKSGQQPARKRLNFGQTGDADSVPDPQPLGQPPAAPSGLGTNTMASGSGAPMADNNEGADGVGNSSGNWHCDSTWMGDRVITTSTRTWALPTYNNHLYKQISSQSGASNDNHYFGYSTPWGYFDFNRFHCHFSPRDWQRLINNNWGFRPKRPNFKLFNIQVKEVTQNDGTTTIANNLTSTVQVFTDSEYQLPYVLGSAHQGCLPPFPADVFMVPQYGYLTLNNGSQAVGRSSFYCLEYFPSQMLRTGNNFTFSYTFEDVPFHSSYAHSQSLDRLMNPLIDQYLYYLSRTNTPSGTTTQSRLQFSQAGASDIRDQSRNWLPGPCYRQQRVSKTAADNNNSDYSWTGATKYHLNGRDSLVNPGTAMASHKDDEEKYFPQSGVLIFGKQDSGKTNVDIEKVMITDEEEIRTTNPVATEQYGSVSTNLQSGNTQAATSDVNTQGVLPGMVWQDRDVYLQGPIWAKIPHTDGHFHPSPLMGGFGPKHPPPQILIKNTPVPANPSTTFSAAKFASFITQYSTGQVSVEIEWELQKENSKRWNPEIQYTSNYNKSVNVDFTVDTNGVYSEPRPIGTRYLTRNL

SEQ ID NO: 2606 - protein, 735 aa, Artificial Sequence
  source: /note="Description of Artificial Sequence: Synthetic polypeptide"
MAADGYLPDWLEDTLSEGIRQWWKLKPGPPPPKPAERHKDDSRGLVLPGYKYLGPFNGLDKGEPVNEADAAALEHDKAYDRQLDSGDNPYLKYNHADAEFQERLKEDTSFGGNLARAVFQAKKRVLEPLGLVEEPVKTAPGKKRPVEHSPAELDSSSGTGKSGQQPARKRLNFGQTGDADSVPDPQPLGQPPAAPSGLGTNTMASGSGAPMAGNNEGADGVGNSSGNWHCDSTWMGDRVITTSTRTWALPTYNNHLYKQISSQSGASNDNHYFGYSTPWGYFDFNRFHCHFSPRDWQRLINNNWGFRPKRLNFKLFNIQVKEVTQNDGTTTIANNLTSTVQVFTDSEYQLPYVLGSAHQGCLPPFPADVFMVPQYGYLTLNNGSQAVGRSSFYCLEYFPSQMLRTGNNFTFSYTFEDVPFHSSYAHSQSLDRLMNPLIDQYLYYLSRTNTPSGTTTQSRLQFSQAGASDIRDQSRNWLPGPCYRQQRVSKTAADNNNSDYSWTGATKYHLNGRDSLVNPGTAMASHKDDEEKYFPQSGVLIFGKQDSGKTNVDIEKVMITDEEEIRTTNPVATEQYGSVSTNLQSGNTQAATSDVNTQGVLPGMVWQDRDVYLQGPIWAKIPHTDGHFHPSPLMGGFGPKHPPPQILIKNTPVPANPSTTFSAAKFASFITQYSTGQVSVEIEWELQKENSKRWNPEIQYTSNYNKSVNVDFTVDTNGVYSEPRPIGTRYLTRNL

SEQ ID NO: 2607 - protein, 735 aa, Artificial Sequence
  source: /note="Description of Artificial Sequence: Synthetic polypeptide"
MAADGYLPDWLEDTLSEGIRQWWKLKPGPPPPKPAERHKDDSRGLVLPGYKYLGPFNGLDKGEPVNEADAAALEHDKAYDRQLDSGDNPYLKYNHADAEFQERLKEDTPFGGNLARAVFQAKKRVLEPLGLVEEPVKTAPGKKRPVEHSPAELDSSSGTGKSGQQPARKRLNFGQTGDADSVPDPQPLGQPPAAPSGLGTNTMASGSGAPMADNNEGADGVGNSSGNWHCDSTWMGDRVITTSTRTWALPTYNNHLYKQISSQSGASNDNHYFGYSTPWGYFDFNRFHCHFSPRDWQRLINNNWGFRPKRLNFKLFNIQVKEVTQNDGTTTIANNLTSTVQVFTDSEYQLPYVLGSAHQGCLPPFPADVFMVPQYGYLTLNNGSQAVGRSSFYCLEYFPSQMLRTGNNFTFSYTFEDVPFHSSYAHSQSLDRLMNPLIDQYLYYLSRTNTPSGTTTQSRLQFSQAGASDIRDQSRNWLPGPCYRQQRVSKTAADNNNSDYSWTGATKYHLNGRDSLVNPGTAMASHKDDEEKYFPQSGVLIFGKQDSGKTNVDIEKVMITDEEEIRTTNPVATEQYGSVSTNLQSGNTQAATSDVNTQGVLPGMVWQDRDVYLQGPIWAKIPHTDGHFHPSPLMGGFGPKHPPPQILIKNTPVPANPSTTFSAAKFASFITQYSTGQVSVEIEWELQKENSKRWNPEIQYTSNYNKSVNVDFTMDTNGVYSEPRPIGTRYLTRNL

SEQ ID NO: 2608 - protein, 735 aa, Artificial Sequence
  source: /note="Description of Artificial Sequence: Synthetic polypeptide"
MAADGYLPDWLEDTLSEGIRQWWKLKPGPPPPKPAERHKDDSRGLVLPGYKYLGPFNGLDKGEPVNEADAAALEHDKAYDRQLDSGDNPYLKYNHADAEFQERLKEDTSFGGNLARAVFQAKKRVLEPLGLVEEPVKTAPGKKRPVEHSPAELDSSSGTGKSGQQPARKRLNFGQTGDADSVPDPQPLGQPPAAPSGLGTNTMASGSGAPMADNNEGADGVGNSSGNWHCDSTWMGDRVITTSTRTWALPTYNNHLYKQISSQSGASNDNHYFGYSTPWGYFDFNRFHCHFSPRDWQRLINNNWGFRPKRLNFKLFNIQVKEVTQNDGTTTIANNLTSTVQVFTDSEYQLPYVLGSAHQGCLPPFPADVFMVPQYGYLTLNNGSQAVGRSSFYCLEYFPSQMLRTGNNFTFSYTFEDVPFHSSYAHSQSLDRLMNPLIDQYLYYLSRTNTPSGTTTQPRLQFSQAGASDIRDQSRNWLPGPCYRQQRVSKTAADNNNSDYSWTGATKYHLNGRDSLVNPGTAMASHKDDEEKYFPQSGVLIFGKQDSGKTNVDIEKVMITDEEEIRTTNPVATEQYGSVSTNLQSGNTQAATSDVNTQGVLPGMVWQDRDVYLQGPIWAKIPHTDGHFHPSPLMGGFGPKHPPPQILIKNTPVPANPSTTFSAAKFASFITQYSTGQVSVEIEWELQKENSKRWNPEIQYTSNYNKSVNVDFTVDTNGVYSEPRPIGTRYLTRNL

SEQ ID NO: 2609 - protein, 735 aa, Artificial Sequence
  source: /note="Description of Artificial Sequence: Synthetic polypeptide"
MAADGYLPDWLEDTLSEGIRQWWKLKPGPPPPKPAERHKDDSRGLVLPGYKYLGPFNGLDKGEPVNEADAAALEHDKAYDRQLDSGDNPYLKYNHADAEFQERLKEDTSFGGNLARAVFQAKKRVLEPLGLVEEPVKTAPGKKRPVEHSPAELDSSSGTGKSGQQPARKRLNFGQTGDADSVPDPQPLGQPPAAPSGLGTNTMASGSGAPMADNNEGADGVGNSSGNWHCDSTWMGDRVITTSTRTWALPTYNNHLYKQISSQSGASNDNHYFGYSTPWGYFDFNRFHCHFSPRDWQRLINNNWGFRPKRLNFKLFNIQVKEVTQNDGTTTIANNLTSTVQVFTDSEYQLPYVLGSAHQGCLPPFPADVFMVPQYGYLTLNNGSQAVGRSSFYCLEYFPSQMLRTGNNFTFSYTFEDVPFHSSYAHSQSLDRLMNPLIDQYLYYLSRTNTPSGTTTQSRLQFSQAGASDIRDQSRNWLPGPCYRQQRVSKTAADNNNSDYSWTGATKHHLNGRDSLVNPGTAMASHKDDEEKYFPQSGVLIFGKQDSGKTNVDIEKVMITDEEEIRTTNPVATEQYGSVSTNLQSGNTQAATSDVNTQGVLPGMVWQDRDVYLQGPIWAKIPHTDGHFHPSPLMGGFGPKHPPPQILIKNTPVPANPSTTFSAAKFASFITQYSTGQVSVEIEWELQKENSKRWNPEIQYTSNYNKSVNVDFTVDTNGVYSEPRPIGTRYLTRNL

SEQ ID NO: 2610 - protein, 735 aa, Artificial Sequence
  source: /note="Description of Artificial Sequence: Synthetic polypeptide"
MAADGYLPDWLEDTLSEGIRQWWKLKPGPPPPKPAERHKDDSRGLVLPGYKYLGPFNGLDKGEPVNEADAAALEHDKAYDRQLDSGDNPYLKYNHADAEFQERLKEDTSFGGNLARAVFQAKKRVLEPLGLVEEPVKTAPGKKRPVEHSPAELDSSSGTGKSGQQPARKRLNFGQTGDADSVPDPQPLGQPPAAPSGLGTNTMASGSGAPMADNNEGADGVGNSSGNWHCDSTWMGDRVITTSTRTWALPTYNNHLYKQISSQSGASNDNHYFGYSTPWGYFDLNRFHCHFSPRDWQRLINNNWGFRPKRLNFKLFNIQVKEVTQNDGTTTIANNLTSTVQVFTDSEYQLPYVLGSAHQGCLPPFPADVFMVPQYGYLTLNNGSQAVGRSSFYCLEYFPSQMLRTGNNFTFSYTFEDVPFHSSYAHSQSLDRLMNPLIDQYLYYLSRTNTPSGTTTQSRLQFSQAGASDIRDQSRNWLPGPCYRQQRVSKTAADNNNSDYSWTGATKYHLNGRDSLVNPGTAMASHKDDEEKYFPQSGVLIFGKQDSGKTNVDIEKVMITDEEEIRTTNPVATEQYGSVSTNLQSGNTQAATSDVNTQGVLPGMVWQDRDVYLQGPIWAKIPHTDGHFHPSPLMGGFGPKHPPPQILIKNTPVPANPSTTFSAAKFASFITQYSTGQVSVEIEWELQKENSKRWNPEIQYTSNYNKSVNVDFTVDTNGVYSEPRPIGTRYLTRNL

SEQ ID NO: 2611 - protein, 735 aa, Artificial Sequence
  source: /note="Description of Artificial Sequence: Synthetic polypeptide"
MAADGYLPDWLEDTLSEGIRQWWKLKPGPPPPKPAERHKDDSRGLVLPGYKYLGPLNGLDKGEPVNEADAAALEHDKAYDRQLDSGDNPYLKYNHADAEFQERLKEDTSFGGNLARAVFQAKKRVLEPLGLVEEPVKTAPGKKRPVEHSPAELDSSSGTGKSGQQPARKRLNFGQTGDADSVPDPQPLGQPPAAPSGLGTNTMASGSGAPMADNNEGADGVGNSSGNWHCDSTWMGDRVITTSTRTWALPTYNNHLYKQISSQSGASNDNHYFGYSTPWGYFDFNRFHCHFSPRDWQRLINNNWGFRPKRLNFKLFNIQVKEVTQNDGTTTIANNLTSTVQVFTDSEYQLPYVLGSAHQGCLPPFPADVFMVPQYGYLTLNNGSQAVGRSSFYCLEYFPSQMLRTGNNFTFSYTFEDVPFHSSYAHSQSLDRLMNPLIDQYLYYLSRTNTPSGTTTQSRLQFSQAGASDIRDQSRNWLPGPCYRQQRVSKTAADNNNSDYSWTGATKYHLNGRDSLVNPGTAMASHKDDEEKYFPQSGVLIFGKQDSGKTNVDIEKVMITDEEEIRTTNPVATEQYGSVSTNLQSGNTQAATSDVNTQGVLPGMVWQDRDVYLQGPIWAKIPHTDGHFHPSPLMGGFGPKHPPPQILIKNTPVPANPSTTFSAAKFASFITQYSTGQVSVEIEWELQKENSKRWNPEIQYTSNYNKSVNVDFTVDTNGVYSEPRPIGTRYLTRNL

SEQ ID NO: 2612 - protein, 735 aa, Artificial Sequence
  source: /note="Description of Artificial Sequence: Synthetic polypeptide"
MAADGYLPDWLEDTLSEGIRQWWKLKPGPPPPKPAERHKDDSRGLVLPGYKYLGPFNGLDKGEPVNEADAAALEHDKAYDRQLDSGDNPYLKYNHADAEFQERLKEDTSFGGNLARAVFQAKKRVLEPLGLVEEPVKTAPGKKRPVEHSPAELDSSSGTGKSGQQPARKRLNFGQTGDADSVPDPQPLGQPPAAPSGLGTNTMASGSGAPMADNNEGADGVGNSSGNWHCDSTWMGDRVITTSTRTWALPTYNNHLYKQISSQSGASNDNHYFGYSTPWGYFDFNRFHCHFSPRDWQRLINNNWGFRPKRLNFKLFNIQVKEVTQNDGTTTIANNLTSTVQVFTDSEYQLPYVLGSAHQGCLPPFPADVFMVPQYGYLTLNNGSQAVGRSSFYCLEYFPSQMLRTGNNFTFSYTFEDVPFHSSYAHSQSLDRLMNPLIDQYLYYLSRTNTPSGTTTQSRLQFSQAGASDIRDQSRNWLPGPCYRQQRVSKTAADNNNSDYSWTGATKYHLNGRDSLVNPGTAMASHKDDEEKYFPQSGVLIFGKQDSGKTNVDIEKVMITDEEEIRTTNPVATEQYGSVSTNLQSGNTQAATSDVNTQGVLPGMVWQDRDVYLQGPIWAKIPHTDGHFHPSPLMGGFGPKHPPPQILIKNTPVPANPSTTFSAAKFASFITQYSTGQVSVEIEWELQKENSKRWNPEIQYTSNYNKSVNVDFTVDTNGVYSEPRPIGTRYLARNL

SEQ ID NO: 2613 - protein, 735 aa, Artificial Sequence
  source: /note="Description of Artificial Sequence: Synthetic polypeptide"
MAADGYLPDWLEDTLSEGIRQWWKLKPGPPPPKPAERHKDDSRGLVLPGYKYLGPFNGLDKGEPVNEADAAALEHDKAYDRQLDSGDNPYLKYNHADAEFQERLKEDTSFGGNLARAVFQAKKRVLEPLGLVEEPVKTAPGKKRPVEHSPAELDSSSGTGKSGQQPARKRLNFGQTGDADSVPDPQPLGQPPAAPSGLGTNTMASGSGAPMADNNEGADGVGNSSGNWHCDSTWMGDRVITTSTRTWALPTYNNHLYKQISSQSGASNDNHYFGYSTPWGYFDFNRFHCHFSPRDWQRLINNNWGFRPKRLNFKLFNIQVKEVTQNDGTTTIANNLTSTVQVFTDSEYQLPYVLGSAHQGCLPPFPADVFMVPQYGYLTLNNGSQAVGRSSFYCLEYFPSQMLRTGNNFTLSYTFEDVPFHSSYAHSQSLDRLMNPLIDQYLYYLSRTNTPSGTTTQSRLQFSQAGASDIRDQSRNWLPGPCYRQQRVSKTAADNNNSDYSWTGATKYHLNGRDSLVNPGTAMASHKDDEEKYFPQSGVLIFGKQDSGKTNVDIEKVMITDEEEIRTTNPVATEQYGSVSTNLQSGNTQAATSDVNTQGVLPGMVWQDRDVYLQGPIWAKIPHTDGHFHPSPLMGGFGPKHPPPQILIKNTPVPANPSTTFSAAKFASFITQYSTGQVSVEIEWELQKENSKRWNPEIQYTSNYNKSVNVDFTVDTNGVYSEPRPIGTRYLTRNL

SEQ ID NO: 2614 - protein, 735 aa, Artificial Sequence
  source: /note="Description of Artificial Sequence: Synthetic polypeptide"
MAADGYLPDWLEDTLSEGIRQWWKLKPGPPPPKPAERHKDDSRGLVLPGYKYLGPFNGLDKGEPVNEADAAALEHDKAYDRQLDSGDNPYLKYNHADAEFQERLKEDTSFGGNLARAVFQAKKRVLEPLGLVEEPVKTAPGKKRPVEHSPAELDSSSGTGKSGQQPARKRLNFGQTGDADSVPDPQPLGQPPAAPSGLGTNTMASGSGAPMADNNEGADGVGNSSGNWHCDSTWMGDRVITTSTRTWALPTYNNHLYKQISSQSGASNDNHYFGYSTPWGYFDFNRFHCHFSPRDWQRLINNNWGFRPKRLNFKLFNIQVKEVTQNDGTTTIANNLTSTVQVFTDSEYQLPYVLGSAHQGCLPPFPADVFMVPQYGYLTLNNGSQAVGRSSFYCLEYFPSQMLRTGNNFTFSYTFEDVPFHSSYAHSQSLDRLMNPLIDQYLYYLSRTNTPSGTTTQSRLQFSQAGASDIRDQSRNWLPGPCYRQQRVSKTAADNNNSDYSWTGATKYHLNGRDSLVNPGTAMASHKDDEEKYFPQSGVLIFRKQDSGKTNVDIEKVMITDEEEIRTTNPVATEQYGSVSTNLQSGNTQAATSDVNTQGVLPGMVWQDRDVYLQGPIWAKIPHTDGHFHPSPLMGGFGPKHPPPQILIKNTPVPANPSTTFSAAKFASFITQYSTGQVSVEIEWELQKENSKRWNPEIQYTSNYNKSVNVDFTVDTNGVYSEPRPIGTRYLTRNL

SEQ ID NO: 2615 - protein, 735 aa, Artificial Sequence
  source: /note="Description of Artificial Sequence: Synthetic polypeptide"
MAADGYLPDWLEDTLSEGIRQWWKLKPGPPPPKPAERHKDDSRGLVLPGYKYLGPFNGLDKGEPVNEADAAALEHDKAYDRQLDSGDNPYLKYNHADAEFQERLKEDTSFGGNLARAVFQAKKRVLEPLGLVEEPVKTAPGKKRPVEHSPAELDSSSGTGKSGQQPARKRLNFGQTGDADSVPDPQPLGQPPAAPSGLGTNTMASGSGAPMADNNEGADGVGNSSGNWHCDSTWMGDRVITTSTRTWALPTYNNHLYKQISSQSGASNDNHYFGYSTPWGYFDFNRFHCHFSPRDWQRLINNNWGFRPKRLNFKLFNIQVKEVTQNDGTTTIANNLTSTVQVFTDSEYQLPYVLGSAHQGCLPPFPADVFMVPQYGYLTLNNGSQAVGRSSFYCLEYFPSQMLRTGNNFTFSYTFEDVPFHSSYAHSQSLDRLMNPLIDQYLYYLSRTNTPSGTTTQSRLQFSQAGASDIRDQSRNWLPGPCYRQQRVSKTAADNNNSDYSWTGATKYHLNGRDSLVNPGTAMASHKDDEEKYFPQSGVLIFGKRDSGKTNVDIEKVMITDEEEIRTTNPVATEQYGSVSTNLQSGNTQAATSDVNTQGVLPGMVWQDRDVYLQGPIWAKIPHTDGHFHPSPLMGGFGPKHPPPQILIKNTPVPANPSTTFSAAKFASFITQYSTGQVSVEIEWELQKENSKRWNPEIQYTSNYNKSVNVDFTVDTNGVYSEPRPIGTRYLTRNL

SEQ ID NO: 2616 - protein, 735 aa, Artificial Sequence
  source: /note="Description of Artificial Sequence: Synthetic polypeptide"
MAADGYLPDWLEDTLSEGIRQWWKLKPGPPPPKPAERHKDDSRGLVLPGYKYLGPFNGLDKGEPVNEADAAALEHDKAYDRQLDSGDNPYLKYNHADAEFQERLKEDTSFGGNLARAVFQAKKRVLEPLGLVEEPVKTAPGKKRPVEHSPAELDSSSGTGKSGQQPARKRLNFGQTGDADSVPDPQPLGQPPAAPSGLGTNTMASGSGAPMADNNEGADGVGNSSGNWHCDSTWMGDRAITTSTRTWALPTYNNHLYKQISSQSGASNDNHYFGYSTPWGYFDFNRFHCHFSPRDWQRLINNNWGFRPKRLNFKLFNIQVKEVTQNDGTTTIANNLTSTVQVFTDSEYQLPYVLGSAHQGCLPPFPADVFMVPQYGYLTLNNGSQAVGRSSFYCLEYFPSQMLRTGNNFTFSYTFEDVPFHSSYAHSQSLDRLMNPLIDQYLYYLSRTNTPSGTTTQSRLQFSQAGASDIRDQSRNWLPGPCYRQQRVSKTAADNNNSDYSWTGATKYHLNGRDSLVNPGTAMASHKDDEEKYFPQSGVLIFGKQDSGKTNVDIEKVMITDEEEIRTTNPVATEQYGSVSTNLQSGNTQAATSDVNTQGVLPGMVWQDRDVYLQGPIWAKIPHTDGHFHPSPLMGGFGPKHPPPQILIKNTPVPANPSTTFSAAKFASFITQYSTGQVSVEIEWELQKENSKRWNPEIQYTSNYNKSVNVDFTVDTNGVYSEPRPIGTRYLTRNL

SEQ ID NO: 2617 - protein, 735 aa, Artificial Sequence
  source: /note="Description of Artificial Sequence: Synthetic polypeptide"
MAADGYLPDWLEDTLSEGIRQWWKLKPGPPPPKPAERHKDDSRGLVLPGYKYLGPFNGLDKGEPVNEADAAALEHDKAYDRQLDSGDNPYLKYNHADAEFQERLKEDTSFGGNLARAVFQAKKRVLEPLGLVEEPVKTAPGKKRPVEHSPAELDSSSGTGKSGQQPARKRLNFGQTGDADSVPDPQPLGQPPAAPSGLGTNTMASGSGAPMADNNEGADGVGNSSGNWHCDSTWMGDRVITTSTRTWALPTYNNHLYKQISSQSGASNDNHYFGYSTPWGYFDFNRFHCHFSPRDWQRLINNNWGFRPKRLNFKLFNIQVKEVTQNDGTTTIANNLTSTVQVFTDSEYQLPYVLGSAHQGCLPPFPADVFMVPQYGYLTLNNGSQAVGRSSFYCLEYFPSQMLRTGNNFTFSYTFEDVPFHSSYAHSQSLDRLMNPLIDQYLYYLSRTNTPSGTTTQSRLQFSQAGASDIRDQSRNWLPGPCYRQQRVSKTAADNNNSDYSWTGATKYHLNGRDSLVNPGTAMASHKDDEEKYFPQSGVLIFGKQDSGKTNVDIEKVMITDEEEIRTTNPVATEQYGSVSTNLQSGNTQAATSDVNTQGVLPGMVWQDRDVYLQGPIWAKIPHTDGHFHPSPLMGGFGPKHPPPQILIKNTPVPANPSTTFSAAKFAYFITQYSTGQVSVEIEWELQKENSKRWNPEIQYTSNYNKSVNVDFTVDTNGVYSEPRPIGTRYLTRNL

SEQ ID NO: 2618 - protein, 735 aa, Artificial Sequence
  source: /note="Description of Artificial Sequence: Synthetic polypeptide"
MAADGYLPDWLEDTLSEGIRQWWKLKPGPPPPKPAERHKDDSRGLVLPGYKYLGPFNGLDKGEPVNEADAAALEHDKAYDRQLDSGDNPYLKYNHADAEFQERLKEDTSFGGNLARAVFQAKKRVLEPLGLVEEPVKTAPGKKRPVEHSPAELDSSSGTGKSGQQPARKRLNFGQTGDADSVPDPQPLGQPPAAPSGLGTNTMASGSGAPMADNNEGADGVGNSSGNWHCDSTWMGDRVITTSTRTWALPTYNNHLYKQISSQSGASNDNHYFGYSTPWGYFGFNRFHCHFSPRDWQRLINNNWGFRPKRLNFKLFNIQVKEVTQNDGTTTIANNLTSTVQVFTDSEYQLPYVLGSAHQGCLPPFPADVFMVPQYGYLTLNNGSQAVGRSSFYCLEYFPSQMLRTGNNFTFSYTFEDVPFHSSYAHSQSLDRLMNPLIDQYLYYLSRTNTPSGTTTQSRLQFSQAGASDIRDQSRNWLPGPCYRQQRVSKTAADNNNSDYSWTGATKYHLNGRDSLVNPGTAMASHKDDEEKYFPQSGVLIFGKQDSGKTNVDIEKVMITDEEEIRTTNPVATEQYGSVSTNLQSGNTQAATSDVNTQGVLPGMVWQDRDVYLQGPIWAKIPHTDGHFHPSPLMGGFGPKHPPPQILIKNTPVPANPSTTFSAAKFAYFITQYSTGQVSVEIEWELQKENSKRWNPEIQYTSNYNKSVNVDFTVDTNGVYSEPRPIGTRYLTRNL

SEQ ID NO: 2619 - protein, 735 aa, Artificial Sequence
  source: /note="Description of Artificial Sequence: Synthetic polypeptide"
MAADGYLPDWLEDTLSEGIRQWWKLKPGPPPPKPAERHKDDSRGLVLPGYKYLGPFNGLDKGEPVNEADAAALEHDKAYDRQLDSGDNPYLKYNHADAEFQERLKEDTSFGGNLARAVFQAKKRVLEPLGLVEEPVKTAPGKKRPVEHSPAELDSSSGTGKSGQQPARKRLNFGQTGDADSVPDPQPLGQPPAAPSGLGTNTMASGSGAPMADNNEGADGVGNSSGNWHCDSTWMGDRVITTSTRTWALPTYNNHLYKQISSQSGASNDNRYFGYSTPWGYFDFNRFHCHFSPRDWQRLINNNWGFRPKRLNFKLFNIQVKEVTQNDGTTTIANNLTSTVQVFTDSEYQLPYVLGSAHQGCLPPFPADVFMVPQYGYLTLNNGSQAVGRSSFYCLEYFPSQMLRTGNNFTFSYTFEDVPFHSSYAHSQSLDRLMNPLIDQYLYYLSRTNTPSGTTTQSRLQFSQAGASDIRDQSRNWLPGPCYRQQRVSKTAADNNNSDYSWTGATKYHLNGRDSLVNPGTAMASHKDDEEKYFPQSGVLIFGKQDSGKTNVDIEKVMITDEEEIRTTNPVATEQYGSVSTNLQSGNTQAATSDVNTQGVLPGMVWQDRDVYLQGPIWAKIPHTDGHFHPSPLMGGFGPKHPPPQILIKNTPVPANPSTTFSAAKFASFITQYSTGQVSVEIEWELQKENSKRWNPEIQYTSNYNKSVNVDFTVDTNGVYSEPRPIGTRYLTRNL

SEQ ID NO: 2620 - protein, 735 aa, Artificial Sequence
  source: /note="Description of Artificial Sequence: Synthetic polypeptide"
MAADGYLPDWLEDTLSEGIRQWWKLKPGPPPPKPAERHKDDSRGLVLPGYKYLGPFNGLDKGEPVNEADAAALEHDKAYDRQLDSGDNPYLKYNHADAEFQERLKEDTPFGGNLARAVFQAKKRVLEPLGLVEEPVKTAPGKKRPVEHSPAELDSSSGTGKSGQQPARKRLNFGQTGDADSVPDPQPLGQPPAAPSGLGTNTMASGSGAPMADNNEGADGVGNSSGNWHCDSTWMGDRVITTSTRTWALPTYNNHLYKQISSQSGASNDNHYFGYSTPWGYFDFNRFHCHFSPRDWQRLINNNWGFRPKRLNFKLFNIQVKEVTQNDGTTTIANNLTSTVQVFTDSEYQLPYVLGSAHQGCLPPFPADVFMVPQYGYLTLNNGSQAVGRSSFYCLEYFPSQMLRTGNNFTFSYTFEDVPFHSSYAHSRSLDRLMNPLIDQYLYYLSRTNTPSGTTTQSRLQFSQAGASDIRDQSRNWLPGPCYRQQRVSKTAADNNNSDYSWTGATKYHLNGRDSLVNPGTAMASHKDDEEKYFPQSGVLIFGKQDSGKTNVDIEKVMITDEEEIRTTNPVATEQYGSVSTNLQSGNTQAATSDVNTQGVLPGMVWQDRDVYLQGPIWAKIPHTDGHFHPSPLMGGFGPKHPPPQILIKNTPVPANPSTTFSAAKFASFITQYSTGQVSVEIEWELQKENSKRWNPEIQYTSNYNKSVNVDFTVDTNGVYSEPRPIGTRYLTRNL

SEQ ID NO: 2621 - protein, 735 aa, Artificial Sequence
  source: /note="Description of Artificial Sequence: Synthetic polypeptide"
MAADGYLPDWLEDTLSEGIRQWWKLKPGPPPPKPAERHKDGSRGLVLPGYKYLGPFNGLDKGEPVNEADAAALEHDKAYDRQLDSGDNPYLKYNHADAEFQERLKEDTSFGGNLARAVFQAKKRVLEPLGLVEEPVKTAPGKKRPVEHSPAELDSSSGTGKSGQQPARKRLNFGQTGDADSVPDPQPLGQPPAAPSGLGTNTMASGSGAPMADNNEGADGVGNSSGNWHCDSTWMGDRVITTSTRTWALPTYNNHLYKQISSQSGASNDNHYFGYSTPWGYFDFNRFHCHFSPRDWQRLINNNWGFRPKRLNFKLFNIQVKEVTQNDGTTTIANNLTSTVQVFTDSEYQLPYVLGSAHQGCLPPFPADVFMVPQYGYLTLNNGSQAVGRSSFYCLEYFPSQMLRTGNNFTFSYTFEDVPFHSSYAHSQSLDRLMNPLIDQYLYYLSRTNTPSGTTTQSRLQFSQAGASDIRDQSRNWLPGPCYRQQRVSKTAADNNNSDYSWTGATKYHLNGRDSLVNPGTAMASHKDDEEKYFPQSGVLIFGKQDSGKTNVDIEKVMITDEEEIRTTNPVATEQYGSVSTNLQSGNTQAATSDVNTQGVLPGMVWQDRDVYLQGPIWAKIPHTDGHFHPSPLMGGFGPKHPPPQILIKNTPVPANPSTTFSAAKFASFITQYSTGQVSVEIEWELQKENSKRWNPEIQYTSNYNKSVNVDFTVDTNGVYSEPRPIGTRYLTRNL

SEQ ID NO: 2622 - protein, 735 aa, Artificial Sequence
  source: /note="Description of Artificial Sequence: Synthetic polypeptide"
MAADGYLPDWLEDTLSEGIRQWWKLKPGPPPPKPAERHKDDSRGLVLPGYKYLGPFNGLDKGEPVNEADAAALEHDKAYDRQLDSGDNPYLKYNHADAGFQERLKEDTSFGGNLARAVFQAKKRVLEPLGLVEEPVKTAPGKKRPVEHSPAELDSSSGTGKSGQQPARKRLNFGQTGDADSVPDPQPLGQPPAAPSGLGTNTMASGSGAPMADNNEGADGVGNSSGNWHCDSTWMGDRVITTSTRTWALPTYNNHLYKQISSQSGASNDNHYFGYSTPWGYFDFNRFHCHFSPRDWQRLINNNWGFRPKRLNFKLFNIQVKEVTQNDGTTTIANNLTSTVQVFTDSEYQLPYVLGSAHQGCLPPFPADVFMVPQYGYLTLNNGSQAVGRSSFYCLEYFPSQMLRTGNNFTFSYTFEDVPFHSSYAHSQSLDRLMNPLIDQYLYYLSRTNTPSGTTTQSRLQFSQAGASDIRDQSRNWLPGPCYRQQRVSKTAADNNNSDYSWTGATKYHLNGRDSLVNPGTAMASHKDDEEKYFPQSGVLIFGKQDSGKTNVDIEKVMITDEEEIRTTNPVATEQYGSVSTNLQSGNTQAATSDVNTQGVLPGMVWQDRDVYLQGPIWAKIPHTDGHFHPSPLMGGFGPKHPPPQILIKNTPVPANPSTTFSAAKFASFITQYSTGQVSVEIEWELQKENSKRWNPEIQYTSNYNKSVNVDFTVDTNGVYSEPRPIGTRYLTRNL

SEQ ID NO: 2623 - protein, 735 aa, Artificial Sequence
  source: /note="Description of Artificial Sequence: Synthetic polypeptide"
MAADGYLPDWLEDTLSEGIRQWWKLKPGPPPPKPAERHKDDSRGLVLPGYKYLGPFNGLDKGEPVNEADAAALEHDKAYDRQLDSGDNPYLKYNHADAEFQERLKEDTSFGGNLARAVFQAKKRVLEPLGLVEEPVKTAPGKKRPVEHSPAELDSSSGTGKSGQQPARKRLNFGQTGDADSVPDPQPLGQPPAAPSGLGTNTMASGSGAPMADNNEGADGVGNSSGNWHCDSTWMGDRVITTSTRTWALPTYNNHLYKQISSQSGASNDNHYLGYSTPWGYFDFNRFHCHFSPRDWQRLINNNWGFRPKRLNFKLFNIQVKEVTQNDGTTTIANNLTSTVQVFTDSEYQLPYVLGSAHQGCLPPFPADVFMVPQYGYLTLNNGSQAVGRSSFYCLEYFPSQMLRTGNNFTFSYTFEDVPFHSSYAHSQSLDRLMNPLIDQYLYYLSRTNTPSGTTTQSRLQFSQAGASDIRDQSRNWLPGPCYRQQRVSKTAADNNNSDYSWTGATKYHLNGRDSLVNPGTAMASHKDDEEKYFPQSGVLIFGKQDSGKTNVDIEKVMITDEEEIRTTNPVATEQYGSVSTNLQSGNTQAATSDVNTQGVLPGMVWQDRDVYLQGPIWAKIPHTDGHFHPSPLMGGFGPKHPPPQILIKNTPVPANPSTTFSAAKFASFITQYSTGQVSVEIERELQKENSKRWNPEIQYTSNYNKSVNVDFTVDTNGVYSEPRPIGTRYLTRNL

SEQ ID NO: 2624 - protein, 735 aa, Artificial Sequence
  source: /note="Description of Artificial Sequence: Synthetic polypeptide"
MAADGYLPDWLEDTLSEGIRQWWKLKPGPPPPKPAERHKDDSRGLVLPGYKYLGPFNGLDKGEPVNEADAAALEHDKAYDRQLDSGDNPYLKYNHADAEFQERLKEDTSFGGNLARAVFQAKKRVLEPLGLVEEPVKTAPGKKRPVEHSPAELDSSSGTGKSGQQPARKRLNFGQTGDADSVPDPQPLGQPPAAPSGLGTNTMASGSGAPMADNNEGADGVGNSSGNWHCDSTWMGDRVITTSTRTWALPTYNNHLYKQISSQSGASNDNHYFGYSTPWGYFDFNRFHCHFSPRDWQRLINNNWGFRPKRLNFKLFNIQVKEVTQNDGTTTIANNLTSTVQVFTDSEYQLPYVLGSAHQGCLPPFPADVFMVPQYGYLTLNNGSQAVGRSSFYCLEYFPSQMLRTGNNFTFSYTFEDVPFHSSYAHSQSLDRLMNPLIDQYLYYLSRTNTPSGTTTQSRLQFSQAGASDIRDQSRNWLPGPCYRQQRVSKTAADNNNSDYSWTGATKYHLNGRDSLVNPGTAMASHKDDEEKYFPQSGVLIFGKQDSGKANVDIEKVMITDEEEIRTTNPVATEQYGSVSTNLQSGNTQAATSDVNTQGVLPGMVWQDRDVYLQGPIWAKIPHTDGHFHPSPLMGGFGPKHPPPQILIKNTPVPANPSTTFSAAKFASFITQYSTGQVSVEIEWELQKENSKRWNPEIQYTSNYNKSVNVDFTVDTNGVYSEPRPIGTRYLTRNL

SEQ ID NO: 2625 - protein, 735 aa, Artificial Sequence
  source: /note="Description of Artificial Sequence: Synthetic polypeptide"
MAADGYLPDWLEDTLSEGIRQWWKLKPGPPPPKPAERHKDDSRGLVLPGYKYLGPFNGLDKGEPVNEADAAALEHDKAYDRQLDSGDNPYLKYNHADAEFQERLKEDTSFGGNLARAVFQAKKRVLEPLGLVEEPVKTAPGKKRPVEHSPAELDSSSGTGKSGQQPARKRLNFGQTGDADSVPDPQPLGQPPAAPSGLGTNTMASGSGAPMADNNEGADGVGNSSGNWHCDSTWMGDRVITTSTRTWALPTYNNHLYKQISSQSGASNDNHYFGYSTPWGYFDFNRFHCHFSPRDWQRLTNNNWGFRPKRLNFKLFNIQVKEVTQNDGTTTIANNLTSTVQVFTDSEYQLPYVLGSAHQGCLPPFPADVFMVPQYGYLTLNNGSQAVGRSSFYCLEYFPSQMLRTGNNFTFSYTFEDVPFHSSYAHSQSLDRLMNPLIDQYLYYLSRTNTPSGTTTQSRLQFSQAGASDIRDQSRNWLPGPCYRQQRVSKTAADNNNSDYSWTGATKYHLNGRDSLVNPGTAMASHKDDEEKYFPQSGVLIFGKQDSGKTNVDIEKVMITDEEEIRTTNPVATEQYGSVSTNLQSGNTQAATSDVNTQGVLPGMVWQDRDVYLQGPIWAKIPHTDGHFHPSPLMGGFGPKHPPPQILIKNTPVPANPSTTFSAAKFASFITQYSTGQVSVEIEWELQKENSKRWNPEIQYTSNYNKSVNVDFTVDTNGVYSEPRPIGTRYLTRNL

SEQ ID NO: 2626 - protein, 735 aa, Artificial Sequence
  source: /note="Description of Artificial Sequence: Synthetic polypeptide"
MAADGYLPDWLEDTLSEGIRQWWKLKPGPPPPKPAERHKDDSRGLVLPGYKYLGPFNGLDKGEPVNEADAAALEHDKAYDRQLDSGDNPYLKYNHADAEFQERLKEDTSFGGNLARAVFQAKKRVLEPLGLVEEPVKTAPGKKRPVEHSPAELDSSSGTGKSGQQPARKRLNFGQTGDADSVPDPQPLGQPPAAPSGLGTNTMASGSGAPMADNNEGADGVGNSSGNWHCDSTWMGDRVITTSTRTWALPTYNNHLYKQISSQSGASNDNHYFGYSTPWGYFDFNRFHCHFSPRDWQRLINNNWGFRPKRLNFKLFNIQVKEVTQNDGTTTIANNLTSTVRVFTDSEYQLPYVLGSAHQGCLPPFPADVFMVPQYGYLTLNNGSQAVGRSSFYCLEYFPSQMLRTGNNFTFSYTFEDVPFHSSYAHSQSLDRLMNPLIDQYLYYLSRTNTPSGTTTQSRLQFSQAGASDIRDQSRNWLPGPCYRQQRVSKTAADNNNSDYSWTGATKYHLNGRDSLVNPGTAMASHKDDEEKYFPQSGVLIFGKQDSGKTNVDIEKVMITDEEEIRTTNPVATEQYGSVSTNLQSGNTQAATSDVNTQGVLPGMVWQDRDVYLQGPIWAKIPHTDGHFHPSPLMGGFGPKHPPPQILIKNTPVPANPSTTFSAAKFASFITQYSTGQVSVEIEWELQKENSKRWNPEIQYTSNYNKSVNVDFTVDTNGVYSEPRPIGTRYLTRNL

SEQ ID NO: 2627 - protein, 735 aa, Artificial Sequence
  source: /note="Description of Artificial Sequence: Synthetic polypeptide"
MAADGYLPDWLEDTLSEGIRQWWKLKPGPPPPKPAERHKDDSRGLVLPGYKYLGPFNGLDKGEPVNEADAAALEHDKAYDRQLDSGDNPYLKYNHADAEFQERLKEDTSFGGNLARAVFQAKKRVLEPLGLVGEPVKTAPGKKRPVEHSPAELDSSSGTGKSGQQPARKRLNFGQTGDADSVPDPQPLGQPPAAPSGLGTNTMASGSGAPMADNNEGADGVGNSSGNWHCDSTWMGDRVITTSTRTWALPTYNNHLYKQISSQSGASNDNHYFGYSTPWGYFDFNRFHCHFSPRDWQRLINNNWGFRPKRLNFKLFNIQVKEVTQNDGTTTIANNLTSTVQVFTDSEYQLPYVLGSAHQGCLPPFPADVFMVPQYGYLTLNNGSQAVGRSSFYCLEYFPSQMLRTGNNFTFSYTFEDVPFHSSYAHSQSLDRLMNPLIDQYLYYLSRTNTPSGTTTQSRLQFSQAGASDIRDQSRNWLPGPCYRQQRVSKTAADNNNSDYSWTGATKYHLNGRDSLVNPGTAMASHKDDEEKYFPQSGVLIFGKQDSGKTNVDIEKVMITDEEEIRTTNPVATEQYGSVSTNLQSGNTQAATSDVNTQGVLPGMVWQDRDVYLQGPIWAKIPHTDGHFHPSPLMGGFGPKHPPPQILIKNTPVPANPSTTFSAAKFASFITQYSTGQVSVEIEWELQKENSKRWNPEIQYTSNYNKSVNVDFTVDTNGVYSEPRPIGTRYLTRNL

SEQ ID NO: 2628 - protein, 735 aa, Artificial Sequence
  source: /note="Description of Artificial Sequence: Synthetic polypeptide"
MAADGYLPDWLEDTLSEGIRQWWKLKPGPPPPKPAERHKDDSRGLVLPGYKYLGPFNGLDKGEPVNEADAAALEHDKAYDRQLDSGDNPYLKYNHADAEFQERLKEDTSFGGNLARAVFQAKKRVLEPLGLVEEPVKTAPGKKRPVEHSPAELDSSSGTGKSGQQPARKRLNFGQTGDADSVPGPQPLGQPPAAPSGPGTNTMASGSGAPMADNNEGADGVGNSSGNWHCDSTWMGDRVVTTSTRTWALPTYNNHLYKQISSQSGASNDNHYFGYSTPWGYFDFNRFHCHFSPRDWQRLINNNWGFRPKRLNFKLFNIQVKEVTQNDGTTTIANNLTSTVQVFTDSEYQLPYVLGSAHQGCLPPFPADVFMVPQYGYLTLNNGSQAVGRSSFYCLEYFPSQMLRTGNNFTFSYTFEDVPFHSSYAHSQSLDRLMNPLIDQYLYYLSRTNTPSGTTTQSRLQFSQAGASDIRDQSRNWLPGPCYRQQRVPKTAADNNNSDYSWTGATKYHLNGRDSLVNPGTAMASHKDDEEKYFPQSGVLIFGKQDSGKTNVDIEKVMITDEEEIRTTNPVATEQYGSVSTNLQSGNTQAATSDVNTQGVLPGMVWQDRDVYLQGPIWAKIPHTDGHFHPSPLMGGFGPKHPPPQILIKNTPVPANPSTTFSAAKFASFITQYSTGQVSVEIEWELQKENSKRWNPEIQYTSNYNKSVNVDFTVDTNGVYSEPRPIGTRYLTRNL

SEQ ID NO: 2629 - protein, 735 aa, Artificial Sequence
  source: /note="Description of Artificial Sequence: Synthetic polypeptide"
MAADGYLPDWLEDTLSEGIRQWWKLKPGPPPPKPAERHKDDSRGLVLPGYKYLGPFNGLDKGEPVNEADAAALEHDKAYDRQLDSGDNPYLKYNHADAEFQERLKEDTSFGGNLARAVFQAKKRVLEPLGLVEGPVKTAPGKKRPVEHSPAELDSSSGTGKSGQQPARKRLNFGQTGDADSVPDPQPLGQPPAAPSGLGTNTMASGSGAPMADNNEGADGVGNSSGNWHCDSTWMGDRVITTSTRTWALPTYNNHLYKQISSQSGASNDNHYFGYSTPWGYFDFNRFHCHFSPRDWQRLINNNWGFRPKRLNFKLFNIQVKEVTQNDGTTTIANNLTSTVQVFTDSEYQLPYVLGSAHQGCLPPFPADVFMVPQYGYLTLNNGSQAVGRSSFYCLEYFPSQMLRTGNNFTFSYTFEDVPFHSSYAHSQSLDRLMNPLIDQYLYYLSRTNTPSGTTTQSRLQFSQAGASDIRDQSRNWLPGPCYRQQRVSKTAADNNNSDYSWTGATKYHLNGRDSLVNPGTAMASHKDDEEKYFPQSGVLIFGKQDSGKTNVDIEKVMITDEEEIRTTNPVATEQYGSVSTNLQSGNTQAATSDVNTQGVLPGMVWQDRDVYLQGPIWAKIPHTDGHFHPSPLMGGFGPKHPPPQILIKNTPVPANPSTTFSAAKFASFITQYSTGQVSVEIEWELQKENSKRWNPEIQYTSNYNKSVNVDFTVDTNGVYSEPRPIGTRYLTRNL

SEQ ID NO: 2630 - protein, 735 aa, Artificial Sequence
  source: /note="Description of Artificial Sequence: Synthetic polypeptide"
MAADGYLPDWLEDTLSEGIRQWWKLKPGPPPPKPAERHKDDSRGLVLPGYKYLGPFNGLDKGEPVNEADAAALEHDKAYDRQLDSGDNPYLKYNHADAEFQERLKEDTSFGGNLARAVFQAKKRVLEPLGLVEEPVKTAPGKKRPVEHSPAELDSSSGTGKSGQQPARKRLNFGQTGDADSVPDPQPLGQPPAAPSGLGTNTMASGSGAPMADNNEGADGVGNSSGNWHCDSTWMGDRVITTSTRTWALPTYNNHLYKQISSQSGASNDNHYLGYSTPWGYFDFNRFHCHFSPRDWQRLINNNWGFRPKRLNFKLFNIQVKEVTQNDGTTTIANNLTSTVQVFTDSEYQLPYVLGSAHQGCLPPFPADVFMVPQYGYLTLNNGSQAVGRSSFYCLEYFPSQMLRTGNNFTFSYTFEDVPFHSSYAHSQSLDRLMNPLIDQYLYYLSRTNTPSGTTTQSRLQFSQAGASDIRDQSRNWLPGPCYRQQRVSKTAADNNNSDYSWTGATKYHLNGRDSLVNPGTAMASHKDDEEKYFPQSGVLIFGKQDSGKTNVDIEKVMITDEEEIRTTNPVATEQYGSVSTNLQSGNTQAATSDVNTQGVLPGMVWQDRDVYLQGPIWAKIPHTDGHFHPSPLMGGFGPKHPPPQILIKNTPVPANPSTTFSAAKFASFITQYSTGQVSVEIEWELQKENSKRWNPEIQYTSNYNKSVNVDFTVDTNGVYSEPRPIGTRYLTRNL

SEQ ID NO: 2631 - protein, 735 aa, Artificial Sequence
  source: /note="Description of Artificial Sequence: Synthetic polypeptide"
MAADGYLPDWLEDTLSEGIRQWWKLKPGPPPPKPAERHKDDSRGLVLPGYKYLGPFNGLDKGEPVNEADAAALEHDKAYDRQLDSGDNPYLKYNHADAEFQERLKEDTSFGGNLARAVFQAKKRVLEPLGLVEEPVKTAPGKKGPVEHSPAELDSSSGTGKSGQQPARKRLNFGQTGDADSVPDPQPLGQPPAAPSGLGTNTMASGSGAPMADNNEGADGVGNSSGNWHCDSTWMGDRVITTSTRTWALPTYNNHLYKQISSQSGASNDNHYFGYSTPWGYFDFNRFHCHFSPRDWQRLINNNWGFRPKRLNFKLFNIQVKEVTQNDGTTTIANNLTSTVQVFTDSEYQLPYVLGSAHQGCLPPFPADVFMVPQYGYLTLNNGSQAVGRSSFYCLEYFPSQMLRTGNNFTFSYTFEDVPFHSSYAHSQSLDRLMNPLIDQYLYYLSRTNTPSGTTTQSRLQFSQAGASDIRDQSRNWLPGPCYRQQRVSKTAADNNNSDYSWTGATKYHLNGRDSLVNPGTAMASHKDDEEKYFPQSGVLIFGKQDSGKTNVDIEKVMITDEEEIRTTNPVATEQYGSVSTNLQSGNTQAATSDVNTQGVLPGMVWQDRDVYLQGPIWAKIPHTDGHFHPSPLMGGFGPKHPPPQILIKNTPVPANPSTTFSAAKFASFITQYSTGQVSVEIEWELQKENSKRWNPEIQYTSNYNKSVNVDFTVDTNGVYSEPRPIGTRYLTRNL

SEQ ID NO: 2632 - protein, 735 aa, Artificial Sequence
  source: /note="Description of Artificial Sequence: Synthetic polypeptide"
MAADGYLPDWLEDTLSEGIRQWWKLKPGPPPPKPAERHKDDSRGLVLPGYKYLGPFNGLDKGEPVNEADAAALEHDKAYDRQLDSGDNPYLKYNHADAEFQERLKEDTPFGGNLARAVFQAKKRVLEPLGLVEEPVKTAPGKKRPVEHSPAELDSSSGTGKSGQQPARKRLNFGQTGDADSVPDPQPLGQPPAAPSGLGTNTMASGSGAPMADNNEGADGVGNSSGNWHCDSTWMGDRVITTSTRTWALPTYNNHLYKQISSQSGASNDNHYFGYSTPWGYFDFNRFHCHFSPRDWQRLINNNWGFRPKRLNFKLFNIQVKEVTQNDGTTTIANNLTSTVQVFTDSEYQLPYVLGSAHQGCLPPFPADVFMVPQYGYLTLNNGSQAVGRSSFYCLEYFPSQMLRTGNNFTFSYTFEDVPFHSSYAHSQSLDRLMNPLIDQYLYYLSRANTPSGTTTQSRLQFSQAGASDIRDQSRNWLPGPCYRQQRVSKTAADNNNSDYSWTGATKYHLNGRDSLVNPGTAMASHKDDEEKYFPQSGVLIFGKQDSGKTNVDIEKVMITDEEEIRTTNPVATEQYGSVSTNLQSGNTQAATSDVNTQGVLPGMVWQDRDVYLQGPIWAKIPHTDGHFHPSPLMGGFGPKHPPPQILIKNTPVPANPSTTFSAAKFASFITQYSTGQVSVEIEWELQKENSKRWNPEIQYTSNYNKSVNVDFTVDTNGVYSEPRPIGTRYLTRNL

SEQ ID NO: 2633 - protein, 735 aa, Artificial Sequence
  source: /note="Description of Artificial Sequence: Synthetic polypeptide"
MAADGYLPDWLEDTLSEGIRQWWKLKPGPPPPKPAERHKDDSRGLVLPGYKYLGPFNGLDKGEPVNEADAAALEHDKAYDRQLDSGDNPYLKYNHADAEFQERLKEDTSFGGNLARAVFQAKKRVLEPLGLVEEPVKTAPGKKRPVEHSPAELDSSSGTGKSGQQPARKRLNFGQTGDADSVPDPQPLGQPPAAPSGLGTNTMASGSGAPMADNNEGADGVGNSSGNWHCDSTWMGDRVITTSTRTWALPTYNNHLYKQISSQSGASNDNHYFGYSAPWGYFDFNRFHCHFSPRDWQRLINNNWGFRPKRLNFKLFNIQVKEVTQNDGTTTIANNLTSTVQVFTDSEYQLPYVLGSAHQGCLPPFPADVFMVPQYGYLTLNNGSQAVGRSSFYCLEYFPSQMLRTGNNFTFSYTFEDVPFHSSYAHSQSLDRLMNPLIDQYLYYLSRTNTPSGTTTQSRLQFSQAGASDIRDQSRNWLPGPCYRQQRVSKTAADNNNSDYSWTGATKYHLNGRDSLVNPGTAMASHKDDEEKYFPQSGVLIFGKQDSGKTNVDIEKVMITDEEEIRTTNPVATEQYGSVSTNLQSGNTQAATSDVNTQGVLPGMVWQDRDVYLQGPIWAKIPHTDGHFHPSPLMGGFGPKHPPPQILIKNTPVPANPSTTFSAAKFASFITQYSTGQVSVEIEWELQKENSKRWNPEIQYTSNYNKSVNVDFTVDTNGVYSEPRPIGTRYLTRNL

SEQ ID NO: 2634 - protein, 735 aa, Artificial Sequence
  source: /note="Description of Artificial Sequence: Synthetic polypeptide"
MAADGYLPDWLEDTLSEGIRQWWKLKPGPPPPKPAERHKDDSRGLVLPGYKYLGPFNGLDKGEPVNEADAAALEHDKAYDRQLDSGDNPYLKYNHADAEFQERLKEDTSFGGNLARAVFQAKKRVLEPLGLVEEPVKTAPGKKRPVEHSPAELDSSSGTGKSGQQPARKRLNFGQTGDADSVPDPQPLGQPPAAPSGLGTNTMASGSGAPMADNNEGADGVGNSSGNWHCDSTWMGDRVITTSTRTWALPTYNNHLYKQISSQSGASNDNHYFGYSTPWGYFDFNRFHCHFSPRDWQRLINNNWGFRPKRLNFKLFNIQVKEVTQNDGTTTIANNLTSTVQVFTDSEYQLPYVLGSAHQGCLPPFPADVFMVPQYGYLTLNNGSQAVGRSSFYCLEYFPSQMLRTGNNFTFSYTFEDVPFHSSYAHSQSLDRLMNPLIDQYLYYLSRTNTPSGTTTQSRLQFSQAGASDIRDQSRNWLPGPCYRQQRVSKTAADNNNSDYSWTGATKYHLNGRDSLVNPGTAMASHKDDEEKYFPQSGVLIFGKQDSGKTNVDIEKVMITDEEEIRTTNPVATEQYGSVSTNLQSGNTQAATSDVNTQGVLPGMVWQDRDVYLQGPIWAKIPHTDGHFHPSPLMGGFGPKHPPPQILIKNTPVPANPSTTFSAAKFASLITQYSTGQVSVEIEWELQKENSKRWNPEIQYTSNYNKSVNVDFTVDTNGVYSEPRPIGTRYLTRNL

SEQ ID NO: 2635 - protein, 735 aa, Artificial Sequence
  source: /note="Description of Artificial Sequence: Synthetic polypeptide"
MAADGYLPDWLEDTLSEGIRQWWKLKPGPPPPKPAERHKDDSRGLVLPGYKYLGPFNGLDKGEPVNEADAAALEHDKAYDRQLDSGDNPYLKYNHADAEFQERLKEDTSFGGNLARAVFQAKKRVLEPLGLVEEPVKTAPGKKRPVEHSPAELDSSSGTGKSGQQPARKGLNFGQTGDADSVPDPQPLGQPPAAPSGLGTNTMASGSGAPMADNNEGADGVGNSSGNWHCDSTWMGDRVITTSTRTWALPTYNNHLYKQISSQSGASNDNHYFGYSTPWGYFDFNRFHCHFSPRDWQRLINNNWGFRPKRLNFKLFNIQVKEVTQNDGTTTIANNLTSTVQVFTDSEYQLPYVLGSAHQGCLPPFPADVFMVPQYGYLTLNNGSQAVGRSSFYCLEYFPSQMLRTGNNFTFSYTFEDVPFHSSYAHSQSLDRLMNPLIDQYLYYLSRTNTPSGTTTQSRLQFSQAGASDIRDQSRNWLPGPCYRQQRVSKTAADNNNSDYSWTGATKYHLNGRDSLVNPGTAMASHKDDEEKYFPQSGVLIFGKQDSGKTNVDIEKVMITDEEEIRTTNPVATEQYGSVSTNLQSGNTQAATSDVNTQGVLPGMVWQDRDVYLQGPIWAKIPHTDGHFHPSPLMGGFGPKHPPPQILIKNTPVPANPSTTFSAAKFASFITQYSTGQVSVEIEWELQKENSKRWNPEIQYTSNYNKSVNVDFTVDTNGVYSEPRPIGTRYLTRNL

SEQ ID NO: 2636 - protein, 735 aa, Artificial Sequence
  source: /note="Description of Artificial Sequence: Synthetic polypeptide"
MAADGYLPDWLEDTLSEGIRQWWKLKPGPPPPKPAERHKDDSRGLVLPGYKYLGPFNGLDKGEPVNEADAAALEHDEAYDRQLDSGDNPYLKYNHADAEFQERLKEDTSFGGNLARAVFQAKKRVLEPLGLVEEPVKTAPGKKRPVEHSPAELDSSSGTGKSGQQPARKRLNFGQTGDADSVPDPQPLGQPPAAPSGLGTNTMASGSGAPMADNNEGADGVGNSSGNWHCDSTWMGDRVITTSTRTWALPTYNNHLYKQISSQSGASNDNHYFGYSTPWGYFDFNRFHCHFSPRDWQRLINNNWGFRPKRLNFKLFNIQVKEVTQNDGTTTIVNNLTSTVQVFTDSEYQLPYVLGSAHQGCLPPFPADVFMVPQYGYLTLNNGSQAVGRSSFYCLEYFPSQMLRTGNNFTFSYTFEDVPFHSSYAHSQSLDRLMNPLIDQYLYYLSRTNTPSGTTTQSRLQFSQAGASDIRDQSRNWLPGPCYRQQRVSKTAADNNNSDYSWTGATKYHLNGRDSLVNPGTAMASHKDDEEKYFPQSGVLIFGKQDSGKTNVDIEKVMITDEEEIRTTNPVATEQYGSVSTNLQSGNTQAATSDVNTQGVLPGMVWQDRDVYLQGPIWAKIPHTDGHFHPSPLMGGFGPKHPPPQILIKNTPVPANPSTTFSAAKFAYFITQYSTGQVSVEIEWELQKENSKRWNPEIQYTSNYNKSVNVDFTVDTNGVYSEPRPIGTRYLTRNL

SEQ ID NO: 2637 - protein, 735 aa, Artificial Sequence
  source: /note="Description of Artificial Sequence: Synthetic polypeptide"
MAADGYLPDWLEDTLSEGIRQWWKLKPGPPPPKPAERHKDDSRGLVLPGYKYLGPFNGLDKGEPVNEADAAALEHDKAYDRQLDSGDNPYLKYNHADAEFQERLKEDTSFGGNLARAVFQAKKRVLEPLGLVEEPVKTAPGKKRPVEHSPAELDSSSGTGKSGQQPARKRLNFGQTGDADSVPDPQPLGQPPAAPSGLGTNTMASGSGAPMADNNEGADGVGNSSGNWHCDSTWMGDRVITTSTRTWALPTYNNHLYKQISSQSGASNDNHYFGYSTPWGYFDFNRFHCHFSPRDWQRLINNNWGFRPKRLNFKLFNIQVKEVTQNDGTTTIANNLTSTVQVFTDSEYQLPYVLGSAHQGCLPPFPADVFMVPQYGYLTLNNGSQAVGRSSFYCLEYFPSQMLRTGNNFTFSYTFEDVPFHSSYAHSQSLDRLMNPLIDQYLYYLSRTNTPSGTTTQSRLQFSQAGASGIRDQSRNWLPGPCYRQQRVSKTAADNNNSDYSWTGATKYHLNGRDSLVNPGTAMASHKDDEEKYFPQSGVLIFGKQDSGKTNVDIEKVMITDEEEIRTTNPVATEQYGSVSTNLQSGNTQAATSDVNTQGVLPGMVWQDRDVYLQGPIWAKIPHTDGHFHPSPLMGGFGPKHPPPQILIKNTPVPANPSTTFSAAKFASFITQYSTGQVSVEIEWELQKENSKRWNPEIQYTSNYNKSVNVDFTVDTNGVYSEPRPIGTRYLTRNL

SEQ ID NO: 2638 - protein, 735 aa, Artificial Sequence
  source: /note="Description of Artificial Sequence: Synthetic polypeptide"
MAADGYLPDWLEDTLSEGIRQWWKLKPGPPPPKPAERHKDDSRGLVLPGYKYLGPFNGLDKGEPVNEADAAALEHDKAYDRQLDSGDNPYLKYNHADAEFQERLKEDTSFGGNLARAVFQAKKRVLEPLGLVEEPVKTAPGKKRPVEHSPAELDSSSGTGKSGQQPARKRLNFGQTGDADSVPDPQPLGQPPAAPSGLGTNTMASGSGAPMADNNEGADGVGNSSGNWHCDSTWMGDRVITTSTRTWALPTYNNHLYKQISSQSGASNDNHYFGYSTPWGYFDFNRFHCHFSPRDWQRLINNNWGFRPKRLNFKLFNIQVKEVTQNDGTTTIANNLTSTVQVFTDSEYQLPYVLGSAHQGCLPPFPADVFMVPQYGYLTLNNGSQAVGRSSFYCLEYFPSQMLRTGNNFTFSYTFEDVPFHSSYAHSQSLDRLMNPLIDQYLYYLSRTNTPSGTTTQSRLQFSQAGASDIRDQSRNWLPGPCYRQQRVSKTAADNNNSDYSWTGATKYHLNGRDSLVNPGTAMASHKDDEEKYFPQSGVLIFGKQDSGKTNVDIEKVVITDEEEIRTTNPVATEQYGSVSTNLQSGNTQAATSDVNTQGVLPGMVWQDRDVYLQGPIWAKIPHTDGHFHPSPLMGGFGPKHPPPQILIKNTPVPANPSTTFSAAKFASFITQYSTGQVSVEIEWELQKENSKRWNPEIQYTSNYNKSVNVDFTVDTNGVYSEPRPIGTRYLTRNL

SEQ ID NO: 2639 - protein, 735 aa, Artificial Sequence
  source: /note="Description of Artificial Sequence: Synthetic polypeptide"
MAADGYLPDWLEDTLSEGIRQWWKLKPGPPPPKPAERHKDDSRGLVLPGYKYLGPFNGLDKGEPVNEADAAALEHDKAYDRQLDSGDNPYLKYNHADAEFQERLKEDTSFGGNLARAVFQAKKRVLEPLGLVEEPVKTAPGKKRPVEHSPAELDSSSGTGKSGQQPARKRLNFGQTGDADSVPDPQPLGQPPAAPSGLGTNTMASGSGAPMADNNEGADGVGNSSGNWHCDSTWMGDRVITTSTRTWALPTYNNHLYKQISSQSGASNDNHYFGYSTPWGYFDFNRFHCHFSPRDWQRLINNNWGFRPKRLNFKLFNIQVKEVTQNDGTTTIANNLTSTVQVFTDSEYQLPYVLGSAHQGCLPPFPADVFMVPQYGYLTLNNGSQAVGRSSFYCLEYFPSQMLRTGNNFTFSYTFEDVPFHSSYAHSQSLDRLMNPLIDQYLYYLSRTNTPSGTTTQSRLQFSQAGASDIRDQSRNWLPGPCYRQQRVSKTAADNNNSDYSWTGATKYHLNGRDSLVNPGTAMASHKDDEEKYFPQSGVLIFGKQDSGKTNVDIEKVMITDEEEIRTTNPVATEQYGSVSTNLQSGDTQAATSDVNTQGVLPGMVWQDRDVYLQGPIWAKIPHTDGHFHPSPLMGGFGPKHPPPQILIKNTPVPANPSTTFSAAKFASFITQYSTGQVSVEIEWELQKENSKRWNPEIQYTSNYNKSVNVDFTVDTNGVYSEPRPIGTRYLTRNL

SEQ ID NO: 2640 - protein, 735 aa, Artificial Sequence
  source: /note="Description of Artificial Sequence: Synthetic polypeptide"
MAADGYLPDWLEDTLSEGIRQWWKLKPGPPPPKPAERHKDDSRGLVLPGYKYLGPFNGLDKGEPVNEADAAALEHDKAYDRQLDSGDNPYLKYNHADAEFQERLKEDTSFGGNLARAVFQAKKRVLEPLGLVEEPVKTAPGKKRPVEHSPAELDSSSGTGKSGQQPARKRLNFGQTGDADSVPDPQPLGQPPAAPSGLGTNTMASGSGAPMADNNEGADGVGNSSGNWHCDSTWMGDRVITTSTRTWALPTYNNHLYKQISSQSGASNDNHYFGYSTPWGYFDFNRFHCHFSPRDWQRLINNNWGFRPKRLNFRLFNIQVKEVTQNDGTTTIANNLTSTVQVFTDSEYQLPYVLGSAHQGCLPPFPADVFMVPQYGYLTLNNGSQAVGRSSFYCLEYFPSQMLRTGNNFTFSYTFEDVPFHSSYAHSQSLDRLMNPLIDQYLYYLSRTNTPSGTTTQSRLQFSQAGASDIRDQSRNWLPGPCYRQQRVSKTAADNNNSDYSWTGATKYHLNGRDSLVNPGTAMASHKDDEEKYFPQSGVLIFGKQDSGKTNVDIEKVMITDEEEIRTTNPVATEQYGSVSTNLQSGNTQAATSDVNTQGVLPGMVWQDRDVYLQGPIWAKIPHTDGHFHPSPLMGGFGPKHPPPQILIKNTPVPANPSTTFSAAKFASFITQYSTGQVSVEIEWELQKENSKRWNPEIQYTSNYNKSVNVDFTVDTNGVYSEPRPIGTRYLTRNL

SEQ ID NO: 2641 - protein, 735 aa, Artificial Sequence
  source: /note="Description of Artificial Sequence: Synthetic polypeptide"
MAADGYLPDWLEDTLSEGIRQWWKLKPGPPPPKPAERHKDDSRGLVLPGYKYLGPFNGLDKGEPVNEADAAALEHGKAYDRQLDSGDNPYLKYNHADAEFQERLKEDTSFGGNLARAVFQAKKRVLEPLGLVEEPVKTAPGKKRPVEHSPAELDSSSGTGKSGQQPARKRLNFGQTGDADSVPDPQPLGQPPAAPSGLGTNTMASGSGAPMADNNEGADGVGNSSGNWHCDSTWMGDRVITTSTRTWALPTYNNHLYKQISSQSGASNDNHYFGYSTPWGYFDFNRFHCHFSPRDWQRLINNNWGFRPKRLNFKLFNIQVKEVTQNDGTTTIANNLTSTVQVFTDSEYQLPYVLGSAHQGCLPPFPADVFMVPQYGYLTLNNGSQAVGRSSFYCLEYFPSQMLRTGNNFTFSYTFEDVPFHSSYAHSQSLDRLMNPLIDQYLYYLSRTNTPSGTTTQSRLQFSQAGASDIRDQSRNWLPGPCYRQQRVSKTAADNNNSDYSWTGATKYHLNGRDSLVNPGTAMASHKDDEEKYFPQSGVLIFGKQDSGKTNVDIEKVMITDEEEIRTTNPVATEQYGSVSTNLQSGNTQAATSDVNTQGVLPGMVWQDRDVYLQGPIWAKIPHTDGHFHPSPLMGGFGPKHPPPQILIKNTPVPANPSTTFSAAKFASFITQYSTGQVSVEIEWELQKENSKRWNPEIQYTSNYNKSVNVDFTVDTNGVYSEPRPIGTRYLTRNL

SEQ ID NO: 2642 - protein, 735 aa, Artificial Sequence
  source: /note="Description of Artificial Sequence: Synthetic polypeptide"
MAADGYLPDWLEDTLSEGIRQWWKLKPGPPPPKPAERHKDDSRGLVLPGYKYLGPFNGLDKGEPVNEADAAALEHDKAYDRQLDSGDNPYLKYNHADAEFQERLKEDTSFGGNLARAVFQAKKRVLEPLGLVEEPVKTAPGKKRPVEHSPAELDSSSGTGKSGQQPARKRLNFGQTGDADSVPDPQPLGQPPAAPSGPGTNTMASGSGAPMADNNEGADGVGNSSGNWHCDSTWMGDRVITTSTRTWALPTYNNHLYKQISSQSGASNDNHYFGYSTPWGYFDFNRFHCHFSPRDWQRLINNNWGFRPKRLNFKLFNIQVKEVTQNDGTTTIANNLTSTVQVFTDSEYQLPYVLGSAHQGCLPPFPADVFMVPQYGYLTLNNGSQAVGRSSFYCLEYFPSQMLRTGNNFTFSYTFEDVPFHSSYAHSQSLDRLMNPLIDQYLYYLSRTNTPSGTTTQSRLQFSQAGASDIRDQSRNWLPGPCYRQQRVSKTAADNNNSDYSWTGATKYHLNGRDSLVNPGTAMASHKDDEEKYFPQSGVLIFGKQDSGKTNVDIEKVMITDEEEIRTTNPVATEQYGSVSTNLQSGNTQAATSDVNTQGVLPGMVWQDRDVYLQGPIWAKIPHTDGHFHPSPLMGGFGPKHPPPQILIKNTPVPANPSTTFSAAKFASFITQYSTGQVSVEIEWELQKENSKRWNPEIQYTSNYNKSVNVDFTVDTNGVYSEPRPIGTRYLTRNL

SEQ ID NO: 2643 - protein, 735 aa, Artificial Sequence
  source: /note="Description of Artificial Sequence: Synthetic polypeptide"
MAADGYLPDWLEDTLSEGIRQWWKLKPGPPPPKPAERHKDDSRGLVLPGYKYLGPFNGLDKGEPVNEADAAALEHDKAYDRQLDSGDNPYLKYNHADAEFQERLKEDTSFGGNLARAVFQAKKRVLEPLGLVEEPVKTAPGKKRPVEHSPAGPDSSSGTGKSGQQPARKRLNFGQTGDADSVPDPQPLGQPPAAPSGLGTNTMASGSGAPMADNNEGADGVGNSSGNWHCDSTWMGDRVITTSTRTWALPTYNNHLYKQISSQSGASNDNHYFGYSTPWGYFDFNRFHCHFSPRDWQRLINNNWGFRPKRLNFELFNIQVKEVTQNDGTTTIANNLTSTVQVFTDSEYQLPYVLGSAHQGCLPPFPADVFMVPQYGYLTLNNGSQAVGRSSFYCLEYFPSQMLRTGNNFTFSYTFEDVPFHSSYAHSQSLDRLMNPLIDQYLYYLSRTNTPSGTTTQSRLQFSQAGASDIRDQSRNWLPGPCYRQQRVSKTAADNNNSDYSWTGATKYHLNGRDSLVNPGTAMASHKDDEEKYFPQSGVLIFGKQDSEKTNVDIEKVMITDEEEIRTTNPVATEQYGSVSTNLQSGNTQAATSDVNTQGVLPGMVWQDRDVYLQGPIWAKIPHTDGHFHPSPLMGGFGLKHPPPQILIKSTPVPANPSTTFSAAKFASFITQYSTGQVSVEIEWELQKENSKRWNPEIQYTSNYNKSVNVDFTVDTNGVYSEPRPIGTRYLTRNL

SEQ ID NO: 2644 - protein, 735 aa, Artificial Sequence
  source: /note="Description of Artificial Sequence: Synthetic polypeptide"
MAADGYLPDWLEDTLSEGIRQWWKLKPGPPPPKPAERHKDDSRGLVLPGYKYLGPFNGLDKGEPVNEADAAALEHDKAYDRQLDSGDNPYLKYNHADAEFQERLKEDTSFGGNLARAVFQAKKRVLEPLGLVEEPVKTAPGKKRPVEHSPAGPDSSSGTGKSGQQPARKRLNFGQTGDADSVPDPQPLGQPPAAPSGLGTNTMASGSGAPMADNNEGADGVGNSSGNWHCDSTWMGDRVITTSTRTWALPTYNNHLYKQISSQSGASNDNHYFGYSTPWGYFDFNRFHCHFSPRDWQRLINNNWGFRPKRLNFELFNIQVKEVTQNDGTTTIANNLTSTVQVFTDSEYQLPYVLGSAHQGCLPPFPADVFMVPQYGYLTLNNGSQAVGRSSFYCLEYFPSQMLRTGNNFTFSYTFEDVPFHSSYAHSQSLDRLMNPLIDQYLYYLSRTNTPSGTTTQSRLQFSQAGASDIRDQSRNWLPGPCYRQQRVSKTAADNNNSDYSWTGATKYHLNGRDSLVNPGTAMASHKDDEEKYFPQSGVLIFGKQDSGKTNVDIEKVMITDEEEIRTTNPVATEQYGSVSTNLQSGNTQAATSDVNTQGVLPGMVWQDRDVYLQGPIWAKIPHTDGHFHPSPLMGGFGLKHPPPQILIKSTPVPANPSTTLSAAKFASFITQYSTGQVSVEIEWELQKENSKRWNPEIQYTSNYNKSVNVDFTVDTNGVYSEPRPIGTRYLTRNL

SEQ ID NO: 2645 - protein, 734 aa, Artificial Sequence
  source: /note="Description of Artificial Sequence: Synthetic polypeptide"
MAADGYLPDWLEDTLSEGIRQWWKLKPGPPPPKPAERHKDDSRGLVLPGYKYLGPFNGLDKGEPVNEADAAALEHDKAYDRQLDSGDNPYLKYNHADAEFQERLKEDTSFGGNLARAVFQAKKRVLEPLGLVEEPVKTAPGKKRPVEHSPAGPDSSSGTGKSGQQPARKRLNFGQTGDADSVPDPQPLGQPPAAPSGLGTNTMASGSGAPMADNNEGADGVGNSSGNWHCDSTWMGDRVITTSTRTWALPTYNNHLYKQISSQSGASNDNHYFGYSTPWGYFDFNRFHCHFSPRDWQRLINNNWGFRPKRLNFELFNIQVKEVTQNDGTTTIANNLTSTVQVFTDSEYQLPYVLGSAHQGCLPPFPADVFMVPQYGYLTLNNGSQAVGRSSFYCLEYFPSQMLRTGNNFTFSYTFEDVPFHSSYAHSQSLDRLMNPLIDQYLYYLSRTNTPSGTTTQSRLQFSQAGASDIRDQSRNWLPGPCYRQQRVSKTAADNNSDYSWTGATKYHLNGRDSLVNPGTAMASHKDDEEKYFPQSGVLIFGKQDSGKTNVDIEKVMITDEEEIRTTNPVATEQYGSVSTNLQSGNTQAATSDVNTQGVLPGMVWQDRDVYLQGPIWAKIPHTDGHFHPSPLMGGFGLKHPPPQILIKSTPVPANPSTTFSAAKFASFITQYSTGQVSVEIEWELQKENSKRWNPEIQYTSNYNKSVNVDFTVDTNGVYSEPRPIGTRYLTRNL

SEQ ID NO: 2646 - protein, 735 aa, Artificial Sequence
  source: /note="Description of Artificial Sequence: Synthetic polypeptide"
MAADGYLPDWLEDTLSEGIRQWWKLKPGPPPPKPAERHKDDSRGLVLPGYKYLGPFNGLDKGEPVNEADAAALEHDKAYDRQLDSGDNPYLKYNHADAEFQERLKEDTSFGGNLGRTVFQAKKRVLEPLGLVEEPVKTAPGKKRPVEHSPVEPDSSSGTGKAGQQPARKRLNFGQTGDADSVPDPQPLGQPPAAPSGLGTNTMATGSGAPMADNNEGADGVGNSSGNWHCDSTWMGDRVITTSTRTWALPTYNNHLYKQISSQSGASNDNHYFGYSTPWGYFDFNRFHCHFSPRDWQRLINNNWGFRPKRLSFKLFNIQVKEVTQNDGTTTIANNLTSTVQVFTDSEYQLPYVLGSAHQGCLPPFPADVFMVPQYGYLTLNNGSQAVGRSSFYCLEYFPSQMLRTGNNFTFSYTFEDVPFHSSYAHSQSLDRLMNPLIDQYLYYLSKTNAPSGTTTMSRLQFSQAGASDIRDQSRNWLPGPCYRQQRVSKTAADNNNSDYSWTGATKYHLNGRDSLVNPGPAMASHKDDEEKYFPQSGVLIFGKQGSNKTNVDIEKVMITDEEEIRTTNPVATEQYGSVSTNLQSGNTQAATSDVNTQGVLPGMVWQDRDVYLQGPIWAKIPHTDGHFHPSPLMGGFGLKHPPPQILIKNTPVPANPSTTFSAAKFASFITQYSTGQVSVEIEWELQKENSKRWNPEIQYTSNYNKSVNVDFTVDTNGVYSEPRPIGTRYLTRNL

SEQ ID NO: 2647 - protein, 735 aa, Artificial Sequence
  source: /note="Description of Artificial Sequence: Synthetic polypeptide"
MAADGYLPDWLEDTLSEGIRQWWKLKPGPPPPKPAERHKDDSRGLVLPGYKYLGPFNGLDKGEPVNEADAAALEHDKAYDRQLDSGDNPYLKYNHADAEFQERLKEDTSFGGNLGRAVFQAKKRVLEPLGLVEEPVKTAPGKKRPVEHSPVEPDSSSGTGKAGQQPARKRLNFGQTGDADSVPDPQPLGQPPAAPSGLGTNTMATGSGAPMADNNEGADGVGNSSGNWHCDSTWMGDRVITTSTRTWALPTYNNHLYKQISSQSGASNDNHYFGYSTPWGYFDFNRFHCHFSPRDWQRLINNNWGFRPKRLSFKLFNIQVKEVTQNDGTTTIANNLTSTVQVFTDSEYQLPYVLGSAHQGCLPPFPADVFMVPQYGYLTLNNGSQAVGRSSFYCLEYFPSQMLRTGNNFTFSYTFEDVPFHSSYAHSQSLDRLMNPLIDQYLYYLSKTNAPSGTTTMSRLQFSQAGASDIRDQSRNWLPGPCYRQQRVSKTAADNNNSDYSWTGATKYHLNGRDSLVNPGPAMANHKDDEEKYFPQSGVLIFGKQGSNKTNVDIEKVMITDEEEIRTTNPVATEQYGSVSTNLQSGNTQAATSDVNTQGVLPGMVWQDRDVYLQGPIWAKIPHTDGHFHPSPLMGGFGLKHPPPQILIKNTPVPANPSTTFSAAKFASFITQYSTGQVSVEIEWELQKENSKRWNPEIQYTSNYNKSVNVDFTVDTNGVYSEPRPIGTRYLTRNL

SEQ ID NO: 2648 - protein, 735 aa, Artificial Sequence
  source: /note="Description of Artificial Sequence: Synthetic polypeptide"
MAADGYLPDWLEDTLSEGIRQWWKLKPGPPPPKPAERHKDDSRGLVLPGYKYLGPFNGLDKGEPVNEADAAALEHDKAYDRQLDSGDNPYLKYNHADAEFQERLKEDTSFGGNLGRAVFQAKKRVLEPLGLVEEPVKTAPGKKRPVEHSPVEPDSSSGTGKAGQQPARKRLNFGQTGDADSVPDPQPLGQPPAAPSGLGTNTMATGSGAPMADNNEGADGVGNSSGNWHCDSTWMGDRVITTSTRTWALPTYNNHLYKQISSQSGASNDNHYFGYSTPWGYFDFNRFHCHFSPRDWQRLINNNWGFRPKRLSFKLFNIQVKEVTQNDGTTTIANNLTSTVQVFTDSEYQLPYVLGSAHQGCLPPFPADVFMVPQYGYLTLNNGSQAVGRSSFYCLEYFPSQMLRTGNNFTFSYTFEDVPFHSSYAHSQSLDRLMNPLIDQYLYYLSKTNAPSGTTTMSRLQFSQAGASDIRDQSRNWLPGPCYRQQRVSKTAADNNNSDYSWTGATKYHLNGRDSLVNPGPAMASHKDDEEKYFPQSGVLIFGKQGSNKTNVDIEKVMITDEEEIRTTNPVATEQYGSVSTNLQSGNTQAATSDVNTQGVLPGMVWQDRDVYLQGPIWAKIPHTDGHFHPSPLMGGFGLKHPPPQILIKNTPVPANPSTTFSAAKFASFITQYSTGQVSVEIEWELQKENSKRWNPEIQYTSNYNKSVNVDFTVDTNGVYSEPRPIGTRYPTRNL

SEQ ID NO: 2649 - protein, 735 aa, Artificial Sequence
  source: /note="Description of Artificial Sequence: Synthetic polypeptide"
MAADGYLPDWLEDTLSEGIRQWWKLKPGPPPPKPAERHKDDSRGLVLPGYKYLGPFNGLDKGEPVNEADAAALEHDKAYDRQLDSGDNPYLKYNHADAEFQERLKEDTSFGGNLGRAVFQAKKRVLEPLGLVEEPVKTAPGKKRPVEHSPVEPDSSSGTGKAGQQPARKRLNFGQTGDADSVPDPQPLGQPPAAPSGLGTNTMATGSGAPMADNNEGADGVGNSSGNWHCDSTWMGDRVITTSTRTWALPTYNNHLYKQISSQSGASNDNHYFGYSTPWGYFDFNRFHCHFSPRDWQRLINNNWGFRPKRLSFKLFNIQVKEVTQNDGTTTIANNLTSTVQVFTDSEYQLPYVLGSAHQGCLPPFPADVFMVPQYGYLTLNNGSQAVGRSSFYCLEYFPSQMLRTGNNFTFSYTFEDVPFHSSYAHSQSLDRLMNPLIDQYLYYLSKTNAPSGTTTMSRLQFSQAGASDIRDQSRNWLPGPCYRQQRVSKTAADNNNSDYSWTGATKYHLNGRDSLVNPGPAMASHKDDEEKYFPQSGVLIFGKQGSNKTNVDIEKVMITDEEEIRTTNPVATEQYGSVSTNLQSGNTQAATSDVNTQGVLPGMVWQDRDVYLQGPIWAKIPHTDGHFHPSPLMGGFGLKHPPPQILIKNTPVPANPSTTFSAAKFASFITQYSTGQVSVEIEWELQKENSKRWNPEIQYTSNYNKSVNVDFTVGTNGVYSEPRPIGTRYLTRNL

SEQ ID NO: 2650 - protein, 735 aa, Artificial Sequence
  source: /note="Description of Artificial Sequence: Synthetic polypeptide"
MAADGYLPDWLEDTLSEGIRQWWKLKPGPPPPKPAERHKDDSRGLVLPGYKYLGPFNGLDKGEPVNEADAAALEHDKAYDRQLDSGDNPYLKYNHADAEFQERLKEDTSFGGNLGRAVFQAKKRVLEPLGLVEEPVKTAPGKKRPVEHSPVEPDSSSGTGKAGQQPARKRLNFGQTGDADSVPDPQPLGQPPAAPSGLGTNTMATGSGAPMADNNEGADGVGNSSGNWHCDSTWMGDRVITTSTRTWALPTYNNHLYKQISSQSGASNDNHYFGYSTPWGYFDFNRFHCHFSPRDWQRLINNNWGFRPKRLSFKLFNIQVKEVTQNDGTTTIANNLTSTVQVFTDSEYQLPYVLGSAHQGCLPPFPADVFMVPQYGYLTLNNGSQAVGRSSFYCLEYFPSQMLRTGNNFTFSYTFEDVPFHSSYAHSQSLDRLMNPLIDQYLYYLSKTNAPSGTTTMSRLQFSQAGASDIRDQSRNWLPGPCYRQQRVSKTAADNNNSDYSWTGATKYHLNGRDSLVNPGPAMASHKDDEEKYFPQSGVLIFGKQGSNKTNVDIEKVMITDEEEIRTTNPVATEQYGSVSTNLQSGNTQAATSDVNTQGVLPGMVWQDRDVYLQGPIWAKIPHTDGHFHPSPLMGGFGLKYPPPQILIKNTPVPANPSTTFSAAKFASFITQYSTGQVSVEIEWELQKENSKRWNPEIQYTSNYNKSVNVDFTVDTNGVYSEPRPIGTRYLTRNL

SEQ ID NO: 2651 - protein, 735 aa, Artificial Sequence
  source: /note="Description of Artificial Sequence: Synthetic polypeptide"
MAADGYLPDWLEDTLSEGIRQWWKLKPGPPPPKPAERHKDDSRGLVLPGYKYLGPFNGLDKGEPVNEADAAALEHDKAYDRQLDSGDNPYLKYNHADAEFQERLKEDTSFGGNLGRAVFQAKKRVLEPLGLVEEPVKTAPGKKRPVEHSPVEPDSSSGTGKAGQQPARKRLNFGQTGDADSVPDPQPLGQPPAAPSGLGTNTMATGSGAPMADNNEGADGVGNSSGNWHCDSTWMGDRVITTSTRTWALPTYNNHLYKQISGQSGASNDNHYFGYSTPWGYFDFNRFHCHFSPRDWQRLINNNWGFRPKRLSFKLFNIQVKEVTQNDGTTTIANNLTSTVQVFTDSEYQLPYVLGSAHQGCLPPFPADVFMVPQYGYLTLNNGSQAVGRSSFYCLEYFPSQMLRTGNNFTFSYTFEDVPFHSSYAHSQSLDRLMNPLIDQYLYYLSKTNAPSGTTTMSRLQFSQAGASDIRDQSRNWLPGPCYRQQRVSKTAADNNNSDYSWTGATKYHLNGRDSLVNPGPAMASHKDDEEKYFPQSGVLIFGKQGSNKTNVDIEKVMITDEEEIRTTNPVATEQYGSVSTNLQSGNTQAATSDVNTQGVLPGMVWQDRDVYLQGPIWAKIPHTDGHFHPSPLMGGFGLKHPPPQILIKNTPVPANPSTTFSAAKFASFITQYSTGQVSVEIEWELQKENSKRWNPEIQYTSNYNKSVNVDFTVDTNGVYSEPRPIGTRYLTRNL

SEQ ID NO: 2652 - protein, 735 aa, Artificial Sequence
  source: /note="Description of Artificial Sequence: Synthetic polypeptide"
MAADGYLPDWLEDTLSEGIRQWWKLKPGPPPPKPAERHKDDSRGLVLPGYKYLGPFNGLDKGEPVNEADAAALEHDKAYDRQLDSGDNPYLKYNHADAEFQERLKEDTSFGGNLGRAVFQAKKRVLEPLGLVEEPVKTAPGKKRPVEHSPVEPDSSSGTGKAGQQPARKRLNFGQTGDADSVPDPQPLGQPPAAPSGLGTNTMATGSGAPMADNNEGADGVGNSSGNWHCDSTWMGDRVITTSTRTWALPTYNNHLYKQISSQSGASNDNHYFGYSTPWGYFDFNRFHCHFSPRDWQRLINNNWGFRPKRLSFKLFNIQVKEVTQNDGTTTIANNLTSTVQVFTDSEYRLPYVLGSAHQGCLPPFPADVFMVPQYGYLTLNNGSQAVGRSSFYCLEYFPSQMLRTGNNFTFSYTFEDVPFHSSYAHSQSLDRLMNPLIDQYLYYLSKTNAPSGTTTMSRLQFSQAGASDIRDQSRNWLPGPCYRQQRVSKTAADNNNSDYSWTGATKYHLNGRDSLVNPGPAMASHKDDEEKYFPQSGVLIFGKQGSNKTNVDIEKVMITDEEEIRTTNPVATEQYGSVSTNLQSGNTQAATSDVNTQGVLPGMVWQDRDVYLQGPIWAKIPHTDGHFHPSPLMGGFGLKHPPPQILIKNTPVPANPSTTFSAAKFASFITQYSTGQVSVEIEWELQKENSKRWNPEIQYTSNYNKSVNVDFTVDTNGVYSEPRPIGTRYLTRNL

SEQ ID NO: 2653 - protein, 735 aa, Artificial Sequence
  source: /note="Description of Artificial Sequence: Synthetic polypeptide"
MAADGYLPDWLEDTLSEGIRQWWKLKPGPPPPKPAERHKDDSRGLVLPGYKYLGPFNGLDKGEPVNEADAAALEHDKAYDRQLDSGDNPYLKYNHADAEFQERLKEDTSFGGNLGRAVFQAKKRVLEPLGLVEEPVKTAPGKKRPVEHSPVEPDSSSGTGKAGQQPARKRLNFGQTGDADSVPDPQPLGQPPAAPSGLGTNTMATGSGAPMADNNEGADGVGNSSGNWHCDSTWMGDRVITTSTRTWALPTYNNHLYKQISSQSGASNDNHYFGYSTPWGYFDFNRFHCHFSPRDWQRLINNNWGFRPKRLSFKLFNIQVKEVTQNDGTTTIANNLTSTVQVFTDSEYQLPYVLGSAHRGCLPPFPADVFMVPQYGYLTLNNGSQAVGRSSFYCLEYFPSQMLRTGNNFTFSYTFEDVPFHSSYAHSQSLDRLMNPLIDQYLYYLSKTNAPSGTTTMSRLQFSQAGASDIRDQSRNWLPGPCYRQQRVSKTAADNNNSDYSWTGATKYHLNGRDSLVNPGPAMASHKDDEEKYFPQSGVLIFGKQGSNKTNVDIEKVMITDEEEIRTTNPVATEQYGSVSTNLQSGNTQAATSDVNTQGVLPGMVWQDRDVYLQGPIWAKIPHTDGHFHPSPLMGGFGLKHPPPQILIKNTPVPANPSTTFSAAKFASFITQYSTGQVSVEIEWELQKENSKRWNPEIQYTSNYNKSVNVDFTVDTNGVYSEPRPIGTRYLTRNL

SEQ ID NO: 2654 - protein, 735 aa, Artificial Sequence
  source: /note="Description of Artificial Sequence: Synthetic polypeptide"
MAADGYLPDWLEDTLSEGIRQWWKLKPGPPPPKPAERHKDDSRGLVLPGYKYLGPFNGLDKGEPVNEADAAALEHDKAYDRQLDSGDNPYLKYNHADAEFQERLKEDTSFGGNLGRAVFQAKKRVLEPLGLVEEPVKTAPGKKRPVEHSPVEPDSSSGTGKAGQQPARKRLNFGQTGDADSVPDPQPLGQPPAAPSGLGTNTMATGSGAPMADNNEGADGVGNSSGNWHCDSTWMGDRVITTSTRTWALPTYNNHLYKQISSQSGASNDNHYFGYSTPWGYFDFNRFHCHFSPRDWQRLINNNWGFRPKRLSFKLFNIQVKEVTQNDGTTTIANNLTSTVQVFTDSEYQLPYVLGSAHQGCLPPFPADVFMVPQYGYLTLNNGSQAVGRSSFYCLEYFPSQMLRAGNNFTFSYTFEDVPFHSSYAHSQSLDRLMNPLIDQYLYYLSKTNAPSGTTTMSRLQFSQAGASDIRDQSRNWLPGPCYRQQRVSKTAADNNNSDYSWTGATKYHLNGRDSLVNPGPAMASHKDDEEKYFPQSGVLIFGKQGSNKTNVDIEKVMITDEEEIRTTNPVATEQYGSVSTNLQSGNTQAATSDVNTQGVLPGMVWQDRDVYLQGPIWAKIPHTDGHFHPSPLMGGFGLKHPPPQILIKNTPVPANPSTTFSAAKFASFITQYSTGQVSVEIEWELQKENSKRWNPEIQYTSNYNKSVNVDFTVDTNGVYSEPRPIGTRYLTRNL

SEQ ID NO: 2655 - protein, 735 aa, Artificial Sequence
  source: /note="Description of Artificial Sequence: Synthetic polypeptide"
MAADGYLPDWLEDTLSEGIRQWWKLKPGPPPPKPAERHKDDSRGLVLPGYKYLGPFNGLDKGEPVNEADAAALEHDKAYDRQLDSGDNPYLKYNHADAEFQERLKEDTSFGGNLGRAVFQAKKRVLEPLGLVEEPVKTAPGKKRPVEHSPVEPDSSSGTGKAGQQPARKRLNFGQTGDADSVPDPQPLGQPPAAPSGLGTNTMATGSGAPMADNNEGADGVGNSSGNWHCDSTWMGDRVITTSTRTWALPTYNNHLYKQISSQSGASNDNHYFGYSTPWGYFDFNRFHCHFSPRDWQRLINNNWGFRPKRLGFKLFNIQVKEVTQNDGTTTIANNLTSTVQVFTDSEYQLPYVLGSAHQGCLPPFPADVFMVPQYGYLTLNNGSQAVGRSSFYCLEYFPSQMLRTGNNFTFSYTFEDVPFHSSYAHSQSLDRLMNPLIDQYLYYLSKTNAPSGTTTMSRLQFSQAGASDIRDQSRNWLPGPCYRQQRVSKTAADNNNSDYSWTGATKYHLNGRDSLVNPGPAMASHKDDEEKYFPQSGVLIFGKQGSNKTNVDIEKVMITDEEEIRTTNPVATEQYGSVSTNLQSGNTQAATSDVNTQGVLPGMVWQDRDVYLQGPIWAKIPHTDGHFHPSPLMGGFGLKHPPPQILIKNTPVPANPSTTFSAAKFASFITQYSTGQVSVEIEWELQKENSKRWNPEIQYTSNYNKSVNVDFTVDTNGVYSEPRPIGTRYLTRNL

SEQ ID NO: 2656 - protein, 735 aa, Artificial Sequence
  source: /note="Description of Artificial Sequence: Synthetic polypeptide"
MAADGYLPDWLEDTLSEGIRQWWKLKPGPPPPKPAERHKDDSRGLVLPGYKYLGPFNGLDKGEPVNEADAAALEHDKAYDRQLDSGDNPYLKYNHADAEFQERLKEDTSFGGNLGRAVFQAKKRVLEPLGLVEEPVKTAPGKKRPVEHSPVEPDSSSGTGKAGQQPARKRLNFGQTGDADSVPDPQPLGQPPAAPSGLGTNTMATGSGAPMADNNEGADGVGNSSGNWHCDSTWMGDRVITTSTRTWALPTYNNHLYKQISSQSGVSNDNHYFGYSTPWGYFDFNRFHCHFSPRDWQRLINNNWGFRPKRLSFKLFNIQVKEVTQNDGTTTIANNLTSTVQVFTDSEYQLPYVLGSAHQGCLPPFPADVFMVPQYGYLTLNNGSQAVGRSSFYCLEYFPSQMLRTGNNFTFSYTFEDVPFHSSYAHSQSLDRLMNPLIDQYLYYLSKTNAPSGTTTMSRLQFSQAGASDIRDQSRNWLPGPCYRQQRVSKTAADNNNSDYSWTGATKYHLNGRDSLVNPGPAMASHKDDEEKYFPQSGVLIFGKQGSNKTNVDIEKVMITDEEEIRTTNPVATEQYGSVSTNLQSGNTQAATSDVNTQGVLPGMVWQDRDVYLQGPIWAKIPHTDGHFHPSPLMGGFGLKHPPPQILIKNTPVPANPSTTFSAAKFASFITQYSTGQVSVEIEWELQKENSKRWNPEIQYTSNYNKSVNVDFTVDTNGVYSEPRPIGTRYLTRNL

SEQ ID NO: 2657 - protein, 735 aa, Artificial Sequence
  source: /note="Description of Artificial Sequence: Synthetic polypeptide"
MAADGYLPDWLEDTLSEGIRQWWKLKPGPPPPKPAERHKDDSRGLVLPGYKYLGPFNGLDKGEPVNEADAAALEHDKAYDRQLDSGDNPYLKYNHADAEFQERLKEDTSFGGNLGRAVFQAKKRVLEPLGLVEEPVKTAPGKKRPVEHSPVEPDSSSGTGKAGQQPARKRLNFGQTGDADSVPDPQPLGQPPAAPSGLGTNTMATGSGAPMADNNEGADGVGNSSGNWHCDSTWMGDRVITTSTRTWALPTYNNHLYKQISSQSGASNDNHYFGYSTPWGYFDFNRFHCHFSPRDWQRLINNNWGFRPKRLSFKLFNIQVKEVTQNDGTTTIANNLTSTVQVFTDSEYQLPYVLGSAHQGCLPPFPADVFMVPQYGYLTLNNGSQAVGRSSFYCLEYFPSQMLRTGNNFTFSYTFEDVPFHSSYAHSQSLDRLMNPLIDQYLYYLSKTNAPSGTTTMSRLQFSQAGASDIRDQSRNWLPGPCYRQQRVSKTAADNNNSDYSWTGATKYHLNGRDSLVNPGPAMASHKDDEEKYFPQSGVLIFGKQGSNKTNVDIEKVMITDEEEIRTTNPMATEQYGSVSTNLQSGNTQAATSDVNTQGVLPGMVWQDRDVYLQGPIWAKIPHTDGHFHPSPLMGGFGLKHPPPQILIKNTPVPANPSTTFSAAKFASFITQYSTGQVSVEIEWELQKENSKRWNPEIQYTSNYNKSVNVDFTVDTNGVYSEPRPIGTRYLTRNL

SEQ ID NO: 2658 - protein, 735 aa, Artificial Sequence
  source: /note="Description of Artificial Sequence: Synthetic polypeptide"
MAADGYLPDWLEDTLSEGIRQWWKLKPGPPPPKPAERHKDDSRGLVLPGYKYLGPFNGLDKGEPVNEADAAALEHDKAYDRQLDSGDNPYLKYNHADAEFQERLKEDTSFGGNLGRAVFQAKKRVLEPLGLVEEPVKTAPGKKRPIEHSPVEPDSSSGTGKAGQQPARKRLNFGQTGDADSVPDPQPLGQPPAAPSGLGTNTMATGSGAPMADNNEGADGVGNSSGNWHCDSTWMGDRVITTSTRTWALPTYNNHLYKQISSQSGASNDNHYFGYSTPWGYFDFNRFHCHFSPRDWQRLINNNWGFRPKRLSFKLFNIQVKEVTQNDGTTTIANNLTSTVQVFTDSEYQLPYVLGSAHQGCLPPFPVDVFMVPQYGYLTLNNGSQAVGRSSFYCLEYFPSQMLRTGNNFTFSYTFEDVPFHSSYAHSQSLDRLMNPLIDQYLYYLSKTNAPSGTTTMSRLQFSQAGASDIRDQSRNWLPGPCYRQQRVSKTAADNNNSDYSWTGATKYHLNGRDSLVNPGPAMASHKDDEEKYFPQSGVLIFGKQGSNKTNVDIEKVMITDEEEIRTTNPVATEQYGSVSTNLQSGNTQAATSDVNTQGVLPGMVWQDRDVYLQGPIWAKIPHTDGHFHPSPLMGGFGLKHPPPQILIKNTPVPANPSTTFSAAKFASFITQYSTGQVSVEIEWELQKENSKRWNPEIQYTSNYNKSVNVDFTVDTNGVYSEPRPIGTRYLTRNL

SEQ ID NO: 2659 - protein, 735 aa, Artificial Sequence
  source: /note="Description of Artificial Sequence: Synthetic polypeptide"
MAADGYLPDWLEDTLSEGIRQWWKLKPGPPPPKPAERHKDDSRGLVLPGYKYLGPFNGLDKGEPVNEADAAALEHDKAYDRQLDSGDNPYLKYNHADAEFQERLKEDTSFGGNLGRAVFQAKKRVLEPLGLVEEPVKTAPGKKRPVEHSPVEPDSSSGTGKAGQQPARKRLNFGQTGDADSVPDPQPLGQPPAAPSGLGTNTMTTGSGAPMADNNEGADGVGNSSGNWHCDSTWMGDRVITTSTRTWALPTYNNHLYKQISSQSGASNDNHYFGYSTPWGYFDFNRFHCHFSPRDWQRLINNNWGFRPKRLSFKLFNIQVKEVTQNDGTTTIANNLTSTVQVFTDSEYQLPYVLGSAHQGCLPPFPADVFMVPQYGYLTLNNGSQAVGRSSFYCLEYFPSQMLRTGNNFTFSYTFEDVPFHSSYAHSQSLDRLMNPLIDQYLYYLSKTNAPSGTTTMSRLQFSQAGASDIRDQSRNWLPGPCYRQQRVSKTAADNNNSDYSWTGATKYHLNGRDSLVNPGPAMASHKDDEEKYFPQSGVLIFGKQGSNKTNVDIEKVMITDEEEIRTTNPVATEQYGSVSTNLQSGNTQAATSDVNTQGVLPGMVWQDRDVYLQGPIWAKIPHTDGHFHPSPLMGGFGLKHPPPQILIKNTPVPANPSTTFSAAKFASFITQYSTGQVSVEIEWELQKENSKRWNPEIQYTSNYNKSVNVDFTVDTNGVYSEPRPIGTRYLTRNL

SEQ ID NO: 2660 - protein, 735 aa, Artificial Sequence
  source: /note="Description of Artificial Sequence: Synthetic polypeptide"
MAADGYLPDWLEDTLSEGIRQWWKLKPGPPPPKPAERHKDDSRGLVLPGYKYLGPFNGLDKGEPVNEADAAALEHDKAYDRQLDSGDNPYLKYNHADAEFQERLKEDTSFGGNLGRAVFQAKKRVLEPLGLVEEPVKTAPGKKRSVEHSPVEPDSSSGTGKAGQQPARKRLNFGQTGDADSVPDPQPLGQPPAAPSGLGTNTMATGSGAPMADNNEGADGVGNSSGNWHCDSTWMGDRVITTSTRTWALPTYNNHLYKQISSQSGASNDNHYFGYSTPWGYFDFNRFHCHFSPRDWQRLINNNWGFRPKRLSFKLFNIQVKEVTQNDGTTTIANNLTSTVQVFTDSEYQLPYVLGSAHQGCLPPFPADVFMVPQYGYLTLNNGSQAVGRSSFYCLEYFPSQMLRTGNNFTFSYTFEDVPFHSSYAHSQSLDRLMNPLIDQYLYYLSKTNAPSGTTTMSRLQFSQAGASDIRDQSRNWLPGPCYRQQRVSKTAADNNNSDYSWTGATKYHLNGRDSLVNPGPAMASHKDDEEKYFPQSGVLIFGKQGSNKTNVDIEKVMITDEEEIRTTNPVATEQYGSVSTNLQSGNTQAATSDVNTQGVLPGMVWQDRDVYLQGPIWAKIPHTDGHFHPSPLMGGFGLKHPPPQILIKNTPVPANPSTTFSAAKFASFITQYSTGQVSVEIEWELQKENSKRWNPEIQYTSNYNKSVNVDFTVDTNGVYSEPRPIGTRYLTRNL

SEQ ID NO: 2661 - protein, 735 aa, Artificial Sequence
  source: /note="Description of Artificial Sequence: Synthetic polypeptide"
MAADGYLPDWLEDTLSEGIRQWWKLKPGPPPPKPAERHKDDSRGLVLPGYKYLGPFNGLDKGEPVNEADAAALEHDKAYDRQLDSGDNPYLKYNHADAEFQERLKEDTSFGGNLGRAVFQAKKRVLEPLGLVEEPVKTAPGKKRPVEHSPVEPDSSSGTGKAGQQPARKRLNFGQTGDADSVPDPQPLGQPPAAPSGLGTNTMATGSGAPMADNNEGADGVGNSSGNWHCDSTWMGDRVITTSTRTWALPTYNNHLYKQISSQSGASNDNHYFGYSTPWGYFDFNRFHCHFSPRDWQRLINNNWGFRPKRLSFKLFNIQVKEVTQNDGTTTIANNLTSTVQVFTDSEYQLPYVLGSAHQGCLPPFPADVFVVPQYGYLTLNNGSQAVGRSSFYCLEYFPSQMLRTGNNFTFSYTFEDVPFHSSYAHSQSLDRLMNPLIDQYLYYLSKTNAPSGTTTMSRLQFSQAGASDIRDQSRNWLPGPCYRQQRVSKTAADNNNSDYSWTGATKYHLNGRDSLVNPGPAMASHKDDEEKYFPQSGVLIFGKQGSNKTNVDIEKVMITDEEEIRTTNPVATEQYGSVSTNLQSGNTQAATSDVNTQGVLPGMVWQDRDVYLQGPIWAKIPHTDGHFHPSPLMGGFGLKHPPPQILIKNTPVPANPSTTFSAAKFASFITQYSTGQVGVEIEWELQKENSKRWNPEIQYTSNYNKSVNVDFTVDTNGVYSEPRPIGTRYLTRNL

SEQ ID NO: 2662 - protein, 735 aa, Artificial Sequence
  source: /note="Description of Artificial Sequence: Synthetic polypeptide"
MAADGYLPDWLEDTLSEGIRQWWKLKPGPPPPKPAERHKDDSRGLVLPGYKYLGPFNGLDKGEPVNEADAAALEHDKAYDRQLDSGDNPYLKYNHADAEFQERLKEDTSFGGNLGRAVFQAKKRVLEPLGLVEEPVKTAPGKKRPVEHSPVEPDSSSGTGKAGQQPARKRLNFGQTGDADSVPDPQPLGQPPAAPSGLGTNTMATGSGAPMADNNEGADGVGNSSGNWHCDSTWMGDRVITTSTRTWALPTYNNHLYKQISSQSGASNDNHYFGYSTPWGYFDFNRFHCHFSPRDWQRLINNNWGFRPKRLSFKLFNIQVKEVTQNDGTTTIANNLTSTVQVFTDSEYQLPYVLGSAHQGCLPPFPADVFMVPQYGYLTLNNGSQAVGRSSFYCLEYFPSQMLRTGNNFTFSYTFEDVPFHSSYAHSQSLDRLMNPLIDQYLYYLSKTNAPSGTTAMSRLQFSQAGASDIRDQSRNWLPGPCYRQQRVSKTAADNNNSDYSWTGATKYHLNGRDSLVNPGPAMASHKDDEEKYFPQSGVLIFGKQGSNKTNVDIEKVMITDEEEIRTTNPVATEQYGSVSTNLQSGNTQAATSDVNTQGVLPGMVWQDRDVYLQGPIWAKIPHTDGHFHPSPLMGGFGLKHPPPQILIKNTPVPANPSTTFSAAKFASFITQYSTGQVSVEIEWELQKENSKRWNPEIQYTSNYNKSVNVDFTVDTNGVYSEPRPIGTRYLTRNL

SEQ ID NO: 2663 - protein, 735 aa, Artificial Sequence
  source: /note="Description of Artificial Sequence: Synthetic polypeptide"
MAADGYLPDWLEDTLSEGIRQWWKLKPGPPPPKPAERHKDDSRGLVLPGYKYLGPFNGLDKGEPVNEADAAALEHDKAYDRQLDSGDNPYLKYNHADAEFQERLKEDTSFGGNLGRAVFQAKKRVLEPLGLVEEPVKTAPGKKRPVEHSPVEPDSSSGTGKAGQQPARKRLNFGQTGDADSVPDPQPLGQPPAAPSGLGTNTMATGSGAPMADNNEGADGVGNSSGNWHCDSTWMGDRVITTSTRTWALPTYNNHLYKQISSQSGASNDNHYFGYSTPWGYFDFNRFHCHFSPRDWQRLINNNWGFRPKRLSFKLFNIQVKEVTQNDGTTTIANNLTSTVQVFTDSEYQLPYVLGSAHQGCLPPFPADVFMVPQYGYLTLNNGSQAVGRSSFYCLEYFPSQMLRTGNNFTFSYTFEDVPFHSSYAHSQSLDRLMNPPIDQYLYYLSKTNAPSGTTTMSRLQFSQAGASDIRDQSRNWLPGPCYRQQRVSKTAADNNNSDYSWTGATKYHLNGRDSLVNPGPAMASHKDDEEKYFPQSGVLIFGKQGSNKTNVDIEKVMITDEEEIRTTNPVATEQYGSVSTNLQSGNTQAATSDVNTQGVLPGMVWQDRDVYLQGPIWAKIPHTDGHFHPSPLMGGFGLKHPPPQILIKNTPVPANPSTTFSAAKFASFITQYSTGQVSVEIEWELQKENSKRWNPEIQYTSNYNKSVNVDFTVDTNGVYSEPRPIGTRYLTRNL

SEQ ID NO: 2664 - protein, 735 aa, Artificial Sequence
  source: /note="Description of Artificial Sequence: Synthetic polypeptide"
MAADGYLPDWLEDTLSEGIRQWWKLKPGPPPPKPAERHKDDSRGLVLPGYKYLGPFNGLDKGEPVNEADAAALEHDKAYDRQLDSGDNPYLKYNHADAEFQERLKEDTSFGGNLGRAVFQAKKRVLEPLGLVEEPVKTAPGKKRPVEHSPVEPDSSSGTGKAGQQPARKRLNFGQTGDADSVPDPQPLGQPPAAPSGLGTNTMATGSGAPMADNNEGADGVGNSSGNWHCDSTWMGDRVITTSTRTWALPTYNNHLYKQISSQSGASNDNHYFGYSTPWGYFDFNRFHCHFSPRDWQRLINNNWGFRPKRLSFKLFNIQVKEVTQNDGTTTIANNLTSTVQVFTDSEYQLPYVLGSAHQGCLPPFPADVFMVPQYGYLTLNNGSQAVGRSSFYCLEYFPSQMLRTGNNFTFSYTFEDVPFHSSYAHGQSLDRLMNPLIDQYLYYLSKTNAPSGTTTMSRLQFSQAGASDIRDQSRNWLPGPCYRQQRVSKTAADNNNSDYSWTGATKYHLNGRDSLVNPGPAMASHKDDEEKYFPQSGVLIFGKQGSNKTNVDIEKVMITDEEEIRTTNPVATEQYGSVSTNLQSGNTQAATSDVNTQGVLPGMVWQDRDVYLQGPIWAKIPHTDGHFHPSPLMGGFGLKHPPPQILIKNTPVPANPSTTFSAAKFASFITQYSTGQVSVEIEWELQKENSKRWNPEIQYTSNYNKSVNVDFTVDTNGVYSEPRPIGTRYLTRNL

SEQ ID NO: 2665 - protein, 735 aa, Artificial Sequence
  source: /note="Description of Artificial Sequence: Synthetic polypeptide"
MAADGYLPDWLEDTLSEGIRQWWKLKPGPPPPKPAERHKDDSRGLVLPGYKYLGPFNGLDKGEPVNEADAAALEHDKAYDRQLDSGDNPYLKYNHADAEFQERLKEDTSFGGNLGRAVFQAKKRVLEPLGLVEEPVKTAPGKKRPVEHSPVEPDSSSGTGKAGQQPARKRLNFGQTGDADSVPDPQPLGQPPAAPSGLGTNTMATGSGAPMADNNEGADGVGNSSGNWHCDSTWMGDRVITTSTRTWALPTYNNHLYKQISSQSGASNDNHYFGYSTPWGYFDFNRFHCHFSPRDWQRLINNNWGFRPKRLSFKLFNIQVKEVTQNDGTTTIANNLTSTVQVFTDSEYQLPYVLGSAHQGCLPPFPADVFMVPQYGYLTLNNGSQAVGRSSFYCLEYFPSQMLRTGNNFTFSYTFEDVPFHSSYAHSQSLDRLMNPLIDQYLYYLSKTNAPSGTTTMSRPQFSQAGASDIRDQSRNWLPGPCYRQQRVSKTAADNNNSDYSWTGATKYHLNGRDSLVNPGPAMASHKDDEEKYFPQSGVLIFGKQGSNKTNVDIEKVMITDEEEIRTTNPVATEQYGSVSTNLQSGNTQAATSDVNTQGVLPGMVWQDRDVYLQGPIWAKIPHTDGHFHPSPLMGGFGLKHPPPQILIKNTPVPANPSTTFSAAKFASFITQYSTGQVSVEIEWELQKENSKRWNPEIQYTSNYNKSVNVDFTVDTNGVYSEPRPIGTRYLTRNL

SEQ ID NO: 2666 - protein, 735 aa, Artificial Sequence
  source: /note="Description of Artificial Sequence: Synthetic polypeptide"
MAADGYLPDWLEDTLSEGIRQWWKLKPGPPPPKPAERHKDDSRGLVLPGYKYLGPFNGLDKGEPVNEADAAALEHDKAYDRQLDSGDNPYLKYNHADAEFQERLKEDTSFGGNLGRAVFQAKKRVLEPLGLVEEPVKTAPGKKRPVEHSPVEPDSSSGTGKAGQQPARKRLNFGQTGDADSVPDPQPLGQPPAAPSGLGTNTMATGSGAPMADNNEGADGVGNSSGNWHCDSTWMGDRVITTSTRTWALPTYNNHLYKQISSQSGTSNDNHYFGYSTPWGYFDFNRFHCHFSPRDWQRLINNNWGFRPKRLSFKLFNIQVKEVTQNDGTTTIANNLTSTVQVFTDSEYQLPYVLGSAHQGCLPPFPADVFMVPQYGYLTLNNGSQAVGRSSFYCLEYFPSQMLRTGNNFTFSYTFEDVPFHSSYAHSQSLDRLMNPLIDQYLYYLSKTNAPSGTTTMSRLQFSQAGASDIRDQSRNWLPGPCYRQQRVSKTAADNNNSDYSWTGATKYHLNGRDSLVNPGPAMASHKDDEEKYFPQSGVLIFGKQGSNKTNVDIEKVMITDEEEIRTTNPVATEQYGSVSTNLQSGNTQAATSDVNTQGVLPGMVWQDRDVYLQGPIWAKIPHTDGHFHPSPLMGGFGLKHPPPQILIKNTPVPANPSTTFSAAKFASFITQYSTGQVSVEIEWELQKENSKRWNPEIQYTSNYNKSVNVDFTVDTNGVYSEPRPIGTRYLTRNL

SEQ ID NO: 2667 - protein, 735 aa, Artificial Sequence
  source: /note="Description of Artificial Sequence: Synthetic polypeptide"
MAADGYLPDWLEDTLSEGIRQWWKLKPGPPPPKPAERHKDDSRGLVLPGYKYLGPFNGLDKGEPVNEADAAALEHDKAYDRQLDSGDNPYLKYNHADAEFQERLKEDTSFGGNLGRAVFQAKKRVLEPLGLVEEPVKTAPGKKRPVEHSPVEPDSSSGTGKAGQQPARKRLNFGQTGDADSVPDPQPLGQPPAAPSGLGTNTMATGSGAPMADNNEGADGVGNSSGNWHCDSTWMGDRVITTSTRTWALPTYNNHLYKQISSQSGASNDNHYFGYSTPWGYFDFNRFHCHFSPRDWQRLINNNWGFRPKRLSFKLFNIQVKEVTQNDGTTTIANNLTSTVQVFTDSEYQLPYVLGSAHQGCLPPFPADVFMVPQYGYLTLNNGSQAVGRSSFYCLEYFPSQMLRTGNNFTFSYTFEDVPFHSSYAHSQSLDRLMNPLIDQYLYYLSKTNAPSGTTTMSRLQFSQAGASDIRDQSRNWLPGPCYRQQRVSKTAADNNNSDYSWTGATKYHLNGRDSLVNPGPAMASHKDDEEKYFPQSGVLIFGKQGSNKTNVDIEKVMITDEEEIRTTNPVATEQYGSVSTNLQSGNTQAATSDVNTQGVLPGMVWQDRDVYLQGPIWAKIPHTDGHFHPSPLMGGFGLKHPPPQILIKNTPVPANPSTTFSAAKFASFITQYSTGQVSVEIEWELQKENSKRWNPEIQYTSNYNKSVNVDFTVDTNGVYSEPHPIGTRYLTRNL

SEQ ID NO: 2668 - protein, 735 aa, Artificial Sequence
  source: /note="Description of Artificial Sequence: Synthetic polypeptide"
MAADGYLPDWLEDTLSEGIRQWWKFKPGPPPPKPAERHKDDSRGLVLPGYKYLGPFNGLDKGEPVNEADAAALEHDKAYDRQLDSGDNPYLKYNHADAEFQERLKEDTSFGGNLGRAVFQAKKRVLEPLGLVEEPVKTAPGKKRPVEHSPVEPDSSSGTGKAGQQPARKRLNFGQTGDADSVPDPQPLGQPPAAPSGLGTNTMATGSGAPMADNNEGADGVGNSSGNWHCDSTWMGDRVITTSTRTWALPTYNNHLYKQISSQSGASNDNHYFGYSTPWGYFDFNRFHCHFSPRDWQRLINNNWGFRPKRLSFKLFNIQVKEVTQNDGTTTIANNLTSTVQVFTDSEYQLPYVLGSAHQGCLPPFPADVFMVPQYGYLTLNNGSQAVGRSSFYCLEYFPSQMLRTGNNFTFSYTFEDVPFHSSYAHSQSLDRLMNPLIDQYLYYLSKTNAPSGTTTMSRLQFSQAGASDIRDQSRNWLPGPCYRQQRVSKTAADNNNSDYSWTGATKYHLNGRDSLVNPGPAMASHKDDEEKYFPQSGVLIFGKQGSNKTNVDIEKVMITDEEEIRTTNPVATEQYGSVSTNLQSGNTQAATSDVNTQGVLPGMVWQDRDVYLQGPIWAKIPHTDGHFHPSPLMGGFGLKHPPPQILIKNTPVPANPSTTFSAAKFASFITQYSTGQVSVEIEWELQKENSKRWNPEIQYTSNYNKSVNVDFTVDTNGVYSEPRPIGTRYLTRNL

SEQ ID NO: 2669 - protein, 735 aa, Artificial Sequence
  source: /note="Description of Artificial Sequence: Synthetic polypeptide"
MAADGYLPDWLEDTLSEGIRQWWKLKPGPPPPKPAERHKDDSRGLVLPGYKYLGPFNGLDKGEPVNEADAAALEHDKAYDRQLDSGDNPYLKYNHADAEFQERLKEDTSFGGNLGRAVFQAKKRVLEPLGLVEEPVKTAPGKKRPVEHSPVEPDSSSGTGKAGQQPARKRLNFGQTGDADSVPDPQPLGQPPAAPSGLGTNTMATGSGAPMADNNEGADGVGNSSGNWHCDSTWMGDRVITTSTRTWALPTYNNHLYKQISSQSGASNDNHYFGYSTPWGYFDFNRFHCHFSSRDWQRLINNNWGFRPKRLSFKLFNIQVKEVTQNDGTTTIANNLTSTVQVFTDSEYQLPYVLGSAHQGCLPPFPADVFMVPQYGYLTLNNGSQAVGRSSFYCLEYFPSQMLRTGNNFTFSYTFEDVPFHSSYAHSQSLDRLMNPLIDQYLYYLSKTNAPSGTTTMSRLQFSQAGASDIRDQSRNWLPGPCYRQQRVSKTAADNNNSDYSWTGATKYHLNGRDSLVNPGPAMASHKDDEEKYFPQSGVLIFGKQGSNKTNVDIEKVMITDEEEIRTTNPVATEQYGSVSTNLQSGNTQAATSDVNTQGVLPGMVWQDRDVYLQGPIWAKIPHTDGHFHPSPLMGGFGLKHPPPQILIKNTPVPANPSTTFSAAKFASFITQYSTGQVSVEIEWELQKENSKRWNPEIQYTSNYNKSVNVDFTVDTNGVYSEPRPIGTRYLTRNL

SEQ ID NO: 2670 - protein, 735 aa, Artificial Sequence
  source: /note="Description of Artificial Sequence: Synthetic polypeptide"
MAADGYLPDWLEDTLSEGIRQWWKLKPGPPPPKPAERHEDDSRGLVLPGYKYLGPFNGLDKGEPVNEADAAALEHDKAYDRQLDSGDNPYLKYNHADAEFQERLKEDTSFGGNLGRAVFQAKKRVLEPLGLVEEPVKTAPGKKRPVEHSPVEPDSSSGTGKAGQQPARKRLNFGQTGDADSVPDPQPLGQPPAAPSGLGTNTMATGSGAPMADNNEGADGVGNSSGNWHCDSTWMGDRVITTSTRTWALPTYNNHLYKQISSQSGASNDNHYFGYSTPWGYFDFNRFHCHFSPRDWQRLINNNWGFRPKRLSFKLFNIQVKEVTQNDGTTTIANNLTSTVQVFTDSEYQLPYVLGSAHQGCLPPFPADVFMVPQYGYLTLNNGSQAVGRSSFYCLEYFPSQMLRTGNNFTFSYTFEDVPFHSSYAHSQSLDRLMNPLIDQYLYYLSKTNAPSGTTTMSRLQFSQAGASDIRDQSRNWLPGPCYRQQRVSKTAADNNNSDYSWTGATKYHLNGRDSLVNPGPAMASHKDDEEKYFPQSGVLIFGKQGSNKTNVDIEKVMITDEEEIRTTNPVATEQYGSVSTNLQSGNTQAATSDVNTQGVLPGMVWQDRDVYLQGPIWAKIPHTDGHFHPSPLMGGFGLKHPPPQILIKNTPVPANPSTTFSAAKFASFITQYSTGQVSVEIEWELQKENSKRWNPEIQYTSNYNKSVNVDFTVDTNGVYSEPRPIGTRYLTRNL

SEQ ID NO: 2671 - protein, 734 aa, Artificial Sequence
  source: /note="Description of Artificial Sequence: Synthetic polypeptide"
MAADGYLPDWLEDTLSEGIRQWWKLKPGPPPPKPAERHKDDSRGLVLPGYKYLGPFNGLDKGEPVNEADAAALEHDKAYDRQLDSGDNPYLKYNHADAEFQERLKEDTSFGGNLGRAVFQAKKRVLEPLGLVEEPVKTAPGKKRPVEHSPVEPDSSSGTGKAGQQPARKRLNFGQTGDADSVPDPQPLGQPPAAPSGLGTNTMATGSGAPMADNNEGADGVGNSSGNWHCDSTWMGDRVITTSTRTWALPTYNNHLYKQISSQSGASNDNHYFGYSTPWGYFDFNRFHCHFSPRDWQRLINNNWGFRPKRLSFKLFNIQVKEVTQNDGTTTIANNLTSTVQVFTDSEYQLPYVLGSAHQGCLPPFPADVFMVPQYGYLTLNNGSQAVGRSSFYCLEYFPSQMLRTGNNFTFSYTFEDVPFHSSYAHSQSLDRLMNPLIDQYLYYLSKTNAPSGTTTMSRLQFSQAGASDIRDQSRNWLPGPCYRQQRVSKTAADNNSDYSWTGATKYHLNGRDSLVNPGPAMASHKDDEEKYFPQSGVLIFGKQGSNKTNVDIEKVMITDEEEIRTTNPVATEQYGSVSTNLQSGNTQAATSDVNTQGVLPGMVWQDRDVYLQGPIWAKIPHTDGHFHPSPLMGGFGLKHPPPQILIKNTPVPANPSTTFSAAKFASFITQYSTGQVSVEIEWELQKENSKRWNPEIQYTSNYNKSVNVDFTVDTNGVYSEPRPIGTRYLTRNL

SEQ ID NO: 2672 - protein, 735 aa, Artificial Sequence
  source: /note="Description of Artificial Sequence: Synthetic polypeptide"
MAADGYLPDWLEDTLSEGIRQWWKLKPGPPPPKPAEWHKDDSRGLVLPGYKYLGPFNGLDKGEPVNEADAAALEHDKAYDRQLDSGDNPYLKYNHADAEFQERLKEDTSFGGNLGRAVFQAKKRVLEPLGLVEEPVKTAPGKKRPVEHSPVEPDSSSGTGKAGQQPARKRLNFGQTGDADSVPDPQPLGQPPAAPSGLGTNTMATGSGAPMADNNEGADGVGNSSGNWHCDSTWMGDRVITTSTRTWALPTYNNHLYKQISSQSGASNDNHYFGYSTPWGYFDFNRFHCHFSPRDWQRLINNNWGFRPKRLSFKLFNIQVKEVTQNDGTTTIANNLTSTVQVFTDSEYQLPYVLGSAHQGCLPPFPADVFMVPQYGYLTLNNGSQAVGRSSFYCLEYFPSQMLRTGNNFTFSYTFEDVPFHSSYAHSQSLDRLMNPLIDQYLYYLSKTNAPSGTTTMSRLQFSQAGASDIRDQSRNWLPGPCYRQQRVSKTAADNNNSDYSWTGATKYHLNGRDSLVNPGPAMASHKDDEEKYFPQSGVLIFGKQGSNKTNVDIEKVMITDEEEIRTTNPVATEQYGSVSTNLQSGNTQAATSDVNTQGVLPGMVWQDRDVYLQGPIWAKIPHTDGHFHPSPLMGGFGLKHPPPQILIKNTPVPANPSTTFSAAKFASFITQYSTGQVSVEIEWELQKENSKRWNPEIQYTSNYNKSVNVDFTVDTNGVYSEPRPIGTRYLTRNL

SEQ ID NO: 2673 - protein, 735 aa, Artificial Sequence
  source: /note="Description of Artificial Sequence: Synthetic polypeptide"
MAADGYLPDWLEDTLSEGIRQWWKLKPGPPPPKPAERHKDDSRGLVLPGYKYLGPFNGLDKGEPVNEADAAALEHDKAYDRQLDSGDNPYLKYNHADAEFQERLKEDTSFGGNLGRAVFQAKKRVLEPLGLVEEPVKTAPGKKRPVEHSPVEPDSSSGTGKAGQQPARKRLNFGQTGDADSVPDPQPLGQPPAAPSGLGTNTMATGSGAPMADNNEGADGVGNSSGNWHCDSTWMGDRVITTSTRTWALPTYNNHLYKQISSQSGASNDNHYFGYSTPWGYFDFNRFHCHFSPRDWQRLINNNWGFRPKRLSFKLFNIQVKEVTQNDGTTTIANNLTSTVQVFTDSEYQLPYVLGSAHQGCLPPFPADVFMVPQYGYLTLNNGSQAVGRSSFYCLEYFPSQMLRTGNNFTFSYTFEDVPFHSSYAHSQSLDRLMNPLIDQYLYYLSKTNAPSGTTTMSRLQFSQAGASDIRDQSRNWLPGPCYRQQRVSKTAADNNNSDYSWTGATKYHLNGRDSLVNPGPAMASHKDDEEKYFPQSGVLIFGKQGSNKTNVDIEKVMITDEEEIRTTNPVATEQYGSVSTNLQSGNTQAATSDVNTQGVLPDMVWQDRDVYLQGPIWAKIPHTDGHFHPSPLMGGFGLKHPPPQILIKNTPVPANPSTTFSAAKFASFITQYSTGQVSVEIEWELQKENSKRWNPEIQYTSNYNKSVNVDFTVDTNGVYSEPRPIGTRYLTRNL

SEQ ID NO: 2674 - protein, 735 aa, Artificial Sequence
  source: /note="Description of Artificial Sequence: Synthetic polypeptide"
MAADGYLPDWLEDTLSEGIRQWWKLKPGPPPPKPAERHKDDSRGLVLPGYKYLGPFNGLDKGEPVNEADAAALEHDKAYDRQLDSGDNPYLKYNHADAEFQERLKEDTSFGDNLGRAVFQAKKRVLEPLGLVEEPVKTAPGKKRPVEHSPVEPDSSSGTGKAGQQPARKRLNFGQTGDADSVPDPQPLGQPPAAPSGLGTNTMATGSGAPMADNNEGADGVGNSSGNWHCDSTWMGDRVITTSTRTWALPTYNNHLYKQISSQSGASNDNHYFGYSTPWGYFDFNRFHCHFSPRDWQRLINNNWGFRPKRLSFKLFNIQVKEVTQNDGTTTIANNLTSTVQVFTDSEYQLPYVLGSAHQGCLPPFPADVFMVPQYGYLTLNNGSQAVGRSSFYCLEYFPSQMLRTGNNFTFSYTFEDVPFHSSYAHSQSLDRLMNPLIDQYLYYLSKTNAPSGTTTMSRLQFSQAGASDIRDQSRNWLPGPCYRQQRVSKTAADNNNSDYSWTGATKYHLNGRDSLVNPGPAMASHKDDEEKYFPQSGVLIFGKQGSNKTNVDIEKVMITDEEEIRTTNPVATEQYGSVSTNLQSGNTQAATSDVNTQGVLPGMVWQDRDVYLQGPIWAKIPHTDGHFHPSPLMGGFGLKHPPPQILIKNTPVPANPSTTFSAAKFASFITQYSTGQVSVEIEWELQKENSKRWNPEIQYTSNYNKSVNVDFTVDTNGVYSEPRPIGTRYLTRNL

SEQ ID NO: 2675 - protein, 735 aa, Artificial Sequence
  source: /note="Description of Artificial Sequence: Synthetic polypeptide"
MAADGYLPDWLEDTLSEGIRQWWKLKPGPPPPKPAERHKDDSRGLVLPGYKYLGPFNGLDKGEPVNEADAAALEHDKAYDRQLDSGDNPYLKYNHADAEFQERLKEDTSFGGNLGRAVFQAKKRVLEPLGLVEEPVKTAPGKKRPVEHSPVEPDSSSGTGKAGQQPARKRLNFGQTGDADSVPDPQPLGQPPAAPSGLGTNTMATGSGAPMADNNEGADGVGNSSGNWHCDSTWMGDRVITTSTRTWALPTYNNHLYKQISSQSGASNDNHYFGYSTPWGYFDFNRFHCHFSPRDWQRLINNNWGFRPKRLSFKLFNIQVKEVTQNDGTTTIANNLTSTVQVFTDSEYQLPYVLDSAHQGCLPPFPADVFMVPQYGYLTLNNGSQAVGRSSFYCLEYFPSQMLRTGNNFTFSYTFEDVPFHSSYAHSQSLDRLMNPLIDQYLYYLSKTNAPSGTTTMSRLQFSQAGASDIRDQSRNWLPGPCYRQQRVSKTAADNNNSDYSWTGATKYHLNGRDSLVNPGPAMASHKDDEEKYFPQSGVLIFGKQGSNKTNVDIEKVMITDEEEIRTTNPVATEQYGSVSTNLQSGNTQAATSDVNTQGVLPGMVWQDRDVYLQGPIWAKIPHTDGHFHPSPLMGGFGLKHPPPQILIKNTPVPANPSTTFSAAKFASFITQYSTGQVSVEIEWELQKENSKRWNPEIQYTSNYNKSVNVDFTVDTNGVYSEPRPIGTRYLTRNL

SEQ ID NO: 2676 - protein, 735 aa, Artificial Sequence
  source: /note="Description of Artificial Sequence: Synthetic polypeptide"
MAADGYLPDWLEDTLSEGIRQWWKLKPGPPPPKPAERHKDDSRGLVLPGYKYLGPFNGLDKGEPVNEADAAALEHDKAYDRQLDSGDNPYLKYNHADAEFQERLKEDTSFGGNLGRAVFQAKKRVLEPLGLVEEPVKTAPGKKRPVEHSPVEPDSSSGTGKAGQQPARKRLNFGQTGDADSVPDPQPLGQPPAAPSGLGTNTMATGSGAPMADNNEGADGVGNSSGNWHCDSTWMGDRVITTSTRTWALPTYNNHLYKQISSQSGASNDNHYFGYSTPWGYFDFNRFHCHFSPRDWQRLINNNWGFRPKRLSFKLFNIQVKEVTQNDGTTTIANNLTSTVQVFTDSEYQLPYVLGSAHQGCLPPFPADVFMVPQYGYLTLNNGSQAVGRSSFYCLEYFPSQMLRTGNNFTFSYTFEDVPFHSSYAHSQSLDRLMNPLIDQYLYYLSKTNAPSGTTTMSRLQFSQAGASDIRDQSRNWLPGPCYRQQRVSKTAADNNNSDYSWTGATKYHLNGRDSLVNPGPAMASHKDDEEKYFPQSGVLIFGKQGSNKTNVDIEKVMITDEEEIRTTNPVATEQYGSVSTNLQSGNTQAATSDVNTQGVLPGMVWQDRDVYLQGPIWAKIPHTDGHFHPSPLMGGFGLKHPPPQILIKNTPVPANPSTTFSATKFASFITQYSTGQVSVEIEWELQKENSKRWNPEIQYTSNYNKSVNVDFTVDTNGVYSEPRPIGTRYLTRNL

SEQ ID NO: 2677 - protein, 735 aa, Artificial Sequence
  source: /note="Description of Artificial Sequence: Synthetic polypeptide"
MAADGYLPDWLEDTLSEGIRQWWKLKPGPPPPKPAERHKDDSRGLVLPGYKYLGPFNGLDKGESVNEADAAALEHDKAYDRQLDSGDNPYLKYNHADAEFQERLKEDTSFGGNLGRAVFQAKKRVLEPLGLVEEPVKTAPGKKRPVEHSPVEPDSSSGTGKAGQQPARKRLNFGQTGDADSVPDPQPLGQPPAAPSGLGTNTMATGSGAPMADNNEGADGVGNSSGNWHCDSTWMGDRVITTSTRTWALPTYNNHLYKQISSQSGASNDNHYFGYSTPWGYFDFNRFHCHFSPRDWQRLINNNWGFRPKRLSFKLFNIQVKEVTQNDGTTTIANNLTSTVQVFTDSEYQLPYVLGSAHQGCLPPFPADVFMVPQYGYLTLNNGSQAVGRSSFYCLEYFPSQMLRTGNNFTFSYTFEDVPFHSSYAHSQSLDRLMNPLIDQYLYYLSKTNAPSGTTTMSRLQFSQAGASDIRDQSRNWLPGPCYRQQRVSKTAADNNNSDYSWTGATKYHLNGRDSLVNPGPAMASHKDDEEKYFPQSGVLIFGKQGSNKTNVDIEKVMITDEEEIRTTNPVATEQYGSVSTNLQSGNTQAATSDVNTQGVLPGMVWQDRDVYLQGPIWAKIPHTDGHFHPSPLMGGFGLKHPPPQILIKNTPVPANPSTTFSAAKFASFITQYSTGQVSVEIEWELQKENSKRWNPEIQYTSNYNKSVNVDFTVDTNGVYSEPRPIGTRYLTRNL

SEQ ID NO: 2678 - protein, 735 aa, Artificial Sequence
  source: /note="Description of Artificial Sequence: Synthetic polypeptide"
MAADGYLPDWLEDTLSEGIRQWWKLKPGPPPPKPAERHKDDSRGLVLPGYKYLGPFNGLDKGEPVNEADAAALEHDKAYDRQLDSGDNPYLKYNHADAEFQERLKEDTSFGGNLGRAVFQAKKRVLEPLGLVEEPVKTAPGKKRPVEHSPVEPDSSSGTGKAGQQPARKRLNFGQTGDADSVPDPQPLGQPPAAPSGLGTNTMATGSGAPMADNNEGADGVGNSSGNWHCDSTWMGDRVITTSTRTWALPTYNNHLYKQISSQSGASNDNHYFGYSTPWGYFDFNRFHCHFSPRDWQRLINNNWGFRPKRLSFKLFNIQVKEVTQNDGTTTIANNLTSTVQVFTDSEYQLPYVLGSVHQGCLPPFPADVFMVPQYGYLTLNNGSQAVGRSSFYCLEYFPSQMLRTGNNFTFSYTFEDVPFHSSYAHSQSLDRLMNPLIDQYLYYLSKTNAPSGTTTMSRLQFSQAGASDIRDQSRNWLPGPCYRQQRVSKTAADNNNSDYSWTGATKYHLNGRDSLVNPGPAMASHKDDEEKYFPQSGVLIFGKQGSNKTNVDIEKVMITDEEEIRTTNPVATEQYGSVSTNLQSGNTQAATSDVNTQGVLPGMVWQDRDVYLQGPIWAKIPHTDGHFHPSPLMGGFGLKHPPPQILIKNTPVPANPSTTFSAAKFASFITQYSTGQVSVEIEWELQKENSKRWNPEIQYTSNYNKSVNVDFTVDTNGVYSEPRPIGTRYLTRNL

SEQ ID NO: 2679 - protein, 735 aa, Artificial Sequence
  source: /note="Description of Artificial Sequence: Synthetic polypeptide"
MAADGYLPDWLEDTLSEGIRQWWKLKPGPPPPKPAERHKDDSRGLVLPGYKYLGPFNGLDKGEPVNEADAAALEHDKAYDRQLDSGDNPYLKYNHADAEFQERLKEDTSFGGNLGRAVFQAKKRVLEPLGLVEEPVKTAPGKKRPVEHSPVESDSSSGTGKAGQQPARKRLNFGQTGDADSVPDPQPLGQPPAAPSGLGTNTMATGSGAPMADNNEGADGVGNSSGNWHCDSTWMGDRVITTSTRTWALPTYNNHLYKQISSQSGASNDNHYFGYSTPWGYFDFNRFHCHFSPRDWQRLINNNWGFRPKRLSFKLFNIQVKEVTQNDGTTTIANNLTSTVQVFTDSEYQLPYVLGSAHQGCLPPFPADVFMVPQYGYLTLNNGSQAVGRSSFYCLEYFPSQMLRTGNNFTFSYTFEDVPFHSSYAHSQSLDRLMNPLIDQYLYYLSKTNAPSGTTTMSRLQFSQAGASDIRDQSRNWLPGPCYRQQRVSKTAADNNNSDYSWTGATKYHLNGRDSLVNPGPAMASHKDDEEKYFPQSGVLIFGKQGSNKTNVDIEKVMITDEEEIRTTNPVATEQYGSVSTNLQSGNTQAATSDVNTQGVLPGMVWQDRDVYLQGPIWAKIPHTDGHFHPSPLMGGFGLKHPPPQILIKNTPVPANPSTTFSAAKFASFITQYSTGQVSVEIEWELQKENSKRWNPEIQYTSNYNKSVNVDFTVDTNGVYSEPRPIGTRYLTRNL

SEQ ID NO: 2680 - protein, 735 aa, Artificial Sequence
  source: /note="Description of Artificial Sequence: Synthetic polypeptide"
MAADGYLPDWLEDTLSEGIRQWWKLKPGPPPPKPAERHKDDSRGLVLPGYKYLGPFNGLDKGEPVNEADAAALEHDKAYDRQLDSGDNPYLKYNHADAEFQERLKEDTSFGGNLGRAVFQAKKRVLEPLGLVEEPVKTAPGKKRPVEHSPVEPDSSSGTGKAGQQPARKRLNFGQTGDADSVPDPQPLGQPPAAPSGLGTNTMATGSGAPMADNNEGADGVGNSSGNWHCDSTWMGDRVITTSTRTWALPTYNNHLYKQISSQSGASNDNHYFGYSTPWGYFDFNRFHCHFSPRDWQRLINNNWGFRPKRLSFKLFNIQVKEVTQNDGTTTIANNLTSTVQVFTDSEYQLPYVLGSAHQGCLPPFPADVFMVPQYGYLTLNNGSQAVGRSSFYCLEYFPSQMLRTGNNFTFSYTFEDVPFHSSYAHSQSMDRLMNPLIDQYLYYLSKTNAPSGTTTMSRLQFSQAGASDIRDQSRNWLPGPCYRQQRVSKTAADNNNSDYSWTGATKYHLNGRDSLVNPGPAMASHKDDEEKYFPQSGVLIFGKQGSNKTNVDIEKVMITDEEEIRTTNPVATEQYGSVSTNLQSGNTQAATSDVNTQGVLPGMVWQDRDVYLQGPIWAKIPHTDGHFHPSPLMGGFGLKHPPPQILIKNTPVPANPSTTFSAAKFASFITQYSTGQVSVEIEWELQKENSKRWNPEIQYTSNYNKSVNVDFTVDTNGVYSEPRPIGTRYLTRNL

SEQ ID NO: 2681 - protein, 735 aa, Artificial Sequence
  source: /note="Description of Artificial Sequence: Synthetic polypeptide"
MAADGYLPDWLEDTLSEGIRQWWKLKPGPPPPKPAERHKDDSRGLVLPGYKYLGPFNGLDKGEPVNEADAAALEHDKAYDRQLDSGDNPYLKYNHADAEFQERLKEDTSFGGNLGRAVFQAKKRVLEPLGLVEEPVKTAPGKKRPVEHSPVEPDSSSGTGKAGQQPARKRLNFGQTGDADSVPDPQPLGQPPAAPSGLGTNTMATGSGAPMADNNEGADGVGNSSGNWHCDSTWMGDRVITTSTRTWALPTYNNHLYKQISSQSGASNDNHYFGYSTPWGYFDFNRFHCHFSPRDWQRLINNNWGFRPKRLSFKLFNIQVKEVTQNDGTTTIANNLTSTVQVFTDSEYQLPYVLGSAHQGCLPPFPADVFMVPQYGYLTLNNGSQAVGRSSFYCLEYFPSQMLRTGNNFTFSYTFEDVPFHSSYAHSQSLDRLMNPLIDQYLYYLSKTNAPSGTTTMSRLQFSQAGASDIRDQSRNWLPGPCYRQQRVSKTAADNNNSDYSWTGATKYHLNGRDSLVNPGPAMASHKDDEEKYFPQSGVLIFRKQGSNKTNVDIEKVMITDEEEIRTTNPVATEQYGSVSTNLQSGNTQAATSDVNTQGVLPGMVWQDRDVYLQGPIWAKIPHTDGHFHPSPLMGGFGLKHPPPQILIKNTPVPANPSTTFSAAKFASFITQYSTGQVSVEIEWELQKENSKRWNPEIQYTSNYNKSVNVDFTVDTNGVYSEPRPIGTRYLTRNL

SEQ ID NO: 2682 - protein, 735 aa, Artificial Sequence
  source: /note="Description of Artificial Sequence: Synthetic polypeptide"
MAADGYLPDWLEDTLSEGIRQWWKLKPGPPPPKPAERHKDDSRGLVLPGYKYLGPFNGLDKGEPVNEADTAALEHDKAYDRQLDSGDNPYLKYNHADAEFQERLKEDTSFGGNLGRAVFQAKKRVLEPLGLVEEPVKTAPGKKRPVEHSPVEPDSSSGTGKAGQQPARKRLNFGQTGDADSVPDPQPLGQPPAAPSGLGTNTMATGSGAPMADNNEGADGVGNSSGNWHCDSTWMGDRVITTSTRTWALPTYNNHLYKQISSQSGASNDNHYFGYSTPWGYFDFNRFHCHFSPRDWQRLINNNWGFRPKRLSFKLFNIQVKEVTQNDGTTTIANNLTSTVQVFTDSEYQLPYVLGSAHQGCLPPFPADVFMVPQYGYLTLNNGSQAVGRSSFYCLEYFPSQMLRTGNNFTFSYTFEDVPFHSSYAHSQSLDRLMNPLIDQYLYYLSKTNAPSGTTTMSRLQFSQAGASDIRDQSRNWLPGPCYRQQRVSKTAADNNNSDYSWTGATKYHLNGRDSLVNPGPAMASHKDDEEKYFPQSGVLIFGKQGSNKTNVDIEKVMITDEEEIRTTNPVATEQYGSVSTNLQSGNTQAATSDVNTQGVLPGMVWQDRDVYLQGPIWAKIPHTDGHFHPSPLMGGFGLKHPPPQILIKNTPVPANPSTTFSAAKFASFITQYSTGQVSVEIEWELQKENSKRWNPEIQYTSNYNKSVNVDFTVDTNGVYSEPRPIGTRYLTRNL

SEQ ID NO: 2683 - protein, 735 aa, Artificial Sequence
  source: /note="Description of Artificial Sequence: Synthetic polypeptide"
MAADGYLPDWLEDTLSEGIRQWWKLKPGPPPPKPAERHKDDSRGLVLPGYKYLGPFNGLDKGEPVNEADAAALEHDKAYDRQLDSGDNPYLKYNHADAEFQERLKEDTSFGGNLGRAVFQAKKRVLEPLGLVEEPVKTAPGKKRPVEHSPVEPDSSSGTGKAGQQPARKRLNFGQTGDADSVPDPQPLGQPPAAPSGLGTNTMATGSGTPMADNNEGADGVGNSSGNWHCDSTWMGDRVITTSTRTWALPTYNNHLYKQISSQSGASNDNHYFGYSTPWGYFDFNRFHCHFSPRDWQRLINNNWGFRPKRLSFKLFNIQVKEVTQNDGTTTIANNLTSTVQVFTDSEYQLPYVLGSAHQGCLPPFPADVFMVPQYGYLTLNNGSQAVGRSSFYCLEYFPSQMLRTGNNFTFSYTFEDVPFHSSYAHSQSLDRLMNPLIDQYLYYLSKTNAPSGTTTMSRLQFSQAGASDIRDQSRNWLPGPCYRQQRVSKTAADNNNSDYSWTGATKYHLNGRDSLVNPGPAMASHKDDEEKYFPQSGVLIFGKQGSNKTNVDIEKVMITDEEEIRTTNPVATEQYGSVSTNLQSGNTQAATSDVNTQGVLPGMVWQDRDVYLQGPIWAKIPHTDGHFHPSPLMGGFGLKHPPPQILIKNTPVPANPSTTFSAAKFASFITQYSTGQVSVEIEWELQKENSKRWNPEIQYTSNYNKSVNVDFTVDTNGVYSEPRPIGTRYLTRNL

SEQ ID NO: 2684 - protein, 735 aa, Artificial Sequence
  source: /note="Description of Artificial Sequence: Synthetic polypeptide"
MAADGYLPDWLEDTLSEGIRQWWKLKPGPPPPKPAERHKDDSRGLVLPGYKYLGPFNGLDKGEPVNEADAAALEHDKAYDRQLDSGDNPYLKYNHADAEFQERLKEDTSFGGNLGRAVFQAKKRVLEPLGLVEEPVKTAPGKKRPVEHSPVEPDSSSGTGKAGQQPARKRLNFGQTGDADSVPDPQPLGQPPAAPSGLGTNTMATGSGAPMADNNEGADGVGNSSGNWHCDSTWMGDRVITTSTRTWALSTYNNHLYKQISSQSGASNDNHYFGYSTPWGYFDFNRFHCHFSPRDWQRLINNNWGFRPKRLSFKLFNIQVKEVTQNDGTTTIANNLTSTVQVFTDSEYQLPYVLGSAHQGCLPPFPADVFMVPQYGYLTLNNGSQAVGRSSFYCLEYFPSQMLRTGNNFTFSYTFEDVPFHSSYAHSQSLDRLMNPLIDQYLYYLSKTNAPSGTTTMSRLQFSQAGASDIRDQSRNWLPGPCYRQQRVSKTAADNNNSDYSWTGATKYHLNGRDSLVNPGPAMASHKDDEEKYFPQSGVLIFGKQGSNKTNVDIEKVMITDEEEIRTTNPVATEQYGSVSTNLQSGNTQAATSDVNTQGVLPGMVWQDRDVYLQGPIWAKIPHTDGHFHPSPLMGGFGLKHPPPQILIKNTPVPANPSTTFSAAKFASFITQYSTGQVSVEIEWELQKENSKRWNPEIQYTSNYNKSVNVDFTVDTNGVYSEPRPIGTRYLTRNL

SEQ ID NO: 2685 - protein, 735 aa, Artificial Sequence
  source: /note="Description of Artificial Sequence: Synthetic polypeptide"
MAADGYLPDWLEDTLSEGIRQWWKLKPGPPPPKPAERHKDDSRGLVLPGYKYLGPFNGLDKGEPVNEADAAALEHDKAYDRQLDSGDNPYLKYNHADAEFQERLKEDTSFGGNLGRAVFQAKKRVLEPLGLVEEPVKTAPGKKRPVEHSPVEPDSSSGTGKAGQQPARKRLNFGQTGDADSVPDPQPLGQPPAAPSGLGTNTMATGSGAPMADNNEGADGVGNSSGNWHCDSTWMGDRVITTSTRTWALPTYNNHLYKQISSQSGASNDNHYFGYSTPWGYFDFNRFHCHFSPRDWQRLINNNWGFRPKRLSFKLFNIQVKEVTQNDGTTTIANNLTSTVQVFTDSEYQLPYVLGSAHQGCLPPFPADVFMVPQYGYLTLNNGSQAVGRSSFYCLEYFPSQMLRTGNNFTFSYTFEDVPFHSSYAHSQSLDRLMNPLIDQYLYYLSKTNAPSGTTTMSRLQFSQAGASDIRDQSRNWLPGPCYRQQRVSKTAVDNNNSDYSWTGATKYHLNGRDSLVNPGPAMASHKDDEEKYFPQSGVLIFGKQGSNKTNVDIEKVMITDEEEIRTTNPVATEQYGSVSTNLQSGNTQAATSDVNTQGVLPGMVWQDRDVYLQGPIWAKIPHTDGHFHPSPLMGGFGLKHPPPQILIKNTPVPANPSTTFSAAKFASFITQYSTGQVSVEIEWELQKENSKRWNPEIQYTSNYNKSVNVDFTVDTNGVYSEPRPIGTRYLTRNL

SEQ ID NO: 2686 - protein, 735 aa, Artificial Sequence
  source: /note="Description of Artificial Sequence: Synthetic polypeptide"
MAADGYLPDWLEDTLSEGIRQWWKLKPGPPPPKPAERHKDDSRGLVLPGYKYLGPFNGLDKGEPVNEADAAALEHDKAYDRQLDSGDNPYLKYNHADAEFQERLKEDTSFGGNLGRAVFQAKKRVLEPLGLVEEPVKTAPGKKRPVEHSPVEPDSSSGTGKAGQQPARKRLNFGQTGDADSVPDPQPLGQPPAAPSGLGTNTMATGSGAPMADNNEGADGVGNSSGNWHCDSTWMGDRVITTSTRTWALPTYNNHLYKQISSQSGASNDNHYFGYSTPWGYFDFNRFHCHFSPRDWQRLINNNWGFRPKRLSFKLFNIQVKEVTQNDGTTTIANNLTSTVQVFTDSEYQLPYVLGSAHQGCLPPFPADVFMVPQYGYLTLNNGSQAVGRSSFYCLEYFPSQILRTGNNFTFSYTFEDVPFHSSYAHSQSLDRLMNPLIDQYLYYLSKTNAPSGTTTMSRLQFSQAGASDIRDQSRNWLPGPCYRQQRVSKTAADNNNSDYSWTGATKYHLNGRDSLVNPGPAMASHKDDEEKYFPQSGVLIFGKQGSNKTNVDIEKVMITDEEEIRTTNPVATEQYGSVSTNLQSGNTQAATSDVNTQGVLPGMVWQDRDVYLQGPIWAKIPHTDGHFHPSPLMGGFGLKHPPPQILIKNTPVPANPSTTFSAAKFASFITQYSTGQVSVEIEWELQKENSKRWNPEIQYTSNYNKSVNVDFTVDTNGVYSEPRPIGTRYLTRNL

SEQ ID NO: 2687 - protein, 735 aa, Artificial Sequence
  source: /note="Description of Artificial Sequence: Synthetic polypeptide"
MAADGYLPDWLEDTLSEGIRQWWKLKPGPPPPKPAERHKDDSRGLVLPGYKYLGPFNGLDKGEPVNEADAAALEHDKAYDRQLDSGDNPYLKYNHADAEFQERLKEDTSFGGNLGRAVFQAKKRVLEPLGLVEEPVKTAPGKKRPVEHSPVEPDSSSGTGKVGQQPARKRLNFGQTGDADSVPDPQPLGQPPAAPSGLGTNTMATGSGAPMADNNEGADGVGNSSGNWHCDSTWMGDRVITTSTRTWALPTYNNHLYKQISSQSGASNDNHYFGYSTPWGYFDFNRFHCHFSPRDWQRLINNNWGFRPKRLSFKLFNIQVKEVTQNDGTTTIANNLTSTVQVFTDSEYQLPYVLGSAHQGCLPPFPADVFMVPQYGYLTLNNGSQAVGRSSFYCLEYFPSQMLRTGNNFTFSYTFEDVPFHSSYAHSQSLDRLMNPLIDQYLYYLSKTNAPSGTTTMSRLQFSQAGASDIRDQSRNWLPGPCYRQQRVSKTAADNNNSDYSWTGATKYHLNGRDSLVNPGPAMASHKDDEEKYFPQSGVLIFGKQGSNKTNVDIEKVMITDEEEIRTTNPVATEQYGSVSTNLQSGNTQAATSDVNTQGVLPGMVWQDRDVYLQGPIWAKIPHTDGHFHPSPLMGGFGLKHPPPQILIKNTPVPANPSTTFSAAKFASFITQYSTGQVSVEIEWELQKENSKRWNPEIQYTSNYNKSVNVDFTVDTNGVYSEPRPIGTRYLTRNL

SEQ ID NO: 2688 - protein, 735 aa, Artificial Sequence
  source: /note="Description of Artificial Sequence: Synthetic polypeptide"
MAADGYLPDWLEDTLSEGIRQWWKLKPGPPPPKPAERHKDDSRGLVLPGYKYLGPFNGLDKGEPVNEADAAALEHDKAYDRQLDSGDNPYLKYNHADAEFQERLKEDTSFGGNLGRAVFQAKKRVLEPLGLVEEPVKTAPGKKRPVEHSPVEPDSSSGTGKAGQQPARKRLNFGQTGDADSVPDPQPLGQPPAAPSGLGTNTMAAGSGAPMADNNEGADGVGNSSGNWHCDSTWMGDRVITTSTRTWALPTYNNHLYKQISSQSGASNDNHYFGYSTPWGYFDFNRFHCHFSPRDWQRLINNNWGFRPKRLSFKLFNIQVKEVTQNDGTTTIANNLTSTVQVFTDSEYQLPYVLGSAHQGCLPPFPADVFMVPQYGYLTLNNGSQAVGRSSFYCLEYFPSQMLRTGNNFTFSYTFEDVPFHSSYAHSQSLDRLMNPLIDQYLYYLSKTNAPSGTTTMSRLQFSQAGASDIRDQSRNWLPGPCYRQQRVSKTAADNNNSDYSWTGATKYHLNGRDSLVNPGPAMASHKDDEEKYFPQSGVLIFGKQGSNKTNVDIEKVMITDEEEIRTTNPVATEQYGSVSTNLQSGNTQAATSDVNTQGVLPGMVWQDRDVYLQGPIWAKIPHTDGHFHPSPLMGGFGLKHPPPQILIKNTPVPANPSTTFSAAKFASFITQYSTGQVSVEIEWELQKENSKRWNPEIQYTSNYNKSVNVDFTVDTNGVYSEPRPIGTRYLTRNL

SEQ ID NO: 2689 - protein, 735 aa, Artificial Sequence
  source: /note="Description of Artificial Sequence: Synthetic polypeptide"
MAADGYLPDWLEDTLSEGIRQWWKLKPGPPPPKPAERHKDDSRGLVLPGYKYLGPFNGLDKGEPVNEADAAALEHDKAYDRQLDSGDNPYLKYNHADAEFQERLKEDTSFGGNLGRAVFQAKKRVLEPLGLVEEPVKTAPGKKRPVEHSPVEPDSSSGTGKAGQQPARKRLNFGQTGDADSVPDPQPLGQPPAAPSGLGTNTMATGSGAPMADNNEGADGVGNSSGNWHCDSTWMGDRVITTSTRTWALPTYNNHLYKQISSQSGASNDNHYFGYSTPWGYFDFNRFHCHFSPRDWQRLINNNWGFRPKRLSFKLFNIQVKEVTQNDGTTTIANNLTSTVQVFTDSEYQLPYVLGSAHQGCLPPFPADVFMVPQYGYLTLNNGSQAVGRSSFYCLEYFPSQMLRTGNNFTFSYTFEDVPFHSSYAHSQSLDRLMNPLIDQYLYYLSKTNAPSGTTTMSRLQFSQAGASDIRDQSRNWLPGPCYRQQRVSKTAADNNNSDYSWTGATKYHLNGRDSLVNPGPAMASHKDDEEKYFPQSGVLIFGKQGSNKTNVDIEKVMITDEEEIRTTNPVATEQYGSVSTNLQSDNTQAATSDVNTQGVLPGMVWQDRDVYLQGPIWAKIPHTDGHFHPSPLMGGFGLKHPPPQILIKNTPVPANPSTTFSAAKFASFITQYSTGQVSVEIEWELQKENSKRWNPEIQYTSNYNKSVNVDFTVDTNGVYSEPRPIGTRYLTRNL

SEQ ID NO: 2690 - protein, 735 aa, Artificial Sequence
  source: /note="Description of Artificial Sequence: Synthetic polypeptide"
MAADGYLPDWLEDTLSEGIRQWWKLKPGPPPPKPAERHKDDSRGLVLPGYKYLGPFNGLDKGEPVNEADAAALEHDKAYDRQLDSGDNPYLKYNHADAEFQERLKEDTSFGGNLGRAVFQAKKRVLEPLGLVEEPVKTAPGKKRPVEHSPVEPDSSSGTGKAGQQPARKRLNFGQTGDADSVPDPQPLGQPPAAPSGLGTNTMATGSGAPMADNNEGADGVGNSSGNWHCDSTWMGDRVITTSTRTWALPTYNNHLYKQISSQSGASNDNHYFGYSTPWGYFDFNRFHCHFSPRDWQRLINNNWGFRPKRLSFKLFNIQVKEVTQNDGTTTIANNLTSTVQVFTDSEYQLPYVLGSAHQGCLPPFPADVFMVPQYGYLTLNNGSQAVGRSSFYCLEYFPSQMLRTGNNFTFSYTFEDVPFHSSYAHSQSLDRLMNPLIDQYLYYLSKTNAPSGTTTMSRLQFSQAGASDIRDQSRNWLPGPCYRQQRVSKTAADNNNSDYSWTGATKYHLNGRDSLVNPGPAMASHKDDEEKYFPQSGVLIFGKQGSNKTNVDIEKVMITDEEEIRTTNPVATEQYGSVSTNLQSGNTQAATSDVNTQGVLPGMVWQDRDVYLQGPIWAKIPHTDGHFHPSPLMGGFGLKHPPPQILIKNTPVPANPSTTFSAAKFASFITQYSTGQVSVEIEWELQKENSKRWNPEIQYTSNYNKSVNVDFTVDTNGVYSEPRPIGTRYLTRNL

SEQ ID NO: 2691 - protein, 735 aa, Artificial Sequence
  source: /note="Description of Artificial Sequence: Synthetic polypeptide"
MAADGYLPDWLEDTLSEGIRQWWKLKPGPPPPKPAERHKDDSRGLVLPGYKYLGPFNGLDKGEPVNEADAAALEHDKAYDRQLDSGDNPYLKYNHADAEFQERLKEDTSFGGNLGRAVFQAKKRVLEPLGLVEEPVKTAPGKKRPVEHSPVEPDSSSGTGKAGQQPARKRLNFGQTGDADSVPDPQPLGQPPAAPSGLGTNTMATGSGAPMADNNEGADGVGNSSGNWHCDSTWMGDRVITTSTRTWALPTYNNHLYKQISSQSGASNDNHYFGYSTPWGYFDFNRFHCHFSPRDWQRLINNNWGFRPKRLSFKLFNIQVKEVTQNDGTTTIANNLTSTVQVFTDSEYQLPYVLGSAHQGCLPPFPADVFMVPQYGYLTLNNGSQAVGRSSFYCLEYFPSQMLRTGNNFTFSYTFEDVPFHSSYAHSQSLDRLMNPLIDQYLYYLSKTNAPSGTTTMSRLQFSQAGASDIRDQSRNWLPGPCYRQQRVSKTAADNNNSDYSWTGATKYHLNGRDSLVNPGPAMASHKDDEEKYFPQSGVLIFGKQGSNKTNVDIEKVMITDEEEIRTTNPVATEQYGSVSTNLQSGNTQAATSDVNTQGVLPGMVWQDRDVYLQGPIWAKIPHTDGHFHPSPLMGGFGLKHPPPQILIKNTPVPANPSTTFSAAKFASFITQYSTGQVSVEIEWELQKENSKRWNPEIQYTSNYNKSVNVDFTVDTNGVYSEPRPIDTRYLTRNL

SEQ ID NO: 2692 - protein, 735 aa, Artificial Sequence
  source: /note="Description of Artificial Sequence: Synthetic polypeptide"
MAADGYLPDWLEDTLSEGIRQWWKLKPGPPPPKPAERHKDDSRGLVLPGYKYLGPFNGLDKGEPVNEADAAALEHDKAYDRQLDSGDNPYLKYNHADAEFQERLKEDTSFGGNLGRAVFQAKKRVLEPLGLVEEPVKTAPGKKRPVEHSPVEPDSSSGTGKAGQQPARKRLNFGQTGDTDSVPDPQPLGQPPAAPSGLGTNTMATGSGAPMADNNEGADGVGNSSGNWHCDSTWMGDRVITTSTRTWALPTYNNHLYKQISSQSGASNDNHYFGYSTPWGYFDFNRFHCHFSPRDWQRLINNNWGFRPKRLSFKLFNIQVKEVTQNDGTTTIANNLTSTVQVFTDSEYQLPYVLGSAHQGCLPPFPADVFMVPQYGYLTLNNGSQAVGRSSFYCLEYFPSQMLRTGNNFTFSYTFEDVPFHSSYAHSQSLDRLMNPLIDQYLYYLSKTNAPSGTTTMSRLQFSQAGASDIRDQSRNWLPGPCYRQQRVSKTAADNNNSDYSWTGATKYHLNGRDSLVNPGPAMASHKDDEEKYFPQSGVLIFGKQGSNKTNVDIEKVMITDEEEIRTTNPVATEQYGSVSTNLQSGNTQAATSDVNTQGVLPGMVWQDRDVYLQGPIWAKIPHTDGHFHPSPLMGGFGLKHPPPQILIKNTPVPANPSTTFSAAKFASFITQYSTGQVSVEIEWELQKENSKRWNPEIQYTSNYNKSVNVDFTVDTNGVYSEPRPIGTRYLTRNL

SEQ ID NO: 2693 - protein, 735 aa, Artificial Sequence
  source: /note="Description of Artificial Sequence: Synthetic polypeptide"
MAADGYLPDWLEDTLSEGIRQWWKLKPGPPPPKPAERHKDDSRGLVLPGYKYLGPFNGLDKGEPVNEADAAALEHDKAYDRQLDSGDNPYLKYNHADAEFQERLKEDTSFGGNLGRAVFQAKKRVLEPLGLVEEPVKTTPGKKRPVEHSPVEPDSSSGTGKAGQQPARKRLNFGQTGDADSVPDPQPLGQPPAAPSGLGTNTMATGSGAPMADNNEGADGVGNSSGNWHCDSTWMGDRVITTSTRTWALPTYNNHLYKQISSQSGASNDNHYFGYSTPWGYFDFNRFHCHFSPRDWQRLINNNWGFRPKRLSFKLFNIQVKEVTQNDGTTTIANNLTSTVQVFTDSEYQLPYVLGSAHQGCLPPFPADVFMVPQYGYLTLNNGSQAVGRSSFYCLEYFPSQMLRTGNNFTFSYTFEDVPFHSSYAHSQSLDRLMNPLIDQYLYYLSKTNAPSGTTTMSRLQFSQAGASDIRDQSRNWLPGPCYRQQRVSKTAADNNNSDYSWTGATKYHLNGRDSLVNPGPAMASHKDDEEKYFPQSGVLIFGKQGSNKTNVDIEKVMITDEEEIRTTNPVATEQYGSVSTNLQSGNTQAATSDVNTQGVLPGMVWQDRDVYLQGPIWAKIPHTDGHFHPSPLMGGFGLKHPPPQILIKNTPVPANPSTTFSAAKFASFITQYSTGQVSVEIEWELQKENSKRWNPEIQYTSNYNKSVNVDFTVDTNGVYSEPRPIGTRYLTRNL

SEQ ID NO: 2694 - protein, 735 aa, Artificial Sequence
  source: /note="Description of Artificial Sequence: Synthetic polypeptide"
MAADGYLPDWLEDTLSEGIRQWWKLKPGPPPPKPAERHKDDSRGLVLPGYKYLGPFNGLDKGEPVNEADAAALEHDKAYDRQLDSGDNPYLKYNHADAEFQERLKEDTSFGGNLGRAVFQAKKRVLEPLGLVEEPVKTAPGKKRPVEHSPVEPDSSSGTGKAGQQPARKRLNFGQTGDADSVPDPQPLGQSPAAPSGLGTNTMATGSGAPMADNNEGADGVGNSSGNWHCDSTWMGDRVITTSTRTWALPTYNNHLYKQISSQSGASNDNHYFGYSTPWGYFDFNRFHCHFSPRDWQRLINNNWGFRPKRLSFKLFNIQVKEVTQNDGTTTIANNLTSTVQVFTDSEYQLPYVLGSAHQGCLPPFPADVFMVPQYGYLTLNNGSQAVGRSSFYCLEYFPSQMLRTGNNFTFSYTFEDVPFHSSYAHSQSLDRLMNPLIDQYLYYLSKTNAPSGTTTMSRLQFSQAGASDIRDQSRNWLPGPCYRQQRVSKTAADNNNSDYSWTGATKYHLNGRDSLVNPGPAMASHKDDEEKYFPQSGVLIFGKQGSNKTNVDIEKVMITDEEEIRTTNPVATEQYGSVSTNLQSGNTQAATSDVNTQGVLPGMVWQDRDVYLQGPIWAKIPHTDGHFHPSPLMGGFGLKHPPPQILIKNTPVPANPSTTFSAAKFASFITQYSTGQVSVEIEWELQKENSKRWNPEIQYTSNYNKSVNVDFTVDTNGVYSEPRPIGTRYLTRNL

SEQ ID NO: 2695 - protein, 735 aa, Artificial Sequence
  source: /note="Description of Artificial Sequence: Synthetic polypeptide"
MAADGYLPDWLEDTLSEGIRQWWKLKPGPPPPKPAERHKDDSRGLVLPGYKYLGPFNGLDKGEPVNEADAAALEHDKAYDRQLDSGDNPYLKYNHADAEFQERLKEDTSFGGNLGRAVFQAKKRVLEPLGLVEEPVKTAPGKKRPVEHSPVEPDSSSGTGKAGQQPARKRLNFGQTGDADSVPDPQPLGQPPAAPSGLGTNTMATGSGAPMADNNEGADGVGNSSGNWHCDSTWMGDRVITTSTRTWALPTYNNHLYKQISSQSGASNDNHYFGYSTPWGYFDFNRFHCHFSPRDWQRLINNNWGFRPKRLSFKLFNIQVKEVTQNDGTTTIANNLTSTVQVFTDSEYQLPYVLGSAHQGCLPPFPADVFMVPQYGYLTLNNGSQAVGRSSFYCLEYFPSQMLRTGNNFTFSYTFEDVPFHSSYAHSQSLDRLMNPLIDQYLYYLSKTNAPSGTTTMSRLQFSQAGASDIRDQSRNWLPGPCYRQQRVSKTAADNNNSDYSWTGATKYHLNGRDSLVNPGPAMVSHKDDEEKYFPQSGVLIFGKQGSNKTNVDIEKVMITDEEEIRTTNPVATEQYGSVSTNLQSGNTQAATSDVNTQGVLPGMVWQDRDVYLQGPIWAKIPHTDGHFHPSPLMGGFGLKHPPPQILIKNTPVPANPSTTFSAAKFASFITQYSTGQVSVEIEWELQKENSKRWNPEIQYTSNYNKSVNVDFTVDTNGVYSEPRPIGTRYLTRNL

SEQ ID NO: 2696 - protein, 735 aa, Artificial Sequence
  source: /note="Description of Artificial Sequence: Synthetic polypeptide"
MAADGYLPDWLEDTLSEGIRQWWKLKPGPPPPKPAERHKDDSRGLVLPGYKYLGPFNGLDKGEPVNEADAAALEHDKAYDRQLDSGDNPYLKYNHADAEFQERLKEDTSFGGNLGRAVFQAKKRVLEPLGLVEEPVKTAPGKKRPVEHSPVEPDSSSGTGKAGQQPARKRLNFGQTGDADSVPDPQPLGQPPAAPSGLGTNTMATGSGAPMADNNEGADGVGNSSGNWHCDSTWMGDRVITTSTRTWALPTYNNHLYKQISSQSGASNDNHYFGYSTPWGYFDFNRFHCHFSPRDWQRLINNNWGFRPKRLSFKLFNIQVKEVTQNDGTTTIANNLTSTVQVFTDSEYQLPYVLGSAHQGCLPPFPADVFMVPQYGYLTLNNGSQAVGRSSFYCLEYFPSQMLRTGNNFTFSYTFEDVPFHSSYAHSQSLDRLMNPLIDQYLYYLSKTNAPSGTTTMSRLQFSQAGASDIRDQSRNWLPGPCYRQQRVSKTAADNNNSDYSWTGATKYHLNGRDSLVNPGPAMASHKDDEEKYFPQSGVLIFGKQGSNKTNVDIEKVMITDEEEIRTTNPVATEQYGSVSTNLQSGNTQAATSDVNTQGVLPGMVWQDRDVYLQGPIWAKIPHTDGHFHPSPLMGGFGLKHPPPQILIKNTPVPANPSTTFSAAKFASFITQYSMGQVSVEIEWELQKENSKRWNPEIQYTSNYNKSVNVDFTVDTNGVYSEPRPIGTRYLTRNL

SEQ ID NO: 2697 - protein, 735 aa, Artificial Sequence
  source: /note="Description of Artificial Sequence: Synthetic polypeptide"
MAADGYLPDWLEDTLSEGIRQWWKLKPGPPPPKPAERHKDDSRGLVLPGYKYLGPFNGLDKGEPVNEADAAALEHDKVYDRQLDSGDNPYLKYNHADAEFQERLKEDTSFGGNLGRAVFQAKKRVLEPLGLVEEPVKTAPGKKRPVEHSPVEPDSSSGTGKAGQQPARKRLNFGQTGDADSVPDPQPLGQPPAAPSGLGTNTMATGSGAPMADNNEGADGVGNSSGNWHCDSTWMGDRVITTSTRTWALPTYNNHLYKQISSQSGASNDNHYFGYSTPWGYFDFNRFHCHFSPRDWQRLINNNWGFRPKRLSFKLFNIQVKEVTQNDGTTTIANNLTSTVQVFTDSEYQLPYVLGSAHQGCLPPFPADVFMVPQYGYLTLNNGSQAVGRSSFYCLEYFPSQMLRTGNNFTFSYTFEDVPFHSSYAHSQSLDRLMNPLIDQYLYYLSKTNAPSGTTTMSRLQFSQAGASDIRDQSRNWLPGPCYRQQRVSKTAADNNNSDYSWTGATKYHLNGRDSLVNPGPAMASHKDDEEKYFPQSGVLIFGKQGSNKTNVDIEKVMITDEEEIRTTNPVATEQYGSVSTNLQSGNTQAATSDVNTQGVLPGMVWQDRDVYLQGPIWAKIPHTDGHFHPSPLMGGFGLKHPPPQILIKNTPVPANPSTTFSAAKFASFITQYSTGQVSVEIEWELQKENSKRWNPEIQYTSNYNKSVNVDFTVDTNGVYSEPRPIGTRYLTRNL

SEQ ID NO: 2698 - protein, 735 aa, Artificial Sequence
  source: /note="Description of Artificial Sequence: Synthetic polypeptide"
MAADGYLPDWLEDTLSEGIRQWWKLKPGPPPPKPAERHKDDSRGLVLPGYKYLGPFNGLDKGEPVNEADAAALEHDKAYDRQLDSGDNPYLKYNHADAEFQERLKEDTSFGGNLGRAVFQAKKRVLEPLGLVEEPVKTAPGKKRPVEHSPVEPDSSSGTGKAGQQPARKRLNFGQTGDADSVPDPQPLGQPPAAPSGLGTNTMATGSGAPMADNNEGADGVGNSSGNWHCDSTWMGDRVITTSTRTWALPTYNNHLYKQISSQSGASNDNHYFGYSTPWGYFDFNRFHCHFSPRDWQRLINNNWGFRPKRLSFKLFNIQVKEVTQNDGTTTIANNLTSTVQVFTDSEYQLPYVLGSAHQGCLPPFPADVFMVPQYGYLTLNNGSQAVGRSSFYCLEYFPSQMLRTGNNFTFSYTFEDVPFHSSYAHSQSLDRLMNPLIDQYLYYLSKTNAPSGTTTMSRLQFSQAGASDIRDQSRNWLPGPCYRQQRVSKTAADNNNSDYSWTGATKYHLNGRDSLVNPGPAMASHKDDEEKYFPQSGVLIFGKQGSNKTNVDIEKVMITDEEEIRTTNPVATEQYGSVSTNLQSGNTQAATSDVNTQGVLPGMVWQDRDVYLQGPIWAKIPHTDGHFHPSPLMGGFGLKHPPPQILIKNTPVPANPSTTFSAAKFASFITQYSTGQVSVEIEWELQKENNKRWNPEIQYTSNYNKSVNVDFTVDTNGVYSEPRPIGTRYLTRNL

SEQ ID NO: 2699 - protein, 735 aa, Artificial Sequence
  source: /note="Description of Artificial Sequence: Synthetic polypeptide"
MAADGYLPDWLEDTLSEGIRQWWKLKPGPPPPKPAERHKDDSRGLVLPGYKYLGPFNGLDKGEPVNEADAAALEHDKAYDRQLDSGDNPYLKYNHADAEFQERLKEDTSFGGNLGRAVFQAKKRVLEPLGLVEEPVKTAPGKKRPVEHSPVEPDSSSGTGKAGQQPTRKRLNFGQTGDADSVPDPQPLGQPPAAPSGLGTNTMATGSGAPMADNNEGADGVGNSSGNWHCDSTWMGDRVITTSTRTWALPTYNNHLYKQISSQSGASNDNHYFGYSTPWGYFDFNRFHCHFSPRDWQRLINNNWGFRPKRLSFKLFNIQVKEVTQNDGTTTIANNLTSTVQVFTDSEYQLPYVLGSAHQGCLPPFPADVFMVPQYGYLTLNNGSQAVGRSSFYCLEYFPSQMLRTGNNFTFSYTFEDVPFHSSYAHSQSLDRLMNPLIDQYLYYLSKTNAPSGTTTMSRLQFSQAGASDIRDQSRNWLPGPCYRQQRVSKTAADNNNSDYSWTGATKYHLNGRDSLVNPGPAMASHKDDEEKYFPQSGVLIFGKQGSNKTNVDIEKVMITDEEEIRTTNPVATEQYGSVSTNLQSGNTQAATSDVNTQGVLPGMVWQDRDVYLQGPIWAKIPHTDGHFHPSPLMGGFGLKHPPPQILIKNTPVPANPSTTFSAAKFASFITQYSTGQVSVEIEWELQKENSKRWNPEIQYTSNYNKSVNVDFTVDTNGVYSEPRPIGTRYLTRNL

SEQ ID NO: 2700 - protein, 735 aa, Artificial Sequence
  source: /note="Description of Artificial Sequence: Synthetic polypeptide"
MAADGYLPDWLEDTLSEGIRQWWKLKPGPPPPKPAERHKDDSRGLVLPGYKYLGPFNGLDKGEPVNEADAAALEHDKAYDRQLDSGDNPYLKYNHADAEFQERLKEDTSFGGNLGRAVFQAKKRVLEPLGLVEEPVKTAPGKKRPVEHSPVEPDSSSGTGKAGQQPARKRLNFGQTGDADSVPDPQPLGQPPAAPSGLGTNTMATGSGAPMADNNEGADGVGNSSGNWHCDSTWMGDRVITTSTRTWALPTYNNHLYKQISSQSGASNDNHYFGYSTPWGYFDFNRFHCHFSPRDWQRLINNNWGFRPKRLSFKLFNIQVKEVTQNDGTTTIANNLTSTVQVFTDSEYQLPYVLGSAHQGCLPPFPADVFMVPQYGYLTLNNGSQAVGRSSFYCLEYFPSQMLRTGNNFTFSYTFEDVPFHSSYAHSQSLDRLMNPLIDQYLYYLSKTNAPSGTTTMSRLQFSQAGASDIRDQSRNWLPGPCYRQQRVSKTAADNNNSDYSWTGATKYHLNGRDSLVNPGPAMASHKDDEEKYFPQSGVLIFGKQGSNKTNVDIERVMITDEEEIRTTNPVATEQYGSVSTNLQSGNTQAATSDVNTQGVLPGMVWQDRDVYLQGPIWAKIPHTDGHFHPSPLMGGFGLKHPPPQILIKNTPVPANPSTTFSAAKFASFITQYSTGQVSVEIEWELQKENSKRWNPEIQYTSNYNKSVNVDFTVDTNGVYSEPRPIGTRYLTRNL

SEQ ID NO: 2701 - protein, 735 aa, Artificial Sequence
  source: /note="Description of Artificial Sequence: Synthetic polypeptide"
MAADGYLPDWLEDTLSEGIRQWWKLKPGPPPPKPAERHKDDSRGLVLPGYKYLGPFNGLDKGEPVNEADAAALEHDKAYDRQLDSGDNPYLKYNHADAEFQERLKEDTSFGGNLGRAVFQAKKRVLEPLGLVEEPVKTAPGKKRPVEHSPVEPDSSSGTGKAGQQPVRKRLNFGQTGDADSVPDPQPLGQPPAAPSGLGTNTMATGSGAPMADNNEGADGVGNSSGNWHCDSTWMGDRVITTSTRTWALPTYNNHLYKQISSQSGASNDNHYFGYSTPWGYFDFNRFHCHFSPRDWQRLINNNWGFRPKRLSFKLFNIQVKEVTQNDGTTTIANNLTSTVQVFTDSEYQLPYVLGSAHQGCLPPFPADVFMVPQYGYLTLNNGSQAVGRSSFYCLEYFPSQMLRTGNNFTFSYTFEDVPFHSSYAHSQSLDRLMNPLIDQYLYYLSKTNAPSGTTTMSRLQFSQAGASDIRDQSRNWLPGPCYRQQRVSKTAADNNNSDYSWTGATKYHLNGRDSLVNPGPAMASHKDDEEKYFPQSGVLIFGKQGSNKTNVDIEKVMITDEEEIRTTNPVATEQYGSVSTNLQSGNTQAATSDVNTQGVLPGMVWQDRDVYLQGPIWAKIPHTDGHFHPSPLMGGFGLKHPPPQILIKNTPVPANPSTTFSAAKFASFITQYSTGQVSVEIEWELQKENSKRWNPEIQYTSNYNKSVNVDFTVDTNGVYSEPRPIGTRYLTRNL

SEQ ID NO: 2702 - protein, 735 aa, Artificial Sequence
  source: /note="Description of Artificial Sequence: Synthetic polypeptide"
MAADGYLPDWLEDTLSEGIRQWWKLKPGPPPPKPAERHKDDSRGLVLPGYKYLGPFNGLDKGEPVNEADAAALEHDKAYDRQLDSGDNPYLKYNHADAEFQERLKEDTSFGGNLGRAVFQAKKRVLEPLGLVEEPVKTAPGKKRPVEHSPVEPDSSSGTGKAGQQPARKRLNFGQTGDADSVPDPQPLGQPPAAPSGLGTNTMATGSGAPMADNNEGADGVGNSSGNWHCDSTWMGDRVITTSTRTWALPTYNNHLYKQISSQSGASNDNHYFGYSTPWGYFDFNRFHCHFSPRDWQRLINNNWGFRPKRLSFKLFNIQVKEVTQNDGTTTIANNLTSTVQVFTDSEYQLPYVLGSAHQGCLPPFPADVFMVPQYGYPTLNNGSQAVGRSSFYCLEYFPSQMLRTGNNFTFSYTFEDVPFHSSYAHSQSLDRLMNPLIDQYLYYLSKTNAPSGTTTMSRLQFSQAGASDIRDQSRNWLPGPCYRQQRVSKTAADNNNSDYSWTGATKYHLNGRDSLVNPGPAMASHKDDEEKYFPQSGVLIFGKQGSNKTNVDIEKVMITDEEEIRTTNPVATEQYGSVSTNLQSGNTQAATSDVNTQGVLPGMVWQDRDVYLQGPIWAKIPHTDGHFHPSPLMGGFGLKHPPPQILIKNTPVPANPSTTFSAAKFASFITQYSTGQVSVEIEWELQKENSKRWNPEIQYTSNYNKSVNVDFTVDTNGVYSEPRPIGTRYLTRNL

SEQ ID NO: 2703 - protein, 735 aa, Artificial Sequence
  source: /note="Description of Artificial Sequence: Synthetic polypeptide"
MAADGYLPDWLEDTLSEGIRQWWKLKPGPPPPKPAERHKDDSRGLVLPGYKYLGPFNGLDKGEPVNEADAAALEHDKAYDRQLDSGDNPYLKYNHADAEFQERLKEDTSFGGNLGRAVFQAKKRVLEPLGLVEEPVKTAPGKKRPVEHSPVEPDSSSGTGKAGQQPARKRLNFGQTGDADSVPDPQSLGQPPAAPSGLGTNTMATGSGAPMADNNEGADGVGNSSGNWHCDSTWMGDRVITTSTRTWALPTYNNHLYKQISSQSGASNDNHYFGYSTPWGYFDFNRFHCHFSPRDWQRLINNNWGFRPKRLSFKLFNIQVKEVTQNDGTTTIANNLTSTVQVFTDSEYQLPYVLGSAHQGCLPPFPADVFMVPQYGYLTLNNGSQAVGRSSFYCLEYFPSQMLRTGNNFTFSYTFEDVPFHSSYAHSQSLDRLMNPLIDQYLYYLSKTNAPSGTTTMSRLQFSQAGASDIRDQSRNWLPGPCYRQQRVSKTAADNNNSDYSWTGATKYHLNGRDSLVNPGPAMASHKDDEEKYFPQSGVLIFGKQGSNKTNVDIEKVMITDEEEIRTTNPVATEQYGSVSTNLQSGNTQAATSDVNTQGVLPGMVWQDRDVYLQGPIWAKIPHTDGHFHPSPLMGGFGLKHPPPQILIKNTPVPANPSTTFSAAKFASFITQYSTGQVSVEIEWELQKENSKRWNPEIQYTSNYNKSVNVDFTVDTNGVYSEPRPIGTRYLTRNL

SEQ ID NO: 2704 - protein, 735 aa, Artificial Sequence
  source: /note="Description of Artificial Sequence: Synthetic polypeptide"
MAADGYLPDWLEDTLSEGIRQWWKLKPGPPPPKPAERHKDDSRGLVLPGYKYLGPFNGLDKGEPVNEADAAALEHDKAYDRQLDSGDNPYLKYNHADAEFQERLKEDTSFGGNLGRAVFQAKKRVLEPLGLVEEPVKTAPGKKRPVEHSPVEPDSSSGTGKAGQQPARKRLNFGQTGDADSVPDPQPLGQPPAAPSGLGTNTMATGSGAPMADNNEGADGVGNSSGNWHCDSTWMGDRVITTSTRTWALPTYNNHLYKQISSQSGASNDNHYFGYSTPWGYFDFNRFHCHFSPRDWQRLINNNWGFRPKRLSFKLFNIQVKEVTQNGGTTTIANNLTSTVQVFTDSEYQLPYVLGSAHQGCLPPFPADVFMVPQYGYLTLNNGSQAVGRSSFYCLEYFPSQMLRTGNNFTFSYTFEDVPFHSSYAHSQSLDRLMNPLIDQYLYYLSKTNAPSGTTTMSRLQFSQAGASDIRDQSRNWLPGPCYRQQRVSKTAADNNNSDYSWTGATKYHLNGRDSLVNPGPAMASHKDDEEKYFPQSGVLIFGKQGSNKTNVDIEKVMITDEEEIRTTNPVATEQYGSVSTNLQSGNTQAATSDVNTQGVLPGMVWQDRDVYLQGPIWAKIPHTDGHFHPSPLMGGFGLKHPPPQILIKNTPVPANPSTTFSAAKFASFITQYSTGQVSVEIEWELQKENSKRWNPEIQYTSNYNKSVNVDFTVDTNGVYSEPRPIGTRYLTRNL

SEQ ID NO: 2705 - protein, 735 aa, Artificial Sequence
  source: /note="Description of Artificial Sequence: Synthetic polypeptide"
MAADGYLPDWLEDTLSEGIRQWWKLKPGPPPPKPAERHKDDSRGLVLPGYKYLGPFNGLDKGEPVNEADAAALEHDKAYDRQLDSGDNPYLKYNHADAEFQERLKEDTSFGGNLGRAVFQAKKRVLEPLGLVEEPVKTAPGKKRPVEHSPVEPDSSSGTGKAGQQPARKRLNFGQTGDADSVPDPQPLGQPPAAPSGLGTNTMATGSGAPMADNNEGADGVGNSSGNWHCDSTWMGDRVITTSTRTWALPTYNNHLYKQISSQSGASNDNHYFGYSTPWGYFDFNRFHCHFSPRDWQRLINNNWGFRPKRLSFKLFNIQVKEVTQNDGTTTIANNLTSTVQVFTDSEYQLPYVLGSAHQGCLPPFPADVFMVPQYGYLTLNNGSQAVGRSSFYCLEYFPSQMLRTGNNFTFSYTFEDVPFHSSYAHSQSLDRLMNPLIDQYLYYLSKTNAPSGTTTMSGLQFSQAGASDIRDQSRNWLPGPCYRQQRVSKTAADNNNSDYSWTGATKYHLNGRDSLVNPGPAMASHKDDEEKYFPQSGVLIFGKQGSNKTNVDIEKVMITDEEEIRTTNPVATEQYGSVSTNLQSGNTQAATSDVNTQGVLPGMVWQDRDVYLQGPIWAKIPHTDGHFHPSPLMGGFGLKHPPPQILIKNTPVPVNPSTTFSAAKFASFITQYSTGQVSVEIEWELQKENSKRWNPEIQYTSNYNKSVNVDFTVDTNGVYSEPRPIGTRYLTRNL

SEQ ID NO: 2706 - protein, 735 aa, Artificial Sequence
  source: /note="Description of Artificial Sequence: Synthetic polypeptide"
MAADGYLPDWLEDTLSEGIRQWWKLKPGPPPPKPAERHKDDSRGLVLPGYKYLGPFNGLDKGEPVNEADAAALEHDKAYDRQLDSGDNPYLKYNHADAEFQERLKEDTSFGGNLGRAVFQAKKRVLEPLGLVEEPVKTAPGKKRPVEHSPVEPDSSSGTGKAGQQPARKRLNFGQTGDADSVPDPQPLGQPPAAPSGLGTNTMATGSGAPMADNNEGADGVGNSSGNWHCDSTWMGDRVITTSTRTWALPTYNNHLYKQISSQSGASNDNHYFGYSTPWGYFDFNRFHCHFSPRDWQRLINNNWGFRPKRLSFKLFNIQVKEVTQNDGTTTIANNLTSTVQVFTDSEYQLPYVLGSAHQGCLPPFPADVFMVPQYGYLTLNNGSQAVGRSSFYCLEYFPSQMLRTGNNFTFSYTFEDVPFHSSYAHSQSLDRLMNPLIDQYLYYLSKTNAPSGTTTMSRLQFSQAGASDIRDQSRNWLPGPCYRQQRVSKTAADNNNSDYSWTGATKYHLNGRDSLVNPGPTMASHKDDEEKYFPQSGVLIFGKQGSNKTNVDIEKVMITDEEEIRTTNPVATEQYGSVSTNLQSGNTQAATSDVNTQGVLPGMVWQDRDVYLQGPIWAKIPHTDGHFHPSPLMGGFGLKHPPPQILIKNTPVPANPSTTFSAAKFASFITQYSTGQVSVEIEWELQKENSKRWNPEIQYTSNYNKSVNVDFTVDTNGVYSEPRPIGTRYLTRNL

SEQ ID NO: 2707 - protein, 735 aa, Artificial Sequence
  source: /note="Description of Artificial Sequence: Synthetic polypeptide"
MAADGYLPDWLEDTLSEGIRQWWKLKPGPPPPKPAERHKDDSRGLVLPGYKYLGPLNGLDKGEPVNEADAAALEHDKAYDRQLDSGDNPYLKYNHADAEFQERLKEDTSFGGNLGRAVFQAKKRVLEPLGLVEEPVKTAPGKKRPVEHSPVEPDSSSGTGKAGQQPARKRLNFGQTGDADSVPDPQPLGQPPAAPSGLGTNTMATGSGAPMADNNEGADGVGNSSGNWHCDSTWMGDRVITTSTRTWALPTYNNHLYKQISSQSGASNDNHYFGYSTPWGYFDFNRFHCHFSPRDWQRLINNNWGFRPKRLSFKLFNIQVKEVTQNDGTTTIANNLTSTVQVFTDSEYQLPYVLGSAHQGCLPPFPADVFMVPQYGYLTLNNGSQAVGRSSFYCLEYFPSQMLRTGNNFTFSYTFEDVPFHSSYAHSQSLDRLMNPLIDQYLYYLSKTNAPSGTTTMSRLQFSQAGASDIRDQSRNWLPGPCYRQQRVSKTAADNNNSDYSWTGATKYHLNGRDSLVNPGPAMASHKDDEEKYFPQSGVLIFGKQGSNKTNVDIEKVMITDEEEIRTTNPVATEQYGSVSTNLQSGNTQAATSDVNTQGVLPGMVWQDRDVYLQGPIWAKIPHTDGHFHPSPLMGGFGLKHPPPQILIKNTPVPANPSTTFSAAKFASFITQYSTGQVSVEIEWELQKENSKRWNPEIQYTSNYNKSVNVDFTVDTNGVYSEPRPIGTRYLTRNL

SEQ ID NO: 2708 - protein, 735 aa, Artificial Sequence
  source: /note="Description of Artificial Sequence: Synthetic polypeptide"
MAADGYLPDWLEDTLSEGIRQWWKLKPGPPPPKPAERHKDDSRGLVLPGYKYLGPFNGLDKGEPVNEADAAALEHDKAYDRQLDSGDNPYLKYNHADAEFQERLKEDTSFGGNLGRAVFQAKKRVLEPLGLVEEPVKTAPGKKRPVEHSPVEPDSSSGTGKAGQQPARKRLNFGQTGDADSVPDPQPLGQPPAAPSGLGTNTMATGSGAPMADNNEGADGVGNSSGNWHCDSTWMGDRVITTSTRTWALPTYNNHLYKQISSQSGASNDNHYFGYSTPWGYFDFNRFHCHFSPRDWQRLINNNWGFRPKRLSFKLFNIQVKEVTQNDGTTTIANNLTSTVQVFTDSEYQLPYVLGSAHQGCLPPFPADVFMVPQYGYLTLNNGSQAVGRSSFYCLEYFPSQMLRTGNNFTFSYTFEDVPFHSSYAHSQSLDRLMNPLIDQYLYYLSKTNAPSGTTTMSRLQFSQAGASDIRDQSRNWLPGPCYRQQRVSKTAADNNNSDYSWTGATKYHLNGRDSLVNPGPAMTSHKDDEEKYFPQSGVLIFGKQGSNKTNVDIEKVMITDEEEIRTTNPVATEQYGSVSTNLQSGNTQAATSDVNTQGVLPGMVWQDRDVYLQGPIWAKIPHTDGHFHPSPLMGGFGLKHPPPQILIKNTPVPANPSTTFSAAKFASFITQYSTGQVSVEIEWELQKENSKRWNPEIQYTSNYNKSVNVDFTVDTNGVYSEPRPIGTRYLTRNL

SEQ ID NO: 2709 - protein, 735 aa, Artificial Sequence
  source: /note="Description of Artificial Sequence: Synthetic polypeptide"
MAADGYLPDWLEDTLSEGIRQWWKLKPGPPPPKPAERHKDDSRGLVLPGYKYLGPFNGLDKGEPVNEADAAALEHDKAYDRQLDSGDNPYLKYNHADAEFQERLKEDTSFGGNLGRAVFQAKKRVLEPLGLVEEPVKTAPGKKRPVEHSPVEPDSSSGTGKAGQQPARKRLNFGQTGDADSVPDPQPLGQPPAAPSGLGTNTMATGSGAPMADNNEGADGVGNSSGNWHCDSTWMGDRVITTSTRTWALPTYNNHLYKQISSQSGASNDNHYFGYSTPWGYFDFNRFHCHFSPRDWQRLINNNWGFRPKRLSFKLFNIQVKEVTQNDGTTTIANNLTSTVQVFTDSEYQLPYVLGSAHQGCLPPFPADVFMVPQYGYLTLNNGSQAVGRSSFYCLEYFPSQMLRTGNNFTFSYTFEDVPFHSSYAHSQSLDRLMNPLIDQYLYYLSKTNAPSGTTTMSRLQFSQAGASDIRDQSRNWLPGPCYRQQRVSKTAADNNNSDYSWTGATKYHLNGRDSLVNPGPAMASHKDDEEKYFPQSGVLIFGKQGSNKTNVDIEKVMITDEEEIRTTNPVATEQYGSVSTNLQSGNTQAATSDVNTQGVLPGMVWQDRDVYLQGPIWTKIPHTDGHFHPSPLMGGFGLKHPPPQILIKNTPVPANPSTTFSAAKFASFITQYSTGQVSVEIEWELQKENSKRWNPEIQYTSNYNKSVNVDFTVDTNGVYSEPRPIGTRYLTRNL

SEQ ID NO: 2710 - protein, 735 aa, Artificial Sequence
  source: /note="Description of Artificial Sequence: Synthetic polypeptide"
MAADGYLPDWLEDTLSEGIRQWWKLKPGPPPPKPAERHKDDSRGLVLPGYKYLGPFNGLDKGEPVNEADAAALEHDKAYDRQLDSGDNPYLKYNHADAEFQERLKEDTSFGGNLGRAVFQAKKRVLEPLGLVEEPVKTAPGKKRPVEHSPVEPDSSSGTGKAGQQPARKRLNFGQTGDADSVPDPQPLGQPPVAPSGLGTNTMATGSGAPMADNNEGADGVGNSSGNWHCDSTWMGDRVITTSTRTWALPTYNNHLYKQISSQSGASNDNHYFGYSTPWGYFDFNRFHCHFSPRDWQRLINNNWGFRPKRLSFKLFNIQVKEVTQNDGTTTIANNLTSTVQVFTDSEYQLPYVLGSAHQGCLPPFPADVFMVPQYGYLTLNNGSQAVGRSSFYCLEYFPSQMLRTGNNFTFSYTFEDVPFHSSYAHSQSLDRLMNPLIDQYLYYLSKTNAPSGTTTMSRLQFSQAGASDIRDQSRNWLPGPCYRQQRVSKTAADNNNSDYSWTGATKYHLNGRDSLVNPGPAMASHKDDEEKYFPQSGVLIFGKQGSNKTNVDIEKVMITDEEEIRTTNPVATEQYGSVSTNLQSGNTQAATSDVNTQGVLPGMVWQDRDVYLQGPIWAKIPHTDGHFHPSPLMGGFGLKHPPPQILIKNTPVPANPSTTFSAAKFASFITQYSTGQVSVEIEWELQKENSKRWNPEIQYTSNYNKSVNVDFTVDTNGVYSEPRPIGTRYLTRNL

SEQ ID NO: 2711 - protein, 735 aa, Artificial Sequence
  source: /note="Description of Artificial Sequence: Synthetic polypeptide"
MAADGYLPDWLEDTLSEGIRQWWKLKPGPPPPKPAERHKDDSRGLVLPGYKYLGPFNGLDKGEPVNEADAAALEHDKAYDRQLDSGDNPYLKYNHADAEFQERLKEDTSFGGNLGRAVFQAKKRVLEPLGLVEEPVKTAPGKKRPVEHSPVEPDSSSGTGKAGQQPARKRLNFGQTGDADSVPDPQPLGQPPAAPSGLGTNTMATGSGAPMADNNEGADGVGNSSGNWHCDSTWMGDRVITTSTRTWALPTYNNHLYKQISSQSGASNDNHYFGYSTPWGYFDFNRFHCHFSPRDWQRLINNNWGFRPKRLSFKLFNIQVKEVTQNDGTTTIANNLTSTVQVFTDSEYQLPYVLGSAHQGCLPPFPADVFMVPQYGYLTLNNGSQAVGRSSFYCLEYFPSQMLRTGNNFTFSYTFEDVPFHSSYAHSQSLDRLMNPLIDQYLYYLSKTNAPSGTTTMSRLQFSQAGASDIRDQSRNWLPGPCYRQQRVSKTAADNNNSDYSWTGATKYHLNGRDSLVNPGPAMASHKDDEEKYFPQSGVLIFGKQGSNKTNVDIEKVMITDEEEIRTTNPVATEQYGSVSTNLQSGNTQAATSDVNTQGVLPGMVWQDRDVYLQGPIWAKIPHTDGHFHPSPLMGGFGLKHPPPQILIKNTPVPANPSTTFSAAKFASFITQYSTGQVSVEIEWEPQKENSKRWNPEIQYTSNYNKSVNVDFTVDTNGVYSEPRPIGTRYLTRNL

SEQ ID NO: 2712 - protein, 735 aa, Artificial Sequence
  source: /note="Description of Artificial Sequence: Synthetic polypeptide"
MAADGYLPDWLEDTLSEGIRQWWKLKPGPPPPKPAERHKDDSRGLVLPGYKYLGPFNGLDKGEPVNEADAAALEHDKAYDRQLDSGDNPYLKYNHADAEFQERLKEDTSFGGNLGRAVFQAKKRVLEPLGLVEEPVKTAPGKKRPVEHSPVEPDSSSGTGKAGQQPARKRLNFGQTGDADSVPDPQPLGQPPAAPSGLGTNTMATGSGAPMADNNEGADGVGNSSGNWHCDSTWMGDRVITTSTRTWALPTYNNHLYKQISSQSGASNDNHYFGYSTPWGYFDFNRFHCHFSPRDWQRLINNNWGFRPKRLSFKLFNIQVKEVTQNDGTTTIANNLTSTVQVFTDSEYQLPYVLGSAHQGCLPPFPADVFMVPQYGYLTLNNGSQAVGRSSFYCLEYFPSQMLRTGNNFTFSYTFEDVPFHSSYAHSQSLDRLMNPLIDQYLYYLSKTNAPSGTTTMSRLQFSQAGASDIRDQSRNWLPGPCYRQQRVSKTVADNNNSDYSWTGATKYHLNGRDSLVNPGPAMASHKDDEEKYFPQSGVLIFGKQGSNKTNVDIEKVMITDEEEIRTTNPVATEQYGSVSTNLQSGNTQAATSDVNTQGVLPGMVWQDRDVYLQGPIWAKIPHTDGHFHPSPLMGGFGLKHPPPQILIKNTPVPANPSTTFSAAKFASFITQYSTGQVSVEIEWELQKENSKRWNPEIQYTSNYNKSVNVDFTVDTNGVYSEPRPIGTRYLTRNL

SEQ ID NO: 2713 - protein, 735 aa, Artificial Sequence
  source: /note="Description of Artificial Sequence: Synthetic polypeptide"
MAADGYLPDWLEDTLSEGIRQWWKLKPGPPPPKPAERHKDDSRGLVLPGYKYLGPFNGLDKGEPVNEADAAALEHDKAYDRQLDSGDNPYLKYNHADAEFQERLKEDTSFGGNLGRAVFQAKKRVLEPLGLVEEPVKTAPGKKRPVEHSPVEPDSSSGTGKAGQQPARKRLNFGQTGDADSVPDPQPLGQPPAAPSGLGTNTMATGSGAPMADNNEGADGVGNSSGNWHCDSTWMGDRVITTSTRTWALPTYNNHLYKQISSQSGASNDNHYFGYSTPWGYFDFNRFHCHFSPRDWQRLINNNWGFRPKRLSFKLFNIQVKEVTQNDGTTTIANNLTSTVQVFTDSEYQLPYVLGSAHQGCLPPFPADVFMVPQYGYLTLNNGSQAVGRSSFYCLEYFPSQMLRTGNNFTFSYTFEDVPFHSSYAHSQSLDRLMNPLIDQYPYYLSKTNAPSGTTTMSRLQFSQAGASDIRDQSRNWLPGPCYRQQRVSKTAADNNNSDYSWTGATKYHLNGRDSLVNPGPAMASHKDDEEKYFPQSGVLIFGKQGSNKTNVDIEKVMITDEEEIRTTNPVATEQYGSVSTNLQSGNTQAATSDVNTQGVLPGMVWQDRDVYLQGPIWAKIPHTDGHFHPSPLMGGFGLKHPPPQILIKNTPVPANPSTTFSAAKFASFITQYSTGQVSVEIEWELQKENSKRWNPEIQYTSNYNKSVNVDFTVDTNGVYSEPRPIGTRYLTRNL

SEQ ID NO: 2714 - protein, 735 aa, Artificial Sequence
  source: /note="Description of Artificial Sequence: Synthetic polypeptide"
MAADGYLPDWLEDTLSEGIRQWWKLKPGPPPPKPAERHKDDSRGLVLPGYKYLGPFNGLDKGEPVNEADAAALEHDKAYDRQLDSGDNPYLKYNHTDAEFQERLKEDTSFGGNLGRAVFQAKKRVLEPLGLVEEPVKTAPGKKRPVEHSPVEPDSSSGTGKAGQQPARKRLNFGQTGDADSVPDPQPLGQPPAAPSGLGTNTMATGSGAPMADNNEGADGVGNSSGNWHCDSTWMGDRVITTSTRTWALPTYNNHLYKQISSQSGASNDNHYFGYSTPWGYFDFNRFHCHFSPRDWQRLINNNWGFRPKRLSFKLFNIQVKEVTQNDGTTTIANNLTSTVQVFTDSEYQLPYVLGSAHQGCLPPFPADVFMVPQYGYLTLNNGSQAVGRSSFYCLEYFPSQMLRTGNNFTFSYTFEDVPFHSSYAHSQSLDRLMNPLIDQYLYYLSKTNAPSGTTTMSRLQFSQAGASDIRDQSRNWLPGPCYRQQRVSKTAADNNNSDYSWTGATKYHLNGRDSLVNPGPAMASHKDDEEKYFPQSGVLIFGKQGSNKTNVDIEKVMITDEEEIRTTNPVATEQYGSVSTNLQSGNTQAATSDVNTQGVLPGMVWQDRDVYLQGPIWAKIPHTDGHFHPSPLMGGFGLKHPPPQILIKNTPVPANPSTTFSAAKFASFITQYSTGQVSVEIEWELQKENSKRWNPEIQYTSNYNKSVNVDFTVDTNGVYSEPRPIGTRYLTRNL

SEQ ID NO: 2715 - protein, 735 aa, Artificial Sequence
  source: /note="Description of Artificial Sequence: Synthetic polypeptide"
MAADGYLPDWLEDTLSEGIRQWWKLKPGPPPPKPAERHKDDSRGLVLPGYKYLGPFNGLDKGGPVNEADAAALEHDKAYDRQLDSGDNPYLKYNHADAEFQERLKEDTSFGGNLGRAVFQAKKRVLEPLGLVEEPVKTAPGKKRPVEHSPVEPDSSSGTGKAGQQPARKRLNFGQTGDADSVPDPQPLGQPPAAPSGLGTNTMATGSGAPMADNNEGADGVGNSSGNWHCDSTWMGDRVITTSTRTWALPTYNNHLYKQISSQSGASNDNHYFGYSTPWGYFDFNRFHCHFSPRDWQRLINNNWGFRPKRLSFKLFNIQVKEVTQNDGTTTIANNLTSTVQVFTDSEYQLPYVLGSAHQGCLPPFPADVFMVPQYGYLTLNNGSQAVGRSSFYCLEYFPSQMLRTGNNFTFSYTFEDVPFHSSYAHSQSLDRLMNPLIDQYLYYLSKTNAPSGTTTMSRLQFSQAGASDIRDQSRNWLPGPCYRQQRVSKTAADNNNSDYSWTGATKYHLNGRDSLVNPGPAMASHKDDEEKYFPQSGVLIFGKQGSNKTNVDIEKVMITDEEEIRTTNPVATEQYGSVSTNLQSGNTQAATSDVNTQGVLPGMVWQDRDVYLQGPIWAKIPHTDGHFHPSPLMGGFGLKHPPPQILIKNTPVPANPSTTFSAAKFASFITQYSTGQVSVEIEWELQKENSKRWNPEIQYTSNYNKSVNVDFTVDTNGVYSEPRPIGTRYLTRNL

SEQ ID NO: 2716 - protein, 735 aa, Artificial Sequence
  source: /note="Description of Artificial Sequence: Synthetic polypeptide"
MAADGYLPDWLEDTLSEGIRQWWKLKPGPPPPKPAERHKDDSRGLVLPGYKYLGPFNGLDKGEPVNEADAAALEHDKAYDRQLDSGDNPYLKYNHADAEFQERLKEDTSFGGNLGRAVFQAKKRVLEPLGLVEEPVKTAPGKKRPVEHSPVEPDSSSGTGKAGQQPARKRLNFGQTGDADSVPDPQPLGQPPAAPSGLGTNTMATGSGAPMADNNEGADGVGNSSGNWHCDSTWMGDRVITTSTRTWTLPTYNNHLYKQISSQSGASNDNHYFGYSTPWGYFDFNRFHCHFSPRDWQRLINNNWGFRPKRLSFKLFNIQVKEVTQNDGTTTIANNLTSTVQVFTDSEYQLPYVLGSAHQGCLPPFPADVFMVPQYGYLTLNNGSQAVGRSSFYCLEYFPSQMLRTGNNFTFSYTFEDVPFHSSYAHSQSLDRLMNPLIDQYLYYLSKTNAPSGTTTMSRLQFSQAGASDIRDQSRNWLPGPCYRQQRVSKTAADNNNSDYSWTGATKYHLNGRDSLVNPGPAMASHKDDEEKYFPQSGVLIFGKQGSNKTNVDIEKVMITDEEEIRTTNPVATEQYGSVSTNLQSGNTQAATSDVNTQGVLPGMVWQDRDVYLQGPIWAKIPHTDGHFHPSPLMGGFGLKHPPPQILIKNTPVPANPSTTFSAAKFASFITQYSTGQVSVEIEWELQKENSKRWNPEIQYTSNYNKSVNVDFTVDTNGVYSEPRPIGTRYLTRNL

SEQ ID NO: 2717 - protein, 735 aa, Artificial Sequence
  source: /note="Description of Artificial Sequence: Synthetic polypeptide"
MAADGYLPDWLEDTLSEGIRQWWKLKPGPPPPKPAERHKDDSRGLVLPGYKYLGPFNGLDKGEPVNEADAAVLEHDKAYDRQLDSGDNPYLKYNHADAEFQERLKEDTSFGGNLGRAVFQAKKRVLEPLGLVEEPVKTAPGKKRPVEHSPVEPDSSSGTGKAGQQPARKRLNFGQTGDADSVPDPQPLGQPPAAPSGLGTNTMATGSGAPMADNNEGADGVGNSSGNWHCDSTWMGDRVITTSTRTWALPTYNNHLYKQISSQSGASNDNHYFGYSTPWGYFDFNRFHCHFSPRDWQRLINNNWGFRPKRLSFKLFNIQVKEVTQNDGTTTIANNLTSTVQVFTDSEYQLPYVLGSAHQGCLPPFPADVFMVPQYGYLTLNNGSQAVGRSSFYCLEYFPSQMLRTGNNFTFSYTFEDVPFHSSYAHSQSLDRLMNPLIDQYLYYLSKTNAPSGTTTMSRLQFSQAGASDIRDQSRNWLPGPCYRQQRVSKTAADNNNSDYSWTGATKYHLNGRDSLVNPGPAMASHKDDEEKYFPQSGVLIFGKQGSNKTNVDIEKVMITDEEEIRTTNPVATEQYGSVSTNLQSGNTQAATSDVNTQGVLPGMVWQDRDVYLQGPIWAKIPHTDGHFHPSPLMGGFGLKHPPPQILIKNTPVPANPSTTFSAAKFASFITQYSTGQVSVEIEWELQKENSKRWNPEIQYTSNYNKSVNVDFTVDTNGVYSEPRPIGTRYLTRNL

SEQ ID NO: 2718 - protein, 735 aa, Artificial Sequence
  source: /note="Description of Artificial Sequence: Synthetic polypeptide"
MAADGYLPDWLEDTLSEGIRQWWKLKPGPPPPKPAERHKDDSRGLVLPGYKYLGPFNGLDKGEPVNEADAAALEHDKAYDRQLDSGDNPYLKYNHADAEFQERLKEDTSFGGNLGRAVFQAKKRVLEPLGLVEEPVKTAPGKKRPVEHSPVEPDSSSGTGKAGQQPARKRLNFGQTGDADSVPDPQPLGQPPAAPSGLGTNTMATGSGAPMADNNEGADGVGNSSGNWHCDSTWMGDRVITTSTHTWALPTYNNHLYKQISSQSGASNDNHYFGYSTPWGYFDFNRFHCHFSPRDWQRLINNNWGFRPKRLSFKLFNIQVKEVTQNDGTTTIANNLTSTVQVFTDSEYQLPYVLGSAHQGCLPPFPADVFMVPQYGYLTLNNGSQAVGRSSFYCLEYFPSQMLRTGNNFTFSYTFEDVPFHSSYAHSQSLDRLMNPLIDQYLYYLSKTNAPSGTTTMSRLQFSQAGASDIRDQSRNWLPGPCYRQQRVSKTAADNNNSDYSWTGATKYHLNGRDSLVNPGPAMASHKDDEEKYFPQSGVLIFGKQGSNKTNVDIEKVMITDEEEIRTTNPVATEQYGSVSTNLQSGNTQAATSDVNTQGVLPGMVWQDRDVYLQGPIWAKIPHTDGHFHPSPLMGGFGLKHPPPQILIKNTPVPANPSTTFSAAKFASFITQYSTGQVSVEIEWELQKENSKRWNPEIQYTSNYNKSVNVDFTVDTNGVYSEPRPIGTRYLTRNL

SEQ ID NO: 2719 - protein, 735 aa, Artificial Sequence
  source: /note="Description of Artificial Sequence: Synthetic polypeptide"
MAADGYLPDWLEDTLSEGIRQWWKLKPGPPPPKPAERHKDDSRGLVLPGYKYLGPFNGLDKGEPVNEADAAALEHDKAYDRQLDSGDNPYLKYNHADAEFQERLKEDTSFGGNLGRAVFQAKKRVLEPLGLVEEPVKTAPGKKRPVEHSPVEPDSSSGTGKAGQQPARKRLNFGQTGDADSVPDPQPLGQPPAAPSGLGTNTMATGSGAPMADNNEGADGVGNSSGNWHCDSTWMGDRVITTSTRTWALPTYNNHLYKQISSQSGASNDNHYFGYSTPWGYFDFNRFHCHFSPRDWQRLINNNWGFRPKRLSFKLFNIQVKEVTQNDGTTTIANNLTSTVQVFTDSEYQLPYVLGSAHQGCLPPFPADVFMVPQYGYLTLNNGSQAVGRSSFYCLEYFPSQMLRTGNNFTFSYTFEDVPFHSSYAHSQSLDRLMNPLIDQYLYYLSKTNAPSGTTTMSRLQFSQAGASGIRDQSRNWLPGPCYRQQRVSKTAADNNNSDYSWTGATKYHLNGRDSLVNPGPAMASHKDDEEKYFPQSGVLIFGKQGSNKTNVDIEKVMITDEEEIRTTNPVATEQYGSVSTNLQSGNTQAATSDVNTQGVLPGMVWQDRDVYLQGPIWAKIPHTDGHFHPSPLMGGFGLKHPPPQILIKNTPVPANPSTTFSAAKFASFITQYSTGQVSVEIEWELQKENSKRWNPEIQYTSNYNKSVNVDFTVDTNGVYSEPRPIGTRYLTRNL

SEQ ID NO: 2720 - protein, 735 aa, Artificial Sequence
  source: /note="Description of Artificial Sequence: Synthetic polypeptide"
MAADGYLPDWLEDTLSEGIRQWWKLKPGPPPPKPAERHKDDSRGLVLPGYKYLGPFNGLDKGEPVNEADAAALEHDKAYDRQLDSGDNPYLKYNHADAEFQERLKEDTSFGGNLGRVVFQAKKRVLEPLGLVEEPVKTAPGKKRPVEHSPVEPDSSSGTGKAGQQPARKRLNFGQTGDADSVPDPQPLGQPPAAPSGLGTNTMATGSGAPMADNNEGADGVGNSSGNWHCDSTWMGDRVITTSTRTWALPTYNNHLYKQISSQSGASNDNHYFGYSTPWGYFDFNRFHCHFSPRDWQRLINNNWGFRPKRLSFKLFNIQVKEVTQNDGTTTIANNLTSTVQVFTDSEYQLPYVLGSAHQGCLPPFPADVFMVPQYGYLTLNNGSQAVGRSSFYCLEYFPSQMLRTGNNFTFSYTFEDVPFHSSYAHSQSLDRLMNPLIDQYLYYLSKTNAPSGTTTMSRLQFSQAGASDIRDQSRNWLPGPCYRQQRVSKTAADNNNSDYSWTGATKYHLNGRDSLVNPGPAMASHKDDEEKYFPQSGVLIFGKQGSNKTNVDIEKVMITDEEEIRTTNPVATEQYGSVSTNLQSGNTQAATSDVNTQGVLPGMVWQDRDVYLQGPIWAKIPHTDGHFHPSPLMGGFGLKHPPPQILIKNTPVPANPSTTFSAAKFASFITQYSTGQVSVEIEWELQKENSKRWNPEIQYTSNYNKSVNVDFTVDTNGVYSEPRPIGTRYLTRNL

SEQ ID NO: 2721 - protein, 735 aa, Artificial Sequence
  source: /note="Description of Artificial Sequence: Synthetic polypeptide"
MAADGYLPDWLEDTLSEGIRQWWKLKPGPPPPKPAERHKDDSRGLVLPGYKYLGPFNGLDKGEPVNEADAAALEHDKAYDRQLDSGDNPYLKYNHADAEFQERLKEDTSFGGNLGRAVFQAKKRVLEPLGLVEEPVKTAPGKKRPVEHSPVEPDSSSGTGKAGQQPARKRLNFGQTGDADSVPDPQPLGQPPAAPSGLGTNTMATGSGAPMADNNEGADGVGNSSGNWHCDSTWMGDRVITTSTRTWALPTYNNHLYKQISSQSGASNDNHYFGYSTPWGYFDFNRFHCHFSPRDWQRLINNNWGFRPKRLSFKLFNIQVKEVTQNDGTTTIANNLTSTVQVFTDSEYQLPYILGSAHQGCLPPFPADVFMVPQYGYLTLNNGSQAVGRSSFYCLEYFPSQMLRTGNNFTFSYTFEDVPFHSSYAHSQSLDRLMNPLIDQYLYYLSKTNAPSGTTTMSRLQFSQAGASDIRDQSRNWLPGPCYRQQRVSKTAADNNNSDYSWTGATKYHLNGRDSLVNPGPAMASHKDDEEKYFPQSGVLIFGKQGSNKTNVDIEKVMITDEEEIRTTNPVATEQYGSVSTNLQSGNTQAATSDVNTQGVLPGMVWQDRDVYLQGPIWAKIPHTDGHFHPSPLMGGFGLKHPPPQILIKNTPVPANPSTTFSAAKFASFITQYSTGQVSVEIEWELQKENSKRWNPEIQYTSNYNKSVNVDFTVDTNGVYSEPRPIGTRYLTRNL

SEQ ID NO: 2722 - protein, 735 aa, Artificial Sequence
  source: /note="Description of Artificial Sequence: Synthetic polypeptide"
MAADGYLPDWLEDTLSEGIRQWWKLKPGPPPPKPAERHKDDSRGLVLPGYKYLGPFNGLDKGEPVNEADAAALEHDKAYDRQLDSGDNPYLKYNHADAEFQERLKEDTSFGGNLGRAVFQAKKRVLEPLGLVEEPVKTAPGKKRPVEHSPVEPDSSSGTGKAGQQPARKRLNFGQTGDADSVPDPQPLGQPPAAPSGLGTNTMATGSGAPMADNNEGVDGVGNSSGNWHCDSTWMGDRVITTSTRTWALPTYNNHLYKQISSQSGASNDNHYFGYSTPWGYFDFNRFHCHFSPRDWQRLINNNWGFRPKRLSFKLFNIQVKEVTQNDGTTTIANNLTSTVQVFTDSEYQLPYVLGSAHQGCLPPFPADVFMVPQYGYLTLNNGSQAVGRSSFYCLEYFPSQMLRTGNNFTFSYTFEDVPFHSSYAHSQSLDRLMNPLIDQYLYYLSKTNAPSGTTTMSRLQFSQAGASDIRDQSRNWLPGPCYRQQRVSKTAADNNNSDYSWTGATKYHLNGRDSLVNPGPAMASHKDDEEKYFPQSGVLIFGKQGSNKTNVDIEKVMITDEEEIRTTNPVATEQYGSVSTNLQSGNTQAATSDVNTQGVLPGMVWQDRDVYLQGPIWAKIPHTDGHFHPSPLMGGFGLKHPPPQILIKNTPVPANPSTTFSAAKFASFITQYSTGQVSVEIEWELQKENSKRWNPEIQYTSNYNKSVNVDFTVDTNGVYSEPRPIGTRYLTRNL

SEQ ID NO: 2723 - protein, 735 aa, Artificial Sequence
  source: /note="Description of Artificial Sequence: Synthetic polypeptide"
MAADGYLPDWLEDTLSEGIRQWWKLKPGPPPPKPAERHKDDSRGLVLPGYKYLGPFNGLDKGEPVNEADAAALEHDKAYDRQLDSGDNPYLKYNHADAEFQERLKEDTSFGGNLGRAVFQAKKRVLEPLGLVEEPVKTAPGKKRPVEHSPVEPDSSSGTGKAGQQPARKRLNFGQTGDADSVPDPQPLGQPPAAPSGLGTNTMATGSGAPMADNNEGADGVGNSSGNWHCDSTWMGDRVITTSTRTWALPTYNNHLYKQISSQSGASNDNHYFGYSTPWGYFDFNRFHCHFSPRDWQRLINNNWGFRPKRLSFKLFNIQVKEVTQNDGTTTIANNLTSTVQVFTDSEYQLPYVLGSAHQGCLPPFPADVFMVPQYGYLTLNNGSQAVGRSSFYCLEYFPSQMLRTGNNFTFSYTFEDVPFHSSYAHSQSLDRLMNPLIDQYLYYLSKTNAPSGTTTMSRLQFSQAGASDIRDQSRNWLPGPCYRQQRVSKTAADNNNSDYSWTGATKYHLNGRGSLVNPGPAMASHKDDEEKYFPQSGVLIFGKQGSNKTNVDIEKVMITDEEEIRTTNPVATEQYGSVSTNLQSGNTQAATSDVNTQGVLPGMVWQDRDVYLQGPIWAKIPHTDGHFHPSPLMGGFGLKHPPPQILIKNTPVPANPSTTFSAAKFASFITQYSTGQVSVEIEWELQKENSKRWNPEIQYTSNYNKSVNVDFTVDTNGVYSEPRPIGTRYLTRNL

SEQ ID NO: 2724 - protein, 735 aa, Artificial Sequence
  source: /note="Description of Artificial Sequence: Synthetic polypeptide"
MAADGYLPDWLEDTLSEGIRQWWKLKPGPPPPKPAERHKDDSRGLVLPGYKYLGPFNGLDKGEPVNEADAAALEHDKAYDRQLDSGDNPYLKYNHADAEFQERLKEDTSFGGNLGRAVFQAKKRVLEPLGLVEEPVKTAPGKKRPVEHSPVEPDSSSGTGKAGQQPARKRLNFGQTGDADSVPDPQPLGQPPAAPSGLGTNTMATGSGAPMADNNEGADGVGNSSGNWHCDSTWMGDRVITTSTRTWALPTYNNHLYKQISSQSGASNDNHYFGYSTPWGYFDFNRFHCHFSPRDWQRLINNNWGFRPKRLSFKLFNIQVKEVTQNDGTTTIANNLTSTVQVFTDSEYQLPYVLGSAHQGCLPPFPADVFMVPQYGYLTLNNGSQAVGRSSFYCLEYFPSQMLRTGNNFTFSYTFEDVPFHSSYAHSQSLDRLMNPLIDQYLYYLSKTNAPSGTTTMSRLQFSQAGASDIRDQSRNWLPGPCYRQQRVSKTAADNNNSDYSWTGATKYHLNGRDSLVNPGPAMASHKDDEEKYFPQSGVLIFGKQGSNKTNVDIEKVMITDEEEIRTTNPVATEQYGSVSTNLQSGNTQAATPDVNTQGVLPGMVWQDRDVYLQGPIWAKIPHTDGHFHPSPLMGGFGLKHPPPQILIKNTPVPANPSTTFSAAKFASFITQYSTGQVSVEIEWELQKENSKRWNPEIQYTSNYNKSVNVDFTVDTNGVYSEPRPIGTRYLTRNL

SEQ ID NO: 2725 - protein, 735 aa, Artificial Sequence
  source: /note="Description of Artificial Sequence: Synthetic polypeptide"
MAADGYLPDWLEDTLSEGIRQWWKLKPGPPPPKPAERHKDDSRGLVLPGYKYLGPFNGLDKGEPVNEADAAALEHDKAYDRQLDSGDNPYLKYNHADAEFQERLKEDTSFGGNLGRAVFQAKKRVLEPLGLVEEPVKTAPGKKRPVEHSPVEPDSSSGTGKAGQQPARKRLNFGQTGDADSVPDPQPLGQPPAAPSGLGTNTMATGSGAPMADNNEGADGVGNSSGNWHCDSTWMGDRVITTSTRTWALPTYNNHLYKQISSQSGASNDNHYFGYSTPWGYFDFNRFHCHFSPRDWQRLINNNWGFRPKRLSFKLFNIQVKEVTQNDGTTTIANNLTSTVQVFTDSEYQLPYVLGSAHQGCLPPFPADVFMVPQYGYLTLNNGSQAVGRSSFYCLEYFPSQMLRTGNNFTFSYTFEDVPFHSSYAHSQSLDRLMNPLIDQYLYYLSKTNAPSGTTTMSRLQFSQAGASDIRDQSRNWLPGPCYRQQRVSKTAADNNNSDYSWTGATKYHLNGRDSLVNPGPAMASHKDDEEKYFPQSGVLIFGKQGSNKTNVDIEKVMITDEEEIRTTNPVATEQYGSVSTNLQSGNTQAATSDVNTQGVLPGMVWQDRDVYLQGPIWAKIPHTDGHFHPSPLMGGFGLKHPPPQILIKNTPVPANPSTTFSVAKFASFITQYSTGQVSVEIEWELQKENSKRWNPEIQYTSNYNKSVNVDFTVDTNGVYSEPRPIGTRYLTRNL

SEQ ID NO: 2726 - protein, 735 aa, Artificial Sequence
  source: /note="Description of Artificial Sequence: Synthetic polypeptide"
MAADGYLPDWLEDTLSEGIRQWWKLKPGPPPPKPAERHKDDSRGLVLPGYKYLGPFNGLDKGEPVNEADAAALEHDKAYDRQLDSGDNPYLKYNHADAEFQERLKEDTSFGGNLGRAVFQAKKRVLEPLGLVEEPVKTAPGKKRPVEHSPVEPDSSSGTGKAGQQPARKRLNFGQTGDADSVPDPQPLGQPPAAPSGLGTNTMATGSGAPMADNNEGADGVGNSSGNWHCDSTWMGDRVITTSTRTWALPTYNNHLYKQISSQSGASNDNHYFGYSTPWGYFDFNRFHCHFSPRDWQRLINNNWGFRPKRLSFKLFNIQVKEVTQNDGTTTIANNLTSTVQVFTDSEYQLPYVLGSAHQGCLPPFPADVFMVPQYGYLTLNNGSQAVGRSSFYCLEYFPSQMLRTGNNFTFSYTFEDVPFRSSYAHSQSLDRLMNPLIDQYLYYLSKTNAPSGTTTMSRLQFSQAGASDIRDQSRNWLPGPCYRQQRVSKTAADNNNSDYSWTGATKYHLNGRDSLVNPGPAMASHKDDEEKYFPQSGVLIFGKQGSNKTNVDIEKVMITDEEEIRTTNPVATEQYGSVSTNLQSGNTQAATSDVNTQGVLPGMVWQDRDVYLQGPIWAKIPHTDGHFHPSPLMGGFGLKHPPPQILIKNTPVPANPSTTFSAAKFASFITQYSTGQVSVEIEWELQKENSKRWNPEIQYTSNYNKSVNVDFTVDTNGVYSEPRPIGTRYLTRNL

SEQ ID NO: 2727 - protein, 735 aa, Artificial Sequence
  source: /note="Description of Artificial Sequence: Synthetic polypeptide"
MAADGYLPDWLEDTLSEGIRQWWKLKPGPPPPKPAERHKDDSRGLVLPGYKYLGPFNGLDKGEPVNEADAAALEHDKAYDRQLDSGDNPYLKYNHADAEFQERLKEDTSFGGNLGRAVFQAKKRVLEPLGLVEEPVKTAPGKKRPVEHSPVEPDSSSGTGKADQQPARKRLNFGQTGDADSVPDPQPLGQPPAAPSGLGTNTMATGSGAPMADNNEGADGVGNSSGNWHCDSTWMGDRVITTSTRTWALPTYNNHLYKQISSQSGASNDNHYFGYSTPWGYFDFNRFHCHFSPRDWQRLINNNWGFRPKRLSFKLFNIQVKEVTQNDGTTTIANNLTSTVQVFTDSEYQLPYVLGSAHQGCLPPFPADVFMVPQYGYLTLNNGSQAVGRSSFYCLEYFPSQMLRTGNNFTFSYTFEDVPFHSSYAHSQSLDRLMNPLIDQYLYYLSKTNAPSGTTTMSRLQFSQAGASDIRDQSRNWLPGPCYRQQRVSKTAADNNNSDYSWTGATKYHLNGRDSLVNPGPAMASHKDDEEKYFPQSGVLIFGKQGSNKTNVDIEKVMITDEEEIRTTNPVATEQYGSVSTNLQSGNTQAATSDVNTQGVLPGMVWQDRDVYLQGPIWAKIPHTDGHFHPSPLMGGFGLKHPPPQILIKNTPVPANPSTTFSAAKFASFITQYSTGQVSVEIEWELQKENSKRWNPEIQYTSNYNKSVNVDFTVDTNGVYSEPRPIGTRYLTRNL

SEQ ID NO: 2728 - protein, 735 aa, Artificial Sequence
  source: /note="Description of Artificial Sequence: Synthetic polypeptide"
MAADGYLPDWLEDTLSEGIRQWWKLKPGPPPPKPAERHKDDSRGLVLPGYKYLGPFNGLDKGEPVNEADAAALEHDKAYDRQLDSGDNPYLKYNHADAEFQERLKEDTSFGGNLGRAVFQAKKRVLEPLGLVEEPVKTAPGKKRPVEHSPVEPDSSSGTGKAGQQPARKRLNFGQTGDADSVPDPQPLGQPPAAPSGLGTNTMATGSGAPMADNNEGADGVGNSSGNWHCDSTWMGDRVITTSTRTWALPTYNNHLYKQISSQSGASNDNHYFGYSTPWGYFDFNRFHCHFSPRDWQRLINNNWGFRPKRLSFKLFNIQVKEVTQNDGTTTIANNLTNTVQVFTDSEYQLPYVLGSAHQGCLPPFPADVFMVPQYGYLTLNNGSQAVGRSSFYCLEYFPSQMLRTGNNFTFSYTFEDVPFHSSYAHSQSLDRLMNPLIDQYLYYLSKTNAPSGTTTMSRLQFSQAGASDIRDQSRNWLPGPCYRQQRVSKTAADNNNSDYSWTGATKYHLNGRDSLVNPGPAMASHKDDEEKYFPQSGVLIFGKQGSNKTNVDIEKVMITDEEEIRTTNPVATEQYGSVSTNLQSGNTQAATSDVNTQGVLPGMVWQDRDVYLQGPIWAKIPHTDGHFHPSPLMGGFGLKHPPPQILIKNTPVPANPSTTFSAAKFASFITQYSTGQVSVEIEWELQKENSKRWNPEIQYTSNYNKSVNVDFTVDTNGVYSEPRPIGTRYLTRNL

SEQ ID NO: 2729 - protein, 735 aa, Artificial Sequence
  source: /note="Description of Artificial Sequence: Synthetic polypeptide"
MAADGYLPDWLEDTLSEGIRQWWKLKPGPPPPKPAERHKDDSRGLVLPGYKYLGPFNGLDKGEPVNEADAAALEHDKAYDRQLDSGDNPYLKYNHADAEFQERLKEDTSFGGNLGRAVFQAKKRVLEPLGLVEEPVKTAPGKKRPVEHSPVEPDSSSGTGKAGQQPARKRLNFGQTGDADSVPDPQPLGQPPAAPSGLGTNTMATGSGAPMADNNEGADGVGNSSGNWHCDSTWMGDRVITTSTRTWALPTYNNHLYKQISSQSGASNDNHYFGYNTPWGYFDFNRFHCHFSPRDWQRLINNNWGFRPKRLSFKLFNIQVKEVTQNDGTTTIANNLTSTVQVFTDSEYQLPYVLGSAHQGCLPPFPADVFMVPQYGYLTLNNGSQAVGRSSFYCLEYFPSQMLRTGNNFTFSYTFEDVPFHSSYAHSQSLDRLMNPLIDQYLYYLSKTNAPSGTTTMSRLQFSQAGASDIRDQSRNWLPGPCYRQQRVSKTAADNNNSDYSWTGATKYHLNGRDSLVNPGPAMASHKDDEEKYFPQSGVLIFGKQGSNKTNVDIEKVMITDEEEIRTTNPVATEQYGSVSTNLQSGNTQAATSDVNTQGVLPGMVWQDRDVYLQGPIWAKIPHTDGHFHPSPLMGGFGLKHPPPQILIKNTPVPANPSTTFSAAKFASFITQYSTGQVSVEIEWELQKENSKRWNPEIQYTSNYNKSVNVDFTVDTNGVYSEPRPIGTRYLTRNL

SEQ ID NO: 2730 - protein, 735 aa, Artificial Sequence
  source: /note="Description of Artificial Sequence: Synthetic polypeptide"
MAADGYLPDWLEDTLSEGIRQWWKLKPGPPPPKPAERHKDDSRGLVLPGYKYLGPFNGLDKGEPVNEADAAALEHDKAYDRQLDSGDNPYLKYNHADAEFQERLKEDTSFGGNLGRAVFQAKKRVLEPLGLVEEPVKTAPGKKRPVEHSPVEPDSSSGTGKAGQQPARKRLNFGQTGGADSVPDPQPLGQPPAAPSGLGTNTMATGSGAPMADNNEGADGVGNSSGNWHCDSTWMGDRVITTSTRTWALPTYNNHLYKQISSQSGASNDNHYFGYSTPWGYFDFNRFHCHFSPRDWQRLINNNWGFRPKRLSFKLFNIQVKEVTQNDGTTTIANNLTSTVQVFTDSEYQLPYVLGSAHQGCLPPFPADVFMVPQYGYLTLNNGSQAVGRSSFYCLEYFPSQMLRTGNNFTFSYTFEDVPFHSSYAHSQSLDRLMNPLIDQYLYYLSKTNAPSGTTTMSRLQFSQAGASDIRDQSRNWLPGPCYRQQRVSKTAADNNNSDYSWTGATKYHLNGRDSLVNPGPAMASHKDDEEKYFPQSGVLIFGKQGSNKTNVDIEKVMITDEEEIRTTNPVATEQYGSVSTNLQSGNTQAATSDVNTQGVLPGMVWQDRDVYLQGPIWAKIPHTDGHFHPSPLMGGFGLKHPPPQILIKNTPVPANPSTTFSAAKFASFITQYSTGQVSVEIEWELQKENSKRWNPEIQYTSNYNKSVNVDFTVDTNGVYSEPRPIGTRYLTRNL

SEQ ID NO: 2731 - protein, 735 aa, Artificial Sequence
  source: /note="Description of Artificial Sequence: Synthetic polypeptide"
MAADGYLPDWLEDTLSEGIRQWWKLKPGPPPPRPAERHQDDSRGLVLPGYKYLGPFNGLDKGEPVNEADAAALEHDKAYDRQLDSGDNPYLKYNHADAEFQERLKEDTSFGGNLGRAVFQAKKRVLEPLGLVEEPVKTAPGKKRPVEHSPAEPDSSSGTGKAGQQPARKRLNFGQTGDADSVPDPQPLGQPPAAPTSLGSTTMATGSGAPMADNNEGADGVGNSSGNWHCDSQWLGDRVITTSTRTWALPTYNNHLYKQISSQSGASNDNHYFGYSTPWGYFDFNRFHCHFSPRDWQRLINNNWGFRPKRLNFKLFNIQVKEVTQNDGTTTIANNLTSTVQVFTDSEYQLPYVLGSAHQGCLPPFPADVFMVPQYGYLTLNNGSQAVGRSSLYCLEYFPSQMLRTGNNFTFSYTFEDVPFHSSYAHSQSLDRLMNPLIDQYLYYLNRTQSNSGTLQQSRLLFSQAGPTSMSLQAKNWLPGPCYRQQRLSKQANDNNNSNFPWTAATKYHLNGRDSLVNPGPAMASHKDDEEKFFPMHGTLIFGKQGTNANDADLEHVMITDEEEIRTTNPVATEQYGNVSNNLQNSNTGPTTENVNHQGALPGMVWQDRDVYLQGPIWAKIPHTDGHFHPSPLMGGFGLKHPPPQIMIKNTPVPANPPTNFSAAKFASFITQYSTGQVSVEIEWELQKENSKRWNPEIQYTSNYNKSVNVDFTVDANGVYSEPRPIGTRYLTRNL

SEQ ID NO: 2732 - protein, 735 aa, Artificial Sequence
  source: /note="Description of Artificial Sequence: Synthetic polypeptide"
MAADGYLPDWLEDTLSEGIRQWWKLKPGPPPPRPAERHQDDSRGLVLPGYKYLGPFNGLDKGEPVNEADAAALEHDKAYDRQLDSGDNPYLKYNHADAEFQERLKEDTSFGGNLGRAVFQAKKRVLEPLGLVEEPVKTAPGKKRPVEHSPAEPDSSSGTGKAGQQPARKRLNFGQTGDADSVPDPQPLGQPPAAPTSLGSTTMATGSGAPMADNNEGADGVGNSSGNWHCDPQWLGDRVITTSTRTWALPTYNNHLYKQISSQSGASNDNHYFGYSTPWGYFDFNRFHCHFSPRDWQRLINNNWGFRPKRLNFKLFNIQVKEVTQNDGTTTIANNLTSTVQVFTDSEYQLPYVLGSAHQGCLPPFPADVFMVPQYGYLTLNNGSQAVGRSSFYCLEYFPSQMLRTGNNFTFSYTFEDVPFHSSYAHSQSLDRLMNPLIDQYLYYLNRTQSNSGTLQQSRLLFSQAGPTSMSLQAKNWLPGPCYRQQRLSKQANDNNNSNFPWTAATKYHLNGRDSLVNPGPAMASHKDDEEKFFPMHGTLIFGKQGTNANDADLEHVMITDEEEIRTTNPVATEQYGNVSNNLQNSNTGPTTENVNHQGALPGMVWQDRDVYLQGPIWAKIPHTDGHFHPSPLMGGFGLKHPPPQIMIKNTPVPANPPTNFSAAKFASFITQYSTGQVSVEIEWELQKENSKRWNPEIQYTSNYNKSVNVDFTVDANGVYSEPRPIGTRYLTRNL

SEQ ID NO: 2733 - protein, 735 aa, Artificial Sequence
  source: /note="Description of Artificial Sequence: Synthetic polypeptide"
MAADGYLPDWLEDTLSEGIRQWWKLKPGPPPPRPAERHQDDSRGLVLPGYKYLGPFNGLDKGEPVNEADAAALEHDKAYDRQLDSGDNPYLKYNHADAEFQERLKEDTSFGGNLGRAVSQAKKRVLEPLGLVEEPVKTAPGKKRPVEHSPAEPDSSSGTGKAGQQPARKRLNFGQTGDADSVPDPQPLGQPPAAPTSLGSTTMATGSGAPMADNNEGADGVGNSSGNWHCDSQWLGDRVITTSTRTWALPTYNNHLYKQISSQSGASNDNHYFGYSTPWGYFDFNRFHCHFSPRDWQRLINNNWGFRPKRLNFKLFNIQVKEVTQNDGTTTIANNLTSTVQVFTDSEYQLPYVLGSAHQGCLPPFPADVFMVPQYGYLTLNNGSQAVGRSSFYCLEYFPSQMLRTGNNFTFSYTFEDVPFHSSYAHSQSLDRLMNPLIDQYLYYLNRTQSNSGTLQQSRLLFSQAGPTSMSLQAKNWLPGPCYRQQRLSKQANDNNNSNFPWTAATKYHLNGRDSLVNPGPAMASHKDDEEKFFPMHGTLIFGKQGTNANDADLEHVMITDEEEIRTTNPVATEQYGNVSNNLQNSNTGPTTENVNHQGALPGMVWQDRDVYLQGPIWAKIPHTDGHFHPSPLMGGFGLKHPPPQIMIKNTPVPANPPTNFSAAKFASFITQYSTGQVSVEIEWELQKENSKRWNPEIQYTSNYNKSVNVDFTVDANGVYSEPRPIGTRYLTRNL

SEQ ID NO: 2734 - protein, 735 aa, Artificial Sequence
  source: /note="Description of Artificial Sequence: Synthetic polypeptide"
MAADGYLPDWLEDTLSEGIRQWWKLKPGPPPPRPAERHQDDSRGLVLPGYKYLGPFNGLDKGEPVNEADAAALEHDKAYDRQLDSGDNPYLKYNHADAEFQERLKEDTSFGGNLGRAVFQAKKRVLEPLGLVEEPVKTAPGKKRPVEHSPAEPDSSSGTGKAGQQPARKRLNFGQTGDADSVPDPQPLGQPPAAPTSLGSTTMATGSGAPMADNNEGADGVGNSSGNWHCDSQWLGDRVITTSTRTWALPTYNNHLYKQISSQSGASNDNHYFGYSTPWGYFDFNRFHCHFSPRDWQRLINNNWGFRPKRLNFKLFNIQVKEVTQNDGTTTIANNLTSTVQVFTDSEYQLPYVLGSAHQGCLPPFPADVFMVPQYGYLTLNNGSQAVGRSSFYCLEYFPSQMLRTGNNFTFSYTFEDVPFHSSYAHSQSLDRLMSPLIDQYLYYLNRTQSNSGTLQQSRLLFSQAGPTSMSLQAKNWLPGPCYRQQRLSKQANDNNNSNFPWTAATKYHLNGRDSLVNPGPAMASHKDDEEKFFPMHGTLIFGKQGTNANDADLEHVMITDEEEIRTTNPVATEQYGNVSNNLQNSNTGPTTENVNHQGALPGMVWQDRDVYLQGPIWAKIPHTDGHFHPSPLMGGFGLKHPPPQIMIKNTPVPANPPTNFSAAKFASFITQYSTGQVSVEIEWELQKENSKRWNPEIQYTSNYNKSVNVDFTVDANGVYSEPRPIGTRYLTRNL

SEQ ID NO: 2735 - protein, 735 aa, Artificial Sequence
  source: /note="Description of Artificial Sequence: Synthetic polypeptide"
MAADGYLPDWLEDTLSEGIRQWWKLKPGPPPPRPAERHQDDSRGLVLPGYKYLGPFNGLDKGEPVNEADAAALEHDKAYDRQLDSGDNPYLKYNHADAEFQERLKEDTSFGGNLGRAVFQAKKRVLEPLGLVEEPVKTAPGKKRPVEHSPAEPDSSSGTGKAGQQPARKRLNFGQTGDADSVPDPQPLGQPPAAPTSLGSTTMATGSGAPMAGNNEGADGVGNSSGNWHCDSQWLGDRVITTSTRTWALPTYNNHLYKQISSQSGASNDNHYFGYSTPWGYFDFNRFHCHFSPRDWQRLINNNWGFRPKRLNFKLFNIQVKEVTQNDGTTTIANNLTSTVQVFTDSEYQLPYVLGSAHQGCLPPFPADVFMVPQYGYLTLNNGSQAVGRSSFYCLEYFPSQMLRTGNNFTFSYTFEDVPFHSSYAHSQSLDRLMNPLIDQYLYYLNRTQSNSGTLQQSRLLFSQAGPTSMSLQAKNWLPGPCYRQQRLSKQANDNNNSNFPWTAATKYHLNGRDSLVNPGPAMASHKDDEEKFFPMHGTLIFGKQGTNANDADLEHVMITDEEEIRTTNPVATEQYGNVSNNLQNSNTGPTTENVNHQGALPGMVWQDRDVYLQGPIWAKIPHTDGHFHPSPLMGGFGLKHPPPQIMIKNTPVPANPPTNFSAAKFASFITQYSTGQVSVEIEWELQKENSKRWNPEIQYTSNYNKSVNVDFTVDANGVYSEPRPIGTRYLTRNL

SEQ ID NO: 2736 - protein, 735 aa, Artificial Sequence
  source: /note="Description of Artificial Sequence: Synthetic polypeptide"
MAADGYLPDWLEDTLSEGIRQWWKLKPGPPPPRPAERHQDDSRGLVLPGYKYLGPFNGLDKGEPVNEADAAALEHDKAYDRQLDSGDNPYLKYNHADAEFQERLKEDTSFGGNLGRAVFQAKKRVLEPLGLVEEPVKTAPGKKRPVEHSPAEPDSSSGTGKAGQQPARKRLNFGQTGDADSVPDPQPLGQPPAAPTSLGSTTMATGSGAPMADSNEGADGVGNSSGNWHCDSQWLGDRVITTSTRTWALPTYNNHLYKQISSQSGASNDNHYFGYSTPWGYFDFNRFHCHFSPRDWQRLINNNWGFRPKRLNFKLFNIQVKEVTQNDGTTTIANNLTSTVQVFTDSEYQLPYVLGSAHQGCLPPFPADVFMVPQYGYLTLNNGSQAVGRSSFYCLEYFPSQMLRTGNNFTFSYTFEDVPFHSSYAHSQSLDRLMNPLIDQYLYYLNRTQSNSGTLQQSRLLFSQAGPTSMSLQAKNWLPGPCYRQQRLSKQANDNNNSNFPWTAATKYHLNGRDSLVNPGPAMASHKDDEEKFFPMHGTLIFGKQGTNANDADLEHVMITDEEEIRTTNPVATEQYGNVSNNLQNSNTGPTTENVNHQGALPGMVWQDRDVYLQGPIWAKIPHTDGHFHPSPLMGGFGLKHPPPQIMIKNTPVPANPPTNFSAAKFASFITQYSTGQVSVEIEWELQKENSKRWNPEIQYTSNYNKSVNVDFTVDANGVYSEPRPIGTRYLTRNL

SEQ ID NO: 2737 - protein, 735 aa, Artificial Sequence
  source: /note="Description of Artificial Sequence: Synthetic polypeptide"
MAADGYLPDWLEDTLSEGIRQWWKLKPGPPPPRPAERHQDDSRGLVLPGYKYLGPFNGLDKGEPVNEADAAALEHDKAYDRQLDSGDNPYLKYNHADAEFQERLKEDTSFGGNLGRAVFQAKKRVLEPLGLVEEPVKTAPGKKRPVEHSPAEPDSSSGTGKAGQQPARKRLNFGQTGDADSVPDPQPLGQPPAAPTSLGSTTMATGSGAPMADNNEGADGVGNSSGNWHCDSQWLGDRVITTSTRTWALPTYNNHHYKQISSQSGASNDNHYFGYSTPWGYFDFNRFHCHFSPRDWQRLINNNWGFRPKRLNFKLFNIQVKEVTQNDGTTTIANNLTSTVQVFTDSEYQLPYVLGSAHQGCLPPFPADVFMVPQYGYLTLNNGSQAVGRSSFYCLEYFPSQMLRTGNNFTFSYTFEDVPFHSSYAHSQSLDRLMNPLIDQYLYYLNRTQSNSGTLQQSRLLFSQAGPTSMSLQAKNWLPGPCYRQQRLSKQANDNNNSNFPWTAATKYHLNGRDSLVNPGPAMASHKDDEEKFFPMHGTLIFGKQGTNANDADLEHVMITDEEEIRTTNPVATEQYGNVSNNLQNSNTGPTTENVNHQGALPGMVWQDRDVYLQGPIWAKIPHTDGHFHPSPLMGGFGLKHPPPQIMIKNTPVPANPPTNFSAAKFASFITQYSTGQVSVEIEWELQKENSKRWNPEIQYTSNYNKSVNVDFTVDANGVYSEPRPIGTRYLTRNL

SEQ ID NO: 2738 - protein, 735 aa, Artificial Sequence
  source: /note="Description of Artificial Sequence: Synthetic polypeptide"
MAADGYLPDWLEDTLSEGIRQWWKLKPGPPPPRPAERHQDDSRGLVLPGYKYLGPFNGLDKGEPVNEADAAALEHDKAYDRQLDSGDNPYLKYNHADAEFQERLKEDTSFGGNLGRAVFQAKKRVLEPLGLVEEPVKTAPGKKRPVEHSPAEPDSSSGTGKAGQQPARKRLNFGQTGDADSVPDPQPLGQPPAAPTSLGSTTMATGSGAPMADNNEGADGVGNSSGNWHCDSQWLGDRVITTSTRTWALPTYNNHLYKQISSQSGASNDNHYFGYSTPWGYFDFNRFHCHFSPRDWQRLINNNWGFRPKRLNFKLFNIQVKEVTQNDGTTTIANNLTSTVRVFTDSEYQLPYVLGSAHQGCLPPFPADVFMVPQYGYLTLNNGSQAVGRSSFYCLEYFPSQMLRTGNNFTFSYTFEDVPFHSSYAHSQSLDRLMNPLIDQYLYYLNRTQSNSGTLQQSRLLFSQAGPTSMSLQAKNWLPGPCYRQQRLSKQANDNNNSNFPWTAATKYHLNGRDSLVNPGPAMASHKDDEEKFFPMHGTLIFGKQGTNANDADLEHVMITDEEEIRTTNPVATEQYGNVSNNLQNSNTGPTTENVNHQGALPGMVWQDRDVYLQGPIWAKIPHTDGHFHPSPLMGGFGLKHPPPQIMIKNTPVPANPPTNFSAAKFASFITQYSTGQVSVEIERELQKENSKRWNPEIQYTSNYNKSVNVDFTVDANGVYSEPRPIGTRYLTRNL

SEQ ID NO: 2739 - protein, 735 aa, Artificial Sequence
  source: /note="Description of Artificial Sequence: Synthetic polypeptide"
MAADGYLPDWLEDTLSEGIRQWWKLKPGPPPPRPAERHQDDSRGLVLPGYKYLGPFNGLDKGEPVNEADAAALEHDKAYDRQLDSGDNPYLKYNHADAEFQERLKEDTSFGGNLGRAVFQAKKRVLEPLGLVEEPVKTAPGKKRPVEHSPAEPDSSSGTGKAGQQPARKRLNFGQTGDADSVPDPQPLGQPPAAPTSLGSTTMATGSGAPMADNNEGADGVGNSSGNWHCDSQWLGDRVITTSTRTWALPTYNNHLYKQISSQSGASNDNHYFGYSTPWGYFDFNRFHCHFSPRDWQRLINNNWGFRPKRLNFKLFNIQVKEVTQNDGTTTIANNLTSTVQVFTDSEYQLPYVLGSAHQGCLPPFPADVFMVPQYGYLTLNNGSQAVGRSSFYCLEYFPSQMLRTGNNFTFSYTFEDVPSHSSYAHSQSLDRLMNPLIDQYLYYLNRTQSNSGTLQQSRLLFSQAGPTSMSLQAKNWLPGPCYRQQRLSKQANDNNNSNFPWTAATKYHLNGRDSLVNPGPAMASHKDDEEKFFPMHGTLIFGKQGTNANDADLEHVMITDEEEIRTTNPVATEQYGNVSNNLQNSNTGPTTENVNHQGALPGMVWQDRDVYLQGPIWAKIPHTDGHFHPSPLMGGFGLKHPPPQIMIKNTPVPANPPTNFSAAKFASFITQYSTGQVSVEIEWELQKENSKRWNPEIQYTSNYNKSVNVDFTVDANGVYSEPRPIGTRYLTRNL

SEQ ID NO: 2740 - protein, 735 aa, Artificial Sequence
  source: /note="Description of Artificial Sequence: Synthetic polypeptide"
MAADGYLPDWLEDTLSEGIRQWWKLKPGPPPPRPAERHQDDSRGLVLPGYKYLGPFNGLDKGEPVNEADAAALEHDKAYDRQLDSGDNPYLKYNHADAEFQERLKEDTSFGGNLGRAVFQAKKRVLEPLGLVEEPVKTAPGKKRPVEHSPAEPDSSSGTGKAGQRPARKRLNFGQTGDADSVPDPQPLGQPPAAPTSLGSTTMATGSGAPMADNNEGADGVGNSSGNWHCDSQWLGDRVITTSTRTWALPTYNNHLYKQISSQSGASNDNHYFGYSTPWGYFDFNRFHCHFSPRDWQRLINNNWGFRPKRLNFKLFNIQVKEVTQNDGTTTIANNLTSTVQVFTDSEYQLPYVLGSAHQGCLPPFPADVFMVPQYGYLTLNNGSQAVGRSSFYCLEYFPSQMLRTGNNFTFSYTFEDVPFHSSYAHSQSLDRLMNPLIDQYLYYLNRTQSNSGTLQQSRLLFSQAGPTSMSLQAKNWLPGPCYRQQRLSKQANDNNNSNFPWTAATKYHLNGRDSLVNPGPAMASHKDDEEKFFPMHGTLIFGKQGTNANDADLEHVMITDEEEIRTTNPVATEQYGNVSNNLQNSNTGPTTENVNHQGALPGMVWQDRDVYLQGPIWAKIPHTDGHFHPSPLMGGFGLKHPPPQIMIKNTPVPANPPTNFSAAKFASFITQYSTGQVSVEIEWELQKENSKRWNPEIQYTSNYNKSVNVDFTVDANGVYSEPRPIGTRYLTRNL

SEQ ID NO: 2741 - protein, 735 aa, Artificial Sequence
  source: /note="Description of Artificial Sequence: Synthetic polypeptide"
MAADGYLPDWLEDTLSEGIRQWWKLKPGPPPPKPAERHKDDSRGLVLPGYKYLGPFNGLDKGEPVNEADAAALEHDKAYDRQLDSGDNPYLKYNHADAEFQERLKEDTSFGGNLARAVFQAKKRVLEPLGLVEEPVKTAPGKKRPVEHSPAEPDSSSGTGKSGQQPARKRLNFGQTGDADSVPDPQPLGQPPAAPSGLGTNTMASGSGAPMADNNEGADGVGNSSGNWHCDSTWMGDRVITTSTRTWALPTYNNHLYKQISSQSGAANDNHYFGYSTPWGYFDFNRFHCHFSPRDWQRLINNNWGFRPKRLNFKLFNIQVKEVTQNDGTTTIANNLTSTVQVFTDSEYQLPYVLGSAHQGCLPPFPADVFMVPQYGYLTLNNGSQAVGRSSFYCLEYFPSQMLRTGNNFTFSYTFEDVPFHSSYAHSQSLDRLMNPLIDQYLYYLNRTQSNSGTLQQSRLLFSQAGPTSMSLQAKNWLPGPCYRQQRLSKQANDNNNSNFPWTAATKYHLNGRDSLVNPGPAMASHKDDEEKFFPMHGTLIFGKQGTNANDADLEHVMITDEEEIRTTNPVATEQYGNVSNNLQNSNTGPTTENVNHQGALPGMVWQDRDVYLQGPIWAKIPHTDGHFHPSPLMGGFGLKHPPPQIMIKNTPVPANPPTNFSAAKFASFITQYSTGQVSVEIEWELQKENSKRWNPEIQYTSNYNKSVNVDFTVDANGVYSEPRPIGTRYLTRNL

SEQ ID NO: 2742 - protein, 735 aa, Artificial Sequence
  source: /note="Description of Artificial Sequence: Synthetic polypeptide"
MAADGYLPDWLEDTLSEGIRQWWKLKPGPPPPRPAERHQDDSRGLVLPGYKYLGPFNGLDKGEPVNEADAAALEHDKAYDRQLDSGDNPYLKYNHADAEFQERLKEDTSFGGNLGRAVFQAKKRVLEPLGLVEEPVKTAPGKKRPVEHSPAEPDSSSGTGKAGQQPARKRLNFGQTGDADSVPDPRPLGQPPAAPTSLGSTTMATGSGAPMADNNEGADGVGNSSGNWHCDSQWLGDRVITTSTRTWALPTYNNHLYKQISSQSGASNDNHYFGYSTPWGYFDFNRFHCHFSPRDWQRLINNNWGFRPKRLNFKLFNIQVKEVTQNDGTTTIANNLTSTVQVFTDSEYQLPYVLGSAHQGCLPPFPADVFMVPQYGYLTLNNGSQAVGRSSFYCLEYFPSQMLRTGNNFTFSYTFEDVPFHSSYAHSQSLDRLMNPLIDQYLYYLNRTQSNSGTLQQSRLLFSQAGPTSMSLQAKNWLPGPCYRQQRLSKQANDNNNSNFPWTAATKYHLNGRDSLVNPGPAMASHKDDEEKFFPMHGTLIFGKQGTNANDADLEHVMITDEEEIRTTNPVATEQYGNVSNNLQNSNTGPTTENVNHQGALPGMVWQDRDVYLQGPIWAKIPHTDGHFHPSPLMGGFGLKHPPPQIMIKNTPVPANPPTNFSAAKFASFITQYSTGQVSVEIEWELQKENSKRWNPEIQYTSNYNKSVNVDFTVDANGVYSEPRPIGTRYLTRNL

SEQ ID NO: 2743 - protein, 735 aa, Artificial Sequence
  source: /note="Description of Artificial Sequence: Synthetic polypeptide"
MAADGYLPDWLEDTLSEGIRQWWKLKPGPPPPKPAERHKDDSRGLVLPGYKYLGPFNGLDKGEPVNEADAAALEHDKAYDRQLDSGDNPYLKYNHADAEFQERLKEDTSFGGNLARAVFQAKKRVLEPLGLVEEPVKTAPGKKRPVEHSPAEPDSSSGTGKSGQQPARKRLNFGQTGDADSVPDPQPLGQPPAAPTSLGSTTMATGSGAPMADNNEGADGVGNSSGNWHCDSQWLGDRVITTSTRTWALPTYNNHLYKQISSQSGASNDNHYFGYSTPWGYFDFNRFHCHFSPRDWQRLINNNWGFRPKRLNFKLFNIQVKEVTQNDGTTTIANNLTSTVQVFTDSEYQLPYVLGSAHQGCLPPFPADVFMVPQYGYLTLNNGSQAVGRSSFYCLEYFPSQMLRTGNNFTFSYTFEDVPFHSSYAHSQSLDRLMNPLIDQYLYYLNRTQSNSGTLQQSRLLFSQAGPTSMSLQAKNWLPGPCYRQQRLSKQANDNNNSNFPWTAATKYHLNGRDSLVNPGPAMASHKDDEEKFFPMHGTLIFGKQGTNANDADLEHVMITDEEEIRTTNPVATEQYGNVSNNLQNSNTGPTTENVNHQGALPGMVWQDRDVYLQGPIWAKIPHTDGHFHPSPLMGGFGLKHPPPQIMIKNTPVPANPPTNFSAAKFASFITQYSTGQVSVEIEWELQKENSKRWNPEIQYTSNYNKSVNVDFTVDANGVYSEPRPIGTRYLTRNL

SEQ ID NO: 2744 - protein, 735 aa, Artificial Sequence
  source: /note="Description of Artificial Sequence: Synthetic polypeptide"
MAADGYLPDWLEDTLSEGIRQWWKLKPGPPPPRPAERHQDDSRGLVLPGYKYLGPFNGLDKGEPVNEADAAALEHDKAYDRQLDSGDNPYLKYNHADAEFQERLKEDTSFGGNLGRAVFQAKKRVLEPLGLVEEPVKTAPGKKRPVEHSPAEPDSSSGTGKAGQQPARKRLNFGQTGDADSVPDPQPLGQPPAAPTSLGSTTMATGSGAPMADNNEGADGVGNSSGNWHCDSQWLGDRVITTSTRTWALPTYNNHLYKQISSQSGASNDNHYFGYSTPWGYFDFNRFHCHFSPRDWQRLINNNWGFRPKRLNFKLFNIQVKEVTQNDGTTTIANNLTSTVRVFTDSEYQLPYVLGSAHQGCLPPFPADVFMVPQYGYLTLNNGSQAVGRSSFYCLEYFPSQMLRTGNNFTFSYTFEDVPFHSSYAHSQSLDRLMNPLIDQYLYYLNRTQSNSGTLQQSRLLFSQAGPTSMSLQAKNWLPGPCYRQQRLSKQANDNNNSNFPWTAATKYHLNGRDSLVNPGPAMASHKDDEEKFFPMHGTLIFGKQGTNANDADLEHVMITDEEEIRTTNPVATEQYGNVSNNLQNSNTGPTTENVNHQGALPGMVWQDRDVYLQGPIWAKIPHTDGHFHPSPLMGGFGLKHPPPQIMIKNTPVPANPPTNFSAAKFASFITQYSTGQVSVEIERELQKENSKRWNPEIQYTSNYNKSVNVDFTVGANGVYSEPRPIGTRYLTRNL

SEQ ID NO: 2745 - protein, 735 aa, Artificial Sequence
  source: /note="Description of Artificial Sequence: Synthetic polypeptide"
MAADGYLPDWLEDTLSEGIRQWWKLKPGPPPPKPAERHKDDSRGLVLPGYKYLGPFNGLDKGEPVNEADAAALEHDKAYDRQLDSGDNPYLKYNHADAEFQERLKEDTSFGGNLARAVFQAKKRVLEPLGLVEEPVKTAPGKKRPVEHSPAEPDSSSGTGKSGQQPARKRLNFGQTGDADSVPDPQPLGQPPAAPSGLGTNTMASGSGAPMADNNEGADGVGNSSGNWHCDSQWLGDRVITTSTRTWALPTYNNHLYKQISSQSGASNDNHYFGYSTPWGYFDFNRFHCHFSPRDWQRLINNNWGFRPKRLNFKLFNIQVKEVTQNDGTTTIANNLTSTVQVFTDSEYQLPYVLGSAHQGCLPPFPADVFMVPQYGYLTLNNGSQAVGRSSFYCLEYFPSQMLRTGNNFTFSYTFEDVPFHSSYAHSQSLDRLMNPLIDQYLYYLNRTQSNSGTLQQSRLLFSQAGPTSMSLQAKNWLPGPCYRQQRLSKQANDNNNSNFPWTAATKYHLNGRDSLVNPGPAMASHKDDEEKFFPMHGTLIFGKQGTNANDADLEHVMITDEEEIRTTNPVATEQYGNVSNNLQNSNTGPTTENVNHQGALPGMVWQDRDVYLQGPIWAKIPHTDGHFHPSPLMGGFGLKHPPPQIMIKNTPVPANPPTNFSAAKFASFITQYSTGQVSVEIEWELQKENSKRWNPEIQYTSNYNKSVNVDFTVDANGVYSEPRPIGTRYLTRNL

SEQ ID NO: 2746 - protein, 735 aa, Artificial Sequence
  source: /note="Description of Artificial Sequence: Synthetic polypeptide"
MAADGYLPDWLEDTLSEGIRQWWKLKPGPPPPRPAERHQDDSRGLVLPGYKYLGPFNGLDKGEPVNEADAAALEHDKAYDRQLDSGDNPYLKYNHADAEFQERLKEDTSFGGNLGRAVFQAKKRVLEPLGLVEEPVKTAPGKKRPVEHSPAEPDSSSGTGKAGQQPARKRLNFGQTGDADSVPDPQPLGQPPAAPTSLGSTTMATGSGAPMADNNEGADGVGNSSGNWHCDSQWLGDRVITTSTRTWALPTYNNHLYKQISSQSGASNDNHYFGYSTPWGYFDFNRFHCHFSPRDWQRLINNNWGFRPKRLNFKLFNIQVKEVTQNDGTTTIANNLTSTVQVFTDSEYQLPYVLGSAHQGCLPPFPADVFMVPQYGYLTLNNGSQAVGRSSFYCLEYFPSQMLRTGNNFTFSYTFEDVPFHSSYAHSQSLDRLMNPLIDQYLYYLNRTQSNSGTLQQSRLLFSQAGPTSMSLQAKNWLPGPCYRQQRLSKQANDNNNSNFPWTAATKYHLNGRDSLVNPGPAMASHKDDEEKFFPMHGTLIFGKQGTNANDADLEHVMITDEEEIRTTNPVATEQYGNVSNNLQNSNTGPTTENVNHQGALPGMVWQDRDVYLQGPIWAKIPHTDGHFHPSPLMGGFGLKHPPPQILIKNTPVPANPSTTFSAAKFASFITQYSTGQVSVEIEWELQKENSKRWNPEIQYTSNYNKSVNVDFTVDTNGVYSEPRPIGTRYLTRNL

SEQ ID NO: 2747 - protein, 735 aa, Artificial Sequence
  source: /note="Description of Artificial Sequence: Synthetic polypeptide"
MAADGYLPDWLEDTLSEGIRQWWKLKPGPPPPRPAERHQDDSRGLVLPGYKYLGPFNGLDKGEPVNEADAAALEHDKAYDRQLDSGDNPYLKYNHADAEFQERLKEDTSFGGNLGRAVFQAKKRVLEPLGLVEEPVKTAPGKKRPVEHSPAEPDSSSGTGKAGQQPARKRLNFGQTGDADSVPDPQPLGQPPAAPTSLGSTTMATGSGAPMADNNEGADGVGNSSGNWHCDSQWLGDRVITTSTRTWALPTYNNHLYKQISSQSGASNDNHYFGYSTPWGYFDFNRFHCHFSPRDWQRLINNNWGFRPKRLNFKLFNIQVKEVTQNDGTTTIANNLTSTVQVFTDSEYQLPYVLGSAHQGCLPPFPADVFMVPQYGYLTLNNGSQAVGRSSFYCLEYFPSQMLRTGNNFTFSYTFEDVPFHSSYAHSQSLDRLMNPLIDQYLYYLNRTQSNSGTLQQSRLLFSQAGPTSMSLQAKNWLPGPCYRQQRLSKQANDNNNSNFPWTAATKYHLNGRDSSVNPGPAMASHKDDEEKFFSMHGTLIFGKQGTNANDADLEHVMITDEEEIRTTNPVATEQYGNVSNNLQNSNTGPTTENVNHQGALPGMVWQDRDVYLQGPIWAKIPHTDGHFHPSPLMGGFGLKHPPPQIMIKNTPVPANPPTNFSAAKFASFITQYSTGQVSVEIEWELQKENSKRWNPEIQYTSNYNKSVNVDFTVDANGVYSEPRPIGTRYLTRNL

SEQ ID NO: 2748 - protein, 735 aa, Artificial Sequence
  source: /note="Description of Artificial Sequence: Synthetic polypeptide"
MAADGYLPDWLEDTLSEGIRQWWKLKPGPPPPRPAERHQDDSRGLVLPGYKYLGPFNGLDKGEPVNEADAAALEHDKAYDRQLDSGDNPYLKYNHADAEFQERLKEDTSFGGNLGRAVFQAKKRVLEPLGLVEEPVKTAPGKKRPVEHSPAEPDSSSGTGKAGQQPARKRLNFGQTGDADSVPDPQPLGQPPAAPTSLGSTTMATGSGAPMADNNEGADGVGNSSGNWHCDSQWLGDRVITTSTRTWALPTYNNHLYKQISSQSGASNDNHYFGYSTPWGYFDFNRFHCHFSPRDWQRLINNNWGFRPKRLNFKLFNIQVKEVTQNDGTTTIANNLTSTVQVFTDSEYQLPYVLGSAHQGCLPPFPAGVFMVPQYGYLTLNNGSQAVGRSSFYCLEYFPSQMLRTGNNFTFSYTFEDVPFHSSYAHSQSLDRLMNPLIDQYLYYLNRTQSNSGTLQQSRLLFSQAGPTSMSLQAKNWLPGPCCRQQRLSKQANDNNNSNFPWTAATKYHLNGRDSLVNPGPAMASHKDDEEKFFPMHGTLIFGKQGTNANDADLEHVMITDEEEIRTTNPVATEQYGNVSNNLQNSNTGPTTENVNHQGALPGMVWQDRDVYLQGPIWAKIPHTDGHFHPSPLMGGFGLKHPPPQIMIKNTPVPANPPTNFSAAKFASFITQYSTGQVSVEIEWELQKENSKRWNPEIQYTSNYNKSVNVDFTVDANGVYSEPRPIGTRYLTRNL

SEQ ID NO: 2749 - protein, 735 aa, Artificial Sequence
  source: /note="Description of Artificial Sequence: Synthetic polypeptide"
MAADGYLPDWLEDTLSEGIRQWWKLKPGPPPPRPAERHQDDSRGLVLPGYKYLGPFNGLDKGEPVNEADAAALEHDKAYDRQLDSGDNPYLKYNHADAEFQERLKEDTSFGGNLGRAVFQAKKRVLEPLGLVEEPVKTAPGKKRPVEHSPAEPDSSSGTGKAGQQPARKRLNFGQTGDADSVPDPQPPGQPPAAPTSLGSTTMATGSGAPMADNNEGADGVGNSSGNWHCDSQWLGDRVITTSTRTWALPTYNNHLYKQISSQSGASNDNHYFGYSTPWGYFDFNRFHCHFSPRDWQRLINNNWGFRPKRLNFKLFNIQVKEVTQNDGTTTIANNLTSTVQVFTDSEYQLPYVLGSAHQGCLPPFPADVFMVPQYGYLTLNNGSQAVGRSSFYCLEYFPSQMLRTGNNFTFSYTFEDVPFHSSYAHSQSLDRLMNPLIDQYLYYLNRTQSNSGTLQQSRLLFSQAGPTSMSLQAKNWLPGPCYRQQRLSKQANDNNNSNFPWTAATKYHLNGRDSLVNPGPAMASHKDDEEKFFPMHGTLIFGKQGTNANDADLEHVMITDEEEIRTTNPVATEQYGNVSNNLQNSNTGPTTENVNHQGALPGMVWQDRDVYLQGPIWAKIPHTDGHFHPSPLMGGFGLKHPPPQIMIKNTPVPANPPTNFSAAKFASFITQYSTGQVSVEIEWELQKENSKRWNPEIQYTSNYNKSVNVDFTVDANGVYSEPRPIGTRYLTRNL

SEQ ID NO: 2750 - protein, 735 aa, Artificial Sequence
  source: /note="Description of Artificial Sequence: Synthetic polypeptide"
MAADGYLPDWLEDTLSEGIRQWWKLKPGPPPPRPAERHQDDSRGLVLPGYKYLGPFNGLDKGEPVNEADAAALEHDKAYDRQLDSGDNPYLKYNHADAEFQERLKEDTSFGGNLGRAVFQAKKRVLEPLGLVEEPVKTAPGKKRPVEHSPAEPDSSSGTGKAGQQPARKRLNFGQTGDADSVPDPQPLGQPPAAPTSLGSTTMATGSGAPMADNNEGADGVGNSSGNWHCDSQWLGDRVITTSTRTWALPTYNNHHYKQISSQSGASNDNHYFGYSTPWGYFDFNRFHCHFSPRDWQRLINNNWGFRPKRLNFKLFNIQVKEVTQNDGTTTIANNLTSTVQVFTDSEYQLPYVLGSAHQGCLPPFPADVFMVPQYGYLTLNNGSQAVGRSSFYCLEYFPSQMLRTGNNFTFSYTFEDVPFHSSYAHSQSLDRLMNPLIDQYLYYLNRTQSNSGTLQQSRLLFSQAGPTSMSLQAKNWLPGPCYRQQRLSKQANDNNNSNFPWTAATKYHLNGRDSLVNPGPAMASHKDDEEKFFPMHGTLIFGKQGTNANDADLEHVMITDEEEIRTTNPVATEQYGNVSNNLQNSNTGPTTEDVNHQGALPGMVWQDRDVYLQGPIWAKIPHTDGHFHPSPLMGGFGLKHPPPQIMIKNTPVPANPPTNFSAAKFASFITQYSTGQVSVEIEWELQKENSKRWNPEIQYTSNYNKSVNVDFTVDANGVYSEPRPIGTRYLTRNL

SEQ ID NO: 2751 - protein, 735 aa, Artificial Sequence
  source: /note="Description of Artificial Sequence: Synthetic polypeptide"
MAADGYLPDWLEDTLSEGIRQWWKLKPGPPPPRPAERHQDDSRGLVLPGYKYLGPFNGLDKGEPVNEADAAALEHDKAYDRQLDSGDNPYLKYNHADAEFQERLKEDTSFGGNLGRAVFQAKKRVLEPLGLVEEPVKTAPGKKRPVEHSPAEPDSSSGTGKAGQQPARKRLNFGQTGDADSVPDPRPLGQPPAAPTSLGSTTMATGSGAPMADNNEGADGVGNSSGNWHCDSQWLGDRVITTSTRTWALPTYNNHLYKQISSQSGASNDNHYFGYSTPWGYFDFNRFHCHFSPRDWQRLINNNWGFRPKRLNFKLFNIQVKEVTQNDGTTTIANNLTSTVQVFTDSEYQLPYVLGSAHQGCLPPFPADVFMVPQYGYLTLNNGSQAVGRSSFYCLEYFPSQMLRTGNNFTFSYTFEDVPFHSSYAHSQSLDRLMNPLIDQYLYYLNRTQSNSGTLQQSRLLFSQAGPTSMSLQAKNWLPGPCYRQQRLSKQANDNNNSNFPWTAATKYHLNGRDSLVNPGPAMASHKDDEEKFFPMHGTLIFGKQGTNANDADLEHVMITDEEEIRTTDPVATEQYGNVSNNLQNSNTGPTTENVNHQGALPGMVWQDRDVYLQGPIWAKIPHTDGHFHPSPLMGGFGLKHPPPQIMIKNTPVPANPPTNFSAAKFASFITQYSTGQVSVEIEWELQKENSKRWNPEIQYTSNYNKSVNVDFTVDANGVYSEPRPIGTRYLTRNL

SEQ ID NO: 2752 - protein, 735 aa, Artificial Sequence
  source: /note="Description of Artificial Sequence: Synthetic polypeptide"
MAADGYLPDWLEDTLSEGIRQWWKLKPGPPPPRPAERHQDDSRGLVLPGYKYLGPFNGLDKGEPVNEADAAALEHDKAYDRQLDSGDNPYLKYNHADAEFQERLKEDTSFGGNLGRAVFQAKKRVLEPLGLVEEPVKTAPGKKRPVEHSPAEPDSSSGTGKAGQQPARKRLNFGQTGDADSVPDPQPLGQPPAAPTSLGSTTMATGSGAPMADNNEGADGVGNSSGNWHCDSQWLGDRVITTSTRTWALPTYNNHLYKQISSQSGASNDNHYFGYSTPWGYFDFNRFHCHFSPRDWQRLINNNWGFRPKRLNFKLFNIQVKEVTQNDGTTTIANNLTSTVQVFTDSEYQLPYVLGSAHQGCLPPFPADVFMVPQYGYLTLNNGSQAVGRSSFYCLEYFPSQMLRTGNNFTFSYTFEDVPFHSSYAHSQSLDRLMNPLIDQYLYYLNRTQSNSGTLQQSRLLFSQAGPTSMSLQAKNWLPGPCYRQQRLSKQANDNNNSNFPWTAATKYHLNGRDSLVNPGPAMASHKDDEEKFFPMHGTLIFGKQGTNANDADLEHVMITDEEEIRTTNPVATEQYGNVSNNLQNSNTGPTTGNVNHQGALPGMVWQDRDVYLQGPIWAKIPHTDGHFHPSPLMGGFGLKHPPPQIMIKNTPVPANPPTNFSAAKFASFITQYSTGQVSVEIEWELQKENSKRWNPEIQYTSNYNKSVNVDFTVDANGVYSEPRPIGTRYLTRNL

SEQ ID NO: 2753 - protein, 735 aa, Artificial Sequence
  source: /note="Description of Artificial Sequence: Synthetic polypeptide"
MAADGYLPDWLEDTLSEGIRQWWKLKPGPPPPRPAERHQDDSRGLVLPGYKYLGPFNGLDKGEPVNEADAAALEHDKAYDRQLDSGDNPYLKYNHADAEFQERLKEDTSFGGNLGRAVFQAKKRVLEPLGLVEEPVKTAPGKKRPVEHSPAEPDSSSGTGKAGQQPARKRLNFGQTGDADSVPDPQPLGQPPAAPTSLGSTTMATGSGAPMADNNEGADGVGNSSGDWHCDSQWLGDRVITTSTRTWALPTYNNHLYKQISSQSGASNDNHYFGYSTPWGYFDFNRFHCHFSPRDWQRLINNNWGFRPKRLNFKLFNIQVKEVTQNDGTTTIANNLTSTVQVFTDSEYQLPYVLGSAHQGCLPPFPADVFMVPQYGYLTLNNGSQAVGRSSFYCLEYFPSQMLRTGNNFTFSYTFEDVPFHSSYAHSQSLDRLMNPLIDQYLYYLNRTQSNSGTLQQSRLLFSQAGPTSMSLQAKNWLPGPCYRQQRLSKQANDNNNSNFPWTAATKYHLNGRDSLVNPGPAMASHKDDEEKFFPMHGTLIFGKQGTNANDADLEHVMITDEEEIRTTNPVATEQYGNVSNSLQNSNTGPTTENVNHQGALPGMVWQDRDVYLQGPIWAKIPHTDGHFHPSPLMGGFGLKHPPPQIMIKNTPVPANPPTNFSAAKFASFITQYSTGQVSVEIEWELQKENSKRWNPEIQYTSNYNKSVNVDFTVDANGVYSEPRPIGTRYLTRNL

SEQ ID NO: 2754 - protein, 735 aa, Artificial Sequence
  source: /note="Description of Artificial Sequence: Synthetic polypeptide"
MAADGYLPDWLEDILSEGIRQWWKLKPGPPPPKPAERHKDDSRGLVLPGYKYLGPFNGLDKGEPVNEADAAALEHDKAYDRQLDSGDNPYLKYNHADAEFQERLKEDTSFGGNLGRAVFQAKKRVLEPLGLVEEPVKTTPGKKRPVEQSPAEPDSSSGTGKAGNQPARKRLNFGQTGDADSVPDPQPLGQPPAAPSGLGSTTMATGSGAPMADNNEGADGVGNSSGNWHCDSQWLGDRVITTSTRTWALPTYNNHLYKQISSQSGASNDNHYFGYSTPWGYFDFNRFHCHFSPRDWQRLINNNWGFRPKRLNFKLFNIQVKEVTQNDGTTTIANNLTSTVQVFTDSEYQLPYVLGSAHQGCLPPFPADVFMVPQYGYLTLNNGSQAVGRSSFYCLEYFPSQMLRTGNNFTFSYTFEDVPFHSSYAHSQSLDRLMNPLIDQYLYYLNKTQSNSGTLQQSRLLFSQAGPTSMSLQAKNWLPGPCYRQQRLSKQANDNNNSNFPWTAATKYHLNGRDSLVNPGPAMASHKDDEEKFFPMHGTLIFGKQGTNANDADLDNVMITDEEEIRTTNPVATEQYGTVSNNLQNSNTGPTTGTVNHQGALPGMVWQDRDVYLQGPIWAKIPHTDGHFHPSPLMGGFGLKHPPPQIMIKNTPVPANPPTNFSSAKFASFITQYSTGQVSVEIEWELQKENSKRWNPEIQYTSNYNKSVNVDFTVDTNGVYSEPRPIGTRYLTRNL

SEQ ID NO: 2755 - protein, 735 aa, Artificial Sequence
  source: /note="Description of Artificial Sequence: Synthetic polypeptide"
MAADGYLPDWLEDILSEGIRQWWKLKPGPPPPKPAERHKDDSRGLVLPGYKYLGPFNGLDKGEPVNEADAAALEHDKAYDRQLDSGDNPYLKYNHADAEFQERLKEDTSFGGNLGRAVFQAKKRVLEPLGLVEEPVKTAPGKKRPVEQSPAEPDSSSGTGKAGNQPARKRLNFGQTGDADSVPDPQPLGQPPAAPSGLGSTTMATGSGAPMADNNEGADGVGNSSGNWHCDSQWLGDRVITTSTRTWALPTYNNHLYKQISSQSGASNDNHYFGYSTPWGYFDFNRFHCHFSPRDWQRLINNNWGFRPKRLNFKLFNIQVKEVTQNDGTTTIANNLTSTVQVFTDSEYQLPYVLGSAHQGCLPPFPADVFMVPQYGYLTLNNGSQAVGRSSFYCLEYFPSQMLRTGNNFTFSYTFEDVPFHSSYAHSQSLDRLMNPLIDQYLYYLNKTQSNSGTLQQSRLLFSQAGPTSMSLQAKNWLPGPCYRQQRLSKQANDNNNSNFPWTAATKYHLNGRDSLVNPGPAMASHKDDEEKFFPMHGTLIFGKQGTNANDADLDNVMITDEEEIRTTNPVATEQYGTVSNNLQNSNTGPTTGTVNHQGALPGMVWQDRDVYLQGPIWAKIPHTDGHFHPSPLMGGFGLKHPPPQIMIKNTPVPANPPTNFSSAKFASFITQYSTGQVSVEIEWELQKENSKRWNPEIQYTSNYNKSVNVDFTVDTNGVYSEPRPIGTRYLTRNL

SEQ ID NO: 2756 - protein, 735 aa, Artificial Sequence
  source: /note="Description of Artificial Sequence: Synthetic polypeptide"
MAADGYLPDWLEDILSEGIRQWWKLKPGPPPPKPAERHKDDSRGLVLPGYKYLGPFNGLDKGEPVNEADAAALEHDKAYDRQLDSGDNPYLKYNHADAEFQERLKEDTSFGGNLGRAVFQAKKRVLEPLGLVEEPVKTAPGKKRPVEQSPAEPDSSSGTGKAGNQPARKRLNFGQTGDADSVPDPQPLGQPPAAPSGLGSTTMATGSGAPMADNNEGADGVGNSSGNWHCDSQWLGDRVITTSTRTWALPTYNNHLYKQISSQSGASNDNHYFGYSTPWGYFDFNRFHCHFSPRDWQRLINNNWGFRPKRLNFKLFNIQVKEVTQNDGTTTIANNLTSTVQVFTDSEYQLPYVLGSAHQGCLPPFPADVFMVPQYGYLTLNNGSQAVGRSSFYCLEYFPSQMLRTGNNFTFSYTFEDVPFHSGYAHSQSLDRLMNPLIDQYLYYLNKTQSNSGTLQQSRLLFSQAGPTSMSLQAKNWLPGPCYRQQRLSKQANDNNNSNFPWTAATKYHLNGRDSLVNPGPAMASHKDDEEKFFPMHGTLIFGKQGTNANDADLDNVMITDEEEIRTTNPVATEQYGTVSNNLQNSNTGPTTGTVNHQGALPGMVWQDRDVYLQGPIWAKIPHTDGHFHPSPLMGGFGLKHPPPQIMIKNTPVPANPPTNFSSAKFASFITQYSTGQVSVEIEWELQKENSKRWNPEIQYTSNYNKSVNVDFTVDTNGVYSEPRPIGTRYLTRNL

SEQ ID NO: 2757 - protein, 734 aa, Artificial Sequence
  source: /note="Description of Artificial Sequence: Synthetic polypeptide"
MAADGYLPDWLEDILSEGIRQWWKLKPGPPPKPAERHKDDSRGLVLPGYKYLGPFNGLDKGEPVNEADAAALEHDKAYDRQLDSGDNPYLKYNHADAEFQERLKEDTSFGGNLGRAVFQAKKRVLEPLGLVEEPVKTAPGKKRPVEQSPAEPDSSSGTGKAGNQPARKRLNFGQTGDADSVPDPQPLGQPPAAPSGLGSTTMATGSGAPMADNNEGADGVGNSSGNWHCDSQWLGDRVITTSTRTWALPTYNNHLYKQISSQSGASNDNHYFGYSTPWGYFDFNRFHCHFSPRDWQRLINNNWGFRPKRLNFKLFNIQVKEVTQNDGTTTIANNLTSTVQVFTDSEYQLPYVLGSAHQGCLPPFPADVFMVPQYGYLTLNNGSQAVGRSSFYCLEYFPSQMLRTGNNFTFSYTFEDVPFHSSYAHSQSLDRLMNPLIDQYLYYLNKTQSNSGTLQQSRLLFSQAGPTSMSLQAKNWLPGPCYRQQRLSKQANDNNNSNFPWTAATKYHLNGRDSLVNPGPAMASHKDDEEKFFPMHGTLIFGKQGTNANDADLDNVMITDEEEIRTTNPVATEQYGTVSNNLQNSNTGPTTGTVNHQGALPGMVWQDRDVYLQGPIWAKIPHTDGHFHPSPLMGGFGLKHPPPQIMIKNTPVPANPPTNFSSAKFASFITQYSTGQVSVEIEWELQKENSKRWNPEIQYTSNYNKSVNVDFTVDTNGVYSEPRPIGTRYLTRNL

SEQ ID NO: 2758 - protein, 735 aa, Artificial Sequence
  source: /note="Description of Artificial Sequence: Synthetic polypeptide"
MAADGYLPDWLEDTLSEGIRQWWKLKPGPPPPRPAERHQDDSRGLVLPGYKYLGPFNGLDKGEPVNEADAAALEHDKAYDRQLDSGDNPYLKYNHADAEFQERLKEDTSFGGNLGRAVFQAKKRVLEPLGLVEEPVKTAPGKKRPVEHSPAEPDSSSGTGKAGQQPARKRLNFGQTGDADSVPDPQPLGQPPAAPTSLGSTTMATGSGAPMADNNEGADGVGNSSGNWHCDSQWLGDRVITTSTRTWALPTYNNHLYKQISSQSGASNDNHYFGYSTPWGYFDFNRFHCHFSPRDWQRLINNNWGFRPKRLNFKLFNIQVKEVTQNDGTTTIANNLTSTVQVFTDSEYQLPYVLGSAHQGCLPPFPADVFMVPQYGYLTLNNGSQAVGHSSSYCLEYFPSQMLRTGNNFTFSYTFEDVPFHSSYAHSQSLDRLMNPLIDQYLYYLNRTQSNSGTLQQSRLLFSQAGPTSMSLQAKNWLPGPCYRQQRLSKQANDNNNSNFPWTAATKYHLNGRDSLVNPGPAMASHKDDEEKFFPMHGTLIFGKQGTNANDADLEHVMITDEEEIRTTNPVATEQYGNVSNNLQNSNTGPTTENVNHQGALPGMVWQDRDVYLQGPIWAKIPHTDGHFHPSPLMGGFGLKHPPPQIMIKNTPVPANPPTNFSAAKFASFITQYSTGQVSVEIEWELQKENSKRWNPEIQYTSNYNKSVNVDFTVDTNGVYSEPRPIGTRYLTRNL

SEQ ID NO: 2759 - protein, 735 aa, Artificial Sequence
  source: /note="Description of Artificial Sequence: Synthetic polypeptide"
MAADGYLPDWLEDTLSEGIRQWWKLKPGPPPPKPAERHQDDSRGLVLPGHKYLGPFNGLDKGEPVNEADAAALEHDKAYDRQLDSGDNPYLKYNHADAEFQERLKEDTSFGGNLGRAVFQAKKRVLEPLGLVEEPVKTAPGKKRPVEHSPAEPDSSSGTGKAGQQPARKRLNFGQTGDADSVPDPQPLGQPPAAPTSLGSTTMATGSGAPMADNNEGADGVGNSSGNWHCDSQWLGDRVITTSTRTWALPTYNNHLYKQISSQSGASNDNHYFGYSTPWGYFDFNRFHCHFSPRDWQRLINNNWGFRPKRLNFKLFNIQVKEVTQNDGTTTIANNLTSTVQVFTDSEYQLPYVLGSAHQGCLPPFPADVFMVPQYGYLTLNNGSQAVGRSSFYCLEYFPSQMLRTGNNFTFSYTFEDVPFHSSYAHSQSLDRLMNPLIDQYLYYLNRTQSNSGTLQQSRLLFSQAGPTSMSLQAKNWLPGPCYRQQRLSKQANDNNNSNFPWTAATKYHLNGRDSLVNPGPAMASHKDDEEKFFPMHGTLIFGKQGTNANDADLEHVMITDEEEIRTTNPVATEQYGNVSNNLQNSNTGPTTENVNHQGALPGMVWQDRDVYLQGPIWAKIPHTDGHFHPSPLMGGFGLKHPPPQIMIKNTPVPANPPTNFSAAKFASFITQYSTGQVSVEIEWELQKENSKRWNPEIQYTSNYNKSVNVDFTVDANGVYSEPRPIGTRYLTRNL

SEQ ID NO: 2760 - protein, 735 aa, Artificial Sequence
  source: /note="Description of Artificial Sequence: Synthetic polypeptide"
MAADGYLPDWLEDTLSEGIRQWWKLKPGPPPPKPAERHKDDSRGLVLPGYKYLGPFNGLDKGEPVNEADAAALEHDKAYDRQLDSGDNPYLKYNHADAEFQERLKEDTSFGGNLGRAVFQAKKRVLEPLGLVEEPVKTAPGKKRPVEHSPAEPDSSSGTGKAGQQPARKRLNFGQTGDADSVPDPQPLGQPPAAPTSLGSTTMATGSGAPMADNNEGADGVGNSSGNWHCDSQWLGDRVITTSTRTWALPTYNNHLYKQISSQSGASNDNHYFGYSTPWGYFDFNRFHCHFSPRDWQRLINNNWGFRPKRLNFKLFNIQVKEVTQNDGTTTIANNLTSTVQVFTDSEYQLPYVLGSAHQGCLPPFPADVFMVPQYGYLTLNNGSQAVGRSSFYCLEYFPSQMLRTGNNFTFSYTFEDVPFHSSYAHSQSLDRLMNPLIDQYLYYLNRTQSNSGTLQQSRLLFSQAGPTSMSLQAKNWLPGPCYRQQRLSKQANDNNNSNFPWTAATKYHLNGRDSLVNPGPAMASHKDDEEKFFPMHGTLIFGKQGTNANDADLEHVMITDEEEIRTTNPVATEQYGNVSNNLQNSNTGPTTENVNHQGALPGMVWQDRDVYLQGPIWAKIPHTDGHFHPSPLMGGFGLKHPPPQIMIKNTPVPANPPTNFSAAKFASFITQYSTGQVSVEIEWELQKENSKRWNPEIQYTSNYNKSVNVDFTVDANGVYSEPRPIGTRYLTRNL

SEQ ID NO: 2761 - protein, 735 aa, Artificial Sequence
  source: /note="Description of Artificial Sequence: Synthetic polypeptide"
MAADGYLPDWLEDTLSEGIRQWWKLKPGPPPPRPAERHQDDSRGLVLPGYKYLGPFNGLDKGEPVNEADAAALEHDKAYDRQLDSGDNPYLKYNHADAEFQERLKEDTSFGGNLGRAVFQAKKRVLEPLGLVEEPVKTAPGKKRPVEHSPAEPDSSSGTGKAGQQPARKRLNFGQTGDADSVPDPQPLGQPPAAPTSLGSTTMATGSGAPMADNNEGADGVGNSSGNWHCDSQWLGDRVITTSTRTWALPTYNNHLYKQISSQSGASNDNHYFGYSTPWGYFDFNRFHCHFSPRDWQRLINNNWGFRPKRLNFKLFNIQVKEVTQNDGTTTIANNLTSTVQVFTDSEYQLPYVLGSAHQGCLPPFPADVFMVPQYGYLTLNNGSQAVGRSSSYCLEYFPSQMLRTGNNFTFSYTFEDVPFHSSYAHSQSLDRLMNPLIDQYLYYLNRTQSNSGTLQQSRLLFSQAGPTSMSLQAKNWLPGPCYRQQRLSKQANDNNNSNFPWTAATKYHLNGRDSLVNPGPAMASHKDDEEKFFPMHGTLIFGKQGTNANDADLEHVMITDEEEIRTTNPVATEQYGNVSNNLQNSNTGPTTENVNHQGALPGMVWQDRDVYLQGPIWAKIPHTDGHFHPSPLMGGFGLKHPPPQIMIKNTPVPANPPTNFSAAKFASFITQYSTGQVSVEIEWELQKENSKRWNPEIQYTSNYNKSVNVDFTVDANGVYSEPRPIGTRYLTRNL

SEQ ID NO: 2762 - protein, 735 aa, Artificial Sequence
  source: /note="Description of Artificial Sequence: Synthetic polypeptide"
MAADGYLPDWLEDTLSEGIRQWWKLKPGPPPPRPAERHQDDSRGLVLPGYKYLGPFNGLDKGEPVNEADAAALEHDKAYDRQLDSGDNPYLKYNHADAEFQERLKEDTSFGGNLGRAVFQAKKRVLEPLGLVEEPVKTAPGKKRPVEHSPAEPDSSSGTGKAGQQPARKRLNFGQTGDADSVPDPQPLGQPPAAPTSLGSTTMATGSGAPMADNNEGADGVGNSSGNWHCDSQWLGDRVITTSTRTWALPTYNNHLYKQISSQSGASNDNHYFGYSTPWGYFDFNRFHCHFSPRDWQRLINNNWGFRPKRLNFKLFNIQVKEVTQNDGTTTIANNLTSTVQVFTDSEYQLPYVLGSAHQGCLPPFPADVFMVPQYGYLTLNNGSQAVGRSSFYCLEYFPSQMLRTGNNFTFSYTFEDVPFHSSYAHSQSLDRLMNPLIDQYLYYPNRTQSNSGTLQQSRLLFSQAGPTSMSLQAKNWLPGPCYRQQRLSKQANDNNNSNFPWTAATKYHLNGRDSLVNPGPAMASHKDDEEKFFPMHGTLIFGKQGTNANDADLEHVMITDEEEIRTTNPVATEQYGNVSNNLQNSNTGPTTENVNHQGALPGMVWQDRDVYLQGPIWAKIPHTDGHFHPSPLMGGFGLKHPPPQIMIKNTPVPANPPTNFSAAKFASFITQYSTGQVSVEIEWELQKENSKRWNPEIQYTSNYNKSVNVDFTVDANGVYSEPRPIGTRYLTRNL

SEQ ID NO: 2763 - protein, 735 aa, Artificial Sequence
  source: /note="Description of Artificial Sequence: Synthetic polypeptide"
MAADGYLPDWLEDTLSEGIRQWWKLKPGPPPPRPAERHQDDSRGLVLPGYKYLGPFNGLDKGEPVNEADAAALEHDKAYDRQLDSGDNPYLKYNHADAEFQERLKEDTSFGGNLGRAVFQAKKRVLEPLGLVEEPVKTAPGKKRPVEHSPAEPDSSSGTGKAGQQPARKRLNFGQTGDADSVPDPQPLGQPPAAPTSLGSTTMATGSGAPMADNNEGADGVGNSSGNWHCDSQWLGDRVITTSTRTWALPTYNNHLYKQISSQSGASNDNHYFGYSTPWGYFDFNRFHCHFSPRDWQRLINNNWGFRPKRLNFKLFNIQVKEVTQNDGTTTIANNLTSTVQVFTDSEYQLPYVLGSAHQGCLPPFPADVFMVPQYGYLTLNNGSQAVGRSSFYCLEYFPSQMLRTGNNFTFSYTFEDVPFHSSYAHSQSLDRLMNPLIDQYLYYLNKTQSNSGTLQQSRLLFSQAGPTSMSLQAKNWLPGPCYRQQRLSKQANDNNNSNFPWTAATKYHLNGRDSLVNPGPAMASHKDDEEKFFPMHGTLIFGKQGTNANDADLDNVMITDEEEIRTTNPVATEQYGTVSNNLQNSNTGPTTGTVNHQGALPGMVWQDRDVYLQGPIWAKIPHTDGHFHPSPLMGGFGLKHPPPQIMIKNTPVPANPPTNFSSAKFASFITQYSTGQVSVEIEWELQKENSKRWNPEIQYTSNYNKSVNVDFTVDTNGVYSEPRPIGTRYLTRNL

SEQ ID NO: 2764 - protein, 735 aa, Artificial Sequence
  source: /note="Description of Artificial Sequence: Synthetic polypeptide"
MAADGYLPDWLEDTLSEGIRQWWKLKPGPPPPKPAERHQDDSRGLVLPGHKYLGPFNGLDKGEPVNEADAAALEHDKAYDRQLDSGDNPYLKYNHADAEFQERLKEDTSFGGNLGRAVFQAKKRVLEPLGLVEEPVKTAPGKKRPVEHSPAEPDSSSGTGKAGQQPARKRLNFGQTGDADSVPDPQPLGQPPAAPTSLGSTTMATGSGAPMADNNEGADGVGNSSGNWHCDSQWLGDRVITTSTRTWALPTYNNHLYKQISSQSGASNDNHYFGYSTPWGYFDFNRFHCHFSPRDWQRLINNNWGFRPKRLNFKLFNIQVKEVTQNDGTTTIANNLTSTVQVFTDSEYQLPYVLGSAHQGCLPPFPADVFMVPQYGYLTLNNGSQAVGHSSSYCLEYFPSQMLRTGNNFTFSYTFEDVPFHSSYAHSQSLDRLMNPLIDQYLYYLNRTQSNSGTLQQSRLLFSQAGPTSMSLQAKNWLPGPCYRQQRLSKQANDNNNSNFPWTAATKYHLNGRDSLVNPGPAMASHKDDEEKFFPMHGTLIFGKQGTNANDADLEHVMITDEEEIRTTNPVATEQYGNVSNNLQNSNTGPTTENVNHQGALPGMVWQDRDVYLQGPIWAKIPHTDGHFHPSPLMGGFGLKHPPPQIMIKNTPVPANPPTNFSAAKFASFITQYSTGQVSVEIEWELQKENSKRWNPEIQYTSNYNKSVNVDFTVDTNGVYSEPRPIGTRYLTRNL

SEQ ID NO: 2765 - protein, 735 aa, Artificial Sequence
  source: /note="Description of Artificial Sequence: Synthetic polypeptide"
MAADGYLPDWLEDTLSEGIRQWWKLKPGPPPPRPAERHQDDSRGLVLPGYKYLGPFNGLDKGEPVNEVDAAALEHDKAYDRQLDSGDNPYLKYNHADAEFQERLKEDTSFGGNLGRAVFQAKKRVLEPLGLVEEPVKTAPGKKRPVEHSPAEPDSSSGTGKAGQQPARKRLNFGQTGDADSVPDPQPLGQPPAAPTSLGSTTMATGSGAPMADNNEGADGVGNSSGNWHCDSQWLGDRVITTSTRTWALPTYNNHLYKQISSQSGASNDNHYFGYSTPWGYFDFNRFHCHFSPRDWQRLINNNWGFRPKRLNFKLFNIQVKEVTQSDGTTTIANNLTSTVQVFTDSEYQLPYVLGSAHQGCLPPFPADVFMVPQYGYLTLNNGSQAVGRSSFYCLEYFPSQMLRTGNNFTFSYTFEDVPFHSSYAHSQSLDRLMNPLIDQYLYYLNRTQSNSGTLQQSRLLFSQAGPTSMSLQAKNWLPGPCYRQQRLSKQANDNNNSNFPWTAATKYHLNGRDSLVNPGPAMASHKDDEEKFFPMHGTLIFGKQGTNANDADLEHVMITDEEEIRTTNPVATEQYGNVSNNLQNSNTGPTTENVNHQGALPGMVWQDRDVYLQGPIWAKIPHTDGHFHPSPLMGGFGLKHPPPQIMIKNTPVPANPPTNFSAAKFASFITQYSTGQVSVEIEWELQKENSKRWNPEIQYTSNYNKSVNVDFTVDANGVYSEPRPIGTRYLTRNL

SEQ ID NO: 2766 - protein, 735 aa, Artificial Sequence
  source: /note="Description of Artificial Sequence: Synthetic polypeptide"
MAADGYLPDWLEDTLSEGIRQWWKLKPGPPPPRPAERHQDDSRGLVLPGYKYLGPFNGLDKGEPVNEADAAALEHDKAYDRQLDSGDNPYLKYNHADAEFQERLKEDTSFGGNLGRAVFQAKKRVLEPLGLVEEPVKTAPGKKRPVEHSPAEPDSSSGTGKAGQQPARKRLNFGQTGDADSVPDPQPLGQPPAAPTSLGSTTMATGSGAPMADNNEGADGVGNSSGNWHCDSQWLGDRVITTSTRTWALPTYNNHLYKQISSQSGASNDNHYFGYSTPWGYFDFNRFHCHFSPRDWQRLINNNWGFRPKRLNFKLFNIQVKEVTQNDGTTTIANNLTSTVQVFTDSEYQLPYVLGSAHQGCLPPFPADVFMVPQYGYLTLNNGSQAVGRSSFYCLEYFPSQMLRTGNNFTFSYTFEDVPFHSSYAHSQSLDRLMNPLIDQYLYYLNRTQSNSGTLQQSRLLFSQAGPTSMSLQAKNWLPGPCYRQQRLSKQANDNNNSNFPWTAATKYHLNGRDSLVNPGPAMASHKDDEEKFFPMHGTLIFGKQGTNANDADLEHVMITDEEEIRTTNPVATEQYGNVSNNLQNSNTGPTTENVNHQGALPGMVWQDRDVYLQGPIWAKIPHTDGHFHPSPLMGGFGLKHPPPQIMIKNTPVPANPPTNFSAAKFASFITQYSTGQVSVEIEWELQKENSKRWNPEIQYTSNYNKSVNVDFTVDTNGVYSEPRPIGTRYLTRNL

SEQ ID NO: 2767 - protein, 735 aa, Artificial Sequence
  source: /note="Description of Artificial Sequence: Synthetic polypeptide"
MAADGYLPDWLEDTLSEGIRQWWKLKPGPPPPKPAERHQDDSRGLVLPGHKYLGPFNGLDKGEPVNEADAAALEHDKAYDRQLDSGDNPYLKYNHADAEFQERLKEDTSFGGNLGRAVFQAKKRVLEPLGLVEEPVKTAPGKKRPVEHSPAEPDSSSGTGKAGQQPARKRLNFGQTGDADSVPDPQPLGQPPAAPTSLGSTTMATGSGAPMADNNEGADGVGNSSGNWHCDSQWLGDRVITTSTRTWALPTYNNHLYKQISSQSGASNDNHYFGYSTPWGYFDFNRFHCHFSPRDWQRLINNNWGFRPKRLNFKLFNIQVKEVTQNDGTTTIANNLTSTVQVFTDSEYQLPYVLGSAHQGCLPPFPADVFMVPQYGYLTLNNGSQAVGHSSSYCLEYFPSQMLRTGNNFTFSYTFEDVPFHSSYAHSQSLDRLMNPLIDQYLYYLNRTQSNSGTLQQSRLLFSQAGPTSMSLQAKNWLPGPCYRQQRLSKQANDNNNSNFPWTAATKYHLNGRDSLVNPGPAMASHKDDEEKFFPMHGTLIFGKQGTNANDADLEHVMITDEEEIRTTNPVATEQYGNVSNNLQNSNTGPTTENVNHQGALPGMVWQDRDVYLQGPIWAKIPHTDGHFHPSPLMGGFGLKHPPPQIMIKNTPVPANPPTNFSAAKFASFITQYSTGQVSVEIEWELQKENSKRWNPEIQYTSNYNKSVNVDFTVDANGVYSEPRPIGTRYLTRNL

SEQ ID NO: 2768 - protein, 735 aa, Artificial Sequence
  source: /note="Description of Artificial Sequence: Synthetic polypeptide"
MAADGYLPDWLEDTLSEGIRQWWKLKPGPPPPRPAERHQDDSRGLVLPGYKYLGPFNGLDKGEPVNEADAAALEHDKAYDRQLDSGDNPYLKYNHADAEFQERLKEDTSFGGNLGRAVFQAKKRVLEPLGLVEEPVKTAPGKKRPVEHSPAEPDSSSGTGKAGQQPARKRLNFGQTGDADSVPDPQPLGQPPAAPTSLGSTTMATGSGAPMADNNEGADGVGNSSGNWHCDSQWLGDRVITTSTRTWALPTYNNHLYKQISSQSGASNDNHYFGYSTPWGYFDFNRFHCHFSPRDWQRLINNNWGFRPKRLNFKLFNIQVKEVTQNDGTTTIANNLTSTVQVFTDSEYQLPYVLGSAHQGCLPPFPADVFMVPQYGYLTLNNGSQAVGRSSFYCLEYFPSQMLRTGNNFTFSYTFEDVPFHSSYAHSQSLDRLMNPLIDQYLYYLNRTQSNSGTLQQSRLLFSQAGPTSMSLQAKNWLPGPCYRQQRLSKQANDNNNSNFPWTAATKYHLNGRDSLVNPGPAMASHKDDEEKFFPMHGTLIFGKQGTNANDADLEHVMITDEEEIRTTNPVATEQYGNVSNNLQNSNTGPTTENVNHQGALPGMVWQDRDVYLQGPIWAKIPHTDGHFHPSPLMGGFGLKHPPPQIMIKNTPVPANPPTNFSAAKFASFITQYSTGQASVEIEWELQKENSKRWNPEIQYTSNYNKSVNVDFTVDANGVYSEPRPIGTRYLTRNL

SEQ ID NO: 2769 - protein, 735 aa, Artificial Sequence
  source: /note="Description of Artificial Sequence: Synthetic polypeptide"
MAADGYLPDWLEDTLSEGIRQWWKLKPGPPPPKPAGRHKDDSRGLVLPGYKYLGPFNGLDKGEPVNEADAAALEHDKAYDRQLDSGDNPYLKYNHAGAEFQERLKEDTSFGGNLGRAVFQAKKRVLEPLGLVEEPVKTAPGKKRPVEHSPVEPDSSSGTGKAGQQPARKRLNFGQTGDADSVPDPQPLGQPPAAPTSLGSTTMATGSGAPMADNNEGADGVGNSSGNWHCDSQWLGDRVITTSTRTWALPTYNNHLYKQISSQSGAANDNHYFGYSTPWGYFDFNRFHCHFSPRDWQRLINNNWGFRPKRLNFKLFNIQVKEVTQNDGTTTIANNLTSTVQVFTDSEYQLPYVLGSAHQGCLPPFPADVFMVPQYGYLTLNNGSQAVGRSSFYCLEYFPSQMLRTGNNFTFSYTFEDVPFHSSYAHSQSLDRLMNPLIDQYLYYLNRTQSNSGTLQQSRLLFSQAGPTSMSLQAKNWLPGPCYRQQRLSKQANDNNNSNFPWTAATKYHLNGRDSLVNPGPAMASHKDDEEKFFPMHGTLIFGKQGTNANDADLEHVMITDEEEIRTTNPVATEQYGNVSNNLQNSNTGPTTENVNHQGALPGMVWQDRDVYLQGPIWAKIPHTDGHFHPSPLMGGFGLKHPPPQIMIKNTPVPANPPTNFSAAKFASFITQYSTGQVSVEIEWELQKENSKRWNPEIQYTSNYNKSVNVDFTVDANGVYSEPRPIGTRYLTRNL

SEQ ID NO: 2770 - protein, 735 aa, Artificial Sequence
  source: /note="Description of Artificial Sequence: Synthetic polypeptide"
MAADGYLPDWLEDTLSEGIRQWWKLKPGPPPPRPAERHQDDSRGLVLPGYKYLGPFNGLDKGEPVNEADAAALEHDKAYDRQLDSGDNPYLKYNHADAEFQERLKEDTSFGGNLGRAVFQAKKRVLEPLGLVEEPVKTAPGKKRPVEHSPAEPDSSSGTGKAGQQPARKRLNFGQTGDADSVPDPQPLGQPPAAPTSLGSTTMATGSGAPMADNNEGADGVGNSSGNWHCDSQWLGDRVITTSTRTWALPTYNNHLYKQISSQSGASNDNHYFGYSTPWGYFDFNRFHCHFSPRDWQRLINNNWGFRPKRLNFKLFNIQVKEVTQNDGTTTIANNLTSTVQVFTDSEYQLPYVLGSAHQGCLPPFPADVFMVPQYGYLTLNNGSQAVGRSSFYCLEYFPSQMLRTGNNFTFSYTFEDVPFHSSYAHSQSLDRLMNPLIDQYLYYLNRTQSNSGTLQQSRLLFSQAGPTSMSLQAKNWLPGPCYRQQRLSKQANDNNNSNFPWTAATKYHLNGRDSLVNPGPAMASHKDDEEKFFPMHGTLIFGKQGTNANDADLEHVMITDEEEIRTTNPVATEQYGNVSNNLQNSNTGPTTENVNHQGALPGMVWQDRDVYLQGPIWAKIPHTDGHFHPSPLMGGFGLKHPPPQIMIKNTPVPAYPPTNFSAAKFASFITQYSTRQVSVEIEWELQKENSKRWNPEIQYTSNYNKSVNVDFTVDANGVYSEPRPIGTRYLTRNL

SEQ ID NO: 2771 - protein, 735 aa, Artificial Sequence
  source: /note="Description of Artificial Sequence: Synthetic polypeptide"
MAADGYLPDWLEDTLSEGIRQWWKLKPGPPPPRPAERHQDDSRGLVLPGYKYLGPFNGLDKGEPVNEADAAALEHDKAYDRQLDSGDNPYLKYNHADAEFQERLKEDTSFGGNLGRAVFQAKKRVLEPLGLVEEPVKTAPGKKRPVEHSPAEPDSSSGTGKAGQQPARKRLNFGQTGDADSVPDPQPLGQPPAAPTSLGSTTMATGSGAPMADNNEGADGVGNSSGNWHCDSQWLGDRVITTSTRTWALPTYNNHLYKQISSQSGASNDNHYFGYSTPWGYFDFNRFHCHFSPRDWQRLINNNWGFRPKRLNFKLFNIQVKEVTQNDGTTTIANNLTSTVQVFTDSEYQLPYVLGSAHQGCLPPFPADVFMVPQYGYLTLNNGSQAVGRSSFYCLEYFPSQMLRTGNNFTFSYTFEDVPFHSSYAHSQSLDRLMNPLIDQYLYYLNRTQSNSGTLQQSRLLFSQAGPTSMSLQAKNWLPGPCYRQQRLSKQANDNNNSNFPWTAATKYHLNGRDSLVNPGPAMASHKDDEEKFFPMHGTLIFGKQGTNANDADLDNVMITDEEEIRTTNPVATEQYGTVSNNLQNSNTGPTTGTVNHQGALPGMVWQDRDVYLQGPIWAKIPHTDGHFHPSPLMGGFGLKHPPPQIMIKNTPVPANPPTNFSSAKFASFITQYSTGQVSVEIEWELQKENSKRWNPEIQYTSNYNKSVNVDFTVDTNGVYSEPRPIGTRYLTRNL

SEQ ID NO: 2772 - protein, 735 aa, Artificial Sequence
  source: /note="Description of Artificial Sequence: Synthetic polypeptide"
MAADGYLPDWLEDILSEGIRQWWKLKPGPPPPKPAERHKDDSRGLVLPGYKYLGPFNGLDKGEPVNEADAAALEHDKAYDRQLDSGDNPYLKYNHADAEFQERLKEDTSFGGNLGRAVFQAKKRVLEPLGLVEEPVKTAPGKKRPVEQSPAEPDSSSGTGKAGNQPARKRLNFGQTGDADSVPDPQPLGQPPAAPSGLGSTTMATGSGAPMADNNEGADGVGNSSGNWHCDSQWLGDRVITTSTRTWALPTYNNHLYKQISSQSGAANDNHYFGYSTPWGYFDFNRFHCHFSPRDWQRLINNNWGFRPKRLNFKLFNIQVKEVTQNDGTTTIANNLTSTVQVFTDSEYQLPYVLGSAHQGCLPPFPADVFMVPQYGYLTLNNGSQAVGRSSFYCLEYFPSQMLRTGNNFTFSYTFEDVPFHSSYAHSQSLDRLMNPLIDQYLYYLNKTQSNSGTLQQSRLLFSQAGPTSMSLQAKNWLPGPCYRQQRLSKQANDNNNSNFPWTAATKYHLNGRDSLVNPGPAMASHKDDEEKFFPMHGTLIFGKQGTNANDADLDNVMITDEEEIRTTNPVATEQYGTVSNNLQNSNTGPTTGTVNHQGALPGMVWQDRDVYLQGPIWAKIPHTDGHFHPSPLMGGFGLKHPPPQIMIKNTPVPANPPTNFSSAKFASFITQYSTGQVSVEIEWELQKENSKRWNPEIQYTSNYNKSVNVDFTVDTNGVYSEPRPIGTRYLTRNL

SEQ ID NO: 2773 - protein, 735 aa, Artificial Sequence
  source: /note="Description of Artificial Sequence: Synthetic polypeptide"
MAADGYLPDWLEDTLSEGIRQWWKLKPGPPPPRPAERHQDDSRGLVLPGYKYLGPFNGLDKGEPVNEADAAALEHDKAYDRQLDSGDNPYLKYNHAGAEFQERLKEDTSFGGNLGRAVFQAKKRVLEPLGLVEEPVKTAPGKKRPVEHSPVEPDSSSGTGKAGQQPARKRLNFGQTGDADSVPDPQPLGQPPAAPTSLGSTTMATGSGAPMADNNEGADGVGNSSGNWHCDSQWLGDRVITTSTRTWALPTYNNHLYKQISSQSGAANDNHYFGYSTPWGYFDFNRFHCHFSPRDWQRLINNNWGFRPKRLNFKLFNIQVKEVTQNDGTTTIANNLTSTVPVFTDSEYQLPYVLGSAHQGCLPPFPADVFMVPQYGYLTLNNGSQAVGRSSFYCLEYFPSQMLRTGNNFTFSYTFEDVPFHSSYAHSQSLDRLMNPLIDQYLYYLNKTQSNSGTLQQSRLLFSQAGPTSMSLQAKNWLPGPCYRQQRLSKQANDNNNSNFPWTAATKYHLNGRDSLVNPGPAMASHKDDEEKFFPMHGTLIFGKQGTNANDADLDNVMITDEEEIRTTNPVATEQYGTVSNNLQNSNTGPTTGTVNHQGALPGMVWQDRDVYLQGPIWAKIPHTDGHFHPSPLMGGFGLKHPPPQIMIKNTPVPANPPTNFSSAKFASFITQYSTGQVSVEIEWELQKENSKRWNPEIQYTSNYNKSVNVDFTVDTNGVYSEPRPIGTRYLTRNL

SEQ ID NO: 2774 - protein, 734 aa, Artificial Sequence
  source: /note="Description of Artificial Sequence: Synthetic polypeptide"
MAADGYLPDWLEDTLSEGIRQWWKLKPGPPPRPAERHQDDSRGLVLPGYKYLGPFNGLDKGEPVNEADAAALEHDKAYDRQLDSGDNPYLKYNHADAEFQERLKEDTSFGGNLGRAVFQAKKRVLEPLGLVEEPVKTAPGKKRPVEHSPAEPDSSSGTGKAGQQPARKRLNFGQTGDADSVPDPQPLGQPPAAPTSLGSTTMATGSGAPMADNNEGADGVGNSSGNWHCDSQWLGDRVITTSTRTWALPTYNNHLYKQISSQSGASNDNHYFGYSTPWGYFDFNRFHCHFSPRDWQRLINNNWGFRPKRLNFKLFNIQVKEVTQNDGTTTIANNLTSTVQVFTDSEYQLPYVLGSAHQGCLPPFPADVFMVPQYGYLTLNNGSQAVGRSSFYCLEYFPSQMLRTGNNFTFSYTFEDVPFHSSYAHSQSLDRLMNPLIDQYLYYLNRTQSNSGTLQQSRLLFSQAGPTSMSLQAKNWLPGPCYRQQRLSKQANDNNNSNFPWTAATKYHLNGRDSLVNPGPAMASHKDDEEKFFPMHGTLIFGKQGTNANDADLEHVMITDEEEIRTTNPVATEQYGNVSNNLQNSNTGPTTENVNHQGALPGMVWQDRDVYLQGPIWAKIPHTDGHFHPSPLMGGFGLKHPPPQIMIKNTPVPANPPTNFSAAKFASFITQYSTGQVSVEIEWELQKENSKRWNPEIQYTSNYNKSVNVDFTVDANGVYSEPRPIGTRYLTRNL

SEQ ID NO: 2775 - protein, 735 aa, Artificial Sequence
  source: /note="Description of Artificial Sequence: Synthetic polypeptide"
MAADGYLPDWLEDTLSEGIRQWWKLKPGPPPPKPAERHQDDSRGLVLPGHKYLGPFNGLDKGEPVNEADAAALEHDKAYDRQLDSGDNPYLKYNHADAEFQERLKEDTSFGGNLGRAVFQAKKRVLEPLGLVEEPVKTAPGKKRPVEHSPAEPDSSSGTGKAGQQPARKRLNFGQTGDADSVPDPQPLGQPPAAPTSLGSTTMATGSGAPMADNNEGADGVGNSSGNWHCDSQWLGDRVITTSTRTWALPTYNNHLYKQISSQSGASNDNHYFGYSTPWGYFDFNRFHCHFSPRDWQRLINNNWGFRPKRLNFKLFNIQVKEVTQNDGTTTIANNLTSTVQVFTDSEYQLPYVLGSAHQGCLPPFPADVFMVPQYGYLTLNNGSQAVGRSSFYCLEYFPSQMLRTGNNFTFSYTFEDVPFHSSYAHSQSLDRLMNPLIDQYLYYLNRTQSNSGTLQQSRLLFSQAGPTSMSLQAKNWLPGPCYRQQRLSKQANDNNNSNFPWTAATKYHLNGRDSLVNPGPAMASHKDDEEKFFPMHGTLIFGKQGTNANDADLEHVMITDEEEIRTTNPVATEQYGNVSNNLQNSNTGPTTENVNHQGALPGMVWQDRDVYLQGPIWAKIPHTDGHFHPSPLMGGFGLKHPPPQIMIKNTPVPANPPTNFSAAKFASFITQYSTGQVSVEIEWELQKENSKRWNPEIQYTSNYNKSVNVDFTVDTNGVYSEPRPIGTRYLTRNL

SEQ ID NO: 2776 - protein, 735 aa, Artificial Sequence
  source: /note="Description of Artificial Sequence: Synthetic polypeptide"
MAADGYLPDWLEDTLSEGIRQWWKLKPGPPPPRPAERHQDDSRGLVLPGYKYLGPFNGLDKGEPVNEADAAALEHDKAYDRQLDSGDNPYLKYNHADAEFQERLKEDTSFGGNLGRAVFQAKKRVLEPLGLVEEPVKTAPGKKRPVEHSPAEPDSSSGTGKAGQQPARKRLNFGQTGDADSVPDPQPLGQPPAAPTSLGSTTMATGSGAPMADNNEGADGVGNSSGNWHCDSQWLGDRVITTSTRTWALPTYNNHLYKQISSQSGASNDNHYFGYSTPWGYFDFNRFHCHFSPRDWQRLINNNWGFRPKRLNFKLFNIQVKEVTQNDGTTTIANNLTSTVQVFTDSEYQLPYVLGSAHQGCLPPFPADVFMVPQYGYLTLNNGSQAVGHSSSYCLEYFPSQMLRTGNNFTFSYTFEDVPFHSSYAHSQSLDRLMNPLIDQYLYYLNRTQSNSGTLQQSRLLFSQAGPTSMSLQAKNWLPGPCYRQQRLSKQANDNNNSNFPWTAATKYHLNGRDSLVNPGPAMASHKDDEEKFFPMHGTLIFGKQGTNANDADLEHVMITDEEEIRTTNPVATEQYGNVSNNLQNSNTGPTTENVNHQGALPGMVWQDRDVYLQGPIWAKIPHTDGHFHPSPLMGGFGLKHPPPQIMIKNTPVPANPPTNFSAAKFASFITQYSTGQVSVEIEWELQKENSKRWNPEIQYTSNYNKSVNVDFTVDANGVYSEPRPIGTRYLTRNL

SEQ ID NO: 2777 - protein, 735 aa, Artificial Sequence
  source: /note="Description of Artificial Sequence: Synthetic polypeptide"
MAADGYLPDWLEDTLSEGIRQWWKLKPGPPPPRPAERHQDDSRGLVLPGYKYLGPFNGLDKGEPVNEADAAALEHDKAYDRQLDSGDNPYLKYNHADAEFQERLKEDTSFGGNLGRAVFQAKKRVLEPLGLVEEPVKTAPGKKRPVEHSPAEPDSSSGTGKAGQQPARKRLNFGQTGDADSVPDPQPLGQPPAAPTSLGSTTMATGSGAPMADNNEGADGVGNSSGNWHCDSQWLGDRVITTSTRTRALPTYNNHLYKQISSQSGASNDNHYFGYSTPWGYFDFNRFHCHFSPRDWQRLTNNNWGFRPKRLNFKLFNIQVKEVTQNDGTTTIANNLTSTVQVFTDSEYQLPYVLGSAHQGCLPPFPADVFMVPQYGYLTLNNGSQAVGRSSFYCLEYFPSQMLRTGNNFTFSYTFEDVPFHSSYAHSQSLDRLMNPLIDQYLYYLNRTQSNSGTLQQSRLLFSQAGPTSMSLQAKNWLPGPCYRQQRLSKQANDNNNSNFPWTAATKYHLNGRDSLVNPGPAMASHKDDEEKFFPMHGTLIFGKQGTNANDADLEHVMITDEEEIRTTNPVATEQYGNVSNNLQNSNTGPTTENVNHQGALPGMVWQDRDVYLQGPIWAKIPHTDGHFHPSPLMGGFGLKHPPPQIMIKNTPVPANPPTNFSAAKFASFITQYSTGQVSVEIEWELQKENSKRWNPEIQYTSNYNKSVNVDFTVDANGVYSEPRPIGTRYLTRNL

SEQ ID NO: 2778 - protein, 735 aa, Artificial Sequence
  source: /note="Description of Artificial Sequence: Synthetic polypeptide"
MAADGYLPDWLEDTLSEGIRQWWKLKPGPPPPKPAERHKDDSRGLVLPGYKYLGPFNGLDKGEPVNEADAAALEHDKAYDRQLDSGDNPYLKYNHADAEFQERLKEDTSFGGNLARAVFQAKKRVLEPLGLVEEPVKTAPGKKRPVEHSPAGPDSSSGTGKSGQQPARKRLNFGQTGDADSVPDPQPLGQPPAAPSGLGTNTMASGSGAPMADNNEGADGVGNSSGNWHCDSTWMGDRVITTSTRTWALPTYNNHLYKQISSQSGAANDNHYFGYSTPWGYFDFNRFHCHFSPRDWQRLINNNWGFRPKRLNFKLFNIQVKEVTQNDGTTTIANNLTSTVQVFTDSEYQLPYVLGSAHQGCLPPFPADVFMVPQYGYLTLNNGSQAVGRSSFYCLEYFPSQMLRTGNNFTFSYTFEDVPFHSSYAHSQSLDRLMNPLIDQYLYYLNRTQSNSGTLQQSRLLFSQAGPTSMSLQAKNWLPGPCYRQQRLSKQANDNNNSNFPWTAATKYHLNGRDSLVNPGPAMASHKDDEEKFFPMHGTLIFGKQGTNANDADLEHVMITDEEEIRTTNPVATEQYGNVSNNLQNSNTGPTTENVNHQGALPGMVWQDRDVYLQGPIWAKIPHTDGHFHPSPLMGGFGLKHPPPQIMIKNTPVPANPPTNFSAAKFASFITQYSTGQVSVEIEWELQKENSKRWNPEIQYTSNYNKSVNVDFTVDANGVYSEPRPIGTRYLTRNL

SEQ ID NO: 2779 - protein, 734 aa, Artificial Sequence
  source: /note="Description of Artificial Sequence: Synthetic polypeptide"
MAADGYLPDWLEDTLSEGIRQWWKLKPGPPPPRPAERHQDDSRGLVLPGYKYLGPFNGLDKGEPVNEADAAALEHDKAYDRQLDSGDNPYLKYNHADAEFQERLKEDTSFGGNLGRAVFQAKKRVLEPLGLVEEPVKTAPGKKRPVEHSPAEPDSSSGTGKAGQQPARKRLNFGQTGDADSVPDPQPLGQPPAAPTSLGSTTMATGSGAPMADNNEGADGVGNSSGNWHCDSQWLGDRVITTSTRTWALPTYNNHLYKQISSQSGASNDNHYFGYSTPWGYFDFNRFHCHFSPRDWQRLINNNWGFRPKRLNFKLFNIQVKEVTQNDGTTTIANNLTSTVQVFTDSEYQLPYVLGSAHQGCLPPFPADVFMVPQYGYLTLNNGSQAVGRSSFYCLEYFPSQMLRTGNNFTFSYTFEDVPFHSSYAHSQSLDRLMNPLIDQYLYYLNRTQSNSGTLQQSRLLFSQAGPTSMSLQAKNWLPGPCYRQQRLSKQANDNNSNFPWTAATKYHLNGRDSLVNPGPAMASHKDDEEKFFPMHGTLIFGKQGTNANDADLEHVMITDEEEIRTTNPVATEQYGNVSNNLQNSNTGPTTENVNHQGALPGMVWQDRDVYLQGPIWAKIPHTDGHFHPSPLMGGFGLKHPPPQIMIKNTPVPANPPTNFSAAKFASFITQYSTGQVSVEIEWELQKENSKRWNPEIQYTSNYNKSVNVDFTVDANGVYSEPRPIGTRYLTRNL

SEQ ID NO: 2780 - protein, 735 aa, Artificial Sequence
  source: /note="Description of Artificial Sequence: Synthetic polypeptide"
MAADGYLPDWLEDTLSEGIRQWWKLKPGPPPPKPAERHKDDSRGLVLPGYKYLGPFNGLDKGEPVNEADAAALEHDKAYDRQLDSGDNPYLKYNHADAEFQERLKEDTSFGGNLARAVFQAKKRVLEPLGLVEEPVKTAPGKKRPVEHSPAGPDSSSGTGKSGQQPARKRLNFGQTGDADSVPDPQPLGQPPAAPTSLGSTTMATGSGAPMADNNEGADGVGNSSGNWHCDSQWLGDRVITTSTRTWALPTYNNHLYKQISSQSGASNDNHYFGYSTPWGYFDFNRFHCHFSPRDWQRLINNNWGFRPKRLNFKLFNIQVKEVTQNDGTTTIANNLTSTVQVFTDSEYQLPYVLGSAHQGCLPPFPADVFMVPQYGYLTLNNGSQAVGRSSFYCLEYFPSQMLRTGNNFTFSYTFEDVPFHSSYAHSQSLDRLMNPLIDQYLYYLNRTQSNSGTLQQSRLLFSQAGPTSMSLQAKNWLPGPCYRQQRLSKQANDNNNSNFPWTAATKYHLNGRDSLVNPGPAMASHKDDEEKFFPMHGTLIFGKQGTNANDADLEHVMITDEEEIRTTNPVATEQYGNVSNNLQNSNTGPTTENVNHQGALPGMVWQDRDVYLQGPIWAKIPHTDGHFHPSPLMGGFGLKHPPPQIMIKNTPVPANPPTNFSAAKFASFITQYSTGQVSVEIEWELQKENSKRWNPEIQYTSNYNKSVNVDFTVDANGVYSEPRPIGTRYLTRNL

SEQ ID NO: 2781 - protein, 735 aa, Artificial Sequence
  source: /note="Description of Artificial Sequence: Synthetic polypeptide"
MAADGYLPDWLEDTLSEGIRQWWKLKPGPPPPKPAGRHKDDSRGLVLPGYKYLGPFNGLDKGEPVNEADAAALEHDKAYDRQLDSGDNPYLKYNHAGAEFQERLKEDTSFGGNLGRAVFQAKKRVLEPLGLVEEPVKTAPGKKRPVEHSPVEPDSSSGTGKAGQQPARKRLNFGQTGDADSVPDPQPLGQPPAAPTSLGSTTMATGSGAPMADNNEGADGVGNSSGNWHCDSQWLGDRVITTSTRTWALPTYNNHLYKQISSQSGAANDNHYFGYSTPWGYFDFNRFHCHFSPRDWQRLINNNWGFRPKRLNFKLFNIQVKEVTQNDGTTTIANNLTSTVPVFTDSEYQLPYVLGSAHQGCLPPFPADVFMVPQYGYLTLNNGSQAVGRSSFYCLEYFPSQMLRTGNNFTFSYTFEDVPFHSSYAHSQSLDRLMNPLIDQYLYYLNKTQSNSGTLQQSRLLFSQAGPTSMSLQAKNWLPGPCYRQQRLSKQANDNNNSNFPWTAATKYHLNGRDSLVNPGPAMASHKDDEEKFFPMHGTLIFGKQGTNANDADLEHVMITDEEEIRTTNPVATEQYGNVSNNLQNSNTGPTTENVNHQGALPGMVWQDRDVYLQGPIWAKIPHTDGHFHPSPLMGGFGLKHPPPQIMIKNTPVPANPPTNFSAAKFASFITQYSTGQVSVEIEWELQKENSKRWNPEIQYTSNYNKSVNVDFTVDANGVYSEPRPIGTRYLTRNL

SEQ ID NO: 2782 - protein, 735 aa, Artificial Sequence
  source: /note="Description of Artificial Sequence: Synthetic polypeptide"
MAADGYLPDWLEDTLSEGIRQWWKLKPGPPPPKPAGRHKDDSRGLVLPGYKYLGPFNGLDKGEPVNEADAAALEHDKAYDRQLDSGDNPYLKYNHAGAEFQERLKEDTSFGGNLGRAVFQAKKRVLEPLGLVEEPVKTAPGKKRPVEHSPVEPDSSSGTGKAGQQPARKRLNFGQTGDADSVPDPQPLGQPPAAPTSLGSTTMATGSGAPMADNNEGADGVGNSSGNWHCDSQWLGDRVITTSTRTWALPTYNNHLYKQISSQSGAANDNHYFGYSTPWGYFDFNRFHCHFSPRDWQRLINNNWGFRPKRLNFKLFNIQVKEVTQNDGTTTIANNLTSTVPVFTDSEYQLPYVLGSAHQGCLPPFPADVFMVPQYGYLTLNNGSQAVGRSSFYCLEYFPSQMLRTGNNFTFSYTFEDVPFHSSYAHSQSLDRLMNPLIDQYLYYLNKTQSNSGTLQQSRLLFSQAGPTSMSLQAKNWLPGPCYRQQRLSKQANDNNNSNFPWTAATKYHLNGRDSLVNPGPAMASHKDDEEKFFPMHGTLIFGKQGTNANDADLDNVMITDEEEIRTTNPVATEQYGTVSNNLQNSNTGPTTGTVNHQGALPGMVWQDRDVYLQGPIWAKIPHTDGHFHPSPLMGGFGLKHPPPQIMIKNTPVPANPPTNFSAAKFASFITQYSTGQVSVEIEWELQKENSKRWNPEIQYTSNYNKSVNVDFTVDANGVYSEPRPIGTRYLTRNL

SEQ ID NO: 2783 - protein, 735 aa, Artificial Sequence
  source: /note="Description of Artificial Sequence: Synthetic polypeptide"
MAADGYLPDWLEDTLSEGIRQWWKLKPGPPPPRPAERHQDDSRGLVLPGYKYLGPFNGLDKGEPVNEADAAALEHDKAYDRQLDSGDNPYLKYNHADAEFQERLKEDTSFGGNLGRAVFQAKKRVLEPLGLVEEPVKTAPGKKRPVEHSPAEPDSSSGTGKAGQQPARKRLNFGQTGDADSVPDPQPLGQPPAAPTSLGSTTMATGSGAPMADNNEGADGVGNSSGNWHCDSQWLGDRVITTSTRTWALPTYNNHLYKQISSQSGASNDNHYFGYSTPWGYFDFNRFHCHFSPRDWQRLINNNWGFRPKRLNFKLFNIQVKEVTQNDGTTTIANNLTSTVQVFTDSEYQLPYVLGSAHQGCLPPFPADVFMVPQYGYLTLNNGSQAVGRSSFYCLEYFPSQMLRTGNNFTFSYTFEDVPFHSSYAHSQSLDRLMNPLIDQYLYYLNRTQSNSGTLQQSRLLFSQAGPTSMSLQAKNWLPGPCYRQQRLSKQANDNNNSNFPWTAATKYHLNGRDSLVNPGPAMASHKDDEEKFFPMHGTLIFGKQGTNANDADLEHVMITDEEEIRTTNPVATEQYGNVSNNLQNSNTGPTTENVNHQGALPGMVWQDRDVYLQGPIWAKIPHTDGHFHPSPLMGGFGLKHPPPQIMIKNTPVPANPPTNFSSAKFASFITQYSTGQVSVEIEWELQKENSKRWNPEIQYTSNYNKSVNVDFTVDTNGVYSEPRPIGTRYLTRNL

SEQ ID NO: 2784 - protein, 735 aa, Artificial Sequence
  source: /note="Description of Artificial Sequence: Synthetic polypeptide"
MAADGYLPDWLEDTLSEGIRQWWKLKPGPPPPKPAERHQDDSRGLVLPGYKYLGPFNGLDKGEPVNEADAAALEHDKAYDRQLDSGDNPYLKYNHADAEFQERLKEDTSFGGNLGRAVFQAKKRVLEPLGLVEEPVKTAPGKKRPVEHSPAEPDSSSGTGKAGQQPARKRLNFGQTGDADSVPDPQPLGQPPAAPTSLGSTTMATGSGAPMADNNEGADGVGNSSGNWHCDSQWLGDRVITTSTRTWALPTYNNHLYKQISSQSGAANDNHYFGYSTPWGYFDFNRFHCHFSPRDWQRLINNNWGFRPKRLNFKLFNIQVKEVTQNDGTTTIANNLTSTVPVFTDSEYQLPYVLGSAHQGCLPPFPADVFMVPQYGYLTLNNGSQAVGRSSFYCLEYFPSQMLRTGNNFTFSYTFEDVPFHSSYAHSQSLDRLMNPLIDQYLYYLNKTQSNSGTLQQSRLLFSQAGPTSMSLQAKNWLPGPCYRQQRLSKQANDNNNSNFPWTAATKYHLNGRDSLVNPGPAMASHKDDEEKFFPMHGTLIFGKQGTNANDADLDNVMITDEEEIRTTNPVATEQYGTVSNNLQNSNTGPTTGTVNHQGALPGMVWQDRDVYLQGPIWAKIPHTDGHFHPSPLMGGFGLKHPPPQIMIKNTPVPANPPTNFSSAKFASFITQYSTGQVSVEIEWELQKENSKRWNPEIQYTSNYNKSVNVDFTVDTNGVYSEPRPIGTRYLTRNL

SEQ ID NO: 2785 - protein, 735 aa, Artificial Sequence
  source: /note="Description of Artificial Sequence: Synthetic polypeptide"
MAADGYLPDWLEDTLSEGIRQWWKLKPGPPPPKPAERHKDDSRGLVLPGYKYLGPFNGLDKGEPVNEADAAALEHDKAYDRQLDSGDNPYLKYNHADAEFQERLKEDTSFGGNLARAVFQAKKRVLEPLGLVEEPVKTAPGKKRPVEHSPAGPDSSSGTGKSGQQPARKRLNFGQTGDADSVPDPQPLGQPPAAPSGLGTNTMASGSGAPMADNNEGADGVGNSSGNWHCDSTWMGDRVITTSTRTWALPTYNNHLYKQISSQSGAANDNHYFGYSTPWGYFDFNRFHCHFSPRDWQRLINNNWGFRPKRLNFELFNIQVKEVTQNDGTTTIANNLTSTVQVFTDSEYQLPYVLGSAHQGCLPPFPADVFMVPQYGYLTLNNGSQAVGRSSFYCLEYFPSQMLRTGNNFTFSYTFEDVPFHSSYAHSQSLDRLMNPLIDQYLYYLNRTQSNSGTLQQSRLLFSQAGPTSMSLQAKNWLPGPCYRQQRLSKQANDNNNSNFPWTAATKYHLNGRDSLVNPGPAMASHKDDEEKFFPMHGTLIFGKQGTNANDADLEHVMITDEEEIRTTNPVATEQYGNVSNNLQNSNTGPTTENVNHQGALPGMVWQDRDVYLQGPIWAKIPHTDGHFHPSPLMGGFGLKHPPPQIMIKNTPVPANPPTNFSAAKFASFITQYSTGQVSVEIEWELQKENSKRWNPEIQYTSNYNKSVNVDFTVDANGVYSEPRPIGTRYLTRNL

SEQ ID NO: 2786 - protein, 735 aa, Artificial Sequence
  source: /note="Description of Artificial Sequence: Synthetic polypeptide"
MAADGYLPDWLEDILSEGIRQWWKLKPGPPPPKPAERHKDDSRGLVLPGYKYLGPFNGLDKGEPVNEADAAALEHDKAYDRQLDSGDNPYLKYNHADAEFQERLKEDTSFGGNLGRAVFQAKKRVLEPLGLVEEPVKTAPGKKRPVEHSPAEPDSSSGTGKAGQQPARKRLNFGQTGDADSVPDPQPLGQPPAAPTSLGSTTMATGSGAPMADNNEGADGVGNSSGNWHCDSQWLGDRVITTSTRTWALPTYNNHLYKQISSQSGASNDNHYFGYSTPWGYFDFNRFHCHFSPRDWQRLINNNWGFRPKRLNFKLFNIQVKEVTQNDGTTTIANNLTSTVQVFTDSEYQLPYVLGSAHQGCLPPFPADVFMVPQYGYLTLNNGSQAVGRSSFYCLEYFPSQMLRTGNNFTFSYTFEDVPFHSSYAHSQSLDRLMNPLIDQYLYYLNRTQSNSGTLQQSRLLFSQAGPTSMSLQAKNWLPGPCYRQQRLSKQANDNNNSNFPWTAATKYHLNGRDSLVNPGPAMASHKDDEEKFFPMHGTLIFGKQGTNANDADLEHVMITDEEEIRTTNPVATEQYGNVSNNLQNSNTGPTTENVNHQGALPGMVWQDRDVYLQGPIWAKIPHTDGHFHPSPLMGGFGLKHPPPQIMIKNTPVPANPPTNFSAAKFASFITQYSTGQVSVEIEWELQKENSKRWNPEIQYTSNYNKSVNVDFTVDANGVYSEPRPIGTRYLTRNL

SEQ ID NO: 2787 - protein, 735 aa, Artificial Sequence
  source: /note="Description of Artificial Sequence: Synthetic polypeptide"
MAADGYLPDWLEDTLSEGIRQWWKLKPGPPPPRPAERHQDDSRGLVLPGYKYLGPFNGLDKGEPVNEADAAALEHDKAYDRQLDSGDNPYLKYNHADAEFQERLKEDTSFGGNLGRAVFQAKKRVLEPLGLVEEPVKTAPGKKRPVEHSPVEPDSSSGTGKAGQQPARKRLNFGQTGDADSVPDPQPLGQPPAAPTSLGSTTMATGSGAPMADNNEGADGVGNSSGNWHCDSQWLGDRVITTSTRTWALPTYNNHLYKQISSQSGAANDNHYFGYSTPWGYFDFNRFHCHFSPRDWQRLINNNWGFRPKRLNFKLFNIQVKEVTQNDGTTTIANNLTSTVPVFTDSEYQLPYVLGSAHQGCLPPFPADVFMVPQYGYLTLNNGSQAVGRSSFYCLEYFPSQMLRTGNNFTFSYTFEDVPFHSSYAHSQSLDRLMNPLIDQYLYYLNKTQSNSGTLQQSRLLFSQAGPTSMSLQAKNWLPGPCYRQQRLSKQANDNNNSNFPWTAATKYHLNGRDSLVNPGPAMASHKDDEEKFFPMHGTLIFGKQGTNANDADLDNVMITDEEEIRTTNPVATEQYGTVSNNLQNSNTGPTTGTVNHQGALPGMVWQDRDVYLQGPIWAKIPHTDGHFHPSPLMGGFGLKHPPPQIMIKNTPVPANPPTNFSSAKFASFITQYSTGQVSVEIEWELQKENSKRWNPEIQYTSNYNKSVNVDFTVDTNGVYSEPRPIGTRYLTRNL

SEQ ID NO: 2788 - protein, 735 aa, Artificial Sequence
  source: /note="Description of Artificial Sequence: Synthetic polypeptide"
MAADGYLPDWLEDTLSEGIRQWWKLKPGPPPPKPAERHKDDSRGLVLPGYKYLGPFNGLDKGEPVNEADAAALEHDKAYDRQLDSGDNPYLKYNHADAEFQERLKEDTSFGGNLARAVFQAKKRVLEPLGLVEEPVKTAPGKKRPVEHSPAEPDSSSGTGKAGQQPARKRLNFGQTGDADSVPDPQPLGQPPAAPTSLGSTTMATGSGAPMADNNEGADGVGNSSGNWHCDSQWLGDRVITTSTRTWALPTYNNHLYKQISSQSGASNDNHYFGYSTPWGYFDFNRFHCHFSPRDWQRLINNNWGFRPKRLNFKLFNIQVKEVTQNDGTTTIANNLTSTVQVFTDSEYQLPYVLGSAHQGCLPPFPADVFMVPQYGYLTLNNGSQAVGRSSFYCLEYFPSQMLRTGNNFTFSYTFEDVPFHSSYAHSQSLDRLMNPLIDQYLYYLNRTQSNSGTLQQSRLLFSQAGPTSMSLQAKNWLPGPCYRQQRLSKQANDNNNSNFPWTAATKYHLNGRDSLVNPGPAMASHKDDEEKFFPMHGTLIFGKQGTNANDADLEHVMITDEEEIRTTNPVATEQYGNVSNNLQNSNTGPTTENVNHQGALPGMVWQDRDVYLQGPIWAKIPHTDGHFHPSPLMGGFGLKHPPPQIMIKNTPVPANPPTNFSAAKFASFITQYSTGQVSVEIEWELQKENSKRWNPEIQYTSNYNKSVNVDFTVDANGVYSEPRPIGTRYLTRNL

SEQ ID NO: 2789 - protein, 735 aa, Artificial Sequence
  source: /note="Description of Artificial Sequence: Synthetic polypeptide"
MAADGYLPDWLEDTLSEGIRQWWKLKPGPPPPRPAERHQDDSRGLVLPGYKYLGPFNGLDKGEPVNEADAAALEHDKAYDRQLDSGDNPYLKYNHADAEFQERLKEDTSFGGNLGRAVFQAKKRVLEPLGLVEEPVKTAPGKKRPVEHSPAEPDSSSGTGKAGQQPARKRLNFGQTGDADSVPDPQPLGQPPAAPTSLGSTTMATGSGAPMADNNEGADGVGNSSGNWHCDSQWLGDRVITTSTRTWALPTYNNHLYKQISSQSGAANDNHYFGYSTPWGYFDFNRFHCHFSPRDWQRLINNNWGFRPKRLNFKLFNIQVKEVTQNDGTTTIANNLTSTVPVFTDSEYQLPYVLGSAHQGCLPPFPADVFMVPQYGYLTLNNGSQAVGRSSFYCLEYFPSQMLRTGNNFTFSYTFEDVPFHSSYAHSQSLDRLMNPLIDQYLYYLNKTQSNSGTLQQSRLLFSQAGPTSMSLQAKNWLPGPCYRQQRLSKQANDNNNSNFPWTAATKYHLNGRDSLVNPGPAMASHKDDEEKFFPMHGTLIFGKQGTNANDADLDNVMITDEEEIRTTNPVATEQYGTVSNNLQNSNTGPTTGTVNHQGALPGMVWQDRDVYLQGPIWAKIPHTDGHFHPSPLMGGFGLKHPPPQIMIKNTPVPANPPTNFSSAKFASFITQYSTGQVSVEIEWELQKENSKRWNPEIQYTSNYNKSVNVDFTVDTNGVYSEPRPIGTRYLTRNL

SEQ ID NO: 2790 - protein, 735 aa, Artificial Sequence
  source: /note="Description of Artificial Sequence: Synthetic polypeptide"
MAADGYLPDWLEDTLSEGIRQWWKLKPGPPPPKPAGRHKDDSRGLVLPGYKYLGPFNGLDKGEPVNEADAAALEHDKAYDRQLDSGDNPYLKYNHAGAEFQERLKEDTSFGGNLGRAVFQAKKRVLEPLGLVEEPVKTAPGKKRPVEHSPVEPDSSSGTGKAGQQPARKRLNFGQTGDADSVPDPQPLGQPPAAPTSLGSTTMATGSGAPMADNNEGADGVGNSSGNWHCDSQWLGDRVITTSTRTWALPTYNNHLYKQISSQSGAANDNHYFGYSTPWGYFDFNRFHCHFSPRDWQRLINNNWGFRPKRLNFKLFNIQVKEVTQNDGTTTIANNLTSTVPVFTDSEYQLPYVLGSAHQGCLPPFPADVFMVPQYGYLTLNNGSQAVGRSSFYCLEYFPSQMLRTGNNFTFSYTFEDVPFHSSYAHSQSLDRLMNPLIDQYLYYLNKTQSNSGTLQQSRLLFSQAGPTSMSLQAKNWLPGPCYRQQRLSKQANDNNNSNFPWTAATKYHLNGRDSLVNPGPAMASHKDDEEKFFPMHGTLIFGKQGTNANDADLDNVMITDEEEIRTTNPVATEQYGTVSNNLQNSNTGPTTGTVNHQGALPGMVWQDRDVYLQGPIWAKIPHTDGHFHPSPLMGGFGLKHPPPQIMIKNTPVPANPPTNFSSAKFASFITQYSTGQVSVEIEWELQKENSKRWNPEIQYTSNYNKSVNVDFTVDTNGVYSEPRPIGTRYLTRNL

SEQ ID NO: 2791 - protein, 735 aa, Artificial Sequence
  source: /note="Description of Artificial Sequence: Synthetic polypeptide"
MAADGYLPDWLEDTLSEGIRQWWKLKPGPPPPRPAERHQDDSRGLVLPGYKYLGPFNGLDKGEPVNEADAAALEHDKAYDRQLDSGDNPYLKYNHADAEFQERLKEDTSFGGNLGRAVFQAKKRVLEPLGLVEEPVKTAPGKKRPVEHSPAEPDSSSGTGKAGQQPARKRLNFGQTGDADSVPDPQPLGQPPAAPTSLGSTTMATGSGAPMADNNEGADGVGNSSGNWHCDSQWLGDRVITTSTRTWALPTYNNHLYKQISSQSGASNDNHYFGYSTPLGYFDFNRFHCHFSPRDWQRLINNNWGFRPKRLNFKLFNIQVKEVTQNDGTTTIANNLTSTVQVFTDSEYQLPYVLGSAHQGCLPPFPADVFMVPQYGYLTLNNGSQAVGRSSFYCLEYFPSQMLRTGNNFTFSYTFEDVPFHSSYAHSQSLDRLMNPLIDQYLYYLNRTQSNSGTLQQSRLLFSQAGPTSMSLQAKNWLPGPCYRQQRLSKQANDNNNSNFPWTAATKYHLNGRDSLVNPGPAMASHKDDEEKFFPMHGTLIFGKQGTNANDADLEHVMITDEEEIRTTNPVATEQYGNVSNNLQNSNTGPTTENVNHQGALPGMVWQDRDVYLQGPIWAKIPHTDGHFHPSPLMGGFGLKHPPPQIMIKNTPVPANPPTNFSAAKFASFITQYSTGQVSVEIEWELQKENSKRWNPEIQYTSNYNKSVNVDFTVDANGVYSEPRPIGTRYLTRNL

SEQ ID NO: 2792 - protein, 735 aa, Artificial Sequence
  source: /note="Description of Artificial Sequence: Synthetic polypeptide"
MAADGYLPDWLEDTLSEGIRQWWKLKPGPPPPKPAGRHKDDSRGLVLPGYKYLGPFNGLDKGEPVNEADAAALEHDKAYDRQLDSGDNPYLKYNHAGAEFQERLKEDTSFGGNLGRAVFQAKKRVLEPLGLVEEPVKTAPGKKRPVEHSPVEPDSSSGTGKAGQQPARKRLNFGQTGDADSVPDPQPLGQPPAAPTSLGSTTMATGSGAPMADNNEGADGVGNSSGNWHCDSQWLGDRVITTSTRTWALPTYNNHLYKQISSQSGAANDNHYFGYSTPWGYFDFNRFHCHFSPRDWQRLINNNWGFRPKRLNFKLFNIQVKEVTQNDGTTTIANNLTSTVPVFTDSEYQLPYVLGSAHQGCLPPFPADVFMVPQYGYLTLNNGSQAVGRSSFYCLEYFPSQMLRTGNNFTFSYTFEDVPFHSSYAHSQSLDRLMNPLIDQYLYYLNRTQSNSGTLQQSRLLFSQAGPTSMSLQAKNWLPGPCYRQQRLSKQANDNNNSNFPWTAATKYHLNGRDSLVNPGPAMASHKDDEEKFFPMHGTLIFGKQGTNANDADLEHVMITDEEEIRTTNPVATEQYGNVSNNLQNSNTGPTTENVNHQGALPGMVWQDRDVYLQGPIWAKIPHTDGHFHPSPLMGGFGLKHPPPQIMIKNTPVPANPPTNFSAAKFASFITQYSTGQVSVEIEWELQKENSKRWNPEIQYTSNYNKSVNVDFTVDANGVYSEPRPIGTRYLTRNL

SEQ ID NO: 2793 - protein, 735 aa, Artificial Sequence
  source: /note="Description of Artificial Sequence: Synthetic polypeptide"
MAADGYLPDWLEDILSEGIRQWWKLKPGPPPPKPAERHKDDSRGLVLPGYKYLGPFNGLDKGEPVNEADAAALEHDKAYDRQLDSGDNPYLKYNHADAEFQERLKEDTSFGGNLGRAVFQAKKRVLEPLGLVEEPVKTAPGKKRPVEQSPAEPDSSSGTGKAGNQPARKRLNFGQTGDADSVPDPQPLGQPPAAPSGLGSTTMATGSGAPMADNNEGADGVGNSSGNWHCDSQWLGDRVITTSTRTWALPTYNNHLYKQISSQSGAANDNHYFGYSTPWGYFDFNRFHCHFSPRDWQRLINNNWGFRPKRLNFKLFNIQVKEVTQNDGTTTIANNLTSTVPVFTDSEYQLPYVLGSAHQGCLPPFPADVFMVPQYGYLTLNNGSQAVGRSSFYCLEYFPSQMLRTGNNFTFSYTFEDVPFHSSYAHSQSLDRLMNPLIDQYLYYLNKTQSNSGTLQQSRLLFSQAGPTSMSLQAKNWLPGPCYRQQRLSKQANDNNNSNFPWTAATKYHLNGRDSLVNPGPAMASHKDDEEKFFPMHGTLIFGKQGTNANDADLDNVMITDEEEIRTTNPVATEQYGTVSNNLQNSNTGPTTGTVNHQGALPGMVWQDRDVYLQGPIWAKIPHTDGHFHPSPLMGGFGLKHPPPQIMIKNTPVPANPPTNFSSAKFASFITQYSTGQVSVEIEWELQKENSKRWNPEIQYTSNYNKSVNVDFTVDTNGVYSEPRPIGTRYLTRNL

SEQ ID NO: 2794 - protein, 735 aa, Artificial Sequence
  source: /note="Description of Artificial Sequence: Synthetic polypeptide"
MAADGYLPDWLEDTLSEGIRQWWKLKPGPPPPRPAERHQDDSRGLVLPGYKYLGPFNGLDKGEPVNEADAAALEHDKAYDRQLDSGDNPYLKYNHADAEFQERLKEDTSFGGNLGRAVFQAKKRVLEPLGLVEEPVKTAPGKKRPVEHSPAEPDSSSGTGKAGQQPARKRLNFGQTGDADSVPDPQPLGQPPAAPTSLGSTTMATGSGAPMADNNEGADGVGNSSGNWHCDSQWLGDRVITTSTRTWALPTYNNHLYKQISSQSGASNDNHYFGYSTPWGYFDFNRFHCHFSPRDWQRLINNNWGFRPKRLNFKLFNIQVKEVTQNDGTTTIANNLTSTVQVFTDSEYQLPYVLGSAHQGCLPPFPADVFMVPQYGYLTLNNGSQAVGRSSFYCLEYFPSQMLRTGNNFTFSYTFEDVPFHSSYAHSQSLDRLMNPLIDQYLYYLNRTQSNSGTLQQSRLLFSQAGPTSMSLQAKNWLPGPCYRQQRLSKQANDNNNSNFPWTAATKYHLNGRDSLVNPGPAMASHKDDEEKFFPMHGTLIFGKQGTNANDADLEHVMITDEEEIRTTNPVATEQYGNVSNNLQNSNTGPTTENVNHQGALPGMVWQDRDVYLQGPIWAKIPHTDGHFHPSPLMGGFGLKHPPPQIMIKNTPVPANPPTNFSAAKFASFITQYSTGQVSVEIEWELQKENSKRWNPEIQYTSNYNKSVNVDFTVDANGVYSEPRPIGTRYLTRNL

SEQ ID NO: 2795 - protein, 735 aa, Artificial Sequence
  source: /note="Description of Artificial Sequence: Synthetic polypeptide"
MAADGYLPDWLEDTLSEGIRQWWKLKPGPPPPKPAGRHKDDSRGLVLPGYKYLGPFNGLDKGEPVNEADAAALEHDKAYDRQLDSGDNPYLKYNHAGAEFQERLKEDTSFGGNLGRAVFQAKKRVLEPLGLVEEPVKTAPGKKRPVEHSPVEPDSSSGTGKAGQQPARKRLNFGQTGDADSVPDPQPLGQPPAAPTSLGSTTMATGSGAPMADNNEGADGVGNSSGNWHCDSQWLGDRVITTSTRTWALPTYNNHLYKQISSQSGASNDNHYFGYSTPWGYFDFNRFHCHFSPRDWQRLINNNWGFRPKRLNFKLFNIQVKEVTQNDGTTTIANNLTSTVQVFTDSEYQLPYVLGSAHQGCLPPFPADVFMVPQYGYLTLNNGSQAVGHSSFYCLEYFPSQMLRTGNNFTFSYTFEDVPFHSSYAHSQSLDRLMNPLIDQYLYYLNRTQSNSGTLQQSRLLFSQAGPTSMSLQAKNWLPGPCYRQQRLSKQANDNNNSNFPWTAATKYHLNGRDSLVNPGPAMASHKDDEEKFFPMHGTLIFGKQGTNANDADLEHVMITDEEEIRTTNPVATEQYGNVSNNLQNSNTGPTTENVNHQGALPGMVWQDRDVYLQGPIWAKIPHTDGHFHPSPLMGGFGLKHPPPQIMIKNTPVPANPPTNFSAAKFASFITQYSTGQVSVEIEWELQKENSKRWNPEIQYTSNYNKSVNVDFTVDTNGVYSEPRPIGTRYLTRNL

SEQ ID NO: 2796 - protein, 735 aa, Artificial Sequence
  source: /note="Description of Artificial Sequence: Synthetic polypeptide"
MAADGYLPDWLEDTLSEGIRQWWKLKPGPPPPKPAERHKDDSRGLVLPGYKYLGPFNGLDKGEPVNEADAAALEHDKAYDRQLDSGDNPYLKYNHADAEFQERLKEDTSFGGNLGRAVFQAKKRVLEPLGLVEEPVKTAPGKKRPVEHSPAEPDSSSGTGKAGQQPARKRLNFGQTGDADSVPDPQPLGQPPAAPTSLGSTTMATGSGAPMADNNEGADGVGNSSGNWHCDSQWLGDRVITTSTRTWALPTYNNHLYKQISSQSGASNDNHYFGYSTPWGYFDFNRFHCHFSPRDWQRLINNNWGFRPKRLNFKLFNIQVKEVTQNDGTTTIANNLTSTVQVFTDSEYQLPYVLGSAHQGCLPPFPADVFMVPQYGYLTLNNGSQAVGRSSFYCLEYFPSQMLRTGNNFTFSYTFEDVPFHSSYAHSQSLDRLMNPLIDQYLYYLNRTQSNSGTLQQSRLLFSQAGPTSMSLQAKNWLPGPCYRQQRLSKQANDNNNSNFPWTAATKYHLNGRDSLVNPGPAMASHKDDEEKFFPMHGTLIFGKQGTNANDADLEHVMITDEEEIRTTNPVATEQYGNVSNNLQNSNTGPTTENVNHQGALPGMVWQDRDVYLQGPIWAKIPHTDGHFHPSPLMGGFGLKHPPPQIMIKNTPVPANPPTNFSAAKFASFITQYSTGQVSVEIEWELQKENSKRWNPEIQYTSNYNKSVNVDFTVDTNGVYSEPRPIGTRYLTRNL

SEQ ID NO: 2797 - protein, 735 aa, Artificial Sequence
  source: /note="Description of Artificial Sequence: Synthetic polypeptide"
MAADGYLPDWLEDTLSEGIRQWWKLKPGPPPPKPAERHQDDSRGLVLPGHKYLGPFNGLDKGEPVNEADAAALEHDKAYDRQLDSGDNPYLKYNHADAEFQERLKEDTSFGGNLGRAVFQAKKRVLEPLGLVEEPVKTAPGKKRPVEHSPAEPDSSSGTGKAGQQPARKRLNFGQTGDADSVPDPQPLGQPPAAPTSLGSTTMATGSGAPMADNNEGADGVGNSSGNWHCDSQWLGDRVITTSTRTWALPTYNNHLYKQISSQSGASNDNHYFGYSTPWGYFDFNRFHCHFSPRDWQRLINNNWGFRPKRLNFKLFNIQVKEVTQNDGTTTIANNLTSTVQVFTDSEYQLPYVLGSAHQGCLPPFPADVFMVPQYGYLTLNNGSQAVGHSSSYCLEYFPSQMLRTGNNFTFSYTFEDVPFHSSYAHSQSLDRLMNPLIDQYLYYLNRTQSNSGTLQQSRLLFSQAGPTSMSLQAKNWLPGPCYRQQRLSKQANDNNNSNFPWTAATKYHLNGRDSLVNPGPAMASHKDDEEKFFPMHGTLIFGKQGTNANDADLEHVMITDEEEIRTTNPVATEQYGNVSNNLQNSNTGPTTENVNHQGALPGMVWQDRDVYLQGPIWAKIPHTDGHFHPSPLMGGFGLKHPPPQILIKNTPVPANPSTTFSAAKFASFITQYSTGQVSVEIEWELQKENSKRWNPEIQYTSNYNKSVNVDFTVDTNGVYSEPRPIGTRYLTRNL

SEQ ID NO: 2798 - protein, 735 aa, Artificial Sequence
  source: /note="Description of Artificial Sequence: Synthetic polypeptide"
MAADGYLPDWLEDTLSEGIRQWWKLKPGPPPPKPAERHKDDSRGLVLPGYKYLGPFNGLDKGEPVNEADAAALEHDKAYDRQLDSGDNPYLKYNHADAEFQERLKEDTSFGGNLARAVFQAKKRVLEPLGLVEEPVKTAPGKKRPVEHSPAEPDSSSGTGKSGQQPARKRLNFGQTGDADSVPDPQPLGQPPAAPSGLGTNTMASGSGAPMADNNEGADGVGNSSGNWHCDSTWMGDRVITTSTRTWALPTYNNHLYKQISSQSGASNDNHYFGYSTPWGYFDFNRFHCHFSPRDWQRLINNNWGFRPKRLNFKLFNIQVKEVTQNDGTTTIANNLTSTVQVFTDSEYQLPYVLGSAHQGCLPPFPADVFMVPQYGYLTLNNGSQAVGRSSFYCLEYFPSQMLRTGNNFTFSYTFEDVPFHSSYAHSQSLDRLMNPLIDQYLYYLNRTQSNSGTLQQSRLLFSQAGPTSMSLQAKNWLPGPCYRQQRLSKQANDNNNSNFPWTAATKYHLNGRDSLVNPGPAMASHKDDEEKFFPMHGTLIFGKQGTNANDADLEHVMITDEEEIRTTNPVATEQYGNVSNNLQNSNTGPTTENVNHQGALPGMVWQDRDVYLQGPIWAKIPHTDGHFHPSPLMGGFGLKHPPPQIMIKNTPVPANPPTNFSAAKFASFITQYSTGQVSVEIEWELQKENSKRWNPEIQYTSNYNKSVNVDFTVDANGVYSEPRPIGTRYLTRNL

SEQ ID NO: 2799 - protein, 735 aa, Artificial Sequence
  source: /note="Description of Artificial Sequence: Synthetic polypeptide"
MAADGYLPDWLEDILSEGIRQWWKLKPGPPPPKPAERHKDDSRGLVLPGYKYLGPFNGLDKGEPVNEADAAALEHDKAYDRQLDSGDNPYLKYNHADAEFQERLKEDTSFGGNLGRAVFQAKKRVLEPLGLVEEPVKTAPGKKRPVEQSPAEPDSSSGTGKAGNQPARKRLNFGQTGDADSVPDPQPLGQPPAAPSGLGSTTMATGSGAPMADNNEGADGVGNSSGNWHCDSQWLGDRVITTSTRTWALPTYNNHLYKQISSQSGAANDNHYFGYSTPWGYFDFNRFHCHFSPRDWQRLINNNWGFRPKRLNFKLFNIQVKEVTQNDGTTTIANNLTSTVQVFTDSEYQLPYVLGSAHQGCLPPFPADVFMVPQYGYLTLNNGSQAVGRSSFYCLEYFPSQMLRTGNNFTFSYTFEDVPFHSSYAHSQSLDRLMNPLIDQYLYYLNRTQSNSGTLQQSRLLFSQAGPTSMSLQAKNWLPGPCYRQQRLSKQANDNNNSNFPWTAATKYHLNGRDSLVNPGPAMASHKDDEEKFFPMHGTLIFGKQGTNANDADLEHVMITDEEEIRTTNPVATEQYGNVSNNLQNSNTGPTTENVNHQGALPGMVWQDRDVYLQGPIWAKIPHTDGHFHPSPLMGGFGLKHPPPQIMIKNTPVPANPPTNFSAAKFASFITQYSTGQVSVEIEWELQKENSKRWNPEIQYTSNYNKSVNVDFTVDANGVYSEPRPIGTRYLTRNL

SEQ ID NO: 2800 - protein, 735 aa, Artificial Sequence
  source: /note="Description of Artificial Sequence: Synthetic polypeptide"
MAADGYLPDWLEDTLSEGIRQWWKLKPGPPPPRPAERHQDDSRGLVLPGYKYLGPFNGLDKGEPVNEADAAALEHDKAYDRQLDSGDNPYLKYNHADAEFQERLKEDTSFGGNLGRAVFQAKKRVLEPLGLVEEPVKTAPGKKRPVEHSPAEPDSSSGTGKAGQQPARKRLNFGQTGDADSVPDPQPLGQPPAAPTSLGSTTMATGSGAPMADNNEGADGVGNSSGNWHCDSQWLGDRVITTSTRTWALPTYNNHLYKQISSQSGASNDNHYFGYSTPWGYFDFNRFHCHFSPRDWQRLINNNWGFRPKRLNFKLFNIQVKEVTQNDGTTTIANNLTSTVQVFTDSEYQLPYVLGSAHQGCLPPFPADVFMVPQYGYLTLNNGSQAVGRSSFYCLEYFPSQMLRTGNNFTFSYTFEDVPFHSSYAHSQSLDRLMNPLIDQYLYYLNRTQSNSGTLQQSRLLFSQAGPTSMSLQAKNWLPGPCYRQQRLSKQANDNNNSNFPWTAATKYHLNGRDSLVNPGPAMASHKDDEEKFFPMHGTLIFGKQGTNANDADLEHVMITDEEEIRTTNPVATEQYGNVSNNLQNSNTGPTTENVNHQGALPGMVWQDRDVYLQGPIWAKIPHTDGHFHPSPLMGGFGLKHPPPQILIKSTPVPANPSTTFSAAKFASFITQYSTGQVSVEIEWELQKENSKRWNPEIQYTSNYNKSVNVDFTVDTNGVYSEPRPIGTRYLTRNL

SEQ ID NO: 2801 - protein, 735 aa, Artificial Sequence
  source: /note="Description of Artificial Sequence: Synthetic polypeptide"
MAADGYLPDWLEDTLSEGIRQWWKLKPGPPPPRPAERHQDDSRGLVLPGYKYLGPFNGLDKGEPVNEADAAALEHDKAYDRQLDSGDNPYLKYNHADAEFQERLKEDTSFGGNLGRAVFQAKKRVLEPLGLVEEPVKTAPGKKRPVEHSPAEPDSSSGTGKAGQQPARKRLNFGQTGDADSVPDPQPLGQPPAAPTSLGSTTMATGSGAPMADNNEGADGVGNSSGNWHCDSQWLGDRVITTSTRTWALPTYNNHLYKQISSQSGASNDNHYFGYSTPWGYFDFNRFHCHFSPRDWQRLTNNNWGFRPKRLNFKLFNIQVKEVTQNDGTTTIANNLTSTVQVFTDSEYQLPYVLGSAHQGCLPPFPADVFMVPQYGYLTLNNGSQAVGRSSFYCLEYFPSQMLRTGNNFTFSYTFEDVPFHSSYAHSQSLDRLMNPLIDQYLYYLNRTQSNSGTLQQSRLLFSQAGPTSMSLQAKNWLPGPCYRQQRLSKQANDNNNSNFPWTAATKYHLNGRDSLVNPGPAMASHKDDEEKFFPMHGTLIFGKQGTNANDADLEHVMITDEEEIRTTNPVATEQYGNVSNNLQNSNTGPTTENVNHQGALPGMVWQDRDVYLQGPIWAKIPHTDGHFHPSPLMGGFGLKHPPPQIMIKNTPVPANPPTNFSAAKFASFITQYSTGQVSVEIEWELQKENSKRWNPEIQYTSNYNKSVNVDFTVDANGVYSEPRPIGTRYLTRNL

SEQ ID NO: 2802 - protein, 735 aa, Artificial Sequence
  source: /note="Description of Artificial Sequence: Synthetic polypeptide"
MAADGYLPDWLEDTLSEGIRQWWKLKPGPPPPKPAGRHKDDSRGLVLPGYKYLGPFNGLDKGEPVNEADAAALEHDKAYDRQLDSGDNPYLKYNHAGAEFQERLKEDTSFGGNLGRAVFQAKKRVLEPLGLVEEPVKTAPGKKRPVEHSPVEPDSSSGTGKAGQQPARKRLNFGQTGDADSVPDPQPLGQPPAAPTSLGSTTMATGSGAPMADNNEGADGVGNSSGNWHCDSQWLGDRVITTSTRTWALPTYNNHLYKQISSQSGASNDNHYFGYSTPWGYFDFNRFHCHFSPRDWQRLINNNWGFRPKRLNFKLFNIQVKEVTQNDGTTTIANNLTSTVPVFTDSEYQLPYVLGSAHQGCLPPFPADVFMVPQYGYLTLNNGSQAVGRSSFYCLEYFPSQMLRTGNNFTFSYTFEDVPFHSSYAHSQSLDRLMNPLIDQYLYYLNKTQSNSGTLQQSRLLFSQAGPTSMSLQAKNWLPGPCYRQQRLSKQANDNNNSNFPWTAATKYHLNGRDSLVNPGPAMASHKDDEEKFFPMHGTLIFGKQGTNANDADLDNVMITDEEEIRTTNPVATEQYGTVSNNLQNSNTGPTTGTVNHQRALPGMVWQDRDVYLQGPIWAKIPHTDGHFHPSPLMGGFGLKHPPPQIMIKNTPVPANPPTNFSSAKFASFITQYSTGQVSVEIEWELQKENSKRWNPEIQYTSNYNKSVNVDFTVDTNGVYSEPRPIGTRYLTRNL

SEQ ID NO: 2803 - protein, 735 aa, Artificial Sequence
  source: /note="Description of Artificial Sequence: Synthetic polypeptide"
MAADGYLPDWLEDTLSEGIRQWWKLKPGPPPPKPAGRHKDDSRGLVLPGYKYLGPFNGLDKGEPVNEADAAALEHDKAYDRQLDSGDNPYLKYNHAGAEFQERLKEDTSFGGNLGRAVFQAKKRVLEPLGLVEEPVKTAPGKKRPVEHSPVEPDSSSGTGKAGQQPARKRLNFGQTGDADSVPDPQPLGQPPAAPTSLGSTTMATGSGAPMADNNEGADGVGNSSGNWHCDSQWLGDRVITTSTRTWALPTYNNHLYKQISSQSGASNDNHYFGYSTPWGYFDFNRFHCHFSPRDWQRLINNNWGFRPKRLNFKLFNIQVKEVTQNDGTTTIANNLTSTVPVFTDSEYQLPYVLGSAHQGCLPPFPADVFMVPQYGYLTLNNGSQAVGRSSFYCLEHFPSQMLRTGNNFTFSYTFEDVPFHSSYAHSQSLDRLMNPLIDQYLYYLNKTQSNSGTLQQSRLLFSQAGPTSMSLQAKNWLPGPCYRQQRLSKQANDNNNSNFPWTAATKYHLNGRDSLVNPGPAMASHKDDEEKFFPMHGTLIFGKQGTNANDADLDNVMITDEEEIRTTNPVATEQYGTVSNNLQNSNTGPTTGTVNHQRALPGMVWQDRDVYLQGPIWAKIPHTDGHFHPSPLMGGFGLKHPPPQIMIKNTPVPANPPTNFSSAKFASFITQYSTGQVSVEIEWELQKENSKRWNPEIQYTSNYNKSVNVDFTVDTNGVYSEPRPIGTRYLTRNL

SEQ ID NO: 2804 - protein, 735 aa, Artificial Sequence
  source: /note="Description of Artificial Sequence: Synthetic polypeptide"
MAADGYLPDWLEDTLSEGIRQWWKLKPGPPPPKPAGRHKDDSRGLVLPGYKYLGPFNGLDKGEPVNEADAAALEHDKAYDRQLDSGDNPYLKYNHAGAEFQERLKEDTSFGGNLGRAVFQAKKRVLEPLGLVEEPVKTAPGKKRPVEHSPVEPDSSSGTGKAGQQPARKRLNFGQTGDADSVPDPQPLGQPPAAPTSLGSTTMATGSGAPMADSNEGADGVGNSSGNWHCDSQWLGDRVITTSTRTWALPTYNNHLYKQISSQSGASNDNHYFGYSTPWGYFDFNRFHCHFSPRDWQRLINNNWGFRPKRLNFKLFNIQVKEVTQNDGTTTIANNLTSTVPVFTDSEYQLPYVLGSAHQGCLPPFPADVFMVPQYGYLTLNNGSQAVGRSSFYCLEYFPSQMLRTGNNFTFSYTFEDVPFHSSYAHSQSLDRLMNPLIDQYLYYLNKTQSNSGTLQQSRLLFSQAGPTSMSLQAKNWLPGPCYRQQRLSKQANDNNNSNFPWTAATKYHLNGRDSLVNPGPAMASHKDDEEKFFPMHGTLIFGKQGTNANDADLDNVMITDEEEIRTTNPVATEQYGTVSNNLQNSNTGPTTGTVNHQRALPGMVWLDRDVYLQGPIWAKIPHTDGHFHPSPLMGGFGLKHPPPQIMIKNTPVPANPPTNFSSAKFASFITQYSTGQVSVEIEWELQKENSKRWNPEIQYTSNYNKSVNVDFTVDTNGVYSEPRPIGTRYLTRNL

SEQ ID NO: 2805 - protein, 735 aa, Artificial Sequence
  source: /note="Description of Artificial Sequence: Synthetic polypeptide"
MAADGYLPDWLEDTLSEGIRQWWRLKPGPPPPKPAGRHKDDSRGLVLPGYKYLGPFNGLDKGEPVNEADAAALEHDKAYDRQLDSGDNPYLKYNHAGAEFQERLKEDTSFGGNLGRAVFQAKKRVLEPLGLVEEPVKTAPGKKRPVEHSPVEPDSSSGTGKAGQQPARKRLNFGQTGDADSVPDPQPLGQPPAAPTSLGSTTMATGSGAPMADNNEGADGVGNSSGNWHCDSQWLGDRVITTSTRTWALPTYNNHLYKQISSQSGASNDNHYFGYSTPWGYFDFNRFHCHFSPRDWQRLINNNWGFRPKRLNFKLFNIQVKEVTQNDGTTTIANNLTSTVPVFTDSEYQLPYVLGSAHQGCLPPFPADVFMVPQYGYLTLNNGSQAVGRSSFYCLEYFPSQMLRTGNNFTFSYTFEDVPFHSSYAHSQSLDRLMNPLIDQYLYYLNKTQSNSGTLQQSRLLFSQAGPTSMSLQAKNWLPGPCYRQQRLSKQANDNNNSNFPWTAATKYHLNGRDSLVNPGPAMASHKDDEEKFFPMHGTLIFGKQGTNANDADLDNVMITDEEEIRTTNPVATEQYGTVSNNLQNSNTGPTTGTVNHQRALPGMVWQDRDVYLQGPIWAKIPHTDGHFHPSPLMGGFGLKHPPPQIMIKNTPVPANPPTNFSSAKFASFITQYSTGQVSVEIEWELQKENSKRWNPEIQYTSNYNKSVNVDFTVDTNGVYSEPRPIGTRYLTRNL

SEQ ID NO: 2806 - protein, 735 aa, Artificial Sequence
  source: /note="Description of Artificial Sequence: Synthetic polypeptide"
MAADGYLPDWLEDTLSEGIRQWWKLKPGPPPPKPAGRHKDDSRGLVLPGYKYLGPFNGLDKGEPVNEADAAALEHDKAYDRQLDSGDNPYLKYNHAGAEFQERLKEDTSFGGNLGRAVFQAKKRVLEPLGLVEEPVKTAPGKKRPVEHSPVEPDSSSGTGKAGQQPARKRLNFGQTGDADSVPDPQPLGQPPAAPTSLGSTTMATGSGAPMADNNEGADGVGNSSGNWHCDSQWLGDRVITTSTRTWALPTYNNHLYKQISSQSGASNDNHYFGYSTPWGYFDFNRFHCHFSPRDWQRLINNNWGFRPKRLNFKLFNIQVKEVTQNDGTTTIANNLTSTVPVFTDSEYQLPYVLGSAHQGCLPPFPADVFMVPQYGYLTLNNGSQAVGRSSFYCLEYFPSQMLRTGNNFTFSYTFEDVPFHSSYAHSQSLDRLMNPLIDQYLYYLNKTQSNSGTLQQSRLLFSQAGPTSMSLQAKNWLPGPCYRQQRLSKQANDNNNSNFPWTAATKYHLNGRDSLVNPGPAMASHKDDEEKFFPMHGTLIFGKQGTNANDADLDNVMITDEEEIRTTNPVATEQYGTVSNNLQNSNTGPTTGTVNHQRALPGMVWQDRDVYLQGPIWAKIPHTDGHFHPSPLMGGFGLKHPPPQIMIKNTPVPANPPTNFSSAKFASFITQYSTGQVSVEIEWELQKENSKRWNPEIQYTSNYNKSVNVDLTVDTNGVYSEPRPIGTRYLTRNL

SEQ ID NO: 2807 - protein, 735 aa, Artificial Sequence
  source: /note="Description of Artificial Sequence: Synthetic polypeptide"
MAADGYLPDWLEDTLSEGIRQWWKLKPGPPPPKPAGRHKDDSRGLVLPGYKYLGPFNGLDKGEPVNEADAAALEHDKAYDRQLDSGDNPYLKYNHAGAEFQERLKEDTSFGGNLGRAVFQAKKRVLEPLGLVEEPVKTAPGKKRPVEHSPVEPDSSSGTGKAGQQPARKRLNFGQTGDADSVPDPQPLGQPPAAPTSLGSTTMATGSGAPMADNNEGADGVGNSSGNWHCDSQWLGDRVITTSTRTWALPTYNNHLYKQISSQSGASNDNHYFGYSTPWGYFDFNRFHCHFSPRDWQRLINNNWGFRPKRLNFKLFNIQVKEVTQNDGTTTIANNLTSTVPVFTDSEYQLPYVLGSAHQGCLPPFPADVFMVPQYGYPTLNNGSQAVGRSSFYCLEYFPSQMLRTGNNFTFSYTFEDVPFHSSYAHSQSLDRLMNPLIDQYLYYLNKTQSNSGTLQQSRLLFSQAGPTSMSLQAKNWLPGPCYRQQRLSKQANDNNNSNFPWAAATKYHLNGRDSLVNPGPAMASHKDDEEKFFPMHGTLIFGKQGTNANDADLDNVMITDEEEIRTTNPVATEQYGTVSNNLQNSNTGPTTGTVNHQRALPGMVWQDRDVYLQGPIWAKIPHTDGHFHPSPLMGGFGLKHPPPQIMIKNTPVPANPPTNFSSAKFASFITQYSTGQVSVEIEWELQKENSKRWNPEIQYTSNYNKSVNVDFTVDTNGVYSEPRPIGTRYLTRNL

SEQ ID NO: 2808 - protein, 735 aa, Artificial Sequence
  source: /note="Description of Artificial Sequence: Synthetic polypeptide"
MAADGYLPDWLEDTLSEGIRQWWKLKPGPPPPKPAERHQDDSRGLVLPGYKYLGPFNGLDKGEPVNEADAAALEHDKAYDRQLDSGDNPYLKYNHADAEFQERLKEDTSFGGNLGRAVFQAKKRVLEPLGLVEEPVKTAPGKKRPVEHSPAEPDSSSGTGKAGQQPARKRLNFGQTGDADSVPDPQPLGQPPAAPTSLGSTTMATGSGAPMADNNEGADGVGNSSGNWHCDSQWLGDRVITTSTRTWALPTYNNHLYKQISSQSGASNDNHYFGYSTPWGYFDFNRFHCHFSPRDWQRLINNNWGFRPKRLNFKLFNIQVKEVTQNDGTTTIANNLTSTVQVFTDSEYQLPYVLGSAHQGCLPPFPADVFMVPQYGYLTLNNGSQAVGRSSFYCLEYFPSQMLRTGNNFTFSYTFEDVPFHSSYAHSQSLDRLMNPLIDQYLYYLNRTQSNSGTLQQSRLLFSQAGPTSMSLQAKNWLPGPCYRQQRLSKQANDNNNSNFPWTAATKYHLNGRDSLVNPGPAMASHKDDEEKFFPMHGTLIFGKQGTNANDADLEHVMITDEEEIRTTNPVATEQYGNVSNNLQNSNTGPTTENVNHQGALPGMVWQDRDVYLQGPIWAKIPHTDGHFHPSPLMGGFGLKHPPPQIMIKNTPVPANPPTNFSAAKFASFITQYSTGQVSVEIEWELQKENSKRWNPEIQYTSNYNKSVNVDFTVDTNGVYSEPRPIGTRYLTRNL

SEQ ID NO: 2809 - protein, 734 aa, Artificial Sequence
  source: /note="Description of Artificial Sequence: Synthetic polypeptide"
MAADGYLPDWLEDTLSEGIRQWWKLKPGPPPPKPAERHQDDSRGLVLPGYKYLGPFNGLDKGEPVNEADAAALEHDKAYDRQLDSGDNPYLKYNHADAEFQERLKEDTSFGGNLGRAVFQAKKRVLEPLGLVEEPVKTAPGKKRPVEHSPAEPDSSSGTGKAGQQPARKRLNFGQTGDADSVPDPQPLGQPPAAPTSLGSTTMATGSGAPMADNNEGADGVGNSSGNWHCDSQWLGDRVITTSTRTWALPTYNNHLYKQISSQSGASNDNHYFGYSTPWGYFDFNRFHCHFSPRDWQRLINNNWGFRPKRLNFKLFNIQVKEVTQNDGTTTIANNLTSTVQVFTDSEYQLPYVLGSAHQGCLPPFPADVFMVPQYGYLTLNNGSQAVGRSSFYCLEYFPSQMLRTGNNFTFSYTFEDVPFHSSYAHSQSLDRLMNPLIDQYLYYLNRTQSNSGTLQQSRLLFSQAGPTSMSLQAKNWLPGPCYRQQRLSKQANDNNSNFPWTAATKYHLNGRDSLVNPGPAMASHKDDEEKFFPMHGTLIFGKQGTNANDADLEHVMITDEEEIRTTNPVATEQYGNVSNNLQNSNTGPTTENVNHQGALPGMVWQDRDVYLQGPIWAKIPHTDGHFHPSPLMGGFGLKHPPPQIMIKNTPVPANPPTNFSAAKFASFITQYSTGQVSVEIEWELQKENSKRWNPEIQYTSNYNKSVNVDFTVDTNGVYSEPRPIGTRYLTRNL

SEQ ID NO: 2810 - protein, 734 aa, Artificial Sequence
  source: /note="Description of Artificial Sequence: Synthetic polypeptide"
MAADGYLPDWLEDTLSEGIRQWWKLKPGPPPKPAERHQDDSRGLVLPGYKYLGPFNGLDKGEPVNEADAAALEHDKAYDRQLDSGDNPYLKYNHADAEFQERLKEDTSFGGNLGRAVFQAKKRVLEPLGLVEEPVKTAPGKKRPVEHSPAEPDSSSGTGKAGQQPARKRLNFGQTGDADSVPDPQPLGQPPAAPTSLGSTTMATGSGAPMADNNEGADGVGNSSGNWHCDSQWLGDRVITTSTRTWALPTYNNHLYKQISSQSGASNDNHYFGYSTPWGYFDFNRFHCHFSPRDWQRLINNNWGFRPKRLNFKLFNIQVKEVTQNDGTTTIANNLTSTVQVFTDSEYQLPYVLGSAHQGCLPPFPADVFMVPQYGYLTLNNGSQAVGRSSFYCLEYFPSQMLRTGNNFTFSYTFEDVPFHSSYAHSQSLDRLMNPLIDQYLYYLNRTQSNSGTLQQSRLLFSQAGPTSMSLQAKNWLPGPCYRQQRLSKQANDNNNSNFPWTAATKYHLNGRDSLVNPGPAMASHKDDEEKFFPMHGTLIFGKQGTNANDADLEHVMITDEEEIRTTNPVATEQYGNVSNNLQNSNTGPTTENVNHQGALPGMVWQDRDVYLQGPIWAKIPHTDGHFHPSPLMGGFGLKHPPPQIMIKNTPVPANPPTNFSAAKFASFITQYSTGQVSVEIEWELQKENSKRWNPEIQYTSNYNKSVNVDFTVDTNGVYSEPRPIGTRYLTRNL

SEQ ID NO: 2811 - protein, 735 aa, Artificial Sequence
  source: /note="Description of Artificial Sequence: Synthetic polypeptide"
MAADGYLPDWLEDTLSEGIRQWWKLKPGPPPPKPAERHQDDSRGLVLPGYKYLGPFNGLDKGEPVNEADAAALEHDKAYDRQLDSGDNPYLKYNHADAEFQERLKEDTSFGGNLGRAVFQAKKRVLEPLGLVEEPVKTAPGKKRPVEHSPAEPDSSSGTGKAGQQPARKRLNFGQTGDADSVPDPQPLGQPPAAPTSLGSTTMATGSGAPMADNNEGADGVGNSSGNWHCDSQWLGDRVITTSTRTWALPTYNNHLYKQISSQSGASNDNHYFGYSTPWGYFDFNRFHCHFSPRDWQRLINNNWGFRPKRLNFKLFNIQVKEVTQNDGTTTIANNLTSTVQVFTDSEYQLPYVLGSAHQGCLPPFPADVFMVPQYGYLTLNNGSQAVGRSSFYCLEYFPSQMLRTGNNFTFSYTFEDVPFHSSYAHSQSLDRLMNPLIDQYLYYLNRTQSNSGTLQQSRLLFSQAGPTSMSLQAKNWLPGPCYRQQRLSKQANDNNNSNFPWTAATKYHLNGRDSLVNPGPAMASHKDDEEKFFPMHGTLIFGKQGTNANDADLEHVMITDEEEIRTTNPVATEQYGNVSNNLQNSNTGPTTENVNHQGALPGMVWQDRDAYLQGPIWAKIPHTDGHFHPSPLMGGFGLKHPPPQIMIKNTPVPANPPTNFSAAKFASFITQYSTGQVSVEIEWELQKENSKRWNPEIQYTSNYNKSVNVDFTVDTNGVYSEPRPIGTRYLTRNL

SEQ ID NO: 2812 - protein, 735 aa, Artificial Sequence
  source: /note="Description of Artificial Sequence: Synthetic polypeptide"
MAADGYLPDWLEDTLSEGIRQWWKLKPGPPPPKPAERHQDDSRGLVLPGYKYLGPFNGLDKGEPVNEADAAALEHDKAYDRQLDSGDNPYLKYNHADAEFQERLKEDTSFGGNLGRAVFQAKKRVLEPLGLVEEPAKTAPGKKRPVEHSPAEPDSSSGTGKAGQQPARKRLNFGQTGDADSVPDPQPLGQPPAAPTSLGSTTMATGSGAPMADNNEGADGVGNSSGNWHCDSQWLGDRVITTSTRTWALPTYNNHLYKQISSQSGASNDNHYFGYSTPWGYFDFNRFHCHFSPRDWQRLINNNWGFRPKRLNFKLFNIQVKEVTQNDGTTTIANNLTSTVQVFTDSEYQLPYVLGSAHQGCLPPFPADVFMVPQYGYLTLNNGSQAVGRSSFYCLEYFPSQMLRTGNNFTFSYTFEDVPFHSSYAHSQSLDRLMNPLIDQYLYYLNRTQSNSGTLQQSRLLFSQAGPTSMSLQAKNWLPGPCYRQQRLSKQANDNNNSNFPWTAATKYHLNGRDSLVNPGPAMASHKDDEEKFFPMHGTLIFGKQGTNANDADLEHVMITDEEEIRTTNPVATEQYGNVSNNLQNSNTGPTTENVNHQGALPGMVWQDRDVYLQGPIWAKIPHTDGHFHPSPLMGGFGLKHPPPQIMIKNTPVPANPPTNFSAAKFASFITQYSTGQVSVEIEWELQKENSKRWNPEIQYTSNYNKSVNVDFTVDTNGVYSEPRPIGTRYLTRNL

SEQ ID NO: 2813 - protein, 735 aa, Artificial Sequence
  source: /note="Description of Artificial Sequence: Synthetic polypeptide"
MAADGYLPDWLEDTLSEGIRQWWKLKPGPPPPKPAERHQDDSRGLVLPGYKYLGPFNGLDKGEPVNEADAAALEHDKAYDRQLDSGDNPYLKYNHADAEFQERLKEDTSFGGNLGRAVFQAKKRVLEPLGLVEEPVKTAPGKKRPVEHSPAEPDSSSGTGKAGQQPARKRLNFGQTGDADSVPDPQPLGQPPAAPTSLGSTTMATGSGAPMADNNEGADGVGNSSGNWHCDSQWLGDRVITTSTRTWALPTYNNHLYKQISSQSGASNDNHYFGYSTPWGYFDFNRFHCHFSPRDWQRLINNNWGFRPKRLNFKLFNIQVKEVTQNDGTTTIANNLTSTVQVFTDSEYQLPYVLGSAHQGCLPPFPADVFMVPQYGYLTLNNGSQAVGRSSFYCLEYFPSQMLRTGNNFTFSYTFEDVPFHSSYAHSQSLDRLMNPLIDQYLYYLNRTQSNSGTLQQSRLLFSQAGPTSMSLQAKNWLPGPCYRQQRLSKQANDNNNSNFPWTAATKYHLNGRDSLVNPGPAMASHKDDEEKFFPMHGTLIFGKQGTNANDADLEHVMITDEEEIRTTNPVATEQYGNVSNNLQNSNTGPTTENVNHQGALPGMVWQDRDVYLQGPIWAKIPHTDGHFHPSPLMGGFGLKHPPPQIMIKNTPVPANPPTNFSAAKFASFITQYSTGQVSVEIEWELQKENSKRWNPEIQYTSNYNKSVNVDFTVDTNGAYSEPRPIGTRYLTRNL

SEQ ID NO: 2814 - protein, 735 aa, Artificial Sequence
  source: /note="Description of Artificial Sequence: Synthetic polypeptide"
MAADGYLPDWLEDTLSEGIRQWWKLKPGPPPPKPAERHKDDSRGLVLPGYKYLGPFNGLDKGEPVNEADAAALEHDKAYDRQLDSGDNPYLKYNHADAEFQERLKEDTSFGGNLGRAVFQAKKRVLEPLGLVEEPVKTAPGKKRPVEHSPVEPDSSSGTGKAGQQPARKRLNFGQTGDADSVPDPQPLGQPPAAPTSLGSTTMATGSGAPMADNNEGADGVGNSSGNWHCDSQWSGDRVITTSTRTWALPTYNNHLYKQISSQSGASNDNHYFGYSTPWGYFDFNRFHCHFSPRDWQRLINNNWGFRPKRLNFKLFNIQVKEVTQNDGTTTIANNLTSTVQVFTDSEYQLPYVLGSAHQGCLPPFPADVFMVPQYGYLTLNNGSQAVGRSSFYCLEYFPSQMLRTGNNFTFSYTFEDVPFHSSYAHSQSLDRLMNPLIDQYLYYLNKTQSNSGTLQQSRLLFSQAGPTSMSLQAKNWLPGPCYRQQRLSKQANDNNNSNFPWTAATKYHLNGRDSLVNPGPAMASHKDDEEKFFPMHGTLIFGKQGTNANDADLDNVMITDEEEIRTTNPVATEQYGTVSNNLQNSNTGPTTGTVNHQGALPGMVWQDRDVYLQGPIWAKIPHTDGHFHPSPLMGGFGLKHPPPQIMIKNTPVPANPPTNFSSAKFASFITQYSTGQVSVEIEWELQKENSKRWNPEIQYTSNYNKSVNVDFTVDTNGVYSEPRPIGTRYLTRNL

SEQ ID NO: 2815 - protein, 735 aa, Artificial Sequence
  source: /note="Description of Artificial Sequence: Synthetic polypeptide"
MAADGYLPDWLEDALSEGIRQWWKLKPGPPPPKPAERHKDDSRGLVLPGYKYLGPFNGLDKGEPVNEADAAALEHDKAYDRQLDSGDNPYLKYNHADAEFQERLKEDTSFGGNLGRAVFQAKKRVLEPLGLVEEPVKTAPGKKRPVEHSPVEPDSSSGTGKAGQQPARKRLNFGQTGDADSVPDPQPLGQPPAAPTSLGSTTMATGSGAPMADNNEGADGVGNSSGNWHCDSQWSGDRVITTSTRTWALPTYNNHLYKQISSQSGASNDNHYFGYSTPWGYFDFNRFHCHFSPRDWQRLINNNWGFRPKRLNFKLFNIQVKEVTQNDSTTTIANNLTSTVQVFTDSEYQLPYVLGSAHQGCLPPFPADVFMVPQYGYLTLNNGSQAVGRSSFYCLEYFPSQMLRTGNNFTFSYTFEDVPFHSSYAHSQSLDRLMNPLIDQYLYYLNKTQSNSGTLQQSRLLFSQAGPTSMSPQAKNWLPGPCYRQQRLSKQANDNNNSNFPWTAATKYHLNGRDSLVNPGPAMASHKDDEEKFFPMHGTLIFGKQGTNANDADLDNVMITDEEEIRTTNPVATEQYGTVSNNLQNSNTGPTTGTVNHQGALPGMVWQDRDVYLQGPIWAKIPHTDGHFHPSPLMGGFGLKHPPPQIMIKNTPVPANPPTNFSSAKFASFITQYSTGQVSVEIEWELQKENSKRWNPEIQYTSNYNKSVNVDFTVDTNGVYSEPRPIGTRYLTRNL

SEQ ID NO: 2816 - protein, 735 aa, Artificial Sequence
  source: /note="Description of Artificial Sequence: Synthetic polypeptide"
MAADGYLPDWLEDTLSEGIRQWWKLKPGPPPPKPAERHKDDSRGLVLPGYKYLGPFNGLDKGEPVNEANAAALEHDKAYDRQLDSGDNPYLKYDHADAEFQERLKEDTSFGGNLGRAVFQAKKRVLEPLGLVEEPVKTAPGKKRSVEHSPVEPDSSSGTGKAGQQPARKRLNFGQTGDADSVPDPQPLGQPPAAPTSLGSTTMATGSGAPMADNNEGADGVGNSSGNWHCDSQWSGDRVITTSTRTWALPTYNNHLYKQISSQSGASNDNHYFGHSTPWGYFDFNRFHCHFSPRDWQRLINNNWGFRPKRLNFKLFNIQVKEVTQNDGTTTIANNLTSTVQVFTDSEYRLPYVLGSAHQGCLPPFPADVFMVPQYGYLTLNNGSQAVGRSSFYCLEYFPSQMLRTGNNFTFSYTFEDVPFHSSYAHSQSLDRLMNPLIDQYLYYLNKTQSNSGTLQQSRLLFSQAGPTSMSLQAKNWLPGPCYRQQRLSKQANDNNNSNFPWTVATKYHLNGRDSLVNPGPAMASHKDDEEKFFPMHGTLIFGKQGTNANDADLDNVMITDEEEIRTTNPVATEQYGTVSNNLQNSNTGPTTGTVNHQGALPGMVWQDRDVYLQGPIWAKIPHTDGHFHPSPLMGGFGLKHPPPQIMIKNTPVPANPPTNFSSAKFASFITQYSTGQVSVEIEWELQKENSKRWNPETQYTSNYNKSVNVDFTVDTNGVYSEPRPIGTRYLTRNL

SEQ ID NO: 2817 - protein, 735 aa, Artificial Sequence
  source: /note="Description of Artificial Sequence: Synthetic polypeptide"
MAADGYLPDWLEDTLSEGIRQWWKLKPGPPPPKPAERHKDDSRGLVLPGYKYLGPFNGLDKGEPVNEANAAALEHDKAYDRQLDSGDNPYLKYNHADAEFQERLKEDTSFGGNLGRAVFQAKKRVLEPLGLVEEPVKTAPGKKRPVEHSPVEPDSSSGTGKAGQQPARKRLNFGQTGDADSVPDPQPLGQPPAAPTSLGSTTMATGSGAPMADNNEGADGVGNSSGNWHCDSQWSGDRVITTSTRTWALPTYNNHLYKQISSQSGASNDNHYFGYSTPWGYFDFNRFHCRFSPRDWQRLINNNWGFRPKRLNFKLLNIQVKEVTQNDGTTTIANNLTSTVQVFTDSEYQLPYVLGSAHQGCLPPFPADVFMVPQYGYLTLNNGSQAVGRSSFYCLEYFPSQMLRTGNNFTFSYTFEDVPFHSSYAHSQSLDRLMNPLIDQYLYYLNKTQSNSGTLQQSRLLFSQAGPTSMSLQAKNWLPGPCYRQQRLSKQANDNNNSNFPWTAATKYHLNGRDSLVNPGPAMASHKDDEEKFFPMHGTLIFGKQGTNANDADLDNVMVTDEEEIRTTNPVATEQYGTVSNNLQNSNTGPTTGTVNHQGALPGMVWQDRDVYLQGPIWAKIPHTDGHFHPSPLMGGFGLKHPPPQIMIKNTPVPANPPTNFSSAKFASFITQYSTGQVSVEIEWELQKENSKRWNPETQYTSNYNKSVNVDFTVDTNGVYSEPRPIGTRYLTRNL

SEQ ID NO: 2818 - protein, 735 aa, Artificial Sequence
  source: /note="Description of Artificial Sequence: Synthetic polypeptide"
MAADGYLPDWLEDTLSEGIRQWWKLKPGPPPPKPAERHKDDSRGLVLPGYKYLGPFNGLDKGEPVNEADAAALEHDKAYDRQLDSGDNPYLKYNHADAEFQERLKEDTSFGGNLGRAVFQAKKRVLEPLGLVEEPVKTAPGKKRPVEHSPVEPDSSSGTGKAGQQPARKGLNFGQTGDADSVPDPRPLGQPPAAPASLGSTTMATGSGAPMADNNEGADGVGNSSGNWHCDSQWLGDRVITTSTRTWALPTYNNHLYKQISSQSGASNDNHYFGYSTPWGYFDFNRFHCHFSPRDWQRLINNNWGFRPKRLNFKLFNIQVKEVTQNDGTTTIANNLTSTVPVFTDSEYQLPYVLGSAHQGCLPPFPADVFMVPQYGYLTLNNGSQAVGRSSFYCLEYFPSQMLRTGNNFTFSYTFEDVPFHSSYAHSQSLDRLMNPLIDQYLYYLNKTQSNSGTLQQSRLLFSQAGPTSMSLQAKNWLPGPYYRQQRLSKQANDNNNSNFPWTAATKYHPNGRDSLVDPGPAMASHKDDEEKFFPMHGTLIFGKQGTNANDADLDNVMITDEEEIRTTNPVATGQYGTVSNNLQNSNTGPTTGTVNHQGALPGMVWQDRDVYLQGPIWAKIPHTDGHFHPSPLMGGFGLKHPPPQIMVKNTPVPANPPTNFSSAKFVSFITRYSTGQVSVEIEWELQKENSKRWNPEIQYTSNYNKSVNVDFTVDTNGVYSEPRPIGTRYLTRNL

SEQ ID NO: 2819 - protein, 735 aa, Artificial Sequence
  source: /note="Description of Artificial Sequence: Synthetic polypeptide"
MAADGYLPDWLEDTLSEGIRQWWKLKPGPPPPKPAERHKDDSRGLVLPGYKYLGPFNGPDKGEPVNEADAAALEHDKAYDRQLDSGDNPYLKYNHADAEFQERLKEDTSFGGNLGRAVFQAKKRVLEPLGLVEEPVKTAPGKKRPVEHSPVEPDSSSGTGKAGQQPARKRLNFGQTGDADSVPDPQPLGQPPAAPTSLGSTTMATGSGAPMADNNEGADGVGNSSGNWHCDSQWSGDRVITTSTRTWALPTYNNHLYKQISSQSGASNDNHYFGYSTPWGYFDFNRFHCHFSPRDWQRLINNNWGFRPKRLNFKLFNIQVKEVTQNDGTTTIANNLTSTVQVFTDSEYQLPYVLGSAHQGCLPPFPADVFMVPQYGYLTLNNGSQAVGRSSFYCLEYFPSQMLRTGNNFTFSYTFEDVPFHSSYAHSQSLDRLMNPLIDQYLYYLNKTQSNSGTLQQSRLLFSQAGPTSMSLQAKNWLPGPCYRQQRLSKQANDNNNSNFPWTAATKYHLNGRDSLVNPGPAMASHKDDEEKFFPMHGTLIFGKQGTNANDADLDNVMITDEEEIRTTNPVATEQYGTVSNNLQNSNTGPTTGTVNHQGALPGMVWQDRDVYLQGPIWAKIPHTDGHFHPSPLMGGFGLKHPPPQIMIKNTPVPANPPTNFSSAKFASFITQYSTGQVSVEIEWELQKENSKRWNPEIQYTSNYNKSVNVDFTVDTNGVYSEPRPIGTRYLTRNL

SEQ ID NO: 2820 - protein, 735 aa, Artificial Sequence
  source: /note="Description of Artificial Sequence: Synthetic polypeptide"
MAADGYLPDWLEDTLSEGIRQWWKLKPGPPPPKPAERHKDDSRGLVLPGYKYLGPFNGLDKGEPVNEADAAALEHDKAYDRQLDSGDNPYLKYNHADAEFQERLKEDTSFGGNLGRAVFQAKKRVLEPLGLVEEPVKTAPGKKRPVEHSPVEPDSSSGTGKAGQQPARKRLNFGQTGDADSVPDPQPLGQPPAAPTSLGSTTMATGSGAPMADNNEGADGVGNSSGNWHCDSQWSGDRVITTSTRTWALPTYNNHLYKQISSQSGASNDNHYFGYSTPWGYFDFNRFHCHFSPRDWQRLINNNWGFRPKRLNFKLFNIQVKEVTQNDGTTTIANNLTSTVQVFTDSEYQLPYVLGSAHQGCLPPFPADVFMVPQYGYLTLNNGSQAVGRSSFYCLEYFPSQMLRTGNNFTFSYTFEDVPFHSSYAHSQSLDRLMNPLIDQYLYYLNKTQSNSGTLQQSRLLFSQAGPTSMSLQAKNWLPGPCYRQQRLSKQANDNNNSNFPWTAATKYHLNGRDSLVNPGPAMASHKDDEEKFFPMHGTLIFGKQGTNANDADLDNVMITDEEEIRTTNPVATEQYGTVSNNLQNSNTGPTTGTVNHQGALPGMVWQDRDVYLQGPIWAKIPHTDGHFHPSPLMGGFGLKHPPPQIMIKNTPVPANPPTNFSSAKFASFITQYSTGQVSVEIEWELQKENSKRWNPETQYTSNYNKSVNVDFTVDTNGVYSEPRPIGTRYLTRNL

SEQ ID NO: 2821 - protein, 735 aa, Artificial Sequence
  source: /note="Description of Artificial Sequence: Synthetic polypeptide"
  MOD_RES (574)..(574): Any naturally occurring amino acid
MAADGYLPDWLEDTLSEGIRQWWKLKPGPPPPKPAERHKDDSRGLVLPGYKYLGPFNGLDKGEPVNEADAAALEHDKAYDRQLDSGDNPYLKYNHADAEFQERLKEDTSFGGNLGRAVFQAKKRVLEPLGLVEEPVKTAPGKKRPVEHSPVEPDSSSGTGKAGQQPARKGLNFGQTGDADSVPDPRPLGQPPAAPASLGSTTMATGSGAPMADNNEGADGVGNSSGNWHCDSQWLGDRVITTSTRTWALPTYNNHLYKQISSQSGASNDNHYFGYSTPWGYFDFNRFHCHFSPRDWQRLINNNWGFRPKRLNFKLFNIQVKEVTQNDGTTTIANNLTSTVPVFTDSEYQLPYVLGSAHQGCLPPFPADVFMVPQYGYLTLNNGSQAVGRSSFYCLEYFPSQMLRTGNNFTFSYTFEDVPFHSSYAHSQSLDRLMNPLIDQYLYYLNKTQSNSGTLQQSRLLFSQAGPTSMSLQAKNWLPGPYYRQQRLSKQANDNNNSNFPWTAATKYHPNGRDSLVDPGPAMASHKDDEEKFFPMHGTLIFGKQGTNANDADLDNVMITDEEEIRTTNPVATXQYGTVSNNLQNSNTGPTTGTVNHQGALPGMVWQDRDVYLQGPIWAKIPHTDGHFHPSPLMGGFGLKHPPPQIMVKNTPVPANPPTNFSSAKFASFITRYSTGQVSVEIEWELQKENSKRWNPEIQYTSNYNKSVNVDFTVDTNGVYSEPRPIGTRYLTRNL

SEQ ID NO: 2822 - protein, 735 aa, Artificial Sequence
  source: /note="Description of Artificial Sequence: Synthetic polypeptide"
MAADGYLPDWLEDTLSEGIRQWWKLKPGPPPPKPAERHKDDSRGLVLPGYKYLGPFNGLDKGEPVNEADAAAPEHDKAYDRQLDSGDNPYPKYNHADAEFQERLKEDTSFGGNLGRAVFQAKKRVLEPLGLVEEPVKTAPGKKRPVEHSPVEPDSSSGTGKAGQQPARKRLNFGQTGDADSVPDPQPLGQPPAAPTSLGSTTMATGSGAPMADNNEGADGVGNSSGNWHCDSQWSGDRVITTSTRTWALPTYNNHLYKQISSQSGASNDNHYFGYSTPWGYFDFNRFHCHFSPRDWQRLINNNWGFRPKRLNFKLFNIQVKEVTQNDGTTTIANNLTSTVQVFTDSEYQLPYVLGSAHQGCLPPFPADVFMVPQYGYLTLNNGSQAVGRSSFYCLEYFPSQMLRTGNNFTFSYTFEDVPFHSSYAHSQSLDRLMNPLIDQYLYYLNKTQSNSGTLQQSRLLFSQAGPTSMSLQAKNWLPGPCYRQQRLSKQANDNNNSNFPWTAATKYHLNGRDSLVNPGPAMASHKDDEEKFFPMHGTLIFGKQGTNANDADLDNVMITDEEEIRTTNPVATEQYGTVSNNLQNSNTGPTTGTVNHQGALPGMVWQDRDVYLQGPIWAKIPHTDGHFHPSPLMGGFGLKHPPPQIMIKNTPVPANPPTNFSSAKFASFITQYSTGQVSVEIEWELQKENSKRWNPEIQYTSNYNKSVNVDFTVDTNGVYSEPRPIGTRYLTRNL

SEQ ID NO: 2823 - protein, 735 aa, Artificial Sequence
  source: /note="Description of Artificial Sequence: Synthetic polypeptide"
MAADGYLPDWLEDTLSEGIRQWWKLKPGPPPPKPAERHKDDSRGLVLPGYKYLGPFNGLDKGEPVNEADAAALEHDKAYDRQLDSGDNPYLKYNHADAEFQERLKEDTSFGGNLGRAVFQAKKRVLEPLGLVVEPVKTAPGKKRPVEHSPVEPDSSSGTGKAGQQPARKRLNFGQTGDADSVPDPQPLGQPPAAPTSLGSTTMATGSGAPMADNNEGADGVGNSSGNWHCDSQWSGDRVITTSTRTWALPTYNNHLYKQISSRSGASNDNHYFGYSTPWGYFDFNGFHCHFSPRDWQRLINNNWGFRPKRLNFKLFNIQVKEVTQNDGTTTIANNLTSTVQVFTDSEYQLPHVLGSAHQGCLPPFPADVFMVPQYGYLTLNNGSQAVGRSSFYCPEYFPSQMLRTGNNFTFSYTFEDVPFHSSYAHSQSLDRLMNPLIDQYLYYLNKTQSNSGTLQQSRLLFSQAGPTSMSLQAKNWLPGPCYRQQRLSKQANGNNNSNFPWTAATKYHLNGRDSLVNPGPAMASHKDDEEKFFPMHGTLIFGKQGTNANDADLDNVMITDEEEIRTTNPVATEQYGTVSNNLQNSNTGPTTGTVNHQGALPGMVWQDRDVYLQGPIWAKIPHTDGHFHPSPLMGGFGLKHPPPQIMIKNTPVPANPPTNFSSAKFASFITQYSTGQVSVEIEWELQKENSKRWNPEIQYTSNYNKSVNVDFTVDTNGVYSEPRPIGTRYLTRNL

SEQ ID NO: 2824 - protein, 735 aa, Artificial Sequence
  source: /note="Description of Artificial Sequence: Synthetic polypeptide"
MAADGYLPDWLEDTLSEGIRQWWKLKPGPPPPKPAERHKDDSRGLVLPGYKYLGPFNGLDKGEPVNEADAAALEHDKAYDRQLDSGDNPYLKYNHADAEFQERLKEDTSFGGNLGRAVFQAKKRVLEPLGLVEEPVKTVPGKKRPVEHSPVEPDSSSGTGKAGQQPARKRLNFGQTGDADSVPDPQPLGQPPAAPTSLGSTTMATGSGAPMADNNEGADGVGNSSGNWHCDSQWSGDRVITTSTRTWALPTYNNHPYKQISSQSGASNDNHYFGYSTPWGYFDFNRFHCHFSPRDWQRLINNNWGFRPKRLNFKLFNIQVKEVTQNDGTTTIANNLTSTVQVFTDSEYQLPYVLGSAHQGRLPPFPADVFMVPQYGYLTLNNGSQAVGRSSFYCLEYFPSQMLRTGNNFTFSYTFEDVPFHSSYAHSQSLDRLMNPLIDQYLYYLNKTQSNSGTLQQSRLLFSQAGPTSMSLQAKNWLPGPCYRQQRLSKQADDNNNSNFPWTAATKYHLNGRDSLVNPGPAMASHKDDEEKFFPMHGTLIFGKQGTNANDADLDNVMITDEEEIRTTNPVATEQYGTVSNNLQNSNTGPTTGTVNHQGALPGMVWQDRDVYLQGPIWAKIPHTDGHFHPSPLMGGFGLKHPPPQIMIKNTPVPANPPTNFSSAKFASFITQYSTGQVSVEIEWELQKENSKRWNPEIQYTSNYNKSVNVDFTVDANGVYSEPRPIGTRYLTRNL

SEQ ID NO: 2825 - protein, 735 aa, Artificial Sequence
  source: /note="Description of Artificial Sequence: Synthetic polypeptide"
MAADGYLPDWLEDTLSEGIRQWWKLKPGPPPPKPAERHKDDSRGLVLSGYKYLGPFNGLDKGEPVNEADAAALEHDKAYDRQLDSGDNPYLKYNHADAEFQERLKEDTSFGGNLGRAVFQAKKRVLEPLGLVEEPVKTAPGKKRPVEHSPVEPDSSSGTGKAGQQPARKRLNFGQTGDADSVPDPQPLGQPPAAPTSLGSTTMATGSGAPMADNNEGADGVGNSSGNWHCDSQWSGDRVITTSTRTWALPTYNNHLYKQISSQSGASNDNHYFGYSTPWGYFDFNRFHCHFSPRDWQRLINNNWGFRPKRLNFKLFNIQVKEVTQNDGTTTIANNLTSTVQVFTDSEYQLPYVLGSAHQGCLPPFPADVFMVPQYGYLTLNNGSQAVGRSSFYCLEYFPSQMLRTGNNFTFSYTFEDVPFHSSYAHSQSLDRLMNPLIDQYLYYLNKTQSNSGTLQQSRLLFSQAGPTSMSLQAKNWLPGPCYRQQRLSKQANDNNNSNFPWTAATKYHLNGRDSLVNPGPAMASHKDDEEKFFPMHGTLIFGKQGTNANDADLDNVMITDEEEIRTTNPVATEQYGTVSNNLQNSNTGPTTGTVNHQGALPGMVWQDRDVYLQGPIWAKIPHTDGHFHPSPLMGGFGLKHPPPQIMIKNTPVPANPPTNFSSAKFASFITQYSTGQVSVEIEWELQKENSKRWNPEIQYTSNYNKSVNVDFTVDTNGVYSEPRPIGTRYLTRNL

SEQ ID NO: 2826 - protein, 735 aa, Artificial Sequence
  source: /note="Description of Artificial Sequence: Synthetic polypeptide"
MAADGYLPDWLEDTLSEGIRQWWKLKPGPPPPKPAERHKDDSRGLVLPGYKYLGPFNGLDKGEPVNEADAAALEHDKAYDRQLDSGDNPYLKYNHADAEFQERLKEDTSFGGNLGRAVFQAKKRVLEPLGLVEEPVKTAPGKKRPVEHSPVEPDSSSGTGKAGQQPARKRLNFGQTGDADSVPDPQPLGQPPAAPTSLGSTTMATGSGAPMADNNEGADGVGNSSGNWHCDSQWSGDRVITTSTRTWALPTYNNHLYKQISSQSGASNDNHYFGYSTPWGYFDFNRFHCHFSPRDWQRLINNNWGFRPKRLNFKLFNIQVKEVTQNDGTTTIANNLTSTVQVFTDSEYQLPYVLGSAHQGCLPPFPADVFMVPQYGYLTLNNGSQAVGRSSFYCLEYFPSQMLRTGNNFTFSYTFEDVPFHSSCAHSQSLDRLMNPLIDQYLYYLNKTQSNSGTLQQSRLLFSQAGPTSMSLQAKNWLPGPCYRQQRLSKQANDNNNSNFPWTAATKYHLNGRDSLVNPGPAMASHKDDEEKFFPMHGTLIFGKQGTNANDADLDNVMITDEEEIRTTNPVATEQYGTVSNNLQNSNTGPTTGTVNHQGALPGMVWQDRDVYLQGPIWAKIPHTDGHFHPSPLMGGFGLKHPPPQIMIKNTPVPANPPTNFSSAKFASFITQYSTGQVSVEIEWELQKENSKRWNPEIQYTSNYNKSVNVDFTVDTNGVYSEPRPIGTRYLTRNL

SEQ ID NO: 2827 - protein, 735 aa, Artificial Sequence
  source: /note="Description of Artificial Sequence: Synthetic polypeptide"
MAADGYLPDWLEDTLSEGIRQWWKLKPGPPPPKPAERHKDDSRGLVLPGYKYLGPFNGLDKGEPVNEADAAALEHDKAYDRQLDSGDNPYLKYNHADAEFQERLKEDTSFGGNLGRAVFQAKKRVLEPLGLVEEPVKTAPGKKRPVEHSPVEPDSSSGTGKAGQQPARKRLNFGQTGDADSVPDPQPLGQPPAAPTSLGSTTMATGSGAPMADNNEGADGVGNSSGNWHCDSQWSGDRVITTSTRTWALPTYNNHLYKQISSQSGASNDNHYFGYSTPWGYFDFNRFHCHFSPRDWQRLINNNWGFRPKRLNFKLFNIQVKEVTQNDGTTTIANNLTSTVPVFTDSEYQLPYVLGSAHQGCLPPFPADVFMVPQYGYLTLNNGSQAVGRSSFYCLEYFPSQMLRTGNNFTFSYTFEDVPFHSSYAHSQSLDRLMNPLIDQYLYYLNKTQSNSGTLQQSRLLFSQAGPTSMSLQAKNWLPGPYYRQQRLSKQANDNNNSNFPWTAATKYHPNGRDSLVDPGPAMASHKDDEEKFFPMHGTLIFGKQGTNANDADLDNVMITDEEEIRTTNPVATGQYGTVSNNLQNSNTGPTTGTVNHQGALPGMVWQDRDVYLQGPIWAKIPHTDGHFHPSPLMGGFGLKHPPPQIMVKNTPVPANPPTNFSSAKFASFITRYSTGQVSVEIEWELQKENSKRWNPEIQYTSNYNKSVNVDFTVDTNGVYSEPRPIGTRYLTRNL

SEQ ID NO: 2828 - protein, 735 aa, Artificial Sequence
  source: /note="Description of Artificial Sequence: Synthetic polypeptide"
MAADGYLPDWLEDTLSEGIRQWWKLKPGPPPPKPAERHKDDSRGLVLPGYKYLGPFNGPDKGEPVNEADAAALEHDKAYDRQLDSGDNPYLKYNHADAEFQERLKEDTSFGGNLGRAVFQAKKRVLEPLGLVEEPVKTAPGKKRPVEHSPVEPDSSSGTGKAGQQPARKRLNFGQTGDADSVPDPQPLGQPPAAPTSLGSTTMATGSGAPMADNNEGADGVGNSSGNWHCDSQWSGDRVITTSTRTWALPTYNNHLYKQISSQSGASNDNHYFGYSTPWGYFDFNRFHCHFSPRDWQRLINNNWGFRPKRLNFRLFNIQVKEVTQNDGTTTIANNLTSTVQVFTDSEYQLPYVLGSAHQGCLPPFPADVFMVPQYGYLTLNNGSQAVGRSSFYCLEYFPSQMLRTGNNFTFSYTFEDVPFHSSYAHSQSLDRLMNPLIDQYLYYLNKTQSNSGTLQQSRLLFSQAGPTSMSLQAKNWLPGPCYRQQRLSKQANDNNNSNFPWTAATKYHLNGRDSLVNPGPAMASHKDDEEKFFPMHGTLIFGKQGTNANDADLDNVMITDEEEIRTTNPVATEQYGTVSNNLQNSNTGPTTGTVNHQGALPGMVWQDRDVYLQGPIWAKIPHTDGHFHPSPLMGGFGLKHPPPQIMIKNTPVPANPPTNFSSAKFASFITQYSTGQVSVEIEWELQKENSKRWNPEIQYTSNYNKSVNVDFTVDTNGVYSEPRPIGTRYLTRNL

SEQ ID NO: 2829 - protein, 735 aa, Artificial Sequence
  source: /note="Description of Artificial Sequence: Synthetic polypeptide"
MAADGYLPDWLEDTLSEGIRQWWKLKPGPPPPKPAERHKDDSRGLVLPGYKYLGPFNGPDKGEPVNEADAAALEHDKAYDRQLDSGDNPYLKYNHADAEFQERLKEDTSFGGNLGRAVFQAKKRVLEPLGLVEEPVKTAPGKKRPVEHSPVEPDSSSGTGKAGQQPARKRLNFGQTGDADSVPDPQPLGQPPAAPTSLGSTTMATGSGAPMADNNEGADGVGNSSGNWHCDSQWSGDRVITTSTRTWALPTYNNHLYKQISSQSGASNDNHYFGYSTPWGYFDFNRFHCHFSPRDWQRLINNNWGFRPKRLNFRLFNIQVKEVTQNDGTTTIANNLTSTVQVFTDSEYQLPYVLGSAHQGCLPPFPADVFMVPQYGYLTLNNGGQAVGRSSFYCLEYFPSQMLRTGDNFTFSYTFEDVPFHSSYAHSQSLDRLMNPLIDQYLYYLNKTQSNSGTLQQSRLLFSQAGPTSMSLQAKNWLPGPCYRQQRLSKQANDNNNSNFPWTAATKYHLNGRDSLVNPGPAMASHKDDEEKFFPMHGTLIFGKQGTNANDADLDNVMITDEEEIRTTNPVATEQYGTVSNNLQNSNTGPTTGTVNHQGALPGMVWQDRDVYLQGPIWAKIPHTDGHFHPSPLMGGFGLKHPPPQIMIKNTPVPANPPTNFSSAKFASFITQYSTGQVSVEIEWELQKENSKRWNPEIQYTSNYNKSVNVDFTVDTNGVYSEPRPIGTRYLTRNL

SEQ ID NO: 2830 - protein, 735 aa, Artificial Sequence
  source: /note="Description of Artificial Sequence: Synthetic polypeptide"
MAADGYLPDWLEDTLSEGIRQWWKLKPGPPPPKPAERHKDDSRGLVLPGYKYLGPFNGLDKGEPVNEADAAALEHDKAYDRQLDSGDNPYLKYNHADAEFQERLKEDTSFGGNLGRAVFQAKKRVLEPLGLVEEPVKTAPGKKRPVEHSPVEPDSSSGTGKAGQQPARKRLNFGQTGDADSVPDPQPLGQPPAAPTSLGSTTMATGSGAPMADNNEGADGVGNSSGNWHCDSQWSGDRVITTSTRTWALPTYNNHLYKQISSQSGASNDNHYFGYSTPWGYFDFNRFHCHFSPRDWQRLINNNWGFRPKRLNFKLFNIQVKEVTQNDGTTTIANNLTSTVQVFTDSEYQLPYVLGSAHQGCLPPFPADVFMVPQYGYLTLNNGSQAVGRSSFYCLEYFPSQMLRTGNNFTFSYTFEDVPFHSSYAHSQSLDRLMNPLIDQYLYYLNKTQSNSGTLQQSRLLFSQAGPTSMSLQAKNWLPGPCYRQQRLSKQANDNNNSNFPWTAATKYHLNGRDSLVNPGPAMASHKDDEEKFFPMHGTLIFGKQGTNANDADLDNAMITDEEEIRTTNPVATEQYGTVSNNLQNSNTGPTTGTVNHQGALPGMVWQDRDVYLQGPIWAKIPHTDGHFHPSPLMGGFGLKHPPPQIMIKNTPVPANPPTNFSSAKFASFITQYSTGQVSVEIEWELQKENSKRWNPEIQYTSNYNKSVNVDFTVDTNGVYSEPRPIGTRYLTRNL

SEQ ID NO: 2831 - protein, 735 aa, Artificial Sequence
  source: /note="Description of Artificial Sequence: Synthetic polypeptide"
MAADGYLPDWLEDTLSEGIRQWWKLKPGPPPPKPAERHKDDSRGLVLPGYKYLGPFNGLDKGEPVNEANAAALEHDKAYDRQLDSGDNPYLKYNHADAEFQERLKEDTSFGGNLGRAVFQAKKRVLEPLGLVEEPVKTAPGKKRPVEHSPVEPDSSSGTGKAGQQPARKRLNFGQTGDADSVPDPQPLGQPPAAPTSLGSTTMATGSGAPMADNNEGADGVGNSSGNWHCDSQWSGDRVITTSTRTWALPTYNNHLYKQISSQSGASNDNHYFGYSTPWGYFDFNRFHCHFSPRDWQRLINNNWGFRPKRLNFKLFNIQVKEVTQNDGTTTIANNLTSTVQVFTDSEYQLPYVLGSAHQGCLPPFPADVFMVPQYGYLTLNNGSQAVGRSSFYCLEYFPSQMLRTGNNFTFSYTFEDVPFHSSYAHSQSLDRLMNPLIDQYLYYLNKTQSNSGTLQQSRLLFSQAGPTSMSLQAKNWLPGPCYRQQRLSKQANDNNNSNFPWTAATKYHLNGRDSLVNPGPAMASHKDDEEKFFPMHGTLIFGKQGTNANDADLDNVMITDEEEIRTTNPVATEQYGTVSNNLQNSNTGPTTGTVNHQGALPGMVWQDRDVYLQGPIWAKIPHTDGHFHPSPLMGGFGLKHPPPQIMIKNTPVPANPPTNFSSAKFASFITQYSTGQVSVEIEWELQKENSKRWNPETQYTSNYNKSVNVDFTVDTNGVYSEPRPIGTRYLTRNL

SEQ ID NO: 2832 - protein, 735 aa, Artificial Sequence
  source: /note="Description of Artificial Sequence: Synthetic polypeptide"
MAADGYLPDWLEDTLSEGIRQWWKLKPGPPPPKPAERHKDDSRGLVLPGYKYLGPFNGPDKGEPVNEADAAALEHDKAYDRQLDSGDNPYLKYNHADAEFQERLKEDTSFGGNLGRAVFQAKKRVLEPLGLVEEPVKTAPGKKRPVEHSPVEPDSSSGTGKAGQQPARKRLNFGQTGDADSVPDPQPLGQPPAAPTSLGSTTMATGSGAPMADNNEGADGVGNSSGNWHCDSQWSGDRVITTSTRTWALPTYNNHLYKQISSQSGASNDNHYFGYSTPWGYFDFNRFHCHFSPRDWQRLINNNWGFRPKRLNFRLFNIQVKEVTQNDGTTTIANNLTSTVQVFTDSEYQLPYVLGSAHQGCLPPFPADVFMVPQYGYLTLNNGSQAVGRSSFYCLEYFPSQMLRTGDNFTFSYTFEDVPFHSSYAHSQSLDRLMNPLIDQYLYYLNKTQSNSGTLQQSRLLFSQAGPTSMSLQAKNWLPGPCYRQQRLSKQANDNNNSNFPWTAATKYHLNGRDSLVNPGPAMASHKDDEEKFFPMHGTLIFGKQGTNANDADLDNVMITDEEEIRTTNPVATEQYGTVSNNLQNSNTGPTTGTVNHQGALPGMVWQDRDVYLQGPIWAKIPHTDGHFHPSPLMGGFGLKHPPPQIMIKNTPVPANPPTNFSSAKFASFITQYSTGQVSVEIEWELQKENSKRWNPEIQYTSNYNKSVNVDFTVDTNGVYSEPRPIGTRYLTRNL

SEQ ID NO: 2833 - protein, 735 aa, Artificial Sequence
  source: /note="Description of Artificial Sequence: Synthetic polypeptide"
MAADGYLPDWLEDTLSEGIRQWWKLKPGPPPPKPAERHKDDSRGLVLPGYKYLGPFNGLDKGEPVNEADAAALEHDKAYDRQLDSGDNPYLKYNHADAEFQERLKEDTSFGGNLGRAVFQAKKRVLEPLGLVEEPVKTAPGKKRPVEHSPVEPDSSSGTGKAGQQPARKGLNFGQTGDADSVPDPRPLGQPPAAPASLGSTTMATGSGAPMADNNEGADGVGNSSGNWHCDSQWLGDRVITTSTRTWALPTYNNHLYKQISSQSGASNDNHYFGYSTPWGYFDFNRFHCHFSPRDWQRLINNNWGFRPKRLNFKLFNIQVKEVTQNDGTTTIANNLTSTVPVFTDSEYQLPYVLGSAHQGCLPPFPADVFMVPQYGYLTLNNGSQAVGRSSFYCLEYFPSQMLRTGNNFTFSYTFEDVPFHSSYAHSQSLDRLMNPLIDQYLYYLNKTQSNSGTLQQSRLLFSQAGPTSMSLQAKNWLPGPYYRQQRLSKQANDNNNSNFPWTAATKYHPNGRDSLVDPGPAMASHKDDEEKFFPMHGTLIFGKQGTNANDADLDNVMITDEEEIRTTNPVATGQYGTVSNNLQNSNTGPTTGTVNHQGALPGMVWQDRDVYLQGPIWAKIPHTDGHFHPSPLMGGFGLKHPPPQIMVKNTPVPANPPTNFSSAKFASFITRYSTGQVSVEIEWELQKENSKRWNPEIQYTSNYNKSVNVDFTVDTNGVYSEPRPIGTRYLTRNL

SEQ ID NO: 2834 - protein, 735 aa, Artificial Sequence
  source: /note="Description of Artificial Sequence: Synthetic polypeptide"
MAADGYLPDWLEDTLSEGIRQWWKLKPGPPPPKPAERHKDDSRGLVLPGYKYLGPFNGLDKGEPVNEADAAALEHDKAYDRQLDSGDNPYLKYNHADAEFQERLKEDTSFGGNLGRAVFQAKKRVLEPLGLVEEPVKTVPGKKRPVEHSPVEPDSSSGTGKAGQQPARKRLNFGQTGDADSVPDPQPLGQPPAAPTSLGSTTMATGSGAPMADNNEGADGVGNSSGNWHCDSQWSGDRVITTSTRTWALPTYNNHPYKQISSQSGASNDNHYFGYSTPWGYFDFNRFHCHFSPRDWQRLINNNWGFRPKRLNFKLFNIQVKEVTQNDGTTTIANNLTSTVQVFTDSEYQLPYVLGSAHQGRLPPFPADVFMVPQYGYLTLNNGSQAVGRSSFYCLEYFPSQMLRTGNNFTFSYTFEDVPFHSSYAHSQSLDRLMNPLIDQYLYYLNKTQSNSGTLQQSRLLFSQAGPTSMSLQAKNWLPGPCYRQQRLSKQADDNNNSNFPWTAATKYHLNGRDSLVNPGPAMASHKDDEEKFFPMHGTLIFGKQGTNANDADLDNVMITDEEEIRTTNPVATEQYGTVSNNLQNSNTGPTTGTVNHQGALPGMVWQDRDVYLQGPIWAKIPHTDGHFHPSPLMGGFGLKHPPPQIMIKNTPVPANPPTNFSSAKFASFITQYSTGQVSVEIEWELQKENSKRWNPEIQYTSNYNKSVNVDFTVDTNGVYSEPRPIGTRYLTRNL

SEQ ID NO: 2835 - protein, 735 aa, Artificial Sequence
  source: /note="Description of Artificial Sequence: Synthetic polypeptide"
MAADGYLPDWLEDTLSEGIRQWWKLKPGPPPPKPAERHKDDSRGLVLPGYKYLGPFNGLDKGEPVNEADAAALEHDKAYDRQLDSGDNPYLKYNHADAEFQERLKEDTSFGGNLGRAVFQAKKRVLEPLGLVEEPVKTAPGKKRPVEQSPAEPDSSSGTGKAGNQPARKRLNFGQTGDADSVPDPQPLGQPPAAPSGLGSTTMATGSGAPMADNNEGADGVGNSSGNWHCDSQWLGDRVITTSTRTWALPTYNNHLYKQISSQSGASNDNHYFGYSTPWGYFDFNRFHCHFSPRDWQRLINNNWGFRPKRLNFKLFNIQVKEVTQNDGTTTIANNLTSTVQVFTDSEYQLPYVLGSAHQGCLPPFPADVFMVPQYGYLTLNNGSQAVGRSSFYCLEYFPSQMLRTGNNFTFSYTFEDVPFHSSYAHSQSLDRLMNPLIDQYLYYLNKTQSNSGTLQQSRLLFSQAGPTSMSLQAKNWLPGPCYRQQRLSKQANDNNNSNFPWTAATKYHLNGRDSLVNPGPAMASHKDDEEKFFPMHGTLIFGKQGTNANDADLDNVMITDEEEIRTTNPVATEQYGTVSNNLQNSNTGPTTGTVNHQGALPGMVWQDRDVYLQGPIWAKIPHTDGHFHPSPLMGGFGLKHPPPQIMIKNTPVPANPPTNFSSAKFASFITQYSTGQVSVEIEWELQKENSKRWNPEIQYTSNYNKSVNVDFTVDTNGVYSEPRPIGTRYLTRNL

SEQ ID NO: 2836 - protein, 734 aa, Artificial Sequence
  source: /note="Description of Artificial Sequence: Synthetic polypeptide"
MAADGYLPDWLEDTLSEGIRQWWKLKPGPPPKPAERHKDDSRGLVLPGYKYLGPFNGLDKGEPVNEADAAALEHDKAYDRQLDSGDNPYLKYNHADAEFQERLKEDTSFGGNLGRAVFQAKKRVLEPLGLVEEPVKTAPGKKRPVEQSPAEPDSSSGTGKAGNQPARKRLNFGQTGDADSVPDPQPLGQPPAAPSGLGSTTMATGSGAPMADNNEGADGVGNSSGNWHCDSQWLGDRVITTSTRTWALPTYNNHLYKQISSQSGASNDNHYFGYSTPWGYFDFNRFHCHFSPRDWQRLINNNWGFRPKRLNFKLFNIQVKEVTQNDGTTTIANNLTSTVQVFTDSEYQLPYVLGSAHQGCLPPFPADVFMVPQYGYLTLNNGSQAVGRSSFYCLEYFPSQMLRTGNNFTFSYTFEDVPFHSSYAHSQSLDRLMNPLIDQYLYYLNKTQSNSGTLQQSRLLFSQAGPTSMSLQAKNWLPGPCYRQQRLSKQANDNNNSNFPWTAATKYHLNGRDSLVNPGPAMASHKDDEEKFFPMHGTLIFGKQGTNANDADLDNVMITDEEEIRTTNPVATEQYGTVSNNLQNSNTGPTTGTVNHQGALPGMVWQDRDVYLQGPIWAKIPHTDGHFHPSPLMGGFGLKHPPPQIMIKNTPVPANPPTNFSSAKFASFITQYSTGQVSVEIEWELQKENSKRWNPEIQYTSNYNKSVNVDFTVDTNGVYSEPRPIGTRYLTRNL

SEQ ID NO: 2837 - protein, 735 aa, Artificial Sequence
  source: /note="Description of Artificial Sequence: Synthetic polypeptide"
MAADGYLPDWLEDTLSEGIRQWWKLKPGPPPPKPAERHKDDSRGLVLPGYKYLGPFNGLDKGEPVNEADAAALEHDKAYDRQLDSGDNPYLKYNHADAEFQERLKEDTSFGGNLGRAVFQAKKRVLEPLGLVEEPVKTAPGKKRPVEQSPAEPDSSSGTGKAGNQPARKRLNFGQTGDADSVPDPQPLGQPPAAPSGLGSTTMATGSGAPMADNNEGADGVGNSSGNWHCDSQWLGDRVITTSTRTWALPTYNNHLYKQISSQSGASNDNHYFGYSTPWGYFDFNRFHRHFSPRDWQRLINNNWGFRPKRLNFKLFNIQVKEVTQNDGTTTIANNLTSTVQVFTDSEYQLPYVLGSAHQGCLPPFPADVFMVPQYGYLTLNNGSQAVGRSSFYCLEYFPSQMLRTGNNFTFSYTFEDVPFHSSYAHSQSLDRLMNPLIDQYLYYLNKTQSNSGTLQQSRLLFSQAGPTSMSLQAKNWLPGPCYRQQRLSKQANDNNNSNFPWTAATKYHLNGRDSLVNPGPAMASHKDDEEKFFPMHGTLIFGKQGTNANDADLDNVMITDEEEIRTTNPVATEQYGTVSNNLQNSNTGPTTGTVNHQGALPGMVWQDRDVYLQGPIWAKIPHTDGHFHPSPLMGGFGLKHPPPQIMIKNTPVPANPPTNFSSAKFASFITQYSTGQVSVEIEWELQKENSKRWNPEIQYTSNYNKSVNVDFTVDTNGVYSEPRPIGTRYLTRNL

SEQ ID NO: 2838 - protein, 734 aa, Artificial Sequence
  source: /note="Description of Artificial Sequence: Synthetic polypeptide"
MAADGYLPDWLEDTLSEGIRQWWKLKPGPPPPKPAERHKDDSRGLVLPGYKYLGPFNGLDKGEPVNEADAAALEHDKAYDRQLDSGDNPYLKYNHADAEFQERLKEDTSFGGNLGRAVFQAKKRVLEPLGLVEEPVKTAPGKKRPVEQSPAEPDSSSGTGKAGNQPARKRLNFGQTGDADSVPDPQPLGQPPAAPSGLGSTTMATGSGAPMADNNEGADGVGNSSGNWHCDSQWLGDRVITTSTRTWALPTYNNHLYKQISSQSGASNDNHYFGYSTPWGYFDFNRFHCHFSPRDWQRLINNNWGFRPKRLNFKLFNIQVKEVTQNDGTTTIANNLTSTVQVFTDSEYQLPYVLGSAHQGCLPPFPADVFMVPQYGYLTLNNGSQAVGRSSFYCLEYFPSQMLRTGNNFTFSYTFEDVPFHSSYAHSQSLDRLMNPLIDQYLYYLNKTQSNSGTLQQSRLLFSQAGPTSMSLQAKNWLPGPCYRQQRLSKQANDNNSNFPWTAATKYHLNGRDSLVNPGPAMASHKDDEEKFFPMHGTLIFGKQGTNANDADLDNVMITDEEEIRTTNPVATEQYGTVSNNLQNSNTGPTTGTVNHQGALPGMVWQDRDVYLQGPIWAKIPHTDGHFHPSPLMGGFGLKHPPPQIMIKNTPVPANPPTNFSSAKFASFITQYSTGQVSVEIEWELQKENSKRWNPEIQYTSNYNKSVNVDFTVDTNGVYSEPRPIGTRYLTRNL

SEQ ID NO: 2839 - protein, 735 aa, Artificial Sequence
  source: /note="Description of Artificial Sequence: Synthetic polypeptide"
MAADGYLPDWLEDTLSEGIRQWWKLKPGPPPPRPAERHQDDSRGLVLPGYKYLGPFNGLDKGEPVNEADAAALEHDKAYDRQLDSGDNPYLKYNHADAEFQERLKEDTSFGGNLGRAVFQAKKRVLEPLGLVEEPVKTAPGKKRPVEHSPAEPDSSSGTGKAGQQPARKRLNFGQTGDADSVPDPQPLGQPPAAPTSLGSTTMATGSGAPMADNNEGADGVGNSSGNWHCDSQWLGDRVITTSTRTWALPTYNNHLYKQISSQSGASNDNHYFGYSTPWGYFDFNRFHCHFSPRDRQRLINNNWGFRPKRLNFKLFNIQVKEVTQNDGTTTIANNLTSTVQVFTDSEYQLPYVLGSAHQGCLPPFPADVFMVPQYGYLTLNNGSQAVGRSSFYCLEYFPSQMLRTGNNFTFSYTFEDVPFHSSYAHSQSLDRLMNPLIDQYLYYLNRTQSNSGTLQQSRLLFSQAGPTSMSLQAKNWLPGPCYRQQRLSKQANDNNNSNFPWTAATKYHLNGRDSLVNPGPAMASHKDDEEKFFPMHGTLIFGKQGTNANDADLEHVMITDEEEIRTTNPVATEQYGNVSNNLQNSNTGPTTENVNHQGALPGMVWQDRDVYLQGPIWAKIPHTDGHFHPSPLMGGFGLKHPPPQIMIKNTPVPANPPTNFSAAKFASFITQYSTGQVSVEIEWELQKENSKRWNPEIQYTSNYNKSVNVDFTVDANGVYSEPRPIGTRYLTRNL

SEQ ID NO: 2840 - protein, 735 aa, Artificial Sequence
  source: /note="Description of Artificial Sequence: Synthetic polypeptide"
MAADGYLPDWLEDTLSEGIRQWWKLKPGPPPPRPAERHQDDSRGLVLPGYKYLGPFNGLDKGEPVNEADAAALEHDKAYDRQLDSGDNPYLKYNHADAEFQERLKEDTSFGGNLGRAVFQAKKRVLEPLGLVEEPVKTAPGKKRPVEHSPAEPDSSSGTGKAGQQPARKRLNFGQTGDADSVPDPQPLGQPPAAPTSLGSTTMATGSGAPMADNNEGADGVGNSSGNWHCDSQWLGDRVITTSTRTWALPTYNNHLYKQISSQSGASNDNHYFGYSTPWGYFDFNRFHCHFSPRDWQRLINNNWGFRPKRLNFKLFNIQVKEVTQNDGTTTIANNLTSTVQVFTDSEYQLPYVLGSAHQGCLPPFPADVFMVPQYGYLTLNNGSQAVGRSSFYCLEYFPSQMLRTGNNFTFSYTFEDVPFHSSYAHSQSLDRLMNPLIDQYLYYLNRTQSNSGTLQQSRLLFSQAGPTSMSLQAKNWLPGPCYRQQRLSKQANDNNNSNFPWTAATKYRLNGRDSLVNPGPAMASHKDDEEKFFPMHGTLIFGKQGTNANDADLEHVMITDEEEIRTTNPVATEQYGNVSNNLQNSNTGPTTENVNHQGALPGMVWQDRDVYLQGPIWAKIPHTDGHFHPSPLMGGFGLKHPPPQIMIKNTPVPANPPTNFSAAKFASFITQYSTGQVSVEIEWELQKENSKRWNPEIQYTSNYNKSVNVDFTVDANGVYSEPRPIGTRYLTRNL

SEQ ID NO: 2841 - protein, 735 aa, Artificial Sequence
  source: /note="Description of Artificial Sequence: Synthetic polypeptide"
MAADGYLPDWLEDTLSEGIRQWWKLKPGPPPPRPAERHQDDSRGLVLPGYKYLGPFNGLDKGEPVNEADAAALEHDKAYDRQLDSGDNPYLKYNHADAEFQERLKEDTSFGGNLGRAVFQAKKRVLEPLGLVEEPVKTAPGKKRPVEHSPAEPDSSSGTGKAGQQPARKRLNFGQTGDADSVPDPQPLGQPPAAPTSLGSTTMATGSGAPMADNNEGADGVGNSSGNWHCDSQWLGVRVITTSTRTWALPTYNNHLYKQISSQSGASNDNHYFGYSTPWGYFDFNRFHCHFSPRDRQRLINNNWGFRPKRLNFKLFNIQVKEVTQNDGTTTIANNLTSTVQVFTDSEYQLPYVLGSAHQGCLPPFPADVFMVPQYGYLTLNNGSQAVGRSSFYCLEYFPSQMLRTGNNFTFSYTFEDVPFHSSYAHSQSLDRLMNPLIDQYLYYLNRTQSNSGTLQQSRLLFSQAGPTSMSLQAKNWLPGPCYRQQRLSKQANDNNNSNFPWTAATKYHLNGRDSLVNPGPAMASHKDDEEKFFPMHGTLIFGKQGTNANDADLEHVMITDEEEIRTTNPVATEQYGNVSNNLQNSNTGPTTENVNHQGALPGMVWQDRDVYLQGPIWAKIPHTDGHFHPSPLMGGFGLKHPPPQIMIKNTPVPANPPTNFSAAKFASFITQYSTGQVSVEIEWELQKENSKRWNPEIQYTSNYNKSVNVDFTVDANGVYSEPRPIGTRYLTRNL

SEQ ID NO: 2842 - protein, 735 aa, Artificial Sequence
  source: /note="Description of Artificial Sequence: Synthetic polypeptide"
MAADGYLPDWLEDTLSEGIRQWWKLKPGPPPPRPAERHQDDSRGLVLPGYKYLGPFNGLDKGEPVNEADAAALEHDKAYDRQLDSGDNPYLKYNHADAEFQERLKEDTSFGGNLGRAVFQAKKRVLEPLGLVEEPVKTAPGKKRPVEHSPAEPDSSSGTGKAGQQPARKRLNFGQTGDADSVPDPQPLGQPPAAPTSLGSTTMAIGSGAPMADNNEGADGVGNSSGNWHCDSQWLGDRVITTSTRTWALPTYNNHLYKQISSQSGASNDNHYFGYSTPWGYFDFNRFHCHFSPRDWQRLINNNWGFRPKRLNFKLFNIQVKEVTQNDGTTTIANNLTSTVQVFTDSEYQLPYVLGSAHQGCLPPFPADVFMVPQYGYLTLNNGSQAVGRSSFYCLEYFPSQMLRTGNNFTFSYTFEDVPFHSSYAHSQSLDRLMNPLIDQYLYYLNRTQSNSGTLQQSRLLFSQAGPTSMSLQAKNWLPGPCYRQQRLSKQANDNNNSNFPWTAATKYHLNGRDSLVNPGPAMASHKDDEEKFFPMHGTLIFGKQGTNANDADLEHVMITDEEEIRTTNPVATEQYGNVSNNLQNSNTGPTTENVNHQGALPGMVWQDRDVYLQGPIWAKIPHTDGHFHPSPLMGGFGLKHPPPQIMIKNTPVPANPPTNFSAAKFASFITQYSTGQVSVEIEWELQKENSKRWNPEIQYTSNYNKSVNVDFTVDANGVYSEPRPIGTRYLTRNL

SEQ ID NO: 2843 - protein, 735 aa, Artificial Sequence
  source: /note="Description of Artificial Sequence: Synthetic polypeptide"
MAADGYLPDWLEDTLSEGIRQWWKLKPGPPPPRPAERHQDDSRGLVLPGYKYLGPFNGLDKGEPVNEADAAALEHDKAYDRQLDSGDNPYLKYNHADAEFQERLKEDTSFGGNLGRAVFQAKKRVLEPLGLVEEPVKTAPGKKRPVEHSPAEPDSSSGTGKAGQQPARKRLNFGQTGDADSVPDPQPLGQPPAAPTSLGSTTMATGSGAPMADNNEGADGVGNSSGNWHCDSQWLGDRVITTSTRTWALPTYNNHLYKQISSQSGASNDNHYFGYSTPWGYLDFNRFHCHFSPRDWQRLINNNWGFRPKRLNFKLFNIQVKEVTQNDGTTTIANNLTSTVQVFTDSEYQLPYVLGSAHQGCLPPFPADVFMVPQYGYLTLNNGSQAVGRSSFYCLEYFPSQMLRTGNNFTFSYTFEDVPFHSSYAHSQSLDRLMNPLIDQYLYYLNRTQSNSGTLQQSRLLFSQAGPTSMSLQAKNWLPGPCYRQQRLSKQANDNNNSNFPWTAATKYHLNGRDSLVNPGPAMASHKDDEEKFFPMHGTLIFGKQGTNANDADLEHVMITDEEEIRTTNPVATEQYGNVSNNLQNSNTGPTTENVNHQGALPGMVWQDRDVYLQGPIWAKIPHTDGHFHPSPLMGGFGLKHPPPQIMIKNTPVPANPPTNFSAAKFASFITQYSTGQVSVEIEWELQKENSKRWNPEIQYTSNYNKSVNVDFTVDANGVYSEPRPIGTRYLTRNL

SEQ ID NO: 2844 - protein, 735 aa, Artificial Sequence
  source: /note="Description of Artificial Sequence: Synthetic polypeptide"
MAADGYLPDWLEDTLSEGIRQWWKLKPGPPPPKPAERHKDDSRGLVLPGYKYLGPFNGLDKGEPVNEADAAALEHDKAYDRQLDSGDNPYLKYNHADAEFQERLKEDTSFGGNLGRAVFQAKKRVLEPLGLVEEPVKTAPGKKRPVEHSPVEPDSSSGTGKAGQQPARKRLNFGQTGDADSVPDPQPLGQPPAAPTSLGSTTMATGSGAPMADNNEGADGVGNSSGNWHCDSQWLGDRVITTSTRTWALPTYNNHLYKQISSQSGAANDNHYFGYSTPWGYFDFNRFHCHFSPRDWQRLINNNWGFRPKRLNFKLFNIQVKEVTQNDGTTTIANNLTSTVQVFTDSEYQLPYVLGSAHQGCLPPFPADVFMVPQYGYLTLNNGSQAVGRSSFYCLEYFPSQMLRTGNNFTFSYTFEDVPFHSSYAHSQSLDRLMNPLIDQYLYYLNKTQSNSGTLQQSRLLFSQAGPTSMSLQAKNWLPGPCYRQQRLSKQANDNNNSNFPWTAATKYHLNGRDSLVNPGPAMASHKDDEEKFFPMHGTLIFGKQGTNANDADLDNVMITDEEEIRTTNPVATEQYGTVSNNLQNSNTGPTTGTVNHQGALPGMVWQDRDVYLQGPIWAKIPHTDGHFHPSPLMGGFGLKHPPPQIMIKNTPVPANPPTNFSSAKFASFITQYSTGQVSVEIEWELQKENSKRWNPEIQYTSNYNKSVNVDFTVDTNGVYSEPRPIGTRYLTRNL

SEQ ID NO: 2845 - protein, 735 aa, Artificial Sequence
  source: /note="Description of Artificial Sequence: Synthetic polypeptide"
MAADGYLPDWLEDTLSEGIRQWWKLKPGPPPPRPAERHQDDSRGLVLPGYKYLGPFNGLDKGEPVNEADAAALEHDKAYDRQLDSGDNPYLKYNHADAEFQERLKEDTSFGGNLGRAVFQAKKRVLEPLGLVEEPVKTAPGKKRPVEHSPAEPDSSSGTGKAGQQPARKRLNFGQTGDADSVPDPQPLGQPPAAPTSLGSTTMATGSGAPMADNNEGADGVGNSSGNWHCDSQWLGDRVITTSTRTWALPTYNNHLYKQISSQSGASNDNHYFGYSTPWGYFDFNRFHCHFSPRDWQRLINNNWGFRPKRLNFKLFNIQVKEVTQNDGTTTIANNLTSTVQVFTDSEYQLPYVLGSAHQGCLPPFPADVFMVPQYGYLTLNNGSQAVGRSSFYCLEYFPSQMLRTGNNFTFSYTFEDVPFHSSYAHSQSLDRLMNPLIDQYLYYLNRTQSNSGTLQQSRLLFSQAGPTSMSLQAKDWLPGPCYRQQRLSKQANDNNNSNFPWTAATKYHLNGRDSLVNPGPAMASHKDDEEKFFPMHGTLIFGKQGTNANDADLEHVMITDEEEIRTTNPVATEQYGNVSNNLQNSNTGPTTENVNHQGALPGMVWQDRDVYLQGPIWAKIPHTDGHFHPSPPMGGFGLKHPPPQIMIKNTPVPANPPTNFSAAKFASFITQYSTGLVSVEIEWELQKENSKRWNPEIQYTSNYNKSVNVDFTVDANGVYSEPRPIGTRYLTRNL

SEQ ID NO: 2846 - protein, 735 aa, Artificial Sequence
  source: /note="Description of Artificial Sequence: Synthetic polypeptide"
MAADGYLPDWLEDTLSEGIRQWWKLKPGPPPPKPAERHKDDSRGLVLPGYKYLGPFNGLDKGEPVNEADAAALEHDKAYDRQLDSGDNPYLKYNHADAEFQERLKEDTSFGGNLGRAVFQAKKRVLEPLGLVEEPVKTAPGKKRPVEHSPVEPDSSSGTGKAGQQPARKRLNFGQTGDADSVPDPQPLGQPPAAPSGLGTNTMATGSGAPMADNNEGADGVGNSSGNWHCDSTWMGDRVITTSTRTWALPTYNNHLYKQISSQSGASNDNHYFGYSTPWGYFDFNRFHCHFSPRDWQRLINNNWGFRPKRLSFKLFNIQVKEVTQNDGTTTIANNLTSTVQVFTDSEYQLPYVLGSAHQGCLPPFPADVFMVPQYGYLTLNNGSQAVGRSSFYCLEYFPSQMLRTGNNFTFSYTFEDVPFHSSYAHSQSLDRLMNPLIDQYLYYLSKTNAPSGTHQMSRLQFSQAGASDMSGPARNWLPGPCYRQQRVSKQAADNNNSDLPWTGATKYHLNGRDSLVNPGPAMASHKDDEEKFFLMSGVLIFGKQGSNENNVDIEKVMITDEEEIRTTNPVATEQYGSVSTNLQSANTSPATSDVNHQGVLPGMVWQDRDVYLQGPIWAKIPHTDGHFHPSPLMGGFGLKHPPPQILIKNTPVPANPSTTFSAAKFASFITQYSTGQVSVEIEWELQKENSKRWNPEIQYTSNYNKSVNVDFTVDTNGVYSEPRPIGTRYLTRNL

SEQ ID NO: 2847 - protein, 735 aa, Artificial Sequence
  source: /note="Description of Artificial Sequence: Synthetic polypeptide"
MAADGYLPDWLEDTLSEGIRQWWKLKPGPPPPRPAERHQDDSRGLVLPGYKYLGPFNGLDKGEPVNEADAAALEHDKAYDRQLDSGDNPYLKYNHADAEFQERLKEDTSFGGNLGRAVFQAKKRVLEPLGLVEEPVKTAPGKKRPVEHSPAEPDSSSGTGKAGQQPARKRLNFGQTGDADSVPDPQPLGQPPAAPTSLGSTTMATGSGAPMADNNEGADGVGNSSGNWHCDSQWLGDRVITTSTRTWALPTYNNHLYKQISSQSGASNDNHYFGYSTPWGYFDFNRFHCHFSPRDWQRLINNNWGFRPKRLNFKLFNIQVKEVTQNDGTTTIANNLTSTVQVFTDSEYQLPYVLGSAHQGCLPPFPADVFMVPQYGYLTLNNGSQAVGRSSFYCLEYFPSQMLRTGNNFTFSYTFEDVSFHSSYAHSQSLDRLMNPLIDQYLYYLNRTQSNSGTLQQSRLLFSQAGPTSMSLQAKNWLPGPCYRQQRLSKQANDNNNSNFPWTAATKYHLNGRDSLVNPGPAMASHKDDEEKFFPMHGTLIFGKQGTNANDADLEHVMITDEEEIRTTNPVATEQYGNVSNNLQNSNTGPTTENVNHQGALPGMVWQDRDVYLQGPIWAKIPHTDGHFHPSPLMGGFGLKHPPPQIMIKNTPVPANPPTNFSAAKFASFITQYSTGQVSVEIEWELQKENSKRWNPEIQYTSNYNKSVNVDFTVDANGVYSEPRPIGTRYLTRNL

SEQ ID NO: 2848 - protein, 735 aa, Artificial Sequence
  source: /note="Description of Artificial Sequence: Synthetic polypeptide"
MAADGYLPDWLEDTLSEGIRQWWKLKPGPPPPRPAERHQDDSRGLVLPGYKYLGPFNGLDKGEPVNEADAAALEHDKAYDRQLDSGDNPYLKYNHADAEFQERLKEDTSFGGNLGRAVFQAKKRVLEPLGLVEEPVKTAPGKKRPVEHSPAEPDSSSGTGKAGQQPARKRLNFGQTGDADSVPDPQPLGQPPAAPTSLGSTTMATGSGAPMADNNEGADGVGNSSGNWHCDSQWLGDRVITTSTRTWALPTYNNHLYKQISSQSGASNDNHYFGYSTPWGYFDFNRFHCHFSPRDWQRLINNNWGFRPKRLNFKLFNIQVKEVTQNDGTTTIANNLTSTVQVFTDSEYQLPYVLGSAHQGCLPPFPADVFMVPQYGYLTLNNGSQAVGRSSFYCLEYFPSQMLRTGNNFTFSYTFEDVPFHSSYAHSQSLDRLMNPLIDQYLYYLNRTQSNSGTLQQSRLLFSQAGPTSMSLQAKNWLPGPCYRQQRLSKQANDNNNSNFPWTAATKYHLNGRDSLVNPGPAMASHKDDEEKFFPMHGTLIFGKQGTNANDADLEHVMITDEEEIRTTNPVATEQYGNVSNNLQNSNTGPTTENVNHQGALLGMVWQDRDVYLQGPIWAKIPHTDGHFHPSPLMGGFGLKHPPPQIMIKNTPVPANPPTNFSAAKFASFITQYSTGQVSVEIEWELQKENSKRWNPEIQYTSNYNKSVNVDFTVDANGVYSEPRPIGTRYLTRNL

SEQ ID NO: 2849 - protein, 735 aa, Artificial Sequence
  source: /note="Description of Artificial Sequence: Synthetic polypeptide"
MAADGYLPDWLEDTLSEGIRQWWKLKPGPPPPRPAERHQDDSRGLVLPGYKYLGPFNGLDKGEPVNEADAAALEHDKAYDRQLDSGDNPYLKYNHADAEFQERLKEDTSFGGNLGRAVFQAKKRVLEPLGLVEEPVKTAPGKKRPVEHSPAEPDSSSGTGKAGQQPARKRLNFGQTGDADSVPDPQPLGQPPAAPTSLGSTTMATGSGAPMADNNEGADGVGNSSGNWHCDSQWLGDRVITTSTRTWALPTYNNHLYKQISSQSGASNDNHYFGYSTPWGYFDFNRFHCHFSPRDWQRLINNNWGFRPKRLNFKLFNIQVKEVTQNDGTATIANNLTSTVQVFTDSEYQLPYVLGSAHQGCLPPFPADVFMVPQYGYLTLNNGSQAVGRSSFYCLEYFPSQMLRTGNNFTFSYTFEDVPFHSSYAHSQSLDRLMNPLIDQYLYYLNRTQSNSGTLQQSRLLFSQAGPTSMSLQAKNWLPGPCYRQQRLSKQANDNNNSNFPWTAATKYHLNGRDSLVNPGPAMASHKDDEEKFFPMHGTLIFGKQGTNANDADLEHVMITDEEEIRTTNPVATEQYGNVSNNLQNSNTGPTTENVNHQGALPGMVWQDRDVYLQGPIWAKIPHTDGHFHPSPLMGGFGLKHPPPQIMIKNTPVPANPPTNFSAAKFASFITQYSTGQVSVEIEWELQKENSKRWNPEIQYTSNYNKSVNVDFTVDANGVYSEPRPIGTRYLTRNL

SEQ ID NO: 2850 - protein, 735 aa, Artificial Sequence
  source: /note="Description of Artificial Sequence: Synthetic polypeptide"
MAADGYLPDWLEDTLSEGIRQWWKLKPGPPPPKPAERHKDDSRGLVLPGYKYLGPFNGLDKGEPVNEADAAALEHDKAYDRQLDSGDNPYLKYNHADAEFQERLKEDTSFGGNLGRAVFQAKKRVLEPLGLVEEPVKTAPGKKRPVEHSPVEPDSSSGTGKAGQQPARKRLNFGQTGDADSVPDPQPLGQPPAAPTSLGSTTMATGSGAPMADNNEGADGVGNSSGNWHCDSQWLGDRVITTSTRTWALPTYNNHLYKQISSQSGASNDNHYFGYSTPWGYFDFNRFHCHFSPRDWQRLINNNWGFRPKRLNFKLFNIQVKEVTQNDGTTTIANNLTSTVQVFTDSEYQLPYVLGSAHQGCLPPFPADVFMVPQYGYLTLNNGSQAVGRSSFYCLEYFPSQMLRTGNNFTFSYTFEDVPFHSSYAHSQSLDRLMNPLIDQYLYYLNKTQSNSGTLQQSRLLFSQAGPTSMSLQAKNWLPGPCYRQQRLSKQANDNNNSNFPWTAATKYHLNGRDSLVNPGPAMASHKDDEEKFFPMHGTLIFGKQGTNANDADLDNVMITDEEEIRTTNPVATEQYGTVSNNLQNSNTGPTTGTVNHQGALPGMVWQDRDVYLQGPIWAKIPHTDGHFHPSPLMGGFGLKHPPPQIMIKNTPVPANPPTNFSSAKFASFITQYSTGQVSVEIEWELQKENSKRWNPEIQYTSNYNKSVNVDFTVDTNGVYSEPRPIGTRYLTRNL

SEQ ID NO: 2851 - protein, 735 aa, Artificial Sequence
  source: /note="Description of Artificial Sequence: Synthetic polypeptide"
MAADGYLPDWLEDTLSEGIRQWWKLKPGPPPPKPAERHKDDSRGLVLPGYKYLGPFNGLDKGEPVNEADAAALEHDKAYDRQLDSGDNPYLKYNHADAEFQERLKEDTSFGGNLGRAVFQAKKRVLEPLGLVEEPVKTAPGKKRPVEHSPVEPDSSSGTGKAGQQPARKRLNFGQTGDADSVPDPQPLGQPPAAPTSLGSTTMATGSGAPMADNNEGADGVGNSSGNWHCDSQWLGDRVITTSTRTWALPTYNNHLYKQISSQSGASNDNHYFGYSTPWGYFDFNRFHCHFSPRDWQRLINNNWGFRPKRLNFKLFNIQVKEVTQNDGTTTIANNLTSTVQVFTDSEYQLPYVLGSAHQGCLPPFPADVFMVPQYGYLTLNNGSQAVGRSSFYCLEYFPSQMLRTGNNFTLSYTFEDVPFHSSYAHSQSLDRLMNPLIDQYLYYLNKTQSNSGTLQQSRLLFSQAGPTSMSLQAKNWLPGPCYRQQRLSKQANDNNNSNFPWTAATKYHLNGRDSLVNPGPAMASHKDDEEKFFPMHGTLIFGKQGTNANDADLDNVMITDEEEIRTTNPVATEQYGTVSNNLQNSNTGPTTGTVNHQGALPGMVWQDRDVYLQGPIWAKIPHTDGHFHPSPLMGGFGLKHPPPQIMIKNTPVPANPPTNFSSAKFASFITQYSTGQVSVEIEWELQKENSKRWNPEIQYTSNYNKSVNVDFTVDTNGVYSEPRPIGTRYLTRNL

SEQ ID NO: 2852 - protein, 735 aa, Artificial Sequence
  source: /note="Description of Artificial Sequence: Synthetic polypeptide"
MAADGYLPDWLEDTLSEGIRQWWKLKPGPPPPKPAERHKDDSRGLVLPGYKYLGPFNGLDKGEPVNEADAAALEHDKAYDRQLDSGDNPYLKYNHADAEFQERLKEDTSFGGNLGRAVFQAKRRVLEPLGLVEEPVKTAPGKKRPVEHSPVEPDSSSGTGKAGQQPARKRLNFGQTGDADSVPDPQPLGQPPAAPTSLGSTTMATGSGAPMADNNEGADGVGNSSGNWHCDSQWLGDRVITTSTRTWALPTYNNHLYKQISSQSGASNDNHYFGYSTPWGYFDFNRFHCHFSPRDWQRLINNNWGFRPKRLNFKLFNIQVKEVTQNDGTTTIANNLTSTVQVFTDSEYQLPYVLGSAHQGCLPPFPADVFMVPQYGYLTLNNGSQAVGRSSFYCLEYFPSQMLRTGNNFTFSYTFEDVPFHSSYAHSQSLDRLMNPLIDQYLYYLNKTQSNSGTLQQSRLLFSQAGPTSMSLQAKNWLPGPCYRQQRLSKQANDNNNSNFPWTAATKYHLNGRDSLVNPGPAMASHKDDEEKFFPMHGTLIFGKQGTNANDADLDNVMITDEEEIRTTNPVATEQYGTVSNNLQNSNTGPTTGTVNHQGALPGMVWQDRDVYLQGPIWAKIPHTDGHFHPSPLMGGFGLKHPPPQIMIKNTPVPANPPTNFSSAKFASFITQYSTGQVSVEIEWELQKENSKRWNPEIQYTSNYNKSVNVDFTVDTNGVYSEPRPIGTRYLTRNL

SEQ ID NO: 2853 - protein, 735 aa, Artificial Sequence
  source: /note="Description of Artificial Sequence: Synthetic polypeptide"
MAADGYLPDWLEDTLSEGIRQWWKLKPGPPPPKPAERHKDDSRGLVLPGYKYLGPFNGLDKGEPVNEADAAALEHDKAYDRQLDSGDNPYLKYNHADAEFQERLKEDTSFGGNLGRAVFQAKKRVLEPLGLVEEPVKTAPGKKRPVEHSPVEPDSSSGTGKAGQQPARKRLNFGQTGDADSVPDPQPLGQPPAAPTSLGSTTMATGSGAPMADNNEGADGVGNSSGNWHCDSQWLGGRVITTSTRTWALPTYNNHLYKQISSQSGASNDNHYFGYSTPWGYFDFNRFHCHFSPRDWQRLINNNWGFRPKRLNFKLFNIQVKEVTQNDGTTTIANNLTSTVQVFTDSEYQLPYVLGSAHQGCLPPFPADVFMVPQYGYLTLNNGSQAVGRSSFYCLEYFPSQMLRTGNNFTFSYTFEDVPFHSSYAHSQSLDRLMNPLIDQYLYYLNKTQSNSGTLQQSRLLFSQAGPTSMSLQAKNWLPGPCYRQQRLSKQANDNNNSNFPWTAATKYHLNGRDSLVNPGPAMASHKDDEEKFFPMHGTLIFGKQGTNANDADLDNVMITDEEEIRTTNPVATEQYGTVSNNLQNSNTGPTTGTVNHQGALPGMVWQDRDVYLQGPIWAKIPHTDGHFHPSPLMGGFGLKHPPPQIMIKNTPVPANPPTNFSSAKFASFITQYSTGQVSVEIEWELQKENSKRWNPEIQYTSNYNKSVNVDFTVDTNGVYSEPRPIGTRYLTRNL

SEQ ID NO: 2854 - protein, 734 aa, Artificial Sequence
  source: /note="Description of Artificial Sequence: Synthetic polypeptide"
MAADGYLPDWLEDTLSEGIRQWWKLKPGPPPPKPAERHKDDSRGLVLPGYKYLGPFNGLDKGEPVNEADAAALEHDKAYDRQLDSGDNPYLKYNHADAEFQERLKEDTSFGGNLGRAVFQAKKRVLEPLGLVEEPVKTAPGKKRPVEHSPVEPDSSSGTGKAGQQPARKRLNFGQTGDADSVPDPQPLGQPPAAPTSLGSTTMATGSGAPMADNNEGADGVGNSSGNWHCDSQWLGDRVITTSTRTWALPTYNNHLYKQISSQSGASNDNHYFGYSTPWGYFDFNRFHCHFSPRDWQRLINNNWGFRPKRLNFKLFNIQVKEVTQNDGTTTIANNLTSTVQVFTDSEYQLPYVLGSAHQGCLPPFPADVFMVPQYGYLTLNNGSQAVGRSSFYCLEYFPSQMLRTGNNFTFSYTFEDVPFHSSYAHSQSLDRLMNPLIDQYLYYLNKTQSNSGTLQQSRLLFSQAGPTSMSLQAKNWLPGPCYRQQRLSKQANDNNSNFPWTAATKYHLNGRDSLVNPGPAMASHKDDEEKFFPMHGTLIFGKQGTNANDADLDNVMITDEEEIRTTNPVATEQYGTVSNNLQNSNTGPTTGTVNHQGALPGMVWQDRDVYLQGPIWAKIPHTDGHFHPSPLMGGFGLKHPPPQIMIKNTPVPANPPTNFSSAKFASFITQYSTGQVSVEIEWELQKENSKRWNPEIQYTSNYNKSVNVDFTVDTNGVYSEPRPIGTRYLTRNL

SEQ ID NO: 2855 - protein, 735 aa, Artificial Sequence
  source: /note="Description of Artificial Sequence: Synthetic polypeptide"
MAADGYLPDWLEDTLSEGIRQWWKLKPGPPPPKPAERHKDDSRGLVLPGYKYLGPFNGLDKGEPVNEADAAALEHDKAYDRQLDSGDNPYLKYNHADAEFQERLKEDTSFGGNLGRAVFQAKKRVLEPLGLVEEPVKTAPGKKRPVEHSPVEPDSSSGTGKAGQQPARKRLNFGQTGDADSVPDPQPLGQPPAAPTSLGSTTMATGSGAPMADNNEGADGVGNSSGNWHCDSQWLGDRVITTSTRTWALPTYNNHLYKQISSQSGASNDNHYFGYSTPWGYFDFNRFHCHFSPRDWQRLINNNWGFRPKRLNFKLFNIQVKEVTQNDGTTTIANNLTSTVQVFTDSEYQLPYVLGSAHQGCLPPFPADVFMVPQYGYLTLNNGSQAVGRSSFYCLEYFPSQMLRTGNNFTFSYTFEDVPFHSSYAHSQSLDRLMNPLIDQYLYYLNKTQSNSGTLQQPRLLFSQAGPTSMSLQAKNWLPGPCYRQQRLSKQANDNNNSNFPWTAATKYHLNGRDSLVNPGPAMASHKDDEEKFFPMHGTLIFGKQGTNANDADLDNVMITDEEEIRTTNPVATEQYGTVSNNLQNSNTGPTTGTVNHQGALPGMVWQDRDVYLQGPIWAKIPHTDGHFHPSPLMGGFGLKHPPPQIMIKNTPVPANPPTNFSSAKFASFITQYSTGQVSVEIEWELQKENSKRWNPEIQYTSNYNKSVNVDFTVDTNGVYSEPRPIGTRYLTRNL

SEQ ID NO: 2856 - protein, 735 aa, Artificial Sequence
  source: /note="Description of Artificial Sequence: Synthetic polypeptide"
MAADGYLPDWLEDTLSEGIRQWWKLKPGPPPPKPAERHKDDSRGLVLPGYKYLGPFNGLDKGEPVNEADAAALEHDKAYDRQLDSGDNPYLKYNHADAEFQERLKEDTSFGGNLGRAVFQAKKRVLEPLGLVEEPVKTAPGKKRPVEHSPVEPDSSSGTGKAGQQPARKRLNFGQTGDADSVPDPQPLGQPPAAPTSLGSTTMATGSGAPMADNNEGADGVGNSSGNWHCDSQWLGDRVITTSTRTWALPTYNNHLYKQISSQSGASNDNHYFGYSTPWGYFDFNRFHCHFSPRDWQRLINNNWGFRPKRLNFKLFNIQVKEVTQNDGTTTIANNLTSTVQVFTDSEYQLPYVLGSAHQGCLPPFPADVFMVPQYGYLTLNNGSQAVGRSSFYCLEYFPSQMLRTGNNFTFSCTFEDVPFHSSYAHSQSLDRLMNPLIDQYLYYLNKTQSNSGTLQQSRLLFSQAGPTSMSLQAKNWLPGPCYRQQRLSKQANDNNNSNFPWTAATKYHLNGRDSLVNPGPAMASHKDDEEKFFPMHGTLIFGKQGTNANDADLDNVMITDEEEIRTTNPVATEQYGTVSNNLQNSNTGPTTGTVNHQGALPGMVWQDRDVYLQGPIWAKIPHTDGHFHPSPLMGGFGLKHPPPQIMIKNTPVPANPPTNFSSAKFASFITQYSTGQVSVEIEWELQKENSKRWNPEIQYTSNYNKSVNVDFTVDTNGVYSEPRPIGTRYLTRNL

SEQ ID NO: 2857 - protein, 735 aa, Artificial Sequence
  source: /note="Description of Artificial Sequence: Synthetic polypeptide"
MAADGYLPDWLEDTLSEGIRQWWKLKPGPPPPKPAERHKDDSRGLVLPGYKYLGPFNGLDKGEPVNEADAAALEHDKAYDRQLDSGDNPYLKYNHADAEFQERLKEDTSFGGNLGRAVFQAKKRVLEPLGLVEEPVKTAPGKKRPVEHSPVEPDSSSGTGKAGQQPARKRLNFGQTGDADSVPDPQPLGQPPAAPTSLGSTTMATGSGAPMADNNEGADGVGNSSGNWHCDSQWLGDRVITTSTRTWALPTYNNHLYKQISSQSGASNDNHYFGYSTPWGYFDFNRFHCHFSPRDWQRLIDNNWGFRPKRLNFKLFNIQVKEVTQNDGTTTIANNLTSTVQVFTDSEYQLPYVLGSAHQGCLPPFSADVFMVPQYGYLTLNNGSQAVGRSSFYCLEYFPSQMLRTGNNFTFSYTFEDVPFHSSYAHSQSLDRLMNPLIDQYLYYLNKTQSNSGTLQQSRLLFSQAGPTSMSLQAKNWLPGPCYRQQRLSKQANDNNNSNFPWTAATKYHLNGRDSLVNPGPAMASHKDDEEKFFPMHGTLIFGKQGTNANDADLDNVMITDEEEIRTTNPVATEQYGTVSNNLQNSNTGPTTGTVNHQGALPGMVWQDRDVYLQGPIWAKIPHTDGHFHPSPLMGGFGLKHPPPQIMIKNTPVPANPPANFSSAKFASFITQYSTGQVSVEIEWELQKENSKRWNPEIQYTSNYNKSVNVDFTVDTNGVYSEPRPIGTRYLTRNL

SEQ ID NO: 2858 - protein, 744 aa, Artificial Sequence
  source: /note="Description of Artificial Sequence: Synthetic polypeptide"
MITTLDKSGMAADGYLPDWLEDTLSEGIRQWWKLKPGPPPPKPAERHKDDSRGLVLPGYKYLGPFNGLDKGEPVNEADAAALEHDKAYDRQLDSGDNPYLKYNHADAEFQERLKEDTSFGGNLGRAVFQAKKRVLEPLGLVEEPVKTAPGKKRPVEHSPVEPDSSSGTGKAGQQPARKRLNFGQTGDADSVPDPQPLGQPPAAPTSLGSTTMATGSGAPMADNNEGADGVGNSSGNWHCDSQWLGDRVITTSTRTWALPTYNNHLYKQISSQSGASNDNHYFGYSTPWGYFDFNRFHCHFSPRDWQRLINNNWGFRPKRLNFKLFNIQVKEVTQNDGTTTIANNLTGTVQVFTDSEYQLPYVLGSAHQGCLPPFPADVFMVPQYGYLTLNNGSQAVGRSSFYCLEYFPSQMLRTGNNFTFSYTFEDVPFHSSYAHSQSLDRLMNPLIDQYLYYLNKTQSNSGTLQQSRLLFSQAGPTSMSLQAKNWLPGPCYRQQRLSKQANDNNNSNFPWTAATKYHLNGRDSLVNPGPAMASHKDDEEKFFPMHGTLIFGKQGTNANDADLDNVMITDEEEIRTTNPVATEQYGTVSNNLQNSNTGPTTGTVNHQGALPGMVWQDRDVYLQGPIWAKIPHTDGHFHPSPLMGGFGLKHPPPQIMIKNTPVPANPPTNFSSAKFASFITQYSTGQVSVEIEWELQKENSKRWNPEIQYTSNYNKSVNVDFTVDTNGVYSEPRPIGTRYLTRNL

SEQ ID NO: 2859 - protein, 744 aa, Artificial Sequence
  source: /note="Description of Artificial Sequence: Synthetic polypeptide"
MITTLDKSGMAADGYLPDWLEDTLSEGIRQWWKLKPGPPPPKPAERHKDDSRGLVLPGYKYLGPFNGLDKGEPVNEADAAALEHDKAYDRQLDSGDNPYLKYNHADAEFQERLKEDTSFGGNLGRAVFQAKKRVLEPLGLVEEPVKTAPGKKRPVEHSPVEPDSSSGTGKAGQQPARKRLNFGQTGDADSVPDPQPLGQPPAAPTSLGSTTMATGSGAPMADNNEGADGVGNSSGNWHCDSQWLGDRVITTSTRTWALPTYNNHLYKQISSQSGASNDNHYFGYSTPWGYFDFNRFHCHFSPRDWQRLINNNWGFRPKRLNFKLFNIQVKEVTQNDGTTTIANNLTSTVQVFTDSEYQLPYVLGSAHQGCLPPFPADVFMVPQYGYLTLNNGSQAVGRSSFYCLEYFPSQMLRTGNNFTFSYTFEDVPFHSSYAHSQSLDRLMNPLIDQYLYYLNKTQSNSGTLQQSRLLFSQAGPTSMSLQAKNWLPGPCYRQQRLSKQANDNNNSNFPWTAATKYHLNGRDSLVNPGPAMASHKDDEEKFFPMHGTLIFGKQGTNANDADLDNVMITDEEEIRTTNPVATEQYGTVSNNLQNSNTGPTTGTVNHQGALPGMVWQDRDVYLQGPIWAKIPHTDGHFHPSPLMGGFGLKHPPPQIMIKNTPVPANPPTNFSSAKFASFITQYSTGQVSVEIEWELQKENSKRWNPEIQYTSNYNKSVNVDFSVDTNGVYSEPRPIGTRYLTRNL

SEQ ID NO: 2860 - protein, 735 aa, Artificial Sequence
  source: /note="Description of Artificial Sequence: Synthetic polypeptide"
MAADGYLPDWLEDTLSEGIRQWWKLKPGPPPPKPAERHKDDSRGLVLPGYKYLGPFNGLDKGEPVNEADAAALEHDKAYDRQLDSGDNPYLKYNHADAEFQERLKEDTSFGGNLGRAVFQAKKRVLEPLGLAEEPVKTAPGKKRPVEHSPVEPDSSSGTGKAGQQPARKRLNFGQTGDADSVPDPQPLGQPPAAPTSLGSTTMATGSGAPMADNNEGADGVGNSSGNWHCDSQWLGDRVITTSTRTWALPTYNNHLYKQISSQSGASNDNHYFGYSTPWGYFDFNRFHCHFSPRDWQRLINNNWGFRPKRLNFKLFNIQVKEVTQNDGTTTIANNLTSTVQVFTDSEYQLPYVLGSAHQGCLPPFPADVFMVPQYGYLTLNNGSQAVGRSSFYCLEYFPSQMLRTGNNFTFSYTFEDVPFHSSYAHSQSLDRLMNPLIDQYLYYLNKTQSNSGTLQQSRLLFSQAGPTSMSLQAKNWLPGPCYRQQRLSKQANDNNNSNFPWTAATKYHLNGRDSLVNPGPAMASHKDDEEKFFPMHGTLIFGKQGTNANDADLDNVMITDEEEIRTTNPVATEQYGTVSNNLQNSNTGPTTGTVNHQGALPGMVWQDRDVYLQGPIWAKIPHTDGHFHPSPLMGGFGLKHPPPQIMIKNTPVPANPPTNFSSAKFASFITQYSTGQVSVEIEWELQKENSKRWNPEIQYTSNYNKSVNVDFTVDTNGVYSEPRPIGTRYLTRNL

SEQ ID NO: 2861 - protein, 735 aa, Artificial Sequence
  source: /note="Description of Artificial Sequence: Synthetic polypeptide"
MAADGYLPDWLEDTLSEGIRQWWKLKPGPPPPKPAERHKDDSRGLVLPGYKYLGPFNGLDKGEPVNEADAAALEHDKAYDRQLDSGDNPYLKYNHADAEFQERLKEDTSFGGNLGRAVFQAKKRVLEPLGLVEEPVKTAPGKKRPVEHSPVEPDSSSGTGKAGQQPARKRLNFGQTGDADSVPDPQPLGQPPAAPTSLGSTTMATGSGAPMADNNEGADGVGNSSGNWHCDSQWLGDRVITTSTRTWALPTYNNHLYKQISSQSGASNDNHYFGYSTPWGYFDFNRFHCHFSPRDWQRLINNNWGFRPKRLNFKLFNIQVKEVTQNDGTTTIANNLTSTVQVFTDSEYQLPYVLGSAHQGCLPPFPADVFMVPQYGYLTLNNGSQAVGRSSFYCLEYFPSQMLRTGNNFTFSYTFEDVPFHSSYAHSQSLDRLMNPLIDQYLYYLNKTQSNSGTLQQSRLLFSQAGPTSMSLQAKNWLPGPCYRQQRLSKQANDNNNSNFPWAAATKYHLNGRDSLVNPGPAMASHKDDEEKFFPMHGTLIFGKQGTNANDADLDNVMITDEEEIRTTNPVATEQYGTVSNNLQNSNTGPTTGTVNHQGALPGMVWQDRDVYLQGPIWAKIPHTDGHFHPSPLMGGFGLKHPPPQIMIKNTPVPANPPTNFSSAKFASFITQYSTGQVSVEIEWELQKENSKRWNPEIQYTSNYNKSVNVDFTVDTNGVYSEPRPIGTRYLTRNL

SEQ ID NO: 2862 - protein, 734 aa, Artificial Sequence
  source: /note="Description of Artificial Sequence: Synthetic polypeptide"
MAADGYLPDWLEDTLSEGIRQWWKLKPGPPPPKPAERHKDDSRGLVLPGYKYLGPFNGLDKGEPVNEADAAALEHDKAYDRQLDSGDNPYLKYNHADAEFQERLKEDTSFGGNLGRAVFQAKKRVLEPLGLVEEPVKTAPGKKRPVEHSPVEPDSSSGTGKAGQQPARKRLNFGQTGDADSVPDPQPLGQPPAAPTSLGSTTMATGSGAPMADNNEGADGVGNSSGNWHCDSQWLGDRVITTSTRTWALPTYNNHLYKQISSQSGASNDNHYFGYSTPWGYFDFNRFHCHFSPRDWQRLINNNWGFRPKRLNFKLFNIQVKEVTQNDGTTTIANNLTSTVQVFTDSEYQLPYVLGSAHQGCLPPFPADVFMVPQYGYLTLNNGSQAVGRSSFYCLEYFPSQMLRTGNNFTFSCTFEDVPFHSSYAHSQSLDRLMNPLIDQYLYYLNKTQSNSGTLQQSRLLFSQAGPTSMSLQAKNWLPGPCYRQQRLSKQANDNNSNFPWTAATKYHLNGRDSLVNPGPAMASHKDDEEKFFPMHGTLIFGKQGTNANDADLDNVMITDEEEIRTTNPVATEQYGTVSNNLQNSNTGPTTGTVNHQGALPGMVWQDRDVYLQGPIWAKIPHTDGHFHPSPLMGGFGLKHPPPQIMIKNTPVPANPPTNFSSAKFASFITQYSTGQVSVEIEWELQKENSKRWNPEIQYTSNYNKSVNVDFTVDTNGVYSEPRPIGTRYLTRNL

SEQ ID NO: 2863 - protein, 735 aa, Artificial Sequence
  source: /note="Description of Artificial Sequence: Synthetic polypeptide"
MAADGYLPDWLEDTLSEGIRQWWKLKPGPPPPKPAERHKDDSRGLVLPGYKYLGPFNGLDKGEPVNEADAAALEHDKAYDRQLDSGDNPYLKYNHADAEFQERLKEDTSFGGNLGRAVFQAKKRVLEPLGLVEEPVKTAPGKKRPVEHSPVEPDSSSGTGKAGQQPARKRLNFGQTGDADSVPDPQPLGQPPAAPTSLGSTTMATGSGAPMADNNEGADGVGNSSGNWHCDSQWLGDRVITTSTRTWALPTYNNHLYKQISSQSGASNDNHYFGYSTPWGYFDFNRFHCHFSPRDWQRLINNNWGFRPKRLNFKLFNIQVKEVTQNDGTTTIANNLTSTVQVFTDSEYQLPYVLGSAHQGCLPPFPADVFMVPQYGYLTLNNGSQAVGRSSFYCLEYFPSQMLRTGNNFTFSCTFEDVPFHSSYAHSQSLDRLMNPLIDQYLYYLNKTQSNSGTLQQSRLLFSQAGPTSMSLQAKNWLPGPCYRQQRLSKQANDNNNSNFPWTAATKYHLNGRDSLVNPGPAMASHKDDEEKFFPMHGTLIFGKQGTNANDADLDNVMITDEEEIRTTNPVATEQYGTVSNNLQNSNTGPTTGTVNHQGALPGMVWQDRDVYLQGPIWAKIPHTDGHFHPSPLMGGFGLKHPPPQIMIKNTPVPANPPTNFSSAKFASFITQYSTGQVSVEIEWELQKENSKRWNPEIQYTSNYNKSVNVDFSVDTNGVYSEPRPIGTRYLTRNL

SEQ ID NO: 2864 - protein, 735 aa, Artificial Sequence
  source: /note="Description of Artificial Sequence: Synthetic polypeptide"
MAADGYLPDWLEDTLSEGIRQWWKLKPGPPPPKPAERHKDDSRGLVLPGYKYLGPFNGLDKGEPVNEADAAALEHDKAYDRQLDSGDNPYLKYNHADAEFQERLKEDTSFGGNLGRAVFQAKKRVLEPLGLVEEPVKTAPGKKRPVEHSPVEPDSSSGTGKAGQQPARKRLNFGQTGDADSVPDPQPLGQPPAAPTSLGSTTMATGSGAPMADNNEGADGVGNSSGNWHCDSQWLGDRVITTSTRTWALPTYNNHLYKQISSQSGASNDNHYFGYSTPWGYFDFNRFHCHFSPRDWQRLINNNWGFRPKRLNFKLFNIQVKEVTQNDGTTTIANNLTSTVQVFTDSEYQLPYVPGSAHQGCLPPFPADVFMVPQYGYLTLNNGSQAVGRSSFYCLEYFPSQMLRTGNNFTFSCTFEDVPFHSSYAHSQSLDRLMNPLIDQYLYYLNKTQSNSGTLQQPRLLFSQAGPTSMSLQAKNWLPGPCYRQQRLSKQANDNNNSNFPWTAATKYHLNGRDSLVNPGPAMASHKDDEEKFFPMHGTLIFGKQGTNANDADLDNVMITDEEEIRTTNPVATEQYGTVSNNLQNSNTGPTTGTVNHQGALPGMVWQDRDVYLQGPIWAKIPHTDGHFHPSPLMGGFGLKHPPPQIMIKNTPVPANPPTNFSSAKFASFITQYSTGQVSVEIEWELQKENSKRWNPEIQYTSNYNKSVNVDFTVDTNGVYSEPRPIGTRYLTRNL

SEQ ID NO: 2865 - protein, 735 aa, Artificial Sequence; identical to SEQ ID NO: 2794
  source: /note="Description of Artificial Sequence: Synthetic polypeptide"

SEQ ID NO: 2866 - protein, 735 aa, Artificial Sequence
  source: /note="Description of Artificial Sequence: Synthetic polypeptide"
MAADGYLPDWLEDTLSEGIRQWWKLKPGPPPPRPAERHQDDSRGLVLPGYKYLGPFNGLDKGEPVNEADAAALEHDKAYDRQLDSGDNPYLKYNHADAEFQERLKEDTSFGGNLGRAVFQAKKRVLEPLGLVEEPVKTAPGKKRPVEHSPAEPDSSSGTGKAGQQPARKRLNFGQTGDADSVPDPQPLGQPPAAPTSLGSTTMATGSGAPMADNNEGADGVGNSSGNWHCDSQWLGDRVITTSTRTWALPTYNNHLYKQISSQSGASNDNHYFGYSTPWGYFDFNRFHCHFSPRDWQRLINNNWGFRPKRLNFKLFNIQVKEVTQNDGTTTIANNLTSTVQVFTDSEYQLPYVLGSAHQGCLPPFPADVFMVPQYGYLTLNNGSQAVGRSSFYCLEYFPSQMLRTGNNFTFSYTFEDVPFHSSYAHSQSLDRLMNPLIDQYLYYLNRTQSNSGTLQQSRLLFSQAGPTSMSLQAKNWLPGPCYRQQRLSKQANDNNNSNFPWTAATKYHLNGRDSLVNPGPAMASHKDDEEKFFPMHGTLIFGKQGTNANDADLEHVMITGEEEIRTTNPVATEQYGNVSNNLQNSNTGPTTENVNHQGALPGMVWQDRDVYLQGPIWAKIPHTDGHFHPSPLMGGFGLKHPPPQIMIKNTPVPANPPTNFSAAKFASFITQYSTGQVSVEIEWELQKENSKRWNPEIQYTSNYNKSVNVDFTVDANGVYSEPRPIGTRYLTRNL

SEQ ID NO: 2867 - protein, 735 aa, Artificial Sequence
  source: /note="Description of Artificial Sequence: Synthetic polypeptide"
MAADGYLPDWLEDTLSEGIRQWWKLKPGPPPPRPAERHQDDSRGLVLPGYKYLGPFNGLDKGEPVNEADAAALEHDKAYDRQLDSGDNPYLKYNHADAEFQERLKEDTSFGGNLGRAVFQAKKRVLEPLGLVEEPVKTAPGKKRPVEHSPAEPDSSSGTGKAGQQPARKRLNFGQTGDADSVPDPQPLGQPPAAPTSLGSTTMATGSGAPMADNNEGADGVGNSSGNWHCDSQWLGDRVITTSTRTWALPTYNNHLYKQISSQSGASNDNHYFGYSTPLGYFDFNRFHCHFSPRDWQRLINNNWGFRPKRLNFKLFNIQVKEVTQNDGTTTIANNLTSTVQVFTDSEYQLPYVLGSAHQGCLPPFPADVFMVPQYGYLTLNNGSQAVGRSSFYCLEYFPSQMLRTGNNFTFSYTFEDVPFHSSYAHSQSLDRLMNPLIDQYLYYLNRTQSNSGTLQQSRLLFSQAGPTSMSLQAKNWLPGPCYRQQRLSKQANDNNNSNFPWTAATKYHLNGRDSLVNPGPAMASHKDDEEKFFPMHGTLIFGKQGTNANDTDLEHVMITDEEEIRTTNPVATEQYGNVSNNLQNSNTGPTTENVNHQGALPGMVWQDRDVYLQGPIWAKIPHTDGHFHPSPLMGGFGLKHPPPQIMIKNTPVPANPPTNFSAAKFASFITQYSTGQVSVEIEWELQKENSKRWNPEIQYTSNYNKSVNVDFTVDANGVYSEPRPIGTRYLTRNL

SEQ ID NO: 2868 - protein, 735 aa, Artificial Sequence
  source: /note="Description of Artificial Sequence: Synthetic polypeptide"
MAADGYLPDWLEDTLSEGIRQWWKLKPGPPPPRPAERHQDDSRGLVLPGYKYLGPFNGLDKGEPVNEADAAALEHDKAYDRQLDSGDNPYLKYNHADAEFQERLKEDTSFGGNLGRAVFQAKKRVLEPLGLVEEPVKTAPGKKRPVEHSPAEPDSSSGTGKAGQQPARKRLNFGQTGDADSVPDPQPLGQPPAAPTSLGSTTMATGSGAPMADNNEGADGVGNSSGNWHCDSQWLGDRVITTSTRTWALPTYNNHLYKQISSQSGASNDNHYFGYSTPWGYFDFNRFHCHFSPRDWQRLINNNWGFRPKRLNFKLFNIQVKEVTQNDGTTTIANNLTSTVQVFTDSEYQLPYVLGSAHQGCLPPFPADVFMVPQYGYLTLNNGSQAVGRSSFYCLEYFPSQMLRTGNNFTFSYTFEDVPFHSSYAHSQSLDRLMNPLIDQYLYYLNRTQSNSGTLQQSRLLFSQAGPTSMSLQAKNWLPGPCYRQQRLSKQANDNNNSNFPWTAATKYHLNGRDSLVNPGPAMASHKDDEEKFFPMHGTLIFGKQGTNANDADLERVMITDEEEIRTTNPVATEQYGNVSNNLQNSNTGPTTENVNHQGALPGMVWQDRDVYLQGPIWAKIPHADGHFHPSPLMGGFGLKHPPPQIMIKNTPVPANPPTNFSAAKFASFITQYSTGQVSVEIEWELQKENSKRWNPEIQYTSNYNKSVNVDFTVDANGVYSEPRPIGTRYLTRNL

SEQ ID NO: 2869 - protein, 735 aa, Artificial Sequence
  source: /note="Description of Artificial Sequence: Synthetic polypeptide"
MAADGYLPDWLEDTLSEGIRQWWKLKPGPPPPRPAERHQDDSRGLVLPGYKYLGPFNGLDKGEPVNEADAAALEHDKAYDRQLDSGDNPYLKYNHADAEFQERLKEDTSFGGNLGRAVFQAKKRVLEPLGLVEEPVKTAPGKKRPVEHSPAEPDSSSGTGKAGQQPARKRLNFGQTGDADSVPDPQPLGQPPAAPTSLGSTTMATGSGAPMADNNEGADGVGNSSGNWHCDSQWLGDRVITTSTRTWALPTYNNHLYKQISSQSGASNDNHYFGYSTPWGYFDFNRFHCHFSPRDWQRLINNNWGFRPKRLNFKLFNIQVKEVTQNDGTTTIANNLTSTVQVFTDSEYQLPYVLGSAHQGCLPPFPADVFMVPQYGYLTLNNGSQAVGRSSFYCLEYFPSQMLRTGNNFTFSYTFEDVPFHSSYAHSQSLDRLMNPLIDQYLYYLNRTQSNSGTLQQSRLLFSQAGPTSMSLQAKNWLPGPCYRQQRLSKQANDNNNSNFPWTAATKYHLNGRDSLVNPGPAMASHKDDEEKFFPMHGTLIFGKQGTNANDADLEHVMITDEEEIRTTNPVATEQYGNVSNNLQNSNTGPTTENVNHQGALPGMVWQDRDVYLQGPIWAKIPHTDGHFHPSPLMGGFGLKHPPPQIMIKNTPVPANPPTNFSAAKFASFITRYSTGQVSAEIEWELQKENSKRWNPEIQYTSNYNKSVNVDFTVDANGVYSEPRPIGTRYLTRNL

SEQ ID NO: 2870 - protein, 735 aa, Artificial Sequence
  source: /note="Description of Artificial Sequence: Synthetic polypeptide"
MAADGYLPDWLEDILSEGIRQWWKLKPGPPPPKPAERHKDDSRGLVLPGYKYLGPFNGLDKGEPVNEADAAALEHDKAYDRQLDSGDNPYLKYNHADAEFQERLKEDTSFGGNLGRAVFQAKKRVLEPLGLVEEPVKTAPGKKRPVEQSPAEPDSSSGTGKAGNQPARKRLNFGQTGDADSVPDPQPLGQPPAAPSGLGSTTMATGSGAPMADNNEGADGVGNSSGNWHCDSQWLGDRVITTSTRTWALPTYNNHLYKQISSQSGAANDNHYFGYSTPWGYFDFNRFHCHFSPRDWQRLINNNWGFRPKRLNFKLFNIQVKEVTQNDGTTTIANNLTSTVQVFTDSEYQLPYVLGSAHQGCLPPFPADVFMVPQYGYLTLNNGSQAVGRSSFYCLEYFPSQMLRTGNNFTFSYTFEDVPFHSSYAHSQSLDRLMNPLIDQYLHYLNKTQSNSGTLQQSRLLFSQAGPTSMSLQAKNWLPGPCYRQQRLSKQANDNNNSNFPWTAATKYHLNGRDSLVNPGPAMASHKDDEEKFFPMHGTLIFGKQGTNANDADLDNVMITDEEEIRTTNPVATEQYGTVSNNLQNSNTGPTTGTVNHQGALPGMVWQDRDVYLQGPIWAKIPHTDGHFHPSPLMGGFGLKHPPPQIMIKNTPVPANPPTNFSSAKFASFITQYSTGQVSVEIEWELQKENSKRWNPEIQYTSNYNKSVNVDFTVDTNGVYSEPRPIGTRYLTRNL

SEQ ID NO: 2871 - protein, 735 aa, Artificial Sequence
  source: /note="Description of Artificial Sequence: Synthetic polypeptide"
MAADGYLPDWLEDTLSEGIRQWWKLKPGPPPPRPAERHQDDSRGLVLPGYKYLGPFNGLDKGEPVNEADAAALEHDKAYDRQLDSGDNPYLKYNHADAEFQERLKEDTSFGGNLGRAVFQAKKRVLEPLGLVEEPVKTAPGKKRPVEHSPAEPDSSSGTGKAGQQPARKRLNFGQTGDADSVPDPQPLGQPPAAPTSLGSTTMATGSGAPMADNNEGADGVGNSSGNWHCDSQWLGDRVITTSTRTWALPTYNNHLYKQISSQSGASNDNHYFGYSTPWGYFDFNRFHCHFSPRDWQRLINNNWGFRPKRLNFKLFNIQVKEVTQNDGTTTIANNLTSTVQVFTDSEYQLPYVLGSAHQGCLPPFPADVFMVPQYGYLTLNNGSQAVGRSSFYCLEYFPSQMLRTGNNFTFSYTFEDVPFHSSYAHSQSLDRLMNPLIDQYLYYLNRTQSNSGTLQQSRLLFSQAGPTSMSLQAKNWLPGPCYRQQRLSKQANDNNNSNFPWTAATKYHLNGRDSLVNPGPAMASHKDDEEKFFPMHGTLIFGKQGTNANDADLEHVMITDEEEIRTTNPVATEQYGNVSNNLQNSNTGPTTENVNRQGALPGMVWQDRDVYLQGPIWAKIPHTDGHFHPSPLMGGFGLKHPPPQIMIKNTPVPANPPTNFSAAKFASFITQYSTGQVSVEIEWELQKENSKRWNPEIQYTSNYNKSVNVDFTVDANGVYSEPRPIGTRYLTRNL

SEQ ID NO: 2872 - protein, 735 aa, Artificial Sequence
  source: /note="Description of Artificial Sequence: Synthetic polypeptide"
MAADGYLPDWLEDTLSEGIRQWWKLKPGPPPPRPAERHQDDSRGLVLPGYKYLGPFNGLDKGEPVNEADAAALEHDKAYDRQLDSGDNPYLKYNHADAEFQERLKEDTSFGGNLGRAVFQAKKRVLEPLGLVEEPVKTAPGKKRPVEHSPAEPDSSSGTGKAGQQPARKRLNFGQTGDADSVPDPQPLGQPPAAPTSLGSTTMATGSGAPMADNNEGADGVGNSSGNWHCDSQWLGDRVITTSTRTWALPTYNNHLYKQISSQSGASNDNHYFGYSTPWGYFDFNRFHCHFSPRDWQRLINNNWGFRPKRLNFKLFNIQVKEVTQNDGTTTIANNLTSTVQVFTDSEYQLPYVLGSAHQGCLPPFPADVFMVPQYGYLTLNNGSQAVGRSSFYCLEYFPSQMLRTGNNFTFSYTFEDVPFHSSYAHSQSLDRLMNPLIDQYLYYLNRTQSNSGTLQQSRLLFSQAAPTSMSLQAKNWLPGPCYRQQRLSKQANDNNNSNFPWTAATKYHLNGRDSLVNPGPAMASHKDDEEKFFPMHGTLIFGKQGTNANDTDLEHVMITDEEEIRTTNPVATEQYGNVSNNLQNSNTGPTTENVNHQGALPGMVWQDRDVYLQGPIWAKIPHTDGHFHPSPLMGGFGLKHPPPQIMIKNTPVPANPPTNFSAAKFASFITQYSTGQVSVEIEWELQKENSKRWNPEIQYTSNYNKSVNVDFTVDANGVYSEPRPIGTRYLTRNL

SEQ ID NO: 2873 - protein, 735 aa, Artificial Sequence
  source: /note="Description of Artificial Sequence: Synthetic polypeptide"
MAADGYLPDWLEDILSEGIRQWWKLKPGPPPPKPAERHKDDSRGLVLPGYKYLGPFNGLDKGEPVNEADAAALEHDKAYDRQLDSGDNPYLKYNHADAEFQERLKEDTSFGGNLGRAVFQAKKRVLEPLGLVEEPVKTAPGKKRPVEQSPAEPDSSSGTGKAGNQPARKRLNFGQTGDADSVPDPQPLGQPPAAPSGLGSTTMATGSGAPMADNNEGADGVGNSSGNWHCDSQWLGDRVITTSTRTWALPTYNNHLYKQISSQSGAANDNHYFGYSTPWGYFDFNRFHCHFSPRDWQRLINNNWGFRPKRLNFKLFNIQVKEVTQNDGTTTIANNLTSTVQVFTDSEYQLPYVLGSAHQGCLPPFPADVFMVPQYGYLTLNNGSQAVGRSSFYCLEYFPSQMLRTGNNFTFSYTFEDVPFHSSYAHSQSLDRLMNPLIDQYLYYLNKTQSNSGTLQQSRLLFSQAGPTSMSLQAKNWLPGPCYRQQRLSKQANDNNNSNFPWTAATKYHLNGRDSLVNPGPAMASHKDDEEKFFPMHGTLIFGKQGTNANDADLDNVMITDEEEIRTTNPVATEQYGTVSNNLQNSNTGPTTGTVNHQGALPGMVWQDRDVYLQGPIWAKIPHTDGHFHPSPLMGGFGLKHPPPQIMIKNTPVPANPPTNFSSAKFASFVTQYSTGQVSVEIEWELQKENSKRWNPEIQYTSNYNKSVNVDFTVDTNGVYSEPRPIGTRYLTRNL

SEQ ID NO: 2874 - protein, 735 aa, Artificial Sequence
  source: /note="Description of Artificial Sequence: Synthetic polypeptide"
MAADGYLPDWLEDTLSEGIRQWWKLKPGPPPPRPAERHQDDSRGLVLPGYKYLGPFNGLDKGEPVNEADAAALEHDKAYDRQLDSGDNPYLKYNHADAEFQERLKEDTSFGGNLGRAVFQAKKRVLEPLGLVEEPVKTAPGKKRPVEHSPAEPDSSSGTGKAGQQPARKRLNFGQTGDADSVPDPQPLGQPPAAPTSLGSTTMATGSGAPMADNNEGADGVGNSSGNWHCDSQWLGDRVITTSTRTWALPTYNNHLYKQISSQSGASNDNHYFGYSTPWGYFDFNRFHCHFSPRDWQRLINNNWGFRPKRLNFKLFNIQVKEVTQNDGTTTIANNLTSTVQVFTDSEYQLPYALGSAHQGCLPPFPADVFMVPQYGYLTLNNGSQAVGRSSFYCLEYFPSQMLRTGNNFTFSYTFEDVPFHSSYAHSQSLDRLMNPLIDQYLYYLNRTQSNSGTLQQSRLLFSQAGPTSMSLQAKNWLPGPCYRQQRLSKQANDNNNSNFPWTAATKYHLNGRDSLVNPGPAMASHKDDEEKFFPMHGTLIFGKQGTNANDTDLEHVMITDEEEIRTTNPVATEQYGNVSNNLQNSNTGPTTENVNHQGALPGMVWQDRDVYLQGPIWAKIPHTDGHFHPSPLMGGFGLKHPPPQIMIKNTPVPANPPTNFSAAKFASFITQYSTGQVSVEIEWELQKENSKRWNPEIQYTSNYNKSVNVDFTVDANGVYSEPRPIGTRYLTRNL

SEQ ID NO: 2875 - protein, 735 aa, Artificial Sequence
  source: /note="Description of Artificial Sequence: Synthetic polypeptide"
MAADGYLPDWLEDILSEGIRQWWKLKPGPPPPKPAERHKDDSRGLVLPGYKYLGPFNGLDKGEPVNEADAAALEHDKAYDRQLDSGDNPYLKYNHADAEFQERLKEDTSFGGNLGRAVFQAKKRVLEPLGLVEEPVKTAPGKKRPVEQSPAEPDSSSGTGKAGNQPARKRLNFGQTGDADSVPDPQPLGQPPAAPSGLGSTTMATGSGAPMADNNEGADGVGNSSGNWHCDSQWLGDRVITTSTRTWALPTYNNHLYKQISSQSGAANDNHYFGYSTPWGYFDFNRFHCHFSPRDWQRLINNNWGFRPKRLNFKLFSIQVKEVTQNDGTTTIANNLTSTVQVFTDSEYQLPYVLGSAHQGCLPPFPADVFMVPQYGYLTLNNGSQAVGRSSFYCLEYFPSQMLRTGNNFTFSYTFEDVPFHSSYAHSQSLDRLMNPLIDQYLYYLNKTQSNSGTLQQSRLLFSQAGPTSMSLQAKNWLPGPCYRQQRLSKQANDNNNSNFPWTAATKYHLNGRDSLVNPGPAMASHKDDEEKFFPMHGTLIFGKQGTNANDADLDNVMITDEEEIRTTNPVATEQYGTVSNNLQNSNTGPTTGTVNHQGALPGMVWQDRDVYLQGPIWAKIPHTDGHFHPSPLMGGFGLKHPPPQIMIKNTPVPANPPTNFSSAKFASFITQYSTGQVSVEIEWELQKENSKRWNPEIQYTSNYNKSVNVDFTVDTNGVYSEPRPIGTRYLTRNL

SEQ ID NO: 2876 - protein, 735 aa, Artificial Sequence
  source: /note="Description of Artificial Sequence: Synthetic polypeptide"
MAADGYLPDWLEDTLSEGIRQWWKLKPGPPPPRPAERHQDDSRGLVLPGYKYLGPFNGLDKGEPVNEADAAALEHDKAYDRQLDSGDNPYLKYNHADAEFQERLKEDTSFGGNLGRAVFQAKKRVLEPLGLVEEPVKTAPGKKRPVEHSPAEPDSSSGTGKAGQQPARKRLNFGQTGDADSVPDPQPLGQPPAAPTSLGSTTMATGSGAPMADNNEGADGVGNSSGNWHCDSQWLGDRVITTSTRTWALPTYNNHLYKQISSQSGASNDNHYLGYSTPWGYFDFNRFHCHFSPRDWQRLINNNWGFRPKRLNFKLFNIQVKEVTQNDGTTTIANNLTSTVQVFTDSEYQLPYVLGSAHQGCLPPFPADVFMVPQYGYLTLNNGSQAVGRSSFYCLEYFPSQMLRTGNNFTFSYTFEDVPFHSSYAHSQSLDRLMNPLIDQYLYYLNRTQSNSGTLQQSRLLFSQAAPTSMSLQAKNWLPGPCYRQQRLSKQANDNNNSNFPWTAATKYPLNGRDSLVNPGPAMASHKDDEEKFFPMHGTLIFGKQGTNANDTDLEHVMITDEEEIRTTNPVATEQYGNVSNNLQNSNTGPTTENVNHQGALPGMVWQDRDVYLQGPIWAKIPHTDGHFHPSPLMGGFGLKHPPPQIMIKNTPVPANPPTNFSAAKFASFITQYSTGQVSVEIEWELQKENSKRWNPEIQYTSNYNKSVNVDFTVDANGVYSEPRPIGTRYLTRNL

SEQ ID NO: 2877 - protein, 735 aa, Artificial Sequence
  source: /note="Description of Artificial Sequence: Synthetic polypeptide"
MAADGYLPDWLEDILSEGIRQWWKLKPGPPPPKPAERHKDDSRGLVLPGYKYLGPFNGLDKGEPVNEADAAALEHDKAYDRQLDSGDNPYLKYNHADAEFQERLKEDTSFGGNLGRAVFQAKKRVLEPLGLVEEPVKTAPGKKRPVEQSPAEPDSSSGTGKAGNQPARKRLNFGQTGDADSVPDPQPLGQPPAAPSGLGSTTMATGSGAPMADNNEGADGVGNSSGNWHCDSQWLGDRVITTSTRTWALPTYNNHLYKQISSQSGAANDNHYFGYSTPWGYFDFNRFHCHFSPRDWQRLINNNWGFRPKRLNFKLFNIQVKEVTQNDGTTTIANNLTSTVQVFTDSEYQLPYVLGSAHQGCLPPFPADVFMVPQYGYLTLNNGSQAVGRSSFYCLEYFPSQMLRTGNNFTFSYAFEDVPFHSSYAHSQSLDRLMNPLIDQYLYYLNKTQSNSGTLQQSRLLFSQAGPTSMSLQAKNWLPGPCYRQQRLSKQANDNNNSNFPWTAATKYHLNGRDSLVNPGPAMASHKDDEEKFFPMHGTLIFGKQGTNANDADLDNVMITDEEEIRTTNPVATEQYGTVSNNLQNSNTGPTTGTVNHQGALPGMVWQDRDVYLQGPIWAKIPHTDGHFHPSPLMGGFGLKHPPPQIMIKNTPVPANPPTNFSSAKFAPFITQYSTGQVSVEIEWELQKENSKRWNPEIQYTSNYNKSVNVDFTVDTNGVYSEPRPIGTRYLTRNL

SEQ ID NO: 2878 - protein, 735 aa, Artificial Sequence
  source: /note="Description of Artificial Sequence: Synthetic polypeptide"
MAADGYLPDWLEDTLSEGIRQWWKLKPGPPPPRPAERHQDDSRGLVLPGYKYLGPFNGLDKGEPVNEADAAALEHDKAYDRQLDSGDNPYLKYNHADAEFQERLKEDTSFGGNLGRAVFQAKKRVLEPLGLVEEPVKTAPGKKRPVEHSPAEPDSSSGTGKAGQQPARKRLNFGQTGDADSVPDPQPLGQPPAAPTSLGSTTMATGSGAPMADNNEGADGVGNSSGNWHCDSQWLGDRVITTSTRTWALPTYNNHLYKQISSQSGASNDNHYFGYSTPWGYFDFNRFHCHFSPRDWQRLINNNWGFRPKRLNFKLFNIQVKEVTQNDGTTTIANNLTSTVQVFTDSEYQLPYVLGSAHQGCLPPFPADVFMVPQYGYLTLNNGSQAVGRSSFYCLEYFPSQMLRTGNNFTFSYTFEDVPFHSSYAHSQSLDRLMNPLIDQYLYYLNRTQSNSGTLQQSRLLFSQAGPTSMSLQAKNWLPGPCYRQQRLSKQANDNNNSNFPWTAATKYHLNGRDSLVNPGPAMASHKDDEEKFFPMHGTLIFGKQGTNANDADLEHVMITDEEEIRTTNPVATEQYGNVSNNLQNSNTGPTTENVNHQGALPGMVWQDRDVYLQGPIWAKIPHTDGHFHPSPLMGGFGLKHPPPQIMIKNTPVPANPPTNFSAAKFASFITRYSTGQVSVEIEWELQKENSKRWNPEIQYTSNYNKSVNVDFTVDANGVYSEPRPIGTRYLTRNL

SEQ ID NO: 2879 - protein, 735 aa, Artificial Sequence
  source: /note="Description of Artificial Sequence: Synthetic polypeptide"
MAADGYLPDWLEDTLSEGIRQWWKLKPGPPPPRPAERHQDDSRGLVLPGYKYLGPFNGLDKGEPVNEADAAALEHDKAYDRQLDSGDNPYLKYNRADAEFQERLKEDTSFGGNLGRAVFQAKKRVLEPLGLVEEPVKTAPGKKRPVEHSPAEPDSSSGTGKAGQQPARKRLNFGQTGDADSVPDPQPLGQPPAAPTSLGSTTMATGSGAPMADNNEGADGVGNSSGNWHCDSQWLGDRVITTSTRTWALPTYNNHLYKQISSQSGASNDNHYFGYSTPWGYFDFNRFHCHFSPRDWQRLINNNWGFRPKRLNFKLFNIQVKEVTQNDGTTTIANNLTSTVQVFTDSEYQLPYVLGSAHQGCLPPFPADVFMVPQYGYLTLNNGSQAVGRSSFYCLEYFPSQMLRTGNNFTFSYTFEDVPFHSSYAHSQSLDRLMNPLIDQYLYYLNRTQSNSGTLQQSRLLFSQAGPTSMSLQAKNWLPGPCYRQQRLSKQANDNNNSNFPWTAATKYHLNGRDSLVNPGPAMASHKDDEEKFFPMHGTLIFGKQGTNANDTDLEHVMITDEEEIRTTNPVATEQYGNVSNNLQNSNTGPTTENVNHQGALPGMVWQDRDVYLQGPIWAKIPHTDGHFHPSPLMGGFGLKHPPPQIMIKNTPVPANPPTNFSAAKFASFITQYSTGQVSVEIEWELQKENSKRWNPEIQYTSNYNKSVNVDFTVDANGVYSEPRPIGTRYLTRNL

SEQ ID NO: 2880 - protein, 735 aa, Artificial Sequence
  source: /note="Description of Artificial Sequence: Synthetic polypeptide"
  MOD_RES (628)..(628): Any naturally occurring amino acid
MAADGYLPDWLEDTLSEGIRQWWKLKPGPPPPRPAERHQDDSRGLVLPGYKYLGPFNGLDKGEPVNEADAAALEHDKAYDRQLDSGDNPYLKYNHADAEFQERLKEDTSFGGNLGRAVFQAKKRVLEPLGLVEEPVKTAPGKKRPVEHSPAEPDSSSGTGKAGQQPARKRLNFGQTGDADSVPDPQPLGQPPAAPTSLGSTTMATGSGAPMADNNEGADGVGNSSGNWHCDSQWLGDRVITTSTRTWALPTYNNHLYKQISSQSGASNDNHYFGYSTPWGYFDFNRFHCHFSPRDWQRLINNNWGFRPKRLNFKLFNIQVKEVTQNDGTTTIANNLTSTVQVFTDSEYQLPYVLGSAHQGCLPPFPADVFMVPQYGYLTLNNGSQAVGRSSFYCLEYFPSQMLRTGNNFTFSYTFEDVPFHSSYAHSQSLDRLMNPLIDQYLYYLNRTQSNSGTLQQSRLLFSQAGPTSMSLQAKNWLPGPCYRQQRLSKQANDNNNSNFPWTAATKYHLNGRDSLVNPGPAMASHKDDEEKFFPMHGTLIFGKQGTNANDADLEHVMITDEEEIRTTNPVATEQYGNVSNNLQNSNTGPTTENVNHQGALPGMVWQDRDVYLQGPIWAKIPHTDGHXHPSPLMGGFGLKHPPPQIMIKNTPVPANPPTNFSAAKFASFITQYSTGQVSVEIEWELQKENSKRWNPEIQYTSNYNKSVNVDFTVDANGVYSEPRPIGTRYLTRNL

SEQ ID NO: 2881 - protein, 735 aa, Artificial Sequence
  source: /note="Description of Artificial Sequence: Synthetic polypeptide"
MAADGYLPDWLEDTLSEGIRQWWKLKPGPPPPRPAERHQDDSRGLVLPGYKYLGPFNGLDKGEPVNEADAAALEHDKAYDRQLDSGDNPYLKYNHADAEFQERLKEDTSFGGNLGRAVFQAKKRVLEPLGLVEEPVKTAPGKKRPAEHSPAEPDSSSGTGKAGQQPARKRLNFGQTGDADSVPDPQPLGQPPAAPTSLGSTTMATGSGAPMADNNEGADGVGNSSGNWHCDSQWLGDRVITTSTRTWALPTYNNHLYKQISSQSGASNDNHYFGYSTPWGYFDFNRFHCHFSPRDWQRLINNNWGFRPKRLNFKLFNIQVKEVTQNDGTTTIANNLTSTVQVFTDSEYQLPYVLGSAHQGCLPPFPADVFMVPQYGYLTLNNGSQAVGRSSFYCLEYFPSQMLRTGNNFTFSYTFEDVPFHSSYAHSQSLDRLMNPLIDQYLYYLNRTQSNSGTLQQSRLLFSQAGPTSMSLQAKNWLPGPCYRQQRLSKQANDNNNSNFPWTAATKYHLNGRDSLVNPGPAMASHKDDEEKFFPMHGTLIFGKQGTNANDADLEHVMITDEEEIRTTNPVATEQYGNVSNNLQNSNTGPTTENVNHQGALPGMVWQDRDVYLQGPIWAKIPHTDGHFHPSPLMGGFGLKHPPPQIMIKNTPVPANPPTNFSAAKFASFITQYSTGQVSVEIEWELQKENSKRWNPEIQYTSNYNKSVNVDFTVDANGVYSEPRPIGTRYLTRNL

SEQ ID NO: 2882 - protein, 735 aa, Artificial Sequence
  source: /note="Description of Artificial Sequence: Synthetic polypeptide"
MAADGYLPDWLEDTLSEGIRQWWKLKPGPPPPRPAERHQDDSRGLVLPGYKYLGPFNGLDKGEPVNEADAAALEHDKAYDRQLDSGDNPYLKYNHADAEFQERLKEDTSFGGNLGRAVFQAKKRVLEPLGLVEEPVKTAPGKKRPVEHSPAEPDSSSGTGKAGQQPARKRLNFGQTGDADSVPDPQPLGQPPAAPTSLGSTTMATGSGAPMADNNEGADGVGNSSGNWHCDSQWLGDRVITTSTRTWALPTYNNHLYKQISSQSGASNDNHYFGYSTPWGYFDFNRFHCHFSPRDWQRLINNNWGFRPKRLNFKLFNIQVKEVTQNDGTTTIANNLTSTVQVFTDSEYQLPYVLGSAHQGCLPPFPADVFMVPQYGYLTLNNGSQAVGRSSFYCLEYFPSQMLRTGNNFTFSYTFEDVPFHSSYAHSQSLDRLMNPLIDQYLYYLNRTQSNSGTLQQPRLLFSQAGPTSMSLQAKNWLPGPCYRQQRLSKQANDNNNSNFPWTAATKYHLNGRDSLVNPGPAMASHKDDEEKFFPMHGTLIFGKQGTNANDADLEHVMITDEEEIRTTNPVATEQYGNVSNNLQNSNTGPTTENVNHQGALPGMVWQDRDVYLQGPIWAKIPHTDGHFHPSPLMGGFGLKHPPPQIMIKNTPVPANPPTNFSAAKFASFITQYSTGQVSVEIEWELQKENSKRWNPEIQYTSNYNKSVNVDFTVDANGVYSEPRPIGTRYLTRNL

SEQ ID NO: 2883 - protein, 735 aa, Artificial Sequence
  source: /note="Description of Artificial Sequence: Synthetic polypeptide"
  MOD_RES (552)..(552): Any naturally occurring amino acid
MAADGYLPDWLEDTLSEGIRQWWKLKPGPPPPRPAERHQDDSRGLVLPGYKYLGPFNGLDKGEPVNEADAAALEHDKAYDRQLDSGDNPYLKYNHADAEFQERLKEDTSFGGNLGRAVFQAKKRVLEPLGLVEEPVKTAPGKKRPVEHSPAEPDSSSGTGKAGQQPARKRLNFGQTGDADSVPDPQPLGQPPAAPTSLGSTTMATGSGAPMADNNEGADGVGNSSGNWHCDSQWLGDRVITTSTRTWALPTYNNHLYKQISSQSGASNDNHYFGYSTPWGYFDFNRFHCHFSPRDWQRLINNNWGFRPKRLNFKLFNIQVKEVTQNDGTTTIANNLTSTVQVFTDSEYQLPYVLGSAHQGCLPPFPADVFMVPQYGYLTLNNGSQAVGRSSFYCLEYFPSQMLRTGNNFTFSYTFEDVPFHSSYAHSQSLDRLMNPLIDQYLYYLNRTQSNSGTLQQSRLLFSQAGPTSMSLQAKNWLPGPCYRQQRLSKQANDNNNSNFPWTAATKYHLNGRDSLVNPGPAMASHKDDEEKFFPMHGTLIFGKQGTNANDXDLEHVMITDEEEIRTTNPVATEQYGNVSNNLQNSNTGPTTENVNHQGALPGMVWQDRDVYLQGPIWAKIPHTDGHFHPSPLMGGFGLKHPPPQIMIKNTPVPANPPTNFSAAKFASFITQYSTGQVSVEIEWELQKENSKRWNPETQYTSNYNKSVNVDFTVDANGVYSEPRPIGTRYLTRNL

SEQ ID NO: 2884 - protein, 735 aa, Artificial Sequence
  source: /note="Description of Artificial Sequence: Synthetic polypeptide"
MAADGYLPDWLEDTLSEGIRQWWKLKPGPPLPRPAERHQDDSRGLVLPGYKYLGPFNGLDKGEPVNEADAAALEHDKAYDRQLDSGDNPYLKYNHADAEFQERLKEDTSFGGNLGRAVFQAKKRVLEPLGLVEEPVKTAPGKKRPVEHSPAEPDSSSGTGKAGQQPARKRLNFGQTGDADSVPDPQPLGQPPAAPTSLGSTTMATGSGAPMADNNEGADGVGNSSGNWHCDSQWLGDRVITTSTRTWALPTYNNHLYKQISSQSGASNDNHYFGYSTPWGYFDFNRFHCHFSPRDWQRLINNNWGFRPKRLNFKLFNIQVKEVTQNDGTTTIANNLTSTVQVFTDSEYRLPYVLGSAHQGCLPPFPADVFMVPQYGYLTLNNGSQAVGRSSFYCLEYFPSQMLRTGNNFTFSYTFEDVPFHSSYAHSQSLDRLMNPLIDQYLYYLNRTQSNSGTLQQSRLLFSQAGPTSMSLQAKNWLPGPCYRQQRLSKQANDNNNSNFPWTAATKYHLNGRDSLVNPGPAMASHKDDEEKFFPMHGTLIFGKQGTNANDADLEHVMITDEEEIRTTNPVATEQYGNVSNNLQNSNTGPTTENVNHQGALPGMVWQDRDVYLQGPIWAKIPHTDGHFHPSPLMGGFGLKHPPPQIMIKNTPVPANPPTNFSAAKFASFITQYSTGQVSVEIEWELQKENSKRWNPEIQYTSNYNKSVNVDFTVDANGVYSEPRPIGTRYLTRNL

SEQ ID NO: 2885 - protein, 735 aa, Artificial Sequence
  source: /note="Description of Artificial Sequence: Synthetic polypeptide"
MAADGYLPDWLEDTLSEGIRQWWKLKPGPPPPRPAERHQDDSRGLVLPGYKYLGPFNGLDKGEPVNEADAAALEHDKAYDRQLDSGDNPYLKYNHADAEFQERLKEDTSFGGNLGRAVFQAKKRVLEPLGLVEEPVKTAPGKKRPVEHSPAEPDSSSGTGKAGQQPARKRLNFGQTGDADSVPDPQPLGQPPAAPTSLGSTTMATGSGAPMADNNEGADGVGNSSGNWHCDSQWLGDRVITTSTRTWALPTYNNHLYKQISSQSGASNDNHYFGYSTPWGYFDFNRFHCHFSPRDWQRLINNNWGFRPKRLNFKLFNIQVKEVTQNDGTTTIANNLTSTVQVFTDSEYQLPYVLGSAHQGCLPPFPADVFMVPQYGYLTLNNGSQAVGRSSFYCLEYFPSQMLRTGNNFTFSYTFEDVPFHSSYAHSQSLDRLMNPLTDQYLYYLNRTQSNSGTLQQSRLLFSQAGPTSMSLQAKNWLPGPCYRQQRLSKQANDNNNSNFPWTAATKYHLNGRDSLVNPGPAMASHKDDEEKFFPMHGTLIFGKQGTNANDTDLEHVMITDEEEIRTTNPVATEQYGNVSNNLQNSNTGPTTENVNHQGALPGMVWQDRDVYLQGPIWAKIPHTDGHFHPSPLMGGFGLKHPPPQIMIKNTPVPANPPTNFSAAKFASFITQYSTGQVSVEIEWELQKENSKRWNPEIQYTSNYNKSVNVDFTVDANGVYSEPRPIGTRYLTRNL

SEQ ID NO: 2886 - protein, 735 aa, Artificial Sequence
  source: /note="Description of Artificial Sequence: Synthetic polypeptide"
MAADGYLPDWLEDTLSEGIRQWWKLKPGPPPPRPAERHQDDSRGLVLPGYKYLGPFNGLDKGEPVNEADAAALEHDKAYDRQLDSGDNPYLKYNHADAEFQERLKEDTSFGGNLGRAVFQAKKRVLEPLGLVEEPVKTAPGKKRPVEHSPAEPDSSSGTGKAGQQPARKRLNFGQTGDADSVPDPQPLGQPPAAPTSLGSTTMATGSGAPMADNNEGADGVGNSSGNWHCDSQWLGDRVITTSTRTWALPTYNNHLYRQISSQSGASNDNHYFGYSTPWGYFDFNRFHCHFSPRDWQRLINNNWGFRPKRLNFKLFNIQVKEVTQNDGTTTIANNLTSTVQVFTDSEYQLPYVLGSAHQGCLPPFPADVFMVPQYGYLTLNNGSQAVGRSSFYCLKYFPSQMLRTGNNFTFSYTFEDVPFHSSYAHSQSLDRLMNPLIDQYLYYLNRTQSNSGTLQQSRLLFSQAGPTSMSLQAKNWLPGPCYRQQRLSKQANDNNNSNFPWTAATKYHLNGRDSLVNPGPAMASHKDDEEKFFPLHGTLIFGKQGTNANDTDLEHVMITDEEEIRTTNPVATEQYGNVSNNLQNSNTGPTTENVNHQGALPGMVWQDRDVYLQGPIWAKIPHTDGHFHPSPLMGGFGLKHPPPQIMIKNTPVPANPPTNFSAAKFASFITQYSTGQVSVEIEWELQKENSKRWNPEIQYTSNYNKSVNVDFTVDANGVYSEPRPIGTRYLTRNL

SEQ ID NO: 2887 - protein, 735 aa, Artificial Sequence
  source: /note="Description of Artificial Sequence: Synthetic polypeptide"
MAADGYLPDWLEDTLSEGIRQWWKLKPGPPPPRPAERHQDDSRGLVLPGYKYLGPFNGLDKGEPVNEADAAALEHDKAYDRQLDSGDNPYLKYNHADAEFQERLKEDTSFGGNLGRAVFQAKKRVLEPLGLVEEPVKTAPGKKRPVEHSPAEPDSSSGTGKAGQQPARKRLNFGQTGDADSVPDPQPLGQPPAAPTSLGSTTMATGSGAPMADNNEGADGVGNSSGNWHCDSQWLGDRVITTSTRTWALPTYNNHLYRQISSQSGASNDNHYFGYSTPWGYFDFNRFHCHFSPRDWQRLINNNWGFRPKRLNFKLFNIQVKEVTQNDGTTTIANNLTSTVQVFTDSEYQLPYVLGSAHQGCLPPFPADVFMVPQYGYLTLNNGSQAVGRSSFYCLEYFPSQMLRTGNNFTFSYTFEDVPFHSSYAHSQSLDRLMNPLIDQYLYYLNRTQSNSGTLQQSRLLFSQAGPTSMSLQAKNWLPGPCYRQQRLSKQANDNNNSNFPWTAATKYHLNGRDSLVNPGPAMASHKDDEEKFFPMHGTLIFGKQGTNANDTDLEHVMITDEEEIRTTNPVATEQYGNVSNNLQNSNTGPTTENVNHQGALPGMVWQDRDVYLQGPIWAKIPHTDGHFHPSPLMGGFGLKHPPPQIMIKNTPVPANPPTNFSAAKFASFITQYSTGQVSVEIEWVLQKENSKRWNPEIQYTSNYNKSVNVDFTVDANGVYSEPRPIGTRYLTRNL

SEQ ID NO: 2888 - protein, 735 aa, Artificial Sequence
  source: /note="Description of Artificial Sequence: Synthetic polypeptide"
MAADGYLPDWLEDTLSEGIRQWWKLKPGPPPPRPAERHQDDSRGLVLPGYKYLGPFNGLDKGEPVNEADAAALEHDKAYDRQLDSGDNPYLKYNHADAEFQERLKEDTSFGGNLGRAVFQAKKRVLEPLGLVEEPVKTAPGKKRPVEHSPAEPDSSSGTGKAGQQPARKRLNFGQTGDADSVPDPQPLGQPPAAPTSLGSTTMATGSGAPMADNNEGADGVGNSSGNWHCDSQWLGDRVITTSTRTWALPTYNNHLYKQISSQSGASNDNHYFGYSTPWGYFDFNRFHCHFSPRDWQRLINNNWGFRPKRLNFKLFNIQVKEVTQNDGTTTIANNLISTVQVFTDSEYQLPYVLGSAHQGCLPPFPADVFMVPQYGYLTLNNGSQAVGRSSFYCLEYFPSQMLRTGNNFTFSYTFEDVPFHSSYAHSQSLDRLMNPLIDQYLYYLNRTQSNSGTLQQSRLLFSQAGPTSMSLQAKNWLPGPCYRQQRLSKQANDNNNSNFPWTAATKYHLNGRDSLVNPGPAMASHKDDEEKFFPMHGTLIFGKQGTNANDADLEHVMITDEEEIRTTNPVATEQYGNVSNNLQNSNTGPTTENVNHQGALPGMVWQDRDVYLQGPIWAKIPHTDGHFHPSPLMGGFGLKHPPPQIMIKNTPVPANPPTNFSAAKFASFITQYSTGQVSVEIEWELQKENSKRWNPEIQYTSNYNKSVNVDFTVDANGVYSEPRPIGTRYLTRNL

SEQ ID NO: 2889 - protein, 734 aa, Artificial Sequence
  source: /note="Description of Artificial Sequence: Synthetic polypeptide"
MAADGYLPDWLEDILSEGIRQWWKLKPGPPPPKPAERHKDDSRGLVLPGYKYLGPFNGLDKGEPVNEADAAALEHDKAYDRQLDSGDNPYLKYNHADAEFQERLKEDTSFGGNLGRAVFQAKKRVLEPLGLVEEPVKTAPGKKRPVEQSPAEPDSSSGTGKAGNQPARKRLNFGQTGDADSVPDPQPLGQPPAAPSGLGSTTMATGSGAPMADNNEGADGVGNSSGNWHCDSQWLGDRVITTSTRTWALPTYNNHLYKQISSQSGAANDNHYFGYSTPWGYFDFNRFHCHFSPRDWQRLINNNWGFRPKRLNFKLFNIQVKEVTQNDGTTTIANNLTSTVQVFTDSEYQLPYVLGSAHQGCLPPFPADVFMVPQYGYLTLNNGSQAVGRSSFYCLEYFPSQMLRTGNNFTFSYTFEDVPFHSSYAHSQSLDRLMNPLIDQYLYYLNKTQSNSGTLQQSRLLFSQAGPTSMSLQAKNWLPGPCYRQQRLSKQANDNNSNFPWTAATKYHLNGRDSLVNPGPAMASHKDDEEKFFPMHGTLIFGKQGTNANDADLDNVMITDEEEIRTTNPVATEQYGTVSNNLQNSNTGPTTGTVNHQGALPGMVWQDRDVYLQGPIWAKIPHTDGHFHPSPLMGGFGLKHPPPQIMIKNTPVPANPPTNFSSAKFASFITQYSTGQVSVEIEWELQKENSKRWNPEIQYTSNYNKSVNVDFTVDTNGVYSEPRPIGTRYLTRNL

SEQ ID NO: 2890 - protein, 735 aa, Artificial Sequence
  source: /note="Description of Artificial Sequence: Synthetic polypeptide"
MAADGYLPDWLEDILSEGIRQWWKLKPGPPPPKPAERHKDDSRGLVLPGYKYLGPFNGLDKGEPVNEADAAALEHDKAYDRQLDSGDNPYLKYNHADAEFQERLKEDTSFGGNLGRAVFQAKKRVLEPLGLVEEPVKTAPGKKRPVEQSPAEPDSSSGTGKAGNQPARKRLNFGQTGDADSVPDPQPLGQPPAAPSGLGSTTMATGSGAPMADNNEGADGVGNSSGNWHCDSQWLGDRVITTSTRTWALPTYNNHLYKQISSQSGAANDSHYFGYSTPWGYFDFNRFHCHFSPRDWQRLINNNWGFRPKRLNFKLFNIQVKEVTQNDGTTTIANNLTSTVQVFTDSEYQLPYVLGSAHQGCLPPFPADVFMVPQYGYLTLNNGSQAVGRSSFYCLEYFPSQMLRTGNNFTFSYTFEDVPFHSSYAHSQSLDRLMNPLIDQYLYYLNKTQSNSGTLQQSRLLFSQAGPTSMSLQAKNWLPGPCYRQQRLSKQANDNNNSNFPWTAATKYHLNGRDSLVNPGPAMASHKDDEEKFFPMHGTLIFGKQGTNANDADLDNVMITDEEEIRTTNPVATEQYGTVSNNLQNSNTGPTTGTVNHQGALPGMVWQDRDVYLQGPIWAKIPHTDGHFHPSPLMGGFGLKHPPPQIMIKNTPVPANPPTNFSSAKFASFITQYSTGQVSVEIEWELQKENSKRWNPEIQYTSNYNKSVNVDFTVDTNGVYSEPRPIGTRYLTRNL

SEQ ID NO: 2891 - protein, 735 aa, Artificial Sequence
  source: /note="Description of Artificial Sequence: Synthetic polypeptide"
MAADGYLPDWLEDTLSEGIRQWWKLKPGPPPPRPAERHQDDSRGLVLPGYKYLGPFNGLDKGEPVNEADAAALEHDKAYDRQLDSGDNPYLKYNHADAEFQERLKEDTSFGGNLGRAVFQAKKRVLEPLGLVEEPVKTAPGKKRPVEHSPAEPDSSSGTGKAGQQPARKRLNFGQTGDADSVPDPQPLGQPPAAPTSLGSTTMATGSGAPMADNNEGADGVGNSSGNWHCDSQWLGDRVITTSTRTWALPTYNNHLYKQISSQSGASNDNHYFGYSTPWGYFDFNRFHCHFSPRDWQRLINNNWGFRPKRLNFKLFNIQVKEVTQNDGTTTIANNLTSTVQVFTDSEYQLPYVLGSAHQGCLPPFPADVFMVPQYGYLTLNNGSQAVGRSSFYCLEYFPSQMLRTGNNFTFSYTFEDVPFHSSYAHSQSLDRLMNPLIDQYLYYLNRTQSNSGTLQQSRLLFSQAGPTSMSLQAKNWLPGPCYRQQRLSKQANDNNNSNFPWTAATKYHLNGRDSLVNPGPAMASHKDDEEKFFPMHGTLIFGKQGTNANDTDLEHVMITDEEEIRTTNPVATEQYGNVSNNLQNSNTGPTTENVNHQGALPGMVWQDRDVYLQGPIWAKIPHTDGHFHPSPLMGGFGLKHPPPQIMIKNTPVPANPPTNFSAAKFASFITQYSTGQVSVEIEWELQKENSKRWNPEIQYTSNYNKSVNVDFTVDANGVYSEPRPIGTRYLTRNL

SEQ ID NO: 2892 - protein, 734 aa, Artificial Sequence
  source: /note="Description of Artificial Sequence: Synthetic polypeptide"
MAADGYLPDWLEDILSEGIRQWWKLKPGPPPKPAERHKDDSRGLVLPGYKYLGPFNGLDKGEPVNEADAAALEHDKAYDRQLDSGDNPYLKYNHADAEFQERLKEDTSFGGNLGRAVFQAKKRVLEPLGLVEEPVKTAPGKKRPVEQSPAEPDSSSGTGKAGNQPARKRLNFGQTGDADSVPDPQPLGQPPAAPSGLGSTTMATGSGAPMADNNEGADGVGNSSGNWHCDSQWLGDRVITTSTRTWALPTYNNHLYKQISSQSGAANDNHYFGYSTPWGYFDFNRFHCHFSPRDWQRLINNNWGFRPKRLNFKLFNIQVKEVTQNDGTTTIANNLTSTVQVFTDSEYQLPYVLGSAHQGCLPPFPADVFMVPQYGYLTLNNGSQAVGRSSFYCLEYFPSQMLRTGNNFTFSYTFEDVPFHSSYAHSQSLDRLMNPLIDQYLYYLNKTQSNSGTLQQSRLLFSQAGPTSMSLQAKNWLPGPCYRQQRLSKQANDNNNSNFPWTAATKYHLNGRDSLVNPGPAMASHKDDEEKFFPMHGTLIFGKQGTNANDADLDNVMITDEEEIRTTNPVATEQYGTVSNNLQNSNTGPTTGTVNHQGALPGMVWQDRDVYLQGPIWAKIPHTDGHFHPSPLMGGFGLKHPPPQIMIKNTPVPANPPTNFSSAKFASFITQYSTGQVSVEIEWELQKENSKRWNPEIQYTSNYNKSVNVDFTVDTNGVYSEPRPIGTRYLTRNL

SEQ ID NO: 2893 - protein, 735 aa, Artificial Sequence
  source: /note="Description of Artificial Sequence: Synthetic polypeptide"
MAADGYLPDWLEDTLSEGIRQWWKLKPGPPPPRPAERHQDDSRGLVLPGYKYLGPFNGLDKGEPVNEADAAALEHDKAYDRQLDSGDNPYLKYNHADAEFQERLKEDTSFGGNLGRAVFQAKKRVLEPLGLVEEPVKTAPGKKRPVEHSPAEPDSSSGTGKAGQQPARKRLNFGQTGDADSVPDPQPLGQPPAAPTSLGSTTMATGSGAPMADNNEGADGVGNSSGNWHCDSQWLGDRVITTSTRTWALPTYNNHLYKQISSQSGASNDNHYFGYSTPWGYFDFNRFHCHFSPRDWQRLINNNWGFRPKRLNFKLFNIQVKEVTQNDGTTTIANNLTSTVQVFTDSEYQLPYVLGSAHQGCLPPFPADVFMVPQYGYLTLNNGSQAVGRSSFYCLEYFPSQMLRTGNNFTFSYTFGDVPFHSSYAHSQSLDRLMNPLIDQYLYYLNRTQSNSGTLQQSRLLFSQAGPTSMSLQAKNWLPGPCYRQQRLSKQANDNNNSNFPWTAATKYHLNGRDSLVNPGPAMASHKDDEEKFFPMHGTLIFGKQGTNANDADLEHVMITDEEEIRTTNPVATEQYGNVSNNLQNSNTGPTTENVNHQGALPGMVWQDRDVYLQGPIWAKIPHTDGHFHPSPLMGGFGLKHPPPQIMIKNTPVPANPPTNFSAAKFASFITQYSTGQVSVEIEWELQKENSKRWNPEIQYTSNYNKSVNVDFTVDANGVYSEPRPIGTRYLTRNL

SEQ ID NO: 2894 - protein, 735 aa, Artificial Sequence
  source: /note="Description of Artificial Sequence: Synthetic polypeptide"
MAADGYLPDWLEDTLSEGIRQWWKLKPGPPPPRPAERHQDDSRGLVLPGYKYLGPFNGLDKGEPVNEADAAALEHDKAYDRQLDSGDNPYLKYNHADAEFQERLKEDTSFGGNLGRAVFQAKKRVLEPLGLVEEPVKTAPGKKRPVEHSPAEPDSSSGTGKAGQQPARKRLNFGQTGDADSVPDPQPLGQPPAAPTSLGSTTMATGSGAPMADNNEGADGVGNSSGNWHCDSQWLGDRVITTSTRTWALPTYNNHLYKQISSQSGASNDSHYFGYSTPWGYFDFNRFHCHFSPRDWQRLINNNWGFRPKRLNFKLFNIQVKEVTQNDGTTTIANNLTSTVQVFTDSEYQLPYVLGSAHQGCLPPFPADVFMVPQYGYLTLNNGSQAVGRSSFYCLEYFPSQMLRTGNNFTFSYTFEDVPFHSSYAHSQSLDRLMNPLIDQYLYYLNRTQSNSGTLQQSRLLFSQAGPTSMSLQAKNWLPGPCYRQQRLSKQANDNNNSNFPWTAATKYHLNGRDSLVNPGPAMASHKDDEEKFFPMHGTLIFGKQGTNANDADLEHVMITDEEEIRTTNPVATEQYGNVSNNLQNSNTGPTTENVNHQGALPGMVWQDRDVYLQGPIWAKIPHTDGHFHPSPLMGGFGLKHPPPQIMIKNTPVPANPPTNFSAAKFASFITQYSTGQVSVEIEWELQKENSKRWNPEIQYTSNYNKSVNVDFTVDANGVYSEPRPIGTRYLTRNL

SEQ ID NO: 2895 - protein, 735 aa, Artificial Sequence
  source: /note="Description of Artificial Sequence: Synthetic polypeptide"
MAADGYLPDWLEDTLSEGIRQWWKLKPGPPPPRPAERHQDDSRGLVLPGYKYLGPFNGLDKGEPVNEADAAALEHDKAYDRQLDSGDNPYLKYNHADAEFQERLKEDTSFGGNLGRAVFQAKKRVLEPLGLVEEPVKTAPGKKRPVEHSPAEPDSSSGTGKAGQQPARKRLNFGQTGDADSVPDPQPLGQPPAAPTSLGSTTMATGSGAPMADNNEGADGVGNSSGNWHCDSQWLGDRVITTSTRTWALPTYNNHLYKQISSQSGASNDNHYFGYSTPWGYFDFNRFHCHFSPRDWQRLINNNWGFRPKRLNFKLFNIQVKEVTQNDGTTTIANNLTSTIQVFTDSEYQLPYVLGSAHQGCLPPFPADVFMVPQYGYLTLNNGSQAVGRSSFYCLEYFPSQMLRTGNNFTFSYTFEDVPFHSSYAHSQSLDRLMNPLIDQYLYYLNRTQSNSGTLQQSRLLFSQAGPTSMSLQAKNWLPGPCYRQQRLSKQANDNNNSNFPWTAATKYHLNGRDSLVNPGPAMASHKDDEEKFFPMHGTLIFGKQGTNANDADLEHVMITDEEEIRTTNPVATEQYGNVSNNLQNSNTGPTTENVNHQGALPGMVWQDRDVYLQGPIWAKIPHTDGHFHPSPLMGGFGLKHPPPQIMIKNTPVPANPPTNFSAAKFASFITQYSTGQVSVEIEWELQKENSKRWNPEIQYTSNYNKSVNVDFTVDANGVYSEPRPIGTRHLTRNL

SEQ ID NO: 2896 - protein, 735 aa, Artificial Sequence
  source: /note="Description of Artificial Sequence: Synthetic polypeptide"
MAADGYLPDWLEDTLSEGIRQWWKLKPGPPPPRPAERHQDDSRGLVLPGYKYLGPFNGLDKGEPVNEADAAALEHDKAYDRQLDSGDNPYLKYNHADAEFQERLKEDTSFGGNLGRAVFQAKKRVLEPLGLVEEPVKTAPGKKRPVEHSPAEPDSSSGTGKAGQQPARKRLNFGQTGDADSVPDPQPLGQPPAAPTSLGSTTMATGSGAPMADNNEGADGVGNSSGNWHCDSQWLGDRVITTSTRTWALPTYNNHLYKQISSQSGASNDNHYFGYSTPWGYFDFNRFHCHFSPRDWQRLINNNWGFRPKRLNFKLFNIQVKEVTQNDGTTTIANNLTSTVQVFTDSEYQLPYVLGSAHQGCLPPFPADVFMVPQYGYLTLNNGSQAVGRSSFYCLEYFPSQMLRTGNNFTFSYTFEDVPFHSSYAHSQSLDRLMNPLIDQYLYYLNRTQSNSGTLQQSGLLFSQAGPTSMSLQAKNWLPGPCYRQQRLSKQANDNNNSNFPWTAATKYHLNGRDSLVNPGPAMASHKDDEEKFFPMHGTLIFGKQGTNANDTDLEHVMITDEEEIRTTNPVATEQYGNVSNNLQNSNTGPTTENVNHQGALPGMVWQDRDVYLQGPIWAKIPHTDGHFHPSPLMGGFGLKHPPPQIMIKNTPVPANPPTNFSAAKFASFITQYSTGQVSVEIEWELQKENSKRWNPEIQYTSNYNKSVNVDFTVDANGVYSEPRPIGTRYLTRNL

SEQ ID NO: 2897 - protein, 735 aa, Artificial Sequence
  source: /note="Description of Artificial Sequence: Synthetic polypeptide"
MAADGYLPDWLEDTLSEGIRQWWKLKPGPPPPRPAERHQDDSRGLVLPGYKYLGPFNGLDKGEPVNEADAAALEHDKAYDRQLDSGDNPYLKYNHADAEFQERPKEDTSFGGNLGRAVFQAKKRVLEPLGLVEEPVKTAPGKKRPVEHSPAEPDSSSGTGKAGQQPARKRLNFGQTGDADSVPDPQPLGQPPAAPTSLGSTTMATGSGAPMADNNEGADGVGNSSGNWHCDSQWLGDRVITTSTRTWALPTYNNHLYKQISSQSGASNDNHYFGYSTPWGYFDFNRFHCHFSPRDWQRLINNNWGFRPKRLNFKLFNIQVKEVTQNDGTTTIANNLTSTVQVFTDSEYQLPYVLGSAHQGCLPPFPADVFMVPQYGYLTLNNGSQAVGRSSFYCLEYFPSQMLRTGNNFTFSYTFEDVPFHSSYAHSQSLDRLMNPLIDQYLYYLNRTQSNSGTLQQSRLLFSQAGPTSMSLQAKNWLPGPCYRQQRLSKQANDNNNSNFPWTAATKYHLNGRDSLVNPGPAMASHKDDEEKFFPMHGTLIFGKQGTNANDADLEHVMITDEEEIRTTNPVATEQYGNVSNNLQNSNTGPTTENVNHQGALPGMVWQDRDVYLQGPIWAKIPHTDGHFHPSPLMGGFGLKHPPPQIMIKNTPVPANPPTNFSAAKFASFITRYSTGQVSVEIEWELQKENSKRWNPEIQYTSNYNKSVNVDFTVDANGVYSEPRPIGTRYLTRNL

SEQ ID NO: 2898 - protein, 735 aa, Artificial Sequence
  source: /note="Description of Artificial Sequence: Synthetic polypeptide"
MAADGYLPDWLEDTLSEGIRQWWKLKPGPPPPKPAERHKDDSRGLVLPGYKYLGPFNGLDKGEPVNEADAAALEHDKAYDRQLDSGDNPYLKYNHADAELQERLKEDTSFGGNLGRAVFQAKKRVLEPLGLVEEPVKTAPGKKRPVEHSPVEPDSSSGTGKAGQQPARKRLNFGQTGDADSVPDPQPLGQPPAAPTSLGSTTMATGSGAPMADNNEGADGVGNSSGNWHCDSQWSGDRVITTSTRTWALPTYNNHLYKQISSQSGASNDNHYFGYSTPWGYFDFNRFHCHFSPRDWQRLINNNWGFRPKRLNFKLFNIQVKGVTQNDGTTTIANNLTSTVQVFTDSEYQLPYVLGSAHQGCLPPFPADVFMVPQYGYLTLNNGSQAVGRSSFYCLEYFPSQMLRTGNNFTFSYTFEDVPFHSSYAHSQSLDRLMNPLIDQYLYYLNKTQSNSGTLQQSRLLFSQAGPTSMSLQAKNWLPGPCYRQQRLSKQANDNNNSNFPWTAATKYHLNGRDSLVNPGPAMASHKDDEEKFFPMHGTLIFGKQGTNANDADLDNVMITDEEEIRTTNPVATEQYGTVSNNLQNSNTGPTTGTVNHQGALPGMVWQDRDVYLQGPIWAKIPHTDGHFHPSPLMGGFGLKHPPPQIMIKNTPVPANPPTNFSSAKFASFITQYSTGQVSVEIEWELQKENSKRWNPEIQYTSNYNKSVNVDFTVDTNGVYSEPRPIGTRYLTRNL

SEQ ID NO: 2899 - protein, 735 aa, Artificial Sequence
  source: /note="Description of Artificial Sequence: Synthetic polypeptide"
MAADGYLPDWLEDILSEGIRQWWKLKPGPPPPKPAERHKDDSRGLVLPGYKYLGPFNGLDKGEPVNEADAAALEHDKAYDRQLDSGDNPYLKYNHADAEFQERLKEDTSFGGNLGRAVFQAKKRVLEPLGLVEEPVKTAPGKKRPVEQSPAEPDSSSGTGKAGNQPARKRLNFGQTGDADSVPDPQPLGHPPAAPSGLGSTTMATGSGAPMADNNEGADGVGNSSGNWHCDSQWLGDRVITTSTRTWALPTYNNHLYKQISSQSGASNDNHYFGYSTPWGYFDFNRFHCHFSPRDWQRLINNNWGFRPKRLNFKLFNIQVKEVTQNDGTTTIANNLTSTVQVFTDSEYQLPYVLGSAHQGCLPPFPADVFMVPQYGYLTLNNGSQAVGRSSFYCLEYFPSQMLRTGNNFTFSYTFEDVPFHSSYAHSQSLDRLMNPLIDQYLYYLNKTQSNSGTLQQSRLLFSQAGPTSMSLQAKNWLPGPCYRQQRLSKQANDNNNSNFPWTAATKYHLNGRDSLVNPGPAMASHKDDEEKFFPMHGTLIFGKQGTNANDADLDNVMITDEEEIRTTNPVATEQYGTVSNNLQNSNTGPTTGTVNHQGALPGMVWQDRDVYLQGPIWAKIPHTDGHFHPSPLMGGFGLKHPPPQIMIKNTPVPANPPTNFSSAKFASFITQYSTGQVSVEIEWELQKENSKRWNPEIQYTSNYNKSVNVDFTVDTNGVYSEPRPIGTRYLTRNL

SEQ ID NO: 2900 - protein, 735 aa, Artificial Sequence
  source: /note="Description of Artificial Sequence: Synthetic polypeptide"
MAADGYLPDWLEDILSEGIRQWWKLKPGPPPPKPAERHKDDSRGLVLPGYKYLGPFNGLDKGEPVNEADAAALEHDKAYDRQLDSGDNPYLKYNHADAEFQERLKEDTSFGGNLGRAVFQAKKRVLEPLGLVEEPVKTAPGKKRPVEQSPAEPDSSSGTGKAGNQPARKRLNFGQTGDADSVPDPQPLGQPPAAPSGLGSTTMATGSGAPMADNNEGADGVGNSSGNWHCDSQWLGDRVITTSTRTWALPTYNNHLYKQISSQSGASNDNHYFGYSTPWGYFDFNRFHCHFSPRDWQRLINNNWGFRPKRLNFKLFNIQVKEVTQNDGTTTIANNLTSTVQVFTDSEYQLPYVLGSAHQGCLPPFPADVFMVPQYGYLTLNNGSQAVGRSSFYCLEYFPSQMLRTGNNFTFSYTFEDVPFHSSYAHSQSLDRLMNPLIDQYLYYLNKTQSNSGTLQQSRLLFSQAGPTSMSLQAKNWLPGPCYRQQRLSKQVNDNNNSNFPWTAATKYHLNGRDSLVNPGPAMASHKDDEEKFFPMHGTLIFGKQGTNANDADLDNVMITDEEEIRTTNPVATEQYGTVSNNLQNSNTGPTTGTVNHQGALPGMVWQDRDVYLQGPIWAKIPHTDGHFHPSPLMGGFGLKHPPPQIMIKNTPVPANPPTNFSSAKFASFITQYSTGQVSVEIEWELQKENSKRWNPEIQYTSNYNKSVNVDFTVDTNGVYSEPRPIGTRYLTRNL

SEQ ID NO: 2901 - protein, 735 aa, Artificial Sequence
  source: /note="Description of Artificial Sequence: Synthetic polypeptide"
MAADGYLPDWLEDILSEGIRQWWKLKPGPPPPKPAERHKDDSRGLVLPGYKYLGPFNGLDKGEPVNEADAAALEHDKAYDRQLDSGDNPYLKYNHADAEFQERLKEDTSFGGNLGRAVFQAKKRVLEPLGLVEEPVKTAPGKKRPVEQSPAEPDSSSGAGKAGNQPARKRLNFGQTGDADSVPDPQPLGQPPAAPSGLGSTTMATGSGAPMADNNEGADGVGNSSGNWHCDSQWLGDRVITTSTRTWALPTYNNHLYKQISSQSGASNDNHYFGYSTPWGYFDFNRFHCHFSPRDWQRLINNNWGFRPKRLNFKLFNIQVKEVTQNDGTTTIANNLTSTVQVFTDSEYQLPYVLGSAHQGCLPPFPADVFMVPQYGYLTLNNGSQAVGRSSFYCLEYFPSQMLRTGNNFTFSYTFEDVPFHSSYAHSQSLDRLMNPLIDQYLYYLTKTQSNSGTLQQSRLLFSQAGPTSMSLQAKNWLPGPCYRQQRLSKQANDNNNSNFPWTAATKYHLNGRDSLVNPGPAMASHKDDEEKFFPMHGTLIFGKQGTNANDADLDNVMITDEEEIRTTNPVATEQYGTVSNNLQNSNTGPTTGTVDHQGALPGMVWQDRDVYLQGPIWAKIPHTDGHFHPSPLMGGFGLKHPPPQIMIKNTPVPANPPTNFSSAKFASFITQYSTGQVSVEIEWELQKENSKRWNPEIQYTSNYNKSVNVDFTVDTNGVYSEPRPIGTRYLTRNL

SEQ ID NO: 2902 - protein, 735 aa, Artificial Sequence
  source: /note="Description of Artificial Sequence: Synthetic polypeptide"
MAADGYLPDWLEDILSEGIRQWWKLKPGPPPPKPAERHKDDSRGLVLPGYKYLGPFNGLDKGEPVNEADAAALEHDKAYDRQLDSGDNPYLKYNHADAEFQERLKEDTSFGGNLGRAVFQAKKRVLEPLGLVEEPVKTAPGKKRPVEQSPAEPDSSSGTGKAGNQPARKRLNFGQTGDADSVPDPQPLGQPPAAPSGLGSTTMATGSGAPMADNNEGADGVGNSSGNWHCDSQWLGDRVITTSTRTWALPTYNNHLYKQISSQSGASNDNHYFGYSTPWGYFDFNRFHCHFSPRDWQRLINNNWGFRPKRLNFKLFNIQVKEVTQNDGTTTIANNLTSTVQVFTDSEYQLPYVLGSAHQGCLPPFPADVFMVPQYGYLTLNNGSQAVGRSSFYCLEYFPSQMLRTGNNFTFSYTFEDVPFHSSYAHSQSLDRLMNPLIDQYLYYLNKTQSNSGTLQQSRLLLSQAGPTSMSLQAKNWLPGPCYRQQRLSKQANDNNNSNFPWTAATKYHLNGRDSLVNPGPAMASHKDDEEKFFPMHGTLIFGKQGTNANDADLDNVMITDEEEIRTTNPVATEQYGTVSNNLQNSNTGPTTGTVNHQGALPGMVWQDRDVYLQGPIWAKIPHTDGHFHPSPLMGGFGLKHPPPQIMIKNTPVPANPPTNFSSAKFASFITQYSTGQVSVEIEWELQKENSKRWNPEIQYTSNYNKSVNVDFTVDTNGVYSEPRPIGTRYLTRNL

SEQ ID NO: 2903 - protein, 735 aa, Artificial Sequence
  source: /note="Description of Artificial Sequence: Synthetic polypeptide"
MAADGYLPDWLEDTLSEGIRQWWKLKPGPPPPKPAERHKDDSRGLVLPGYKYLGPFNGLDKGEPVNEADAAALEHDKAYDRQLDSGDNPYLKYNHADAEFQERLKEDTSFGGNLGRAVFQAKKRVLEPLGLVEEPVKTAPGKKRPVEHSPVEPDSSSGTGKAGQQPARKRLNFGQTGDADSVPDPQPLGQPPAAPTSLGSTTMATGSGAPMADNNEGADGVDNSSGNWHCDSQWSGDRVITTSTRTWALPTYNNHLYKQISSQSGASNDNHYFGYSTPWGYFDFNRFHCHFSPRDWQRLINNNWGFRPKRLNFKLFNIQVKEVTQNDGTTTIANNLTSTVQVSTDSEYQLPYVLGSAHQGCLPPFPADVFMVPQYGYLTLNNGSQAVGRSSFYCLEYFPSQMLRTGNNFTFSYTFEDVPFHSSYAHSQSLDRLMNPLIDQYLYYLNKTQSNSGTLQQSRLLFSQAGPTSMSLQAKNWLPGPCYRQQRLSKQANDNNNSNFPWTAATKYHLNGRDSLVNPGPAMASHKDDEEKFFPMHGTLIFGKQGTNANDADLDNVMITDEEEIRTTNPVATEQYGTVSNNLQNSNTGPTTGTVNHQGALPGMVWQDRDVYLQGPIWAKIPHTDGHFHPSPLMGGFGLKHPPPQIMIKNTPVPANPPTNFSSAKFASFITQYSTGQVSVEIEWELQKENSKRWNPEIQYTSNYNKSVNVDFTVDTNGVYSEPRPIGTRYLTRNL

SEQ ID NO: 2904 - protein, 735 aa, Artificial Sequence
  source: /note="Description of Artificial Sequence: Synthetic polypeptide"
MAADGYLPDWLEDTLSEGIRQWWKLKPGPPPPKPAERHKDDSRGLVLPGYKYLGPFNGLDKGEPVNEADAAALEHDKAYDRQLDSGDNPYLKYNHADAEFQERLKEDTSFGGNLGRAVFQAKKRVLEPLGLVEEPVKTAPGKKRPVEHSPVEPDSSSGTGKAGQQPARKRLNFGQTGDADSVPDPQPLGQPPAAPTSLGSTTMATGSGAPMADNNEGADGVGNSSGNWHCDSQWSGDRVITTSTRTWALPTYNNHLYKQISSQSGASNDNHYFGYSTPWGYFDFNRFHCHFSPRDWQRLINNNWGFRPKRLNFKLFNIQVKEVTQNDGTTTIANNLTSTVQVFTDSEYQLPYVLGSAHQGCLPPFPADVFMVPQYGYLTLNNGSQAVGRSSFYCLEYFPSQMLRTGNNFTFSYTFEDVPFHSSYAHSQSLDRLMNPLIDQYLYYLNKTQSNSGTLQQSRLLFSQAGPTSMSLQAKNWLPGPCCRQQRLSKQANDNNNSNFPWTAATKYHLNGRDSLVNPGPAMASHKDDEEKFFPMHGTLIFGKQGTNANDADLDNVMITDEEEIRTTNPVATEQYGTVSNNLQNSNTGPTTGTVNHQGALPGMVWQDRDVYLQGPIWAKIPHTDGHFHPSPLMGGFGLKHPPPQIMIKNTPVPANPPTNFSSAKFASFITQYSTGQVSVEIEWELQKENSKRWNPEIQYTSNYNKSVNVDFTVDTNGVYSEPRPIGTRYLTRNL

SEQ ID NO: 2905 - protein, 735 aa, Artificial Sequence
  source: /note="Description of Artificial Sequence: Synthetic polypeptide"
MAADGYLPDWLEDILSEGIRQWWKLKPGPPPPKPAERHKDDSRGLVLPGYKYLGPFNGLDKGEPVNEADAAALEHDKAYDRQLDSGDNPYLKYNHADAEFQERLKEDTSFGGNLGRAVFQAKKRVLEPLGLVEEPVKTAPGKKRPVEQSPAEPDSSSGTGKAGNQPARKRLNFGQTGDADSVPDPQPLGQPPAAPSGLGSTTMATGSGAPMADNNEGADGVGNSSGNWHCDSQWLGDRVITTSTRTWALPTYNNHLYKQISSQSGASNDNHYFGYSTPWGYFDFNRFHCHFSPRDWQRLINNNWGFRPKRLNFKLFNIQVKEVTQNDGTTTIANNLTSTVQVFTDSEYQLPYVLGSAHQGCLPPFPADVFMVPQYGYLTLNNGSQAVGRSSFYCLEYFPSQMLRTGNNFTFSYTFEDVPFHSSYAHSQSLDRLMNPLIDQYLYYLNKTQSNSGTLQQSRLLFSQAGPTSMSLQAKNWLPGPCYRQQRLSKQANDNNNSNFPWTAATKYHLNGRDSLVNPGPAMASHKDDEEKFFPMHGTLIFGKQGTNANDADLDNVMITDEEEIRTTNPVATEQYGTVSNNLQNSNTGPTTGTVNHQGALPGMVWQDRDVYLQGPIWAKIPHTDGHFHPSPLMGGFGLKHPPPQIMIKNTPVPANPPTNFSSAKFASFITQYSTGQVSVEIERELQKENSKRWNPEIQYTSNYNKSVNVDFTVDTNGVYSEPRPIGTRYLTRNL

SEQ ID NO: 2906 - protein, 735 aa, Artificial Sequence
  source: /note="Description of Artificial Sequence: Synthetic polypeptide"
MAADGYLPDWLEDILSEGVRQWWKLKPGPPPPKPAERHKDDSRGLVLPGYKYLGPFNGLDKGEPVNEADAAALEHDKAYDRQLDSGDNPYLKYNHADAEFQERLKEDTSFGGNLGRAVFQAKKRVLEPLGLVEEPVKTAPGKKRPVEQSPAEPDSSSGTGKAGNQPARKRLNFGQTGDADSVPDPQPLGQPPAAPSGLGSTTMATGSGAPMADNNEGADGVGNSSGNWHCDSQWLGDRVITTSTRTWALPTYNNHLYKQISSQSGASNDNHYFGYSTPWGYFDFNRFHCHFSPRDWQRLINNNWGFRPKRLNFKLFNIQVKEVTQNDGTTTIANNLTSTVQVFTDSEYQLPYVLGSAHQGCLPPFPADVFMVPQYGYLTLNNGSQAVGRSSFYCLEYFPSQMLRTGNNFTFSYTFEDVPFHSSYAHSQSLDRLMNPLIDQYLYYLNKTQSNSGTLQQSRLLFSQAGPTSMSLQAKNWLPGPCYRQQRLSKQANDNNNSNFPWTAATKYHLNGRDSLVNPGPAMASHKDDEEKFFPMHGTLIFGKQGTNANDADLDNVMITDEEEIRTTNPVATEQYGTVSNNLQNSNTGPTTGTVNHQGALPGMVWQDRDVYLQGPIWAKIPHTDGHFHPSPLMGGFGLKHPPPQIMIKNTPVPANPPTNFSSAKFASFITQYSTGQVSVEIEWELQKENSKRWNPEIQYTSNYNKSVNVDFTVDTNGVYSEPRPIGTRYLTRNL

SEQ ID NO: 2907 - protein, 735 aa, Artificial Sequence
  source: /note="Description of Artificial Sequence: Synthetic polypeptide"
MAADGYLPDWLEDTLSEGIRQWWKLKPGPPPPKPAERHKDDSRGLVLPGYKYLGPFNGLDKGEPVNEADAAALEHDKAYDRQLDSGDNPYLKYNHADAEFQERLKEDTSFGGNLGRAVFQAKKRVLEPLGLVEEPVKTAPGKKRPVEHSPVEPDSSSGTGKAGQQPARKRLNFGQTGDADSVPDPQPLGQPPAAPTSLGSTTMATGSGAPMADNNEGADGVGNSSGNWHCDSQWSGDRVITTSTRTWALPTYNNHLYKQISSQSGASNDNHYFGYSTPWGYFDFNRFHCHFSPRDWQRLINNNWGFRPKRLNFKLFNIQVKEVTQNDGTTTIANNLTSTVQVSTDSEYQLPYVLGSAHQGCLPPFPADVFMVPQYGYLTLNNGSQAVGRSSFYCLEYFPSQMLRTGNNFTFSYTFEDVPFHSSYAHSQSLDRLMNPLIDQYLYYLNKTQSNSGTLQQSRLLFSQAGPTSMSLQAKNWLPGPCYRQQRLSKQANDNNNSNFPWTAATKYHLNGRDSLVNPGPAMASHKDDEEKFFPMHGTLIFGKQGTNANDADLDNVMITDEEEIRTTNPVATEQYGTVSNNLQNSNTGPTTGTVNHQGALPGMVWQDRDVYLQGPIWAKIPHTDGHFHPSPLMGGFGLKHPPPQIMIKNTPVPANPPTNFSSAKFASFITQYSTGQVSVEIEWELQKENSKRWNPEIQYTSNYNKSVNVDFTVDTNGVYSEPRPIGTRYLTRNL

SEQ ID NO: 2908 - protein, 735 aa, Artificial Sequence
  source: /note="Description of Artificial Sequence: Synthetic polypeptide"
MAADGYLPDWLEDILSEGIRQWWKLKPGPPPPKPAERHKDDSRGLVLPGYKYLGPFNGLDKGEPVNEADAAALEHDKAYDRQLDSGDNPYLKYNHADAEFQERLKEDTSFGGNLGRAVFQAKKRVLEPLGLVEEPVKTAPGKKRPVEQSPAEPDSSSGTGKAGNQPARKRLNFGQTGDADSVPDPQPLGQPPAAPSGLGSTTMATGSGAPMADNNEGADGVGNSSGNWHCDSQWLGDRVITTSTRTWALPTYNNHLYKQISSQSGASNDNHYFGYSTPWGYFDFNRFHCHFSPRDWQRLINNNWGFRPKRLNFKLFNIQVKEVTQNDGTTTIANNLTSTVQVFTDSEYQLPYVLGSAHQGCLPPFPADVFMVPQYGYLTLNNGSQAVGRSSFYCLEYFPSQMLRTGNNFTFSYTFEDVPFHSSYAHSQSLDRLMNPLIDQYLYYLNKTQSNSGTLQQSRLLFSQAGPTSMSLQAKNWLPGPCYRQQRLSKQANDNNNSNFPWTAATKYHLNGRDSLVNPGPAMASHKDDEEKFFPMHGTLIFGKQGTNANDADLDNVMITDEEEIRTTNPVATEQYGTVSNNLQNSNTGPTTGTVNHQGALPGMVWQDRDVYLQGPIWAKIPHTDGHFHPSPLMGGFGLKHPPPQIMIKNTPVPVNPPTNFSSAKFASFITQYSTGQVSVEIEWELQKENSKRWNPEIQYTSNYNKSVNVDFTVDTNGVYSEPRPIGTRYLTRNL

SEQ ID NO: 2909 - protein, 735 aa, Artificial Sequence
  source: /note="Description of Artificial Sequence: Synthetic polypeptide"
MAADGYLPDWLEDTLSEGIRQWWKLKPGPPPPKPAERHKDDSRGLVLPGYKYLGPFNGLDKGEPVNEADAAALEHDKAYDRQLDSGDNPYLKYNHADAEFQERLKEDTSFGGNLARAVFQAKKRVLEPLGLVEEPVKTAPGKKRPVEHSPAEPDSSSGTGKSGQQPARKRLNFGQTGDADSVPDPQPLGQPPAAPSGLGSTTMATGSGAPMADNNEGADGVGNSSGNWHCDSQWLGDRVITTSTRTWALPTYNNHLYKQISSQSGASNDNHYFGYSTPWGYFDFNRFHCHFSPRDWQRLINNNWGFRPKRLNFKLFNIQVKEVTQNDGTTTIANNLTSTVQVFTDSEYQLPYVLGSAHQGCLPPFPADVFMVPQYGYLTLNNGSQAVGRSSFYCLEYFPSQMLRTGNNFTFSYTFEDVPFHSSYAHSQSLDRLMNPLIDQYLYYLNKTQSNSGTLQQSRLLFSQAGPTSMSLQAKNWLPGPCYRQQRLSKQANDNNNSNFPWTAATKYHLNGRDSLVNPGPAMASHKDDEEKFFPMHGTLIFGKQGTNANDADLDNVMITDEEEIRTTNPVATEQYGTVSNNLQNSNTGPTTGTVNHQGALPGMVWQDRDVYLQGPIWAKIPHTDGHFHPSPLMGGFGLKHPPPQIMIKNTPVPANPPTNFSSAKFASFITQYSTGQVSVEIEWELQKENSKRWNPEIQYTSNYNKSVNVDFTVDTNGVYSEPRPIGTRYLTRNL

SEQ ID NO: 2910 - protein, 735 aa, Artificial Sequence
  source: /note="Description of Artificial Sequence: Synthetic polypeptide"
MAADGYLPDWLEDILSEGIRQWWKLKPGPPPPKPAERHKDDSRGLVLPGYKYLGPFNGLDKGEPVNEADAAALEHDKAYDRQLDSGDNPYLKYNHADAEFQERLKEDTSFGGNLGRAVFQAKKRVLEPLGLVEEPVKTAPGKKRPVEQSPAEPDSSSGTGKAGNQPARKRLNFGQTGDADSVPDPQPLGQPPAAPSGLGSTTMATGSGAPMADNNEGADGVGNSSGNWHCDSQWLGDRVITTSTRTWALPTYNNHLYKQISSQSGASNDNHYFGYSTPWGYFDFNRFHCHFSPRDWQRLINNNWGFRPKRLNFKLFNIQVKEVTQNDGTTTIANNLTSTVQVFTDSEYQLPYVLGSAHQGCLPPFPADVFMVPQYGYLTLNNGSQAVGRSSFYCLEYFPSQMLRTGNNFTFSYTFEDVPFHSSYAHSQSLDRLMNPLIDQYLYYLNKTQSNSGTLQQSRLLFSQAGPTSMSLQAKNWLPGPCYRQQRLSKQANDNNNSNFPWTAATKYHLNGRDSLVNPGPAMASHKDDEEKFFPMHGTLIFGKQGTNANDADLDNVMITDEEEIRTTNPVATEQYGTVSNNLQNSNTGPTTGTVNHQGALPGMVWQDRDVYLQGPIWAKIPHTDGHFHPSPLMGGFGLKHPPPQIMIKNTPVPANPPTNFSSAKFASFITQYSTGQVSVGIEWELQKENSKRWNPEIQYTSNYNKSVNVDFTVDTNGVYSEPRPIGTRYLTRNL

SEQ ID NO: 2911 - protein, 734 aa, Artificial Sequence
  source: /note="Description of Artificial Sequence: Synthetic polypeptide"
MAADGYLPDWLEDILSEGIRQWWKLKPGPPPPKPAERHKDDSRGLVLPGYKYLGPFNGLDKGEPVNEADAAALEHDKAYDRQLDSGDNPYLKYNHADAEFQERLKEDTSFGGNLGRAVFQAKKRVLEPLGLVEEPVKTAPGKKRPVEQSPAEPDSSSGTGKAGNQPARKRLNFGQTGDADSVPDPQPLGQPPAAPSGLGSTTMATGSGAPMADNNEGADGVGNSSGNWHCDSQWLGDRVITTSTRTWALPTYNNHLYKQISSQSGASNDNHYFGYSTPWGYFDFNRFHCHFSPRDWQRLINNNWGFRPKRLNFKLFNIQVKEVTQNDGTTTIANNLTSTVQVFTDSEYQLPYVLGSAHQGCLPPFPADVFMVPQYGYLTLNNGSQAVGRSSFYCLEYFPSQMLRTGNNFTFSYTFEDVPFHSSYAHSQSLDRLMNPLIDQYLYYLNKTQSNSGTLQQSRLLFSQAGPTSMSLQAKNWLPGPCYRQQRLSKQANDNNSNFPWTAATKYHLNGRDSLVNPGPAMASHKDDEEKFFPMHGTLIFGKQGTNANDADLDNVMITDEEEIRTTNPVATEQYGTVSNNLQNSNTGPTTGTVNHQGALPGMVWQDRDVYLQGPIWAKIPHTDGHFHPSPLMGGFGLKHPPPQIMIKNTPVPANPPTNFSSAKFASFITQYSTGQVSVEIEWELQKENSKRWNPEIQYTSNYNKSVNVDFTVDTNGVYSEPRPIGTRYLTRNL

SEQ ID NO: 2912 - protein, 735 aa, Artificial Sequence
  source: /note="Description of Artificial Sequence: Synthetic polypeptide"
MAADGYLPDWLEDTLSEGIRQWWKLKPGPPPPKPAERHKDDSRGLVLPGYKYLGPFNGLDKGEPVNEADAAALEHDKAYDRQLDSGDNPYLKYNHADAEFQERLKEDTSFGGNLGRAVFQAKKRVLEPLGLVVEPVKTAPGKKRPVEHSPVEPDSSSGTGKAGQQPARKRLNFDQTGGADSVPDPQPLGQPPAAPTSLGSTTMATGSGAPMADNNEGADGVGNSSGNWHCDSQWSGDRVITTSTRTWALPTYNNHLYKQISSRSGASNDNHYFGYSTPWGYFDFNGFHCHFSPRDWQRLINNNWGFRPKRLNFKLFNIQVKEVTQNDGTTTIANNLTSTVQVFTDSEYQLPHVLGSAHQGCLPPFPADVFMVPQYGYLTLNNGSQAVGRSSFYCPGYFPSQMLRTGNNFTFSYTFEDVPFHSSYAHSQSLDRLMNPLIDQYLYYLNKTQSNSGTLQQSRLLFSQAGPTSMSLQAKNWLPGPCYRQQRLSKQANGNNNSNFPWTAATKYHLNGRDSLVNPGPAMASHKDDEEKFFPMHGTLIFGKQGTNANDADLDNVMITDEEEIRTTNPVATEQYGTVSNNLQNSNTGPTTGTVNHQGALPGMVWQDRDVYLQGPIWAKIPHTDGHFHPSPLMGGFGLKHPPPQIMIKNTPVPANPPTNFSSAKFASFITQYSTGQVSVEIEWELQKENSKRWNPEIQYTSNYNKSVNVDFTVDTNGVYSEPRPIGTRYLTRNL

SEQ ID NO: 2913 - protein, 734 aa, Artificial Sequence
  source: /note="Description of Artificial Sequence: Synthetic polypeptide"
MAADGYLPDWLEDTLSEGIRQWWKLKPGPPPPKPAERHKDDSRGLVLPGYKYLGPFNGLDKGEPVNEADAAALEHDKAYDRQLDSGDNPYLKYNHADAEFQERLKEDTSFGGNLGRAVFQAKKRVLEPLGLVEEPVKTAPGKKRPVEHSPVEPDSSSGTGKAGQQPARKRLNFGQTGDADSVPDPQPLGQPPAAPTSLGSTTMATGSGAPMADNNEGADGVGNSSGNWHCDSQWSGDRVITTSTRTWALPTYNNHLYKQISSQSGASNDNHYFGYSTPWGYFDFNRFHCHFSPRDWQRLINNNWGFRPKRLNFKLFNIQVKEVTQNDGTTTIANNLTSTVQVFTDSEYQLPYVLGSAHQGCLPPFPADVFMVPQYGYLTLNNGSQAVGRSSFYCLEYFPSQMLRTGNNFTFSYTFEDVPFHSSYAHSQSLDRLMNPLIDQYLYYLNKTQSNSGTLQQSRLLFSQAGPTSMSLQAKNWLPGPCYRQQRLSKQANDNNSNFPWTAATKYHLNGRDSLVNPGPAMASHKDDEEKFFPMHGTLIFGKQGTNANDADLDNVMITDEEEIRTTNPVATEQYGTVSNNLQNSNTGPTTGTVNHQGALPGMVWQDRDVYLQGPIWAKIPHTDGHFHPSPLMGGFGLKHPPPQIMIKNTPVPANPPTNFSSAKFASFITQYSTGQVSVEIEWELQKENSKRWNPEIQYTSNYNKSVNVDFTVDTNGVYSEPRPIGTRYLTRNL

SEQ ID NO: 2914 - protein, 735 aa, Artificial Sequence
  source: /note="Description of Artificial Sequence: Synthetic polypeptide"
MAADGYLPDWLEDILSEGIRQWWKLKPGPPPPKPAERHKDDSRGLVLPGYKYLGPFNGLDKGEPVNEADAAALEHDKAYDRQLDSGDNPYLKYNHADAEFQERLKEDTSFGGNLGRAVFQAKKRVLEPLGLVEEPVKTAPGKKRPVEQSPAEPDSSSGTGKAGNQPARKRLNFGQTGDADSVPDPQPLGQPPAAPSGLGSTTMATGSGAPMADNNEGADGVGNSSGNWHCDSQWLGDRVITTSTRTWALPTYNNHLYKQISSQSGASNDNHYFGYSTPWGYFDFNRFHCHFSPRDWQRLINNNWGFRPKRLNFKLFNIQVKEVTQNDGTTTIANNLTSTVQVFTDSEYQLPYVLGSAHQGCLPPFPADVFMVPQYGYLTLNNGSQAVGRSSFYCLEYFPSQMLRTGNNFTFSYTFEDVPFHSSYAHSQSLDRLMNPLIDQYLYYLNKTQSNSGTLQQSRLLFSQAGPTSMSLQAKNWLPGPCYRQQRLSKQANDNNNSNFPWTAATKYHLNGRDSLVNPGPAMASHKDDEEKFFPMHGTLIFGKQGTNANDADLDNVMITDEEEIRTTNPVATEQYGTVSNNLQNSNTGPTTGTVNHQGALPGMVWQDRDVYLQGPIWAKIPHTDGHFHPSPLMGGFGLKHPPPQIMIKNTPVPANPPTNFSSAKFASFITQYSTGQVSVGIEWVLQKENSKRWNPEIQYTSNYNKSVNVDFTVDTNGVYSEPRPIGTRYLTRNL

SEQ ID NO: 2915 - protein, 735 aa, Artificial Sequence
  source: /note="Description of Artificial Sequence: Synthetic polypeptide"
MAADGYLPDWLEDTLSEGIRQWWKLKPGPPPPKPAERHKDDSRGLVLPGYKYLGPFNGLDKGEPVNEADAAALEHDKAYDRQLDSGDNPYLKYNHADAEFQERLKEDTSFGGNLARAVFQAKKRVLEPLGLVEEPVKTAPGKKRPVEQSPAEPDSSSGTGKAGNQPARKRLNFGQTGDADSVPDPQPLGQPPAAPSGLGSTTMATGSGAPMADNNEGADGVGNSSGNWHCDSQWLGDRVITTSTRTWALPTYNNHLYKQISSQSGASNDNHYFGYSTPWGYFDFNRFHCHFSPRDWQRLINNNWGFRPKRLNFKLFNIQVKEVTQNDGTTTIANNLTSTVQVFTDSEYQLPYVLGSAHQGCLPPFPADVFMVPQYGYLTLNNGSQAVGRSSFYCLEYFPSQMLRTGNNFTFSYTFEDVPFHSSYAHSQSLDRLMNPLIDQYLYYLNKTQSNSGTLQQSRLLFSQAGPTSMSLQAKNWLPGPCYRQQRLSKQANDNNNSNFPWTAATKYHLNGRDSLVNPGPAMASHKDDEEKFFPMHGTLIFGKQGTNANDADLDNVMITDEEEIRTTNPVATEQYGTVSNNLQNSNTGPTTGTVNHQGALPGMVWQDRDVYLQGPIWAKIPHTDGHFHPSPLMGGFGLKHPPPQIMIKNTPVPANPPTNFSSAKFASFITQYSTGQVSVEIEWELQKENSKRWNPEIQYTSNYNKSVNVDFTVDTNGVYSEPRPIGTRYLTRNL

SEQ ID NO: 2916 - protein, 735 aa, Artificial Sequence
  source: /note="Description of Artificial Sequence: Synthetic polypeptide"
MAADGYLPDWLEDILSEGIRQWWKLKPGPPPPKPAERHKDDSRGLVLPGYKYLGPFNGLDKGEPVNEADAAALEHDKAYDRQLDSGDNPYLKYNHADAEFQERLKEDTSFGGNLGRAVFQAKKRVLEPLGLVEEPVKTAPGKKRPVEQSPAEPDSSSGAGKAGNQPARKRLNFGQTGDADSVPDPQPLGQPPAAPSGLGSTTMATGSGAPMADNNEGADGVGNSSGNWHCDSQWLGDRVITTSTRTWALPTYNNHLYKQISSQSGASNDNHYFGYSTPWGYFDFNRFHCHFSPRDWQRLINNNWGFRPKRLNFKLFNIQVKEVTQNDGTTTIANNLTSTVQVFTDSEYQLPYVLGSAHQGCLPPFPADVFMVPQYGYLTLNNGSQAVGRSSFYCLEYFPSQMLRTGNNFTFSYTFEDVPFHSSYAHSQSLDRLMNPLIDQYLYYLNKTQSNSGTLQQSRLLFSQAGPTSMSLQAKNWLPGPCYRQQRLSKQANDNNNSNFPWTAATKYHLNGRDSLVNPGPAMASHKDDEEKFFPMHGTLIFGKQGTNANDADLDNVMITDEEEIRTTNPVATEQYGTVSNNLQNSNTGPTTGTVNHQGALPGMVWQDRDVYLQGPIWAKIPHTDGHFHPSPLMGGFGLKHPPPQIMIKNTPVPANPPTNFSSAKFASFITQYSTGQVSVEIEWELQKENSKRWNPEIQYTSNYNKSVNVDFTVDTNGVYSEPRPIGTRYLTRNL

SEQ ID NO: 2917 - protein, 735 aa, Artificial Sequence
  source: /note="Description of Artificial Sequence: Synthetic polypeptide"
MAADGYLPDWLKDILSEGIRQWWKLKPGPPPPKPAERHKDDSRGLVLPGYKYLGPFNGLDKGEPVNEADAAALEHDKAYDRQLDSGDNPYLKYNHADAEFQERLKEDTSFGGNLGRAVFQAKKRVLEPLGLVEEPVKTAPGKKRPVEQSPAEPDSSSGTGKAGNQPARKRLNFGQTGDADSVPDPQPLGQPPAAPSGLGSTTMATGSGAPMADNNEGADGVGNSSGNWHRDSQWLGDRVITTSTRTWALPTYNNHLYKQISSQSGASNDNHYFGYSTPWGYFDFNRFHCHFSPRDWQRLINNNWGFRPKRLNFKLFNIQVKEVTQNDGTTTIANNLTSTVQVFTDSEYQLPYVLGSAHQGCLPPFPADVFMVPQYGYLTLNNGSQAVGRSSFYCLEYFPSQMLRTGNNFTFSYTFEDVPFHSSYAHSQSLDRLMNPLIDQYLYYLNKTQSNSGTLQQSRLLFSQAGPTSMSLQAKNWLPGPCYRQQRLSKQANDNNNSNFPWTAATKYHLNGRDSLVNPGPAMASHKDDEEKFFPMHGTLIFGKQGTNANDADLDNVMITDEEEIRTTNPVATEQYGTVSNNLQNSNTGPTTGTVNHQGALPGMVWQDRDVYLQGPIWAKIPHTDGHFHPSPLMGGFGLKHPPPQIMIKNTPVPVNPPTNFSSAKFASFITQYSTGQVSVEIEWELQKENSKRWNPEIQYTSNYNKSVNVDFTVDTNGVYSEPRPIGTRYLTRNL

SEQ ID NO: 2918 - protein, 735 aa, Artificial Sequence
  source: /note="Description of Artificial Sequence: Synthetic polypeptide"
MAADGYLPDWLEDILSEGIRRWWKLKPGPPPPKPAERHKDDSRGLVLPGYKYLGPFNGLDKGEPVNEADAAALEHDKAYDRQLDSGDNPYLKYNHADAEFQERLKEDTSFGGNLGRAVFQAKKRVLEPLGLVEEPVKTAPGKKRPVEQSPAEPDSSSGTGKAGNQPARKRLNFGQTGDADSVPDPQPLGQPPAAPSGLGSTTMATGSGAPMADNNEGADGVGNSSGNWHCDSQWLGDRVITTSTRTWALPTYNNHLYKQISSQSGASNDNHYFGYSTPWGYFDFNRFHCHFSPRDWQRLINNNWGFRPKRLNFKLFNIQVKEVTQNDGTTTIANNLTSTVQVFTDSEYQLPYVLGSAHQGCLPPFPADVFMVPQYGYLTLNNGSQAVGRSSFYCLEYFPSQMLRTGNNFTFSYTFEDVPFHSSYAHSQSLDRLMNPLIDQYLYYLNKTQSNSGTLQQSRLLFSQAGPTSMSLQAKNWLPGPCYRQQRLSKQANDNNNSNFPWTAATKYHLNGRDSLVNPGPAMASHKDDEEKFFPMHGTLIFGKQGTNANDADLDNVMITDEEEIRTTNPVATERYGTVSNNLQNSNTGPTTGTVNHQGALPGMVWQDRDVYLQGPIWAKIPHTDGHFHPSPLMGGFGLKHPPPQIMIKNTPVPANPPTNFSSAKFASFITQYSTGQVSVEIEWELQKENSKRWNPEIQYTSNYNKSVNVDFTVDTNGVYSEPRPIGTRYLTRNL

SEQ ID NO: 2919 - protein, 735 aa, Artificial Sequence
  source: /note="Description of Artificial Sequence: Synthetic polypeptide"
MAADGYLPDWLEDTLSEGIRQWWKLKPGPPPPKPAERHKDDSRGLVLPGYKYLGPFNGLDKGEPVNEADAAALEHDKAYDRQLDSGDNPYLKYNHADAEFQERLKEDTSFGGNLARAVFQAKKRVLEPLGLVEEPVKTAPGKKRPVEHSPAEPDSSSGTGKSGQQPARKRLNFGQTGDADSVPDPQPLGQPPAAPSGLGTNTMASGSGAPMADNNEGADGVGNSSGNWHCDSQWLGDRVITTSTRTWALPTYNNHLYKQISSQSGASNDNHYFGYSTPWGYFDFNRFHCHFSPRDWQRLINNNWGFRPKRLNFKLFNIQVKEVTQNDGTTTIANNLTSTVQVFTDSEYQLPYVLGSAHQGCLPPFPADVFMVPQYGYLTLNNGSQAVGRSSFYCLEYFPSQMLRTGNNFTFSYTFEDVPFHSSYAHSQSLDRLMNPLIDQYLYYLNKTQSNSGTLQQSRLLFSQAGPTSMSLQAKNWLPGPCYRQQRLSKQANDNNNSNFPWTAATKYHLNGRDSLVNPGPAMASHKDDEEKFFPMHGTLIFGKQGTNANDADLDNVMITDEEEIRTTNPVATEQYGTVSNNLQNSNTGPTTGTVNHQGALPGMVWQDRDVYLQGPIWAKIPHTDGHFHPSPLMGGFGLKHPPPQIMIKNTPVPANPPTNFSSAKFASFITQYSTGQVSVEIEWELQKENSKRWNPEIQYTSNYNKSVNVDFTVDTNGVYSEPRPIGTRYLTRNL

SEQ ID NO: 2920 - protein, 735 aa, Artificial Sequence
  source: /note="Description of Artificial Sequence: Synthetic polypeptide"
MAADGYLPDWLEDTLSEGIRQWWKLKPGPPPPKPAERHKDDSRGLVLPGYKYLGPFNGLDKGEPVNEADAAALEHDKAYDRQLDSGDNPYLKYNHADAEFQERLKEDTSFGGNLARAVFQAKKRVLEPLGLVEEPVKTAPGKKRPVEHSPAEPDSSSGTGKSGQQPARKRLNFGQTGDADSVPDPQPLGQPPAAPSGLGTNTMASGSGAPMADNNEGADGVGNSSGNWHCDSTWMGDRVITTSTRTWALPTYNNHLYKQISSQSGASNDNHYFGYSTPLGYFDFNRFHCHFSPRDWQRLINNNWGFRPKRLNFKLFNIQVKEVTQNDGTTTIANNLTSTVQVFTDSEYQLPYVLGSAHQGCLPPFPADVFMVPQYGYLTLNNGSQAVGRSSFYCLEYFPSQMLRTGNNFTFSYTFEDVPFHSSYAHSQSLDRLMNPLIDQYLYYLNKTQSNSGTLQQSRLLFSQAGPTSMSLQAKNWLPGPCYRQQRLSKQANDNNNSNFPWTAATKYHLNGRDSLVNPGPAMASHKDDEEKFFPMHGTLIFGKQGTNANDADLDNVMITDEEEIRTTNPVATEQYGTVSNNLQNSNTGPTTGTVNHQGALPGMVWQDRDVYLQGPIWAKIPHTDGHFHPSPLMGGFGLKHPPPQIMIKNTPVPANPPTNFSSAKFASFITQYSTGQVSVEIEWELQKENSKRWNPEIQYTSNYNKSVNVDFTVDTNGVYSEPRPIGTRYLTRNL

SEQ ID NO: 2921 - protein, 735 aa, Artificial Sequence
  source: /note="Description of Artificial Sequence: Synthetic polypeptide"
MAADGYLPDWLEDTLSEGIRQWWKLKPGPPPPKPAERHKDDSRGLVLPGYKYLGPFNGLDKGEPVNEADAAALEHDKAYDRQLDSGDNPYLKYNHADAEFQERLKEDTSFGGNLARAVFQAKKRVLEPLGLVEEPVKTAPGKKRPVEHSPAEPDSSSGTGKSGQQPARKRLNFGQTGDADSVPDPQPLGQPPAAPSGLGTNTMASGSGAPMADNNEGADGVGNSSGNWHCDSTWMGDRVITTSTRTWALPTYNNHLYKQISSQSGASNDNHYFGYSTPWGYFDFNRFHCHFSPRDWQRLINNNWGFRPKRLNFKLFNIQVKEVTQNDGTTTIANNLTSTVQVFTDSEYQLPYVLGSAHQGCLPPFPADVFMVPQYGYLTLNNGSQAVGRSSFYCLEYFPSQMLRTGNNFTFSYTFEDVPFHSSYAHSQSLDRLMNPLIDQYLYYLNKTQSNSGTLQQSRLLFSQAGPTSMSLQAKNWLPGPCYRQQRLSKQANDNNNSNFPWTAATKYHLNGRDSLVNPGPAMASHKDDEEKFFPMHGTLIFGKQGTNANDADLDNVMITDEEEIRTTNPVATEQYGTVSNNLQNSNTGPTTGTVNHQGALPGMVWQDRDVYLQGPIWAKIPHTDGHFHPSPLMGGFGLKHPPPQIMIKNTPVPANPPTNFSSAKFASFITQYSTGQVSVEIEWELQKENSKRWNPEIQYTSNYNKSVNVDFTVDTNGVYSEPRPIGTRYLTRNL

SEQ ID NO: 2922 - protein, 735 aa, Artificial Sequence
  source: /note="Description of Artificial Sequence: Synthetic polypeptide"
MAADGYLPDWLEDTLSEGIRQWWKLKPGPPPPKPAERHKDDSRGLVLPGYKYLGPFNGLDKGEPVNEADAAALEHDKAYDRQLDSGDNPYLKYNHADAEFQERLKEDTSFGGNLGRAVFQAKKRVLEPLGLVVEPVKTAPGKKRPVEHSPVEPDSSSGTGKAGQQPARKRLNFDQTGDADSVPDPQPLGQPPAAPTSLGSTTMATGSGAPMADNNEGADGVGNSSGNWHCDSQWSGDRVITTSTRTWALPTYNNHLYKQISSRSGASNDNHYFGYSTPWGYFDFNGFHCHFSPRDWQRLINNNWGFRPKRLNFKLFNIQVKEVTQNDGTTTIANNLTSTVQVFTDSEYQLPHVLGSAHQGCLPPFPADVFMVPQYGYLTLNNGSQAVGRSSFYCPGYFPSQMLRTGNNFTFSYTFEDVPFHSSYAHSQSLDRLMNPLIDQYLYYLNKTQSNSGTLQQSRLLFSQAGPTSMSLQAKNWLPGPCYRQQRLSKQANGNNNSNFPWTAATKYHLNGRDSLVNPGPAMASHKDDEEKFFPMHGTLIFGKQGTNANDADLDNVMITDEEEIRTTNPVATEQYGTVSNNLQNSNTGPTTGTVNHQGALPGMVWQDRDVYLQGPIWAKIPHTDGHFHPSPLMGGFGLKHPPPQIMIKNTPVPANPPTNFSSAKFASFITQYSTGQVSVEIEWELQKENSKRWNPEIQYTSNYNKSVNVDFTVDTNGVYSEPRPIGTRYLTRNL

SEQ ID NO: 2923 - protein, 735 aa, Artificial Sequence
  source: /note="Description of Artificial Sequence: Synthetic polypeptide"
MAADGYLPDWLEDILSEGIRQWWKLKPGPPPPKPAERHKDDSRGLVLPGYKYLGPFNGLDKGEPVNEADAAALEHDKAYDRQLDSGDNPYLKYNHADAEFQGRLKEDTSFGGNLGRAVFQAKKRVLEPLGLVEEPVKTAPGKKRPVEQSPAEPDSSSGTGKAGNQPARKRLNFGQTGDADSVPDPQPLGQPPAAPSGLGSTTMATGSGAPMADNNEGADGVGNSSGNWHCDSQWLGDRVITTSTRTWALPTYNNHLYKQISSQSGASNDNHYFGYSTPWGYFDFNRFHCHFSPRDWQRLINNNWGFRPKRLNFKLFNIQVKEVTQNDGTTTIANNLTSTVQVFTDSEYQLPYVLGSAHQGCLPPFPADVFMVPQYGYLTLNNGSQAVGRSSFYCLEYFPSQMLRTGNNFTFSYTFEDVPFHSSYAHSQSLDRLMNPLIDQYLYYLNKTQSNSGTLQQSRLLFSQAGPTSMSLQAKNWLPGPCYRQQRLSKQANDNNNSNFPWTAATKYHLNGRDSLVNPGPAMASHKDDEEKFFPMHGTLIFGKQGTNANDADLDNVMITDEEEIRTTNPVATEQYGTVSNNLQNSNTGPTTGTVNHQGALPGMVWQDRDVYLQGPIWAKIPHTDGHFHPSPLMGGFGLKHPPPQIMIKNTPVPANPPTNFSSAKFASFITQYSTGQVSVEIEWELQKENSKRWNPEIQYTSNYNKSVNVDFTVDTNGVYSEPRPIGTRYLTRNL

SEQ ID NO: 2924 - protein, 735 aa, Artificial Sequence
  source: /note="Description of Artificial Sequence: Synthetic polypeptide"
MAADGYLPDWLEDILSEGIRQWWKLKPGPPPPKPAERHKDDSRGLVLPGYKYLGPFNGLDKGEPVNEADAAALEHDKAYDRQLDSGDNPYLKYNHADAEFQERLKEDTSFGGNLGRAVFQAKKRALEPLGLVEEPVKTAPGKKRPVEQSPAEPDSSSGTGKAGNQPARKRSNFGQTGDADSVPDPQPLGQPPAAPSGLGSTTMATGSGAPMADNNEGADGVGNSSGNWHCDSQWLGDRVITTSTRTWALPTYNNHLYKQISSQSGASNDNHYFGYSTPWGYFDFNRFHCHFSPRDWQRLINNNWGFRPKRLNFKLFNIQVKEVTQNDGTTTIANNLTSTVQVFTDSEYQLPYVLGSAHQGCLPPFPADVFMVPQYGYLTLNNGSQAVGRSSFYCLEYFPSQMLRTGNNFTFSYTFEDVPFHSSYAHSQSLDRLMNPLIGQYLYYLNKTQSNSGTLQQSRLLFSQAGPTSMSLQAKNWLPGPCYRQQRLSKQANDNNNSNFPWTAATKYHLNGRDSLVNPGPAMASHKDDEEKFFPMHGTLIFGKQGTNANDADLDNVMITDEEEIRTTNPVATEQYGTVSNNLQNSNTGPTTGTVNHQGALPGMVWQDRDVYLQGPIWAKIPHTDGHFHPSPLMGGFGLKHPPPQIMIKNTPVPANPPTNFSSAKFASFITQYSTGQVSVEIEWELQKENSKRWNPEIQYTSNYNKSVNVDFTVDTNGVYSEPRPIGTRYLTRNL

SEQ ID NO: 2925 - protein, 738 aa, Artificial Sequence
  source: /note="Description of Artificial Sequence: Synthetic polypeptide"
MAADGYLPDWLEDNLSEGIREWWALKPGAPKPKANQQKQDDGRGLVLPGYKYLGPFNGLDKGEPVNAADAAALEHDKAYDQQLQAGDNPYLRYNHADAEFQERLQEDTSFGGNLGRAVFQAKKRVLEPLGLVEEGAKTAPGKERPVEPSPQRSPDSSTGIGKEGQQPARKRLNFGQTGDSESVPDPQPLGEPPAAPSGVGPNTMAAGGGAPMADNNEGADGVGSSSGNWHCDSTWLGDRVITTSTRTWALPTYNNHLYKQISNGTSGGATNDNTYFGYSTPWGYFDFNRFHCHFSPRDWQRLINNNWGFRPKRLSFKLFNIQVKEVTQNEGTKTTANNLTSTIQVFTDSEYQLPYVLGSAHQGCLPPFPADVFTIPQYGYLTLNNGSQAVGRSSFYCLEYFPSQMLRTGNNFQFTYTFEDVPFHSSYAHSQSLDRLMNPLIDQYLYYLSRIQTTGGTANTQTLGFSQGGPNTMANQAKNWLPGPCYRQQRVSTTTGQNNNSNFAWTAGTKYHLNGRNSLANPGIAMATHKDDEERFFPSNGILIFGKQNAARDNADYSDVMPTSEEEIKTTNPVATEEYGIVADNLQQQNTAPQIGTVNSQGALPGMVWQNRDVYLQGPIWAKIPHTDGNFHPSPLMGGFGLKHPPPQILIKNTPVPADPPTTFNQSKLNSFITQYSTGQVSVEIEWELQKENSKRWNPEIQYTSNYYKSTSVDFAVNTEGVYSEPRPIGTRYLTRNL

SEQ ID NO: 2926 - protein, 738 aa, Artificial Sequence
  source: /note="Description of Artificial Sequence: Synthetic polypeptide"
MAADGYLPDWLEDNLSEGIREWWALKPGAPKPKANQQKQDDGRGLVLPGYKYLGPFNGLDKGEPVNAADAAALEHDKAYDQQLQAGDNPYLRYNHADAEFQERLQEDTSFGGNLGRAVFQAKKRVLEPLGLVEEGAKTAPGKKRPVEPSPQRSPDSSTGIGKGGQQPARKRLNFGQTGDSESVPDPQPLGEPPAAPSGVGPNTMAAGGGAPMADNNEGADGVGSSSGNWHCDSTWLGDRVITTSTRTWALPTYNNHLYKQISNGTSGGATNDNTYFGYSTPWGYFDFNRFHCHFSPRDWQRLINNNWGFRPKRLSFKLFNIQVKEVTQNEGTKTIANNLTSTIQVFTDSEYQLPYVLGSAHQGCLPPFPADVFTIPQYGYLTLNNGSQAVGRSSFYCLEYFPSQMLRTGNNFQFTYTFEDVPFHSSYAHSQSLDRLMNPLIDQYLYYLSRIQTTGGTANTQTLGFSQGGPNTMANQAKNWLPGPCYRQQRVSTTTGQNNNSNFAWTAGTKYHLNGRNSLANPGIAMATHKDDEERFFPSNGILIFGKQNAARDNADYSDVMPTSEEEIKTTNPVATEEYGIVADNLQQQNTAPQIGTVNSQGALPGMVWQNRDVYLQGPIWAKIPHTDGNFHPSPLMGGFGLKHPPPQILIKNTPVPADPPTTFNQSKLNSFITQYSTGQVSVEIEWELQKENSKRWNPEIQYTSNYYKSTSVDFAVNTEGVYSEPRPIGTRYLTRNL

SEQ ID NO: 2927 - protein, 738 aa, Artificial Sequence
  source: /note="Description of Artificial Sequence: Synthetic polypeptide"
MAADGYLPDWLEDNLSEGIREWWALKPGAPKPKANQQKQDDGRGLVLPGYKYLGPFNGLDKGEPVNAADAAALEHDKAYDQQLQAGDNPYLRYNHADAEFQERLQEDTSFGGNLGRAVFQAKKRVLEPLGLVEEGAKTAPGKERPVEPSPQRSPDSSTGIGKKGQQPARKRLNFGQTGDSESVPDPQPLGEPPAAPSGVGPNTMAAGGGAPMADNNEGADGVGSSSGNWHCDSTWLGDRVITTSTRTWALPTYNNHLYKQISNGTSGGATNDNTYFGYSTPWGYFDFNRFHCHFSPRDWQRLINNNWGFRPKRLSFKLFNIQVKEVTQNEGTKTTANNLTSTIQVFTDSEYQLPYVLGSAHQGCLPPFPADVFTIPQYGYLTLNNGSQAVGRSSFYCLEYFPSQMLRTGNNFQFTYTFEDAPFHSSYAHSQSLDRLMNPLIDQYLYYLSRIQTTGGTANTQTLGFSQGGPNTMANQAKNWLPGPCYRQQRVSTTTGQNNNSNFAWTAGTKYHLNGRNSLANPGIAMATHKDDEERFFPSNGILIFGKQNAARDNADYSDVMPTSEEEIKTTNPVATEEYGIVADNLQQQNTAPQIGTVNSQGALPGMVWQNRDVYLQGPIWAKIPHTDGNFHPSPLMGGFGLKHPPPQILIKNTPVPADPPTTFNQSKLNSFITQYSTGQVSVEIEWELQKENSKRWNPEIQYTSNYYKSTSVDFAVNTEGVYSEPRPIGTRYLTRNL

SEQ ID NO: 2928 - protein, 738 aa, Artificial Sequence
  source: /note="Description of Artificial Sequence: Synthetic polypeptide"
MAADGYLPDWLEDNLSEGIREWWALKPGAPKPKANQQKQDDGRGLVLPGYKYLGPFNGLDKGEPVNAADAAALEHDKAYDQQLQAGDNPYLRYNHADAEFQERLQEDTSFGGNLGRAVFQAKKRVLEPLGLVEEGAKTAPGKKRPVEPSPQRSPDSSTGIGKEGQQPARKRLNFGQTGDSESVPDPQPLGEPPAAPSGVGPNTMAAGGGAPMADNNEGADGVGSSSGNWHCDSTWLGDRVITTSTRTWALPTYNNHLYKQISNGTSGGATNDNTYFGYSTPWGYFDFNRFHCHFSPRDWQRLINNNWGFRPKRLSFKLFNIQVKEVTQNEGTKTIANNLTSTIQVFTDSEYQLPYVLGSAHQGCLPPFPADVFTIPQYGYLTLNNGSQAVGRSSFYCLEYFPSQMLRTGNNFQFTYTFEDVPFHSSYAHSQSLDRLMNPLIDQYLYYLSRIQTTGGTANTQTLGFSQGGPNTMANQAKNWLPGPCYRQQRVSTTTGQNNNSNFAWTAGTKYHLNGRNSLANPGIAMATHKDDEERFFPSNGILIFGKQNAARDNADYSDVMPTSEEEIKTTNPVATEEYGIVADNLQQQNTAPQIGTVNSQGALPGMVWQNRDVYLQGPIWAKIPHTDGNFHPSPLMGGFGLKHPPPQILIKNTPVPADPPTTFNQSKLNSFITQYCTGQVSVEIEWELQKENSKRWNPEIQYTSNYYKSTSVDFAVNTEGVYSEPRPIGTRYLTRNL

SEQ ID NO: 2929 - protein, 738 aa, Artificial Sequence
  source: /note="Description of Artificial Sequence: Synthetic polypeptide"
MAADGYLPDWLEDNLSEGIREWWALKPGAPKPKANQQKQDDGRGLVLPGYKYLGPFNGLDKGEPVNAADAAALEHDKAYDQQLQAGDNPYLRYNHADAEFQERLQEDTSFGGNLGRAVFQAKKRVLEPLGLVEEGAKTAPGKKRPVEPSPQRSPDSSTGIGKEGQQPARKRLNFGQTGDSESVPDPQPLGEPPAAPSGVGPNTMAAGGGAPMADNNEGADGVGSSSGNWHCDSTWLGDRVITTSTRTWALPTYNNHLYKQISNGTSGGATNDNTYFGYSTPWGYFDFNRFHCHFSPRDWQRLINNNWGFRPKRLSFKLFNIQVKEVTQNEGTKTIANNLTSTIQVFTDSEYQLPYVLGSAHQGCLPPFPADVFTIPQYGYLTLNNGSQAVGRSSFYCLEYFPSQMLRTGNNFQFTYTFEDVPFHSSYAHSQSLDRLMNPLIDQYLYYLSRIQTTGGTANTQTLGFSQGGPNTMANQAKNWLPGPCYRQQRVSTTTGQNNNSNFAWTAGTKYHLNGRNSLANPGIAMATHKDDEERFFPSNGILIFGKQNAARDNADYSDVMPTSEEEIKTTNPVATEEYGIVADNLQQQNTAPQIGTVNSQGALPGMVWQNRDVYLQGPIWAKIPHTDGNFHPSPLMGGFGLKHPPPQILIKNTPVPADPPTTFNQSKLNSFITQYSTGQVSVEIEWELQKENSKRWNPEIQYTSNYYKSTSVDFAVNTEGVYSEPRPIGTRYLTRNL

SEQ ID NO: 2930 - protein, 738 aa, Artificial Sequence
  source: /note="Description of Artificial Sequence: Synthetic polypeptide"
MAADGYLPDWLEDNLSEGIREWWALKPGAPKPKANQQKQDDGRGLVLPGYKYLGPFNGLDKGEPVNAADAAALEHDKAYDQQLQAGDNPYLRYNHADAEFQERLQEDTSFGGNLGRAVFQAKKRVLEPLGLVEEGAKTAPGKERPVEPSPQRSPDSSTGIGKKGQQPARKRLNFGQTGDSESVPDPQPLGEPPAAPSGVGPNTMAAGGGAPMADNNEGADGVGSSSGNWHCDSTWLGDRVITTSTRTWALPTYNNHLYKQIPNGTSGGATNDNTYFGYSTPWGYFDFNRFHCHFSPRDWQRLINNNWGFRPKRLSFKLFNIQVKEVTQNEGTKTTANNLTSTIQVFTDSEYQLPYVLGSAHQGCLPPFPADVFTIPQYGYLTLNNGSQAVGRSSFYCLEYFPSQMLRTGNNFQFTYTFEDVPFHSSYAHSQSLDRLMNPLIDQYLYYLSRIQTTGGTANTQTLGFSQGGPNTMANQAKNWLPGPCYRQQRVSTTTGQNNNSNFAWTAGTKYHLNGRNSLANPGIAMATHKDDEERFFPSNGILIFGKQNAARDNADYSDVMPTSEEEIKTTNPVATEEYGIVADNLQQQNTAPQIGTVNSQGALPGMVWQNRDVYLQGPIWAKIPHTDGNFHPSPLMGGFGLKHPPPQILIKNTPVPADPPTTFNQSKLNSFITQYSTGQVSVEIEWELQKENSKRWNPEIQYTSNYYKSTSVDFAVNTEGVYSEPRPIGTRYLTRNL

SEQ ID NO: 2931 - protein, 738 aa, Artificial Sequence
  source: /note="Description of Artificial Sequence: Synthetic polypeptide"
MAADGYLPDWLEDNLSEGIREWWALKPGAPKPKANQQKQDDGRGLVLPGYKYLGPFNGLDKGEPVNAADAAALEHDKAYDQQLQAGDNPYLRYNHADAEFQERLQEDTSFGGNLGRAVFQAKKRVLEPLGLVEEGAKTAPGKKRPVEPSPQRSPDSSTGIGKEGQQPARKRLNFGQTGDSESVPDPQPLGEPPAAPSGVGPNTMAAGGGAPMADNNEGADGVGSSSGNWHCDSTWLGDRVITTSTRTWALPTYNNHLYKQISNGTSGGATNDNTYFGYSTPWGYFDFNRFHCHFSPRDWQRLINNNWGFRPKRLSFKLFNIQVKEVTQNEGTKTTANNLTSTIQVFTDSEYQLPYVLGSAHQGCLPPFPADVFTIPQYGYLTLNNGSQAVGRSSFYCLEYFPSQMLRTGNNFQFTYTFEDVPFHSSYAHSQSLDRLMNPLIDQYLYYLSRIQTTGGTANTQTLGFSQGGPNTMANQAKNWLPGPCYRQQRVSTTTGQNNNSNFAWTAGTKYHLNGRNSLANPGIAMATHKDDEERFFPSNGILIFGKQNAARDNADYSDVMPTSEEEIKTTNPVATEEYGIVADNLQQQNTAPQIGTVNSQGALPGMVWQNRDVYLQGPIWAKIPHTDGNFHPSPLMGGFGLKHPPPQILIKNTPVPADPPTTFNQSKLNSFITQYSTGQVSVEIEWELQKENSKRWNPEIQYTSNYYKSTSVDFAVNTEGVYSEPRPIGTRYLTRNL

SEQ ID NO: 2932 - protein, 738 aa, Artificial Sequence
  source: /note="Description of Artificial Sequence: Synthetic polypeptide"
MAADGYLPDWLEDNLSEGIREWWALKPGAPKPKANQQKQDDGRGLVLPGYKYLGPFNGLDKGEPVNAADAAALEHDKAYDQQLQAGDNPYLRYNHADAEFQERLQEDTSFGGNLGRAVFQAKKRVLEPLGLVEEGAKTAPGKERPVEPSPQRSPDSSTGIGKKGQQPARKRLNFGQTGDSESVPDPQPLGEPPAAPSGVGPNTMAAGGGAPMADNNEGADGVGSSSGNWHCDSTWLGDRVITTSTRTWALPTYNNHLYKQISNGTSGGATNDNTYFGYSTPWGYFDFNRFHCHFSPRDWQRLINNNWGFRPKRLSFKLFNIQVKEVTQNEGTKTTANNLTSTIQVFTDSEYQLPYVLGSAHQGCLPPFPADVFTIPQYGYLTLNNGSQAVGRSSFYCLEYFPSQMLRTGNNFQFTYTFEDVPFHSSYAHSQSLDRLMNPLIDQYLYYLSRIQTTGGTANTQTLGFSQGGPNTMANQAKNWLPGPCYRQQRVSTTTGQNNNSNFAWTAGTKYHLNGRNSLANPGIAMATHKDDEERFFPSNGILIFGKQNAARDNADYSDVMPTSEEEIKTTNPVATEEYGIVADNLQQQNTAPQIGTVNSQGALPGMVWQNRDVYLQGPIWAKIPHTDGNFHPSPLMGGFGLKHPPPQILIKNTPVPADPPTTFNQSKLNSFITQYSTGQVSVEIEWELQKENSKRWNPEIQYTSNYYKSTSVDFAVNTEGVYSEPRPIGTRYLTRNL

SEQ ID NO: 2933 - protein, 738 aa, Artificial Sequence
  source: /note="Description of Artificial Sequence: Synthetic polypeptide"
MAADGYLPDWLEDNLSEGIREWWALKPGAPKPKANQQKQDDGRGLVLPGYKYLGPFNGLDKGEPVNAADAAALEHDKAYDQQLQAGDNPYLRYNHADAEFQERLQEDTSFGGNLGRAVFQAKKRVLEPLGLVEEGAKTAPGKERPVEPSPQRSPDSSTGIGKKGQQPARKRLNFGQTGDSESVPDPQPLGEPPAAPSGVGPNTMAAGGGAPMADNNEGADGVGSSSGNWHCDSTWLGDRVITTSTRTWALPTYNNHLYKQISNGTSGGATNDNTYFGYSTPWGYFDFNRFHCHFSPRDWQRLINNNWGFRPKRLSFKLFNIQVKEVTQNEGTKTIANNLTSTIQVFTDSEYQLPYVLGSAHQGCLPPFPADVFTIPQYGYLTLNNGSQAVGRSSFYCLEYFPSQMLRTGNNFQFTYTFEDVPFHSSYAHSQSLDRLMNPLIDQYLYYLSRIQTTGGTANTQTLGFSQGGPNTMANQAKNWLPGPCYRQQRVSTTTGQNNNSNFAWTAGTKYHLNGRNSLANPGIAMATHKDDEERFFPSNGILIFGKQNAARDNADYSDVMPTSEEEIKTTNPVATEEYGIVADNLQQQNTAPQIGTVNSQGALPGMVWQNRDVYLQGPIWAKIPHTDGNFHPSPLMGGFGLKHPPPQILIKNTPVPADPPTTFNQSKLNSFITQYSTGQVSVEIEWELQKENSKRWNPEIQYTSNYYKSTSVDFAVNTEGVYSEPRPIGTRYLTRNL

SEQ ID NO: 2934 - protein, 738 aa, Artificial Sequence
  source: /note="Description of Artificial Sequence: Synthetic polypeptide"
MAADGYLPDWLEDNLSEGIREWWALKPGAPKPKANQQKQDDGRGLVLPGYKYLGPFNGLDKGEPVNAADAAALEHDKAYDQQLQAGDNPYLRYNHADAEFQERLQEDTSFGGNLGRAVFQAKKRVLEPLGLVEEGAKTAPGKKRPVEPSPQRSPDSSTGIGKKGQQPARKRLNFGQTGDSESVPDPQPLGEPPAAPSGVGPNTMAAGGGAPMADNNEGADGVGSSSGNWHCDSTWLGDRVITTSTRTWALPTYNNHLYKQISNGTSGGATNDNTYFGYSTPWGYFDFNRFHCHFSPRDWQRLINNNWGFRPKRLSFKLFNIQVKEVTQNEGTKTIANNLTSTIQVFTDSEYPLPYVLGSAHQGCLPPFPADVFTIPQYGYLTLNNGSQAVGRSSFYCLEYFPSQMLRTGNNFQFTYTFEDVPFHSSYAHSQSLDRLMNPLIDQYLYYLSRIQTTGGTANTQTLGFSQGGPNTMANQAKNWLPGPCYRQQRVSTTTGQNNNSNFAWTAGTKYHLNGRNSLANPGIAMATHKDDEERFFPSNGILIFGKQNAARDNADYSDVMPTSEEEIKTTNPVATEEYGIVADNLQQQNTAPQIGTVNSQGALPGMVWQNRDVYLQGPIWAKIPHTDGNFHPSPLMGGFGLKHPPPQILIKNTPVPADPPTTFNQSKLNSFITQYSTGQVSVEIEWELQKENSKRWNPEIQYTSNYYKSTSVDFAVNTEGVYSEPRPIGTRYLTRNL

SEQ ID NO: 2935 - protein, 738 aa, Artificial Sequence
  source: /note="Description of Artificial Sequence: Synthetic polypeptide"
MAADGYLPDWLEDNLSEGIREWWALKPGAPKPKANQQKQDDGRGLVLPGYKYLGPFNGLDKGEPVNAADAAALEHDKAYDQQLQAGDNPYLRYNHADAEFQERLQEDTSFGGNLGRAVFQAKKRVLEPLGLVEEGAKTAPGKKRPVEPSPQRSPDSSTGIGKKGQQPARKRLNFGQTGDSESVPDPQPLGEPPAAPSGVGPNTMAAGGGAPMADNNEGADGVGSSSGNWHCDSTWLGDRVITTSTRTWALPTYNNHLYKQISNGTSGGATNDNTYFGYSTPWGYFDFNRFHCHFSPRDWQRLINNNWGFRPKRLSFKLFNIQVKEVTQNEGTKTIANNLTSTIQVFTDSEYQLPYVLGSAHQGCLPPFPADVFTIPQYGYLTLNNGSQAVGRSSFYCLEYFPSQMLRTGNNFQFTYTFEDVPFHSSYAHSQSLDRLMNPLIDQYLYYLSRIQTTGGTANTQTLGFSQGGPNTMANQAKNWLPGPCYRQQRVSTTTGQNNNSNFAWTAGTKYHLNGRNSLANPGIAMATHKDDEERFFPSNGILIFGKQNAARDNADYSDVMPTSEEEIKTTNPVATEEYGIVADNLQQQNTAPQIGTVNSQGALPGMVWQNRDVYLQGPIWAKIPHTDGNFHPSPLMGGFGLKHPPPQILIKNTPVPADPPTTFNQSKLNSFITQYGTGQVSVEIEWELQKENSKRWNPEIQYTSNYYKSTSVDFAVNTEGVYSEPRPIGTRYLTRNL

SEQ ID NO: 2936 - protein, 738 aa, Artificial Sequence
  source: /note="Description of Artificial Sequence: Synthetic polypeptide"
MAADGYLPDWLEDNLSEGIREWWALKPGAPKPKANQQKQDDGRGLVLPGYKYLGPFNGLDKGEPVNAADAAALEHDKAYDQQLQAGDNPYLRYNHADAEFQERLQEDTSFGGNLGRAVFQAKKRVLEPLGLVEEGAKTAPGKKRPVEPSPQRSPDSSTGIGKKGQQPARKRLNFGQTGDSESVPDPQPLGEPPAAPSGVGPNTMAAGGGAPMADNNEGADGVGSSSGNWHCDSTWLGDRVITTSTRTWALPTYNNHLYKQISNGTSGGATNDNTYFGYSTPWGYFDFNRFHCHFSPRDWQRLINNNWGFRPKRLSFKPFNIQVKEVTQNEGTKTIANNLTSTIQVFTDSEYQLPYVLGSAHQGCLPPFPADVFTIPQYGYLTLNNGSQAVGRSSFYCLEYFPSQMLRTGNNFQFTYTFEDVPFHSSYAHSQSLDRLMNPLIDQYLYYLSRIQTTGGTANTQTLGFSQGGPNTMANQAKNWLPGPCYRQQRVSTTTGQNNNSNFAWTAGTKYHLNGRNSLANPGIAMATHKDDEERFFPSNGILIFGKQNAARDNADYSDVMPTSEEEIKTTNPVATEEYGIVADNLQQQNTAPQIGTVNSQGALPGMVWQNRDVYLQGPIWAKIPHTDGNFHPSPLMGGFGLKHPPPQILIKNTPVPADPPTTFNQSKLNSFITQYSTGQVSVEIEWELQKENSKRWNPEIQYTSNYYKSTSVDFAVNTEGVYSEPRPIGTRYLTRNL

SEQ ID NO: 2937 - protein, 738 aa, Artificial Sequence
  source: /note="Description of Artificial Sequence: Synthetic polypeptide"
MAADGYLPDWLEDNLSEGIREWWALKPGAPKPKANQQKQDDGRGLVLPGYKYLGPFNGLDKGEPVNAADAAALEHDKAYDQQLQAGDNPYLRYNHADAEFQERLQEDTSFGGNLGRAVFQAKKRVLEPLGLVEEGAKTAPGKKRPVEPSPQRSPDSSTGIGKKGQQPARKRLNFGQTGDSESVPDPQPLGEPPAAPSGVGPNTMAAGGGAPMADNNEGADGVGSSSGNWHCDSTWLGDRVITTSTRTWALPTYNNHLYKQISNGTSGGATNDNTYFGYSTPWGYFDFNRFHCHFSPRDWQRLINNNWGFRPKRLSFKLFNIQVKEVTQNEGTKTIANNLTSTIQVFTDSEYQLPYVLGSAHQGCLPPFPADVFTIPQYGYLTLNNGSQAVGRSSFYCLEYFPSQMLRTGNNFQFTYTFEDVPFHSSYAHSQSLDRLMNPLIDQYLYYLSRIQTTGGTANTQALGFSQGGPNTMANQAKNWLPGPCYRQQRVSTTTGQNNNSNFAWTAGTKYHLNGRNSLANPGIAMATHKDDEERFFPSNGILIFGKQNAARDNADYSDVMPTSEEEIKTTNPVATEEYGIVADNLQQQNTAPQIGTVNSQGALPGMVWQNRDVYLQGPIWAKIPHTDGNFHPSPLMGGFGLKHPPPQILIKNTPVPADPPTTFNQSKLNSFITQYSTGQVSVEIEWELQKENSKRWNPEIQYTSNYYKSTSVDFAVNTEGVYSEPRPIGTRYLTRNL

SEQ ID NO: 2938 - protein, 738 aa, Artificial Sequence
  source: /note="Description of Artificial Sequence: Synthetic polypeptide"
MAADGYLPDWLEDNLSEGIREWWALKPGAPKPKANQQKQDDGRGLVLPGYKYLGPFNGLDKGEPVNAADAAALEHDKAYDQQLQAGDNPYLRYNHADAEFQERLQEDTSFGGNLGRAVFQAKKRVLEPLGLVEEGAKTAPGKKRPVEPSPQRSPDSSTGIGKKGQQPARKRLNFGQTGDSESVPDPQPLGEPPAAPSGVGPNTMAAGGGAPMADNNEGADGVGSSSGNWHCDSTWLGDRVITTSTRTWALPTYNNHLYKQISNGTSGGATNDNTYFGYSTPWGYFDFNRFHCHFSPRDWQRLINNNWGFRPKRLSFKLFNIQVKEVTQNEGTKTIANNLTSTIQVFTDSEYQLPYVLGSAHQGCLPPFPADVFTIPQYGYLTLNNGSQAVGRSSFYCLEYFPSQMLRTGNNFQFTYTFEDVPFHSSYAHSQSLDRLMNPLIDQYLYYLSRIQTTGGTANTQTLGFSQGGPNTMANQAKNWLPGPCYRQQRVSTTTGQNNNSNFAWTAGTKYHLNGRNSLANPGIAMATHKDDEERFFPSNGILIFGKQNAARDNADYSDVMPTSEEEIKTTNPVATEGYGIVADNLQQQNTAPQIGTVNSQGALPGMVWQNRDVYLQGPIWAKIPHTDGNFHPSPLMGGFGLKHPPPQILIKNTPVPADPPTTFNQSKLNSFITQYSTGQVSVEIEWELQKENSKRWNPEIQYTSNYYKSTSVDFAVNTEGVYSEPRPIGTRYLTRNL

SEQ ID NO: 2939 - protein, 738 aa, Artificial Sequence
  source: /note="Description of Artificial Sequence: Synthetic polypeptide"
MAADGYLPDWLEDNLSEGIREWWALKPGAPKPKANQQKQDDGRGLVLPGYKYLGPFNGLDKGEPVNAADAAALEHDKAYDQQLQAGDNPYLRYNHADAEFQERLQEDTSFGGNLGRAVFQAKKRVLEPLGLVEEGAKTAPGKKRPVEPSPQRSPDSSTGIGKKGQQPARKRLNFGQTGDSESVPDPQPLGEPPAAPSGVGPNTMAAGGGAPMADNNEGADGVGSSSGNWHCDSTWLGDRVITTSTRTWALPTYNNHLYKQISNGTSGGATNDNTYFGYSTPWGYFDFNRFHCHFSPRDWQRLINNNWGFRPKRLSFKLFNIQVKEVTQNEGTKTIANNLTSTIQVFTDSEYQLPYVLGSAHQGCLPPFPADVFTIPQYGYLTLNNGSQAVGRSSFYCLEYFPSQMLRTGNNFQFTYTFEDVPFHSSYAHSQSLDRLMNPLIDQYLYYLSRIQTTGGTANTQTLGFSQGGPNTMANQAKNWLPGPCYRQQRVSTTTGQNNNSNFAWTAGTKYHLNGRNSLANPGIAMATRKDDEERFFPSNGILIFGKQNAARDNADYSDVMPTSEEEIKTTNPVATEEYGIVADNLQQQNTAPQIGTVNSQGALPGMVWQNRDVYLQGPIWAKIPHTDGNFHPSPLMGGFGLKHPPPQILIKNTPVPADPPTTFNQSKLNSFITQYSTGQVSVEIEWELQKENSKRWNPEIQYTSNYYKSTSVDFAVNTEGVYSEPRPIGTRYLTRNL

SEQ ID NO: 2940 - protein, 738 aa, Artificial Sequence
  source: /note="Description of Artificial Sequence: Synthetic polypeptide"
MAADGYLPDWLEDNLSEGIREWWALKPGAPKPKANQQKQDDGRGLVLPGYKYLGPFNGLDKGEPVNAADAAALEHDKAYDQQLQAGDNPYLRYNHADAEFQERLQEDTSFGGNLGRAVFQAKKRVLEPLGLVEEGAKTAPGKKRPVEPSPQRSPDSSTGIGKKGQQPARKRLNFGQTGDSESVPDPQPLGEPPAAPSGVGPNTMAAGGGAPMADNNEGADGVGSSSGNWHCDSTWLGDRVITTSTRTWALPTYNNHLYKQISNGTSGGATNDNTYFGYSTPWGYFDFNRFHCHFSPRDWQRLINNNWGFRPKRLSFKLFNIQVKEVTQNEGTKTIANNLTSTIQVFTDSEYQLPYVLGSAHQGCLPPFPADVFTIPQYGYLTLNNGSQAVGRSSFYCLEYFPSQMLRTGNNFQFTYTFEDVPFHSSYAHSQSLDRLMNPLIDQYLYYLSRIQTTGGTANTQTLGFSQGGPNTMANQAKNWLPGPCYRQQRVSTTTGQNNNSNFAWTAGTKYHLNGRNSLANPGIAMATHKDDEERFFPSNGILIFGKQNAARDNADYSDVMPTSEEEIKTTNPVATEEYGIVADNLQQQNTAPQIGTVNSQGALPGMVWQNRDVYLQGPIWAKIPHTDGNFHPSPLMGGFGLKHPPPQILIKNTPVPADPPTTFNQSKPNSFITQYSTGQVSVEIEWELQKENSKRWNPEIQYTSNYYKSTSVDFAVNTEGVYSEPRPIGTRYLTRNL

SEQ ID NO: 2941 - protein, 738 aa, Artificial Sequence
  source: /note="Description of Artificial Sequence: Synthetic polypeptide"
MAADGYLPDWLEDNLSEGIREWWALKPGAPKPKANQQKQDDGRGLVLPGYKYLGPFNGLDKGEPVNAADAAALEHDKAYDQQLQAGDNPYLRYNHADAEFQERLQEDTSFGGNLGRAVFQAKKRVLEPLGLVEEGAKTAPGKKRPVEPSPQRSPDSSTGIGKKGQQPARKRLNFGQTGDSESVPDPQPLGEPPAAPSGVGPNTMAAGGGAPMADNNEGADGVGSSSGNWHCDSTWLGDRVITTSTRTWALPTYNNHLYKQISNGTSGGATNDNTYFGYSTPWGYFDFNRFHCHFSPRDWQRLINNNWGFRPKRLSFKLFNIQVKEVTQNEGTKTIANNLTSTIQVFTDSEYQLPYVLGSAHQGCLPPFPADVFTIPQYGYLTLNNGSQAVGRSSFYCLEYFPSQMLRTGNNFQFTYTFEDVPFHSSYAHSQSLDRLMNPLIDQYLYYLSRIQTTGGTANTQTLGFSQGGPNTMANQAKNWLPGPCYRQQRVSTTTGQNNNSNFAWTAGTKYHLNGRNSLANPGIAMATHKDDEERFFSSNGILIFGKQNAARDNADYSDVMPTSEEEIKTTNPVATEEYGIVADNLQQQNTAPQIGTVNSQGALPGMVWQNRDVYLQGPIWAKIPHTDGNFHPSPLMGGFGLKHPPPQILIKNTPVPADPPTTFNQSKLNSFITQYSTGQVSVEIEWELQKENSKRWNPEIQYTSNYYKSTSVDFAVNTEGVYSEPRPIGTRYLTRNL

SEQ ID NO: 2942 - protein, 738 aa, Artificial Sequence
  source: /note="Description of Artificial Sequence: Synthetic polypeptide"
MAADGYLPDWLEDNLSEGIREWWALKPGAPKPKANQQKQDDGRGLVLPGYKYLGPFNGLDKGEPVNAADAAALEHDKAYDQQLQAGDNPYLRYNHADAEFQERLQEDTSFGGNLGRAVFQAKKRVLEPLGLVEEGAKTAPGKKRPVEPSPQRSPDSSTGIGKKGQQPARKRLNFGQTGDSESVPDPQPLGEPPAAPSGVGPNTMAAGGGAPMADNNEGADGVGSSSGNWHCDSTWLGDRVITTSTRTWALPTYNNHLYKQISNGTSGGATNDNTYFGYSTPWGYFDFNRFHCHFSPRDWQRLINNNWGFRPKRLSFKLFNIQVKEVTQNEGTKTIANNLTSTIQVFTDSEYQLPYVLGSAHQGCLPPFPADVFTIPQYGYLTLNNGSQAVGRSSFYCLEYFPSQMLRTGNNFQFTYTFEDVPFHSSYAHSQSLDRLMNPLIDQYLYYLSRIQTTGGTANTQTLGFSQGGPNTMANQAKNWLPGPCYRQQRVSTTTGQNNNSNFAWAAGTKYHLNGRNSLANPGIAMATHKDDEERFFPSNGILIFGKQNAARDNADYSDVMPTSEEEIKTTNPVATEEYGIVADNLQQQNTAPQIGTVNSQGALPGMVWQNRDVYLQGPIWAKIPHTDGNFHPSPLMGGFGLKHPPPQILIKNTPVPADPPTTFNQSKLNPFITQYSTGQVSVEIEWELQKENSKRWNPEIQYTSNYYKSTSVDFAVNTEGVYSEPRPIGTRYLTRNL

SEQ ID NO: 2943 - protein, 738 aa, Artificial Sequence
  source: /note="Description of Artificial Sequence: Synthetic polypeptide"
MAADGYLPDWLEDNLSEGIREWWALKPGAPKPKANQQKQDDGRGLVLPGYKYLGPFNGLDKGEPVNAADAAALEHDKAYDQQLQAGDNPYLRYNHADAEFQERLQEDTSFGGNLGRAVFQAKKRVLEPLGLVEEGAKTAPGKKRPVEPSPQRSPDSSTGIGKKGQQPARKRLNFGQTGDSESVPDPQPLGEPPAAPSGVGPNTMAAGGGAPMADNNEGADGVGSSSGNWHCDSTWLGDRVITTSTRTWALPTYNNHLYKQISNGTSGGATNDNTYFGYSTPWGYFDFNRFHCHFSPRDWQRLINNNWGFRPKRLSFKLFNIQVKEVTQNEGTKTIANNPTSTIQVFTDSEYQLPYVLGSAHQGCLPPFPADVFTIPQYGYLTLNNGSQAVGRSSFYCLEYFPSQMLRTGNNFQFTYTFEDVPFHSSYAHSQSLDRLMNPLIDQYLYYLSRIQTTGGTANTQTLGFSQGGPNTMANQAKNWLPGPCYRQQRVSTTTGQNNNSNFAWTAGTKYHLNGRNSLANPGIAMATHKDDEERFFPSNGILIFGKQNAARDNADYSDVMPTSEEEIKTTNPVATEEYGIVADNLQQQNTAPQIGTVNSQGALPGMVWQNRDVYLQGPIWAKIPHTDGNFHPSPLMGGFGLKHPPPQILIKNTPVPADPPTTFNQSKLNSFITQYSTGQVSVEIEWELQKENSKRWNPEIQYTSNYYKSTSVDFAVNTEGVYSEPRPIGTRYLTRNL

SEQ ID NO: 2944 - protein, 738 aa, Artificial Sequence
  source: /note="Description of Artificial Sequence: Synthetic polypeptide"
MAADGYLPDWLEDNLSEGIREWWALKPGAPKPKANQQKQDDGRGLVLPGYKYLGPFNGLDKGEPVNAADAAALEHDKAYDQQLQAGDNPYLRYNHADAEFQERLQEDTSFGGNLGRAVFQAKKRVLEPLGLVEEGAKTAPGKKRPVEPSPQRSPDSSTGIGKKGQQPARKRLNFGQTGDSESVPDPQPLGEPPAAPSGVGPNTMAAGGGAPMADNNEGADGVGSSSGNWHCDSTWLGDRVITTSTRTWALPTYNNHLYKQISNGTSGGATNDNTYFGYSTPWGYFDFNRFHCRFSPRDWQRLINNNWGFRPKRLSFKLFNIQVKEVTQNEGTKTIANNLTSTIQVFTDSEYQLPYVLGSAHQGCLPPFPADVFTIPQYGYLTLNNGSQAVGRSSFYCLEYFPSQMLRTGNNFQFTYTFEDVPFHSSYAHSQSLDRLMNPLIDQYLYYLSRIQTTGGTANTQTLGFSQGGPNTMANQAKNWLPGPCYRQQRVSTTTGQNNNSNFAWTAGTKYHLNGRNSLANPGIAMATHKDDEERFFPSNGILIFGKQNAARDNADYSDVMPTSEEEIKTTNPVATEEYGIVADNLQQQNTAPQIGTVNSQGALPGMVWQNRDVYLQGPIWAKIPHTDGNFHPSPLMGGFGLKHPPPQILIKNTPVPADPPTTFNQSKLNSFITQYSTGQVSVEIEWELQKENSKRWNPEIQYTSNYYKSTSVDFAVNTEGVYSEPRPIGTRYLTRNL

SEQ ID NO: 2945 - protein, 738 aa, Artificial Sequence
  source: /note="Description of Artificial Sequence: Synthetic polypeptide"
MAADGYLPDWLEDNLSEGIREWWALKPGAPKPKANQQKQDDGRGLVLPGYKYLGPFNGLDKGEPVNAADAAALEHDKAYDQQLQAGDNPYLRYNHADAEFQERLQEDTSFGGNLGRAVFQAKKRVLEPLGLVEEGAKTAPGKKRPVEPSPQRSPDSSTGIGKKGQQPARKRLNFGQTGDSESVPDPQPLGEPPAAPSGVGPNTMAAGGGAPMADNNEGADGVGSSSGNWHCDSTWLGDRVITTSTRTWALPTYNNHLYKQISNGTSGGATNDNTYFGYSTPWGYFDFNRFHCHFSPRDWQRLINNNWGFRPKRLSFKLFNIQVKEVTQNEGTKTIANNLTSTIQVFTDSEYQLPYVLGSAHQGCLPPFPADVFTIPQYGYLTLNNGSQAVGRSSFYCLEYFPSQMLRTGNNFQFTYTFEDVPFHSSYAHSQSLDRLMNPLIDQYLYYLSRIQTTGGTANTQTLGFSQGGPNTMANQAKNWLPGPCYRQQRVSTTTGQNNNSNFAWTAGTKYHLNGRNSLANPGIAMATHKDDEERFFPSNGILIFGKQNAARDNADYSDVMPTSEEEIKTTNPVATEEYGIVADNLQQQNAAPQIGTVNSQGALPGMVWQNRDVYLQGPIWAKIPHTDGNFHPSPLMGGFGLKHPPPQILIKNTPVPADPPTTFNQSKLNSFITQYSTGQVSVEIEWELQKENSKRWNPEIQYTSNYYKSTSVDFAVNTEGVYSEPRPIGTRYLTRNL

SEQ ID NO: 2946 - protein, 738 aa, Artificial Sequence
  source: /note="Description of Artificial Sequence: Synthetic polypeptide"
MAADGYLPDWLEDNLSEGIREWWALKPGAPKPKANQQKQDDGRGLVLPGYKYLGPFNGLDKGEPVNAADAAALEHDKAYDQQLQAGDNPYLRYNHADAEFQERLQEDTSFGGNLGRAVFQAKKRVLEPLGLVEEGAKTAPGKKRPVEPSPQRSPDSSTGIGKKGQQPARKRLNFGQTGDSESVPDPQPLGEPPAAPSGVGPNTMAAGGGAPMADNNEGADGVGSSSGNWHCDSTWLGDRVITTSTRTWALPTYNNHLYKQISNGTSGGATNDNTYFGYSTPWGYFDFNRFHCHFSPRDWQRLINNNWGFRPKRLSFKLFNIQVKEVTQNEGTKTIANSLTSTIQVFTDSEYQLPYVLGSAHQGCLPPFPADVFTIPQYGYLTLNNGSQAVGRSSFYCLEYFPSQMLRTGNNFQFTYTFEDVPFHSSYAHSQSLDRLMNPLIDQYLYYLSRIQTTGGTANTQTLGFSQGGPNTMANQAKNWLPGPCYRQQRVSTTTGQNNNSNFAWTAGTKYHLNGRNSLANPGIAMATHKDDEERFFPSNGILIFGKQNAARDNADYSDVMPTSEEEIKTTNPVATEEYGIVADNLQQQNTAPQIGTVNSQGALPGMVWQNRDVYLQGPIWAKIPHTDGNFHPSPLMGGFGLKHPPPQILIKNTPVPADPPTTFNQSKLNSFITQYSTGQVSVEIEWELQKENSKRWNPEIQYTSNYYKSASVDFAVNTEGVYSEPRPIGTRYLTRNL

SEQ ID NO: 2947 - protein, 738 aa, Artificial Sequence
  source: /note="Description of Artificial Sequence: Synthetic polypeptide"
MAADGYLPDWLEDNLSEGIREWWALKPGAPKPKANQQKQDDGRGLVLPGYKYLGPFNGLDKGEPVNAADAAALEHDKAYDQQLQAGDNPYLRYNHADAEFQERLQEDTSFGGNLGRAVFQAKKRVLEPLGLVEEGAKTAPGKKRPVEPSPQRSPDSSTGIGKKGQQPARKRLNFGQTGDSESVPDPQPLGEPPAAPSGVGPNTMAAGGGAPMADNNEGADGVGSSSGNWHCDSTWLGDRVITTSTRTWALPTYNNHLYKQISNGTSGGATNDNTYFGYSTPWGYFDFNRFHCHFSPRDWQRLINNNWGFRPKRLSFKLFNIQVKEVTQNEGTKTIANNLTSTIQVFTDSEYQLPYVLGSAHQGCLPPFPADVFTIPQYGYLTLNNGSQAVGRSSFYCLEYFPSQMLRTGNNFQFTYTFEDVPFHSSYAHSQSLDRLMNPLIDQYLYYLSRIQTTGGTANTQTLGFSQGGPNTMANQAKNWLPGPCYRQQRVSTTTGQNNNSNFAWTAGTKYHLNGGNSLANPGIAMATHKDDEERFFPSNGILIFGKQNAARDNADYSDVMPTSEEEIKTTNPVATEEYGIVADNLQQQNTAPQIGTVNSQGALPGMVWQNRDVYLQGPIWAKIPHTDGNFHPSPLMGGFGLKHPPPQILIKNTPVPADPPTTFNQSKLNSFITQYSTGQVSVEIEWELQKENSKRWNPEIQYTSNYYKSTSVDFAVNTEGVYSEPRPIGTRYLTRNL

SEQ ID NO: 2948 - protein, 738 aa, Artificial Sequence
  source: /note="Description of Artificial Sequence: Synthetic polypeptide"
MAADGYLPDWLEDNLSEGIREWWALKPGAPKPKANQQKQDDGRGLVLPGYKYLGPFNGLDKGEPVNAADAAALEHDKAYDQQLQAGDNPYLRYNHADAEFQERLQEDTSFGGNLGRAVFQAKKRVLEPLGLVEEGAKTAPGKKRPVEPSPQRSPDSSTGIGKKGQQPARKRLNFGQTGDSESVPDPQPLGEPPAAPSGVGPNTMAAGGGAPMADNNEGADGVGSSSGNWHCDSTWLGDRVITTSTRTWALPTYNNHLYKQISNGTSGGATNDNTYFGYSTPWGYFDFNRFHCHFSPRDWQRLINNNWGFRPKRLSFKLFNIQVKEVTQNEGTKTIANNLTSTIQVFTDSEYQLPYVLGSAHQGCLPPFPADVFTIPQYGYLTLNNGSQAVGRSSFYCLEYFPSQMLRTGNNFQFTYTFEDVPFHSSYAHSQSLDRLMNPLIDQYLYYLSRIQTTGGTANTQTLGFSQGGPNTMANQAKNWLPGPCYRQQRVSTTTGQNNNSNFAWTAGTKYHLNGRNSLANPGIAMATHKDDEERFFPSNGILIFGKQNAARDNADYSDVMPTSEEEIKTTNPVATEEYGIVADNLQQQNTAPQIGTVNSQGALPGMVWQNRDVYLQGPIWAKIPHTDGNFHPSPLMGGFGLKHPPPQILIKNTPVPADPPTTFNQSRLNSFITQYSTGQVSVEIEWELQKENSKRWNPEIQYTSNYYKSTSVDFAVNTEGVYSEPRPIGTRYLTRNL

SEQ ID NO: 2949 - protein, 738 aa, Artificial Sequence
  source: /note="Description of Artificial Sequence: Synthetic polypeptide"
MAADGYLPDWLEDNLSEGIREWWALKPGAPKPKANQQKQDDGRGLVLPGYKYLGPFNGLDKGEPVNAADAAALEHDKAYDQQLQAGDNPYLRYNHADAEFQERLQEDTSFGGNLGRAVFQAKKRVLEPLGLVEEGAKTAPGKKRPVEPSPQRSPDSSTGIGKKGQQPARKRLNFGQTGDSESVPDPQPLGEPPAAPSGVGPNTMAAGGGAPMADNNEGADGVGSSSGNWHCDSTWLGDRVITTSTRTWALPTYNNHLYKQISNGTSGGAANDNTYFGYSTPWGYFDFNRFHCHFSPRDWQRLINNNWGFRPKRLSFKLFNIQVKEVTQNEGTKTIANNLTSTIQVFTDSEYQLPYVLGSAHQGCLPPFPADVFTIPQYGYLTLNNGSQAVGRSSFYCLEYFPSQMLRTGNNFQFTYTFEDVPFHSSYAHSQSLDRLMNPLIDQYLYYLSRIQTTGGTANTQTLGFSQGGPNTMANQAKNWLPGPCYRQQRVSTTTGQNNNSNFAWTAGTKYHLNGRNSLANPGIAMATHKDDEERFFPSNGILIFGKQNAARDNADYSDVMPTSEEEIKTTNPVATEEYGIVADNLQQQNTAPQIGTVNSQGALPGMVWQNRDVYLQGPIWAKIPHTDGNFHPSPLMGGFGLKHPPPQILIKNTPVPADPPTTFNQSKLNSFITQYSTGQVSVEIEWELQKENSKRWNPEIQYTSNYYKSTSVDFAVNTEGVYSEPRPIGTRYLTRNL

SEQ ID NO: 2950 - protein, 738 aa, Artificial Sequence
  source: /note="Description of Artificial Sequence: Synthetic polypeptide"
MAADGYLPDWLEDNLSEGIREWWALKPGAPKPKANQQKQDDGRGLVLPGYKYLGPFNGLDKGEPVNAADAAALEHDKAYDQQLQAGDNPYLRYNHADAEFQERLQEDTSFGGNLGRAVFQAKKRVLEPLGLVEEGAKTAPGKKRPVEPSPQRSPDSSTGIGKKGQQPARKRLNFGQTGDSESVPDPQPLGEPPAAPSGVGPNTMAAGGGAPMAGNNEGADGVGSSSGNWHCDSTWLGDRVITTSTRTWALPTYNNHLYKQISNGTSGGATNDNTYFGYSTPWGYFDFNRFHCHFSPRDWQRLINNNWGFRPKRLSFKLFNIQVKEVTQNEGTKTIANNLTSTIQVFTDSEYQLPYVLGSAHQGCLPPFPADVFTIPQYGYLTLNNGSQAVGRSSFYCLEYFPSQMLRTGNNFQFTYTFEDVPFHSSYAHSQSLDRLMNPLIDQYLYYLSRIQTTGGTANTQTLGFSQGGPNTMANQAKNWLPGPCYRQQRVSTTTGQNNNSNFAWTAGTKYHLNGRNSLANPGIAMATHKDDEERFFPSNGILIFGKQNAARDNADYSDVMPTSEEEIKTTNPVATEEYGIVADNLQQQNTAPQIGTVNSQGALPGMVWQNRDVYLQGPIWAKIPHTDGNFHPSPLMGGFGLKHPPPQILIKNTPVPADPPTTFNQSKLNSFITQYSTGQVSVEIEWELQKENSKRWNPEIQYTSNYYKSTSVDFAVNTEGVYSEPRPIGTRYLTRNL

SEQ ID NO: 2951 - protein, 738 aa, Artificial Sequence
  source: /note="Description of Artificial Sequence: Synthetic polypeptide"
MAADGYLPDWLEDNLSEGIREWWALKPGAPKPKANQQKQDDGRGLVLPGYKYLGPFNGLDKGEPVNAADAAALEHDKAYDQQLQAGDNPYLRYNHADAEFQERLQEDTSFGGNLGRAVFQAKKRVLEPLGLVEEGAKTAPGKKRPVEPSPQRSPDSSTGIGRKGQQPARKRLNFGQTGDSESVPDPQPLGEPPAAPSGVGPNTMAAGGGAPMADNNEGADGVGSSSGNWHCDSTWLGDRVITTSTRTWALPTYNNHLYKQISNGTSGGATNDNTYFGYSTPWGYFDFNRFHCHFSPRDWQRLINNNWGFRPKRLSFKLFNIQVKEVTQNEGTKTIANNLTSTIQVFTDSEYQLPYVLGSAHQGCLPPFPADVFTIPQYGYLTLNNGSQAVGRSSFYCLEYFPSQMLRTGNNFQFTYTFEDVPFHSSYAHSQSLDRLMNPLIDQYLYYLSRIQTTGGTANTQTLGFSQGGPNTMANQAKNWLPGPCYRQQRVSTTTGQNNNSNFAWTAGTKYHLNGRNSLANPGIAMATHKDDEERFFPSNGILIFGKQNAARDNADYSDVMPTSEEEIKTTNPVATEEYGIVADNLQQQNTAPQIGTVNSQGALPGMVWQNRDVYLQGPIWAKIPHTDGNFHPSPLMGGFGLKHPPPQILIKNTPVPADPPTTFNQSKLNSFITQYSTGQVSVEIEWELQKENSKRWNPEIQYTSNYYKSTSVDFAVNTEGVYSEPRPIGTRYLTRNL

SEQ ID NO: 2952 - protein, 738 aa, Artificial Sequence
  source: /note="Description of Artificial Sequence: Synthetic polypeptide"
MAADGYLPDWLEDNLSEGIREWWALKPGAPKPKANQQKQDDGRGLVLPGYKYLGPFNGLDKGEPVNAADAAALEHDKAYDQQLQAGDNPYLRYNHADAEFQERLQEDTSFGGNLGRAVFQAKKRVLEPLGLVEEGAKTAPGKKRPVEPSPQRSPDSSTGIGKKGQQPARKRLNFGQTGDSESVPDPQPLGEPPAAPSGVGPNTMAAGGGAPMADNNEGADGVGSSSGNWHCDSTWLGDRVITTSTRTWALPTYNNHLYKQISNGTSGGATNDNTYFGYGTPWGYFDFNRFHCHFSPRDWQRLINNNWGFRPKRLSFKLFNIQVKEVTQNEGTKTIANNLTSTIQVFTDSEYQLPYVLGSAHQGCLPPFPADVFTIPQYGYLTLNNGSQAVGRSSFYCLEYFPSQMLRTGNNFQFTYTFEDVPFHSSYAHSQSLDRLMNPLIDQYLYYLSRIQTTGGTANTQTLGFSQGGPNTMANQAKNWLPGPCYRQQRVSTTTGQNNNSNFAWTAGTKYHLNGRNSLANPGIAMATHKDDEERFFPSNGILIFGKQNAARDNADYSDVMPTSEEEIKTTNPVATEEYGIVADNLQQQNTAPQIGTVNSQGALPGMVWQNRDVYLQGPIWAKIPHTDGNFHPSPLMGGFGLKHPPPQILIKNTPVPADPPTTFNQSKLNSFITQYSTGQVSVEIEWELQKENSKRWNPEIQYTSNYYKSTSVDFAVNTEGVYSEPRPIGTRYLTRNL

SEQ ID NO: 2953 - protein, 738 aa, Artificial Sequence
  source: /note="Description of Artificial Sequence: Synthetic polypeptide"
MAADGYLPDWLEDNLSEGIREWWALKPGAPKPKANQQKQDDGRGLVLPGYKYLGPFNGLDKGEPVNAADAAALEHDKAYDQQLQAGDNPYLRYNHADAEFQERLQEDTSFGGNLGRAVFQAKKRVLEPLGLVEEGAKTAPGKKRPVEPSPQRSPDSSTGIGKKGQQPARKRLNFGQTGDSESVPDPQPLGEPPAAPSGVGPNTMAAGGGAPMADNNEGADGVGSSSGNWHCDSTWLGDRVITTSTRTWALPTYNNHLYKQISNGTSGGATNDNTYFGYSTPWGYFDFNRFHCHFSPRDWQRLINNNWGFRPKRLSFKLFNIQVKEVTQNEGTKTIANNLTSTIQVFTDSEYQLPYVLGSAHQGCLPPFPADVFTIPQYGYLTLNNGSQAVGRSSFYCLEYFPSQMLRTGNNFQFTYTFEDVPFHSSYAHSQSLDRPMNPLIDQYLYYLSRIQTTGGTANTQTLGFSQGGPNTMANQAKNWLPGPCYRQQRVSTTTGQNNNSNFAWTAGTKYHLNGRNSLANPGIAMATHKDDEERFFPSNGILIFGKQNAARDNADYSDVMPTSEEEIKTTNPVATEEYGIVADNLQQQNTAPQIGTVNSQGALPGMVWQNRDVYLQGPIWAKIPHTDGNFHPSPLMGGFGLKHPPPQILIKNTPVPADPPTTFNQSKLNSFITQYSTGQVSVEIEWELQKENSKRWNPEIQYTSNYYKSTSVDFAVNTEGVYSEPRPIGTRYLTRNL

SEQ ID NO: 2954 - protein, 738 aa, Artificial Sequence
  source: /note="Description of Artificial Sequence: Synthetic polypeptide"
MAADGYLPDWLEDNLSEGIREWWALKPGAPKPKANQQKQDDGRGLVLPGYKYLGPFNGLDKGEPVNAADAAALEHDKAYDQQLQAGDNPYLRYNHADAEFQERLQEDTSFGGNLGRAVFQAKKRVLEPLGLVEEGAKTAPGKKRPVEPSPQRSPDSSTGIGKKGQQPARKRLNFGQTGDSESVPDPQPLGEPPAAPSGVGPNTMAAGGGAPMADNNEGADGVGSSSGNWHCDSTWLGDRVITTSTRTWALPTYNNHLYKQISNGTSGGATNDNTYFGYSTPWGYFDFNRFHCHFSPRDWQRLINNNWGFRPKRLSLKLFNIQVKEVTQNEGTKTIANNLTSTIQVFTDSEYQLPYVLGSAHQGCLPPFPADVFTIPQYGYLTLNNGSQAVGRSSFYCLEYFPSQMLRTGNNFQFTYTFEDVPFHSSYAHSQSLDRLMNPLIDQYLYYLSRIQTTGGTANTQTLGFSQGGPNTMANQAKNWLPGPCYRQQRVSTTTGQNNNSNFAWTAGTKYHLNGRNSLANPGIAMATHKDDEERFFPSNGILIFGKQNAARDNADYSDVMPTSEEEIKTTNPVATEEYGIVADNLQQQNTAPQIGTVNSQGALPGMVWQNRDVYLQGPIWAKIPHTDGNFHPSPLMGGFGLKHPPPQILIKNTPVPADPPTTFNQSKLNSFITQYSTGQVSVEIEWELQKENSKRWNPEIQYTSNYYKSTSVDFAVNTEGVYSEPRPIGTRYLTRNL

SEQ ID NO: 2955 - protein, 738 aa, Artificial Sequence
  source: /note="Description of Artificial Sequence: Synthetic polypeptide"
MAADGYLPDWLEDNLSEGIREWWALKPGAPKPKANQQKQDDGRGLVLPGYKYLGPFNGLDKGEPVNAADAAALEHDKAYDQQLQAGDNPYLRYNHADAEFQERLQEDTSFGGNLGRAVFQAKKRVLEPLGLVEEGAKTAPGKKRPVEPSPQRSPDSSTGIGKKGQQPARKRLNFGQTGDSESVPDPQPLGEPPAAPSGVGPNTMAAGGGAPMADNNEGADGVGSSSGNWHCDSTWLGDRVITTSTRTWALPTYNNHLYKQISNGTSGGATNDNTYFGYSTPWGYFDFNRFHCHFSPRDWQRLINNNWGFRPKRLSFKLFNIQVKEVTQNEGTKTIANNLTSTIQVFTDSEYQLPYVLGSAHQGCLPPFPADVFTIPQYGYLTLNNGSQAVGRSSFYCLEYFPSQMLRTGNNFQFTYTFEDVPFHSSYAHSQSLDRLMNPLIDQYLYYLSRIQTTGGTANTQTLGFSQGGPNTMANQAKNWLPGPCYRQQRVSTTTGQNNNSNFAWTAGTKYHLNGRNSLANPGIAMATHKDDEERFFPSNGILIFGKQNAARDNADYSDVTPTSEEEIKTTNPVATEEYGIVADNLQQQNTAPQIGTVNSQGALPGMVWQNRDVYLQGPIWAKIPHTDGNFHPSPLMGGFGLKHPPPQILIKNTPVPADPPTTFNQSKLNSFITQYSTGQVSVEIEWELQKENSKRWNPEIQYTSNYYKSTSVDFAVNTEGVYSEPRPIGTRYLTRNL

SEQ ID NO: 2956 - protein, 738 aa, Artificial Sequence
  source: /note="Description of Artificial Sequence: Synthetic polypeptide"
MAADGYLPDWLEDNLSEGIREWWALKPGAPKPKANQQKQDDGRGLVLPGYKYLGPFNGLDKGEPVNAADAAALEHDKAYDQQLQAGDNPYLRYNHADAEFQERLQEDTSFGGNLGRAVFQAKKRVLEPLGLVEEGAKTAPGKKRPVEPSPQRSPDSSTGIGKKGQQPARKRLNFGQTGDSESVPDPQPLGEPPAAPSGVGPNTMAAGGGAPMADNNEGADGVGSSSGNWHCDSTWLGDRVITTSTRTWALPTYNNHLYKQISNGTSGGATNDNTYFGYSTPWGYFDFNRFHCHFSPRDWQRLINNNWGFRPKRLSFKLFNIQVKEVTQNEGTKTIANNLTSTIQVFTDSEYQLPYVLGSAHQGCLPPFPADVFTIPQYGYLTLNNGSQAVGRSSFYCLEYFPSQMLRTGNNFQFTYTFEDVPFHSSYAHSQSLDRLMNPLIDQYLYYLSRIQTTGGTANTQTLGFSQGGPNTMANQAKNWLPGPCYRQQRVSTTTGQNNNSNFAWTAGTKYHLNGRNSLANPGIAMATHKDDEERFFPSNGILIFGKQNAARDNADYSDVMPTSEEEIKTTNPVATEEYGIVADNLQQQNTAPQIGTVNSQGALPGMVRQNRDVYLQGPIWAKIPHTDGNFHPSPLMGGFGLKHPPPQILIKNTPVPADPPTTFNQSKLNSFITQYSTGQVSVEIEWELQKENSKRWNPEIQYTSNYYKSTSVDFAVNTEGVYSEPRPIGTRYLTRNL

SEQ ID NO: 2957 - protein, 738 aa, Artificial Sequence
  source: /note="Description of Artificial Sequence: Synthetic polypeptide"
MAADGYLPDWLEDNLSEGIREWWALKPGAPKPKANQQKQDDGRGLVLPGYKYLGPFNGLDKGEPVNAADAAALEHDKAYDQQLQAGDNPYLRYNHADAEFQERLQEDTSFGGNLGRAVFQAKKRVLEPLGLVEEGAKTAPGKKRPVEPSPQRSPDSSTDIGKKGQQPARKRLNFGQTGDSESVPDPQPLGEPPAAPSGVGPNTMAAGGGAPMADNNEGADGVGSSSGNWHCDSTWLGDRVITTSTRTWALPTYNNHLYKQISNGTSGGATNDNTYFGYSTPWGYFDFNRFHCHFSPRDWQRLINNNWGFRPKRLSFKLFNIQVKEVTQNEGTKTIANNLTSTIQVFTDSEYQLPYVLGSAHQGCLPPFPADVFTIPQYGYLTLNNGSQAVGRSSFYCLEYFPSQMLRTGNNFQFTYTFEDVPFHSSYAHSQSLDRLMNPLIDQYLYYLSRIQTTGGTANTQTLGFSQGGPNTMANQAKNWLPGPCYRQQRVSTTTGQNNNSNFAWTAGTKYHLNGRNSLANPGIAMATHKDDEERFFPSNGILIFGKQNAARDNADYSDVMPTSEEEIKTTNPVATEEYGIVADNLQQQNTAPQIGTVNSQGALPGMVWQNRDVYLQGPIWAKIPHTDGNFHPSPLMGGFGLKHPPPQILIKNTPVPADPPTTFNQSKLNSFITQYSTGQVSVEIEWELQKENSKRWNPEIQYTSNYYKSTSVDFAVNTEGVYSEPRPIGTRYLTRNL

SEQ ID NO: 2958 - protein, 738 aa, Artificial Sequence
  source: /note="Description of Artificial Sequence: Synthetic polypeptide"
MAADGYLPDWLEDNLSEGIREWWALKPGAPKPKANQQKQDDGRGLVLPGYKYLGPFNGLDKGEPVNAADAAALEHDKAYDQQLQAGDNPYLRYNHADAEFQERLQEDTSFGGNLGRAVFQAKKRVLEPLGLVEEGAKTAPGKKRPVEPSPQRSPDSSTGIGKKGQQPAGKRLNFGQTGDSESVPDPQPLGEPPAAPSGVGPNTMAAGGGAPMADNNEGADGVGSSSGNWHCDSTWLGDRVITTSTRTWALPTYNNHLYKQISNGTSGGATNDNTYFGYSTPWGYFDFNRFHCHFSPRDWQRLINNNWGFRPKRLSFKLFNIQVKEVTQNEGTKTIANNLTSTIQVFTDSEYQLPYVLGSAHQGCLPPFPADVFTIPQYGYLTLNNGSQAVGRSSFYCLEYFPSQMLRTGNNFQFTYTFEDVPFHSSYAHSQSLDRLMNPLIDQYLYYLSRIQTTGGTANTQTLGFSQGGPNTMANQAKNWLPGPCYRQQRVSTTTGQNNNSNFAWTAGTKYHLNGRNSLANPGIAMATHKDDEERFFPSNGILIFGKQNAARDNADYSDVMPTSEEEIKTTNPVATEEYGIVADNLQQQNTAPQIGTVNSQGALPGMVWQNRDVYLQGPIWAKIPHTDGNFHPSPLMGGFGLKHPPPQILIKNTPVPADPPTTFNQSKLNSFITQYSTGQVSVEIEWELQKENSKRWNPEIQYTSNYYKSTSVDFAVNTEGVYSEPRPIGTRYLTRNL

SEQ ID NO: 2959 - protein, 738 aa, Artificial Sequence
  source: /note="Description of Artificial Sequence: Synthetic polypeptide"
MAADGYLPDWLEDNLSEGIREWWALKPGAPKPKANQQKQDDGRGLVLPGYKYLGPFNGLDKGEPVNAADAAALEHDKAYDQQLQAGDNPYLRYNHADAEFQERLQEDTSFGGNLGRAVFQAKKRVLEPLGLVEEGAKTAPGKKRPVEPSPQRSPDSSTGIGKKGQQPARKRLNFGQTGDSESVPDPQPLGEPPAAPSGVGPNTMAAGGGAPMADNNEGADGVGSSSGNWHCDSTWLGDRVITTSTRTWALPTYNNHLYKQISNGTSGGATNDNTYFGYSTPWGYFDFNRFHCHFSPRDWQRLINNNWGFRPKRLSFKLFNIQVKEVTQNEGTKTIANNLTSTIQVFTDSEYQLPYVLGSAHQGCLPPFPADVFTIPQYGYLTLNNGSQAVGRPSFYCLEYFPSQMLRTGNNFQFTYTFEDVPFHSSYAHSQSLDRLMNPLIDQYLYYLSRIQTTGGTANTQTLGFSQGGPNTMANQAKNWLPGPCYRQQRVSTTTGQNNNSNFAWTAGTKYHLNGRNSLANPGIAMATHKDDEERFFPSNGILIFGKQNAARDNADYSDVMPTSEEEIKTTNPVATEEYGIVADNLQQQNTAPQIGTVNSQGALPGMVWQNRDVYLQGPIWAKIPHTDGNFHPSPLMGGFGLKHPPPQILIKNTPVPADPPTTFNQSKLNSFITQYSTGQVSVEIEWELQKENSKRWNPEIQYTSNYYKSTSVDFAVNTEGVYSEPRPIGTRYLTRNL

SEQ ID NO: 2960 - protein, 738 aa, Artificial Sequence
  source: /note="Description of Artificial Sequence: Synthetic polypeptide"
MAADGYLPDWLEDNLSEGIREWWALKPGAPKPKANQQKQDDGRGLVLPGYKYLGPFNGLDKGEPVNAADAAALEHDKAYDQQLQAGDNPYLRYNHADAEFQERLQEDTSFGGNLGRAVFQAKKRVLEPLGLVEEGAKTAPGKKRPVEPSPQRSPDSSTGIGKKGQQPARKRLNFGQTGDSESVPDPQPLGEPPAAPSGVGPNTMAAGGGAPMADNNEGADGVGSSSGNWHCDSTWLGDRVITTSTRTWALPTYNNHLYKQISNGTSGGATNDNTYFGYSTPWGYFDFNRFHCHFSPRDWQRLINNNWGFRPKRLSFKLFNIQVKAVTQNEGTKTIANNLTSTIQVFTDSEYQLPYVLGSAHQGCLPPFPADVFTIPQYGYLTLNNGSQAVGRSSFYCLEYFPSQMLRTGNNFQFTYTFEDVPFHSSYAHSQSLDRLMNPLIDQYLYYLSRIQTTGGTANTQTLGFSQGGPNTMANQAKNWLPGPCYRQQRVSTTTGQNNNSNFAWTAGTKYHLNGRNSLANPGIAMATHKDDEERFFPSNGILIFGKQNAARDNADYSDVMPTSEEEIKTTNPVATEEYGIVADNLQQQNTAPQIGTVNSQGALPGMVWQNRDVYLQGPIWAKIPHTDGNFHPSPLMGGFGLKHPPPQILIKNTPVPADPPTTFNQSKLNSFITQYSTGQVSVEIEWELQKENSKRWNPEIQYTSNYYKSTSVDFAVNTEGVYSEPRPIGTRYLTRNL

SEQ ID NO: 2961 - protein, 738 aa, Artificial Sequence
  source: /note="Description of Artificial Sequence: Synthetic polypeptide"
MAADGYLPDWLEDNLSEGIREWWALKPGAPKPKANQQKQDDGRGLVLPGYKYLGPFNGLDKGEPVNAADAAALEHDKAYDQQLQAGDNPYLRYNHADAEFQERLQEDTSFGGNLGRAVFQAKKRVLEPLGLVEEGAKTAPGKKRPVEPSPQRSPDSSTGIGKKGQQPARKRLNFGQTGDSESVPDPQPLGEPPAAPSGVGPNTMAAGGGAPMADNNEGADGVGSSSGNWHCDSTWLGDRVITTSTRTWALPTYNNHLYKQISNGTSGGATNDNTYFGYSTPWGYFDFNRFHCHFSPRDWQRLINNNWGFRPKRLSFKLFNIQVKEVTQNEGTKTIANNLTSTIQVFTDSEYQLPYVLGSAHQGCLPPFPADVFTIPQYGYLTLNNGSQAVGRSSFYCLEYFPSQMLRTGNNFQFTYTFEDVPFHSSYAHSQSLDRLMNPLIDQYLYYLSRIQTTGGTANTQTLGFSQGGPNTMANQAKNWLPGPCYRQQRVSTTTGQNNNSNFAWTAGTKYHLNGRNSLANPGIAMATHKDDEERFFPSNGILIFGKQNAARDNADYSDVMPTSEEEIKTTNPVATEEYGIVADNLQQQNTAPQIGTVNSQGALPGMVWQNRDVYLQGPIWAKIPHTDGNFHPSPLMGGFGLKHPPPQILIKNTPVPADPPTAFNQSKLNSFITQYSTGQVSVEIEWELQKENSKRWNPEIQYTSNYYKSTSVDFAVNTEGVYSEPRPIGTRYLTRNL

SEQ ID NO: 2962 - protein, 738 aa, Artificial Sequence
  source: /note="Description of Artificial Sequence: Synthetic polypeptide"
MAADGYLPDWLEDNLSEGIREWWALKPGAPKPKANQQKQDDGRGLVLPGYKYLGPFNGLDKGEPVNAADAAALEHDKAYDQQLQAGDNPYLRYNHADAEFQERLQEDTSFGGNLGRAVFQAKKRVLEPLGLVEEGAKTAPGKKRPVEPSPQRSPDSSTGIGKKGQQPARKRLNFGQTGDSESVPDPQPLGEPPAAPSGVGPNTMAAGGGAPMADNNEGADGVGSSSGNWHCDSTWLGDRVITTSTRTWALPTYNNHLYKQISNGTSGGATNDNTYFGYSTPWGYFDFNRFRCHFSPRDWQRLINNNWGFRPKRLSFKLFNIQVKEVTQNEGTKTIANNLTSTIQVFTDSEYQLPYVLGSAHQGCLPPFPADVFTIPQYGYLTLNNGSQAVGRSSFYCLEYFPSQMLRTGNNFQFTYTFEDVPFHSSYAHSQSLDRLMNPLIDQYLYYLSRIQTTGGTANTQTLGFSQGGPNTMANQAKNWLPGPCYRQQRVSTTTGQNNNSNFAWTAGTKYHLNGRNSLANPGIAMATHKDDEERFFPSNGILIFGKQNAARDNADYSDVMPTSEEEIKTTNPVATEEYGIVADNLQQQNTAPQIGTVNSQGALPGMVWQNRDVYLQGPIWAKIPHTDGNFHPSPLMGGFGLKHPPPQILIKNTPVPADPPTTFNQSKLNSFITQYSTGQVSVEIEWELQKENSKRWNPEIQYTSNYYKSTSVDFAVNTEGVYSEPRPIGTRYLTRNL

SEQ ID NO: 2963 - protein, 738 aa, Artificial Sequence
  source: /note="Description of Artificial Sequence: Synthetic polypeptide"
MAADGYLPDWLEDNLSEGIREWWALKPGAPKPKANQQKQDDGRGLVLPGYKYLGPFNGLDKGEPVNAADAAALEHDKAYDQQLQAGDNPYLRYNHADAEFQERLQEDTSFGGNLGRAVFQAKKRVLEPLGLVEEGAKTAPGKKRPVEPSPQRSPDSSTGIGKKGQQPARKRLNFGQTGDSESVPDPQPLGEPPAAPSGVGPNTMAAGGGAPMADNNEGADGVGSSSGNWHCDSTWLGDRVITTSTRTWALPTYNNHLYKQISNGTSGGATNDNTYFGYSTPWGYFDFNRFHCHFSPRDWQRLINNNWGFRPKRLSFKLFNIQVKEVTQNEGTKTIANNLTSTIQVFTDSEYQLPYVLGSAHQGCLPPFPADVFTIPQYGYLTLNNGSQAVGRSSFYCLEYFPSQMLRTGNNFQFTYTLEDVPFHSSYAHSQSLDRLMNPLIDQYLYYLSRIQTTGGTANTQTLGFSQGGPNTMANQAKNWLPGPCYRQQRVSTTTGQNNNSNFAWTAGTKYHLNGRNSLANPGIAMATHKDDEERFFPSNGILIFGKQNAARDNADYSDVMPTSEEEIKTTNPVATEEYGIVADNLQQQNTAPQIGTVNSQGALPGMVWQNRDVYLQGPIWAKIPHTDGNFHPSPLMGGFGLKHPPPQILIKNTPVPADPPTTFNQSKLNSFITQYSTGQVSVEIEWELQKENSKRWNPEIQYTSNYYKSTSVDFAVNTEGVYSEPRPIGTRYLTRNL

SEQ ID NO: 2964 - protein, 738 aa, Artificial Sequence
  source: /note="Description of Artificial Sequence: Synthetic polypeptide"
MAADGYLPDWLEDNLSEGIREWWALKPGAPKPKANQQKQDDGRGLVLPGYKYLGPFNGLDKGEPVNAADAAALEHDKAYDQQLQAGDNPYLRYNHADAEFQERLQEDTSFGGNLGRAVFQAKKRVLEPLGLVEEGAKTAPGKKRPVEPSPQRSPDSSTGIGKKGQQPARKRLNFGQTGDSESVPDPQPLGEPPAAPSGVGPNTMAAGGGAPMADNNEGADGVGSSSGNWHCDSTWLGDRVITTSTRTWALPTYNNHLYKQISNGTSGGATNDNTYFGYSTPWGYFDFNRFHCHFSPRDWQRLINNNWGFRPKRLSFKLFNIQVKEVTQNEGTKTIANNLTSTIQVFTDSEYQLPYVLGSAHQGCLPPFPADVFTIPQYGYLTLNNGSQAVGRSSFYCLEYFPSQMLRTGNNFQFTYTFEDVPFHSSYAHSQSLDRLMNPLIDQYLYYLSRIQTTGGTANTQTLGFSQGGPNTMANQAKNWLPGPCYRQQRVSTTTGQNNNSNFAWTAGTKYHLNGRNSLANPGIAMATHKDDEERFFPSNGILIFGKQNAARDNADYSDVMPTSEEEIKTTNPVATEEYGIVADNLQQQSTAPQIGTVNSQGALPGMVWQNRDVYLQGPIWAKIPHTDGNFHPSPLMGGFGLKHPPPQILIKNTPVPADPPTTFNQSKLNSFITQYSTGQVSVEIEWELQKENSKRWNPEIQYTSNYYKSTSVDFAVNTEGVYSEPRPIGTRYLTRNL

SEQ ID NO: 2965 - protein, 738 aa, Artificial Sequence
  source: /note="Description of Artificial Sequence: Synthetic polypeptide"
MAADGYLPDWLEDNLSEGIREWWALKPGAPKPKANQQKQDDGRGLVLPGYKYLGPFNGLDKGEPVNAADAAALEHDKAYDQQLQAGDNPYLRYNHADAEFQERLQEDTSFGGNLGRAVFQAKKRVLEPLGLVEEGAKTAPGKKRPVEPSPQRSPDSSTGIGKKGQQPARKRLNFGQTGDSESVPDPQPLGEPPAAPSGVGPNTMAAGGGAPMADNNEGADGVGSSSGNWHCDSTWLGDRVITTSTRTWALPTYNNHLYKQISNGTSGGATNDNTYFGYSTPWGYFDFNRFHCHFSPRDWQRLINNNWGFRPKRLSFKLFNIQVKEVTQNEGTKTIANNLTSTIQVFTDSEYQLPYVLGSAHQGCLPPFPADVFTIPQYGYLTLNNGSQAVGRSSFYCLEYFPSQMLRTGNNFQFTYTFEDVPFHSSYAHSQSLDRLMNPLIDQYLYYLSRIQTTGGTANTQTLGFSQGGPNTMANQAKNWLPGPCYRQQRVSTTTGQNNNSNFAWTAGTKYHLNGRNSLANPGIAMATHKDDEERFFPSNGILIFGKQNAARDNADYSDVMPTSEEEIKTTNPVATEEYGIVADNLQQQNTAPQIGTVSSQGALPGMVWQNRDVYLQGPIWAKIPHTDGNFHPSPLMGGFGLKHPPPQILIKNTPVPADPPTTFNQSKLNSFITQYSTGQVSVEIEWELQKENSKRWNPEIQYTSNYYKSTSVDFAVNTEGVYSEPRPIGTRYLTRNL

SEQ ID NO: 2966 - protein, 738 aa, Artificial Sequence
  source: /note="Description of Artificial Sequence: Synthetic polypeptide"
MAADGYLPDWLEDNLSEGIREWWALKPGAPKPKANQQKQDDGRGLVLPGYKYLGPFNGLDKGEPVNAADAAALEHDKAYDQQLQAGDNPYLRYNHADAEFQERLQEDTSFGGNLGRAVFQAKKRVLEPLGLVEEGAKTAPGKKRPVEPSPQRSPDSSTGIGKKGQQPARKRLNFGQTGDSESVPDPQPLGEPPAAPSGVGPNTMAAGGGAPMADNNEGADGVGSSSGNWHCDSTWLGDRVITTSTRTWALPTYNNHLYKQISNGTSGGATNDNTYFGYSTPWGYFDFNRFHCHFSPRDWQRLINNNWGFRPKRLSFKLFNIQVKEVTQNEGTKTIANNLTSTIQVFTDSEYQLPYVLGSAHQGCLPPFPADVFTIPQYGYLTLNNGSQAVGRSSFYCLEYFPSQMLRTGNNFQFTYTFEDVPFHSSYAHSQSLDRLMNPLIDQYLYYLSRIQTTGGTANTQTLGFSQGGPNTMANQAKNWLPGPCYRQQRVSTTTGQNNNSNFAWTAGTKYHLNGRNSLANPGIAMATHKDDEERFFPSNGILIFGKQSAARDNADYSDVMPTSEEEIKTTNPVATEEYGIVADNLQQQNTAPQIGTVNSQGALPGMVWQNRDVYLQGPIWAKIPHTDGNFHPSPLMGGFGLKHPPPQILIKNTPVPADPPTTFNQSKLNSFITQYSTGQVSVEIEWELQKENSKRWNPEIQYTSNYYKSTSVDFAVNTEGVYSEPRPIGTRYLTRNL

SEQ ID NO: 2967 - protein, 738 aa, Artificial Sequence
  source: /note="Description of Artificial Sequence: Synthetic polypeptide"
MAADGYLPDWLEDNLSEGIREWWALKPGAPKPKANQQKQDDGRGLVLPGYKYLGPFNGLDKGEPVNAADAAALEHDKAYDQQLQAGDNPYLRYNHADAEFQERLQEDTSFGGNLGRAVFQAKKRVLEPLGLVEEGAKTAPGKKRPVEPSPQRSPDSSTGIGKKGQQPARKRLNFGQTGDSESVPDPQPLGEPPAAPSGVGPNTMAAGGGAPMADNNEGADGVGSSSGNWHCDSTWLGDRVITTSTRTWALPTYNNHLYKQISNGTSGGATNDNTYFGYSTPWGYFDFNRFHCHFSPRDWQRLINNNWGFRPKRLSFKLFNIQVKEVTQNEGTKTIANNLTSTIQVFTDSEYQLPYVLGSAHQGCLPPFPADVFTIPQYGYLTLNNGSQAVGRSSFYCLEYFPSQMLRTGNNFQFTYTFEDVPFHSSYAHSQSLDRLMNPLIDQYLYYLSRIQTAGGTANTQTLGFSQGGPNTMANQAKNWLPGPCYRQQRVSTTTGQNNNSNFAWTAGTKYHLNGRNSLANPGIAMATHKDDEERFFPSNGILIFGKQNAARDNADYSDVMPTSEEEIKTTNPVATEEYGIVADNLQQQNTAPQIGTVNSQGALPGMVWQNRDVYLQGPIWAKIPHTDGNFHPSPLMGGFGLKHPPPQILIKNTPVPADPPTTFNQSKLNSFITQYSTGQVSVEIEWELQKENSKRWNPEIQYTSNYYKSTSVDFAVNTEGVYSEPRPIGTRYLTRNL

SEQ ID NO: 2968 - protein, 738 aa, Artificial Sequence
  source: /note="Description of Artificial Sequence: Synthetic polypeptide"
MAADGYLPDWLEDNLSEGIREWWALKPGAPKPKANQQKQDDGRGLVLPGYKYLGPFNGLDKGEPVNAADAAALEHDKAYDQQLQAGDNPYLRYNHADAEFQERLQEDTSFGGNLGRAVFQAKKRVLEPLGLVEEGAKTAPGKKRPVEPSPQRSPDSSTGIGKKGQQPARKRLNFGQTGDSESVPDPQPLGEPPAAPSGVGPNTMAAGGGAPMADNNEGADGVGSSSGNWHCDSTWLGDRVITTSTRTWALPTYNNHLYKQISNGTSGGATNDNTYFGYSTPWGYFDFNRFHCHFSPRDWQRLINNNWGFRPKRLSFKLFNIQVKEVTQNEGTKTIANNLTSTIQVFTDSEYQLPYVLGSAHQGCLPPFPADVFTIPQYGYLTLNNGSQAVGRSSFYCLEYFPSQMLRTGNNFQFTYTFEDVPFHSSYAHSQNLDRLMNPLIDQYLYYLSRIQTTGGTANTQTLGFSQGGPNTMANQAKNWLPGPCYRQQRVSTTTGQNNNSNFAWTAGTKYHLNGRNSLANPGIAMATHKDDEERFFPSNGILIFGKQNAARDNADYSDVMPTSEEEIKTTNPVATEEYGIVADNLQQQNTAPQIGTVNSQGALPGMVWQNRDVYLQGPIWAKIPHTDGNFHPSPLMGGFGLKHPPPQILIKNTPVPADPPTTFNQSKLNSFITQYSTGQVSVEIEWELQKENSKRWNPEIQYTSNYYKSTSVDFAVNTEGVYSEPRPIGTRYLTRNL

SEQ ID NO: 2969 - protein, 738 aa, Artificial Sequence
  source: /note="Description of Artificial Sequence: Synthetic polypeptide"
MAADGYLPDWLEDNLSEGIREWWALKPGAPKPKANQQKQDDGRGLVLPGYKYLGPFNGLDKGEPVNAADAAALEHDKAYDQQLQAGDNPYLRYNHADAEFQERLQEDTSFGGNLGRAVFQAKKRVLEPLGLVEEGAKTAPGKKRPVEPSPQRSPDSSTGIGKKGQQPARKRLNFGQTGDSESVPDPQPLGEPPAAPSGVGPNTMAAGGGAPMADNNEGADGVGSSSGNWHCDSTWLGDRVITTSTRTWALPTYNNHLYKQISNGTSGGATNDNTYFGYSTPWGYFDFNRFHCHFSPRDWQRLINNNWGFRPKRLSFKLFNIQVKAVTQNEGTKTIANNLTSTIQVFTDSEYQLPYVLGSAHQGCLPPFPADVFTIPQYGYLTLNNGSQAVGRSSFYCLEYFPSQMLRTGNNFQFTYTFEDVPFHSSYAHSQSLDRLMNPLIDQYLYYLSRIQTTGGTANTQTLGFSQGGPNTMANQAKNWLPGPCYRQQRVSTTTGQNNNSNFAWTAGTKYHLNGRNSLANPSIAMATHKDDEERFFPSNGILIFGKQNAARDNADYSDVMPTSEEEIKTTNPVATEEYGIVADNLQQQNTAPQIGTVNSQGALPGMVWQNRDVYLQGPIWAKIPHTDGNFHPSPLMGGFGLKHPPPQILIKNTPVPADPPTTFNQSKLNSFITQYSTGQVSVEIEWELQKENSKRWNPEIQYTSNYYKSTSVDFAVNTEGVYSEPRPIGTRYLTRNL

SEQ ID NO: 2970 - protein, 738 aa, Artificial Sequence
  source: /note="Description of Artificial Sequence: Synthetic polypeptide"
MAADGYLPDWLEDNLSEGIREWWALKPGAPKPKANQQKQDDGRGLVLPGYKYLGPFNGLDKGEPVNAADAAALEHDKAYDQQLQAGDNPYLRYNHADAEFQERLQEDTSFGGNLGRAVFQAKKRVLEPLGLVEEGAKTAPGKKRPVEPSPQRSPDSSTGIGKKGQQPARKRLNFGQTGDSESVPDPQPLGEPPAAPSGVGPNTMAAGGGAPMADNNEGADGVGSSSGNWHCDSTWLGDRVITTSTRTWALPTYNNHLYKQISNGTSGGATNDNTYFGYSTPWGYFDFNRFHCHFSPRDWQRLINNNWGFRPKRLSFKLFNIQVKEVTQNEGTKTIANNLTSTIQVFTDSEYQLPYVLGSAHQGCLPPFPADVFTIPQYGYLTLNNGSQAVGRSSFYCLEYFPSQMLRTGNNFQFTYTFEDVPFHSSYAHSQSLDRLMNPLIDQYLYYLSRIQTTGGTANTQTLGFSQGGPNTMANQAKNWLPGPCYRQQRVSTTTGQNNNSNFAWTAGTKYHLNGRNSLANPGIAMATHKDDEERFFPSNGILIFGKQNAARDNADYSDVMPTSEEEIKTTNPVATEEYDIVADNLQQQNTAPQIGTVNSQGALPGMVWQNRDVYLQGPIWAKIPHTDGNFHPSPLMGGFGLKHPPPQILIKNTPVPADPPTTFNQSKLNSFITQYSTGQVSVEIEWELQKENSKRWNPEIQYTSNYYKSTSVDFAVNTEGVYSEPRPIGTRYLTRNL

SEQ ID NO: 2971 - protein, 738 aa, Artificial Sequence
  source: /note="Description of Artificial Sequence: Synthetic polypeptide"
MAADGYLPDWLEDNLSEGIREWWALKPGAPKPKANQQKQDDGRGLVLPGYKYLGPFNGLDKGEPVNAADAAALEHDKAYDQQLQAGDNPYLRYNHADAEFQERLQEDTSFGGNLGRAVFQAKKRVLEPLGLVEEGAKTAPGKKRPVEPSPQRSPDSSTGIGKKGQQPARKRLNFGQTGDSESVPDPQPLGEPPAAPSGVGPNTMAAGGGAPMADNNEGADGVGSSSGNWHCDSTWLGDRVITTSTRTWALPTYNNHLYKQISNGTSGGATNDNTYFGYSTPWGYFDFNRFHCHFSPRDWQRLINNNWGFRPKRLSFKLFNIQVKEVTQNEGTKTIANNLTSTIQVFTDSEYQLPYVLGSAHQGCLPPFPADVFTIPQYGYLTLNNGSQAVGRSSFYCLEYFPSQMLRTGNNFQFTYTFEDVPFHSSYAHSQSLDRLMNPLIDQYLYYLSRIQTTGGTANTQTPGFSQGGPNTMANQAKNWLPGPCYRQQRVSTTTGQNNNSNFAWTAGTKYHLNGRNSLANPGIAMATHKDDEERFFPSNGILIFGKQNAARDNADYSDVMPTSEEEIKTTNPVATEEYGIVADNLQQQNTAPQIGTVNSQGALPGMVWQNRDVYLQGPIWAKIPHTDGNFHPSPLMGGFGLKHPPPQILIKNTPVPADPPTTFNQSKLNSFITQYSTGQVSVEIEWELQKENSKRWNPEIQYTSNYYKSTSVDFAVNTEGVYSEPRPIGTRYLTRNL

SEQ ID NO: 2972 - protein, 738 aa, Artificial Sequence
  source: /note="Description of Artificial Sequence: Synthetic polypeptide"
MAADGYLPDWLEDNLSEGIREWWALKPGAPKPKANQQKQDDGRGLVLPGYKYLGPFNGLDKGEPVNAADAAALEHDKAYDQQLQAGDNPYLRYNHADAEFQERLQEDTSFGGNLGRAVFQAKKRVLEPLGLVEEGAKTAPGKKRPVEPSPQRSPDSSTGIGKKGQQPARKRLNFGQTGDSESVPDPQPLGEPPAAPSGVGPNTMAAGGGAPMADNNEGADGVGSSSGNWHCDSTWLGDRVITTSTRTWALPTYNNHLYKQISNGTSGGATNDNTYFGYSTPWGYFDFNRFHCHFSPRDWQRLINNNWGFRPKRLSFKLFNIQVKEVTQNEGTKTIANNLTSTIQVFTDSEYQLPYVLGSAHQGCLPPFPADVFTIPQYGYLTLNNGSQAVGRSSSYCLEYFPSQMLRTGNNFQFTYTFEDVPFHSSYAHSQSLDRLMNPLIDQYLYYLSRIQTTGGTANTQTLGFSQGGPNTMANQAKNWLPGPCYRQQRVSTTTGQNNNSNFAWTAGTKYHLNGRNSLANPGIAMATHKDDEERFFPSNGILIFGKQNAARDNADYSDVMPTSEEEIKTTNPVATEEYGIVADNLQQQNTAPQIGTVNSQGALPGMVWQNRDVYLQGPIWAKIPHTDGNFHPSPLMGGFGLKHPPPQILIKNTPVPADPPTTFNQSKLNSFITQYSTGQVSVEIEWELQKENSKRWNPEIQYTSNYYKSTSVDFAVNTEGVYSEPRPIGTRYLTRNL

SEQ ID NO: 2973 - protein, 738 aa, Artificial Sequence
  source: /note="Description of Artificial Sequence: Synthetic polypeptide"
MAADGYLPDWLEDNLSEGIREWWALKPGAPKPKANQQKQDDGRGLVLPGYKYLGPFNGLDKGEPVNAADAAALEHDKAYDQQLQAGDNPYLRYNHADAEFQERLQEDTSFGGNLGRAAFQAKKRVLEPLGLVEEGAKTAPGKKRPVEPSPQRSPDSSTGIGKKGQQPARKRLNFGQTGDSESVPDPQPLGEPPAAPSGVGPNTMAAGGGAPMADNNEGADGVGSSSGNWHCDSTWLGDRVITTSTRTWALPTYNNHLYKQISNGTSGGATNDNTYFGYSTPWGYFDFNRFHCHFSPRDWQRLINNNWGFRPKRLSFKLFNIQVKEVTQNEGTKTIANNLTSTIQVFTDSEYQLPYVLGSAHQGCLPPFPADVFTIPQYGYLTLNNGSQAVGRSSFYCLEYFPSQMLRTGNNFQFTYTFEDVPFHSSYAHSQSLDRLMNPLIDQYLYYLSRIQTTGGTANTQTLGFSQGGPNTMANQAKNWLPGPCYRQQRVSTTTGQNNNSNFAWTAGTKYHLNGRNSLANPGIAMATHKDDEERFFPSNGILIFGKQNAARDNADYSDVMPTSEEEIKTTNPVATEEYGIVADNLQQQNTAPQIGTVNSQGALPGMVWQNRDVYLQGPIWAKIPHTDGNFHPSPLMGGFGLKHPPPQILIKNTPVPADPPTTFNQSKLNSFITQYSTGQVSVEIEWELQKENSKRWNPEIQYTSNYYKSTSVDFAVNTEGVYSEPRPIGTRYLTRNL

SEQ ID NO: 2974 - protein, 738 aa, Artificial Sequence
  source: /note="Description of Artificial Sequence: Synthetic polypeptide"
MAADGYLPDWLEDNLSEGIREWWALKPGAPKPKANQQKQDDGRGLVLPGYKYLGPFNGLDKGEPVNAADAAALEHDKAYDQQLQAGDNPYLRYNHADAEFQERLQEDTSFGGNLGRAVFQAKKRVLEPLGLVEEGAKTAPGKKRPVEPSPQRSPDSSTGIGKKGQQPARKRLNFGQTGDSESVPDPQPLGEPPAAPSGVGPNTMAAGGGAPMADNNEGADGVGSSSGNWHCDSTWLGDRVITTSTRTWALPTYNNHLYKQISNGTSGGATDDNTYFGYSTPWGYFDFNRFHCHFSPRDWQRLINNNWGFRPKRLSFKLFNIQVKEVTQNEGTKTIANNLTSTIQVFTDSEYQLPYVLGSAHQGCLPPFPADVFTIPQYGYLTLNNGSQAVGRSSFYCLEYFPSQMLRTGNNFQFTYTFEDVPFHSSYAHSQSLDRLMNPLIDQYLYYLSRIQTTGGTANTQTLGFSQGGPNTMANQAKNWLPGPCYRQQRVSTTTGQNNNSNFAWTAGTKYHLNGRNSLANPGIAMATHKDDEERFFPSNGILIFGKQNAARDNADYSDVMPTSEEEIKTTNPVATEEYGIVADNLQQQNTAPQIGTVNSQGALPGMVWQNRDVYLQGPIWAKIPHTDGNFHPSPLMGGFGLKHPPPQILIKNTPVPADPPTTFNQSKLNSFITQYSTGQVSVEIEWELQKENSKRWNPEIQYTSNYYKSTSVDFAVNTEGVYSEPRPIGTRYLTRNL

SEQ ID NO: 2975 - protein, 738 aa, Artificial Sequence
  source: /note="Description of Artificial Sequence: Synthetic polypeptide"
MAADGYLPDWLEDNLSEGIREWWALKPGAPKPKANQQKQDDGRGLVLPGYKYLGPFNGLDKGEPVNAADAAALEHDKAYDQQLQAGDNPYLRYNHADAEFQERLQEDTSFGGNLGRAVFQAKKRVLEPLGLVEEGAKTAPGKKRPVEPSPQRSPDSSTGIGKKGQQPARKRLNFGQTGDSESVPDPQPLGEPPAAPSGVGPNTMAAGGGAPMADNNEGADGVGSSSGNWHCDSTWLGDRVITTSTRTWALPTYNNHLYKQISNGTSGGATNDNTYFGYSTPWGYFDFNRFHCHFSPRDWQRLINNNWGFRPKRLSFKLFNIQVKEVTQNEGTKTIANNLTSTIQVFTDSEYQLPYVLGSAHQGCLPPFPADVFTIPQYGYLTLNNGSQAVGRSSFYCLEYFPSQMLRTGNNFQFTYTFEDVPFHSSYAHSQSLDRLMNPLIDQYLYYLSRIQTTGGTANTQTLGFSQGGPNTMANQAKNWLPGPCYRQQRVSTTTGQNNNSNFAWTAGTKYHLNGRNSLANPGIAMATHKDDEERFFPSNGILIFGKQNATRDNADYSDVMPTSEEEIKTTNPVATEEYGIVADNLQQQNTAPQIGTVNSQGALPGMVWQNRDVYLQGPIWAKIPHTDGNFHPSPLMGGFGLKHPPPQILIKNTPVPADPPTTFNQSKLNSFITQYSTGQVSVEIEWELQKENSKRWNPEIQYTSNYYKSTSVDFAVNTEGVYSEPRPIGTRYLTRNL

SEQ ID NO: 2976 - protein, 738 aa, Artificial Sequence
  source: /note="Description of Artificial Sequence: Synthetic polypeptide"
MAADGYLPDWLEDNLSEGIREWWALKPGAPKPKANQQKQDDGRGLVLPGYKYLGPFNGLDKGEPVNAADAAALEHDKAYDQQLQAGDNPYLRYNHADAEFQERLQEDTSFGGNLGRAVFQAKKRVLEPLGLVEEGAKTAPGKKRPVEPSPQRSPDSSTGIGKKGQQPARKRLNFGQTGDSESVPDPQPLGEPPAAPSGVGPNTMAAGGGAPMADNNEGADGVGSSSGNWHCDSTWLGDRVITTSTRTWALPTYNNHLYKQISNGTSGGATNDNTYFGYSTPWGYFDFNRFHCHFSPRDWQRLINNNWGFRPKRLSFKLFNIQVKEVTQNEGTKTIANNLTSTIQVFTDSEYQLPYVLGSAHQGCLPPFPADVFTIPQYGYLTLNNGSQAVGRSSFYCLEYFPSQMLRTGNNFQFTYTFEDVPFHSSYAHSQSLDRLMNPLIDQYLYYLSRIQTTGGTANTQTLGFSQGGPNTMANQAKNWLPGPCYRQQRVSTTTGQNNNSNFAWTAGTKYHLNGRNSLANPGIAMATHKDDEERFFPSNGILIFGKQNAARDNADYSDVMPTSEEEIKTTNPVATEEHGIVADNLQQQNTAPQIGTVNSQGALPGMVWQNRDVYLQGPIWAKIPHTDGNFHPSPLMGGFGLKHPPPQILIKNTPVPADPPTTFNQSKLNSFITQYSTGQVSVEIEWELQKENSKRWNPEIQYTSNYYKSTSVDFAVNTEGVYSEPRPIGTRYLTRNL

SEQ ID NO: 2977 - protein, 738 aa, Artificial Sequence
  source: /note="Description of Artificial Sequence: Synthetic polypeptide"
MAADGYLPDWLEDNLSEGIREWWALKPGAPKPKANQQKQDDGRGLVLPGYKYLGPFNGLDKGEPVNAADAAALEHDKAYDQQLQAGDNPYLRYNHADAEFQERLQEDTSFGGNLGRAVFQAKKRVLEPLGLVEEGAKTAPGKKRPVEPSPQRSPDSSTGIGKKGQQPARKRLNFGQTGDSESVPDPQPLGEPPAAPSGVGPNTMAAGGGAPMADNNEGADGVGSSSGNWHCDSTWLGDRVITTSTRTWALPTYNNHLYKQISNGTSGGATNDNTYFGYSTPWGYFDFNRFHCHFSPRDWQRLINNNWGFRPKRLSFKLFNIQVKEVTQNEGTKTIANNLTSTIQVFTDSEYQLPYVLGSAHQGCLPPFPADVFTIPQYGYLTLNNGSQAVGRSSFYCLEYFPSQMLRTGNNFQFTYTFEDVPFHSSYARSQSLDRLMNPLIDQYLYYLSRIQTTGGTANTQTLGFSQGGPNTMANQAKNWLPGPCYRQQRVSTTTGQNNNSNFAWTAGTKYHLNGRNSLANPGIAMATHKDDEERFFPSNGILIFGKQNAARDNADYSDVMPTSEEEIKTTNPVATEEYGIVADNLQQQNTAPQIGTVNSQGALPGMVWQNRDVYLQGPIWAKIPHTDGNFHPSPLMGGFGLKHPPPQILIKNTPVPADPPTTFNQSKLNSFITQYSTGQVSVEIEWELQKENSKRWNPEIQYTSNYYKSTSVDFAVNTEGVYSEPRPIGTRYLTRNL

SEQ ID NO: 2978 - protein, 738 aa, Artificial Sequence
  source: /note="Description of Artificial Sequence: Synthetic polypeptide"
MAADGYLPDWLEDNLSEGIREWWALKPGAPKPKANQQKQDDGRGLVLPGYKYLGPFNGLDKGEPVNAADAAALEHDKAYDQQLQAGDNPYLRYNHADAEFQERLQEDTSFGGNLGRAVFQAKKRVLEPLGLVEEGAKTAPGKKRPVEPSPQRSPDSSTGIGKKGQQPARKRLNFGQTGDSESVPDPQPLGEPPAAPSGVGPNTMAAGGGAPMADNNEGADGVGSSSGNWHCDSTWLGDRVITTSTRTWALPTYNNHLYKQISNGTSGGATNDNTYFGYSTPWGYFDFNRFHCHFSPRDWQRLINNNWGFRPKRLSFKLFNIQVKEVTQNEGTKTIANNLTSTIQVFTDSEYQLPYVLGSAHQGCLPPLPADVFTIPQYGYLTLNNGSQAVGRSSFYCLEYFPSQMLRTGNNFQFTYTFEDVPFHSSYAHSQSLDRLMNPLIDQYLYYLSRIQTTGGTANTQTLGFSQGGPNTMANQAKNWLPGPCYRQQRVSTTTGQNNNSNFAWTAGTKYHLNGRNSLANPGIAMATHKDDEERFFPSNGILIFGKQNAARDNADYSDVMPTSEEEIKTTNPVATEEYGIVADNLQQQNTAPQIGTVNSQGALPGMVWQNRDVYLQGPIWAKIPHTDGNFHPSPLMGGFGLKHPPPQILIKNTPVPADPPTTFNQSKLNSFITQYSTGQVSVEIEWELQKENSKRWNPEIQYTSNYYKSTSVDFAVNTEGVYSEPRPIGTRYLTRNL

SEQ ID NO: 2979 - protein, 738 aa, Artificial Sequence
  source: /note="Description of Artificial Sequence: Synthetic polypeptide"
MAADGYLPDWLEDNLSEGIREWWALKPGAPKPKANQQKQDDGRGLVLPGYKYLGPFNGLDKGEPVNAADAAALEHDKAYDQQLQAGDNPYLRYNHADAEFQERLQEDTSFGGNLGRAVFQAKKRVLEPLGLVEEGAKTAPGKKRPVEPSPQRSPDSSTGIGKKGQQPARKRLNFGQTGDSESVPDPQPLGEPPAAPSGVGPNTMAAGGGAPMADNNEGADGVGSSSGNWHCDSTWLGDRVITTSTRTRALPTYNNHLYKQISNGTSGGATNDNTYFGYSTPWGYFDFNRFHCHFSPRDWQRLINNNWGFRPKRLSFKLFNIQVKEVTQNEGTKTIANNLTSTIQVFTDSEYQLPYVLGSAHQGCLPPFPADVFTIPQYGYLTLNNGSQAVGRSSFYCLEYFPSQMLRTGNNFQFTYTFEDVPFHSSYAHSQSLDRLMNPLIDQYLYYLSRIQTTGGTANTQTLGFSQGGPNTMANQAKNWLPGPCYRQQRVSTTTGQNNNSNFAWTAGTKYHLNGRNSLANPGIAMATHKDDEERFFPSNGILIFGKQNAARDNADYSDVMPTSEEEIKTTNPVATEEYGIVADNLQQQNTAPQIGTVNSQGALPGMVWQNRDVYLQGPIWAKIPHTDGNFHPSPLMGGFGLKHPPPQILIKNTPVPADPPTTFNQSKLNSFITQYSTGQVSVEIEWELQKENSKRWNPEIQYTSNYYKSTSVDFAVNTEGVYSEPRPIGTRYLTRNL

SEQ ID NO: 2980 - protein, 738 aa, Artificial Sequence
  source: /note="Description of Artificial Sequence: Synthetic polypeptide"
MAADGYLPDWLEDNLSEGIREWWALKPGAPKPKANQQKQDDGRGLVLPGYKYLGPFNGLDKGEPVNAADAAALEHDKAYDQQLQAGDNPYLRYNHADAEFQERLQEDTSFGGNLGRAVFQAKKRVLEPLGLVEEGAKTAPGKKRPVEPSPQRSPDSSTGIGKKGQQPARKRLNFGQTGDSESVPDPQPLGEPPAAPSGVGPNTMAAGGGAPMADNNEGADGVGSSSGNWHCDSTWLGDRVITTSTRTWALPTYNNHLYKQISNGTSGGATNDNTYFGYSTPWGYFDFNRFHCHFSPRDWQRLINNNWGFRPKRLSFKLFNIQVKEVTQNEGTKTIANNLTSTIQVFTDSEYQLPYVLGSAHQGCLPPFPADVFTIPQYGYLTLNNGSQAVGRSSFYCLEYFPSQMLRTGNNFQFTYTFEDVPFHSSYAHSQSLDRLMNPLIDQYLYYLSRIQTTGGTANTQTLGFSQGGPNTMANQAKNWLPGPCYRQQRVSTTTGQNNNSNFAWTAGTKYHLNGRNSLANPGIAMTTHKDDEERFFPSNGILIFGKQNAARDNADYSDVMPTSEEEIKTTNPVATEEYGIVADNLQQQNTAPQIGTVNSQGALPGMVWQNRDVYLQGPIWAKIPHTDGNFHPSPLMGGFGLKHPPPQILIKNTPVPADPPTTFNQSKLNSFITQYSTGQVSVEIEWELQKENSKRWNPEIQYTSNYYKSTSVDFAVNTEGVYSEPRPIGTRYLTRNL

SEQ ID NO: 2981 - protein, 738 aa, Artificial Sequence
  source: /note="Description of Artificial Sequence: Synthetic polypeptide"
MAADGYLPDWLEDNLSEGIREWWALKPGAPKPKANQQKQDDGRGLVLPGYKYLGPFNGLDKGEPVNAADAAALEHDKAYDQQLQAGDNPYLRYNHADAEFQERLQEDTSFGGNLGRAVFQAKKRVLEPLGLVEEGAKTAPGKKRPVEPSPQRSPDSSTGIGKKGQQPARKRLNFGQTGDSESVPDPQPLGEPPAAPSGVGPNTMAAGGGAPMADNNEGADGVGSSSGNWHCDSTWLGDRVITTSTRTWALPTYNNHLYKQISNGTSGGATNDNTYFGYSTPWGYFDFNRFHCHFSPRDWQRLINNNWGFRPKRLSFKLFNIQVKEVTQNEGTKTIANNLTSTIQVFTDSEYQLPYVLGSAHQGCLPPFPADVFTIPQYGYLTLNNGSQAVGRSSFYCLEYFPSQMLRTGNNFQFTYTFEDVPFHSSYAHSQSLDRLMNPLIDQYLYYLSRIQTTGGTANTQTLGFSQGGPNTMANQAKNWLPGPCYRQQRVSTTTGQNNNSNFAWTAGTKYHLNGRNSLANPGIAMATHKDDEERFFPSNGILIFGKQNAARDNADYSDVMPTSEEEIKTTNPVATEEYGIVADNLQQQNTAPQIGTVNSQGVLPGMVWQNRDVYLQGPIWAKIPHTDGNFHPSPLMGGFGLKHPPPQILIKNTPVPADPPTTFNQSKLNSFITQYSTGQVSVEIEWELQKENSKRWNPEIQYTSNYYKSTSVDFAVNTEGVYSEPRPIGTRYLTRNL

SEQ ID NO: 2982 - protein, 738 aa, Artificial Sequence
  source: /note="Description of Artificial Sequence: Synthetic polypeptide"
MAADGYLPDWLEDNLSEGIREWWALKPGAPKPKANQQKQDDGRGLVLPGYKYLGPFNGLDKGEPVNAADAAALEHDKAYDQQLQAGDNPYLRYNHADAEFQERLQEDTSFGGNLGRAVFQAKKRVLEPLGLVEEGAKTAPGKKRPVEPSPQRSPDSSTGIGKKGQQPARKRLNFGQTGDSESVPDPQPLGEPPAAPSGVGPNTMAAGGGAPMADNNEGADGVGSSSGNWHCDSTWLGDRVITTSTRTWALPTYNNHLYKQISNGTSGGATNDNTYFGYSTPWGYFDFNRFHCHFSPRDWQRLVNNNWGFRPKRLSFKLFNIQVKEVTQNEGTKTIANNLTSTIQVFTDSEYQLPYVLGSAHQGCLPPFPADVFTIPQYGYLTLNNGSQAVGRSSFYCLEYFPSQMLRTGNNFQFTYTFEDVPFHSSYAHSQSLDRLMNPLIDQYLYYLSRIQTTGGTANTQTLGFSQGGPNTMANQAKNWLPGPCYRQQRVSTTTGQNNNSNFAWTAGTKYHLNGRNSLANPGIAMATHKDDEERFFPSNGILIFGKQNAARDNADYSDVMPTSEEEIKTTNPVATEEYGIVADNLQQQNTAPQIGTVNSQGALPGMVWQNRDVYLQGPIWAKIPHTDGNFHPSPLMGGFGLKHPPPQILIKNTPVPADPPTTFNQSKLNSFITQYSTGQVSVEIEWELQKENSKRWNPEIQYTSNYYKSTSVDFAVNTEGVYSEPRPIGTRYLTRNL

SEQ ID NO: 2983 - protein, 738 aa, Artificial Sequence
  source: /note="Description of Artificial Sequence: Synthetic polypeptide"
MAADGYLPDWLEDNLSEGIREWWALKPGAPKPKANQQKQDDGRGLVLPGYKYLGPFNGLDKGEPVNAADAAALEHDKAYDQQLQAGDNPYLRYNHADAEFRERLQEDTSFGGNLGRAVFQAKKRVLEPLGLVEEGAKTAPGKKRPVEPSPQRSPDSSTGIGKKGQQPARKRLNFGQTGDSESVPDPQPLGEPPAAPSGVGPNTMAAGGGAPMADNNEGADGVGSSSGNWHCDSTWLGDRVITTSTRTWALPTYNNHLYKQISNGTSGGATNDNTYFGYSTPWGYFDFNRFHCHFSPRDWQRLINNNWGFRPKRLSFKLFNIQVKEVTQNEGTKTIANNLTSTIQVFTDSEYQLPYVLGSAHQGCLPPFPADVFTIPQYGYLTLNNGSQAVGRSSFYCLEYFPSQMLRTGNNFQFTYTFEDVPFHSSYAHSQSLDRLMNPLIDQYLYYLSRIQTTGGTANTQTLGFSQGGPNTMANQAKNWLPGPCYRQQRVSTTTGQNNNSNFAWTAGTKYHLNGRNSLANPGIAMATHKDDEERFFPSNGILIFGKQNAARDNADYSDVMPTSEEEIKTTNPVATEEYGIVADNLQQQNTAPQIGTVNSQGALPGMVWQNRDVYLQGPIWAKIPHTDGNFHPSPLMGGFGLKHPPPQILIKNTPVPADPPTTFNQSKLNSFITQYSTGQVSVEIEWELQKENSKRWNPEIQYTSNYYKSTSVDFAVNTEGVYSEPRPIGTRYLTRNL

SEQ ID NO: 2984 - protein, 738 aa, Artificial Sequence
  source: /note="Description of Artificial Sequence: Synthetic polypeptide"
MAADGYLPDWLEDNLSEGIREWWALKPGAPKPKANQQKQDDGRGLVLPGYKYLGPFNGLDKGEPVNAADAAALEHDKAYDQQLQAGDNPYLRYNHADAEFQERLQEDTSFGGNLGRAVFQAKKRVLEPLGLVEEGAKTAPGKKRPVEPSPQRSPDSSTGIGKKGQQPARKRLNFGQTGDSESVPDPQPLGEPPAAPSGVGPNTMAAGGGAPMADNNEGADGVGSSSGNWHCDSTWLGDRVITTSTRTWALPTYNNHLYKQISNGTSGGATNDNTYFGYSTPWGYFDFNRFHCHFSPRDWQRLINNNWGFRPKRLSFKLFNIQVKEVTQNEGTKTIANNLTSTIQVFTDSEYQLPYVLGSAHQGCLPPFPADVFTIPQYGYPTLNNGSQAVGRSSFYCLEYFPSQMLRTGNNFQFTYTFEDVPFHSSYAHSQSLDRLMNPLIDQYLYYLSRIQTTGGTANTQTLGFSQGGPNTMANQAKNWLPGPCYRQQRVSTTTGQNNNSNFAWTAGTKYHLNGRNSLANPGIAMATHKDDEERFFPSNGILIFGKQNAARDNADYSDVMPTSEEEIKTTNPVATEEYGIVADNLQQQNTAPQIGTVNSQGALPGMVWQNRDVYLQGPIWAKIPHTDGNFHPSPLMGGFGLKHPPPQILIKNTPVPADPPTTFNQSKLNSFITQYSTGQVSVEIEWELQKENSKRWNPEIQYTSNYYKSTSVDFAVNTEGVYSEPRPIGTRYLTRNL

SEQ ID NO: 2985 - protein, 738 aa, Artificial Sequence
  source: /note="Description of Artificial Sequence: Synthetic polypeptide"
MAADGYLPDWLEDNLSEGIREWWALKPGAPKPKANQQKQDDGRGLVLPGYKYLGPFNGLDKGEPVNAADAAALEHDKAYDQQLQAGDNPYLRYNHADAEFQERLQEDTSFGGNLGRAVFQAKKRVLEPLGLVEEGAKTAPGKKRPVEPSPQRSPDSSTGIGKKGQQPARKRLNFGQTGDSESVPDPQPLGEPPAAPSGVGPNTMTAGGGAPMADNNEGADGVGSSSGNWHCDSTWLGDRVITTSTRTWALPTYNNHLYKQISNGTSGGATNDNTYFGYSTPWGYFDFNRFHCHFSPRDWQRLINNNWGFRPKRLSFKLFNIQVKEVTQNEGTKTIANNLTSTIQVFTDSEYQLPYVLGSAHQGCLPPFPADVFTIPQYGYLTLNNGSQAVGRSSFYCLEYFPSQMLRTGNNFQFTYTFEDVPFHSSYAHSQSLDRLMNPLIDQYLYYLSRIQTTGGTANTQTLGFSQGGPNTMANQAKNWLPGPCYRQQRVSTTTGQNNNSNFAWTAGTKYHLNGRNSLANPGIAMATHKDDEERFFPSNGILIFGKQNAARDNADYSDVMPTSEEEIKTTNPVATEEYGIVADNLQQQNTAPQIGTVNSQGALPGMVWQNRDVYLQGPIWAKIPHTDGNFHPSPLMGGFGLKHPPPQILIKNTPVPADPPTTFNQSKLNSFITQYSTGQVSVEIEWELQKENSKRWNPEIQYTSNYYKSTSVDFAVNTEGVYSEPRPIGTRYLTRNL

SEQ ID NO: 2986 - protein, 738 aa, Artificial Sequence
  source: /note="Description of Artificial Sequence: Synthetic polypeptide"
MAADGYLPDWLEDNLSEGIREWWALKPGAPKPKANQQKQDDGRGLVLPGYKYLGPFNGLDKGEPVNAADAAALEHDKAYDQQLQAGDNPYLRYNHADAEFQERLQEDTSFGGNLGRAVFQAKKRVLEPLGLVEEGAKTAPGKKRPVEPSPQRSPDSSTGIGKKGQQPARKRLNFGQTGDSESVPDPQPLGEPPAAPSGVGPNTMAAGGGAPMADNNEGADGVGSSSGNWHCDSTWLGDRVITTSTRTWALPTYNNHLYKQISNGTSGGATNDNTYFGYSTPWGYFDFNRFHCHFSPRDWQRLINNNWGFRPKRLSFKLFNIQVKEVTQNEGTKTIANNLTSTIQVFTDSEYQLPYVLGSAHQGCLPPFPADVFTIPQYGYLTLNNGSQAVGRSSFYCLEYFPSQMLRTGNNFQFTYTFEDVPFHSSYAHSQSLDRLMNPLIDQYLYYLSRIQTTGGTANTQTLGFSQGGPNTMANQAKNWLPGPCYRQQRVSTTTGQNNNSNFAWTAGTKYHLNGRNSLANPGIAMATHKDDEERFFPSNGILIFGKQNAARDNADYSDVMPTSEEEIKTTNPVATEEYGIVTDNLQQQNTAPQIGTVNSQGALPGMVWQNRDVYLQGPIWAKIPHTDGNFHPSPLMGGFGLKHPPPQILIKNTPVPADPPTTFNQSKLNSFITQYSTGQVSVEIEWELQKENSKRWNPEIQYTSNYYKSTSVDFAVNTEGVYSEPRPIGTRYLTRNL

SEQ ID NO: 2987 - protein, 738 aa, Artificial Sequence
  source: /note="Description of Artificial Sequence: Synthetic polypeptide"
MAADGYLPDWLEDNLSEGIREWWALKPGAPKPKANQQKQDDGRGLVLPGYKYLGPFNGLDKGEPVNAADAAALEHDKAYDQQLQAGDNPYLRYNHADAEFQERLQEDTSFGGNLGRAVFQAKKRVLEPLGLVEEGAKTAPGKKRPVEPSPQRSPDSSTGIGKKGQQPARKRLNFGQTGDSESVPDPQPLGEPPAAPSGVGPNTMAAGGGAPMADNNEGADGVGSSSGNWHCDSTWLGDRVITTSTRTWALPTYNNHLYKQISNGTSGGATNDNTYFGYSTPWGYFDFNRFHCHFSPRDWQRLINNNWGFRPKRLSFKLFNIQVKEVTQNEGTKTIANNLTSTIQVFTDSEYQLPYVLGSAHQGCLPPFPADVFTIPQYGYLTLNNGSQAVGRSSFYCLEYFPSQMLRTGNNFQFTYTFEDVPFHSSYAHSQSLDRLMNPLIDQYLYYLSRIQTTGGTANTQTLGFSQGGPNTMANQAKNWLPGPCYRQQRVSTTTGQNNNSNFAWTAGTKYHLNGRNSLANPGIAMATHKDDEERFFPSNGILIFGKQNAARDNADYSDVMPTSEEEIKTTNPVATEEYGIVADNLQQQNTAPQIGTVNSQGALPGMVWQNRDVYLQGPIWAKIPHTDGNFHPSPLMGGFGLKHPPPQILIKNTPVPADPPTTFNQSKLNSFITQYSTGQVSVEIEWELQKENSKRWNPEIQYTSNYYKSTSVDFAINTEGVYSEPRPIGTRYLTRNL

SEQ ID NO: 2988 - protein, 738 aa, Artificial Sequence
  source: /note="Description of Artificial Sequence: Synthetic polypeptide"
MAADGYLPDWLEDNLSEGIREWWALKPGAPKPKANQQKQDDGRGLVLPGYKYLGPFNGLDKGEPVNAADAAALEHDKAYDQQLQAGDNPYLRYNHADAEFQERLQEDTSFGGNLGRAVFQAKKRVLEPLGLVEEGAKTAPGKKRPVEPSPQRSPDSSTGIGKKGQQPARKRLNFGQTGDSESVPDPQPLGEPPAAPSGVGPNTMAAGGGAPMADNNEGADGVGSSSGNWHCDSTWLGDRVITTSTRTWALPTYNNHLYKQISNGTSGGATNDNTYFGYSTPWGYFDFNRFHCHFSPRDWQRLINNNWGFRPKRLSFKLFNIQVKEVTQNEGTKTIANNLTSTIQVFTDSEYQLPYVLGSAHQGCLPPFPADVFTIPQYGYLTLNNGSQAVGRSSFYCLEYFPSQMLRTGNNFQFTYTFEDVPFHSSYAHSQSLDRLMNPLIDQYLYYLSRIQTTGGTANTQTLGFSQGGPNTMANQAKNWLPGPCYRQQRVSTTTGQNNNSNFAWTAGTKYHLNGRNSLANPGIAMATHKDDEERFFPSNGILIFGKQNAARDNADYSDVMPTSEEEIKTTNPVATEEYGIVADNLQQQNTAPQIGTVNSQGALPGMVWQNRDVYLQGPIWAKIPHADGNFHPSPLMGGFGLKHPPPQILIKNTPVPADPPTTFNQSKLNSFITQYSTGQVSVEIEWELQKENSKRWNPEIQYTSNYYKSTSVDFAVNTEGVYSEPRPIGTRYLTRNL

SEQ ID NO: 2989 - protein, 738 aa, Artificial Sequence
  source: /note="Description of Artificial Sequence: Synthetic polypeptide"
MAADGYLPDWLEDNLSEGIREWWALKPGAPKPKANQQKQDDGRGLVLPGYKYLGPFNGLDKGEPVNAADAAALEHDKAYDQQLQAGDNPYLRYNHADAEFQERLQEDTSFGGNLGRAVFQAKKRVLEPLGLVEEGAKTAPGKKRPVEPSPQRSPDSSTGIGKKGQQPARKRLNFGQTGDSESVPDPQPLGEPPAAPSGVGPNTMAAGGGAPMADNNEGADGVGSSSGNWHCNSTWLGDRVITTSTRTWALPTYNNHLYKQISNGTSGGATNDNTYFGYSTPWGYFDFNRFHCHFSPRDWQRLINNNWGFRPKRLSFKLFNIQVKEVTQNEGTKTIANNLTSTIQVFTDSEYQLPYVLGSAHQGCLPPFPADVFTIPQYGYLTLNNGSQAVGRSSFYCLEYFPSQMLRTGNNFQFTYTFEDVPFHSSYAHSQSLDRLMNPLIDQYLYYLSRIQTTGGTANTQTLGFSQGGPNTMANQAKNWLPGPCYRQQRVSTTTGQNNNSNFAWTAGTKYHLNGRNSLANPGIAMATHKDDEERFFPSNGILIFGKQNAARDNADYSDVMPTSEEEIKTTNPVATEEYGIVADNLQQQNTAPQIGTVNSQGALPGMVWQNRDVYLQGPIWAKIPHTDGNFHPSPLMGGFGLKHPPPQILIKNTPVPADPPTTFNQSKLNSFITQYSTGQVSVEIEWELQKENSKRWNPEIQYTSNYYKSTSVDFAVNTEGVYSEPRPIGTRYLTRNL

SEQ ID NO: 2990 - protein, 738 aa, Artificial Sequence
  source: /note="Description of Artificial Sequence: Synthetic polypeptide"
MAADGYLPDWLEDNLSEGIREWWALKPGAPKPKANQQKQDDGRGLVLPGYKYLGPFNGLDKGEPVNAADAAALEHDKAYDQQLQAGDNPYLRYNHADAEFQERLQEDTSFGGNLGRAVFQAKKRVLEPLGLVEEGAKTAPGKKRPVEPSPQRSPDSSTGIGKKGQQPARKRLNFGQTGDSESVPDPQPLGEPPAAPSGVGPNTMAAGGGAPMADNNEGADGVGSSSGNWHCDSTWLGDRVITTSTRTWALPTYNNHLYKQISNGTSGGATNDNTYFGYSTPWGYFDFNRFHCHFSPRDWQRLINNNWGFRPKRLSFKLFNIQVKEVTQNEGTKTIANNLTSTIQVFTDSEYQLPYVLGSAHQGCLPPFPADVFTIPQYGYLTLNNGSQAVGRSSFYCLEYFPSQMLRTGNNFQFTYTFEDVPFHSSYAHSQSLDRLMNPLIDQYLYYLSRIQTTGGTANTQTLGFSQGGPNTMANQAKNWLPGPCYRQQRVSTTTGQNNNSNFAWTAGTKYHLNGRNSLANPGIAMATHKDDEERFFPSNGILIFGKQNAARDNADYSDVMPTSEEEIKTTNPVATEEYGIVADNLQQQNTAPQIGTVNSQGALPGMVWQNRDVYLQGPIWAKIPHTDGNFHPSPLMGGFGLKHPPPQILIKNTPVPADPPTTFNQSKLNSFITQYSTGQVSVEIEWELQKENSKRWNPEIQYTSNYYKSTSVDFAVNTEGAYSEPRPIGTRYLTRNL

SEQ ID NO: 2991 - protein, 738 aa, Artificial Sequence
  source: /note="Description of Artificial Sequence: Synthetic polypeptide"
MAADGYLPDWLEDNLSEGIREWWALKPGAPKPKANQQKQDDGRGLVLPGYKYLGPFNGLDKGEPVNAADAAALEHDKAYDQQLQAGDNPYLRYNHADAEFQERLQEDTSFGGNLGRAVFQAKKRVLEPLGLVEEGAKTAPGKKRPVEPSPQRSPDSSTGIGKKGQQPARKRLNFGQTGDSESVPDPQPLGEPPAAPSGVGPNTMAAGGGAPMADNNEGADGVGSSSGNWHCDSTWLGDRVITTSTRTWALPTYNNHLYKQISNGTSGGATNDNTYFGYSTPWGYFDFNRFHCHFSPRDWQRLINNNWGFRPKRLSFKLFNIQVKEVTQNEGTKTIANNLTSTIQVFTDSEYQLPYVLGSAHQGCLPPFPADVFTIPQYGYLTLNNGSQAVGRSSFYCLEYFPSQMLRTGNNFQFTYTFEDVPFHSSYAHSQSLDRLMNPLIDQYLYYLSRIQTTGGTANTQTLGFSQGGPNTMANQAKNWLPGPCYRQQRVSTTTGQNNNSNFAWTAGTKYHLNGRNSLANPGIAMATHKDDEERFFPSNGILIFGKQNAARDNADYSDVMPTSEEEIKTTNPVATEECGIVADNLQQQNTAPQIGTVNSQGALPGMVWQNRDVYLQGPIWAKIPHTDGNFHPSPLMGGFGLKHPPPQILIKNTPVPADPPTTFNQSKLNSFITQYSTGQVSVEIEWELQKENSKRWNPEIQYTSNYYKSTSVDFAVNTEGVYSEPRPIGTRYLTRNL

SEQ ID NO: 2992 - protein, 738 aa, Artificial Sequence
  source: /note="Description of Artificial Sequence: Synthetic polypeptide"
MAADGYLPDWLEDNLSEGIREWWALKPGAPKPKANQQKQDDGRGLVLPGYKYLGPFNGLDKGEPVNAADAAALEHDKAYDQQLQAGDNPYLRYNHADAEFQERLQEDTSFGGNLGRAVFQAKKRVLEPLGLVEEGAKTAPGKKRPVEPSPQRSPDSSTGIGKKGQQPARKRLNFGQTGDSESVPDPQPLGEPPAAPSGVGPNTMAAGGGAPMADNNEGADGVGSSSGNWHCDSTWLGDRVITTSTRTWALPTYNNHLYKQISNGTSGGATNDNTYFGYSTPWGYFDFNRFHCHFSPRDWQRLINNNWGFRPKRLSFKLFNIQVKEVTQNEGTKTIANNLTSTIQVFTDSEYQLPYVLGSAHQGCLPPFPADVFTIPQYGYLTLNNGSQAVGRSSFYCLEYFPSQMLRTGNNFQFTYTFEDVPFHSSYAHSQSLDRLMNPLIDQYLYYLSRIQTTGGTANTQTLGFSQGGPNTMANQAKNWLPGPCYRQQRVSTTTGQNNNSNFAWTAGTKYHLNGRNSLANPGIAMATHKDDEERFFPSNGILIFGKQNAARDNADYSDVMPTSEEEIKTTNPVATEEYGIVADNLQQQNTAPQIGTVNSQGALPGMVWQNRDVYLQGPIWAKIPHTDGNFHPSPLMGGFGLKHPPPQILIKNTPVPADPPTTFNQSKLNSFITQYSTGQVSVEIEWELQKENSKRWNPEIRYTSNYYKSTSVDFAVNTEGVYSEPRPIGTRYLTRNL

SEQ ID NO: 2993 - protein, 738 aa, Artificial Sequence
  source: /note="Description of Artificial Sequence: Synthetic polypeptide"
MAADGYLPDWLEDNLSEGIREWWALKPGAPKPKANQQKQDDGRGLVLPGYKYLGPFNGLDKGEPVNAADAAALEHDKAYDQQLQAGDNPYLRYNHADAEFQERLQEDTSFGGNLGRAVFQAKKRVLEPLGLVEEGAKTAPGKKRPVEPSPQRSPDSSTGIGKKGQQPARKRLNFGQTGDSESVPDPQPLGEPPAAPSGVGPNTMAAGGGAPMADNNEGADGVGSSSGNWHCDSTWLGDRVITTSTRTWALPTYNNHLYKQISNGTSGGATNDNTYFGYSTPWGYFDFNRFHCHFSPRDWQRLINNNWGFRPKRLSFKLFNIQVKEVTQNEGTKTIANNLTSTIQVFTDSEYQLPYVLGSAHQGCLPPFPADVFTIPQYGYLTLNNGSQAVGRSSFYCLEYFPSQMLRTGNNFQFTYTFEDVPFHSSYAHSQSLDRLMNPLIDQYLYYLSRIQTTGGTANTQTLGFSQGGPNTMANQAKNWLPGPCYRQQRVSTTTGQNNNSNFAWTAGTKYHLNGRNSLANPGIAMATHKDDEERFFPSNGILIFGKQNAARDNADCSDVMPTSEEEIKTTNPVATEEYGIVADNLQQQNTAPQIGTVNSQGALPGMVWQNRDVYLQGPIWAKIPHTDGNFHPSPLMGGFGLKHPPPQILIKNTPVPADPPTTFNQSKLNSFITQYSTGQVSVEIEWELQKENSKRWNPEIQYTSNYYKSTSVDFAVNTEGVYSEPRPIGTRYLTRNL

SEQ ID NO: 2994 - protein, 738 aa, Artificial Sequence
  source: /note="Description of Artificial Sequence: Synthetic polypeptide"
MAADGYLPDWLEDNLSEGIREWWALKPGAPKPKANQQKQDDGRGLVLPGYKYLGPFNGLDKGEPVNAADAAALEHDKAYDQQLQAGDNPYLRYNHADAEFQERLQEDTSFGGNLGRAVFQAKKRVLEPLGLVEEGAKTAPGKKRPVEPSPQRSPDSSTGIGKKGQQPARKRLNFGQTGDSESVPDPQPLGEPPAAPSGVGPNTMAAGGGAPMADNNEGADGVGSSSGNWHCDSTWLGDRVITTSTRTWALPTYNNHLYKQISNGTSGGATNDNTYFGYSTPWGYFDFNRFHCHFSPRDWQRLINNNWGFRPKRLSFKLFNIQVKEVTQNEGTKTIANNLTSTIQVFTDSEYQLPYVLGSAHQGCLPPFPADVFTIPQYGYLTLNNGSQAVGRSSFYCLEYFPSQMLRTGNNFQFTYTFEDVPFHSSYAHSQSLDRLMNPLIDQYLYYLSRIQTTGGTANTQTLGFSQGGPNTMANQAKNWLPGPCYRQQRVSTTTGQNNNSNFAWTAGTKYHLNGRNSLANPGIAMATHKDDEERFFPSNGILIFGKQNAARDNADYSDVMPTSEEEIKTTNPVATEEYGIAADNLQQQNTAPQIGTVNSQGALPGMVWQNRDVYLQGPIWAKIPHTDGNFHPSPLMGGFGLKHPPPQILIKNTPVPADPPTTFNQSKLNSFITQYSTGQVSVEIEWELQKENSKRWNPEIQYTSNYYKSTSVDFAVNTEGVYSEPRPIGTRYLTRNL

SEQ ID NO: 2995 - protein, 738 aa, Artificial Sequence
  source: /note="Description of Artificial Sequence: Synthetic polypeptide"
MAADGYLPDWLEDNLSEGIREWWALKPGAPKPKANQQKQDDGRGLVLPGYKYLGPFNGLDKGEPVNAADAAALEHDKAYDQQLQAGDNPYLRYNHADAEFQERLQEDTSFGGNLGRAVFQAKKRVLEPLGLVEEGAKTAPGKKRPVEPSPQRSPDSSTGIGKKGQQPARKRLNFGQTGDSESVPDPQPLGEPPAAPSGVGPNTMAAGGGAPMADNNEGADGVGSSSGNWHCDSTWLGDRVITTSTRTWALPTYNNHLYKQISNGTSGGATNDNTYFGYSTPWGYFDFNRFHCHFSPRDWQRLINNNWGFRPKRLSFKLFNIQVKEVTQNEGTKTIANNLTSTIQVFTDSEYQLPYVLGSAHQGCLPPFPADVFTIPQYGYLTLNNGSQAVGRSSFYCLEYFPSQMLRTGNNFQFTYTFEDVPFHSSYAHSQSLDRLMNPLIDQYLYYLSRIQTTGGTANTQTLGFSQGGPNTMANQAKNWLPGPCYRQQRVSTTTGQNNNSNFAWTAGTKYHLNGRNSLANPGIAMATHKDDEERFFPSNGILIFGKQNAARDNADYSDVMPTSEEEIKTTNPVATEEYGIVADNLQQQNTAPQIGTVNSQGALPGMIWQNRDVYLQGPIWAKIPHTDGNFHPSPLMGGFGLKHPPPQILIKNTPVPADPPTTFNQSKLNSFITQYSTGQVSVEIEWELQKENSKRWNPEIQYTSNYYKSTSVDFAVNTEGVYSEPRPIGTRYLTRNL

SEQ ID NO: 2996 - protein, 738 aa, Artificial Sequence
  source: /note="Description of Artificial Sequence: Synthetic polypeptide"
MAADGYLPDWLEDNLSEGIREWWALKPGAPKPKANQQKQDDGRGLVLPGYKYLGPFNGLDKGEPVNAADAAALEHDKAYDQRLQAGDNPYLRYNHADAEFQERLQEDTSFGGNLGRAVFQAKKRVLEPLGLVEEGAKTAPGKKRPVEPSPQRSPDSSTGIGKKGQQPARKRLNFGQTGDSESVPDPQPLGEPPAAPSGVGPNTMAAGGGAPMADNNEGADGVGSSSGNWHCDSTWLGDRVITTSTRTWALPTYNNHLYKQISNGTSGGATNDNTYFGYSTPWGYFDFNRFHCHFSPRDWQRLINNNWGFRPKRLSFKLFNIQVKEVTQNEGTKTIANNLTSTIQVFTDSEYQLPYVLGSAHQGCLPPFPADVFTIPQYGYLTLNNGSQAVGRSSFYCLEYFPSQMLRTGNNFQFTYTFEDVPFHSSYAHSQSLDRLMNPLIDQYLYYLSRIQTTGGTANTQTLGFSQGGPNTMANQAKNWLPGPCYRQQRVSTTTGQNNNSNFAWTAGTKYHLNGRNSLANPGIAMATHKDDEERFFPSNGILIFGKQNAARDNADYSDVMPTSEEEIKTTNPVATEEYGIVADNLQQQNTAPQIGTVNSQGALPGMVWQNRDVYLQGPIWAKIPHTDGNFHPSPLMGGFGLKHPPPQILIKNTPVPADPPTTFNQSKLNSFITQYSTGQVSVEIEWELQKENSKRWNPEIQYTSNYYKSTSVDFAVNTEGVYSEPRPIGTRYLTRNL

SEQ ID NO: 2997 - protein, 738 aa, Artificial Sequence
  source: /note="Description of Artificial Sequence: Synthetic polypeptide"
MAADGYLPDWLEDNLSEGIREWWALKPGAPKPKANQQKQDDGRGLVLPGYKYLGPFNGLDKGEPVNAADAAALEHDKAYDQQLQAGDNPYLRYNHADAEFQERLQEDTSFGGNLGRAVFQAKKRVLEPLGLVEEGAKTAPGKKRPVEPSPQRSPDSSTGIGKKGQQPARKRLNFGQTGDSESVPDPQPLGEPPAAPSGVGPNTMAAGGGAPMADNNEGADGVGSSSGNWHCDSTWLGDRVITTSTRTWALPTYNNHLYKQISNGTSGGATNDNTYFGYSTPWGYFDFNRFHCHFSPRDWQRLINNNWGFRPKRLSFKLFNIQVKEVTQNEGTKTIANNLTSTIQVFTDSEYQLPYVLGSAHQGCLPPFPADVFTIPQYGYLTLNNGSQAVGRSSFYCLEYFPSQMLRTGNNFQFTYTFEDVPFHSSYAHSQSLDRLMNPLIDQYLYYLSRIQTTGGTANTQTLGFSQGGPNTMANQAKNWLPGPCYRQQRVSTTTGQNNNSNFAWTAGTKYHLNGRNSLANPGIAMATHKDDEERFFPSNGILIFGKQNAARDNADYSDVMPTSEEEIKTTNPVATEEYGIVADNLQQQNTAPQIGTVNGQGALPGMVWQNRDVYLQGPIWAKIPHTDGNFHPSPLMGGFGLKHPPPQILIKNTPVPADPPTTFNQSKLNSFITQYSTGQVSVEIEWELQKENSKRWNPEIQYTSNYYKSTSVDFAVNTEGVYSEPRPIGTRYLTRNL

SEQ ID NO: 2998 - protein, 738 aa, Artificial Sequence
  source: /note="Description of Artificial Sequence: Synthetic polypeptide"
MAADGYLPDWLEDNLSEGIREWWALKPGAPKPKANQQKQDDGRGLVLPGYKYLGPFNGLDKGEPVNAADAAALEHDKAYDQQLQAGDNPYLRYNHADAEFQERLQEDTSFGGNLGRAVFQAKKRVLEPLGLVEEGAKTAPGKKRPVEPSPQRSPDSSTGIGKKGQQPARKRLNFGQTGDSESVPDPQPLGEPPAAPSGVGPNTMAAGGGAPMADNNEGADGVGSSSGNWHCDSTWLGDRVITTSTRTWALPTYNNHLYKQISNGTSGGATNDNTYFGYSTPWGYFDFNRFHCHFSPRDWQRLINNNWGFRPKRLSFKLFNIQVKEVTQNEGTKTIANNLTSTIQVFTDSEYQLPYVLGSAHQGCLPPFPADVFTIPQYGYLTLNNGSQAVGRSSFYCLEYFPSQMLRTGNNFQFTYTFEDVPFHSSYAHSQSLDRLMNPLIDQYLYYLSRIQTTGGTANTQTLGFSQGGPNTMANQAKNWLPGPCYRQQRVSTTTGQNNNSNFAWTAGTKYHLNGRNSLANPGIAMATHKDDEECFFPSNGILIFGKQNAARDNADYSDVMPTSEEEIKTTNPVATEEYGIVADNLQQQNTAPQIGTVNSQGALPGMVWQNRDVYLQGPIWAKIPHTDGNFHPSPLMGGFGLKHPPPQILIKNTPVPADPPTTFNQSKLNSFITQYSTGQVSVEIEWELQKENSKRWNPEIQYTSNYYKSTSVDFAVNTEGVYSEPRPIGTRYLTRNL

SEQ ID NO: 2999 - protein, 738 aa, Artificial Sequence
  source: /note="Description of Artificial Sequence: Synthetic polypeptide"
MAADGYLPDWLEDNLSEGIREWWALKPGAPKPKANQQKQDDGRGLVLPGYKYLGPFNGLDKGEPVNAADAAALEHDKAYDQQLQAGDNPYLRYNHADAEFQERLQEDTSFGGNLGRAVFQAKKRVLEPLGLVEEGAKTAPGKKRPVEPSPQRSPDSSTGIGKKGQQPARKRLNFGQTGDSESVPDPQPLGEPPAAPSGVGPNTMAAGGGAPMADNNEGADGVGSSSGNWHCDSTWLGDRVITTSTRTWALPTYNNHLYKQISNGTSGGATNDNTYFGYSTPWGYFDFNRFHCHFSPRDWQRLINNNWGFRPKRLSFKLFNIQVKEVTQNEGTKTIANNLTSTIQVFTDSEYQLPYVLGSAHQGCLPPFPADVFTIPQYGYLTLNNGSQAVGRSSFYCLEYFPSQMLRTGNNFQFTYTFEDVPFHSSYAHSQSLDRLMNPLIDQYLYYLSRIQTTGGTANTQTLGFSQGGPNTMANQAKNWLPGPCYRQQRVSTTTGQNNNSNFAWTAGTKYHLNGRNSLANPGIAMATHKDDEERFFPSNGILIFGKQNAARDNADYSDVMPTSEEEIKTTNPVATEEYGIVADNLQQQNTAPQIGTVNSQGALPGMVWQNRDAYLQGPIWAKIPHTDGNFHPSPLMGGFGLKHPPPQILIKNTPVPADPPTTFNQSKLNSFITQYSTGQVSVEIEWELQKENSKRWNPEIQYTSNYYKSTSVDFAVNTEGVYSEPRPIGTRYLTRNL

SEQ ID NO: 3000 - protein, 738 aa, Artificial Sequence
  source: /note="Description of Artificial Sequence: Synthetic polypeptide"
MAADGYLPDWLEDNLSEGIREWWALKPGAPKPKANQQKQDDGRGLVLPGYKYLGPFNGLDKGEPVNAADAAALEHDKAYDQQLQAGDNPYLRYNHADAEFQERLQEDTSFGGNLGRAVFQAKKRVLEPLGLVEEGAKTAPGKKRPVEPSPQRSPDSSTGIGKKGQQPARKRLNFGQTGDSESVPDPQPLGEPPAAPSGVGPNTMAAGGGAPMADNNEGADGVGSSSGNWHCDSTWLGDRVITTSTRTWALPTYNNHLYKQISNGTSGGATNDNTYFGYSTPWGYFDFNRFHCHFSPRDWQRLINNNWGFRPKRLSFKLFNIQVKEVTQNEGTKTIANNLTSTIQVFTDSEYQLPYVLGSAHQGCLPPFPADVFTIPQYGYLTLNNGSQAAGRSSFYCLEYFPSQMLRTGNNFQFTYTFEDVPFHSSYAHSQSLDRLMNPLIDQYLYYLSRIQTTGGTANTQTLGFSQGGPNTMANQAKNWLPGPCYRQQRVSTTTGQNNNSNFAWTAGTKYHLNGRNSLANPGIAMATHKDDEERFFPSNGILIFGKQNAARDNADYSDVMPTSEEEIKTTNPVATEEYGIVADNLQQQNTAPQIGTVNSQGALPGMVWQNRDVYLQGPIWAKIPHTDGNFHPSPLMGGFGLKHPPPQILIKNTPVPADPPTTFNQSKLNSFITQYSTGQVSVEIEWELQKENSKRWNPEIQYTSNYYKSTSVDFAVNTEGVYSEPRPIGTRYLTRNL

SEQ ID NO: 3001 - protein, 738 aa, Artificial Sequence
  source: /note="Description of Artificial Sequence: Synthetic polypeptide"
MAADGYLPDWLEDNLSEGIREWWALKPGAPKPKANQQKQDDGRGLVLPGYKYLGPFNGLDKGEPVNAADAAALEHDKAYDQQLQAGDNPYLRYNHADAEFQERLQEDTSFGGNLGRAVFQAKKRVLEPLGLVEEGAKTAPGKKRPVEPSPQRSPDSSTGIGKKGQQPARKRLNFGQTGDSESVPDPQPLGEPPAAPSGVGPNTMAAGGGAPMADNNEGADGVGSSSGNWHCDSTWLGDRVITTSTRTWALPTYNNHLYKQISNGTSGGATNDNTYFGYSTPWGYFDFNRFHCHFSPRDWQRLINNNWGFRPKRLSFKLFNIQVKEVTQNEGTKTIANNLTSTIQVFTDSEYQLPYVLGSAHQGCLPPFPADVFTIPQYGYLTLNNGSQAVGRSSFYCLEYFPSQMLRTGNNFQFTYTFEDVPFHSSYAHSQSLDRLMNPLIDQYLYYLSRIQTTGGTANTQTLGFSQGGPNTMANQAKNWLPGPCYRQQRVSTTTGQNNNSNFAWTAGTKYHLNGRNSLANPGIAMATHKDDEERFFPSNGILIFGKQNAARDNADYSDVMPTSEEEIKTTNPVATEEYGIVADNLQQQNTAPQIGTVNSQGALPGMVWQNRDVYLQGPIWAKIPHTDGNFHPSPLMGGFGLKHPPPQILIKNTPVPADPPTTFNQSKLNSFITQYSTGQVSVEIEWELQKENSKRWNPEIQYTSNYYKSTSVDLAVNTEGVYSEPRPIGTRYLTRNL

SEQ ID NO: 3002 - protein, 738 aa, Artificial Sequence
  source: /note="Description of Artificial Sequence: Synthetic polypeptide"
MAADGYLPDWLEDNLSEGIREWWALKPGAPKPKANQQKQDDGRGLVLPGYKYLGPFNGLDKGEPVNAADAAALEHDKAYDQQLQAGDNPYLRYNHADAEFQERLQEDTSFGGNLGRAVFQAKKRVLEPLGLVEEGAKTAPGKKRPVEPSPQRSPDSSTGIGKKGQQPARKRLNFGQTGDSESVPDPQPLGEPPAAPSGVGPNTMAAGGGAPMADNNEGADGVGSSSGNWHCDSTWLGDRVITTSTRTWALPTYNNHLYKQISNGTSGGATNDNTYFGYSTPWGYFDFNRFHCHFSPRDWQRLINNNWGFRPKRLSFKLFNIQVKEVTQNEGTKTIANNLTSTIQVFTDSEYQLPYVLGSAHQGCLPPFPADVFTIPQYGYLTLNNGSQAVGRSSFYCLEYFPSQMLRTGNNFQFTYTFEDVPFHSSYAHSQSLDRLMNPLIDQYLYYLSRIQTTGGTANTQTLGFSQGGPNTMANQAKNWLPGPCYRQQRVSTTTGQNNNSNFAWTAGTKYHLNGRNSLANPGIAMATHKDDEERFFPSNGILIFGKQNAARDNADYSDVMPTSEEEIKTTNPVATEEYGIVADNLQQQNTAPQIGTVNSQGALPGMVWQNRDVYLQGPIWAKIPHTDGNFHPSPLMGGFGLKHPPPQILIKNTPVPADPPTTFNQSKLNSFITQYSTGQVSVEIEWEPQKENSKRWNPEIQYTSNYYKSTSVDFAVNTEGVYSEPRPIGTRYLTRNL

SEQ ID NO: 3003 - protein, 738 aa, Artificial Sequence
  source: /note="Description of Artificial Sequence: Synthetic polypeptide"
MAADGYLPDWLEDNLSEGIREWWALKPGAPKPKANQQKQDDGRGLVLPGYKYLGPFNGLDKGEPVNAADAAALEHDKAYDQQLQAGDNPYLRYNHADAEFQERLQEDTSFGGNLGRAVFQAKKRVLEPLGLVEEGAKTAPGKKRPVEPSPQRSPDSSTGIGKKGQQPARKRLNFGQTGDSESVPDPQPLGEPPAAPSGVGPNTMAAGGGAPMADNNEGADGVGSSSGNWHCDSTWLGDRVITTSTRTWALPTYNNHLYKQISNGTSGGATNDNTYFGYSTPWGYFDFNRFHCHFSPRDWQRPINNNWGFRPKRLSFKLFNIQVKEVTQNEGTKTIANNLTSTIQVFTDSEYQLPYVLGSAHQGCLPPFPADVFTIPQYGYLTLNNGSQAVGRSSFYCLEYFPSQMLRTGNNFQFTYTFEDVPFHSSYAHSQSLDRLMNPLIDQYLYYLSRIQTTGGTANTQTLGFSQGGPNTMANQAKNWLPGPCYRQQRVSTTTGQNNNSNFAWTAGTKYHLNGRNSLANPGIAMATHKDDEERFFPSNGILIFGKQNAARDNADYSDVMPTSEEEIKTTNPVATEEYGIVADNLQQQNTAPQIGTVNSQGALPGMVWQNRDVYLQGPIWAKIPHTDGNFHPSPLMGGFGLKHPPPQILIKNTPVPADPPTTFNQSKLNSFITQYSTGQVSVEIEWELQKENSKRWNPEIQYTSNYYKSTSVDFAVNTEGVYSEPRPIGTRYLTRNL

SEQ ID NO: 3004 - protein, 738 aa, Artificial Sequence
  source: /note="Description of Artificial Sequence: Synthetic polypeptide"
MAADGYLPDWLEDNLSEGIREWWALKPGAPKPKANQQKQDDGRGLVLPGYKYLGPFNGLDKGEPVNAADAAALEHDKAYDQQLQAGDNPYLRYNHADAEFQERLQEDTSFGGNLGRAVFQAKKRVLEPLGLVEEGAKTAPGKKRPVEPSPQRSPDSSTGIGKKGQQPARKRLNFGQTGDSESVPDPQPLGEPPAAPSGVGPNTMAAGGGAPMADNNEGADGVGSSSGNWHCDSTWLGDRVITTSTRTWALPTYNNHLYKQISNGTSGGATNDNTYFGYSTPWGYFDFNRFHCHFSPRDWQRLINNNWGFRPKRLSFKLFNIQVKEVTQNEGTKTIANNLTSTIQVFTDSEYQLPYVLGSAHQGCLPPFPADVFTIPQYGYLTLNNGSQAVGRSSFYCLEYFPSQMLRTGNNFQFTYTFEDVPFHSSYAHSQSLDRLMNPLIDQYLYYLSRIQTTGGTANTQTLGFSQGGPNTMANQAKNWLPGPCYRQQRVSTTTGQNNNSNFAWTAGTKYHLNGRNSLANPGIAMATHKDDEERFFPSNGILIFGKQNAARDNADYSDVMPTSEEEIKTTNPAATEEYGIVADNLQQQNTAPQIGTVNSQGALPGMVWQNRDVYLQGPIWAKIPHTDGNFHPSPLMGGFGLKHPPPQILIKNTPVPADPPTTFNQSKLNSFITQYSTGQVSVEIEWELQKENSKRWNPEIQYTSNYYKSTSVDFAVNTEGVYSEPRPIGTRYLTRNL

SEQ ID NO: 3005 - protein, 738 aa, Artificial Sequence
  source: /note="Description of Artificial Sequence: Synthetic polypeptide"
MAADGYLPDWLEDNLSEGIREWWALKPGAPKPKANQQKQDDGRGLVLPGYKYLGPFNGLDKGEPVNAADAAALEHDKAYDQQLQAGDNPYLRYNHADAEFQERLQEDTSFGGNLGRAVFQAKKRVLEPLGLVEEGAKTAPGKKRPVEPSPQRSPDSSTGIGKKGQQPARKRLNFGQTGDSESVPDPQPLGEPPAAPSGVGPNTMAAGGGAPMADNNEGADGVGSSSGNWHCDSTWLGDRVITTSTRTWALPTYNNHLYKQISNGTSGGATNDNTYFGYSTPWGYFDFNRFHCHFSPRDWQRLINNNWGFRPKRLSFKLFNIQVKEVTQNEGTKTIANNLTSTIQVFTDSEYQLPYVLGSAHQGCLPPFPADVFTIPQYDYLTLNNGSQAVGRSSFYCLEYFPSQMLRTGNNFQFTYTFEDVPFHSSYAHSQSLDRLMNPLIDQYLYYLSRIQTTGGTANTQTLGFSQGGPNTMANQAKNWLPGPCYRQQRVSTTTGQNNNSNFAWTAGTKYHLNGRNSLANPGIAMATHKDDEERFFPSNGILIFGKQNAARDNADYSDVMPTSEEEIKTTNPVATEEYGIVADNLQQQNTAPQIGTVNSQGALPGMVWQNRDVYLQGPIWAKIPHTDGNFHPSPLMGGFGLKHPPPQILIKNTPVPADPPTTFNQSKLNSFITQYSTGQVSVEIEWELQKENSKRWNPEIQYTSNYYKSTSVDFAVNTEGVYSEPRPIGTRYLTRNL

SEQ ID NO: 3006 - protein, 738 aa, Artificial Sequence
  source: /note="Description of Artificial Sequence: Synthetic polypeptide"
MAADGYLPDWLEDNLSEGIREWWALKPGAPKPKANQQKQDDGRGLVLPGYKYLGPFNGLDKGEPVNAADAAALEHDKAYDQQLQAGDNPYLRYNHADAEFQERLQEDTSFGGNLGRAVFQAKKRVLEPLGLVEEGAKTAPGKKRPVEPSPQRSPDSSTGIGKKGQQPARKRLNFGQTGDSGSVPDPQPLGEPPAAPSGVGPNTMAAGGGAPMADNNEGADGVGSSSGNWHCDSTWLGDRVITTSTRTWALPTYNNHLYKQISNGTSGGATNDNTYFGYSTPWGYFDFNRFHCHFSPRDWQRLINNNWGFRPKRLSFKLFNIQVKEVTQNEGTKTIANNLTSTIQVFTDSEYQLPYVLGSAHQGCLPPFPADVFTIPQYGYLTLNNGSQAVGRSSFYCLEYFPSQMLRTGNNFQFTYTFEDVPFHSSYAHSQSLDRLMNPLIDQYLYYLSRIQTTGGTANTQTLGFSQGGPNTMANQAKNWLPGPCYRQQRVSTTTGQNNNSNFAWTAGTKYHLNGRNSLANPGIAMATHKDDEERFFPSNGILIFGKQNAARDNADYSDVMPTSEEEIKTTNPVATEEYGIVADNLQQQNTAPQIGTVNSQGALPGMVWQNRDVYLQGPIWAKIPHTDGNFHPSPLMGGFGLKHPPPQILIKNTPVPADPPTTFNQSKLNSFITQYSTGQVSVEIEWELQKENSKRWNPEIQYTSNYYKSTSVDFAVNTEGVYSEPRPIGTRYLTRNL

SEQ ID NO: 3007 - protein, 738 aa, Artificial Sequence
  source: /note="Description of Artificial Sequence: Synthetic polypeptide"
MAADGYLPDWLEDNLSEGIREWWALKPGAPKPKANQQKQDDGRGLVLPGYKYLGPFNGLDKGEPVNAADAAALEHDKAYDQQLQAGDNPYLRYNHADAEFQERLQEDTSFGGNLGRAVFQAKKRVLEPLGLVEEGAKTAPGKKRPVEPSPQRSPDSSTGIGKKGQQPARKRLNFGQTGDSESVPDPQPLGEPPAAPSGVGPNTMAAGGGAPMADNNEGADGVGSSSGNWHCDSTWLGDRVITTSTRTWALPTYNNHLYKQISNGTSGGATNDNTYFGYSTPWGYFDFNRFHCHFSPRDWQRLINNNWGFRPKRLSFKLFNIQVKEVTQNEGTKAIANNLTSTIQVFTDSEYQLPYVLGSAHQGCLPPFPADVFTIPQYGYLTLNNGSQAVGRSSFYCLEYFPSQMLRTGNNFQFTYTFEDVPFHSSYAHSQSLDRLMNPLIDQYLYYLSRIQTTGGTANTQTLGFSQGGPNTMANQAKNWLPGPCYRQQRVSTTTGQNNNSNFAWTAGTKYHLNGRNSLANPGIAMATHKDDEERFFPSNGILIFGKQNAARDNADYSDVMPTSEEEIKTTNPVATEEYGIVADNLQQQNTAPQIGTVNSQGALPGMVWQNRDVYLQGPIWAKIPHTDGNFHPSPLMGGFGLKHPPPQILIKNTPVPADPPTTFNQSKLNSFITQYSTGQVSVEIEWELQKENSKRWNPEIQYTSNYYKSTSVDFAVNTEGVYSEPRPIGTRYLTRNL

SEQ ID NO: 3008 - protein, 738 aa, Artificial Sequence
  source: /note="Description of Artificial Sequence: Synthetic polypeptide"
MAADGYLPDWLEDNLSEGIREWWALKPGAPKPKANQQKQDDGRGPVLPGYKYLGPFNGLDKGEPVNAADAAALEHDKAYDQQLQAGDNPYLRYNHADAEFQERLQEDTSFGGNLGRAVFQAKKRVLEPLGLVEEGAKTAPGKKRPVEPSPQRSPDSSTGIGKKGQQPARKRLNFGQTGDSESVPDPQPLGEPPAAPSGVGPNTMAAGGGAPMADNNEGADGVGSSSGNWHCDSTWLGDRVITTSTRTWALPTYNNHLYKQISNGTSGGATNDNTYFGYSTPWGYFDFNRFHCHFSPRDWQRLINNNWGFRPKRLSFKLFNIQVKEVTQNEGTKTIANNLTSTIQVFTDSEYQLPYVLGSAHQGCLPPFPADVFTIPQYGYLTLNNGSQAVGRSSFYCLEYFPSQMLRTGNNFQFTYTFEDVPFHSSYAHSQSLDRLMNPLIDQYLYYLSRIQTTGGTANTQTLGFSQGGPNTMANQAKNWLPGPCYRQQRVSTTTGQNNNSNFAWTAGTKYHLNGRNSLANPGIAMATHKDDEERFFPSNGILIFGKQNAARDNADYSDVMPTSEEEIKTTNPVATEEYGIVADNLQQQNTAPQIGTVNSQGALPGMVWQNRDVYLQGPIWAKIPHTDGNFHPSPLMGGFGLKHPPPQILIKNTPVPADPPTTFNQSKLNSFITQYSTGQVSVEIEWELQKENSKRWNPEIQYTSNYYKSTSVDFAVNTEGVYSEPRPIGTRYLTRNL

SEQ ID NO: 3009 - protein, 738 aa, Artificial Sequence
  source: /note="Description of Artificial Sequence: Synthetic polypeptide"
MAADGYLPDWLEDNLSEGIREWWALKPGAPKPKANQQKQDDGRGLVLPGYKYLGPFNGLDKGEPVNAADAAALEHDKAYDQQLQAGDNPYLRYNHADAEFQERLQEDTSFGGNLGRAVFQAKKRVLEPLGLVEEGAKTAPGKKRPVEPSPQRSPDSSTGIGKKGQQPARKRLNFGQTGDSESVPDPQPLGEPPAAPSGVGPNTMAAGGGAPMADNNEGADGVGSSSGNWHCDSTWLGDRVITTSTRTWALPTYNNHLYKQISNGTSGGATNDNTYFGYSTPWGYFDFNRFHCHFSPRDWQRLINNNWGFRPKRLSFKLFNIQVKEVTQNEGTKTIANNLTSTIQVFTDSEYQLPYVLGSAHQGCLPPFPADVFTIPQYGYLTLNNGSQAVGRSSFYCLEYFPSQMLRTGNNFQFTYTFEDVPFHSSYAHSQSLDRLMNPLIDQYLYYLSRIQTTGGTANTQTLGFSQGGPNTMANRAKNWLPGPCYRQQRVSTTTGQNNNSNFAWTAGTKYHLNGRNSLANPGIAMATHKDDEERFFPSNGILIFGKQNAARDNADYSDVMPTSEEEIKTTNPVATEEYGIVADNLQQQNTAPQIGTVNSQGALPGMVWQNRDVYLQGPIWAKIPHTDGNFHPSPLMGGFGLKHPPPQILIKNTPVPADPPTTFNQSKLNSFITQYSTGQVSVEIEWELQKENSKRWNPEIQYTSNYYKSTSVDFAVNTEGVYSEPRPIGTRYLTRNL

SEQ ID NO: 3010 - protein, 738 aa, Artificial Sequence
  source: /note="Description of Artificial Sequence: Synthetic polypeptide"
MAADGYLPDWLEDNLSEGIREWWALKPGAPKPKANQQKQDDGRGLVLPGYKYLGPFNGLDKGEPVNAADAAALEHDKAYDQQLQAGDNPYLRYNHADAEFQERLQEDTSFGGNLGRAVFQAKKRVLEPLGLVEEGAKTAPGKKRPVEPSPQRSPDSSTGIGKKGQQPARKRLNFGQTGDSESVPDPQPLGEPPAAPSGVGPNTMAAGGGAPMADNNEGADGVGSSSGNWHCDSTWLGDRVITTSTRTWALPTYNNHLYKQISNGTSGGATNDNTYFGYSTPWGYFDFNRFHCHFSPRDWQRLINNNWGFRPKRLSFKLFNIQVKEVTQNEGTKTIANNLTSTIQVFTDSEYQLPYVLGSAHQGCLPPFPADVFTIPQYGYLTLNNGSQAVGRSSFYCLEYFPSQMLRTGNNFQFTYTFEDVPFHSSYAHSQSLDRLMNPLIDQYLYYLSRIQTTGGTANTQTLGFSQGGPNTMANQAKNWLPGPCYRQQRVSTTTGQNNNSNFARTAGTKYHLNGRNSLANPGIAMATHKDDEERFFPSNGILIFGKQNAARDNADYSDVMPTSEEEIKTTNPVATEEYGIVADNLQQQNTAPQIGTVNSQGALPGMVWQNRDVYLQGPIWAKIPHTDGNFHPSPLMGGFGLKHPPPQILIKNTPVPADPPTTFNQSKLNSFITQYSTGQVSVEIEWELQKENSKRWNPEIQYTSNYYKSTSVDFAVNTEGVYSEPRPIGTRYLTRNL

SEQ ID NO: 3011 - protein, 738 aa, Artificial Sequence
  source: /note="Description of Artificial Sequence: Synthetic polypeptide"
MAADGYLPDWLEDNLSEGIREWWALKPGAPKPKANQQKQDDGRGLVLPGYKYLGPFNGLDKGEPVNAADAAALEHDKAYDQQLQAGDNPYLRYNHADAEFQERLQEDTSFGGNLGRAVFQAKKRVLEPLGLVEEGAKTAPGKKRPVEPSPQRSPDSSTGIGKKGQQPARKRLNFGQTGDSESVPDPQPLGEPPAAPSGVGPNTMAAGGGAPMADNNEGADGVGSSSGNWHCDSTWLGDRVITTSTRTWALPTYNNHLYKQISNGTSGGATNDNTYFGYSTPWGYFDFNRSHCHFSPRDWQRLINNNWGFRPKRLSFKLFNIQVKEVTQNEGTKTIANNLTSTIQVFTDSEYQLPYVLGSAHQGCLPPFPADVFTIPQYGYLTLNNGSQAVGRSSFYCLEYFPSQMLRTGNNFQFTYTFEDVPFHSSYAHSQSLDRLMNPLIDQYLYYLSRIQTTGGTANTQTLGFSQGGPNTMANQAKNWLPGPCYRQQRVSTTTGQNNNSNFAWTAGTKYHLNGRNSLANPGIAMATHKDDEERFFPSNGILIFGKQNAARDNADYSDVMPTSEEEIKTTNPVATEEYGIVADNLQQQNTAPQIGTVNSQGALPGMVWQNRDVYLQGPIWAKIPHTDGNFHPSPLMGGFGLKHPPPQILIKNTPVPADPPTTFNQSKLNSFITQYSTGQVSVEIEWELQKENSKRWNPEIQYTSNYYKSTSVDFAVNTEGVYSEPRPIGTRYLTRNL

SEQ ID NO: 3012 - protein, 738 aa, Artificial Sequence
  source: /note="Description of Artificial Sequence: Synthetic polypeptide"
MAADGYLPDWLEDNLSEGIREWWALKPGAPKPKANQQKQDDGRGLVLPGYKYLGPFNGLDKGEPVNAADAAALEHDKAYDQQLQAGDNPYLRYNHADAEFQERLQEDTSFGGNLGRAVFQAKKRVLEPLGLVEEGAKTAPGKKRPVEPSPQRSPDSSTGIGKKGQQPARKRLNFGQTGDSESVPDPQPLGEPPAAPSGVGPNTMAAGGGAPMADNNEGADGVGSSSGNWHCDSTWLGDRVITTSTRTWALPTYNNHLYKQISNGTSGGATNDNTYFGYSTPWGYFDFNRFHCHFSPRDWQRLINNNWGFRPKRLSFKLFNIQVKEVTQNEGTKTIANNLTSTIQVFTDSEYQLPYVLGSAHQGCLPPFPADVFTIPQYGYLTLNNGSQAVGRSSFYCLEYFPSQMLRTGNNFQFTYTFEDVPFHSSYAHSQSLDRLMNPLIDQYLYYLSRIQTTGGTANTQTLGFGQGGPNTMANQAKNWLPGPCYRQQRVSTTTGQNNNSNFAWTAGTKYHLNGRNSLANPGIAMATHKDDEERFFPSNGILIFGKQNAARDNADYSDVMPTSEEEIKTTNPVATEEYGIVADNLQQQNTAPQIGTVNSQGALPGMVWQNRDVYLQGPIWAKIPHTDGNFHPSPLMGGFGLKHPPPQILIKNTPVPADPPTTFNQSKLNSFITQYSTGQVSVEIEWELQKENSKRWNPEIQYTSNYYKSTSVDFAVNTEGVYSEPRPIGTRYLTRNL

SEQ ID NO: 3013 - protein, 738 aa, Artificial Sequence
  source: /note="Description of Artificial Sequence: Synthetic polypeptide"
MAADGYLPDWLEDNLSEGIREWWALKPGAPKPKANQQKQDDGRGLVLPGYKYLGPFNGLDKGEPVNAADAAALEHDKAYDQQLQAGDNPYLRYNHADAEFQERLQEDTSFGGNLGRAVFQAKKRVLEPLGLVEEGAKTAPGKKRPVEPSPQRSPDSSTGIGKKGQQPARKRLNFGQTGDSESVPDPQPLGEPPAAPSGVGPNTMAAGGGAPMADNNEGADGVGSSSGNWHCDSTWLGDRVITTSTRTWALPTYNNHLYKQISNGTSGGATNDNTYFGYSTPWGYFDFNRFHCHFSPRDWQRLINNNWGFRPKRLSFKLFNIQVKEVTQNEGTKTIANNLTSTIQVFTDSEYQLPYVLGSAHQGCLPPFPADVFTIPQYGYLTLNNGSQAVGRSSFYCLEYFPSQMLRTGNNFQFTYTFEDVPFHSSYAHSQSLDRLMNPLIDQYLYYLSRIQTTGGTANTQTLGFSQGGPNTMANQAKNWLPGPCYRQQRASTTTGQNNNSNFAWTAGTKYHLNGRNSLANPGIAMATHKDDEERFFPSNGILIFGKQNAARDNADYSDVMPTSEEEIKTTNPVATEEYGIVADNLQQQNTAPQIGTVNSQGALPGMVWQNRDVYLQGPIWAKIPHTDGNFHPSPLMGGFGLKHPPPQILIKNTPVPADPPTTFNQSKLNSFITQYSTGQVSVEIEWELQKENSKRWNPEIQYTSNYYKSTSVDFAVNTEGVYSEPRPIGTRYLTRNL

SEQ ID NO: 3014 - protein, 738 aa, Artificial Sequence
  source: /note="Description of Artificial Sequence: Synthetic polypeptide"
MAADGYLPDWLEDNLSEGIREWWALKPGAPKPKANQQKQDDGRGLVLPGYKYLGPFNGLDKGEPVNAADAAALEHDKAYDQQLQAGDNPYLRYNHADAEFQERLQEDTSFGGNLGRAVFQAKKRVLEPLGLVEEGAKTAPGKKRPVEPSPQRSPDSSTGIGKKGQQPARKRLNFGQTGDSESVPDPQPLGEPPAAPSGVGPNTMAAGGGAPMADNNEGADGVGSSSGNWHCDSTWLGDRVITTSTRTWALPTYNNHLYKQISNGTSGGATNDNTYFGYSTPWGYFDFNRFHCHFSPRDWQRLINNNWGFRPKRLSFKLFNIQVKEVTQNEGTKTIANNLTSTIQVFTDSEYQLPYVLGSAHQGCLPPFPADVFTIPQYGYLTLNNGSQAVGRSSFYCLEYFPSQMLRTGNNFQFTYTFEDVPFHSSYAHSQSLDRLMNPLIDQYLYYLSRIQTTGGTANTQTLGFSQGGPNTMANQAKNWLPGPCYRQQRVSTTTGQNNNSNFAWTAGTKYHLNGRNSLANPGIAMATHKDDEERFFPSNGILIFGKQNAARDNADYSDVIPTSEEEIKTTNPVATEEYGIVADNLQQQNTAPQIGTVNSQGALPGMVWQNRDVYLQGPIWAKIPHTDGNFHPSPLMGGFGLKHPPPQILIKNTPVPADPPTTFNQSKLNSFITQYSTGQVSVEIEWELQKENSKRWNPEIQYTSNYYKSTSVDFAVNTEGVYSEPRPIGTRYLTRNL

SEQ ID NO: 3015 - protein, 738 aa, Artificial Sequence
  source: /note="Description of Artificial Sequence: Synthetic polypeptide"
MAADGYLPDWLEDNLSEGIREWWALKPGAPKPKANQQKQDDGRGLVLPGYKYLGPFNGLDKGEPVNAADAAALEHDKAYDQQLQAGDNPYLRYNHADAEFQERLQEDTSFGGNLGRAVFQAKKRVLEPLGLVEEGAKTAPGKKRPVEPSPQRSPDSSTGIGKKGQQPARKRLNFGQTGDSESVPDPQPLGEPPAAPSGVGPNTMAAGGGAPMADNNEGADGVGSSSGNWHCDSTWLGDRVITTSTRTWALPTYNNHLYKQISNGTSGGATNDNTYFGYSTPWGYFDFNRFHCHFSPRDWQRLINNNWGFRPKRLSFKLFNIQVKEVTQNEGTKTIANNLTSTIQVFTDSEYQLPYVLGSAHQGCLPPFPADVFTIPQYGYLTLNNGSQAVGRSSFYCLEYFPSQMLRTGNNFQFTYTFEDVPFHSSYAHSQSLDRLMNPLIDQYLYYLSRIQTTGGTANTQTLGFSQGGPNTMANQAKNWLPGPCYRQQRVSTTTGQNNNSNFAWTAGTKYHLNGRNSLANPGIAMATHKDDEERFFPSNGILIFGKQNAARDNADYSDVMPTSEEEIKTTNPVATEEYGIVADNLQQQNTAPQIGTANSQGALPGMVWQNRDVYLQGPIWAKIPHTDGNFHPSPLMGGFGLKHPPPQILIKNTPVPADPPTTFNQSKLNSFITQYSTGQVSVEIEWELQKENSKRWNPEIQYTSNYYKSTSVDFAVNTEGVYSEPRPIGTRYLTRNL

SEQ ID NO: 3016 - protein, 738 aa, Artificial Sequence
  source: /note="Description of Artificial Sequence: Synthetic polypeptide"
MAADGYLPDWLEDNLSEGIREWWALKPGAPKPKANQQKQDDGRGLVLPGYKYLGPFNGLDKGEPVNAADAAALEHDKAYDQQLQAGDNPYLRYNHADAEFQERLQEDTSFGGNLGRAVFQAKKRVLEPLGLVEEGAKTAPGKKRPVEPSPQRSPDSSTGIGKKGQQPARKRLNFGQTGDSESVPDPQPLGEPPAAPSGVGPNTMAAGGGAPMADNNEGADGVGSSSGNWHCDSTWLGDRVITTSTRTWALPTYNNHLYKQISNGTSGGATNDNTYFGYSTPWGYFDFNRFHCHFSPRDWQRLINNNWGFRPKRLSFKLFNIQVKEVTQNEGTKTIANNLTSTIQVFTDSEYQLPYVLGSAHQGCLPPFPADVFTIPQYGYLTLNNGSQAVGRSSFYCLEYFPSQMLRTGNNFQFTYTFEDVPFHSSYAHSQSLDRLMNPLIDQYLYYLSRIQTTGGTANTQTLGFSQGGPNTMANQAKNWLPGPCYRQQRVSTTTGQNNNSNFAWTAGTKYHLNGRNSLANPGIAMATHKDDEERFFPSNGILIFGKQNAARDNADYSDVMPTSEEEIKTTNPVATEEYGIVADNLQQQNTAPQIGTVNSQGALPGMVWQNRDVYLQGPIWAKIPHTDGNFHPSPLMGGFGLKHPPPQILIKNTPVPADPPTTFNQSKLNSFITQYSTGQVGVEIEWELQKENSKRWNPEIQYTSNYYKSTSVDFAVNTEGVYSEPRPIGTRYLTRNL

SEQ ID NO: 3017 - protein, 738 aa, Artificial Sequence
  source: /note="Description of Artificial Sequence: Synthetic polypeptide"
MAADGYLPDWLEDNLSEGIREWWALKPGAPKPKANQQKQDDGRGLVLPGYKYLGPFNGLDKGEPVNAADAAALEHGKAYDQQLQAGDNPYLRYNHADAEFQERLQEDTSFGGNLGRAVFQAKKRVLEPLGLVEEGAKTAPGKKRPVEPSPQRSPDSSTGIGKKGQQPARKRLNFGQTGDSESVPDPQPLGEPPAAPSGVGPNTMAAGGGAPMADNNEGADGVGSSSGNWHCDSTWLGDRVITTSTRTWALPTYNNHLYKQISNGTSGGATNDNTYFGYSTPWGYFDFNRFHCHFSPRDWQRLINNNWGFRPKRLSFKLFNIQVKEVTQNEGTKTIANNLTSTIQVFTDSEYQLPYVLGSAHQGCLPPFPADVFTIPQYGYLTLNNGSQAVGRSSFYCLEYFPSQMLRTGNNFQFTYTFEDVPFHSSYAHSQSLDRLMNPLIDQYLYYLSRIQTTGGTANTQTLGFSQGGPNTMANQAKNWLPGPCYRQQRVSTTTGQNNNSNFAWTAGTKYHLNGRNSLANPGIAMATHKDDEERFFPSNGILIFGKQNAARDNADYSDVMPTSEEEIKTTNPVATEEYGIVADNLQQQNTAPQIGTVNSQGALPGMVWQNRDVYLQGPIWAKIPHTDGNFHPSPLMGGFGLKHPPPQILIKNTPVPADPPTTFNQSKLNSFITQYSTGQVSVEIEWELQKENSKRWNPEIQYTSNYYKSTSVDFAVNTEGVYSEPRPIGTRYLTRNL

SEQ ID NO: 3018 - protein, 738 aa, Artificial Sequence
  source: /note="Description of Artificial Sequence: Synthetic polypeptide"
MAADGYLPDWLEDNLSEGIREWWALKPGAPKPKANQQKQDDGRGLVLPGYKYLGPFNGLDKGEPVNAADAAALEHDKAYDQQLQAGDNPYLRYNHADAEFQERLQEDTSFGGNLGRAVFQAKKRVLEPLGLVEEGAKTAPGKKRPVEPSPQRSPDSSTGIGKKGQQPARKRLNFGQTGDSESVPDPQPLGEPPAAPSGVGPNTMAAGGGAPMADNNEGADGVGSSSGNWHCDSTWLGDRVITTSTRTWALPTYNNHLYKQISNGTSGGATNDNTYFGYSTPWGYFDFNRFHCHFSPRDWQRLINNNWGFRPKRLSFKLFNIQVKEVTQNEGTKTIANNLTSTIQVFTDSEYQLPYVLGSAHQGCLPPFPADVFTIPQYGYLTLNNGSQAVGRSSFYCLEYFPSQMLRTGNNFQFTYTFEDVPFHSSYAHSQSLDRLMNPLIDQYLYYLSRIQTTGGTANTQTLGFSQGGPNTMANQAKNWLPGPCYRQQRVSTTTGQNNNSNFAWTAGTKYHLNGRNSLANPGIAMATHKDDEERFFPSNGILIFGKQNAARDNADYSDVMPTSEEEIKTTNPVATGEYGIVADNLQQQNTAPQIGTVNSQGALPGMVWQNRDVYLQGPIWAKIPHTDGNFHPSPLMGGFGLKHPPPQILIKNTPVPADPPTTFNQSKLNSFITQYSTGQVSVEIEWELQKENSKRWNPEIQYTSNYYKSTSVDFAVNTEGVYSEPRPIGTRYLTRNL

SEQ ID NO: 3019 - protein, 738 aa, Artificial Sequence
  source: /note="Description of Artificial Sequence: Synthetic polypeptide"
MAADGYLPDWLEDNLSEGIREWWALKPGAPKPKANQQKQDDGRGLVLPGYKYLGPFNGLDKGEPVNAADAAALEHDKAYDQQLQAGDNPYLRYNHADAEFQERLQEDTSFGGNLGRAVFQAKKRVLEPLGLVEEGAKTAPGKKRPVEPSPQRSPDSSTGIGKKGQQPARKRLNFGQTGDSESVPDPQPLGEPPAAPSGVGPNTMAAGGGAPMADNNEGADGVGSSSGNWHCDSTWLGDRVITTSTRTWALPTHNNHLYKQISNGTSGGATNDNTYFGYSTPWGYFDFNRFHCHFSPRDWQRLINNNWGFRPKRLSFKLFNIQVKEVTQNEGTKTIANNLTSTIQVFTDSEYQLPYVLGSAHQGCLPPFPADVFTIPQYGYLTLNNGSQAVGRSSFYCLEYFPSQMLRTGNNFQFTYTFEDVPFHSSYAHSQSLDRLMNPLIDQYLYYLSRIQTTGGTANTQTLGFSQGGPNTMANQAKNWLPGPCYRQQRVSTTTGQNNNSNFAWTAGTKYHLNGRNSLANPGIAMATHKDDEERFFPSNGILIFGKQNAARDNADYSDVMPTSEEEIKTTNPVATEEYGIVADNLQQQNTAPQIGTVNSQGALPGMVWQNRDVYLQGPIWAKIPHTDGNFHPSPLMGGFGLKHPPPQILIKNTPVPADPPTTFNQSKLNSFITQYSTGQVSVEIEWELQKENSKRWNPEIQYTSNYYKSTSVDFAVNTEGVYSEPRPIGTRYLTRNL

SEQ ID NO: 3020 - protein, 738 aa, Artificial Sequence
  source: /note="Description of Artificial Sequence: Synthetic polypeptide"
MAADGYLPDWLEDNLSEGIREWWALKPGAPKPKANQQKQDDGRGLVLPGYKYLGPFNGLDKGEPVNAADAAALEHDKAYDQQLQAGDNPYLRYNHADAEFQERLQEDTSFGGNLGRAVFQAKKRVLEPLGLVEEGAKTAPGKKRPVEPSPQRSPDSSTGIGKKGQQPARKRLNFGQTGDSESVPDPQPLGEPPAAPSGVGPNTMAAGGGAPMADNNEGADGVGSSSGNWHCDSTWLGDRVITTSTRTWALPTYNNHLYKQISNGTSGGATNDNTYFGYSTPWGYFDFNRFHCHFSPRDWQRLINNNWGFRPKRLSFKLFNIQVKEVTQNEGTKTIANNLTSTIQVFTDSEYQLPYVLGSAHQGCLPPFPADVFTIPQYGYLTLNNGSQAVGRSSFYCLEYFPSQMLRTGNNFQFTYTFEDVPFHSSYAHSQSLDRLMNPLIDQYLYYLSRIQTTGGTANTQTLGFSQGGPNTMANQAKNWLPGPCYRQQRVSTTTGQNNNSNFAWTAGTKYHLNGRNSLANPGIAMATHKDDEERFFPSNGILIFGKQNAAIDNADYSDVMPTSEEEIKTTNPVATEEYGIVADNLQQQNTAPQIGTVNSQGALPGMVWQNRDVYLQGPIWAKIPHTDGNFHPSPLMGGFGLKHPPPQILIKNTPVPADPPTTFNQSKLNSFITQYSTGQVSVEIEWELQKENSKRWNPEIQYTSNYYKSTSVDFAVNTEGVYSEPRPIGTRYLTRNL

SEQ ID NO: 3021 - protein, 738 aa, Artificial Sequence
  source: /note="Description of Artificial Sequence: Synthetic polypeptide"
MAADGYLPDWLEDNLSEGIREWWALKPGAPKPKANQQKQDDGRGLVLPGYKYLGPFNGLDKGEPVNAADAAALEHDKAYDQQLQAGDNPYLRYNHADAEFQERLQEDTSFGGNLGRAVFQAKKRVLEPLGLVEEGAKTAPGKKRPVEPSPQRSPDSSTGIGKKGQQPARKRLNFGQTGDSESVPDPQPLGEPPAAPSGVGPNTMAAGGGAPMADNNEGADGVGSSSGNWHCDSTWLGDRVITTSTRTWALPTYNNHLYKQISNGTSGGATNDNTYFGYSTPWGYFDFNRFHCHFSPRDWQRLINNNWGFRPKRLSFKLFNIQVKEVTQNEGTKTIANNLTSTIQVFTDSEYQLPYVLGSAHQGCLPPFPADVFTIPQYGYLTLNNGSQAVGRSSFYCLEYFPSQMLRTGNNFQFTYTFEDVPFHSSYAHSQSLDRLMNPLIDQYLYYLSRIQTTGGTANTQTLGFSQGGPNTMANQAKNWLPGPCYRQQRVSTTTGQNNNSNFAWTAGTKYHLNGRNSLANPGIAMATHKDDEGRFFPSNGILIFGKQNAARDNADYSDVMPTSEEEIKTTNPVATEEYGIVADNLQQQNTAPQIGTVNSQGALPGMVWQNRDVYLQGPIWAKIPHTDGNFHPSPLMGGFGLKHPPPQILIKNTPVPADPPTTFNQSKLNSFITQYSTGQVSVEIEWELQKENSKRWNPEIQYTSNYYKSTSVDFAVNTEGVYSEPRPIGTRYLTRNL

SEQ ID NO: 3022 - protein, 738 aa, Artificial Sequence
  source: /note="Description of Artificial Sequence: Synthetic polypeptide"
MAADGYLPDWLEDNLSEGIREWWALKPGAPKPKANQQKQDDGRGLVLPGYKYLGPFNGLDKGEPVNAADAAALEHDKAYDQQLQAGDNPYLRYNHADAEFQERLQEDTSFGGNLGRAVFQAKKRVLEPLGLVEEGAKTAPGKKRPVEPSPQRSPDSSTGIGKKGQQPARKRLNFGQTGDSESVPDPQPLGEPPAAPSGVGPNTMAAGGGAPMADNNEGADGVGSSSGNWHCDSTWLGDRVITTSTRTWALPTYNNHLYKQISNGTSGGATNDNTYFGYSTPWGYFDFNRFHCHFSPRDWQRLINNNWGFRTKRLSFKLFNIQVKEVTQNEGTKTIANNLTSTIQVFTDSEYQLPYVLGSAHQGCLPPFPADVFTIPQYGYLTLNNGSQAVGRSSFYCLEYFPSQMLRTGNNFQFTYTFEDVPFHSSYAHSQSLDRLMNPLIDQYLYYLSRIQTTGGTANTQTLGFSQGGPNTMANQAKNWLPGPCYRQQRVSTTTGQNNNSNFAWTAGTKYHLNGRNSLANPGIAMATHKDDEERFFPSNGILIFGKQNAARDNADYSDVMPTSEEEIKTTNPVATEEYGIVADNLQQQNTAPQIGTVNSQGALPGMVWQNRDVYLQGPIWAKIPHTDGNFHPSPLMGGFGLKHPPPQILIKNTPVPADPPTTFNQSKLNSFITQYSTGQVSVEIEWELQKENSKRWNPEIQYTSNYYKSTSVDFAVNTEGVYSEPRPIGTRYLTRNL

SEQ ID NO: 3023 - protein, 738 aa, Artificial Sequence
  source: /note="Description of Artificial Sequence: Synthetic polypeptide"
MAADGYLPDWLEDNLSEGIREWWALKPGAPKPKANQQKQDDGRGLVLPGYKYLGPFNGLDKGEPVNAADAAALEHDKAYDQQLQAGDNPYLRYNHADAEFQERLQEDTSFGGNLGRAVFQAKKRVLEPLGLVEEGAKTAPGKKRPVEPSPQRSPDSSTGIGKKGQQPARKRLNFGQTGDSESVPDPQPLGEPPAAPSGVGPNTMAAGGGAPMADNNEGADGVGSSSGNWHCDSTWLGDRVITTSTRTWALPTYNNHLYKQISNGTSGGATNDNTYFGYSTPWGYFDFNRFHCHFSPRDWQRLINNNWGFRPKRLSFKLFNIQVKEVTQNEGTKTIANNLTSTIQVFTDSEYQLPYVLGSAHQGCLPPFPADVFTIPQYGYLTLNNGSQAVGRSSFYCLEYFPSQMLRTGNNFQFTYTFEDVPFHSSYAHSQSLDRLMNPLIDQYLYYLSRIQTTGGTANTQTLGFSQGGPNTMANQAKNWLPGPCYRQQRVSTTTGQNNNSNFAWTAGTKYHLNGRNSLANPGIAMATHKDDEERFFPSNGILIFGKQNAARDNADYSDVMPTSEEEIKTTNPVATEEYGIVADNLQQQNTAPQIGTVNSQGALPGMVWQNRDVYLQGPIWAKIPHTDGNFHPSPLMGGFGLKHPPPQILIKNTPVPADPPTTFNQSKLNSFITQCSTGQVSVEIEWELQKENSKRWNPEIQYTSNYYKSTSVDFAVNTEGVYSEPRPIGTRYLTRNL

SEQ ID NO: 3024 - protein, 738 aa, Artificial Sequence
  source: /note="Description of Artificial Sequence: Synthetic polypeptide"
MAADGYLPDWLEDNLSEGIREWWALKPGAPKPKANQQKQDDGRGLVLPGYKYLGPFNGLDKGEPVNAADAAALEHDKAYDQQLQAGDNPYLRYNHADAEFQERLQEDTSFGGNLGRAVFQAKKRVLEPLGLVEEGAKTAPGKKRPVEPSPQRSPDSSTGIGKKGQQPARKRLNFGQTGDSESVPDPQPLGEPPAAPSGVGPNTMAAGGGAPMADNNEGADGVGSSSGNWHCDSTWLGDRVITTSTRTWALPTYNNHLYKQISNGTSGGATNDNTYFGYSTPWGYFDFNRFHCHFSPRDWQRLINNNWGFRPKRLSFKLFNIQVKEVTQNEGTKTIANNLTSTIQVFTDSEYQLPYVLGSAHQGCLPPFPADVFTIPQYGYLTLNNGSQAVGRSSFYCLEYFPSQMLRTGNNFQFTYTFEDVPFRSSYAHSQSLDRLMNPLIDQYLYYLSRIQTTGGTANTQTLGFSQGGPNTMANQAKNWLPGPCYRQQRVSTTTGQNNNSNFAWTAGTKYHLNGRNSLANPGIAMATHKDDEERFFPSNGILIFGKQNAARDNADYSDVMPTSEEEIKTTNPVATEEYGIVADNLQQQNTAPQIGTVNSQGALPGMVWQNRDVYLQGPIWAKIPHTDGNFHPSPLMGGFGLKHPPPQILIKNTPVPADPPTTFNQSKLNSFITQYSTGQVSVEIEWELQKENSKRWNPEIQYTSNYYKSTSVDFAVNTEGVYSEPRPIGTRYLTRNL

SEQ ID NO: 3025 - protein, 738 aa, Artificial Sequence
  source: /note="Description of Artificial Sequence: Synthetic polypeptide"
MAADGYLPDWLEDNLSEGIREWWALKPGAPKPKANQQKQDDGRGLVLPGYKHLGPFNGLDKGEPVNAADAAALEHDKAYDQQLQAGDNPYLRYNHADAEFQERLQEDTSFGGNLGRAVFQAKKRVLEPLGLVEEGAKTAPGKKRPVEPSPQRSPDSSTGIGKKGQQPARKRLNFGQTGDSESVPDPQPLGEPPAAPSGVGPNTMAAGGGAPMADNNEGADGVGSSSGNWHCDSTWLGDRVITTSTRTWALPTYNNHLYKQISNGTSGGATNDNTYFGYSTPWGYFDFNRFHCHFSPRDWQRLINNNWGFRPKRLSFKLFNIQVKEVTQNEGTKTIANNLTSTIQVFTDSEYQLPYVLGSAHQGCLPPFPADVFTIPQYGYLTLNNGSQAVGRSSFYCLEYFPSQMLRTGNNFQFTYTFEDVPFHSSYAHSQSLDRLMNPLIDQYLYYLSRIQTTGGTANTQTLGFSQGGPNTMANQAKNWLPGPCYRQQRVSTTTGQNNNSNFAWTAGTKYHLNGRNSLANPGIAMATHKDDEERFFPSNGILIFGKQNAARDNADYSDVMPTSEEEIKTTNPVATEEYGIVADNLQQQNTAPQIGTVNSQGALPGMVWQNRDVYLQGPIWAKIPHTDGNFHPSPLMGGFGLKHPPPQILIKNTPVPADPPTTFNQSKLNSFITQYSTGQVSVEIEWELQKENSKRWNPEIQYTSNYYKSTSVDFAVNTEGVYSEPRPIGTRYLTRNL

SEQ ID NO: 3026 - protein, 738 aa, Artificial Sequence
  source: /note="Description of Artificial Sequence: Synthetic polypeptide"
MAADGYLPDWLEDNLSEGIREWWALKPGAPKPKANQQKQDDGRGLVLPGYKYLGPFNGLDKGEPVNAADAAALEHDKAYDQQLQAGDNPYLRYNHADAEFQERLQEDTSFGGNLGRAVFQAKKRVLEPLGLVEEGAKTAPGKKRPVEPSPQRSPDSSTGIGKKGQQPARKRLNFGQTGDSESVPDPQPLGEPPAAPSGVGPNTMAAGGGAPMADNNEGADGVGSSSGNWHCDSTWLGDRVITTSTRTWALPTYNNHLYKQISNGTSGGATNDNTYFGYSTPWGYFDFNRFHCHFSPRDWQRLINNNWGFRPKRLSFKLFNIQVKEVTQNEGTKTIANNLTSTIQVFTDSEYQLPYVLGSAHQGCLPPFPADVFTIPQYGYLTLNNGSQAVGRSSFYCLEYFPSQMLRTGNNFQFTYTFEDVPFHSSYAHSQSLDRLMNPLIDQYLYYLSRIQTTGGTANTQTLGFSQGGPNTMANQAKNWLPGPCYRQQRVSATTGQNNNSNFAWTAGTKYHLNGRNSLANPGIAMATHKDDEERFFPSNGILIFGKQNAARDNADYSDVMPTSEEEIKTTNPVATEEYGIVADNLQQQNTAPQIGTVNSQGALPGMVWQNRDVYLQGPIWAKIPHTDGNFHPSPLMGGFGLKHPPPQILIKNTPVPADPPTTFNQSKLNSFITQYSTGQVSVEIEWELQKENSKRWNPEIQYTSNYYKSTSVDFAVNTEGVYSEPRPIGTRYLTRNL

SEQ ID NO: 3027 - protein, 738 aa, Artificial Sequence
  source: /note="Description of Artificial Sequence: Synthetic polypeptide"
MAADGYLPDWLEDNLSEGIREWWALKPGAPKPKANQQKQDDGRGLVLPGYKYLGPFNGLDKGEPVNAADAAALEHDKAYDQQLQAGDNPYLRYNHADAEFQERLQEDTSFGGNLGRAVFQAKKRVLEPLGLVEEGAKTAPGKKRPVEPSPQRSPDSSTGIGKKGQQPARKRLNFGQTGGSESVPDPQPLGEPPAAPSGVGPNTMAAGGGAPMADNNEGADGVGSSSGNWHCDSTWLGDRVITTSTRTWALPTYNNHLYKQISNGTSGGATNDNTYFGYSTPWGYFDFNRFHCHFSPRDWQRLINNNWGFRPKRLSFKLFNIQVKEVTQNEGTKTIANNLTSTIQVFTDSEYQLPYVLGSAHQGCLPPFPADVFTIPQYGYLTLNNGSQAVGRSSFYCLEYFPSQMLRTGNNFQFTYTFEDVPFHSSYAHSQSLDRLMNPLIDQYLYYLSRIQTTGGTANTQTLGFSQGGPNTMANQAKNWLPGPCYRQQRVSTTTGQNNNSNFAWTAGTKYHLNGRNSLANPGIAMATHKDDEERFFPSNGILIFGKQNAARDNADYSDVMPTSEEEIKTTNPVATEEYGIVADNLQQQNTAPQIGTVNSQGALPGMVWQNRDVYLQGPIWAKIPHTDGNFHPSPLMGGFGLKHPPPQILIKNTPVPADPPTTFNQSKLNSFITQYSTGQVSVEIEWELQKENSKRWNPEIQYTSNYYKSTSVDFAVNTEGVYSEPRPIGTRYLTRNL

SEQ ID NO: 3028 - protein, 738 aa, Artificial Sequence
  source: /note="Description of Artificial Sequence: Synthetic polypeptide"
MAADGYLPDWLEDNLSEGIREWWALKPGAPKPKANQQKQDDGRGLVLPGYKYLGPFNGLDKGEPVNAADAAALEHDKAYDQQLQAGDNPYLRYNHADAEFQERLQEDTSFGGNLGRAVFQAKKRVLEPLGLVEEGAKTAPGKKRPVEPSPQRSPDSSTGIGKKGQQPARKRLNFGQTGDSESVPDPQPLGEPPAAPSGVGPNTMAAGGGAPMADNNEGADGVGSSSGNWHCDSAWLGDRVITTSTRTWALPTYNNHLYKQISNGTSGGATNDNTYFGYSTPWGYFDFNRFHCHFSPRDWQRLINNNWGFRPKRLSFKLFNIQVKEVTQNEGTKTIANNLTSTIQVFTDSEYQLPYVLGSAHQGCLPPFPADVFTIPQYGYLTLNNGSQAVGRSSFYCLEYFPSQMLRTGNNFQFTYTFEDVPFHSSYAHSQSLDRLMNPLIDQYLYYLSRIQTTGGTANTQTLGFSQGGPNTMANQAKNWLPGPCYRQQRVSTTTGQNNNSNFAWTAGTKYHLNGRNSLANPGIAMATHKDDEERFFPSNGILIFGKQNAARDNADYSDVMPTSEEEIKTTNPVATEEYGIVADNLQQQNTAPQIGTVNSQGALPGMVWQNRDVYLQGPIWAKIPHTDGNFHPSPLMGGFGLKHPPPQILIKNTPVPADPPTTFNQSKLNSFITQYSTGQVSVEIEWELQKENSKRWNPEIQYTSNYYKSTSVDFAVNTEGVYSEPRPIGTRYLTRNL

SEQ ID NO: 3029 - protein, 738 aa, Artificial Sequence
  source: /note="Description of Artificial Sequence: Synthetic polypeptide"
MAADGYLPDWLEDNLSEGIREWWALKPGAPKPKANQQKQDDGRGLVLPGYKYLGPFNGLDKGEPVNAADAAALEHDKAYDQQLQAGDNPYLRYNHADAEFQERLQEDTSFGGNLGRAVFQAKKRVLEPLGLVEEGAKTAPGKKRPVEPSPQRSPDSSTGIGKKGQQPARKRLNFGQTGDSESVPDPQPLGEPPAAPSGVGPNTMAAGGGAPMADNNEGADGVGSSSGNWHCDSTWLGDRVITTSTRTWALPTYNNHLYKQISNGTSGGATNDNTYFGYSTPWGYFDFNRFHCHFSPRDWQRLINNNWGFRPKRLSFKLFNIQVKEVTQNEGTKTIANNLTSTIQVFTDSEYQLPYVLGSAHRGCLPPFPADVFTIPQYGYLTLNNGSQAVGRSSFYCLEYFPSQMLRTGNNFQFTYTFEDVPFHSSYAHSQSLDRLMNPLIDQYLYYLSRIQTTGGTANTQTLGFSQGGPNTMANQAKNWLPGPCYRQQRVSTTTGQNNNSNFAWTAGTKYHLNGRNSLANPGIAMATHKDDEERFFPSNGILIFGKQNAARDNADYSDVMPTSEEEIKTTNPVATEEYGIVADNLQQQNTAPQIGTVNSQGALPGMVWQNRDVYLQGPIWAKIPHTDGNFHPSPLMGGFGLKHPPPQILIKNTPVPADPPTTFNQSKLNSFITQYSTGQVSVEIEWELQKENSKRWNPEIQYTSNYYKSTSVDFAVNTEGVYSEPRPIGTRYLTRNL

SEQ ID NO: 3030 - protein, 738 aa, Artificial Sequence
  source: /note="Description of Artificial Sequence: Synthetic polypeptide"
MAADGYLPDWLEDNLSEGIREWWALKPGAPKPKANQQKQDDGRGLVLPGYKYLGPFNGLDKGEPVNAADAAALEHDKAYDQQLQAGDNPYLRYNHADAEFQERLQEDTSFGGNLGRAVFQAKKRVLEPLGLVEEGAKTAPGKKRPVEPSPQRSPDSSTGIGKKGQQPARKRLNFGQTGDSESVPDPQPLGEPPAAPSGVGPNTMAAGGGAPMADNNEGADGVGSSSGNWHCDSTWLGDRVITTSTRTWALPTYNNHLYKQISNGTSGGATNDNTYFGYSTPWGYFDFNRFHCHFSPRDWQRLINNNWGFRPKRLSFKLFNIQVKEVTQNEGTKTIANNLTSTIQVFTDSEYQLPYVLGSAHQGCLPPFPADVFTIPQYGYLTLNNGSQAVGRSSFYCLEYFPSQMLRTGNNFQFTYTFEDVPFHSSYAHSQSLDRLMNPLIDQYLYYLSRIQTTGGTANTQTLGFSQGGPNTMANQAKNWLPGPCYRQQRVSTTTGQNNNSNFAWTAGTKYHLNGRNSLANPGIAMATHKDDEERFFPSNGILIFGKQNAARDNADYSDVMPTSEEEIKTTNPVATEEYGIVADNLQQQNTAPQIGTVNSQGALPGMVWQNRDVYLQGPIWAKIPHTDGNFHPSPLMGGFGLKHPPPQILIKNTPVSADPPTTFNQSKLNSFITQYSTGQVSVEIEWELQKENSKRWNPEIQYTSNYYKSTSVDFAVNTEGVYSEPRPIGTRYLTRNL

SEQ ID NO: 3031 - protein, 738 aa, Artificial Sequence
  source: /note="Description of Artificial Sequence: Synthetic polypeptide"
MAADGYLPDWLEDNLSEGIREWWALKPGAPKPKANQQKQDDGRGLVLPGYRYLGPFNGLDKGEPVNAADAAALEHDKAYDQQLQAGDNPYLRYNHADAEFQERLQEDTSFGGNLGRAVFQAKKRVLEPLGLVEEGAKTAPGKKRPVEPSPQRSPDSSTGIGKKGQQPARKRLNFGQTGDSESVPDPQPLGEPPAAPSGVGPNTMAAGGGAPMADNNEGADGVGSSSGNWHCDSTWLGDRVITTSTRTWALPTYNNHLYKQISNGTSGGATNDNTYFGYSTPWGYFDFNRFHCHFSPRDWQRLINNNWGFRPKRLSFKLFNIQVKEVTQNEGTKTIANNLTSTIQVFTDSEYQLPYVLGSAHQGCLPPFPADVFTIPQYGYLTLNNGSQAVGRSSFYCLEYFPSQMLRTGNNFQFTYTFEDVPFHSSYAHSQSLDRLMNPLIDQYLYYLSRIQTTGGTANTQTLGFSQGGPNTMANQAKNWLPGPCYRQQRVSTTTGQNNNSNFAWTAGTKYHLNGRNSLANPGIAMATHKDDEERFFPSNGILIFGKQNAARDNADYSDVMPTSEEEIKTTNPVATEEYGIVADNLQQQNTAPQIGTVNSQGALPGMVWQNRDVYLQGPIWAKIPHTDGNFHPSPLMGGFGLKHPPPQILIKNTPVPADPPTTFNQSKLNSFITQYSTGQVSVEIEWELQKENSKRWNPEIQYTSNYYKSTSVDFAVNTEGVYSEPRPIGTRYLTRNL

SEQ ID NO: 3032 - protein, 738 aa, Artificial Sequence
  source: /note="Description of Artificial Sequence: Synthetic polypeptide"
MAADGYLPDWLEDNLSEGIREWWALKPGAPKPKANQQKQDDGRGLVLPGYKYLGPFNGLDKGEPVNAADAAALEHDKAYDQQLQAGDNPYLRYNHADAEFQERLQEDTSFGGNLGRAVFQAKKRVLEPLGLVEEGAKTAPGKKRPVEPSPQRSPDSSTGIGKKGQQPARKRLNFGQTGDSESVPDPQPLGEPPAAPSGVGPNTMAAGGGAPMADNNEGADGVGSSSGNWHCDSTWLGDRVITTSTRTWALPTYNNHLYKQISNGTSGGATNDNTYFGYSTPWGYFDFNRFHCHFSPRDWQRLINNNWGFRPKRLSFKLFNIQVKEVTQNEGTKTIANNLTSTIQVFTDSEYQLPYVLGSAHQGCLPPFPADVFTIPQYGYLTLNNGSQAVGRSSFYCLEYFPSQMLRTGNNFQFTYTFEDVPFHSSYAHSQSLDRLMNPLIDQYLYYLSRIQTTGGTANTQTLGFSQGGPNTMANQAKNWLPGPCYRQQRVSTTTGQNNNSNFAWTAGTKYRLNGRNSLANPGIAMATHKDDEERFFPSNGILIFGKQNAARDNADYSDVMPTSEEEIKTTNPVATEEYGIVADNLQQQNTAPQIGTVNSQGALPGMVWQNRDVYLQGPIWAKIPHTDGNFHPSPLMGGFGLKHPPPQILIKNTPVPADPPTTFNQSKLNSFITQYSTGQVSVEIEWELQKENSKRWNPEIQYTSNYYKSTSVDFAVNTEGVYSEPRPIGTRYLTRNL

SEQ ID NO: 3033 - protein, 738 aa, Artificial Sequence
  source: /note="Description of Artificial Sequence: Synthetic polypeptide"
MAADGYLPDWLEDNLSEGIREWWALKPGAPKPKANQQKQDDGRGLVLPGYKYLGPFNGLDKGEPVNAADAAALEHDKAYDQQLQAGDNPYLRYNHADAEFQERLQEDTSFGGNLGRAVFQAKKRVLEPLGLVEEGAKTAPGKKRPVEPSPQRSPDSSTGIGKKGQQPARKRLNFGQTGDSESAPDPQPLGEPPAAPSGVGPNTMAAGGGAPMADNNEGADGVGSSSGNWHCDSTWLGDRVITTSTRTWALPTYNNHLYKQISNGTSGGATNDNTYFGYSTPWGYFDFNRFHCHFSPRDWQRLINNNWGFRPKRLSFKLFNIQVKEVTQNEGTKTIANNLTSTIQVFTDSEYQLPYVLGSAHQGCLPPFPADVFTIPQYGYLTLNNGSQAVGRSSFYCLEYFPSQMLRTGNNFQFTYTFEDVPFHSSYAHSQSLDRLMNPLIDQYLYYLSRIQTTGGTANTQTLGFSQGGPNTMANQAKNWLPGPCYRQQRVSTTTGQNNNSNFAWTAGTKYHLNGRNSLANPGIAMATHKDDEERFFPSNGILIFGKQNAARDNADYSDVMPTSEEEIKTTNPVATEEYGIVADNLQQQNTAPQIGTVNSQGALPGMVWQNRDVYLQGPIWAKIPHTDGNFHPSPLMGGFGLKHPPPQILIKNTPVPADPPTTFNQSKLNSFITQYSTGQVSVEIEWELQKENSKRWNPEIQYTSNYYKSTSVDFAVNTEGVYSEPRPIGTRYLTRNL

SEQ ID NO: 3034 - protein, 738 aa, Artificial Sequence
  source: /note="Description of Artificial Sequence: Synthetic polypeptide"
MAADGYLPDWLEDNLSEGIREWWALKPGAPKPKANQQKQDDGRGLVLPGYKYLGPFNGLDKGEPVNAADAAALEHDKAYDQQLQAGDNPYLRYNHADAEFQERLQEDTSFGGNLGRAVFQAKKRVLEPLGLVEEGAKTAPGKKRPVEPSPQRSPDPSTGIGKKGQQPARKRLNFGQTGDSESVPDPQPLGEPPAAPSGVGPNTMAAGGGAPMADNNEGADGVGSSSGNWHCDSTWLGDRVITTSTRTWALPTYNNHLYKQISNGTSGGATNDNTYFGYSTPWGYFDFNRFHCHFSPRDWQRLINNNWGFRPKRLSFKLFNIQVKEVTQNEGTKTIANNLTSTIQVFTDSEYQLPYVLGSAHQGCLPPFPADVFTIPQYGYLTLNNGSQAVGRSSFYCLEYFPSQMLRTGNNFQFTYTFEDVPFHSSYAHSQSLDRLMNPLIDQYLYYLSRIQTTGGTANTQTLGFSQGGPNTMANQAKNWLPGPCYRQQRVSTTTGQNNNSNFAWTAGTKYHLNGRNSLANPGIAMATHKDDEERFFPSNGILIFGKQNAARDNADYSDVMPTSEEEIKTTNPVATEEYGIVADNLQQQNTAPQIGTVNSQGALPGMVWQNRDVYLQGPIWAKIPHTDGNFHPSPLMGGFGLKHPPPQILIKNTPVPADPPTTFNQSKLNSFITQYSTGQVSVEIEWELQKENSKRWNPEIQYTSNYYKSTSVDFAVNTEGVYSEPRPIGTRYLTRNL

SEQ ID NO: 3035 - protein, 738 aa, Artificial Sequence
  source: /note="Description of Artificial Sequence: Synthetic polypeptide"
MAADGYLPDWLEDNLSEGIREWWALKPGAPKPKANQQKQDDGRGLVLPGYKYLGPFNGLDKGEPVNAADAAALEHDKAYDQQLQAGDNPYLRYNHADAEFQERLQEDTSFGGNLGRAVFQAKKRVLEPLGLVEEGAKTAPGKKRPVEPSPQRSPDSSTGIGKKGQQPARKRLNFGQTGDSESVPDPQPLGEPPAAPSGVGPNTMAAGGGAPMADNNEGADGVGSSSGNWHCDSTWLGDRVITTSTRTWALPTYNNHLYKQISNGTSGGATNDNTYFGYSTPWGYFDFNRFHCHFSPRDWQRLINNNWGFRPKRLSFKLFNIQVKEVTQNEGTKTIANNLTSTIQVFTDSEYRLPYVLGSAHQGCLPPFPADVFTIPQYGYLTLNNGSQAVGRSSFYCLEYFPSQMLRTGNNFQFTYTFEDVPFHSSYAHSQSLDRLMNPLIDQYLYYLSRIQTTGGTANTQTLGFSQGGPNTMANQAKNWLPGPCYRQQRVSTTTGQNNNSNFAWTAGTKYHLNGRNSLANPGIAMATHKDDEERFFPSNGILIFGKQNAARDNADYSDVMPTSEEEIKTTNPVATEEYGIVADNLQQQNTAPQIGTVNSQGALPGMVWQNRDVYLQGPIWAKIPHTDGNFHPSPLMGGFGLKHPPPQILIKNTPVPADPPTTFNQSKLNSFITQYSTGQVSVEIEWELQKENSKRWNPEIQYTSNYYKSTSVDFAVNTEGVYSEPRPIGTRYLTRNL

SEQ ID NO: 3036 - protein, 738 aa, Artificial Sequence
  source: /note="Description of Artificial Sequence: Synthetic polypeptide"
MAADGYLPDWLEDNLSEGIREWWALKPGAPKPKANQQKQDDGRGLVLPGYKYLGPFNGLDKGEPVNAADAAALEHDKAYDQQLQAGDNPYLRYNHADAEFQERLQEDTSFGGNLGRAVFQAKKRVLEPLGLVEEGAKTAPGKKRPVEPSPQRSPDSSTGIGKKGQQPARKRLNFGQTGDSESVPDPQPLGEPPAAPSGVGPNTMAAGGGAPMADNNEGADGVGSSSGNWHCDSTWLGDRVITTSTRTWALPTYNNHLYKQISNGTSGGATNDNTYFGYSTPWGYFDFNRFHCHFSPRDWQRLINNNWGFRPKRLSFKLFNIQVKEVTQNEGTKTIANNLTSTIQVFTDSEYQLPYVLGSAHQGCLPPFPADVFTIPQYGYLTLNNGSQAVGRSSFYCLEYFPSQMLRTGNNFQFTYTFEDVPFHSSYAHSQSLDRLMNPLIDQYLYYLSRIQTTGGTANTQTLGFSQGGPNTMANQAKNWLPGPCYRQQRVSTTTGQNNNSNFAWTAGTKYHLNGRNSLANPGIAMATHKDDEERFFPSNGILIFGKQNAARDNADYSDVMPTSEEEIKTTNPVATEEYGIVADNLQQQNTAPQIGTVNSQGALPGMVWQNRDVYLQGPIWAKIPHTDGNFHPSPLMGGFGLKHPPPQILIKNTPVPADPPTTFNQPKLNSFITQYSTGQVSVEIEWELQKENSKRWNPEIQYTSNYYKSTSVDFAVNTEGVYSEPRPIGTRYLTRNL

SEQ ID NO: 3037 - protein, 738 aa, Artificial Sequence
  source: /note="Description of Artificial Sequence: Synthetic polypeptide"
MAADGYLPDWLEDNLSEGIREWWALKPGAPKPKANQQKQDDGRGLVLPGYKYLGPFNGLDKGEPVNAADAAALEHDKAYDQQLQAGGNPYLRYNHADAEFQERLQEDTSFGGNLGRAVFQAKKRVLEPLGLVEEGAKTAPGKKRPVEPSPQRSPDSSTGIGKKGQQPARKRLNFGQTGDSESVPDPQPLGEPPAAPSGVGPNTMAAGGGAPMADNNEGADGVGSSSGNWHCDSTWLGDRVITTSTRTWALPTYNNHLYKQISNGTSGGATNDNTYFGYSTPWGYFDFNRFHCHFSPRDWQRLINNNWGFRPKRLSFKLFNIQVKEVTQNEGTKTIANNLTSTIQVFTDSEYQLPYVLGSAHQGCLPPFPADVFTIPQYGYLTLNNGSQAVGRSSFYCLEYFPSQMLRTGNNFQFTYTFEDVPFHSSYAHSQSLDRLMNPLIDQYLYYLSRIQTTGGTANTQTLGFSQGGPNTMANQAKNWLPGPCYRQQRVSTTTGQNNNSNFAWTAGTKYHLNGRNSLANPGIAMATHKDDEERFFPSNGILIFGKQNAARDNADYSDVMPTSEEEIKTTNPVATEEYGIVADNLQQQNTAPQIGTVNSQGALPGMVWQNRDVYLQGPIWAKIPHTDGNFHPSPLMGGFGLKHPPPQILIKNTPVPADPPTTFNQSKLNSFITQYSTGQVSVEIEWELQKENSKRWNPEIQYTSNYYKSTSVDFAVNTEGVYSEPRPIGTRYLTRNL

SEQ ID NO: 3038 - protein, 738 aa, Artificial Sequence
  source: /note="Description of Artificial Sequence: Synthetic polypeptide"
MAADGYLPDWLEDNLSEGIREWWALKPGAPKPKANQQKQDDGRGLVLPGYKYLGPFNGLDKGEPVNAADAAALEHDKAYDQQLQAGDNPYLRYNHADAEFQERLQEDTSFGGNLGRAVFQAKKRVLEPLGLVEEGAKTAPGKKRPVEPSPQRSPDSSTGIGKKGQQPARKRLNFGQTGDSESVPDPQPLGEPPAAPSGVGPNTMAAGGGAPMADNNEGADGVGSSSGNWHCDSTWLGDRVITTSTRTWALPTYNNHLYKQISNGTSGGATNDNTYFGYSTPWGYFDFNRFHCHFSPRDWQRLINNNWGFRPKRLSFKLFNIQVKEVTQNEGTKTIANNLTSTIQVFTDSEYQLPYVLGSAHQGCLPPFPADVFTIPQYGYLTLNNGSQAVGRSSFYCLEYFPSQMLRTGNNFQFTYTFEDVPFHSSYAHSQSLDRLMNPLIDQYLYYLSRIQTTGGTANTQTLGFSQGGPNTMANQAKNWLPGPCYRQQRVSTATGQNNNSNFAWTAGTKYHLNGRNSLANPGIAMATHKDDEERFFPSNGILIFGKQNAARDNADYSDVMPTSEEEIKTTNPVATEEYGIVADNLQQQNTAPQIGTVNSQGALPGMVWQNRDVYLQGPIWAKIPHTDGNFHPSPLMGGFGLKHPPPQILIKNTPVPADPPTTFNQSKLNSFITQYSTGQVSVEIEWELQKENSKRWNPEIQYTSNYYKSTSVDFAVNTEGVYSEPRPIGTRYLTRNL

SEQ ID NO: 3039 - protein, 738 aa, Artificial Sequence
  source: /note="Description of Artificial Sequence: Synthetic polypeptide"
MAADGYLPDWLEDNLSEGIREWWALKPGAPKPKANQQKQDDGRGLVLPGYKYLGPFNGLDKGEPVNAADAAALEHDKAYDQQLQAGDNPYLRYNHADAEFQERLQEDTSFGGNLGRAVFQAKKRVLEPLGLVEEGAKTAPGKKRPVEPSPQRSPDSSTGIGKKGQQPARKRLNFGQTGDSESVPDPQPLGEPPAAPSGVGPNTMAAGGGAPMADNNEGADGVGSSSGNWHCDSTWLGDRVITTSTRTWALPTYNNHLYKQISNGTSGGATNDNTYFGYSTPWGYFDFNRFHCHFSPRDWQRLINNNWGFRPKRLSFKLFNIQVKEVTQNEGTKTIANNLTSTIQVFTDSEYQLPYVLGSAHQGCPPPFPADVFTIPQYGYLTLNNGSQAVGRSSFYCLEYFPSQMLRTGNNFQFTYTFEDVPFHSSYAHSQSLDRLMNPLIDQYLYYLSRIQTTGGTANTQTLGFSQGGPNTMANQAKNWLPGPCYRQQRVSTTTGQNNNSNFAWTAGTKYHLNGRNSLANPGIAMATHKDDEERFFPSNGILIFGKQNAARDNADYSDVMPTSEEEIKTTNPVATEEYGIVADNLQQQNTAPQIGTVNSQGALPGMVWQNRDVYLQGPIWAKIPHTDGNFHPSPLMGGFGLKHPPPQILIKNTPVPADPPTTFNQSKLNSFITQYSTGQVSVEIEWELQKENSKRWNPEIQYTSNYYKSTSVDFAVNTEGVYSEPRPIGTRYLTRNL

SEQ ID NO: 3040 - protein, 738 aa, Artificial Sequence
  source: /note="Description of Artificial Sequence: Synthetic polypeptide"
MAADGYLPDWLEDNLSEGIREWWALKPGAPKPKANQQKQDDGRGLVLPGYKYLGPFNGLDKGEPVNAADAAALEHDKAYDQQPQAGDNPYLRYNHADAEFQERLQEDTSFGGNLGRAVFQAKKRVLEPLGLVEEGAKTAPGKKRPVEPSPQRSPDSSTGIGKKGQQPARKRLNFGQTGDSESVPDPQPLGEPPAAPSGVGPNTMAAGGGAPMADNNEGADGVGSSSGNWHCDSTWLGDRVITTSTRTWALPTYNNHLYKQISNGTSGGATNDNTYFGYSTPWGYFDFNRFHCHFSPRDWQRLINNNWGFRPKRLSFKLFNIQVKEVTQNEGTKTIANNLTSTIQVFTDSEYQLPYVLGSAHQGCLPPFPADVFTIPQYGYLTLNNGSQAVGRSSFYCLEYFPSQMLRTGNNFQFTYTFEDVPFHSSYAHSQSLDRLMNPLIDQYLYYLSRIQTTGGTANTQTLGFSQGGPNTMANQAKNWLPGPCYRQQRVSTTTGQNNNSNFAWTAGTKYHLNGRNSLANPGIAMATHKDDEERFFPSNGILIFGKQNAARDNADYSDVMPTSEEEIKTTNPVATEEYGIVADNLQQQNTAPQIGTVNSQGALPGMVWQNRDVYLQGPIWAKIPHTDGNFHPSPLMGGFGLKHPPPQILIKNTPVPADPPTTFNQSKLNSFITQYSTGQVSVEIEWELQKENSKRWNPEIQYTSNYYKSTSVDFAVNTEGVYSEPRPIGTRYLTRNL

SEQ ID NO: 3041 - protein, 738 aa, Artificial Sequence
  source: /note="Description of Artificial Sequence: Synthetic polypeptide"
MAADGYLPDWLEDNLSEGIREWWALKPGAPKPKANQQKQDDGRGLVLPGYKYLGPFNGLDKGEPVNAADAAALEHDKAYDQQLQAGDNPYLRYNHADAEFQERLQEDTSFGGNLGRAVFQAKKRVLEPLGLVEEGAKTAPGKKRPVEPSPQRSPDSSTGIGKKGQQPARKRLNFGQTGDSESVPDPQPLGEPPAAPSGVGPNTMAAGGGAPMADNNEGADGVGSSSGNWHCDSTWLGDRVITTSTRTWALPTYNNHLYKQISNGTSGGATNDNTYFGYSTPWGYFDFNRFHCHFSPRDWQRLINNNWGFRPKRLSFKLFNIQVKEVTQNEGTKTIANNLTSTIQVFTDSEYQLPYVLGSAHQGCLPPFPADVFTIPQYGYLTLNNGSQAVGRSSFYCLEYLPSQMLRTGNNFQFTYTFEDVPFHSSYAHSQSLDRLMNPLIDQYLYYLSRIQTTGGTANTQTLGFSQGGPNTMANQAKNWLPGPCYRQQRVSTTTGQNNNSNFAWTAGTKYHLNGRNSLANPGIAMATHKDDEERFFPSNGILIFGKQNAARDNADYSDVMPTSEEEIKTTNPVATEEYGIVADNLQQQNTAPQIGTVNSQGALPGMVWQNRDVYLQGPIWAKIPHTDGNFHPSPLMGGFGLKHPPPQILIKNTPVPADPPTTFNQSKLNSFITQYSTGQVSVEIEWELQKENSKRWNPEIQYTSNYYKSTSVDFAVNTEGVYSEPRPIGTRYLTRNL

SEQ ID NO: 3042 - protein, 738 aa, Artificial Sequence
  source: /note="Description of Artificial Sequence: Synthetic polypeptide"
MAADGYLPDWLEDNLSEGIREWWALKPGAPKPKANQQKQDDGRGLVLPGYKYLGPFNGLDKGEPVNAADAAALEHDKAYDQQLRAGDNPYLRYNHADAEFQERLQEDTSFGGNLGRAVFQAKKRVLEPLGLVEEGAKTAPGKKRPVEPSPQRSPDSSTGIGKKDQQPARKRLNFGQTGDSESVPDPQPLGEPPAAPSGVGPNTMAAGGGAPMADNNEGADGVGSSSGNWHCDSTWLGDRVITTSTRTWALPTYNNHLYKQISNGTSGGATNDNTYFGYSTPWGYFDFNRFHCHFSPRDWQRLINNNWGFRPKRLSFKLFNIQVKEVTQNEGTKTIANNLTSTIQVFTDSEYQLPYVLGSAHQGCLPPFPADVFTIPQYGYLTLNNGSQAVGRSSFYCLEYFPSQMLRTGNNFQFTYTFEDVPFHSSYAHSQSLDRLMNPLIDQYLYYLSRIQTTGGTANTQTLGFSQGGPNTMANQAKNWLPGPCYRQQRVSTTTGQNNNSNFAWTAGTKYHLNGRNSLANPGIAMATHKDDEERFFPSNGILIFGKQNAARDNADYSDVMPTSEEEIKTTNPVATEEYGIVADNLQQQNTAPQIGTVNSQGALPGMVWQNRDVYLQGPIWAKIPHTDGNFHPSPLMGGFGLKHPPPQILIKNTPVPADPPTTFNQSKLNSFITQYSTGQVSVEIEWELQKENSKRWNPEIQYTSNYYKSTSVDFAVNTEGVYSEPRPIGTRYLTRNL

SEQ ID NO: 3043 - protein, 738 aa, Artificial Sequence
  source: /note="Description of Artificial Sequence: Synthetic polypeptide"
MAADGYLPDWLEDNLSEGIREWWALKPGAPKPKANQQKQDDGRGLVLPGYKYLGPFNGLDKGEPVNAADAAALEHDKAYDQQLQAGDNPYLRYNHADAEFQERLQEDTSFGGNLGRAVFQAKKRVLEPLGLVEEGAKTAPGKKRPVEPSPQRSPDSSTGIGKKGQQPARKRLNFGQTGDSESVPDPQPLGEPPAAPSGVGPNTMAAGGGAPMADNNEGADGVGSSSGNWHCDSTWLGDRVITTSTRTWALPTYNNHLYKQISNGTSGGATNDNTYFGYSTPWGYFDFNRFHCHFSPRDWQRLINNNWGFRPKRLSFKLFNIQVKEVTQNEGTKTIANNLTSTIQVFTDSEYQLPYVLGSAHQGCLPPFPADVFTIPQYGYLTLNNGSQAVGRSSFYCLEYFPSQMLRTGNNFQFTYTFEDVPFHSSYAHSQSLDRLMNPLIDQYLYYLSRIQTTGGTANTQTLGFSQGGPNTMANQAKNWLPGPCYRQQRVSTTTGQNNNSNFAWTAGTKYHLNGRNSLANPGIAMATHKDDEERFFPSNGILIFGKQNAARDNADYSDVMPTSEEEIKTTNPVATEEYGIVADNLQQQNTAPQIGTVNSQGALPGMVWQNRDVYLQGPIWAKIPRTDGNFHPSPLMGGFGLKHPPPQILIKNTPVPADPPTTFNQSKLNSFITQYSTGQVSVEIEWELQKENSKRWNPEIQYTSNYYKSTSVDFAVNTEGVYSEPRPIGTRYLTRNL

SEQ ID NO: 3044 - protein, 738 aa, Artificial Sequence
  source: /note="Description of Artificial Sequence: Synthetic polypeptide"
MAADGYLPDWLEDNLSEGIREWWALKPGAPKPKANQQKQDDGRGLVLPGYKYLGPFNGLDKGEPVNAADAAALEHDKAYDQQLQAGDNPYLRYNHADAEFQERLQEDTSFGGNLGRAVFQAKKRVLEPLGLVEEGAKTAPGKKRPVEPSPQRSPDSSTGIGKKGQQPARKRLNFGQTGDSESVPDPQPLGEPPAAPSGVGPNTMAAGGGAPMADNNEGADGVGSSSGNWHCDSTWLGDRVITTSTRTWALPTYNNHLYKQISNGTSGGATNDNTYFGYSTPWGYFDFNRFHCHFSPRDWQRLINNNWGFRPKRLSFKLFNIQVKEVTQNEGTKTIANNLTSTIQVFTDSEYQLPYVLGSAHQGCLPPFPADVFTIPQYGYLTLNNGSQAVGRSSFYCLEYFPSQMLRTGNNFQFTYTFEDVPFHSSYAHSQSLDRLMNPLIDQYLYYLSRIQTTGGTANTQTLGFSQGGPNTMANQAKNWLPGPCYRQQRVSTTTGQNNNSNFAWTAGTKYHLNGRNSLANPGIAMATHKDDEERFFPSNGILIFGKQNAARDNADYSDVMPTSEEEIKTTNPVATEEYGIVADNLQQQNTAPQIGTVNSQGALPGMVWQNRDVYLQGPIWAKIPHTDGNFHPSPLMGGFGLKHPPPQILIKNTPVPADPPTTFNQSKLNSFITQYSTGQVSVEIGWELQKENSKRWNPEIQYTSNYYKSTSVDFAVNTEGVYSEPRPIGTRYLTRNL

SEQ ID NO: 3045 - protein, 738 aa, Artificial Sequence
  source: /note="Description of Artificial Sequence: Synthetic polypeptide"
MAADGYLPDWLEDNLSEGIREWWALKPGAPKPKANQQKQDDGRGLVLPGYKYLGPFNGLDKGEPVNAADAAALEHDKAYDQQLQAGDNPYLRYNHADAEFQERLQEDTSFGGNLGRAVFQAKKRVLEPLGLVEEGAKTAPGKKRPVEPSPQRSPDSSTGIGKKGQQPARKRLNFGQTGDSESVPDPQPLGEPPAAPSGVGPNTMATGGGAPMADNNEGADGVGSSSGNWHCDSTWLGDRVITTSTRTWALPTYNNHLYKQISNGTSGGATNDNTYFGYSTPWGYFDFNRFHCHFSPRDWQRLINNNWGFRPKRLSFKLFNIQVKEVTQNEGTKTIANNLTSTIQVFTDSEYQLPYVLGSAHQGCLPPFPADVFTIPQYGYLTLNNGSQAVGRSSFYCLEYFPSQMLRTGNNFQFTYTFEDVPFHGSYAHSQSLDRLMNPLIDQYLYYLSRIQTTGGTANTQTLGFSQGGPNTMANQAKNWLPGPCYRQQRVSTTTGQNNNSNFAWTAGTKYHLNGRNSLANPGIAMATHKDDEERFFPSNGILIFGKQNAARDNADYSDVMPTSEEEIKTTNPVATEEYGIVADNLQQQNTAPQIGTVNSQGALPGMVWQNRDVYLQGPIWAKIPHTDGNFHPSPLMGGFGLKHPPPQILIKNTPVPADPPTTFNQSKLNSFITQYSTGQVSVEIEWELQKENSKRWNPEIQYTSNYYKSTSVDFAVNTEGVYSEPRPIGTRYLTRNL

SEQ ID NO: 3046 - protein, 738 aa, Artificial Sequence
  source: /note="Description of Artificial Sequence: Synthetic polypeptide"
MAADGYLPDWLEDNLSEGIREWWALKPGAPKPKANQQKQDDGRGLVLPGYKYLGPFNGLDKGEPVNAADAAALEHDKAYDQQLQAGDNPYLRYNHADAEFQERLQEDTSFGGNLGRAVFQAKKRVLEPLGLVEEGAKTAPGKKRPVEPSPQRSPDSSTGIGKKGQQPARKRLNFGQTGDSESVPDPQPLGEPPAAPSGVGPNTMAAGGGAPMADNNEGADGVGSSSGNWHCDSTWLGDRVITTSTRTWALPTYNNHLYKQISNGTSGGATNDNTYFGYSTPWGYFDFNRFHCHFSPRDWQRLINNNWGFRPKRLSFKLFNIQVKEVTQNEGTKTIANNLTSTIQVFTDSEYLLPYVLGSAHQGCLPPFPADVFTIPQYGYLTLNNGSQAVGRSSFYCLEYFPSQMLRTGNNFQFTYTFEDVPFHSSYAHSQSLDRLMNPLIDQYLYYLSRIQTTGGTANTQTLGFSQGGPNTMANQAKNWLPGPCYRQQRVSTTTGQNNNSNFAWTAGTKYHLNGRNSLANPGIAMATHKDDEERFFPSNGILIFGKQNAARDNADYSDVMPTSEEEIKTTNPVATEEYGIVADNLQQQNTAPQIGTVNSQGALPGMVWQNRDVYLQGPIWAKIPHTDGNFHPSPLMGGFGLKHPPPQILIKNTPVPADPPTTFNQSKLNSFITQYSTGQVSVEIEWELQKENSKRWNPEIQYTSNYYKSTSVDFAVNTEGVYSEPRPIGTRYLTRNL

SEQ ID NO: 3047 - protein, 738 aa, Artificial Sequence
  source: /note="Description of Artificial Sequence: Synthetic polypeptide"
MAADGYPPDWLEDNLSEGIREWWALKPGAPKPKANQQKQDDGRGLVLPGYKYLGPFNGLDKGEPVNAADAAALEHDKAYDQQLQAGDNPYLRYNHADAEFQERLQEDTSFGGNLGRAVFQAKKRVLEPLGLVEEGAKTAPGKKRPVEPSPQRSPDSSTGIGKKGQQPARKRLNFGQTGDSESVPDPQPLGEPPAAPSGVGPNTMAAGGGAPMADNNEGADGVGSSSGNWHCDSTWLGDRVITTSTRTWALPTYNNHLYKQISNGTSGGATNDNTYFGYSTPWGYFDFNRFHCHFSPRDWQRLINNNWGFRPKRLSFKLFNIQVKEVTQNEGTKTIANNLTSTIQVFTDSEYQLPYVLGSAHQGCLPPFPADVFTIPQYGYLTLNNGSQAVGRSSFYCLEYFPSQMLRTGNNFQFTYTFEDVPFHSSYAHSQSLDRLMNPLIDQYLYYLSRIQTTGGTANTQTLGFSQGGPNTMANQAKNWLPGPCYRQQRVSTTTGQNNNSNFAWTAGTKYHLNGRNSLANPGIAMATHKDDEERFFPSNGILIFGKQNAARDNADYSDVMPTSEEEIKTTNPVATEEYGIVADNLQQQNTAPQIGTVNSQGALPGMVWQNRDVYLQGPIWAKIPHTDGNFHPSPLMGGFGLKHPPPQILIKNTPVPADPPTTFNQSKLNSFITQYSTGQVSVEIEWELQKENSKRWNPEIQYTSNYYKSTSVDFAVNTEGVYSEPRPIGTRYLTRNL

SEQ ID NO: 3048 - protein, 738 aa, Artificial Sequence
  source: /note="Description of Artificial Sequence: Synthetic polypeptide"
MAADGYLPDWLEDNLSEGIREWWALKPGAPKPKANQQKQDDGRGLVLPGYKYLGPFNGLDKGEPVNAADAAALEHDKAYDQQLQAGDNPYLRYNHADAEFQERLQEDTSFGGNLGRAVFQAKKRVLEPLGLVEEGAKTAPGKKRPVEPSPQRSPDSSTGIGKKGQQPARKRLNFGQTGDSESVPDPQPLGEPPAAPSGVGPNTMAAGGGAPMADNNEGADGVGSSSGNWHCDSTWLGDRVITTSTRTWALPTYNNHLYKQISNGTSGGATNDNTYFGYSTPWGYFDFNRFHCHFSPRDWQRLINNNWGFRPKRLSFKLFNIQVKEVTQNEGTKTIANNLTSTIQVFTDSEYQLPYVLGSAHQGCLPPFPADVFTIPQYGYLTLNNGSQAVGRSSFYCLEYFPSQMLRTGNNFQFTYTFEDVPFHSSYAHSQSLDRLMNPLIDQYLYYLSRIQTTGGTANTQTLGSSQGGPNTMANQAKNWLPGPCYRQQRVSTTTGQNNNSNFAWTAGTKYHLNGRNSLANPGIAMATHKDDEERFFPSNGILIFGKQNAARDNADYSDVMPTSEEEIKTTNPVATEEYGIVADNLQQQNTAPQIGTVNSQGALPGMVWQNRDVYLQGPIWAKIPHTDGNFHPSPLMGGFGLKHPPPQILIKNTPVPADPPTTFNQSKLNSFITQYSTGQVSVEIEWELQKENSKRWNPEIQYTSNYYKSTSVDFAVNTEGVYSEPRPIGTRYLTRNL

SEQ ID NO: 3049 - protein, 738 aa, Artificial Sequence
  source: /note="Description of Artificial Sequence: Synthetic polypeptide"
MAADGYLPDWLEDNLSEGIREWWALKPGAPKPKANQQKQDDGRGLVLPGYKYLGPFNGLDKGEPVNAADAAALEHDKAYDQQLQAGDNPYLRYNHADAEFQERLQEDTSFGGNLGRAVFQAKKRVLEPLGLVEEGAKTAPGKKRPVEPSPQRSPDSSTGIGKKGQQPARKRLNFGQTGDSESVPDPQPLGEPPAAPSGVGPNTMAAGGGAPMADNNEGADGVGSSSGNWHCDSTWLGDRVITTSTRTWALPTYNNHLYKQISNGTSGGATNDNTYFGYSTPWGYFDFNRFHCHFSPRDWQRLINNNWGFRPKRLSFKLFNIQVKEVTQNEGTKTIANNLTSTIQVFTDSEYQLPYVLGSAHQGCLPPFPADVFTIPQYGYLTLNNGSQAVGRSSFYCLEYFPSQMLRTGNNFQFTYTFEDVPFHSSYAHSQSLDRLMNPLIGQYLYYLSRIQTTGGTANTQTLGFSQGGPNTMANQAKNWLPGPCYRQQRVSTTTGQNNNSNFAWTAGTKYHLNGRNSLANPGIAMATHKDDEERFFPSNGILIFGKQNAARDNADYSDVMPTSEEEIKTTNPVATEEYGIVADNLQQQNTAPQIGTVNSQGALPGMVWQNRDVYLQGPIWAKIPHTDGNFHPSPLMGGFGLKHPPPQILIKNTPVPADPPTTFNQSKLNSFITQYSTGQVSVEIEWELQKENSKRWNPEIQYTSNYYKSTSVDFAVNTEGVYSEPRPIGTRYLTRNL

SEQ ID NO: 3050 - protein, 738 aa, Artificial Sequence
  source: /note="Description of Artificial Sequence: Synthetic polypeptide"
MAADGYLPDWLEDNLSEGIREWWALKPGAPKPKANQQKQDDGRGLVLPGYKYLGPFNGLDKGEPVNAADAAALEHDKAYDQQLQAGDNPYLRYNHADAEFQERLQEDTSFGGNLGRAVFQAKKRVLEPLGLVEEGAKTAPGKKRPVEPSPQRSPDSSTGIGKKGQQPARKRLNFGQTGDSESVPDPQPLGEPPAAPSGVGPNTMAAGGGAPMADNNEGADGVGSSSGNWHCDSTWLGDRVITTSTRTWALPTYNNHLYKQISNGTSGGATNDNTYFGYSTPWGYFDFNRFHCHFSPRDWQRLINNNWGFRPKRPSFKLFNIQVKEVTQNEGTKTIANNLTSTIQVFTDSEYQLPYVLGSAHQGCLPPFPADVFTIPQYGYLTLNNGSQAVGRSSFYCLEYFPSQMLRTGNNFQFTYTFEDVPFHSSYAHSQSLDRLMNPLIDQYLYYLSRIQTTGGTANTQTLGFSQGGPNTMANQAKNWLPGPCYRQQRVSTTTGQNNNSNFAWTAGTKYHLNGRNSLANPGIAMATHKDDEERFFPSNGILIFGKQNAARDNADYSDVMPTSEEEIKTTNPVATEEYGIVADNLQQQNTAPQIGTVNSQGALPGMVWQNRDVYLQGPIWAKIPHTDGNFHPSPLMGGFGLKHPPPQILIKNTPVPADPPTTFNQSKLNSFITQYSTGQVSVEIEWELQKENSKRWNPEIQYTSNYYKSTSVDFAVNTEGVYSEPRPIGTRYLTRNL

SEQ ID NO: 3051 - protein, 738 aa, Artificial Sequence
  source: /note="Description of Artificial Sequence: Synthetic polypeptide"
MAADGYLPDWLEDNLSEGIREWWALKPGAPKPKANQQKQDDGRGLVLPGYKYLGPFNGLDKGEPVNAADAAALEHDKAYDQQLQAGDNPYLRYNHADAEFQERLQEDTSFGGNLGRAVFQAKKRVLEPLGLVEEGAKTAPGKKRPVEPSPQRSPDSSTGIGKKGQQPARKRLNFGQTGDSESVPDPQPLGEPPAAPSGVGPNTMAAGGGAPMADNNEGADGVGSSSGNWHCDSTWLGDRVITTSTRTWALPTYNNHLYKQISNGTSGGATNDNTYFGYSTPWGYFDFNRFHCHFSPRDWQRLINNNWGFRPKRLSFKLFNIQVKEVTQNEGTKTIANNLTSTIQVFTDSEYQLPYVLGSAHQGCLPPFPADVFTIPQYGYLTLNNGSQAVGRSSFYCLEYFPSQMLRTGNNFQFTYTFEDVPFHSSYAHSQSLDRLMNPLIDQYLYYLSRIQTTGGTANTQTLGFSQGGPNTMANQAKNWLPGPCYRQQRVSTTTGQNNNSNFAWTAGTKYHLNGRNSLANPGIAMATHKDDGERFFPSNGILIFGKQNAARDNADYSDVMPTSEEEIKTTNPVATEEYGIVADNLQQQNTAPQIGTVNSQGALPGMVWQNRDVYLQGPIWAKIPHTDGNFHPSPLMGGFGLKHPPPQILIKNTPVPADPPTTFNQSKLNSFITQYSTGQVSVEIEWELQKENSKRWNPEIQYTSNYYKSTSVDFAVNTEGVYSEPRPIGTRYLTRNL

SEQ ID NO: 3052 - protein, 738 aa, Artificial Sequence
  source: /note="Description of Artificial Sequence: Synthetic polypeptide"
MAADGYLPDWLEDNLSEGIREWWALKPGAPKPKANQQKQDDGRGLVLPGYKYLGPFNGLDKGEPVNAADAAALEHDKAYDQQLQAGDNPYLRYNHADAEFQERLQEDTSFGGNLGRAVFQAKKRVLEPLGLVEEGAKTAPGKKRPVEPSPQRSPDSSTGIGKKGQQPARKRLNFGQTGDSESVPDPQPLGEPPAAPSGVGPNTMAAGGGAPMADNNEGADGVGSSSGNWHCDSTWLGDRVITTSTRTWAPPTYNNHLYKQISNGTSGGATNDNTYFGYSTPWGYFDFNRFHCHFSPRDWQRLINNNWGFRPKRLSFKLFNIQVKEVTQNEGTKTIANNLTSTIQVFTDSEYQLPYVLGSAHQGCLPPFPADVFTIPQYGYLTLNNGSQAVGRSSFYCLEYFPSQMLRTGNNFQFTYTFEDVPFHSSYAHSQSLDRLMNPLIDQYLYYLSRIQTTGGTANTQTLGFSQGGPNTMANQAKNWLPGPCYRQQRVSTTTGQNNNSNFAWTAGTKYHLNGRNSLANPGIAMATHKDDEERFFPSNGILIFGKQNAARDNADYSDVMPTSEEEIKTTNPVATEEYGIVADNLQQQNTAPQIGTVNSQGALPGMVWQNRDVYLQGPIWAKIPHTDGNFHPSPLMGGFGLKHPPPQILIKNTPVPADPPTTFNQSKLNSFITQYSTGQVSVEIEWELQKENSKRWNPEIQYTSNYYKSTSVDFAVNTEGVYSEPRPIGTRYLTRNL

SEQ ID NO: 3053 - protein, 738 aa, Artificial Sequence
  source: /note="Description of Artificial Sequence: Synthetic polypeptide"
MAADGYLPDWLEDNLSEGIREWWALKPGAPKPKANQQKQDDGRGLVLPGYKYLGPFNGLDKGEPVNAADAAALEHDKAYDQQLQAGDNPYLRYNHADAEFQERLQEDTSFGGNLGRAVFQAKKRVLEPLGLVEEGAKTAPGKKRPVEPSPQRSPDSSTGIGKKGQQPARKRLNFGQTGDSESVPDPQPLGEPPAAPSGVGPNTMAAGGGAPMADNNEGADGVGSSSGNWHCDSTWLGDRVITTSTRTWALPTYNNHLYKQISNGTSGGATNDNTYFGYSTPWGYFDFNRFHCHFSPRDWQRLINNNWGFRPKRLGFKLFNIQVKEVTQNEGTKTIANNLTSTIQVFTDSEYQLPYVLGSAHQGCLPPFPADVFTIPQYGYLTLNNGSQAVGRSSFYCLEYFPSQMLRTGNNFQFTYTFEDVPFHSSYAHSQSLDRLMNPLIDQYLYYLSRIQTTGGTANTQTLGFSQGGPNTMANQAKNWLPGPCYRQQRVSTTTGQNNNSNFAWTAGTKYHLNGRNSLANPGIAMATHKDDEERFFPSNGILIFGKQNAARDNADYSDVMPTSEEEIKTTNPVATEEYGIVADNLQQQNTAPQIGTVNSQGALPGMVWQNRDVYLQGPIWAKIPHTDGNFHPSPLMGGFGLKHPPPQILIKNTPVPADPPTTFNQSKLNSFITQYSTGQVSVEIEWELQKENSKRWNPEIQYTSNYYKSTSVDFAVNTEGVYSEPRPIGTRYLTRNL

SEQ ID NO: 3054 - protein, 738 aa, Artificial Sequence
  source: /note="Description of Artificial Sequence: Synthetic polypeptide"
MAADGYLPDWLEDNLSEGIREWWALKPGAPKPKANQQKQDDGRGLVLPGYKYLGPFNGLDKGEPVNAADAAALEHDKAYDQQLQAGDNPYLRYNHADAEFQERLQEDTSFGGNLGRAVFQAKKRVLEPLGLVEEGAKTAPGKKRPVEPSPQRSPDSSTGIGKKGQQPARKRLNFGRTGDSESVPDPQPLGEPPAAPSGVGPNTMAAGGGAPMADNNEGADGVGSSSGNWHCDSTWLGDRVITTSTRTWALPTYNNHLYKQISNGTSGGATNDNTYFGYSTPWGYFDFNRFHCHFSPRDWQRLINNNWGFRPKRLSFKLFNIQVKEVTQNEGTKTIANNLTSTIQVFTDSEYQLPYVLGSAHQGCLPPFPADVFTIPQYGYLTLNNGSQAVGRSSFYCLEYFPSQMLRTGNNFQFTYTFEDVPFHSSYAHSQSLDRLMNPLIDQYLYYLSRIQTTGGTANTQTLGFSQGGPNTMANQAKNWLPGPCYRQQRVSTTTGQNNNSNFAWTAGTKYHLNGRNSLANPGIAMATHKDDEERFFPSNGILIFGKQNAARDNADYSDVMPTSEEEIKTTNPVATEEYGIVADNLQQQNTAPQIGTVNSQGALPGMVWQNRDVYLQGPIWAKIPHTDGNFHPSPLMGGFGLKHPPPQILIKNTPVPADPPTTFNQSKLNSFITQYSTGQVSVEIEWELQKENSKRWNPEIQYTSNYYKSTSVDFAVNTEGVYSEPRPIGTRYLTRNL

SEQ ID NO: 3055 - protein, 738 aa, Artificial Sequence
  source: /note="Description of Artificial Sequence: Synthetic polypeptide"
MAADGYLPDWLEDNLSEGIREWWALKPGAPKPKANQQKQDDGRGLVLPGYKYLGPFNGLDKGEPVNAADAAALEHDKAYDQQLQAGDNPYLRYNHADAEFQERLQEDTSFGGNLGRAVFQAKKRVLEPLGLVEEGAKTAPGKKRPVEPSPQRSPDSSTGIGKKGQQPARKRLNFGQTGDSESVPDPQPLGEPPAAPSGVGPNTMAAGGGAPMADNNEGADGVGSSSGNWHCDSTWLGDRVITTSTRTWALPTYNNHLYKQISNGTSGGATNDNTYFGYSTPWGYFDFNRFHCHFSPRDWQRLINNNWGFRPKRLSFKLFNIQVKEVTQNEGTKTIANNLTSTIQVFTDSEYQLPYVLGSAHQGCLPPFPADVFTIPQYGYLTLNNGSQAVGRSSFYCLEYFPSQMLRTGNNFQFTYTFEDVPFHSSYAHSQSLDRLMNPLIDQYLYYLSRIQTTGGTANTQTLGFSQGGPNTVANQAKNWLPGPCYRQQRVSTTTGQNNNSNFAWTAGTKYHLNGRNSLANPGIAMATHKDDEERFFPSNGILIFGKQNAARDNADYSDVMPTSEEEIKTTNPVATEEYGIVADNLQQQNTAPQIGTVNSQGALPGMVWQNRDVYLQGPIWAKIPHTDGNFHPSPLMGGFGLKHPPPQILIKNTPVPADPPTTFNQSKLNSFITQYSTGQVSVEIEWELQKENSKRWNPEIQYTSNYYKSTSVDFAVNTEGVYSEPRPIGTRYLTRNL

SEQ ID NO: 3056 - protein, 738 aa, Artificial Sequence
  source: /note="Description of Artificial Sequence: Synthetic polypeptide"
MAADGYLPDWLEDNLSEGIREWWALKPGAPKPKANQQKQDDGRGLVLPGYKYLGPFNGLDKGEPVNAADAAALEHDKAYDQQLQAGDNPYLRYNHADAEFQERLQEDTSFGGNLGRAVFQAKKRVLEPLGLVEEGAKTAPGKKRPVEPSPQRSPDSSTGIGKKGQQPARKRLNFGQTGDSESVPDPQPLGEPPAAPSGVGPNTMAAGGGAPMADNNEGADGVGSSSGNWHCDSTWLGDRVITTSTRTWALPTYNNHLYKQISNGTSGGATNDNTYFGYSTPWGYFDFNRFHCHFSPRDWQRLINNNWGFRPKRLSFKLFNIQVKEVTQNEGTKTIANNLTSTIQVFTDSEYQLPYVLGSAHQGCLPPFPADVFTIPQYGYLTLNNGSQAVGRSSFYCPEYFPSQMLRTGNNFQFTYTFEDVPFHSSYAHSQSLDRLMNPLIDQYLYYLSRIQTTGGTANTQTLGFSQGGPNTMANQAKNWLPGPCYRQQRVSTTTGQNNNSNFAWTAGTKYHLNGRNSLANPGIAMATHKDDEERFFPSNGILIFGKQNAARDNADYSDVMPTSEEEIKTTNPVATEEYGIVADNLQQQNTAPQIGTVNSQGALPGMVWQNRDVYLQGPIWAKIPHTDGNFHPSPLMGGFGLKHPPPQILIKNTPVPADPPTTFNQSKLNSFITQYSTGQVSVEIEWELQKENSKRWNPEIQYTSNYYKSTSVDFAVNTEGVYSEPRPIGTRYLTRNL

SEQ ID NO: 3057 - protein, 738 aa, Artificial Sequence
  source: /note="Description of Artificial Sequence: Synthetic polypeptide"
MAADGYLPDWLEDNLSEGIREWWALKPGAPKPKANQQKQDDGRGLVLPGYKYLGPFNGLDKGEPVNAADAAALEHDKAYDQQLQAGDNPYLRYNHADAEFQERLQEDTSFGGNLGRAVFQAKKRVLEPLGLVEEGAKTAPGKKRPVEPSPQRSPDSSTGIGKKGQQPARKRLNFGQTGDSESVPDPQPLGEPPAAPSGVGPNTMAAGGGAPMADNNEGADGVGSSSGNWHCDSTWLGDRVITTSTRTWALPTYNNHLYKQISNGTSGGATNDNTYFGYSTPWGYFDFNRFHCHFSPRDWQRLINNNWGFRPKRLSFKLFNIQVKEVTQNEGTKTIANNLTSTIQVFTDSEYQLPYVLGSAHQGCLPPFPADVFTIPQYGYLTLNNGSQAVGRSSFYCLEYFPSQMLRTGNNFQFTYTFEDVPFHSSYAHSQSLDRLMNPLIDQYLYYLSRIQTTGGTANTQTLGFSQGGPNTMANQAKNWLPGPCYRQQRVSTTTGQNNNSNFAWTAGTKYHLNGRNSLANPGIAMATHKDDEERFFPSNGILIFGKQNAARDNADYSDVMPTSEEEIKTTNPVATEEYGIVADSLQQQNTAPQIGTVNSQGALPGMVWQNRDVYLQGPIWAKIPHTDGNFHPSPLMGGFGLKHPPPQILIKNTPVPADPPTTFNQSKLNSFITQYSTGQVSVEIEWELQKENSKRWNPEIQYTSNYYKSTSVDFAVNTEGVYSEPRPIGTRYLTRNL

SEQ ID NO: 3058 - protein, 738 aa, Artificial Sequence
  source: /note="Description of Artificial Sequence: Synthetic polypeptide"
MAADGYLPDWLEDNLSEGIREWWALKPGAPKPKANQQKQGDGRGLVLPGYKYLGPFNGLDKGEPVNAADAAALEHDKAYDQQLQAGDNPYLRYNHADAEFQERLQEDTSFGGNLGRAVFQAKKRVLEPLGLVEEGAKTAPGKKRPVEPSPQRSPDSSTGIGKKGQQPARKRLNFGQTGDSESVPDPQPLGEPPAAPSGVGPNTMAAGGGAPMADNNEGADGVGSSSGNWHCDSTWLGDRVITTSTRTWALPTYNNHLYKQISNGTSGGATNDNTYFGYSTPWGYFDFNRFHCHFSPRDWQRLINNNWGFRPKRLSFKLFNIQVKEVTQNEGTKTIANNLTSTIQVFTDSEYQLPYVLGSAHQGCLPPFPADVFTIPQYGYLTLNNGSQAVGRSSFYCLEYFPSQMLRTGNNFQFTYTFEDVPFHSSYAHSQSLDRLMNPLIDQYLYYLSRIQTTGGTANTQTLGFSQGGPNTMANQAKNWLPGPCYRQQRVSTTTGQNNNSNFAWTAGTKYHLNGRNSLANPGIAMATHKDDEERFFPSNGILIFGKQNAARDNADYSDVMPTSEEEIKTTNPVATEEYGIVADNLQQQNTAPQIGTVNSQGALPGMVWQNRDVYLQGPIWAKIPHTDGNFHPSPLMGGFGLKHPPPQILIKNTPVPADPPTTFNQSKLNSFITQYSTGQVSVEIEWELQKENSKRWNPEIQYTSNYYKSTSVDFAVNTEGVYSEPRPIGTRYLTRNL

SEQ ID NO: 3059 - protein, 738 aa, Artificial Sequence
  source: /note="Description of Artificial Sequence: Synthetic polypeptide"
MAADGYLPDWLEDNLSEGIREWWALKPGAPKPKANQQKQDDGRGLVLPGYKYLGPFNGLDKGEPVNAADAAALEHDKAYDQQLQAGDNPYLRYNHADAEFQERLQEDTSFGGNLGRAVFQAKKRVLEPLGLVEEGAKTAPGKKRPVEPSPQRSPDSSTGIGKKGQQPARKRLNFGQTGDSESVPDPQPLGEPPAAPSGVGPNTMAAGGGAPMADNNEGADGVGSSSGNWHCDSTWLGDRVITTSTRTWALPTYNNHLYKQISNGTSGGATNDNTYFGYSTPWGYFDFNRFHCHFSPRDWQRLINNNWGFRPKRLSSKLFNIQVKEVTQNEGTKTIANNLTSTIQVFTDSEYQLPYVLGSAHQGCLPPFPADVFTIPQYGYLTLNNGSQAVGRSSFYCLEYFPSQMLRTGNNFQFTYTFEDVPFHSSYAHSQSLDRLMNPLIDQYLYYLSRIQTTGGTANTQTLGFSQGGPNTMANQAKNWLPGPCYRQQRVSTTTGQNNNSNFAWTAGTKYHLNGRNSLANPGIAMATHKDDEERFFPSNGILIFGKQNAARDNADYSDVMPTSEEEIKTTNPVATEEYGIVADNLQQQNTAPQIGTVNSQGALPGMVWQNRDVYLQGPIWAKIPHTDGNFHPSPLMGGFGLKHPPPQILIKNTPVPADPPTTFNQSKLNSFITQYSTGQVSVEIEWELQKENSKRWNPEIQYTSNYYKSTSVDFAVNTEGVYSEPRPIGTRYLTRNL

SEQ ID NO: 3060 - protein, 738 aa, Artificial Sequence
  source: /note="Description of Artificial Sequence: Synthetic polypeptide"
MAADGYLPDWLEDNLSEGIREWWALKPGAPKPKANQQKQDDGRGLVLPGYKYLGPFNGLDKGEPVNAADAAALEHDKAYDQQLQAGDNPYLRYNHADAEFQERLQEDTSFGGNLGRAVFQAKKRVLEPLGLVEEGAKTAPGKKRPVEPSPQRSPDSSTGIGKKGQQPARKRLNFGQTGDSESVPDPQPLGEPPAAPSGVGPNTMAAGGGAPMADNNEGADGVGSSSGNWHCDSTWLGDRVITTSTRTWALPTYNNHLYKQISNGTSGGATNDNTYFGYSTPWGYFDFNRFHCHFSPRDWQRLINNNWGFRPKRLSFKLFNIQVKEVTQNEGTKTIANNLTSTIQVFTDSEYQLPYVLGSAHQGCLPPFPADVFTIPQYGYLTLNNGSQAVGRSSFYCLEYFPSQMLRTGNNFQFTYAFEDVPFHSSYAHSQSLDRLMNPLIDQYLYYLSRIQTTGGTANTQTLGFSQGGPNTMANQAKNWLPGPCYRQQRVSTTTGQNNNSNFAWTAGTKYHLNGRNSLANPGIAMATHKDDEERFFPSNGILIFGKQNAARDNADYSDVMPTSEEEIKTTNPVATEEYGIVADNLQQQNTAPQIGTVNSQGALPGMVWQNRDVYLQGPIWAKIPHTDGNFHPSPLMGGFGLKHPPPQILIKNTPVPADPPTTFNQSKLNSFITQYSTGQVSVEIEWELQKENSKRWNPEIQYTSNYYKSTSVDFAVNTEGVYSEPRPIGTRYLTRNL

SEQ ID NO: 3061 - protein, 738 aa, Artificial Sequence
  source: /note="Description of Artificial Sequence: Synthetic polypeptide"
MAADGYLPDWLEDNLSEGIREWWALKPGAPKPKANQQKQDDGRGLVLPGYKYLGPFNGLDKGEPVNAADAAALEHDKAYDQQLQAGDNPYLRYNHADAEFQERLQEDTSFGGNLGRAVFQAKKRVLEPLGLVEEGAKTAPGKKRPVEPSPQRSPDSSTGIGKKGQQPARKRLNFGQTGDSESVPDPQPLGEPPAAPSGVGPNTMAAGGGAPMADNNEGADGVGSSSGNWHCDSTWLGDRVITTSTRTWALPAYNNHLYKQISNGTSGGATNDNTYFGYSTPWGYFDFNRFHCHFSPRDWQRLINNNWGFRPKRLSFKLFNIQVKEVTQNEGTKTIANNLTSTIQVFTDSEYQLPYVLGSAHQGCLPPFPADVFTIPQYGYLTLNNGSQAVGRSSFYCLEYFPSQMLRTGNNFQFTYTFEDVPFHSSYAHSQSLDRLMNPLIDQYLYYLSRIQTTGGTANTQTLGFSQGGPNTMANQAKNWLPGPCYRQQRVSTTTGQNNNSNFAWTAGTKYHLNGRNSLANPGIAMATHKDDEERFFPSNGILIFGKQNAARDNADYSDVMPTSEEEIKTTNPVATEEYGIVADNLQQQNTAPQIGTVNSQGALPGMVWQNRDVYLQGPIWAKIPHTDGNFHPSPLMGGFGLKHPPPQILIKNTPVPADPPTTFNQSKLNSFITQYSTGQVSVEIEWELQKENSKRWNPEIQYTSNYYKSTSVDFAVNTEGVYSEPRPIGTRYLTRNL

SEQ ID NO: 3062 - protein, 738 aa, Artificial Sequence
  source: /note="Description of Artificial Sequence: Synthetic polypeptide"
MAADGYLPDWLEDNLSEGIREWWALKPGAPKPKANQQKQDDGRGLVLPGYKYLGPFNGLDKGEPVNAADAAALEHDKAYDQQLQAGDNPYLRYNHADAEFQERLQEDTSFGGSLGRAVFQAKKRVLEPLGLVEEGAKTAPGKKRPVEPSPQRSPDSSTGIGKKGQQPARKRLNFGQTGDSESVPDPQPLGEPPAAPSGVGPNTMAAGGGAPMADNNEGADGVGSSSGNWHCDSTWLGDRVITTSTRTWALPTYNNHLYKQISNGTSGGATNDNTYFGYSTPWGYFDFNRFHCHFSPRDWQRLINNNWGFRPKRLSFKLFNIQVKEVTQNEGTKTIANNLTSTIQVFTDSEYQLPYVLGSAHQGCLPPFPADVFTIPQYGYLTLNNGSQAVGRSSFYCLEYFPSQMLRTGNNFQFTYTFEDVPFHSSYAHSQSLDRLMNPLIDQYLYYLSRIQTTGGTANTQTLGFSQGGPNTMANQAKNWLPGPCYRQQRVSTTTGQNNNSNFAWTAGTKYHLNGRNSLANPGIAMATHKDDEERFFPSNGILIFGKQNAARDNADYSDVMPTSEEEIKTTNPVATEEYGIVADNLQQQNTAPQIGTVNSQGALPGMVWQNRDVYLQGPIWAKIPHTDGNFHPSPLMGGFGLKHPPPQILIKNTPVPADPPTTFNQSKLNSFITQYSTGQVSVEIEWELQKENSKRWNPEIQYTSNYYKSTSVDFAVNTEGVYSEPRPIGTRYLTRNL

SEQ ID NO: 3063 - protein, 738 aa, Artificial Sequence
  source: /note="Description of Artificial Sequence: Synthetic polypeptide"
MAADGYLPDWLEDNLSEGIREWWALKPGAPKPKANQQKQDDGRGLVLPGYKYLGPFNGLDKGEPVNAADAAALEHDKAYDQQLQAGDNPYLRYNHADAEFQERLQEDTSFGGNLGRAVFQAKKRVLEPLGLVEEGAKTAPGKKRPVEPSPQRSPDSSTGIGKKGQQPARKRLNFGQTGDSESVPDPQPLGEPPAAPSGVGPNTMAAGGGAPMADNNEGADGVGSSSGNWHCDSTWLGDRVITTSTRTWALPTYNNHLYKQISNGTSGGATNDNTYFGYSTPWGYFDFNRFHCHFSPRDWQRLINNNWGFRPKRLSFKLFNIQVKEVTQNEGTKTIANNLTSTIQVFTDSEYQLPYVLGSAHQGCLPPFPADVFTIPQYGYLTLNNGSQAVGRSSFYCLEYFPSQMLRTGNNFQFTYTFEDVPFHSSYAHSQSLDRLMNPLIDQYLYYLSRIQTTGGTANTQTLGFSQGGPNTMANQATNWLPGPCYRQQRVSTTTGQNNNSNFAWTAGTKYHLNGRNSLANPGIAMATHKDDEERFFPSNGILIFGKQNAARDNADYSDVMPTSEEEIKTTNPVATEEYGIVADNLQQQNTAPQIGTVNSQGALPGMVWQNRDVYLQGPIWAKIPHTDGNFHPSPLMGGFGLKHPPPQILIKNTPVPADPPTTFNQSKLNSFITQYSTGQVSVEIEWELQKENSKRWNPEIQYTSNYYKSTSVDFAVNTEGVYSEPRPIGTRYLTRNL

SEQ ID NO: 3064 - protein, 738 aa, Artificial Sequence
  source: /note="Description of Artificial Sequence: Synthetic polypeptide"
MAADGYLPDWLEDNLSEGIREWWALKPGAPKPKANQQKQDDGRGLVLPGYKYLGPFNGLDKGEPVNAADAAALEHDKAYGQQLQAGDNPYLRYNHADAEFQERLQEDTSFGGNLGRAVFQAKKRVLEPLGLVEEGAKTAPGKKRPVEPSPQRSPDSSTGIGKKGQQPARKRLNFGQTGDSESVPDPQPLGEPPAAPSGVGPNTMAAGGGAPMADNNEGADGVGSSSGNWHCDSTWLGDRVITTSTRTWALPTYNNHLYKQISNGTSGGATNDNTYFGYSTPWGYFDFNRFHCHFSPRDWQRLINNNWGFRPKRLSFKLFNIQVKEVTQNEGTKTIANNLTSTIQVFTDSEYQLPYVLGSAHQGCLPPFPADVFTIPQYGYLTLNNGSQAVGRSSFYCLEYFPSQMLRTGNNFQFTYTFEDVPFHSSYAHSQSLDRLMNPLIDQYLYYLSRIQTTGGTANTQTLGFSQGGPNTMANQAKNWLPGPCYRQQRVSTTTGQNNNSNFAWTAGTKYHLNGRNSLANPGIAMATHKDDEERFFPSNGILIFGKQNAARDNADYSDVMPTSEEEIKTTNPVATEEYGIVADNLQQQNTAPQIGTVNSQGALPGMVWQNRDVYLQGPIWAKIPHTDGNFHPSPLMGGFGLKHPPPQILIKNTPVPADPPTTFNQSKLNSFITQYSTGQVSVEIEWELQKENSKRWNPEIQYTSNYYKSTSVDFAVNTEGVYSEPRPIGTRYLTRNL

SEQ ID NO: 3065 - protein, 738 aa, Artificial Sequence
  source: /note="Description of Artificial Sequence: Synthetic polypeptide"
MAADGYLPDWLEDNLSEGIREWWALKPGAPKPKANQQKQDDGRGLVLPGYKYLGPFNGLDKGEPVNAADAAALEHDKAYDQQLQAGDNPYLRYNHADAEFQERLQEDTSFGGNLGRAVFQAKKRVLEPLGLVEEGAKTAPGKKRPVEPSPQRSPDSSTGIGKKGQQPARKRLNFGQTGDSESVPDPQPLGEPPAAPSGVGPNTMAAGGGAPMADNNEGADGVGSSSGNWHCDSTWLGDRVITTSTRTWALPTYNNHLYKQISNGTSGGATNDNTYFGYSTPWGYFDFNRFHCHFSPRDWQRLINNNWGFRPKRLSFKLLNIQVKEVTQNEGTKTIANNLTSTIQVFTDSEYQLPYVLGSAHQGCLPPFPADVFTIPQYGYLTLNNGSQAVGRSSFYCLEYFPSQMLRTGNNFQFTYTFEDVPFHSSYAHSQSLDRLMNPLIDQYLYYLSRIQTTGGTANTQTLGFSQGGPNTMANQAKNWLPGPCYRQQRVSTTTGQNNNSNFAWTAGTKYHLNGRNSLANPGIAMATHKDDEERFFPSNGILIFGKQNAARDNADYSDVMPTSEEEIKTTNPVATEEYGIVADNLQQQNTAPQIGTVNSQGALPGMVWQNRDVYLQGPIWAKIPHTDGNFHPSPLMGGFGLKHPPPQILIKNTPVPADPPTTFNQSKLNSFITQYSTGQVSVEIEWELQKENSKRWNPEIQYTSNYYKSTSVDFAVNTEGVYSEPRPIGTRYLTRNL

SEQ ID NO: 3066 - protein, 738 aa, Artificial Sequence
  source: /note="Description of Artificial Sequence: Synthetic polypeptide"
MAADGYLPDWLEDNLSEGIREWWALKPGAPKPKANQQKQDDGRGLVLPGYKYLGPFNGLDKGEPVNAADAAALEHDKAYDQQLQAGDNPYLRYNHADAEFQERLQEDTSFGGNLGRAVFQAKKRVLEPLGLVEEGAKTAPGKKRPVEPSPQRSPDSSTGIGKKGQQPARKRLNFGQTGDSESVPDPQPLGEPPAAPSGVGPNTMAAGGGAPMADNNEGADGVGSSSGNWHCDSTWLGDRVITTSTRTWALPTYNNHLYKQISNGTSGGATNDNTYFGYSTPWGYFDFNRFHCHFSPRDWQRLINNNWGFRPKRLSFKLFNIQVKEVTQNEGTKTIANNLTSTIQVFTDSEYQLPYVLGSAHQGCLPPFPADVFTIPQYGYLTLNNGSQAVGRSSFYCLEYFPSQMLRTGNNFQFTYTFEDVPFHSSYAHSQSLDRLMNPLIDQYLYYLSRIQTTGGTANTQTLGFSQGGPNTMANQAKNWLPGPCYRQQRVSTTTGQNNNSNFAWTAGTKYHLNGRNSLANPGIAMATHKDDEERFFPSNGILIFGKQNAARDNADYSDVVPTSEEEIKTTNPVATEEYGIVADNLQQQNTAPQIGTVNSQGALPGMVWQNRDVYLQGPIWAKIPHTDGNFHPSPLMGGFGLKHPPPQILIKNTPVPADPPTTFNQSKLNSFITQYSTGQVSVEIEWELQKENSKRWNPEIQYTSNYYKSTSVDFAVNTEGVYSEPRPIGTRYLTRNL

SEQ ID NO: 3067 - protein, 738 aa, Artificial Sequence
  source: /note="Description of Artificial Sequence: Synthetic polypeptide"
MAADGYLPDWLEDNLSEGIREWWALKPGAPKPKANQQKQDDGRGLVLPGYKYLGPFNGLDKGEPVNAADAAALEHDKAYDQQLQAGDNPYLRYNHADAEFQERLQEDTSFGGNLGRAVFQAKKRVLEPLGLVEEGAKTAPGKKRPVEPSPQRSPDSSTGIGKKGRQPARKRLNFGQTGDSESVPDPQPLGEPPAAPSGVGPNTMAAGGGAPMADNNEGADGVGSSSGNWHCDSTWLGDRVITTSTRTWALPTYNNHLYKQISNGTSGGATNDNTYFGYSTPWGYFDFNRFHCHFSPRDWQRLINNNWGFRPKRLSFKLFNIQVKEVTQNEGTKTIANNLTSTIQVFTDSEYQLPYVLGSAHQGCLPPFPADVFTIPQYGYLTLNNGSQAVGRSSFYCLEYFPSQMLRTGNNFQFTYTFEDVPFHSSYAHSQSLDRLMNPLIDQYLYYLSRIQTTGGTANTQTLGFSQGGPNTMANQAKNWLPGPCYRQQRVSTTTGQNNNSNFAWTAGTKYHLNGRNSLANPGIAMATHKDDEERFFPSNGILIFGKQNAARDNADYSDVMPTSEEEIKTTNPVATEEYGIVADNLQQQNTAPQIGTVNSQGALPGMVWQNRDVYLQGPIWAKIPHTDGNFHPSPLMGGFGLKHPPPQILIKNTPVPADPPTTFNQSKLNSFITQYSTGQVSVEIEWELQKENSKRWNPEIQYTSNYYKSTSVDFAVNTEGVYSEPRPIGTRYLTRNL

SEQ ID NO: 3068 - protein, 738 aa, Artificial Sequence
  source: /note="Description of Artificial Sequence: Synthetic polypeptide"
MAADGYLPDWLEDNLSEGIREWWALKPGAPKPKANQQKQDDGRGLVLPGYKYLGPFNGLDKGEPVNAADAAALEHDKAYDQQLQAGDNPYLRYNHADAEFQERLQEDTSFGGNLGRAVFQAKKRVLEPLGLVEEGAKTAPGKKRPVESSPQRSPDSSTGIGKKGQQPARKRLNFGQTGDSESVPDPQPLGEPPAAPSGVGPNTMAAGGGAPMADNNEGADGVGSSSGNWHCDSTWLGDRVITTSTRTWALPTYNNHLYKQISNGTSGGATNDNTYFGYSTPWGYFDFNRFHCHFSPRDWQRLINNNWGFRPKRLSFKLFNIQVKEVTQNEGTKTIANNLTSTIQVFTDSEYQLPYVLGSAHQGCLPPFPADVFTIPQYGYLTLNNGSQAVGRSSFYCLEYFPSQMLRTGNNFQFTYTFEDVPFHSSYAHSQSLDRLMNPLIDQYLYYLSRIQTTGGTANTQTLGFSQGGPNTMANQAKNWLPGPCYRQQRVSTTTGQNNNSNFAWTAGTKYHLNGRNSLANPGIAMATHKDDEERFFPSNGILIFGKQNAARDNADYSDVMPTSEEEIKTTNPVATEEYGIVADNLQQQNTAPQIGTVNSQGALPGMVWQNRDVYLQGPIWAKIPHTDGNFHPSPLMGGFGLKHPPPQILIKNTPVPADPPTTFNQSKLNSFITQYSTGQVSVEIEWELQKENSKRWNPEIQYTSNYYKSTSVDFAVNTEGVYSEPRPIGTRYLTRNL

SEQ ID NO: 3069 - protein, 738 aa, Artificial Sequence
  source: /note="Description of Artificial Sequence: Synthetic polypeptide"
MAADGYLPDWLEDNLSEGIREWWALKPGAPKPKANQQKQDDGRGLVLPGYKYLGPFNGLDKGEPVNAADAAALEHDKAYDQQLQAGDNPYLRYNHADAEFQERLQEDTSFGGNLGRAVFQAKKRVLEPLGLVEEGAKTAPGKKRPVEPSPQRSPDSSTGIGKKGQQPARKRLNFGQTGDSESVPDPQPLGEPPAAPSGAGPNTMAAGGGAPMADNNEGADGVGSSSGNWHCDSTWLGDRVITTSTRTWALPTYNNHLYKQISNGTSGGATNDNTYFGYSTPWGYFDFNRFHCHFSPRDWQRLINNNWGFRPKRLSFKLFNIQVKEVTQNEGTKTIANNLTSTIQVFTDSEYQLPYVLGSAHQGCLPPFPADVFTIPQYGYLTLNNGSQAVGRSSFYCLEYFPSQMLRTGNNFQFTYTFEDVPFHSSYAHSQSLDRLMNPLIDQYLYYLSRIQTTGGTANTQTLGFSQGGPNTMANQAKNWLPGPCYRQQRVSTTTGQNNNSNFAWTAGTKYHLNGRNSLANPGIAMATHKDDEERFFPSNGILIFGKQNAARDNADYSDVMPTSEEEIKTTNPVATEEYGIVADNLQQQNTAPQIGTVNSQGALPGMVWQNRDVYLQGPIWAKIPHTDGNFHPSPLMGGFGLKHPPPQILIKNTPVPADPPTTFNQSKLNSFITQYSTGQVSVEIEWELQKENSKRWNPEIQYTSNYYKSTSVDFAVNTEGVYSEPRPIGTRYLTRNL

SEQ ID NO: 3070 - protein, 738 aa, Artificial Sequence
  source: /note="Description of Artificial Sequence: Synthetic polypeptide"
MAADGYLPDWLEDNLSEGIREWWALKPGAPKPKANQQKQDDGRGLVLPGYKYLGPFNGLDKGEPVNAADAAALEHDKAYDQQLQAGDNPYLRYNHADAEFQERLQEDTSFGGNLGRAVFQAKKRVLEPLGLVEEGAKTAPGKKRPVEPSPQRSPDSSTGIGKKGQQPARKRLNFGQTGDSESVPDPQPLGEPPAAPSGVGPNTMAAGGGAPMADNNEGADGVGSSSGNWHCDSTWLGDRVITTSTRTWALPTYNNHLYKQISNGTSGGATNDNTYFGYSTPWGYFDFNRFHCHFSPRDWQRLINNNWGFRPKRLSFKLFNIQVKEVTQNEGTKTIANNLTSTIQVFTDSEYQLPYVLGSAHQGCLPPFPADVFTIPQYGYLTLNNGSQAVGRSSFYCLEYFPSQMLRTGNNFQFTYTFEDVPFHSSYAHSQSLDRLMNPLIDQYPYYLSRIQTTGGTANTQTLGFSQGGPNTMANQAKNWLPGPCYRQQRVSTTTGQNNNSNFAWTAGTKYHLNGRNSLANPGIAMATHKDDEERFFPSNGILIFGKQNAARDNADYSDVMPTSEEEIKTTNPVATEEYGIVADNLQQQNTAPQIGTVNSQGALPGMVWQNRDVYLQGPIWAKIPHTDGNFHPSPLMGGFGLKHPPPQILIKNTPVPADPPTTFNQSKLNSFITQYSTGQVSVEIEWELQKENSKRWNPEIQYTSNYYKSTSVDFAVNTEGVYSEPRPIGTRYLTRNL

SEQ ID NO: 3071 - protein, 738 aa, Artificial Sequence
  source: /note="Description of Artificial Sequence: Synthetic polypeptide"
MAADGYLPDWLEDNLSEGIREWWALKPGAPKPKANQQKQDDGRGLVLPGYKYLGPFNGLDKGEPVNAADAAALEHDKAYDQQLQAGDNPYLRYNHADAEFQERLQEDTSFGGNLGRAVFQAKKRVLEPLGLVEEGAKTAPGKKRPVEPSPQRSPDSSTGIGKKGQQPARKRLNFGQTGDSESVPDPQPLGEPPAAPSGVGPNTMAAGGGAPMADNNEGADGVGSSSGNWHCDSTWLGDRVITTSTRTWALPTYNNHLYKQISNGTSGGATNDNTYFGYSTPWGYFDFNRFHCHFSPRDWQRLINNNWGFRPKRLSFKLFNIQVKEVTQNEGTKTIANNLTSTIQVFTDSEYQLPYVLGSAHQGCLPPFPADVFTIPQYGYLTLNNGSQAVGRSSFYCLEYFPSQMLRTGNNFQFTYTFEDVPFHSSYAHSQSLDRLMNPLIDQYLYYLSRIQTTGGTANTQTLGFSQGGPNTMANQAKNWLPGPCYRQQRVSTTTGQSNNSNFAWTAGTKYHLNGRNSLANPGIAMATHKDDEERFFPSNGILIFGKQNAARDNADYSDVMPTSEEEIKTTNPVATEEYGIVADNLQQQNTAPQIGTVNSQGALPGMVWQNRDVYLQGPIWAKIPHTDGNFHPSPLMGGFGLKHPPPQILIKNTPVPADPPTTFNQSKLNSFITQYSTGQVSVEIEWELQKENSKRWNPEIQYTSNYYKSTSVDFAVNTEGVYSEPRPIGTRYLTRNL

SEQ ID NO: 3072 - protein, 738 aa, Artificial Sequence
  source: /note="Description of Artificial Sequence: Synthetic polypeptide"
MAADGYLPDWLEDNLSEGIREWWALKPGAPKPKANQQKQDDGRGLVLPGYKYLGPFNGLDKGEPVNAADAAALEHDKAYDQQLQAGDNPYLRYNHADAEFQERLQEDTSFGGNLGRAVFQAKKRVLEPLGLVEEGAKTAPGKKRPVEPSPQRSPDSSTGIGKKGQQPARKRLNFGQTGDSESVPDPQPLGEPPAAPSGVGPNTMAAGGGAPMADNNEGADGVGSSSGNWHCDSTWLGDRVITTSTRTWALPTYNNHLYKQISNGTSGGATNDNTYFGYSTPWGYFDFNRFHCHFSPRDWQRLINNNWGFRPKRLSFKLFNIQVKEVTQNEGTKTIANNLTSTIQVFTDSEYQLPYVLGSAHQGCLPPFPADVFTIPQYGYLTLNNGSQAVGRSSFYCLEYFPSQMLRTGNNFQFTYTFEDVPFHSSYAHSQSLDRLMNPLIDQYLYYLSRIQTTGGTANTQTLGFSQGGPNTMANQAKNWLPGPRYRQQRVSTTTGQNNNSNFAWTAGTKYHLNGRNSLANPGIAMATHKDDEERFFPSNGILIFGKQNAARDNADYSDVMPTSEEEIKTTNPVATEEYGIVADNLQQQNTAPQIGTVNSQGALPGMVWQNRDVYLQGPIWAKIPHTDGNFHPSPLMGGFGLKHPPPQILIKNTPVPADPPTTFNQSKLNSFITQYSTGQVSVEIEWELQKENSKRWNPEIQYTSNYYKSTSVDFAVNTEGVYSEPRPIGTRYLTRNL

SEQ ID NO: 3073 - protein, 738 aa, Artificial Sequence
  source: /note="Description of Artificial Sequence: Synthetic polypeptide"
MAADGYLPDWLEDNLSEGIREWWALKPGAPKPKANQQKQDDGRGLVLPGYKYLGPFNGLDKGEPVNAADAAALEHDKAYDQQLQAGDNPYLRYNHADAEFQERLQEDTSFGGNLGRAVFQAKKRVLEPLGLVEEGAKTAPGKKRPVEPSPQRSPDSSTGIGKKGQQPARKRLNFGQTGDSESVPDPQPLGEPPAAPSGVGPNTMAAGGGAPMADNNEGADGVGSSSGNWHCDSTWLGDRVITTSTRTWALPTYNNHLYKQISNGTSGGATNDNTYFGYSTPWGYFDFNRFHCHFSPRDWQRLINNNWGFRPKRLSFKLFNIQVKEVTQNEGTKTIANNLTSTIQVFTDSEYQLPYVLGSAHQGCLPPFPADVFTIPQYGYLTLNNGSQAVGRSSFYCLEYFPSQMLRTGNNFQFTYTFEDVPFHSSYAHSQSLDRLMNPLIDQYLYYLSRIQTTGGTANTQTLGFSQGGPNTMANQAKNWLPGPCYRQQRVSTTTGQNNNSNFAWTAGTKYHLNGRNSLANPGIAMATHKDDEERFFPSNGILIFGKQNAARDNADYSDVMPTSEEEIKTTNPVATEEYGIVADNLQQQNTAPQIGTVNSQGALPGMVWQNRDVYLQGPIWAKIPHTDGNFHPSPLMGGFGLKHPPPQILIKNAPVPADPPTTFNQSKLNSFITQYSTGQVSVEIEWELQKENSKRWNPEIQYTSNYYKSTSVDFAVNTEGVYSEPRPIGTRYLTRNL

SEQ ID NO: 3074 - protein, 738 aa, Artificial Sequence
  source: /note="Description of Artificial Sequence: Synthetic polypeptide"
MAADGYLPDWLEDNLSEGIREWWALKPGAPKPKANQQKQDDGRGLVLPGYKYLGPFNGLDKGEPVNAADAAALEHDKAYDQQLQAGDNPYLRYNHADAEFQERLQEDTSFGGNLGRAVFQAKKRVLEPLGLVEEGAKTAPGKKRPVEPSPQRSPDSSTGIGKKGQQPARKRLNFGQTGDSESVPDPQPLGEPPAAPSGVGPNTMAAGGGAPMADNNEGADGVGSSSGNWHCDSTWLGDRVITTSTRTWALPTYNNHLYKQISNGTSGGATNDNTYFGYSTPWGYFDFNRFHCHFSPRDRQRLINNNWGFRPKRLSFKLFNIQVKEVTQNEGTKTIANNLTSTIQVFTDSEYQLPYVLGSAHQGCLPPFPADVFTIPQYGYLTLNNGSQAVGRSSFYCLEYFPSQMLRTGNNFQFTYTFEDVPFHSSYAHSQSLDRLMNPLIDQYLYYLSRIQTTGGTANTQTLGFSQGGPNTMANQAKNWLPGPCYRQQRVSTTTGQNNNSNFAWTAGTKYHLNGRNSLANPGIAMATHKDDEERFFPSNGILIFGKQNAARDNADYSDVMPTSEEEIKTTNPVATEEYGIVADNLQQQNTAPQIGTVNSQGALPGMVWQNRDVYLQGPIWAKIPHTDGNFHPSPLMGGFGLKHPPPQILIKNTPVPADPPTTFNQSKLNSFITQYSTGQVSVEIEWELQKENSKRWNPEIQYTSNYYKSTSVDFAVNTEGVYSEPRPIGTRYLTRNL

SEQ ID NO: 3075 - protein, 738 aa, Artificial Sequence
  source: /note="Description of Artificial Sequence: Synthetic polypeptide"
MAADGYLPDWLEDNLSEGIREWWALKPGAPKPKANQQKQDDGRGLVLPGYKYLGPFNGLDKGEPVNAADAAALEHDKAYDQQLQAGDNPYLRYNHADAEFQERLQEDTSFGGNLGRAVFQAKKRVLEPLGLVEEGAKTAPGKKRPVEPSPQRSPDSSTGIGKKGQQPARKRLNFGQTGDSESVPDPQPLGEPPAAPSGVGPNTMAAGGGAPMADNNEGADGVGSSSGNWHCDSTWLGDRVITTSTRTWALPTYNNHLYKQISNGTSGGATNDNTYFGYSTPWGYFDFNRFHCHFSPRDWQRLINNNWGFRPKRLSFKLFNIQVKEVTQNEGTKTIANNLTSTIQVFTDSEYQLPYVLGSAHQGCLPPFPADVFTIPQYGYLTLNNGSQAVGRSSFYCLEYFPSQMLRTGNNFQFTYTFEDVPFHSSYAHSQSLDRLMNPLIDQYLYYLSRIQTTGGTANTQTLGFSQGGPNTMANQAKNWLPGPCYRQQRVSTTTGQNNNSNFAWTAGTKYHLNGRNSLANPGIAMATHKDDEERFFPSNGILIFGKQNAARDNADYSDVMPTSEEEIKTTNPVATEEYGIVADNLQQQNTAPQIGTVNSQGALPGMVWQNRDVYLQGPIWAKIPHTDGSFHPSPLMGGFGLKHPPPQILIKNTPVPADPPTTFNQSKLNSFITQYSTGQVSVEIEWELQKENSKRWNPEIQYTSNYYKSTSVDFAVNTEGVYSEPRPIGTRYLTRNL

SEQ ID NO: 3076 - protein, 738 aa, Artificial Sequence
  source: /note="Description of Artificial Sequence: Synthetic polypeptide"
MAADGYLPDWLEDNLSEGIREWWALKPGAPKPKANQQKQDDGRGLVLPGYKYLGPFNGLDKGEPVNAADAAALEHDKAYDQQLQAGDNPYLRYNHADAEFQERLQEDTSFGGNLGRAVFQAKKRVLEPLGLVEEGAKTAPGKKRPVEPSPQRSPDSSTGIGKKGQQPARKRLNFGQTGDSESVPDPQPLGEPPTAPSGVGPNTMAAGGGAPMADNNEGADGVGSSSGNWHCDSTWLGDRVITTSTRTWALPTYNNHLYKQISNGTSGGATNDNTYFGYSTPWGYFDFNRFHCHFSPRDWQRLINNNWGFRPKRLSFKLFNIQVKEVTQNEGTKTIANNLTSTIQVFTDSEYQLPYVLGSAHQGCLPPFPADVFTIPQYGYLTLNNGSQAVGRSSFYCLEYFPSQMLRTGNNFQFTYTFEDVPFHSSYAHSQSLDRLMNPLIDQYLYYLSRIQTTGGTANTQTLGFSQGGPNTMANQAKNWLPGPCYRQQRVSTTTGQNNNSNFAWTAGTKYHLNGRNSLANPGIAMATHKDDEERFFPSNGILIFGKQNAARDNADYSDVMPTSEEEIKTTNPVATEEYGIVADNLQQQNTAPQIGTVNSQGALPGMVWQNRDVYLQGPIWAKIPHTDGNFHPSPLMGGFGLKHPPPQILIKNTPVPADPPTTFNQSKLNSFITQYSTGQVSVEIEWELQKENSKRWNPEIQYTSNYYKSTSVDFAVNTEGVYSEPRPIGTRYLTRNL

SEQ ID NO: 3077 - protein, 738 aa, Artificial Sequence
  source: /note="Description of Artificial Sequence: Synthetic polypeptide"
MAADGYLPDWLEDNLSEGIREWWALKPGAPKPKANQQKQDDGRGLVLPGYKYLGPFNGLDKGEPVNAADAAALEHDKAYDQQLQAGDNPYLRYNHADAEFQERLQEDTSFGGNLGRAVFQAKKRVLEPLGLVEEGAKTAPGKKRPVEPSPQRSPDSSTGIGKKGQQPARKRLNFGQTGDSESVPDPQPLGEPPAAPSGVGPNTMAAGGGAPMADNNEGADGVGSSSGNWHCDSTWLGDRVITTSTRTWALPTYNNHLYKQISNGTSGGATNDNTYFGYSTPWGYFDFNRFHCHFSPRDWQRLINNNWGFRPKRLSFKLFNIQVKEVTQNEGTKTIANNLTSTIQVFTDSEYQLPYVLGSAHQGCLPPFPADVFTIPQYGYLTLNNGSQAVGRSSFYCLEYFPSQMLRTGNNFQFTYTFEDVPFHSSYAHSQSLDRLMNPLIDQYLYYLSRIQTTGGTANTQTLGFSQGGPNTMANQAKNWLPGPCYRQQRVSTTTGQNNNSNFAWTAGTKYHLNGRNSLANPGIAMATHKDDEERFFPSNGILIFGKQNAARDNADYSDVMPTSEEEIKTTNPVATEEYGIVADNLQQQNTAPQIGTVNSQGALPGMVWQNRDVYLQGPIWAKIPHTDGNFHPSPLMGGFGLKHPPPQILIKNTPVPADPPTTFNQSKLNSFITQYSTGQVSVEIEWELQKENSKRWNPEIQYTSNYYKSTSVDFAVNAEGVYSEPRPIGTRYLTRNL

SEQ ID NO: 3078 - protein, 738 aa, Artificial Sequence
  source: /note="Description of Artificial Sequence: Synthetic polypeptide"
MAADGYLPDWLEDNLSEGIREWWALKPGAPKPKANQQKQDDGRGLVLPGYKYLGPFNGLDKGEPVNAADAAALEHDKAYDQQLQAGDNPYLRYNHADAEFQERLQEDTSFGGNLGRAVFQAKKRVLEPLGLVEEGAKTAPGKKRPVEPSPQRSPDSSTGIGKKGQQPARKRLNFGQTGDSESVPDPQPLGEPPAAPSGVGPNTMAAGGGAPMADNNEGADGAGSSSGNWHCDSTWLGDRVITTSTRTWALPTYNNHLYKQISNGTSGGATNDNTYFGYSTPWGYFDFNRFHCHFSPRDWQRLINNNWGFRPKRLSFKLFNIQVKEVTQNEGTKTIANNLTSTIQVFTDSEYQLPYVLGSAHQGCLPPFPADVFTIPQYGYLTLNNGSQAVGRSSFYCLEYFPSQMLRTGNNFQFTYTFEDVPFHSSYAHSQSLDRLMNPLIDQYLYYLSRIQTTGGTANTQTLGFSQGGPNTMANQAKNWLPGPCYRQQRVSTTTGQNNNSNFAWTAGTKYHLNGRNSLANPGIAMATHKDDEERFFPSNGILIFGKQNAARDNADYSDVMPTSEEEIKTTNPVATEEYGIVADNLQQQNTAPQIGTVNSQGALPGMVWQNRDVYLQGPIWAKIPHTDGNFHPSPLMGGFGLKHPPPQILIKNTPVPADPPTTFNQSKLNSFITQYSTGQVSVEIEWELQKENSKRWNPEIQYTSNYYKSTSVDFAVNTEGVYSEPRPIGTRYLTRNL

SEQ ID NO: 3079 - protein, 738 aa, Artificial Sequence
  source: /note="Description of Artificial Sequence: Synthetic polypeptide"
MAADGYLPDWLEDNLSEGIREWWALKPGAPKPKANQQKQDDGRGLVLPGYKYLGPFNGLDKGEPVNAADAAALEHDKAYDQQLQAGDNPYLRYNHADAEFQERLQEDTSFGGNLGRAVFQAKKRVLEPLGLVEEGAKTAPGKKRPVEPSPQRSPDSSTGIGKKGQQPARKRLNFGQTGDSESVPDPQPLGEPPAAPSGVGPNTMAAGGGAPMADNNEGADGVGSSSGNWHCDSTWLGDRAITTSTRTWALPTYNNHLYKQISNGTSGGATNDNTYFGYSTPWGYFDFNRFHCHFSPRDWQRLINNNWGFRPKRLSFKLFNIQVKEVTQNEGTKTIANNLTSTIQVFTDSEYQLPYVLGSAHQGCLPPFPADVFTIPQYGYLTLNNGSQAVGRSSFYCLEYFPSQMLRTGNNFQFTYTFEDVPFHSSYAHSQSLDRLMNPLIDQYLYYLSRIQTTGGTANTQTLGFSQGGPNTMANQAKNWLPGPCYRQQRVSTTTGQNNNSNFAWTAGTKYHLNGRNSLANPGIAMATHKDDEERFFPSNGILIFGKQNAARDNADYSDVMPTSEEEIKTTNPVATEEYGIVADNLQQQNTAPQIGTVNSQGALPGMVWQNRDVYLQGPIWAKIPHTDGNFHPSPLMGGFGLKHPPPQILIKNTPVPADPPTTFNQSKLNSFITQYSTGQVSVEIEWELQKENSKRWNPEIQYTSNYYKSTSVDFAVNTEGVYSEPRPIGTRYLTRNL

SEQ ID NO: 3080 - protein, 738 aa, Artificial Sequence
  source: /note="Description of Artificial Sequence: Synthetic polypeptide"
MAADGYLPDWLEDNLSEGIREWWALKPGAPKPKANQQKQDDGRGLVLPGYKYLGPFNGLDKGEPVNAADAAALEHDKAYDQQLQAGDNPYLRYNHADAEFQERLQEDTSFGGNLGRAVFQAKKRVLEPLGLVEEGAKTAPGKKRPVEPSPQRSPDSSTGIGKKGQQPARKRLNFGQTGDSESVPDPQPLGEPPAAPSGVGPNTMAAGGGAPMADNNEGADGVGSSSGNWHCDSTWLGDRVITTSTRTWALPTYNNHLYKQISNGTSGGATNDNTYFGYSTPWGYFDFNRFHCHFSPRDWQRLINNNWGFRPKRLSFKLFNIQVKEVTQNEGTKTIANNLTSTIQVFTDSEYQLPYVLGSAHQGCLPPFPADVFTIPQYGYLTLNNGSQAVGRSSFYCLEYFPSQMLRTGNNFQFTYTFEDVPFHSSYAHSQSLDRLMNPLIDQYLYYLSRIQTTGGTANTQTLGFSQGGPNTMANQAKNWLPGPCYRQQRVSTTTGQNNNSNFAWTAGTKYHLNGRNSLANPGVAMATHKDDEERFFPSNGILIFGKQNAARDNADYSDVMPTSEEEIKTTNPVATEEYGIVADNLQQQNTAPQIGTVNSQGALPGMVWQNRDVYLQGPIWAKIPHTDGNFHPSPLMGGFGLKHPPPQILIKNTPVPADPPTTFNQSKLNSFITQYSTGQVSVEIEWELQKENSKRWNPEIQYTSNYYKSTSVDFAVNTEGVYSEPRPIGTRYLTRNL

SEQ ID NO: 3081 - protein, 738 aa, Artificial Sequence
  source: /note="Description of Artificial Sequence: Synthetic polypeptide"
MAADGYLPDWLEDNLSEGIREWWALKPGAPKPKANQQKQDDGRGLVLPGYKYLGPFNGLDKGEPVNAADAAALEHDKAYDQQLQAGDNPYLRYNHADAEFQERLQEDTSFGGNLGRAVFQAKKRVLEPLGLVEEGAKTAPGKKRPVEPSPQRSPDSSTGIGKKGQQPARKRLNFGQTGDSESVPDPQPLGEPPAAPSGVGPNTMAAGGGAPMADNNEGADGVGSSSGNWHCDSTWLGDRVITTSTRTWALPTYNNHLYKQISNGTSGGATNDNTYFGYSTPWGYFDFNRFHCHFSPRDWQRLINNNWGFRPKRLSFKLFNIQVKEVTQNEGTKTIANNLTGTIQVFTDSEYQLPYVLGSAHQGCLPPFPADVFTIPQYGYLTLNNGSQAVGRSSFYCLEYFPSQMLRTGNNFQFTYTFEDVPFHSSYAHSQSLDRLMNPLIDQYLYYLSRIQTTGGTANTQTLGFSQGGPNTMANQAKNWLPGPCYRQQRVSTTTGQNNNSNFAWTAGTKYHLNGRNSLANPGIAMATHKDDEERFFPSNGILIFGKQNAARDNADYSDVMPTSEEEIKTTNPVATEEYGIVADNLQQQNTAPQIGTVNSQGALPGMVWQNRDVYLQGPIWAKIPHTDGNFHPSPLMGGFGLKHPPPQILIKNTPVPADPPTTFNQSKLNSFITQYSTGQVSVEIEWELQKENSKRWNPEIQYTSNYYKSTSVDFAVNTEGVYSEPRPIGTRYLTRNL

SEQ ID NO: 3082 - protein, 738 aa, Artificial Sequence
  source: /note="Description of Artificial Sequence: Synthetic polypeptide"
MAADGYLPDWLEDNLSEGIREWWALKPGAPKPKANQQKQDDGRGLVLPGYKYLGPFNGLDKGEPVNAADAAALEHDKAYDQQLQAGDNPYLRYNHADAEFQERLQEDTSFGGNLGRAVFQAKKRVLEPLGLVEEGAKTAPGKKRPVEPSPQRSPDSSTGIGKKGQQPARKRLNFGQTGDSESVPDPQPLGEPPAAPSGVGPNTMAAGGGAPMADNNEGADGVGSSSGNWHCDSTWLGDRVITTSTRTWALPTYNNHLYKQISNGTSGGATNDNTYFGYSTPWGYFDFNRFHCHFSPRDWQRLINNNWGFRPKRLSFKLFNIQVKEVTQNEGTKTIANNLTSTIQVFTDSEYQLPYVLGSAHQGCLPPFPADVFTIPQYGYLTLNNGSQAVGRSSFYCLEYFPSQMLRTGNNFQFTYTFEDVPFHSSYAHSQSLDRLMNPLIDQYLYYLSRIQTTGGTANTQTLGFSQGGPNTMANQAKNWLPGPCYRQQRVSTTTGQNNNSNFAWTAGTKYHLNGRNSLANPGIAMATHKDDEERFFPSNGILIFGKQNAVRDNADYSDVMPTSEEEIKTTNPVATEEYGIVADNLQQQNTAPQIGTVNSQGALPGMVWQNRDVYLQGPIWAKIPHTDGNFHPSPLMGGFGLKHPPPQILIKNTPVPADPPTTFNQSKLNSFITQYSTGQVSVEIEWELQKENSKRWNPEIQYTSNYYKSTSVDFAVNTEGVYSEPRPIGTRYLTRNL

SEQ ID NO: 3083 - protein, 738 aa, Artificial Sequence
  source: /note="Description of Artificial Sequence: Synthetic polypeptide"
MAADGYLPDWLEDNLSEGIREWWALKPGAPKPKANQQKQDDGRGLVLPGYKYLGPFNGLDKGEPVNAADAAALEHDKAYDQQLQAGDNPYLRYNHADAEFQERLQEDTSFGGNLGRAVFQAKKRVLEPLGLVEEGAKTAPGKKRPVEPSPQRSPDSSTGIGKKGQQPARKRLNFGQTGDSESVPDPQPLGEPPAAPSGVGPNTMAAGGGAPMADNNEGADGVGSSSGNWHCDSTWLGDRVITTSTRTWALPTYNNHLYKQISNGTSGGATNDNTYFGYSTPWGYFDFNRFHCHFSPRDWQRLINNNWGFRPKRLSFKLFNIQVKEVTQNEGTKTIANNLTSTIQVFTDSEYQLPYVLGSAHQGCLPPFPADVFTIPQYGYLTLNNGSQAVGRSSFYCLEYFPSQMLRTGNNFQFTYTFEDVPFHSSYAHSQSLDRLMNPLIDQYLYYLSRIQTTGGTANTQTLGFSQGGPNTMANQAKNWLPGPCYRQQRVSTTTGQNNNSNFAWTAGTKYHLNGRNSLANPGIAMATHKDDEERFFPSNGILIFGKQNAARDNADYSDVMPTSEEEIKTTNPVATEEYGIVADNLQQQNTAPQIGTVNSQGALPGMVWQNRDVYLQGPIWAKIPHTDGNFHPSPLMGGFGLKHPPPQILIKNTPVPADPPTTFNQSKLNSFIAQYSTGQVSVEIEWELQKENSKRWNPEIQYTSNYYKSTSVDFAVNTEGVYSEPRPIGTRYLTRNL

SEQ ID NO: 3084 - protein, 738 aa, Artificial Sequence
  source: /note="Description of Artificial Sequence: Synthetic polypeptide"
MAADGYLPDWLEDNLSEGIREWWALKPGAPKPKANQQKQDDGRGLVLPGYKYLGPFNGLDKGEPVNAADAAALEHDKAYDQQLQAGDNPYLRYNHADAEFQERLQEDTSFGGNLGRAVFQAKKRVLEPLGLVEEGAKTAPGKKRPVEPSPQRSPDSSTGIGKKGQQPARKRLNFGQTGDSESVPDPQPLGEPPAAPSGVGPNTMAAGGGAPMADNNEGADGVGSSSGNWHCDSTWLGDRVITTSTRTWALPTYNNHLYKQISNGTSGGATNDNTYFGYSTPWGYFDFNRFHCHFSPRDWQRLINNNWGFRPKRLSFKLFNIQVKEVTQNEGTKTIANNLTSTIQVFTDSEYQLPYVLGSAHQGCLPPFPADVFTIPQYGYLTLNNGSQAVGRSSFYCLEYFPSQMLRTGNNFQFTYTFEDVPFHSSYAHSQSLDRLMNPLIDQYLYYLSRIQTTGGTANTQTLGFSQGGPNTMANQAKNWLPGPCYRQQRVSTTTGQNNNSNFAWTAGTKYHLNGRNSLANPGIAMATHKDGEERFFPSNGILIFGKQNAARDNADYSDVMPTSEEEIKTTNPVATEEYGIVADNLQQQNTAPQIGTVNSQGALPGMVWQNRDVYLQGPIWAKIPHTDGNFHPSPLMGGFGLKHPPPQILIKNTPVPADPPTTFNQSKLNSFITQYSTGQVSVEIEWELQKENSKRWNPEIQYTSNYYKSTSVDFAVNTEGVYSEPRPIGTRYLTRNL

SEQ ID NO: 3085 - protein, 738 aa, Artificial Sequence
  source: /note="Description of Artificial Sequence: Synthetic polypeptide"
MAADGYLPDWLEDNLSEGIREWWALKPGAPKPKANQQKQDDGRGLVLPGYKYLGPFNGLDKGEPVNAADAAALEHDKAYDQQLQAGDNPYLRYNHADAEFQERLQEDTSFGGNLGRAVFQAKKRVLEPLGLVEEGAKTAPGKKRPVEPSPQRSPDSSTGIGKKGQQPARKRLNFGQTGDSESVPDPQPLGEPPAAPSGVGPNTMAAGGGAPMADNNEGADGVGSSSGNWHCDSTWLGDRVITTSTRTWALPTYNNHLYKQISNGTSGGATNDNTYFGYSTPWGYFDFNRFHCHFSPRDWQRLINNNWGFRPKRLSFKLFNIQVKEVTQNEGTKTIANNLTSTIQVFTDSEYQLPYVLGSAHQGCLPPFPADVFTIPQYGYLTLNNGSQAVGRSSFYCLEYFPSQMLRTGNNFQFTYTFEDVPFHSSYAHSQSLDRLMNPLIDQYLYYLSRIQTTGGTANTQTLGFSQGGPNTMANQAKNWLPGPCYRQQRVSTTTGQNNNSNFAWTAGTKYHLNGRNSLANPGIAMATHKGDEERFFPSNGILIFGKQNAARDNADYSDVMPTSEEEIKTTNPVATEEYGIVADNLQQQNTAPQIGTVNSQGALPGMVWQNRDVYLQGPIWAKIPHTDGNFHPSPLMGGFGLKHPPPQILIKNTPVPADPPTTFNQSKLNSFITQYSTGQVSVEIEWELQKENSKRWNPEIQYTSNYYKSTSVDFAVNTEGVYSEPRPIGTRYLTRNL

SEQ ID NO: 3086 - protein, 738 aa, Artificial Sequence
  source: /note="Description of Artificial Sequence: Synthetic polypeptide"
MAADGYLPDWLEDNLSEGIREWWALKPGAPKPKANQQKQDDGRGLVLPGYKYLGPFNGLDKGEPVNAADAAALEHDKAYNQQLQAGDNPYLRYNHADAEFQERLQEDTSFGGNLGRAVFQAKKRVLEPLGLVEEGAKTAPGKKRPVEPSPQRSPDSSTGIGKKGQQPARKRLNFGQTGDSESVPDPQPLGEPPAAPSGVGPNTMAAGGGAPMADNNEGADGVGSSSGNWHCDSTWLGDRVITTSTRTWALPTYNNHLYKQISNGTSGGATNDNTYFGYSTPWGYFDFNRFHCHFSPRDWQRLINNNWGFRPKRLSFKLFNIQVKEVTQNEGTKTIANNLTSTIQVFTDSEYQLPYVLGSAHQGCLPPFPADVFTIPQYGYLTLNNGSQAVGRSSFYCLEYFPSQMLRTGNNFQFTYTFEDVPFHSSYAHSQSLDRLMNPLIDQYLYYLSRIQTTGGTANTQTLGFSQGGPNTMANQAKNWLPGPCYRQQRVSTTTGQNNNSNFAWTAGTKYHLNGRNSLANPGIAMATHKDDEERFFPSNGILIFGKQNAARDNADYSDVMPTSEEEIKTTNPVATEEYGIVADNLQQQNTAPQIGTVNSQGALPGMVWQNRDVYLQGPIWAKIPHTDGNFHPSPLMGGFGLKHPPPQILIKNTPVPADPPTTFNQSKLNSFITQYSTGQVSVEIEWELQKENSKRWNPEIQYTSNYYKSTSVDFAVNTEGVYSEPRPIGTRYLTRNL

SEQ ID NO: 3087 - protein, 738 aa, Artificial Sequence
  source: /note="Description of Artificial Sequence: Synthetic polypeptide"
MAADGYLPDWLEDNLSEGIREWWALKPGAPKPKANQQKQDDGRGLVLPGYKYLGPFNGLDKGEPVNAADAAALEHDKAYDQQLQAGDNPYLRYNHADAEFQERLQEDTSFGGNLGRAVFQAKKRVLEPLGLVEEGAKTAPGKKRPVEPSPQRSPDSSTGIGKKGQQPARKRLNFGQTGDSESVPDPQPLGEPPAAPSGVGPNTMAAGGGAPMADNNEGADGVGSSSGNWHCDSTWLGDRVITTSTRTWALPTYNNHLYKQISNGTSGGATNDNTYFGYSTPWGYFDFNRFHCHFSPRDWQRLINNNWGFRPKRLSFKLFNIQVKEVTQNEGTKTIANNLTSTIQVFTDSEYQLPYVLGSAHQGCLPPFPADVFTIPQYGYLTLNNGSQAVGRSSFYCLEYFPSQMLRTGNNFQFTYTFEDVPFHSSYAHSQSLDRLMNPLIDQYLYYLSRIQTTGGTANTQTLGFSQGGPNTMANQAKNWLPGPCYRQQRVSTTTGQNNNSNFAWTAGTKYHLNGRNSLANPGIAMATHKDDEERFFPSNGILIFGKQNAARDNADYSDVMPTSEEEIKTTNPVATEEYGIVADNLQQQNTAPQIGTVNSQGALPGMVWQNRDVYLQGPTWAKIPHTDGNFHPSPLMGGFGLKHPPPQILIKNTPVPADPPTTFNQSKLNSFITQYSTGQVSVEIEWELQKENSKRWNPEIQYTSNYYKSTSVDFAVNTEGVYSEPRPIGTRYLTRNL

SEQ ID NO: 3088 - protein, 738 aa, Artificial Sequence
  source: /note="Description of Artificial Sequence: Synthetic polypeptide"
MAADGYLPDWLEDNLSEGIREWWALKPGAPKPKANQQKQDDGRGLVLPGYKYLGPFNGLDKGEPVNAADAAALEHDKAYDQQLQAGDNPYLRYNHADAEFQERLQEDTSFGGNLGRAVFQAKKRVLEPLGLVEEGAKTAPGKKRPVEPSPQRSPDSSTGIGKKGQQPARKRLNFGQTGDSESVPDPQPLGEPPAAPSGVGPNTMAAGGGAPMADNNEGADGVGSSSGNWHCDSTWLGDRVITTSTRTWALPTYNNHLYKQISNGTSGGATNDNTYFGYSTPWGYFDFNRFHCHFSPRDWQRLINNNWGFRPKRLSFKLFNIQVKEVTQNEGTKTIANNLTSTIQVFTDSEYQLPYVLGSAHQGCLPPFPADVFTIPQYGYLTLNNGSQAVGRSSFYCLEYFPSQMLRTGNNFQFTYTFEDVPFHSSYAHSQSLDRLMNPLIDQYLYYLSRIQTTGGTANTQTLGFSQGGPNTMANQAKNWLPGPCYRQQRVSTTTGQNNNSNFAWTAGTKYHLNGRNSLANPGIAMATHKDDEERFFPSNGILIFGKQNAARDNADYSDVMPTSEEEIKTTNPVATEEYGIVADNLRQQNTAPQIGTVNSQGALPGMVWQNRDVYLQGPIWAKIPHTDGNFHPSPLMGGFGLKHPPPQILIKNTPVPADPPTTFNQSKLNSFITQYSTGQVSVEIEWELQKENSKRWNPEIQYTSNYYKSTSVDFAVNTEGVYSEPRPIGTRYLTRNL

SEQ ID NO: 3089 - protein, 738 aa, Artificial Sequence
  source: /note="Description of Artificial Sequence: Synthetic polypeptide"
MAADGYLPDWLEDNLSEGIREWWALKPGAPKPKANQQKQDDGRGLVLPGYKYLGPFNGLDKGEPVNAADAAALEHDKAYDQQLQAGDNPYLRYNHADAEFQERLQEDTSFGGNLGRAVFQAKKRVLEPLGLVEEGAKTAPGKKRPVEPSPQRSPDSSTGIGKKGQQPARKRLNFGQTGDSESVPDPQPLGEPPAAPSGVGPNTMAAGGGAPMADNNEGADGVGSSSGNWHCDSTWLGDRVITTSTRTWALPTYNNHLYKQISNGTSGGATNDNTYFGYSTPWGYFDFNRFHCHFSPRDWQRLINNNWGFRPKRLSFKLFNIQVKEVTQNEGTKTIANNLTSTIQVFTDSEYQLPYVLGSAHQGCLPPFPADVFTIPQYGYLTLNNGSQAVGRSSFYCLEYFPSQMLRTGNNFQFTYTFEDVPFHSSYAHSQSLDRLMNPLIDQYLYYLSRIQTTGGTANTQTLGFSQGGPNTMANQAKNWLPGPCYRQQRVSTTTGQNNNSNFAWTAGTKYHLNGRNSLANPGIAMATHKDDEERFFPSNGILIFGKQNAARDNADYSDAMPTSEEEIKTTNPVATEEYGIVADNLQQQNTAPQIGTVNSQGALPGMVWQNRDVYLQGPIWAKIPHTDGNFHPSPLMGGFGLKHPPPQILIKNTPVPADPPTTFNQSKLNSFITQYSTGQVSVEIEWELQKENSKRWNPEIQYTSNYYKSTSVDFAVNTEGVYSEPRPIGTRYLTRNL

SEQ ID NO: 3090 - protein, 738 aa, Artificial Sequence
  source: /note="Description of Artificial Sequence: Synthetic polypeptide"
MAADGYLPDWLEDNLSEGIREWWALKPGAPKPKANQQKQDDGRGLVLPGYKYLGPFNGLDKGEPVNAADAAALEHDKAYDQQLQAGDNPYLRYNHADAEFQERLQEDTSFGGNLGRAVFQAKKRVLEPLGLVEEGAKTAPGKKRPVEPSPQRSPDSSTGIGKKGQQPARKRLNFGQTGDSESVPDPQPLGEPPAAPSGVGPNTMAAGGGAPMADNNEGADGVGSSSGNWHCDSTWLGDRVITTSTRTWALPTYNNHLYKQISNGTSGGATNGNTYFGYSTPWGYFDFNRFHCHFSPRDWQRLINNNWGFRPKRLSFKLFNIQVKEVTQNEGTKTIANNLTSTIQVFTDSEYQLPYVLGSAHQGCLPPFPADVFTIPQYGYLTLNNGSQAVGRSSFYCLEYFPSQMLRTGNNFQFTYTFEDVPFHSSYAHSQSLDRLMNPLIDQYLYYLSRIQTTGGTANTQTLGFSQGGPNTMANQAKNWLPGPCYRQQRVSTTTGQNNNSNFAWTAGTKYHLNGRNSLANPGIAMATHKDDEERFFPSNGILIFGKQNAARDNADYSDVMPTSEEEIKTTNPVATEEYGIVADNLQQQNTAPQIGTVNSQGALPGMVWQNRDVYLQGPIWAKIPHTDGNFHPSPLMGGFGLKHPPPQILIKNTPVPADPPTTFNQSKLNSFITQYSTGQVSVEIEWELQKENSKRWNPEIQYTSNYYKSTSVDFAVNTEGVYSEPRPIGTRYLTRNL

SEQ ID NO: 3091 - protein, 738 aa, Artificial Sequence
  source: /note="Description of Artificial Sequence: Synthetic polypeptide"
MAADGYLPDWLEDNLSEGIREWWALKPGAPKPKANQQKQDDGRGLVLPGYKYLGPFNGLDKGEPVNAADAAALEHDKAYDQQLQAGDNPYLRYNHADAEFQERLQEDTSFGGNLGRAVFQAKKRVLEPLGLVEEGAKTAPGKKRPVEPSPQRSPDSSTGIGKKGQQPARKRLNFGQTGDSESVPDPQPLGEPPAAPSGVGPNTMAAGGGAPMADNNEGADGVGSSSGNWHCDSTWLGDRVITTSTRTWALPTYNNHLYKQISNGTSGGATNDNTYFGYSTPWGYFDFNRFHCHFSPRDWQRLINNNWGFRPKRLSFKLFNIQVKEVAQNEGTKTIANNLTSTIQVFTDSEYQLPYVLGSAHQGCLPPFPADVFTIPQYGYLTLNNGSQAVGRSSFYCLEYFPSQMLRTGNNFQFTYTFEDVPFHSSYAHSQSLDRLMNPLIDQYLYYLSRIQTTGGTANTQTLGFSQGGPNTMANQAKNWLPGPCYRQQRVSTTTGQNNNSNFAWTAGTKYHLNGRNSLANPGIAMATHKDDEERFFPSNGILIFGKQNAARDNADYSDVMPTSEEEIKTTNPVATEEYGIVADNLQQQNTAPQIGTVNSQGALPGMVWQNRDVYLQGPIWAKIPHTDGNFHPSPLMGGFGLKHPPPQILIKNTPVPADPPTTFNQSKLNSFITQYSTGQVSVEIEWELQKENSKRWNPEIQYTSNYYKSTSVDFAVNTEGVYSEPRPIGTRYLTRNL

SEQ ID NO: 3092 - protein, 738 aa, Artificial Sequence
  source: /note="Description of Artificial Sequence: Synthetic polypeptide"
MAADGYLPDWLEDNLSEGIREWWALKPGAPKPKANQQKQDDGRGLVLPGYKYLGPFNGLDKGEPVNAADAAALEHDKAYDQQLQAGDNPYLRYNHADAEFQERLQEDTSFGGNLGRAVFQAKKRVLEPLGLVEEGAKTAPGKKRPVEPSPQRSPDSSTGIGKKGQQPARKRLNFGQTGDSESVPDPQPLGEPPAAPSGVGPNTMAAGGGAPMADNNEGADGVGSSSGNWHCDSTWLGDRVITTSTRTWALPTYNNHLYKQISNGTSGGATNDNTYFGYSTPWGYFDFNRFHCHFSPRDWQRLINNNWGFRPKRLSFKLFNIQVKEVTQNEGTKTIANNLTSTIQVFTDSEYQLPYVLGSAHQGCLPPFPADVFTIPQYGYLTLNNGSQAVGRSSFYCLEYFPSQMLRTGNNFQFTYTFEDVPFHSSYAHSQSLDRLMNPLIDQYLYYLSRIQTTGGTANTQTLGFSQGGPNTMANQAKNWLPGPCYRQQRVSTTTGQNNNSNFAWTAGTKYHLNGRNSLANPGIAMATHKDDEERFFPSNGILIFGKQNAARDNADYSDVMPTSEEEIKTTNPVATEEYGIVADNLQQQNTAPQIGTVNSQGALPGMVWQNRDVYLQGPIWAKIPHTDGNFHPSPLMGGFGLKHPPPQILIKNTPVPADPPTTFNQSKLNSFITQYSTGQVSAEIEWELQKENSKRWNPEIQYTSNYYKSTSVDFAVNTEGVYSEPRPIGTRYLTRNL

SEQ ID NO: 3093 - protein, 738 aa, Artificial Sequence
  source: /note="Description of Artificial Sequence: Synthetic polypeptide"
MAADGYLPDWLEDNLSEGIREWWALKPGAPKPKANQQKQDDGRGLVLPGYKYLGPFNGLDKGEPVNAADAAALEHDKAYDQQLQAGDNPYLRYNHADAEFQERLQEDTSFGGNLGRAVFQAKKRVLEPLGLVEEGAKTAPGKKRPVEPSPQRSPDSSTGIGKKGQQPARKRLNFGQTGDSESVPDPQPLGEPPAAPSGVGPNTMAAGGGAPMADNNEGADGVGSSSGNWHCDSTWLGDRVITTSTRTWALPTYNNHLYKQISNGTSGGATNDNTYFGYSTPWGYFDFNRFHCHFSPRDWQRLINNNWGFRPKRLSFKLFNIQVKEVTQNEGTKTIANNLTSTIQVFTDSEYQLPYVLGSAHQGCLPPFPADVFTIPQYGYLTLNNGSQAVGRSSFYCLEYFPSQMLRTGNNFQFTYTFEDVPFHSSYAHSQGLDRLMNPLIDQYLYYLSRIQTTGGTANTQTLGFSQGGPNTMANQAKNWLPGPCYRQQRVSTTTGQNNNSNFAWTAGTKYHLNGRNSLANPGIAMATHKDDEERFFPSNGILIFGKQNAARDNADYSDVMPTSEEEIKTTNPVATEEYGIVADNLQQQNTAPQIGTVNSQGALPGMVWQNRDVYLQGPIWAKIPHTDGNFHPSPLMGGFGLKHPPPQILIKNTPVPADPPTTFNQSKLNSFITQYSTGQVSVEIEWELQKENSKRWNPEIQYTSNYYKSTSVDFAVNTEGVYSEPRPIGTRYLTRNL

SEQ ID NO: 3094 - protein, 738 aa, Artificial Sequence
  source: /note="Description of Artificial Sequence: Synthetic polypeptide"
MAADGYLPDWLEDNLSEGIREWWALKPGAPKPKANQQKQDDGRGLVLPGYKYLGPFNGLDKGEPVNAADAAALEHDKAYDQQLQAGDNPYLRYNHADAEFQERLQEDTSFGGNLGRAVFQAKKRVLEPLGLVEEGAKTAPGKKRPVEPSPQRSPDSSTGIGKKGQQPARKRLNFGQTGDSESVPDPQPLGEPPAAPSGVGPNTMAAGGGAPMADNNEGADGVGSSSGNWHCDSTWLGDRVITTSTRTWALPTYNNHLYKQISNGTSGGATNDNTYFGYSTPWGYFDFNRFHCHFSPRDWQRLINNNWGFRPKRLSFKLFNIQVKEVTQNEGTKTIANNLTSTIQVFTDSEYQLPYVLGSAHQGCLPPFPADVFTIPQYGYLTLNNGSQAVGRSSFYCLEYFPSQMLRTGSNFQFTYTFEDVPFHSSYAHSQSLDRLMNPLIDQYLYYLSRIQTTGGTANTQTLGFSQGGPNTMANQAKNWLPGPCYRQQRVSTTTGQNNNSNFAWTAGTKYHLNGRNSLANPGIAMATHKDDEERFFPSNGILIFGKQNAARDNADYSDVMPTSEEEIKTTNPVATEEYGIVADNLQQQNTAPQIGTVNSQGALPGMVWQNRDVYLQGPIWAKIPHTDGNFHPSPLMGGFGLKHPPPQILIKNTPVPADPPTTFNQSKLNSFITQYSTGQVSVEIEWELQKENSKRWNPEIQYTSNYYKSTSVDFAVNTEGVYSEPRPIGTRYLTRNL

SEQ ID NO: 3095 - protein, 738 aa, Artificial Sequence
  source: /note="Description of Artificial Sequence: Synthetic polypeptide"
MAADGYLPDWLEDNLSEGIREWWALKPGAPKPKANQQKQDDGRGLVLPGYKYLGPFNGLDKGEPVNAADAAALEHDKAYDQQLQAGDNPYLRYNHADAEFQERLQEDTSFGGNLGRAVFQAKKRVLEPLGLVEEGAKTAPGKKRPVEPSPQRSPDSSTGIGKKGQQPARKRLNFGQTGDSESVPDPQPLGEPPAAPSGVGPNTMAAGGGAPMADNNEGADGVGSSSGNWHCDSTWLGDRVITTSTRTWALPTYNNHLYKQISNGTSGGATNDNTYFGYSTPWGYFDFNRFHCHFSPRDWQRLINNNWGFRPKRLSFKLFNIQVKEVTQNEGTKTIANNLTSTIQVFTDSEYQLPYVLGSAHQGCLPPFPADVFTIPQYGYLTLNNGSQAVGRSSFYCLEYFPSQMLRTGNNFQFTYTFEDVPFHSSYAHSQSLDRLMNPLIDQYLYYLSRIQTTGGTANTQTLGFSQGGPNTMANQAKNWLPGPCYRQQRVSTTTGQNNNSNFAWTAGTKYHLNGRNSLANPGIAMATHKDDEERFFPSNGILIFGKQNAARDNADYSDVMPTSEEEIKTTNPVATEEYGIVADNLQQQNTAPQIGTVNSQGALPGMVWQNRDVYLQGPIWAKIPHTDGNFHPSPLMGGFGLKHPPPQILIKNTPVPADPPTTFNQSKLNSFITQYSTGQVSVEIEWELRKENSKRWNPEIQYTSNYYKSTSVDFAVNTEGVYSEPRPIGTRYLTRNL

SEQ ID NO: 3096 - protein, 738 aa, Artificial Sequence
  source: /note="Description of Artificial Sequence: Synthetic polypeptide"
MAADGYLPDWLEDNLSEGIREWWALKPGAPKPKANQQKQDDGRGLVLPGYKYLGPFNGLDKGEPVNAADAAALEHDKAYDQQLQAGDNPYLRYNHADAEFQERLQEDTSFGGNLGRAVFQAKKRVLEPLGLVEEGAKTAPGKKRPVEPSPQRSPDSSTGIGKKGQQPARKRLNFGQTGDSESVPDPQPLGEPPAAPSGVGPNTMAAGGGAPMADNNEGADGVGSSSGNWHCDSTWLGDRVITTSTRTWALPTYNNHLYKQISNGTSGGATNDNTYFGYSTPWGYFDFNRFHCHFSPRDWQRLINNNWGFRPKRLSFKLFNIQVKEVTQNEGTKTIANNLTSTIQVFTDSEYQLPYVLGSAHQGCLPPFPADVFTIPQYGYLTLNNGSQAVGRSSFYCLEYFPSQMLRTGNNFQFTYTFEDAPFHSSYAHSQSLDRLMNPLIDQYLYYLSRIQTTGGTANTQTLGFSQGGPNTMANQAKNWLPGPCYRQQRVSTTTGQNNNSNFAWTAGTKYHLNGRNSLANPGIAMATHKDDEERFFPSNGILIFGKQNAARDNADYSDVMPTSEEEIKTTNPVATEEYGIVADNLQQQNTAPQIGTVNSQGALPGMVWQNRDVYLQGPIWAKIPHTDGNFHPSPLMGGFGLKHPPPQILIKNTPVPADPPTTFNQSKLNSFITQYSTGQVSVEIEWELQKENSKRWNPEIQYTSNYYKSTSVDFAVNTEGVYSEPRPIGTRYLTRNL

SEQ ID NO: 3097 - protein, 738 aa, Artificial Sequence
  source: /note="Description of Artificial Sequence: Synthetic polypeptide"
MAADGYLPDWLEDNLSEGIREWWALKPGAPKPKANQQKQDDGRGLVLPGYKYLGPFNGLDKGEPVNAADAAALEHDKAYDQQLQAGDNPYLRYNHADAEFQERLQEDTSFGGNLGRAVFQAKKRVLEPLGLVEEGAKTAPGKKRPVEPSPQRSPDSSTGIGKKGQQPARKRLNFGQTGDSESVPDPQPLGEPPAAPSGVGPNTMAAGGGAPMADNNEGADGVGSSSGNWHCDSTWLGDRVITASTRTWALPTYNNHLYKQISNGTSGGATNDNTYFGYSTPWGYFDFNRFHCHFSPRDWQRLINNNWGFRPKRLSFKLFNIQVKEVTQNEGTKTIANNLTSTIQVFTDSEYQLPYVLGSAHQGCLPPFPADVFTIPQYGYLTLNNGSQAVGRSSFYCLEYFPSQMLRTGNNFQFTYTFEDVPFHSSYAHSQSLDRLMNPLIDQYLYYLSRIQTTGGTANTQTLGFSQGGPNTMANQAKNWLPGPCYRQQRVSTTTGQNNNSNFAWTAGTKYHLNGRNSLANPGIAMATHKDDEERFFPSNGILIFGKQNAARDNADYSDVMPTSEEEIKTTNPVATEEYGIVADNLQQQNTAPQIGTVNSQGALPGMVWQNRDVYLQGPIWAKIPHTDGNFHPSPLMGGFGLKHPPPQILIKNTPVPADPPTTFNQSKLNSFITQYSTGQVSVEIEWELQKENSKRWNPEIQYTSNYYKSTSVDFAVNTEGVYSEPRPIGTRYLTRNL

SEQ ID NO: 3098 - protein, 738 aa, Artificial Sequence
  source: /note="Description of Artificial Sequence: Synthetic polypeptide"
MAADGYLPDWLEDNLSEGIREWWALKPGAPKPKANQQKQDDGRGLVLPGYKYLGPFNGLDKGEPVNAADAAALEHDKAYDQQLQAGDNPYLRYNHADAEFQERLQEDTSFGGNLGRAVFQAKKRVLEPLGLVEEGAKTAPGKKRPVEPSPQRSPDSSTGIGKKGQQPARKRLNFGQTGDSESVPDPQPLGEPPAAPSGVGPNTMAAGGGAPMADNNEGADGVGSSSGNWHCDSTWLGDRVITTSTRTWALPTYNNHLYKQISNGTSGGATNDNTYFGYSTPWGYFDFNRFHCHFSPRDWQRLINNNWGFRPKRLSFKLFNIQVKEVTQNEGTKTIANNLTSTIQVFTDSEYQLPYVLGSAHQGCLPPFPADVFTIPQYGYLTLNNGSQAVGRSSFYCLEYFPSQMLRTGNNFQFTYTFEDVPFHSSYAHSQSLDRLMNPLIDQYLYYLSRIQTTGGTANTQTLGFSQGGPNTMANQAKNWLPGPCYRQQRVSTTTGQNNNSNFAWTAGTKYHLNGRNSLANPGIAMATHKDDEERFFPSNGILIFGKQNAARDNADYSDVMPTSEEEIKTTNPVATEEYGIVADNLQQQNTAPQIGTVNSQGALPGMVWQNRDVYLQGPIWAKIPHTDGNFHPSPLMGGFGLKHPPPQILIKNTPVPADPPTTFNQSKLNSFITQYSTGQVSVEIEWELQKENSKRRNPEIQYTSNYYKSTSVDFAVNTEGVYSEPRPIGTRYLTRNL

SEQ ID NO: 3099 - protein, 738 aa, Artificial Sequence
  source: /note="Description of Artificial Sequence: Synthetic polypeptide"
MAADGYLPDWLEDNLSEGIREWWALKPGAPKPKANQQKQDDGRGLVLPGYKYLGPFNGLDKGEPVNAADAAALEHDKAYDQQLQAGDNPYLRYNHADAEFQERLQEDTSFGGNLGRAVFQAKKRVLEPLGLVEEGAKTAPGKKRPVEPSPQRSPDSSTGIGKKGQQPARKRLNFGQTGDSEPVPDPQPLGEPPAAPSGVGPNTMAAGGGAPMADNNEGADGVGSSSGNWHCDSTWLGDRVITTSTRTWALPTYNNHLYKQISNGTSGGATNDNTYFGYSTPWGYFDFNRFHCHFSPRDWQRLINNNWGFRPKRLSFKLFNIQVKEVTQNEGTKTIANNLTSTIQVFTDSEYQLPYVLGSAHQGCLPPFPADVFTIPQYGYLTLNNGSQAVGRSSFYCLEYFPSQMLRTGNNFQFTYTFEDVPFHSSYAHSQSLDRLMNPLIDQYLYYLSRIQTTGGTANTQTLGFSQGGPNTMANQAKNWLPGPCYRQQRVSTTTGQNNNSNFAWTAGTKYHLNGRNSLANPGIAMATHKDDEERFFPSNGILIFGKQNAARDNADYSDVMPTSEEEIKTTNPVATEEYGIVADNLQQQNTAPQIGTVNSQGALPGMVWQNRDVYLQGPIWAKIPHTDGNFHPSPLMGGFGLKHPPPQILIKNTPVPADPPTTFNQSKLNSFITQYSTGQVSVEIEWELQKENSKRWNPEIQYTSNYYKSTSVDFAVNTEGVYSEPRPIGTRYLTRNL

SEQ ID NO: 3100 - protein, 738 aa, Artificial Sequence
  source: /note="Description of Artificial Sequence: Synthetic polypeptide"
MAADGYLPDWLEDNLSEGIREWWALKPGAPKPKANQQKQDDGRGLVLPGYKYLGPFNGLDKGEPVNAADAAALEHDKAYDQQLQAGDNPYLRYNHADAEFQERLQEDTSFGGNLGRAVFQAKKRVLEPLGLVEEGAKTAPGKKRPVEPSPQRSPDSSTGIGKKGQQPARKRLNFGQTGDSESVPDPQPLGEPPAAPSGVGPNTMAAGGGAPMADNNEGADGVGSSSGNWHCDSTWLGDRVITTSTRTWALPTYNNHLYKQISNGTSGGATNDNTYFGYSTPWGYFDFNRFHCHFSPRDWQRLINNNWGFRPKRLSFKLFNIQVKEVTQNEGTKTIANNLTSTIQVFTDSEYQLPYVLGSAHQGCLPPFPADVFTIPQYGYLTLNNGSQAVGRSSFYCLEYFPSQMLRTGNNFQFTYTFEDVPFHSSYAHSQSLDRLMNPLIDQYLYYLSRIQTTGGTANTQTLGFSQGGPNTMANQAKNWLPGPCYRQQRVSTTTGQNNNSNFAWTAGTKYHLNGRNSLANPGIAMATHKDDEERFFPSNGIPIFGKQNAARDNADYSDVMPTSEEEIKTTNPVATEEYGIVADNLQQQNTAPQIGTVNSQGALPGMVWQNRDVYLQGPIWAKIPHTDGNFHPSPLMGGFGLKHPPPQILIKNTPVPADPPTTFNQSKLNSFITQYSTGQVSVEIEWELQKENSKRWNPEIQYTSNYYKSTSVDFAVNTEGVYSEPRPIGTRYLTRNL

SEQ ID NO: 3101 - protein, 738 aa, Artificial Sequence
  source: /note="Description of Artificial Sequence: Synthetic polypeptide"
MAADGYLPDWLEDNLSEGIREWWALKPGAPKPKANQQKQDDGRGLVLPGYKYLGPFNGLDKGEPVNAADAAALEHDKAYDQQLQAGDNPYLRYNHADAEFQERLQEDTSFGGNLGRAVFQAKKRVLEPLGLVEEGAKTAPGKKRPVEPSPQRSPDSSTGIGKKGQQPARKRLNFGQTGDSESVPDPQPLGEPPAAPSGVGPNTMAAGGGAPMADNNEGADGVGSSSGNWHCDSTWLGDRVITTSTRTWALPTYNNHLYKQISNGTSGGATNDNTYFGYSTPWGYFDFNRFHCHFSPRDWQRLINNNWGFRPKRLSFKLFNIQVKEVTQNEGTKTIANNLTSTIQVFTDSEYQLPYVLGSAHQGCLPPFPADVFTIPQYGYLTLNNGSQAVGRSSFYCLEYFPSQMLRTGNNFQFTYTFEDVPFHSSYAHSQSLDRLMNPLIDQYLYYLSRIQTTGGTANTQTLGFSQGGPNTMANQAKNWLPGPCYRQQRVSTTTGQNNNSNFAWTAGTKYHLNGRNSLANPGIAMATHKDDEERFFPSNGILIFGKQNAARDNADYSDVMPTSEEEIKTTNPVATEEYGIVADNLQQQNTAPQIGTVNSQGALPGMVWQNRDVYLQGPIWAKIPHTDGNFHPSPLMGGFGLKHPPPQILIKNTPVPADPPTTFNQSKLNSFITQYSTGQVSVEIEWELQKENSKRWNPEIQHTSNYYKSTSVDFAVNTEGVYSEPRPIGTRYLTRNL

SEQ ID NO: 3102 - protein, 738 aa, Artificial Sequence
  source: /note="Description of Artificial Sequence: Synthetic polypeptide"
MAADGYLPDWLEDNLSEGIREWWALKPGAPKPKANQQKQDDGRGLVLPGYKYLGPFNGLDKGEPVNAADAAALEHDKAYDQQLQAGDNPYLRYNHADAEFQERLQEDTSFGGNLGRAVFQAKKRVLEPLGLVEEGAKTAPGKKRPVEPSPQRSPDSSTGIGKKGQQPARKRLNFGQTGDSESVPDPQPLGEPPAAPSGVGPNTMAAGGGAPMADNNEGADGVGSSSGNWHCDSTWLGDRVITTSTRTWALPTYNNHLYKQISNGTSGGATNDNTYFGYSTPWGYFDFNRFHCHFSPRDWQRLINNNWGFRPKRLSFKLFNIQVKEVTQNEGTKTIANNLTSTIQVFTDSEYQLPYVLGSAHQGCLPPFPADVFTIPQYGYLTLNNGSQAVGRSSFYCLEYFPSQMLRTGNNFQFTYTFEDVPFHSSYAHSQSLDRLMNPLIDQYLYYLSRIQTTGGTANTQTLGFSQGGPNTMANQAKNWLPGPCYRQQRVSTTTGQNNNSNFAWTAGTKYHLNGRNSLANPGIAMATHKDDEERFFPSNGILIFGKQNAARDNADYSDVMPTSEEEIKTTNPVATEEYGIVADNLQQQNTAPQIGTVNSQGALPGMVWQNRDVYLQGPIWAKIPHTDGNFHPSPLMGGFGLKHPPPQILIKNTPVPADPPTTFNQSKLNPFITQYSTGQVSVEIEWELQKENSKRWNPEIQYTSNYYKSTSVDFAVNTEGVYSEPRPIGTRYLTRNL

SEQ ID NO: 3103 - protein, 738 aa, Artificial Sequence
  source: /note="Description of Artificial Sequence: Synthetic polypeptide"
MAADGYLPDWLEDNLSEGIREWWALKPGAPKPKANQQKQDDGRGLVLPGYKYLGPFNGLDKGEPVNAADAAALEHDKAYDQQLQAGDNPYLRYNHADAEFQERLQEDTSFGGNLGRAVFQAKKRVLEPLGLVEEGAKTAPGKKRPVEPSPQRSPDSSTGIGKKGQQPARKRLNFGQTGDSESVPDPQPLGEPPAAPSGVGPNTMAAGGGAPMADNNEGADGVGSSSGNWHCDSTWLGDRVITTSTRTWALPTYNNHLYKQISNGTSGGATNDNTYFGYSTPWGYFDFNRFHCHFSPRDWQRLINNNWGFRPKRLSFKLFNIQVKEVTQNEGTKTIANNLTSTIQVFTDSEYQLPYVLGSAHQGCLPPFPADVFTIPQYGYLTLNNGSQAVGRSSFYCLEYFPSQMLRTGNNFQFTYTFEDVPFHSSYAHSQSLDRLMNPLIDQYLYYLSRIQTTGGTANTQTLGFSQGGPNTMANQAKNWLPGPCYRQQRVSTTTGQNNNSNFAWTAGTKYHLNGRNSLANPGIAMATHKDDEERFFPSNGILIFGKQNAARDNADYSDVMPTSEEEIKTTNPVATEEYGIVADNLQQQNTAPQIGTVNSQGALPGMVWQNRDVYLQGPIWAKIPHTDGNFRPSPLMGGFGLKHPPPQILIKNTPVPADPPTTFNQSKLNSFITQYSTGQVSVEIEWELQKENSKRWNPEIQYTSNYYKSTSVDFAVNTEGVYSEPRPIGTRYLTRNL

SEQ ID NO: 3104 - protein, 738 aa, Artificial Sequence
  source: /note="Description of Artificial Sequence: Synthetic polypeptide"
MAADGYLPDWLEDNLSEGIREWWALKPGAPKPKANQQKQDDGRGLVLPGYKYLGPFNGLDKGEPVNAADAAALEHDKAYDQQLQAGDNPYLRYNHADAEFQERLQEDTSFGGNLGRAVFQAKKRVLEPLGLVEEGAKTAPGKKRPVEPSPQRSPDSSTGIGKKGQQPARKRLNFGQTGDSESVPDPQPLGEPPAAPSGVGPNTMAAGGGAPMADNNEGADGVGSSSGNWHCDSTWLGDRVITTSTRTWALPTYNNHLYKQISNGTSGGATNDNTYFGYSTPWGYFDFNRFHCHFSPRDWQRLINNNWGFRPKRLSFKLFNIQVKEVTQNEGTKTIANNLTSTIQVFTDSEYQLPYVLGSAHQGCLPPFPADVFTIPQYGYLTLNNGSQAVGRSSFYCLEYFPSQMLRTGNNFQFTYTFEDVPFHSSYAHSQSLDRLMNPLIDQYLYYLSRIQTTGGTANTQTLGFSQGGPNTMANQAKNWLPGPCYRQQRVSTTTGQNNNSNFAWTAGTKYHLNGRNSLANPGIAMATHKDDEERFFPSNGILIFGKQNAARDNADYSDVMPTSEEEIKTTNPVATEEYGIVADNLQQQNTAPQIGTVNSQGALPGMVWQNRDVYLQGPIWAKIPHTDGNFHPSPLMGGFGLKHPPPQILIKNTPVPADPPTTFNQSKLNSFITQYSTGQVSVEIEWELQKENSKRWNPEIQYTSNYYKSTSVDFAVNTEGVYSEPRPIGARYLTRNL

SEQ ID NO: 3105 - protein, 738 aa, Artificial Sequence
  source: /note="Description of Artificial Sequence: Synthetic polypeptide"
MAADGYLPDWLEDNLSEGIREWWALKPGAPKPKANQQKQDDGRGLVLPGYKYLGPFNGLDKGESVNAADAAALEHDKAYDQQLQAGDNPYLRYNHADAEFQERLQEDTSFGGNLGRAVFQAKKRVLEPLGLVEEGAKTAPGKKRPVEPSPQRSPDSSTGIGKKGQQPARKRLNFGQTGDSESVPDPQPLGEPPAAPSGVGPNTMAAGGGAPMADNNEGADGVGSSSGNWHCDSTWLGDRVITTSTRTWALPTYNNHLYKQISNGTSGGATNDNTYFGYSTPWGYFDFNRFHCHFSPRDWQRLINNNWGFRPKRLSFKLFNIQVKEVTQNEGTKTIANNLTSTIQVFTDSEYQLPYVLGSAHQGCLPPFPADVFTIPQYGYLTLNNGSQAVGRSSFYCLEYFPSQMLRTGNNFQFTYTFEDVPFHSSYAHSQSLDRLMNPLIDQYLYYLSRIQTTGGTANTQTLGFSQGGPNTMANQAKNWLPGPCYRQQRVSTTTGQNNNSNFAWTAGTKYHLNGRNSLANPGIAMATHKDDEERFFPSNGILIFGKQNAARDNADYSDVMPTSEEEIKTTNPVATEEYGIVADNLQQQNTAPQIGTVNSQGALPGMVWQNRDVYLQGPIWAKIPHTDGNFHPSPLMGGFGLKHPPPQILIKNTPVPADPPTTFNQSKLNSFITQYSTGQVSVEIEWELQKENSKRWNPEIQYTSNYYKSTSVDFAVNTEGVYSEPRPIGTRYLTRNL

SEQ ID NO: 3106 - protein, 738 aa, Artificial Sequence
  source: /note="Description of Artificial Sequence: Synthetic polypeptide"
MAADGYLPDWLEDNLSEGIREWWALKPGAPKPKANQQKQDDGRGLVLPGYKYLGPFNGLDKGEPVNAADAAALEHDKAYDQQLQAGDNPYLRYNHADAEFQERLQEDTSFGGNLGRAVFQAKKRVLEPLGLVEEGAKTAPGKKRPVEPSPQRSPDSSTGIGKKGQQPARKRLNFGQTGDSESVPDPQPLGEPPAAPSGVGPNTMAAGGGAPMADNSEGADGVGSSSGNWHCDSTWLGDRVITTSTRTWALPTYNNHLYKQISNGTSGGATNDNTYFGYSTPWGYFDFNRFHCHFSPRDWQRLINNNWGFRPKRLSFKLFNIQVKEVTQNEGTKTIANNLTSTIQVFTDSEYQLPYVLGSAHQGCLPPFPADVFTIPQYGYLTLNNGSQAVGRSSFYCLEYFPSQMLRTGNNFQFTYTFEDVPFHSSYAHSQSLDRLMNPLIDQYLYYLSRIQTTGGTANTQTLGFSQGGPNTMANQAKNWLPGPCYRQQRVSTTTGQNNNSNFAWTAGTKYHLNGRNSLANPGIAMATHKDDEERFFPSNGILIFGKQNAARDNADYSDVMPTSEEEIKTTNPVATEEYGIVADNLQQQNTAPQIGTVNSQGALPGMVWQNRDVYLQGPIWAKIPHTDGNFHPSPLMGGFGLKHPPPQILIKNTPVPADPPTTFNQSKLNSFITQYSTGQVSVEIEWELQKENSKRWNPEIQYTSNYYKSTSVDFAVNTEGVYSEPRPIGTRYLTRNL

SEQ ID NO: 3107 - protein, 738 aa, Artificial Sequence
  source: /note="Description of Artificial Sequence: Synthetic polypeptide"
MAADGYLPDWLEDNLSEGIREWWALKPGAPKPKANQQKQDDGRGLVLPGYKYLGPFNGLDKGEPVNAADAAALEHDKAYDQQLQAGDNPYLRYNHADAEFQERLQEDTSFGGNLGRAVFQAKKRVLEPLGLVEEGAKTAPGKKRPVEPSPQRSPDSSTGIGKKGQQPARKRLNFGQTGDSESVPDPQPLGEPPAAPSGVGPNTMAAGGGAPMADNNEGADGVGSSSGNWHCDSTWLGDRVITTSTRTWALPTYNNHLYKQISNGTSGGATNDNTYFGYSTPWGYFDFNRFHCHFSPRDWQRLINNNWGFRPKRLSFKLFNIQVKEVTQNEGTKTIANNLTSTIQVFTDSEYQLPYVLGSAHQGCLPPFPADVFTIPQYGYLTLNNGSQAVGRSSFYCLEYFPSQMLRTGNNFQFTYTFEDVPFHSSYAHSQSLDRLMNPLIDQYLYYLSRIQTTGGTANTQTLGFSQGGPNTMANQAKNWLPGPCYRQQRVSTTTGQNNNSNFAWTAGTKYHLNGRNSLANPGIAMATHKDDEERFFPSNGILIFGKQNAARDNADYGDVMPTSEEEIKTTNPVATEEYGIVADNLQQQNTAPQIGTVNSQGALPGMVWQNRDVYLQGPIWAKIPHTDGNFHPSPLMGGFGLKHPPPQILIKNTPVPADPPTTFNQSKLNSFITQYSTGQVSVEIEWELQKENSKRWNPEIQYTSNYYKSTSVDFAVNTEGVYSEPRPIGTRYLTRNL

SEQ ID NO: 3108 - protein, 738 aa, Artificial Sequence
  source: /note="Description of Artificial Sequence: Synthetic polypeptide"
MAADGYLPDWLEDNLSEGIREWWALKPGAPKPKANQQKQDDGRGLVLPGYKYLGPFNGLDKGEPVNAADAAALEHDKAYDQQLQAGDNPYLRYNHADAEFQERLQEDTSFGGNLGRAVFQAKKRVLEPLGLVEEGAKTAPGKRRPVEPSPQRSPDSSTGIGKKGQQPARKRLNFGQTGDSESVPDPQPLGEPPAAPSGVGPNTMAAGGGAPMADNNEGADGVGSSSGNWHCDSTWLGDRVITTSTRTWALPTYNNHLYKQISNGTSGGATNDNTYFGYSTPWGYFDFNRFHCHFSPRDWQRLINNNWGFRPKRLSFKLFNIQVKEVTQNEGTKTIANNLTSTIQVFTDSEYQLPYVLGSAHQGCLPPFPADVFTIPQYGYLTLNNGSQAVGRSSFYCLEYFPSQMLRTGNNFQFTYTFEDVPFHSSYAHSQSLDRLMNPLIDQYLYYLSRIQTTGGTANTQTLGFSQGGPNTMANQAKNWLPGPCYRQQRVSTTTGQNNNSNFAWTAGTKYHLNGRNSLANPGIAMATHKDDEERFFPSNGILIFGKQNAARDNADYSDVMPTSEEEIKTTNPVATEEYGIVADNLQQQNTAPQIGTVNSQGALPGMVWQNRDVYLQGPIWAKIPHTDGNFHPSPLMGGFGLKHPPPQILIKNTPVPADPPTTFNQSKLNSFITQYSTGQVSVEIEWELQKENSKRWNPEIQYTSNYYKSTSVDFAVNTEGVYSEPRPIGTRYLTRNL

SEQ ID NO: 3109 - protein, 738 aa, Artificial Sequence
  source: /note="Description of Artificial Sequence: Synthetic polypeptide"
MAADGYLPDWLEDNLSEGIREWWALKPGAPKPKANQQKQDDGRGLVLPGYKYLGPFNGLDKGEPVNAADAAALEHDKAYDQQLQAGDNPYLRYNHADAEFQERLQEDTSFGGNLGRAVFQAKKRVLEPLGLVEEGAKTAPGKKRPVEPSPQRSPDSSTGIGKKGQQPARKRLNFGQTGDSESVPDPQPLGEPPAAPSGVGPNTMAAGGGAPMADNNEGADGVGSSSGNWHCDSTWLGDRVITTSTRTWALPTYNNHLYKQISNGTSGGATNDNTYFGYSTPWGYFDFNRFHCHFSPRDWQRLINNNWGFRPKRLSFKLFNIQVKEVTQNEGTKTIANNLTSTIQVFTDSEYQLPYVLGSAHQGCLPPFPADVFTIPQYGYLTLNNGSQAVGRSSFYCLEYFPSQMLRTGNNFQFTYTFEDVPFHSSYAHSQSLDRLMNPLIDQYLYYLSRIQTTGGTANTQTLGFSQGGPNTMANQAKNWLPGPCYRQQRVPTTTGQNNNSNFAWTAGTKYHLNGRNSLANPGIAMATHKDDEERFFPSNGILIFGKQNAARDNADYSDVMPTSEEEIKTTNPVATEEYGIVADNLQQQNTAPQIGTVNSQGALPGMVWQNRDVYLQGPIWAKIPHTDGNFHPSPLMGGFGLKHPPPQILIKNTPVPADPPTTFNQSKLNSFITQYSTGQVSVEIEWELQKENSKRWNPEIQYTSNYYKSTSVDFAVNTEGVYSEPRPIGTRYLTRNL

SEQ ID NO: 3110 - protein, 738 aa, Artificial Sequence
  source: /note="Description of Artificial Sequence: Synthetic polypeptide"
MAADGYLPDWLEDNLSEGIREWWALKPGAPKPKANQQKQDDGRGLVLPGYKYLGPFNGLDKGEPVNAADAAALEHDKAYDQQLQAGDNPYLRYNHADAEFQERLQEDTSFGGNLGRAVFQAKKRVLEPLGLVEEGAKTAPGKKRPVEPSPQRSPDSSTGIGKKGQQPARKRLNFGQTGDSESVPDPQPLGEPPAAPSGVGPNTMAAGGGAPMADNNEGADGVGSSSGNWHCDSTWLGDRVITTSTRTWALPTYNNHLYKQISNGTSGGATNDNTYFGYSTPWGYFDFNRFHCHFSPRDWQRLINNNWGFRPKRLSFKLFNIQVKEVTQNEGTKTIANNLTSTIQVFTDSEYQLPYVLGSAHQGCLPPFPADVFTIPQYGYLTLNNGSQAVGRSSFYCLEYFPSQMLRTGNNFQFTYTFEDVPFHSSYAHSQSLDRLMNPLIDQYLYYLSRIQTTGGTANTQTLGFSQGGPNTMANQAKNWLPGPCYRQQRVSTTTGQNNNSNFAWTAGTKYHLNGRNSLANPGIAMATHKDDEERFFPSNGILIFGKQNAARDNADYSDVMPTSEEEIKTTNPVATEEYGIVADNLQQQNTAPQIGTVNSQGALPGMVWQNRDVYLQGPIWAKIPHTDGNFHPSPLMGGFGLKHPPPQILIKNTPVPADPPTTFNQSKLNSFITQYSTGQVSVEIEWELQKENSKRWNPEIQYTSNYYKSTSVDFAVNTEGVYSEPRPIGTRYLTRNL

SEQ ID NO: 3111 - protein, 738 aa, Artificial Sequence
  source: /note="Description of Artificial Sequence: Synthetic polypeptide"
MAADGYLPDWLEDNLSEGIREWWALKPGAPKPKANQQKQDDGRGLVLPGYKYLGPFNGLDKGEPVNAADAAALEHDKAYDQQLQAGDNPYLRYNHADAEFQERLQEDTSFGGNLGRAVFQAKKRVLEPLGLVEEGAKTAPGKKRPVEPSPQRSPDSSTGIGKKGQQPARKRLNFGQTGDSESVPDPQPLGEPPAAPSGVGPNTMAAGGGAPMADNNEGADGVGSSSGNWHCDSTWLGDRVITTSTRTWALPTYNNHLYKQISNGTSGGATNDNTYFGYSTPWGYFDFNRFHRHFSPRDWQRLINNNWGFRPKRLSFKLFNIQVKEVTQNEGTKTIANNLTSTIQVFTDSEYQLPYVLGSAHQGCLPPFPADVFTIPQYGYLTLNNGSQAVGRSSFYCLEYFPSQMLRTGNNFQFTYTFEDVPFHSSYAHSQSLDRLMNPLIDQYLYYLSRIQTTGGTANTQTLGFSQGGPNTMANQAKNWLPGPCYRQQRVSTTTGQNNNSNFAWTAGTKYHLNGRNSLANPGIAMATHKDDEERFFPSNGILIFGKQNAARDNADYSDVMPTSEEEIKTTNPVATEEYGIVADNLQQQNTAPQIGTVNSQGALPGMVWQNRDVYLQGPIWAKIPHTDGNFHPSPLMGGFGLKHPPPQILIKNTPVPADPPTTFNQSKLNSFITQYSTGQVSVEIEWELQKENSKRWNPEIQYTSNYYKSTSVDFAVNTEGVYSEPRPIGTRYLTRNL

SEQ ID NO: 3112 - protein, 738 aa, Artificial Sequence
  source: /note="Description of Artificial Sequence: Synthetic polypeptide"
MAADGYLPDWLEDNLSEGIREWWALKPGAPKPKANQQKQDDGRGLVLPGYKYLGPFNGLDKGEPVNAADAAALEHDKAYDQQLQAGDNPYLRYNHADAEFQERLQEDTSFGGNLGRAVFQAKKRVLEPLGLVEEGAKTAPGKKRPVEPSPQRSPDSSTGIGKKGQQPARKRLNFGQTGDSESVPDPQPLGEPPAAPSGVGPNTMAAGGGAPMADNNEGADGVGSSSGNWHCDSTWLGDRVITTSTRTWALPTYNNHLYKQISNGTSGGATNDNTYFGYSTPWGYFDFNRFHCHFSPRDWQRLINNNWGFRPKRLSFKLFNIQVKEVTQNEGTKTIANNLTSTIQVFTDSECQLPYVLGSAHQGCLPPFPADVFTIPQYGYLTLNNGSQAVGRSSFYCLEYFPSQMLRTGNNFQFTYTFEDVPFHSSYAHSQSLDRLMNPLIDQYLYYLSRIQTTGGTANTQTLGFSQGGPNTMANQAKNWLPGPCYRQQRVSTTTGQNNNSNFAWTAGTKYHLNGRNSLANPGIAMATHKDDEERFFPSNGILIFGKQNAARDNADYSDVMPTSEEEIKTTNPVATEEYGIVADNLQQQNTAPQIGTVNSQGALPGMVWQNRDVYLQGPIWAKIPHTDGNFHPSPLMGGFGLKHPPPQILIKNTPVPADPPTTFNQSKLNSFITQYSTGQVSVEIEWELQKENSKRWNPEIQYTSNYYKSTSVDFAVNTEGVYSEPRPIGTRYLTRNL

SEQ ID NO: 3113 - protein, 738 aa, Artificial Sequence
  source: /note="Description of Artificial Sequence: Synthetic polypeptide"
MAADGYLPDWLEDNLSEGIREWWALKPGAPKPKANQQKQDDGRGLVLPGYKYLGPFNGLDKGEPVNAADAAALEHDKAYDQQLQAGDNPYLRYNHADAEFQERLQEDTSFGGNLGRAVFQAKKRVLEPLGLVEEGAKTAPGKKRPVEPSPQRSPDSSTGIGKKGQQPARKRLNFGQTGDSESVPDPQPLGEPPAAPSGVGPNTMAAGGGAPMADNNEGADGVGSSSGNWHCDSTWLGDRVITTSTRTWALPTYNNHLYKQISNGTSGGATNDNAYFGYSTPWGYFDFNRFHCHFSPRDWQRLINNNWGFRPKRLSFKLFNIQVKEVTQNEGTKTIANNLTSTIQVFTDSEYQLPYVLGSAHQGCLPPFPADVFTIPQYGYLTLNNGSQAVGRSSFYCLEYFPSQMLRTGNNFQFTYTFEDVPFHSSYAHSQSLDRLMNPLIDQYLYYLSRIQTTGGTANTQTLGFSQGGPNTMANQAKNWLPGPCYRQQRVSTTTGQNNNSNFAWTAGTKYHLNGRNSLANPGIAMATHKDDEERFFPSNGILIFGKQNAARDNADYSDVMPTSEEEIKTTNPVATEEYGIVADNLQQQNTAPQIGTVNSQGALPGMVWQNRDVYLQGPIWAKIPHTDGNFHPSPLMGGFGLKHPPPQILIKNTPVPADPPTTFNQSKLNSFITQYSTGQVSVEIEWELQKENSKRWNPEIQYTSNYYKSTSVDFAVNTEGVYSEPRPIGTRYLTRNL

SEQ ID NO: 3114 - protein, 738 aa, Artificial Sequence
  source: /note="Description of Artificial Sequence: Synthetic polypeptide"
MAADGYLPDWLEDNLSEGIREWWALKPGAPKPKANQQKQDDGRGLVLPGYKYLGPFNGLDKGEPVNAADAAALEHDKAYDQQLQAGDNPYLRYNHADAEFQERLQEDTSFGGNLGRAVFQAKKRVLEPLGLVEEGAKTAPGKKRPVEPSPQRSPDSSTGIGKKGQQPARKRLNFGQTGDSESVPDPQPLGEPPAAPSGVGPNTMAAGGGAPMADNNEGADGVGSSSGNWHCDSTWLGDRVITTSTRTWALPTYNNHLYKQISNGTSGGATNDNTYFGYSTPWGYFDFNRFHCHFSPRDWQRLINNNWGFRPKRLSFKLFNIQVKEVTQNEGTKTIANNLTSTIQVFTDSEYQLPYVLGSAHQGCLPPFPADVFTIPQYGYLTLNNGSQAVGRSSFYCLEYFPSQMLRTGNNFQFTYTFEDVPFHSSYAHSQSLDRLMNPLIDQYLYYLSRIQTTGGTANTQTLGFSQGGPNTMANQAKNWLPGPCYRQQRVSTTTGQNNNSNFAWTAGTKYHLNGRNSLANPGIAMATHKDDEERFFPSNGILIFGKQNAARGNADYSDVMPTSEEEIKTTNPVATEEYGIVADNLQQQNTAPQIGTVNSQGALPGMVWQNRDVYLQGPIWAKIPHTDGNFHPSPLMGGFGLKHPPPQILIKNTPVPADPPTTFNQSKLNSFITQYSTGQVSVEIEWELQKENSKRWNPEIQYTSNYYKSTSVDFAVNTEGVYSEPRPIGTRYLTRNL

SEQ ID NO: 3115 - protein, 738 aa, Artificial Sequence
  source: /note="Description of Artificial Sequence: Synthetic polypeptide"
MAADGYLPDWLEDNLSEGIREWWALKPGAPKPKANQQKQDDGRGLVLPGYKYLGPFNGLDKGEPVNAADAAALEHDKAYDQQLQAGDNPYLRYNHADAEFQERLQEDTSFGGNLGRAVFQAKKRVLEPLGLVEEGAKTAPGKKRPVEPSPQRSPDSSTGIGKKGQQPARKRLNFGQTGDSESVPDPQPLGEPPAAPSGVGPNTMAAGGGAPMADNNEGADGVGSSSGNWHCDSTWLGDRVITTSTRTWALPTYNNHLYKQISNGTSGGATNDNTYFGYSTPWGYFDFNRFHCHFSPRDWQRLINNNWGFRPKRLSFKLFNIQVKEVTQNEGTKTIANNLTSTIQVFTDSEYQLPYVLGSAHQGCLPPFPADVFTIPQYGYLTLNNGSQAVGRSSFYCLEYFPSQMLGTGNNFQFTYTFEDVPFHSSYAHSQSLDRLMNPLIDQYLYYLSRIQTTGGTANTQTLGFSQGGPNTMANQAKNWLPGPCYRQQRVSTTTGQNNNSNFAWTAGTKYHLNGRNSLANPGIAMATHKDDEERFFPSNGILIFGKQNAARDNADYSDVMPTSEEEIKTTNPVATEEYGIVADNLQQQNTAPQIGTVNSQGALPGMVWQNRDVYLQGPIWAKIPHTDGNFHPSPLMGGFGLKHPPPQILIKNTPVPADPPTTFNQSKLNSFITQYSTGQVSVEIEWELQKENSKRWNPEIQYTSNYYKSTSVDFAVNTEGVYSEPRPIGTRYLTRNL

SEQ ID NO: 3116 - protein, 738 aa, Artificial Sequence
  source: /note="Description of Artificial Sequence: Synthetic polypeptide"
MAADGYLPDWLEDNLSEGIREWWALKPGAPKPKANQQKQDDGRGLVLPGYKYLGPFNGLDKGEPVNAADAAALEHDKAYDQQLQAGDNPHLRYNHADAEFQERLQEDTSFGGNLGRAVFQAKKRVLEPLGLVEEGAKTAPGKKRPVEPSPQRSPDSSTGIGKKGQQPARKRLNFGQTGDSESVPDPQPLGEPPAAPSGVGPNTMAAGGGAPMADNNEGADGVGSSSGNWHCDSTWLGDRVITTSTRTWALPTYNNHLYKQISNGTSGGATNDNTYFGYSTPWGYFDFNRFHCHFSPRDWQRLINNNWGFRPKRLSFKLFNIQVKEVTQNEGTKTIANNLTSTIQVFTDSEYQLPYVLGSAHQGCLPPFPADVFTIPQYGYLTLNNGSQAVGRSSFYCLEYFPSQMLRTGNNFQFTYTFEDVPFHSSYAHSQSLDRLMNPLIDQYLYYLSRIQTTGGTANTQTLGFSQGGPNTMANQAKNWLPGPCYRQQRVSTTTGQNNNSNFAWTAGTKYHLNGRNSLANPGIAMATHKDDEERFFPSNGILIFGKQNAARDNADYSDVMPTSEEEIKTTNPVATEEYGIVADNLQQQNTAPQIGTVNSQGALPGMVWQNRDVYLQGPIWAKIPHTDGNFHPSPLMGGFGLKHPPPQILIKNTPVPADPPTTFNQSKLNSFITQYSTGQVSVEIEWELQKENSKRWNPEIQYTSNYYKSTSVDFAVNTEGVYSEPRPIGTRYLTRNL

SEQ ID NO: 3117 - protein, 738 aa, Artificial Sequence
  source: /note="Description of Artificial Sequence: Synthetic polypeptide"
MAADGYLPDWLEDNLSEGIREWWALKPGAPKPKANQQKQDDGRGLVLPGYKYLGPFNGLDKGEPVNAADAAALEHDKAYDQQLQAGDNPYLRYNHADAEFQERLQEDTSFGGNLGRAVFQAKKRVLEPLGLVEEGAKTAPGKKRPVEPSPQRSPDSSTGIGKKGQQPARKRLNFGQTGDSESVPDPQPLGEPPAAPSGVGPNTMAAGGGAPMADNNEGADGVGSSSGNWHCDSTWLGDRVITTSTRTWALPTYNNHLYKQISNGTSGGATNDNTYFGYSTPWGYFDFNRFHCHFSPRDWQRLINNNWGFRPKRLSFKLFNIQVKEVTQNEGTKTIANNLTSTIQVFTDSEYQLPYVLGPAHQGCLPPFPADVFTIPQYGYLTLNNGSQAVGRSSFYCLEYFPSQMLRTGNNFQFTYTFEDVPFHSSYAHSQSLDRLMNPLIDQYLYYLSRIQTTGGTANTQTLGFSQGGPNTMANQAKNWLPGPCYRQQRVSTTTGQNNNSNFAWTAGTKYHLNGRNSLANPGIAMATHKDDEERFFPSNGILIFGKQNAARDNADYSDVMPTSEEEIKTTNPVATEEYGIVADNLQQQNTAPQIGTVNSQGALPGMVWQNRDVYLQGPIWAKIPHTDGNFHPSPLMGGFGLKHPPPQILIKNTPVPADPPTTFNQSKLNSFITQYSTGQVSVEIEWELQKENSKRWNPEIQYTSNYYKSTSVDFAVNTEGVYSEPRPIGTRYLTRNL

SEQ ID NO: 3118 - protein, 738 aa, Artificial Sequence
  source: /note="Description of Artificial Sequence: Synthetic polypeptide"
MAADGYLPDWLEDNLSEGIREWWALKPGAPKPKANQQKQDDGRGLVLPGYKYLGPFNGLDKGEPVNAADAAALEHDKAYDQQLQAGDNPYLRYNHADAEFQERLQEDTSFGGNLGRAVFQAKKRVLEPLGLVGEGAKTAPGKKRPVEPSPQRSPDSSTGIGKKGQQPARKRLNFGQTGDSESVPDPQPLGEPPAAPSGVGPNTMAAGGGAPMADNNEGADGVGSSSGNWHCDSTWLGDRVITTSTRTWALPTYNNHLYKQISNGTSGGATNDNTYFGYSTPWGYFDFNRFHCHFSPRDWQRLINNNWGFRPKRLSFKLFNIQVKEVTQNEGTKTIANNLTSTIQVFTDSEYQLPYVLGSAHQGCLPPFPADVFTIPQYGYLTLNNGSQAVGRSSFYCLEYFPSQMLRTGNNFQFTYTFEDVPFHSSYAHSQSLDRLMNPLIDQYLYYLSRIQTTGGTANTQTLGFSQGGPNTMANQAKNWLPGPCYRQQRVSTTTGQNNNSNFAWTAGTKYHLNGRNSLANPGIAMATHKDDEERFFPSNGILIFGKQNAARDNADYSDVMPTSEEEIKTTNPVATEEYGIVADNLQQQNTAPQIGTVNSQGALPGMVWQNRDVYLQGPIWAKIPHTDGNFHPSPLMGGFGLKHPPPQILIKNTPVPADPPTTFNQSKLNSFITQYSTGQVSVEIEWELQKENSKRWNPEIQYTSNYYKSTSVDFAVNTEGVYSEPRPIGTRYLTRNL

SEQ ID NO: 3119 - protein, 738 aa, Artificial Sequence
  source: /note="Description of Artificial Sequence: Synthetic polypeptide"
MAADGYLPDWLEDNLSEGIREWWALKPGAPKPKANQQKQDDGRGLVLPGYKYLGPFNGLDKGEPVNAADAAALEHDKAYDQQLQAGDNPYLRYNHADAEFQERLQEDTSFGGNLGRAVFQAKKRVLEPLGLVEEGAKTAPGKKRPVEPSPQRSPDSSTGIGKKGQQPARKRLNFGQTGDSESVPDPQPLGEPPAAPSGVGPNTMAAGGGAPMADNNEGADGVGSSSGNWHCDSTWLGDRVITTSTRTWALPTYNNHLYKQISNGTSGGATNDNTYFGYSTPWGYFDFNRFHCHFSPRDWQRLINNNWGFRPKRLSFKLFNIQVKEVTQNEGTKTIANNLTSTIQVFTDSEYQLPYVLGSAHQGCLPPFPADVFTIPQYGYLTLNNGSQAVGRSSFYCLEYFPSQMLRTGNNFQFTYTFEDVPFHSSYAHSQSLDRLMNPLIDQYLYYLSRIQTTGGTANTQTLGFSQGGPNTMANQAKNWLPGPCYRQQRVSTTTGQNNNSNFAWTAGTKYHLNGRNSLANPGIAMATHKDDEERFFPSNGILIFGKQNAARDNADYSDVMPTSEEEIKTTNPVATEEYGIVADNLQQQNTAPQIGTVNSQGALPGMVWQNRDVYLQGPIWAKIPHTDGNFHPSPLMGGFGLKHPPPQILIKNTPVPADPPTTFNQSKLNSFITQYSTGQVSVEIEWELQKESSKRWNPEIQYTSNYYKSTSVDFAVNTEGVYSEPRPIGTRYLTRNL

SEQ ID NO: 3120 - protein, 738 aa, Artificial Sequence
  source: /note="Description of Artificial Sequence: Synthetic polypeptide"
MAADGYLPDWLEDNLSEGIREWWALKPGAPKPKANQQKQDDGRGLVLPGYKYLGPFNGLDKGEPVNAADAAALEHDKAYDQQLQAGDNPYLRYNHADAEFQERLQEDTSFGGNLGRAVFQAKKRVLEPLGLVEEGAKTAPGKKRPVEPSPQRSPDSSTGIGKKGQQPARKRLNFGQTGDSESVPDPQPLGEPPAAPSGVGPNTMAAGGGAPMADNNEGADGVGSSSGNWHCDSTWLGDRVITTSTRTWALPTYNNHLYKQISNGTSGGATNDNTYFGYSTPWGYFDFNRFHCHFSPRDWQRLINNNWGFRPKRLSFKLFNIQVKEVTQNEGTKTIANNLTSTIQVFTDSEYQLPYVLGSAHQGCLPPFPADVFTIPQYGYLTLNNGSQAVGRSSFYCLEYFPSQMLRTGNNFQFTYTFEDVPFHSSYAHSQSLDRLMNPLIDQYLYYLSRIQTTGGTANTQTLGFSQGGPNTMANQAKNWLPGPCYRQQRVSTTTGQNNNSNFAWTAGTKYHLNGRNSLANPGIAMATHKDDEERFFPSNGILIFGKQNAARDNADYSDVMPASEEEIKTTNPVATEEYGIVADNLQQQNTAPQIGTVNSQGALPGMVWQNRDVYLQGPIWAKIPHTDGNFHPSPLMGGFGLKHPPPQILIKNTPVPADPPTTFNQSKLNSFITQYSTGQVSVEIEWELQKENSKRWNPEIQYTSNYYKSTSVDFAVNTEGVYSEPRPIGTRYLTRNL

SEQ ID NO: 3121 - protein, 738 aa, Artificial Sequence
  source: /note="Description of Artificial Sequence: Synthetic polypeptide"
MAADGYLPDWLEDNLSEGIREWWALKPGAPKPKANQQKQDDGRGLVLPGYKYLGPFNGLDKGEPVNAADAAALEHDKAYDQQLQAGDNPYLRYNHADAEFQERLQEDTSFGGNLGRAVFQAKKRVLEPLGLVEEGAKTAPGKKRPVEPSPQRSPDSSTGIGKKGQQPARKRLNFGQTGDSESVPDPQPLGEPPAAPSGVGPNTMAAGGGAPMADNNEGADGVGSSSGNWHCDSTWLGDRVITTSTRTWALPTYNNHLYKQISNGTSGGATNDNTYFGYSTPWGYFDFNRFHCHFSPRDWQRLINNNWGFRPKRLSFKLFNIQVKEVTQNEGTKTIANNLTSTIQVFTDSEYQLPYVLGSAHQGCLPPFPADVLTIPQYGYLTLNNGSQAVGRSSFYCLEYFPSQMLRTGNNFQFTYTFEDVPFHSSYAHSQSLDRLMNPLIDQYLYYLSRIQTTGGTANTQTLGFSQGGPNTMANQAKNWLPGPCYRQQRVSTTTGQNNNSNFAWTAGTKYHLNGRNSLANPGIAMATHKDDEERFFPSNGILIFGKQNAARDNADYSDVMPTSEEEIKTTNPVATEEYGIVADNLQQQNTAPQIGTVNSQGALPGMVWQNRDVYLQGPIWAKIPHTDGNFHPSPLMGGFGLKHPPPQILIKNTPVPADPPTTFNQSKLNSFITQYSTGQVSVEIEWELQKENSKRWNPEIQYTSNYYKSTSVDFAVNTEGVYSEPRPIGTRYLTRNL

SEQ ID NO: 3122 - protein, 738 aa, Artificial Sequence
  source: /note="Description of Artificial Sequence: Synthetic polypeptide"
MAADGYLPDWLEDNLSEGIREWWALKPGAPKPKANQQKQDDGRGLVLPGYKYLGPFNGLDKGEPVNAADAAALEHDKAYDQQLQAGDNPYLRYNHADAEFQERLQEDTSFGGNLGRAVFQAKKRVLEPLGLVEEGAKTAPGKKRPVEPSPQRSPDSSTGIGKKGQQPARKRLNFGQTGDSESVPDPQPLGEPPAAPSGVGPNTMAAGGGAPMADNNEGADGVGSSSGNWHCDSTWLGDRVITTSTRTWALPTYNNHLYKQISNGTSGGATNDNTYFGYSTPWGYFDFNRFHCHFSPRDWQRLINNNWGFRPKRLSFKLFNIQVKEVTQNEGTKTIANNLTSTIRVFTDSEYQLPYVLGSAHQGCLPPFPADVFTIPQYGYLTLNNGSQAVGRSSFYCLEYFPSQMLRTGNNFQFTYTFEDVPFHSSYAHSQSLDRLMNPLIDQYLYYLSRIQTTGGTANTQTLGFSQGGPNTMANQAKNWLPGPCYRQQRVSTTTGQNNNSNFAWTAGTKYHLNGRNSLANPGIAMATHKDDEERFFPSNGILIFGKQNAARDNADYSDVMPTSEEEIKTTNPVATEEYGIVADNLQQQNTAPQIGTVNSQGALPGMVWQNRDVYLQGPIWAKIPHTDGNFHPSPLMGGFGLKHPPPQILIKNTPVPADPPTTFNQSKLNSFITQYSTGQVSVEIEWELQKENSKRWNPEIQYTSNYYKSTSVDFAVNTEGVYSEPRPIGTRYLTRNL

SEQ ID NO: 3123 - protein, 738 aa, Artificial Sequence
  source: /note="Description of Artificial Sequence: Synthetic polypeptide"
MAADGYLPDWLEDNLSEGIREWWALKPGAPKPKANQQKQDDGRGLVLPGYKYLGPFNGLDKGEPVNAADAAALEHDKAYDQQLQAGDNPYLRYNHADAEFQERLQEDTSFGGNLGRAVFQAKKRVLEPLGLVEEGAKTAPGKKRPVEPSPQRSPDSSTGIGKKGQQPARKRLNFGQTGDSESVPDPQPLGEPPAAPSGVGPNTMAAGGGAPMADNNEGADGVGSSSGNWHCDSTWLGDRVITTSTRTWALPTYNNHLYKQISNGTSGGATNDNTYFGYSTPWGYFDFNRFHCHFSPRDWRRLINNNWGFRPKRLSFKLFNIQVKEVTQNEGTKTIANNLTSTIQVFTDSEYQLPYVLGSAHQGCLPPFPADVFTIPQYGYLTLNNGSQAVGRSSFYCLEYFPSQMLRTGNNFQFTYTFEDVPFHSSYAHSQSLDRLMNPLIDQYLYYLSRIQTTGGTANTQTLGFSQGGPNTMANQAKNWLPGPCYRQQRVSTTTGQNNNSNFAWTAGTKYHLNGRNSLANPGIAMATHKDDEERFFPSNGILIFGKQNAARDNADYSDVMPTSEEEIKTTNPVATEEYGIVADNLQQQNTAPQIGTVNSQGALPGMVWQNRDVYLQGPIWAKIPHTDGNFHPSPLMGGFGLKHPPPQILIKNTPVPADPPTTFNQSKLNSFITQYSTGQVSVEIEWELQKENSKRWNPEIQYTSNYYKSTSVDFAVNTEGVYSEPRPIGTRYLTRNL

SEQ ID NO: 3124 - protein, 738 aa, Artificial Sequence
  source: /note="Description of Artificial Sequence: Synthetic polypeptide"
MAADGYLPDWLEDNLSEGIREWWALKPGAPKPKANQQKQDDGRGLVLPGYKYLGPFNGLDKGEPVNAADAAALEHDKAYDQQLQAGDNPYLRYNHADAEFQERLQEDTSFGGNLGRAVFQAKKRVLEPLGLVEEGAKTAPGKKRPVEPSPQRSPDSSTGIGKKGQQPARKRLNFGQTGDSESVPDPQPLGEPPAAPSGVGPNTMAAGGGAPMADNNEGADGVGSSSGNWHCDSTWLGDRVITTSTRTWALPTYNNHLYKQISNGTSGGATNDNTYFGYSTPWGYFDFNRFHCHFSPRDWQRLINNNWGFRPKRLSFKLFNIQVKEVTQNEGTKTIANNLTSTIQVFTDSEYQLPYVLGSAHQGCLPPFPADVFMIPQYGYLTLNNGSQAVGRSSFYCLEYFPSQMLRTGNNFQFTYTFEDVPFHSSYAHSQSLDRLMNPLIDQYLYYLSRTQTTGGTASTQTLGFSQGGPNTMANQAKNWLPGPCYRQQRVSTTTGQNNNSNFAWTAGTKYHLNGRNSLANPGIAMATHKDDEERFFPSNGILIFGKQNAARDNADYSDVMLTSEEEIKTTNPVATEEYGIVADNLQQQNTAPQIGTVNSQGALPGMVWQNRDVYLQGPIWAKIPHTDGNFHPSPLMGGFGLKHPPPQILIKNTPVPADPPTTFNQSKLNSFITQYSTGQVSVEIEWELQKENSKRWNPEIQYTSNYYKSTSVDFAVNTEGVYSEPRPIGTRYLTRNL

SEQ ID NO: 3125 - protein, 738 aa, Artificial Sequence; identical to SEQ ID NO: 116
  source: /note="Description of Artificial Sequence: Synthetic polypeptide"

SEQ ID NO: 3126 - protein, 738 aa, Artificial Sequence
  source: /note="Description of Artificial Sequence: Synthetic polypeptide"
MAADGYLPDWLEDNLSEGIREWWALKPGAPKPKANQQKQDDGRGQVLPGYKYLGPFNGLDKGEPVNAADAAALEHDKAYDQQLQAGDNPYLRYNHADAEFQERLQEDTSFGGNLGRAVFQAKKRVLEPLGLVEEGAKTAPGKKRPVEPSPQRSPDSSTGIGKKGQQPARKRLNFGQTGDSESVPDPQPLGEPPAAPSGVGPNTMAAGGGAPMADNNEGADGVGSSSGNWHCDSTWLGDRVITTSTRTWALPTYNNHLYKQISNGTSGGATNDNTYFGYSTPWGYFDFNRFHCHFSPRDWQRLINNNWGFRPKRLSFKLFNIQVKEVTQNEGTKTIANNLTSTIQVFTDSEYQLPYVLGSAHQGCLPPFPADVFMIPQYGYLTLNNGSQAVGRSSFYCLEYFPSQMLRTGNNFQFTYTFEDVPFHSSYAHSQSLDRLMNPLIDQYLYYLSRTQTTGGTANTQTLGFSQGGPNTMANQAKNWLPGPCYRQQRVSTTTGQNNNSNFAWTAGTKYHLNGRNSLANPGIAMATHKDDEERFFPSNGILIFGKQNAARDNADYSDVMLTSEEEIKTTNPVATEEYGIVADNLQQQNTAPQIGTVNSQGALPGMVWQNRDVYLQGPVWAKIPHTDGNFHPSPLMGGFGLKHPPPQILIKNTPVPADPPTTFNQSKLNSFITQYSTGQVSVEIEWELQKENSKRWNPEIQYTSNYYKSTSVDFAVNTEGVYSEPRPIGTRYLTRNL

SEQ ID NO: 3127 - protein, 738 aa, Artificial Sequence
  source: /note="Description of Artificial Sequence: Synthetic polypeptide"
MAADGYLPDWLEDNLSEGIREWWALKPGAPKPKANQQKQDDGRGLVLPGYKYLGPFNGLDKGEPVNAADAAALEHDKAYDQQLQAGDNPYLRYNHADAEFQERLQEDTSFGGNLGRAVFQAKKRVLEPLGLVEEGAKTAPGKKRPVEPSPQRSPDSSTGIGKKGQQPARKRLNFGQTGDSESVPDPQPLGEPPAAPSGVGPNTMAAGGGAPMADNNEGADGVGSSSGNWHCDSTWLGDRVITTSTRTWALPTYNNHLYKQISNGTSGGATNDNTYFGYSTPWGYFDFNRFHCHFSPRDWQRLINSNWGFRPKRLSFKLFNIQVKEVTQNEGTKTIANNLTSTIQVFTDSEYQLPYVLGSAHQGCLPPFPADVFMIPQYGYLTLNNGSQAVGRSSFYCLEYFPSQMLRTGNNFQFTYTFEDVPFHSSYAHSQSLDRLMNPLIDQYLYYLSRTQTTGGTANTQTLGFSQGGPNTMANQAKNWLPGPCYRQQRVSTTTGQNNNSNFAWTAGTKYHLNGRNSLANPGIAMATHKDDEERFFPSNGILIFGKQNAARDNADYSDVMLTSEEEIKTTNPVATEEYGIVADNLQQQNTAPQIGTVNSQGALPGMVWQNRDVYLQGPIWAKIPHTDGNFHPSPLMGGFGLKHPPPQILIKNTPVPADPPTTFNQSKLNSFITQYSTGQVSVEIEWELQKENSKRWNPEIQYTSNYYKSTSVDFAVNTEGVYSEPRPIGTRYLTRNL

SEQ ID NO: 3128 - protein, 738 aa, Artificial Sequence
  source: /note="Description of Artificial Sequence: Synthetic polypeptide"
MAADGYLPDWLEDNLSEGIREWWALKPGAPKPKANQQKQDDGRGLVLPGYKYLGPFNGLDKGEPVNAADAAALEHDKAYDQQLQAGDNPYLRYNHADAEFQERLQEDTSFGGNLGRAVFQAKKRVLEPLGLVEEGAKTAPGKKRPVEPSPQRSPDSSTGIGKKGQQPARKRLNFGQTGDSESVPDPQPLGEPPAAPSGVGPNTMAAGGGAPMADNNEGADGVGSSSGNWHCDSTWLGDRVITTSTRTWALPTYNNHLYKQISNGTSGGATNDNTYFGYSTPWGYFDFNRFHCHFSPRDWQRLINNNWGFRPKRLSFKLFNIQVKEVTQNEGTKTIANNLTSTIQVFTDSEYQLPYVLGSAHQGCLPPFPADVFTIPQYGYLTLNNGSQAVGRSSFYCLEYFPSQMLRTGNNFQFTYTFEDVPFHSSYAHSQSLDRLMNPLIDQYLYYLSRTQTTGGTANTQTLGFSQGGPNTMANQAKNWLPGPCYRQQRVSTTTGQNNNSNFAWTAGTKYHLNGRNSLANPGIAMATHKDDEERFFPSNGILIFGKQNAARDNADYSDVMLTSEEEIKTTNPVATEEYGIVADNLQQQNTAPQIGTVNSQGALPGMVWQNRDVYLQGPIWAKIPHTDGNFHPSPLMGGFGLKHPPPQILIKNTPVPADPPTTFNQSKLNSFITQYSTGQVSVEIEWELQKENSKRWNPEIQYTSNYYKSTSVDFAVNTEGVYSEPRPIGTRYLTRNL

SEQ ID NO: 3129 - protein, 738 aa, Artificial Sequence
  source: /note="Description of Artificial Sequence: Synthetic polypeptide"
MAADGYLPDWLEDNLSEGIREWWALKPGAPKPKANQQKQDDGRGLVLPGYKYLGPFNGLDKGEPVNAADAAALEHDKAYDQQLQAGDNPYLRYNHADAEFQERLQEDTSFGGNLGRAVFQAKKRVLEPLGLVEEGAKTAPGKKRPVEPSPQRSPDSSTGIGKKGQQPARKRLNFGQTGDSESVPDPQPLGEPPAAPSGVGPNTMAAGGGAPMADNNEGADGVGSSSGNWHCDSTWLGDRVITTSTRTWALPTYNNHLYKQISNGTSGGATNDNTYFGYSTPWGYFDFNRFHCHFSPRDWQRLIDNNWGFRPKRLSFKLFNIQVKEVTQNEGTKTIANNLTSTIQVFTDSEYQLPYVLGSAHQGCLPPFPADVFMIPQYGYLTLNNGSQAVGRSSFYCLEYFPSQMLRTGNNFQFTYTFEDVPFHSSYAHSQSLDRLMNPLIDQYLYYLSRTQTTGGTANTQTLGFSQGGPNTMANQAKNWLPGPCYRQQRVSTTTGQNNNSNFAWTAGTKYHLNGRNSLANPGIAMATHKDDEERFFPSNGILIFGKQNAARDNADYSDVMLTSEEEIKTTNPVATEEYGIVADNLQQQNTAPQIGTVNSQGALPGMVWQNRDVYLQGPIWAKIPHTDGNFHPSPLMGGFGLKHPPPQILIKNTPVPADPPTTFNQSKLNSFITQYSTGQVSVEIEWELQKENSKRWNPEIQYTSNYYKSTSVDFAVNTEGVYSEPRPIGTRYLTRNL

SEQ ID NO: 3130 - protein, 738 aa, Artificial Sequence
  source: /note="Description of Artificial Sequence: Synthetic polypeptide"
MAADGYLPDWLEDNLSEGIREWWALKPGAPKPKANQQKQDDGRGLVLPGYKYLGPFNGLDKGEPVNAADAAALEHDKAYDQQLQAGDNPYLRYNHADAEFQERLQEDTSFGGNLGRAVFQAKKRVLEPLGLVEEGAKTAPGKKRPVEPSPQRSPDSSTGIGKKGQQPARKRLNFGQTGDSESVPDPQPLGEPPAAPSGVGPNTMAAGGGAPMADNNEGADGVGSSSGNWHCDSTWLGDRVITTSTRTWALPAYNNHLYKQISNGTSGGATNDNTYFGYSTPWGYFDFNRFHCHFSPRDWQRLINNNWGFRPKRLSFKLFNIQVKEVTQNEGTKTIANNLTSTIQVFTDSEYQLPYVLGSAHQGCLPPFPADVFTIPQYGYLTLNNGSQAVGRSSFYCLEYFPSQMLRTGNNFQFTYTFEDVPFHSSYAHSQSLDRLMNPLIDQYLYYLSRTQTTGGTANTQTLGFSQGGPNTMANQAKNWLPGPCYRQQRVSTTTGQNNNSNFAWTAGTKYHLNGRNSLANPGIAMATHKDDEERFFPSNGILIFGKQNAARDNADYSDVMLTSEEEIKTTNPVATEEYGIVADNLQQQNTAPQIGTVNSQGALPGMVWQNRDVYLQGPIWAKIPHTDGNFHPSPLMGGFGLKHPPPQILIKNTPVPADPPTTFNQSKLNSFITQYSTGQVSVEIEWELQKENSKRWNPEIQYTSNYYKSTNVDFAVNTEGVYSEPRPIGTRYLTRNL

SEQ ID NO: 3131 - protein, 738 aa, Artificial Sequence
  source: /note="Description of Artificial Sequence: Synthetic polypeptide"
MAADGYLPDWLEDNLSEGIREWWALKPGAPKPKANQQKQDDGRGLVLPGYKYLGPFNGLDKGEPVNAADAAALEHDKAYDQQLQAGDNPYLRYNHADAEFQERLQEDTSFGGNLGRAVFQAKKRVLEPLGLVEEGAKTAPGKKRPVEPSPQRSPDSSTGIGKKGQQPARKRLNFGQTGDSESVPDPQPLGEPPAAPSGVGPNTMAAGGGAPMADNNEGADGVGSSSGNWHCDSTWLGDRVITTSTRTWALPTYNNHLYKQISNGTSGGATNDNTYFGYSTPWGYFDFNRFHCHFSPRDWQRLINNNWGFRPKRLSFKLFNIQVKEVTQNEGTKTIANNLTSTIQVFTDSEYQLPYVLGSAHQGCLPPFPADVFMIPQYGYLTLNDGSQAVGRSSFYCLEYFPSQMLRTGNNFQFTYTFEDVPFHSSYAHSQSLDRLMNPLIDQYLYYLSRTQTTGGTANTQTLGFSQGGPNTMANQAKNWLPGPCYRQQRVSTTTGQNNNSNFAWTAGTKYHLNGRNSLANPGIAMATHKDDEERFFPSNGILIFGKQNAARDNADYSDVMLTSEEEIKTTNPVATEEYGIVADNLQQQNTAPQIGTVNSQGALPGMVWQNRDVYLQGPIWAKIPHTDGNFHPSPLMGGFGLKHPPPQILIKNTPVPADPPTTFNQSKLNSFITQYSTGQVSVEIEWELQKENSKRWNPEIQYTSNYYKSTSVDFAVNTEGVYSEPRPIGTRYLTRNL

SEQ ID NO: 3132 - protein, 738 aa, Artificial Sequence
  source: /note="Description of Artificial Sequence: Synthetic polypeptide"
MAADGYLPDWLEDNLSEGIREWWALKPGAPKPKANQQKQDDGRGLVLPGYKYLGPFNGLDKGEPVNAADAAALEHDKAYDQQLQAGDNPYLRYNHADAEFQERLQEDTSFGGNLGRAVFQAKKRVLEPLGLVEEGAKTAPGKKRPVEPSPQRSPDSSTGIGKKGQQPARKRLNFGQTGDSESVPDPQPLGEPPAAPSGVGPNTMAAGGGAPMADNNEGADGVGSSSGNWHCDSTWLGDRVITTSTRTWAQPTYNNHLYKQISNGTSGGATNDNTYFGYSTPWGYFDFNRFHCHFSPRDWQRLINNNWGFRPKRLSFKLFNIQVKEVTQNEGTKTIANNLTSTIQVFTDSEYQLPYVLGSAHQGCLPPFPADVFMIPQYGYLTLNNGSQAVGRSSFYCLEYFPSQMLRTGNNFQFTYTFEDVPFHSSYAHSQSLDRLMNPLIDQYLYYLSRTQTTGGTANTQTLGFSQGGPNTMANQAKNWLPGPCYRQQRVSTTTGQNNNSNFAWTAGTKYHLNGRNSLANPGIAMATHKDDEERFFPSNGILIFGKQNAARDNADYSDVMLTSEEEIKTTNPVATEEYGIVADNLQQQNTAPQIGTVNSQGALPGMVWQNRDVYLQGPIWAKIPHTDGNFHPSPLMGGFGLKHPPPQILIKNTPVPADPPTTFNQSKLNSFITQYSTGQVSVEIEWELQKENSKRWNPEIQYTSNYYKSTSVDFAVNTEGVYSEPRPIGTRYLTRNL

SEQ ID NO: 3133 - protein, 735 aa, Artificial Sequence
  source: /note="Description of Artificial Sequence: Synthetic polypeptide"
MAADGYLPDWLEDTLSEGIRQWWKLKPGPPPPKPAERHKDDSRGLVLPGYKYLGPFNGLDKGEPVNEADAAALEHDKAYDRQLDSGDNPYLKYNHADAEFQERLKEDTSFGGNLGRAVFQAKKRVLEPLGLVEEPVKTAPGKKRPVEHSPAEPDSSSGTGKAGQQPARKRLNFGQTGDADSVPDPQPLGQPPAAPSGLGTNTMATGSGAPMADNNEGADGVGNSSGNWHCDSTWMGDRVITTSTRTWALPTYNNHLYKQISSQSGASNDNHYFGYSTPWGYFDFNRFHCHFSPRDWQRLINNNWGFRPKRLSFKLFNIQVKEVTQNDGTTTIANNLTSTVQVFTDSEYQLPYVLGSAHQGCLPPFPADVFMVPQYGYLTLNNGSQAVGRSSFYCLEYFPSQMLRTGNNFTFSYTFEDVPFHSSYAHSQSLDRLMNPLIDQYLYYLSKTNAPSGTTTMSRLQFSQAGASDIRDQSRNWLPGPCYRQQRVSKTAADNNNSDYSWTGATKYHLNGRDSLVNPGPAMASHKDDEEKYFPQSGVLIFGKQGSNKTNVDIEKVMITDEEEIRTTNPVATEQYGAVSTNLQSGNTQAATSDVNTQGVLPGMVWQDRDVYLQGPIWAKIPHTDGHFHPSPLMGGFGLKHPPPQILIKNTPVPANPSTTFSAAKFASFITQYSTGQVSVEIEWELQKENSKRWNPEIQYTSNYNKSVNVDFTVDTNGVYSEPRPIGTRYLTRNL

SEQ ID NO: 3134 - protein, 735 aa, Artificial Sequence
  source: /note="Description of Artificial Sequence: Synthetic polypeptide"
MAADGYLPDWLEDTLSEGIRQWWKLKPGPPPPKPAERHKDDSRGLVLPGYKYLGPFNGLDKGEPVNEADAAALEHDKAYDRQLDSGDNPYLKYNHADAEFQERLKEDTSFGGNLGRAVFQAKKRVLEPLGLVEEPVKTAPGKKRPVEHSPAEPDSSSGTGKAGQQPARKRLNFGQTGDADSVPDPQPLGQPPAAPSGLGTNTMATGSGAPMADNNEGADGVGNSSGNWHCDSTWMGDRVITTSTRTWALPTYNNHLYKQISSQSGASNDNHYFGYSTPWGYFDFNRFHCHFSPRDWQRLINNNWGFRPKRLSFKLFNIQVKEVTQNDGTTTIANNLTSTVQVFTDSEYQLPYVLGSAHQGCLPPFPADVFMVPQYGYLTLNNGSQAVGRSSFYCLEYFPSQMLRTGNNFTFSYTFEDVPFHSSYAHSQSLDRLMNPLIDQYLYYLSKTNAPSGTTTMSRLQFSQAGASDIRDQSRNWLPGPCYRQQRVSKTAADNNNSDYSWTGATKYHLNGRDSLVNPGPAMASHKDDEEKIFPQSGVLIFGKQGSNKTNVDIEKVMITDEEEIRTTNPVATEQYGAVSTNLQSGNTQAATSDVNTQGVLPGMVWQDRDVYLQGPIWAKIPHTDGHFHPSPLMGGFGLKHPPPQILIKNTPVPANPSTTFSAAKFASFITQYSTGQVSVEIEWELQKENSKRWNPEIQYTSNYNKSVNVDFTVDTNGVYSEPRPIGTRYLTRNL

SEQ ID NO: 3135 - protein, 735 aa, Artificial Sequence
  source: /note="Description of Artificial Sequence: Synthetic polypeptide"
MAADGYLPDWLEDTLSEGIRQWWKLKPGPPPPKPAERHKDDSRGLVLPGYKYLGPFNGLDKGEPVNEADAAALEHDKAYDRQLDSGDNPYLKYNHADAEFQERLKEDTSFGGNLGRAVFQAKKRVLEPLGLVEEPVKTAPGKKRPVEHSPAEPDSSSGTGKAGQQPARKRLNFGQTGDADSVPDPQPLGQPPAAPSGLGTNTMATGSGAPMADNNEGADGVGNSSGNWHCDSTWMGDRVITTSTRTWALPTYNNHLYKQISSQSGASNDNHYFGYSTPWGYFDFNRFHCHFSPRDWQRLINNNWGFRPKRLSFKLFNIQVKEVTQNDGTTTIANNLTSTVQVFTDSEYQLPYALGSAHQGCLPPFPADVFMVPQYGYLTLNNGSQAVGRSSFYCLEYFPSQMLRTGNNFTFSYTFEDVPFHSSYAHSQSLDRLMNPLIDQYLYYLSKTNAPSGTTTMSRLQFSQAGASDIRDQSRNWLPGPCYRQQRVSKTAADNNNSDYSWTGATKYHPNGRDSLVNPGPAMASHKDDEEKYFPQSGVLIFGKQGSNKTNVDIEKVMITDEEEIRTTNPVATEQYGAVSTNLQSGNTQAATSDVNTQGVLPGMVWQDRDVYLQGPIWAKIPHTDGHSHPSPLMGGFGLKHPPPQILIKNTPVPANPSTTFSAAKFASFITQYSTGQVSVEIEWELQKENSKRWNPEIQYTSNYNKSVNVDFTVDTNGVYSEPRPIGTRYLTRNL

SEQ ID NO: 3136 - protein, 734 aa, Artificial Sequence
  source: /note="Description of Artificial Sequence: Synthetic polypeptide"
MAADGYLPDWLEDTLSEGIRQWWKLKPGPPPPKPAERHKDDSRGLVLPGYKYLGPFNGLDKGEPVNEADAAALEHDKAYDRQLDSGDNPYLKYNHADAEFQERLKEDTSFGGNLGRAVFQAKKRVLEPLGLVEEPVKTAPGKKRPVEHSPAEPDSSSGTGKAGQQPARKRLNFGQTGDADSVPDPQPLGQPPAAPSGLGTNTMATGSGAPMADNNEGADGVGNSSGNWHCDSTWMGDRVITTSTRTWALPTYNNHLYKQISSQSGASNDNHYFGYSTPWGYFDFNRFHCHFSPRDWQRLINNNWGFRPKRLSFKLFNIQVKEVTQNDGTTTIANNLTSTVQVFTDSEYQLPYVLGSAHQGCLPPFPADVFMVPQYGYLTLNNGSQAVGRSSFYCLEYFPSQMLRTGNNFTFSYTFEDVPFHSSYAHSQSLDRLMNPLIDQYLYYLSKTNAPSGTTTMSRLQFSQAGASDIRDQSRNWLPGPCYRQQRVSKTAADNNSDYSWTGATKYHLNGRDSLVNPGPAMASHKDDEEKYFPQSGVLIFGKQGSNKTNVDIEKVMITDEEEIRTTNPVATEQYGAVSTNLQSGNTQAATSDVNTQGVLPGMVWQDRDVYLQGPIWAKIPHTDGHFHPSPLMGGFGLKHPPPQILIKNTPVPANPSTTFSAAKFASFITQYSTGQVSVEIEWELQKENSKRWNPEIQYTSNYNKSVNVDFTVDTNGVYSEPRPIGTRYLTRNL

SEQ ID NO: 3137 - protein, 735 aa, Artificial Sequence
  source: /note="Description of Artificial Sequence: Synthetic polypeptide"
MAADGYLPDWLEDTLSEGIRQWWKLKPGPPPPKPAERHKDDSRGLVLPGYKYLGPFNGLDKGEPVNEADAAALEHDKAYDRQLDSGDNPYLKYNHADAEFQERLKEDTSFGGNLARAVFQAKKRVLEPLGLVEEPVKTAPGKKRPVEHSPAEPDSSSGTGKSGQQPARKRLNFGQTGDADSVPDPQPLGQPPAAPSGLGTNTMASGSGAPMADNNEGADGVGNSSGNWHCDSTWMGDRVITTSTRTWALPTYNNHLYKQISSQSGASNDNHYFGYSTPWGYFDFNRFHCHFSPRDWQRLINNNWGFRPKRLNFKLFNIQVKEVTQNDGTTTIANNLTSTVQVFTDSEYQLPYVLGSAHQGCLPPFPADVFMVPQYGYLTLNNGSQAVGRSSFYCLEYFPSQMLRTGNNFTFSYTFEDVPFHSSYAHSQSLDRLMNPLIDQYLYYLSRTNTPSGTTTQSRLQFSQAGASDIRDQSRNWLPGPCYRQQRVSKTAADNNNSDYSWTGATKYHLNGRDSLVNPGTAMASHKDDEEKYFPQSGVLIFRKQDSGKTNVDIEKVMITDEEEIRTTNPVATEQYGSVSTNLQSGNTQAATSDVNTQGVLPGMVWQDRDVYLQGPIWAKIPHTDGHFHPSPLMGGLGQKHPPPQSLIKNTPVPANPSTTFSAAKFASFITQYSTGQVSVEIEWELQKENSKRWNPEIQYTSNYNKSVNVDFTVDTNGVYSEPRPIGTRYLTRNL

SEQ ID NO: 3138 - protein, 735 aa, Artificial Sequence
  source: /note="Description of Artificial Sequence: Synthetic polypeptide"
MAADGYLPDWLEDTLSEGIRQWWKLKPGPPPPKPAERHKDDSRGLVLPGYKYLGPFNGLDKGEPVNEADAAALEHDKAYDRQLDSGDNPYLKYNHADAEFQERLKEDTSFGGNLARAVFQAKKRVLEPLGLVEEPVKTAPGKKRPVEHSPAEPDSSSGTGKSGQQPARKRLNFGQTGDADSVPDPQPLGQPPAAPSGLGTNTMASGSGAPMADNNEGADGVGNSSGNWHCDSTWMGDRVITTSTRTWALPTYNNHLYKQISSQSGASNDNHYFGYSTPWGYFDFNRFHCHFSPRDWQRLINNNWGFRPKRLNFKLFNIQVKEVTQNDGTTTIANNLTSTVQVFTDSEYQLPYVLGSAHQGCLPPFPADVFMVPQYGYLTLNNGSQAVGRSSFYCLEYFPSQMLRTGNNFTFSYTFEDVPFHSSYAHSQSLDRLMNPLIDQYLYYLSRTNTPSGTTTQSRLQFSQAGASDIRDQSRNWLPGPCYRQQRVSKTAADNNNSDYSWTGATKYHLNGRDSLVNPGTAMASHKDDEEKYFPQSGVLIFGKQDSGKTNVDIEKVMITDEEEIRTTNPVATEQYGSVSTNLQSGNTQAATSDVNTQGVLPGMVWQDRDVYLQGPIWAKIPHTDGHFHPSPLMGGLGQKHPPPQILIKNTPVPANPSTTFSAAKFASFITQYSTGQVSVEIEWELQKENSKRWNPEIQYTSNYNKSVNVDFTVDTNGVYSEPRPIGTRYLTRNL

SEQ ID NO: 3139 - protein, 735 aa, Artificial Sequence
  source: /note="Description of Artificial Sequence: Synthetic polypeptide"
MAADGYLPDWLEDTLSEGIRQWWKLKPGPPPPKPAERHKDDSRGLVLPGYKYLGPFNGLDKGEPVNEADAAALEHDKAYDRQLDSGDNPYLKYNHADAEFQERLKEDTSFGGNLARAVFQAKKRVLEPLGLVEEPVKTAPGKKRPVEHSPAEPDSSSGTGKSGQQPARKRLNFGQTGDADSVPDPQPLGQPPAAPSGLGTNTMASGSGAPMADNNEGADGVGNSSGNWHCDSTWMGDRVITTSTRTWALPTYNNHLYKQISSQSGASNDNHYFGYSTPWGYFDFNRFHCHFSPRDWQRLINNNWGFRPKRLNFKLFNIQVKEVTQNDGTTTIANNLTSTVQVFTDSEYQLPYVLGSAHQGCLPPFPADVFMVPRYGYLTLNNGSQAVGRSSFYCLEYFPSQMLRTGNNFTFSYTFEDVPFHSSYAHSQSLDRLMNPLIDQYLYYLSRTNTPSGTTTQSRLQFSQAGASDIRDQSRNWLPGPCYRQQRVSKTAADNNNSDYSWTGATKYHLNGRDSLVNPGTAMASHKDDEEKYFPQSGVLIFRKQDSGKTNVDIEKVMITDEEEIRTTNPVATEQYGSVSTNLQSGNTQAATSDVNTQGVLPGMVWQDRDVYLQGPIWAKIPHTDGHFHPSPLMGGFGLKHPPPQILIKNTPVPANPSTTFSAAKFASFITQYSTGQVSVEIEWELQKENSKRWNPEIQYTSNYNKSVNVDFTVDTNGVYSEPRPIGTRYLTRNL

SEQ ID NO: 3140 - protein, 735 aa, Artificial Sequence
  source: /note="Description of Artificial Sequence: Synthetic polypeptide"
MAADGYLPDWLEDTLSEGIRQWWKLKPGPPPPKPAERHKDDSRGLVLPGYKYLGPFNGLDKGEPVNEADAAALEHDKAYDRQLDSGDNPYLKYNHADAEFQERLKEDTSFGGNLARAVFQAKKRVLEPLGLVEEPVKTAPGKKRPVEHSPAEPDSSSGTGKSGQQPARKRLNFGQTGDADSVPDPQPLGQPPAAPSGLGTNTMASGSGAPMADNNEGADGVGNSSGNWHCDSTWMGDRVITTSTRTWALPTYNNHLYKQISSQSGASNDNHYFGYSTPWGYFDFNRFHCHFSPRDWQRLINNNWGFRPKRLNFKLFNIQVKEVTQNDGTTTIANNLTSTVQVFTDSEYQLPYVLGSAHQGCLPPFPADVFMVPQYGYLTLNNGSQAVGRSSFYCLEYFPSQMLRTGNNFTFSYTFEDVPFHSSYAHSQSLDRLMNPLIDQYLYYLSRTNTPSGTTTQSRLQFSQAGASDIRDQSRNWLPGPCYRQQRVSKTAADNNNSDYSWTGATKYHLNGRDSLVNPGTAMASHKDDEEKYFPQSGVLIFRKQDSGKTNVDIEKVMITDEEEIRTTNPVATEQYGSVSTNLQSGNTQAATSDVNTQGVLPGMVWQDRDVYLQGPIWAKIPHTDGHFHPSPLMGGFGLKHPPPQILIKNTPVPANPSTTFSAAKFASFITQYSTGQVSVEIEWELQKENSKRWNPEIQYTSNYNKSVNVDFTVDTNGVYSEPRPIGTRYLTRNL

SEQ ID NO: 3141 - protein, 735 aa, Artificial Sequence
  source: /note="Description of Artificial Sequence: Synthetic polypeptide"
MAADGYLPDWLEDTLSEGIRQWWKLKPGPPPPKPAERHKDDSRGLVLPGYKYLGPFNGLDKGEPVNEADAAALEHDKAYDRQLDSGDNPYLKYNHADAEFQERLKEDTSFGGNLARAVFQAKKRVLEPLGLVEEPVKTAPGKKRPVEHSPAEPDSSSGTGKSGQQPARKRLNFGQTGDADSVPDPQPLGQPPAAPSGLGTNTMASGSGAPMADNNEGADGVGNSSGNWHCDSTWMGDRVITTSTRTWALPTYNNHLYKQISSQSGASNDNHYFGYSTPWGYFDFNRFHCHFSPRDWQRLINNNWGFRPKRLNFKLFNIQVKEVTQNDGTTTIANNLTSTVQVFTDSEYQLPYVLGSAHQGCLPPFPADVFMVPRYGYLTLNNGSQAVGRSSFYCLEYFPSQMLRTGNNFTFSYTFEDVPFHSSYAHSQSLDRLMNPLIDQYLYYLSRTNTPSGTTTQSRLQFSQAGASDIRDQSRNWLPGPCYRQQRVSKTAADNNNSDYSWTGATKYHLNGRDSLVNPGTAMASHKDDEEKYFPQSGVLIFGKQDSGKTNVDIEKVMITDEEEIRTTNPVATEQYGSVSTNLQSGNTQAATSDVNTQGVLPGMVWQDRDVYLQGPIWAKIPHTDGHFHPSPLMGGFGLKHPPPQILIKNTPVPANPSTTFSAAKFASFITQYSTGQVSVEIEWELQKENSKRWNPEIQYTSNYNKSVNVDFTVDTNGVYSEPRPIGTRYLTRNL

SEQ ID NO: 3142 - protein, 735 aa, Artificial Sequence
  source: /note="Description of Artificial Sequence: Synthetic polypeptide"
MAADGYLPDWLEDTLSEGIRQWWKLKPGPPPPKPAERHKDDSRGLVLPGYKYLGPFNGLDKGEPVNEADAAALEHDKAYDRQLDSGDNPYLKYNHADAEFQERLKEDTSFGGNLARAVFQAKKRVLEPLGLVEEPVKTAPGKKRPVEHSPAEPDSSSGTGKSGQQPARKRLNFGQTGDADSVPDPQPLGQPPAAPSGLGTNTMASGSGAPMADNNEGADGVGNSSGNWHCDSTWMGDRVITTSTRTWALPTYNNHLYKQISSQSGASNDNHYFGYSTPWGYFDFNRFHCHFSPRDWQRLINNNWGFRPKRLNFKLFNIQVKEVTQNDGTTTIANNLTSTVQVFTDSEYQLPYVLGSAHQGCLPPFPADVFMVPQYGYLTLNNGSQAVGRSSFYCLEYFPSQMLRTGNNFTFSYTFEDVPFHSSYAHSQSLDRLMNPLIDQYLYYLSRTNTPSGTTTQSRLQFSQAGASDIRDQSRNWLPGPCYRQQRVSKTAADNNNSDYSWTGATKYHLNGRDSLVNPGTAMASHKDDEEKYFPQSGVLIFGKQDSGKTNVDIEKVMITDEEEIRTTNPVATEQYGSVSTNLQSGNTQAATSDVNTQGVLPGMVWQDRDVYLQGPIWAKIPHTDGHFHPSPLMGGLGQKHPPPQSLIKNTPVPANPSTTFSAAKFASFITQYSTGQVSVEIEWELQKENSKRWNPEIQYTSNYNKSVNVDFTVDTNGVYSEPRPIGTRYLTRNL

SEQ ID NO: 3143 - protein, 735 aa, Artificial Sequence
  source: /note="Description of Artificial Sequence: Synthetic polypeptide"
MAADGYLPDWLEDTLSEGIRQWWKLKPGPPPPKPAERHKDDSRGLVLPGYKYLGPFNGLDKGEPVNEADAAALEHDKAYDRQLDSGDNPYLKYNHADAEFQERLKEDTSFGGNLARAVFQAKKRVLEPLGLVEEPVKTAPGKKRPVEHSPAEPDSSSGTGKSGQQPARKRLNFGQTGDADSVPDPQPLGQPPAAPSGLGTNTMASGSGAPMADNNEGADGVGNSSGNWHCDSTWMGDRVITTSTRTWALPTYNNHLYKQISSQSGASNDNHYFGYSTPWGYFDFNRFHCHFSPRDWQRLINNNWGFRPKRLNFKLFNIQVKEVTQNDGTTTIANNLTSTVQVFTDSEYQLPYVLGSAHQGCLPPFPADVFMVPQYGYLTLNNGSQAVGRSSFYCLEYFPSQMLRTGNNFTFSYTFEDVPFHSSYAHSQSLDRLMNPLIDQYLYYLSRTNTPSGTTTQSRLQFSQAGASDIRDQSRNWLPGPCYRQQRVSKTAADNNNSDYSWTGATKYHLNGRDSLVNPGTAMASHKDDEEKYFPQSGVLIFGKQDSEKTNVDIEKVMITDEEEIRTTNPVATEQYGSVSTNLQSGNTQAATSDVNTQGVLPGMVWQDRDVYLQGPIWAKIPHTDGHFHPSPLMGGFGLKHPPPQILIKNTPVPANPSTTFSAAKFASFITQYSTGQVSVEIEWELQKENSKRWNPEIQYTSNYNKSVNVDFTVDTNGVYSEPRPIGTRYLTRNL

SEQ ID NO: 3144 - protein, 735 aa, Artificial Sequence
  source: /note="Description of Artificial Sequence: Synthetic polypeptide"
MAADGYLPDWLEDTLSEGIRQWWKLKPGPPPPKPAERHKDDSRGLVLPGYKYLGPFNGLDKGEPVNEADAAALEHDKAYDRQLDSGDNPYLKYNHADAEFQERLKEDTSFGGNLARAVFQAKKRVLEPLGLVEEPVKTAPGKKRPVEHSPAEPDSSSGTGKSGQQPARKRLNFGQTGDADSVPDPQPLGQPPAAPSGLGTNTMASGSGAPMADNNEGADGVGNSSGNWHCDSTWMGDRVITTSTRTWALPTYNNHLYKQISSQSGASNDNHYFGYSTPWGYFDFNRFHCHFSPRDWQRLINNNWGFRPKRLNFKLFNIQVKEVTQNDGTTTIANNLTSTVQVFTDSEYQLPYVLGSAHQGCLPPFPADVFMVPQYGYLTLNNGSQAVGRSSFYCLEYFPSQMLRTGNNFTFSYTFEDVPFHSSYAHSQSLDRLMNPLIDQYLYYLSRTNTPSGTTTQSRLQFSQAGASDIRDQSRNWLPGPCYRQQRVSKTAADNNNSDYSWTGATKYHLNGRDSLVNPGTAMASHKDDEEKYFPQSGVLIFGKQDSGKTNVDIEKVMITDEEEIRTTNPVATEQYGSVSTNLQSGNTQAATSDVNTQGVLPGMVWQDRDVYLQGPIWAKIPHTDGHFHPSPLMGGFGLKHPPPQILIKNTPVPANPSTTFSAAKFASFITQYSTGQVSVEIEWELQKENSKRWNPEIQYTSNYNKSVNVDFTVDTNGVYSEPRPIGTRYLTRNL

SEQ ID NO: 3145 - protein, 735 aa, Artificial Sequence
  source: /note="Description of Artificial Sequence: Synthetic polypeptide"
MAADGYLPDWLEDTLSEGIRQWWKLKPGPPPPKPAERHKDDSRGLVLPGYKYLGPFNGLDKGEPVNEADAAALEHDKAYDRQLDSGDNPYLKYNHADAEFQERLKEDTSFGGNLARAVFQAKKRVLEPLGLVEEPVKTAPGKKRPVEHSPAEPDSSSGTGKSGQQPARKRLNFGQTGDADSVPDPQPLGQPPAAPSGLGTNTMASGSGAPMADNNEGADGVGNSSGNWHCDSTWMGDRVITTSTRTWALPTYNNHLYKQISSQSGASNDNHYFGYSTPWGYFDFNRFHCHFSPRDWQRLINNNWGFRPKRLNFKLFNIQVKEVTQNDGTTTIANNLTSTVQVFTDSEYQLPYVLGSAHQGCLPPFPADVFMVPQYGYLTLNNGSQAVGRSSFYCLEYFPSQMLRTGNNFTFSYTFEDVPFHSSYAHSQSLDRLMNPLIDQYLYYLSRTNTPSGTTTQSRLQFSQAGASDIRDQSRNWLPGPCYRQQRVSKTAADNNNSDYSWTGATKYHLNGRDSLVNPGTAMASHKDDEEKYFPQSGVLIFGKQDSGKTNVDIEKVMITDEEEIRTTNPVATEQYGSVSTNLQSGNTQAATSDVNTQGVLPGMVWQDRDVYLQGPIWAKIPHTDGHFHPSPLMGGFGQKHPPPQSLIKNTPVPANPSTTFSAAKFASFITQYSTGQVSVEIEWELQKENSKRWNPEIQYTSNYNKSVNVDFTVDTNGVYSEPRPIGTRYLTRNL

SEQ ID NO: 3146 - protein, 735 aa, Artificial Sequence
  source: /note="Description of Artificial Sequence: Synthetic polypeptide"
MAADGYLPDWLEDTLSEGIRQWWKLKPGPPPPKPAERHKDDSRGLVLPGYKYLGPFNGLDKGEPVNEADAAALEHDKAYDRQLDSGDNPYLKYNHADAEFQERLKEDTSFGGNLARAVFQAKKRVLEPLGLVEEPVKTAPGKKRPVEHSPAEPDSSSGTGKSGQQPARKRLNFGQTGDADSVPDPQPLGQPPAAPSGLGTNTMASGSGAPMADNNEGADGVGNSSGNWHCDSTWMGDRVITTSTRTWALPTYNNHLYKQISSQSGASNDNHYFGYSTPWGYFDFNRFHCHFSPRDWQRLINNNWGFRPKRLNFKLFNIQVKEVTQNDGTTTIANNLTSTVQVFTDSEYQLPYVLGSAHQGCLPPFPADVFMVPQYGYLTLNNGSQAVGRSSFYCLEYFPSQMLRTGNNFTFSHTFEDVPFHSSYAHSQSLDRLMNPLIDQYLYYLSRTNTPSGTTTQSRLQFSQAGASDIRDQSRNWLPGPCYRQQRVSKTAADNNNSDYSWTGATKYHLNGRDSLVNPGTAMASHKDDEEKYFPQSGVLIFGKQDSGKTNVDIEKVMITDEEEIRTTNPVATEQYGSVSTNLQSGNTQAATSDVNTQGVLPGMVWQDRDVYLQGPIWAKIPHTDGHFHPSPLMGGFGLKHPPPQILIKNTPVPANPSTTFSAAKFASFITQYSTGQVSVEIEWELQKENSKRWNPEIQYTSNYNKSVNVDFTVDTNGVYSEPRPIGTRYLTRNL

SEQ ID NO: 3147 - protein, 735 aa, Artificial Sequence
  source: /note="Description of Artificial Sequence: Synthetic polypeptide"
MAADGYLPDWLEDTLSEGIRQWWKLKPGPPPPKPAERHKDDSRGLVLPGYKYLGPFNGLDKGEPVNEADAAALEHDKAYDRQLDSGDNPYLKYNHADAEFQERLKEDTSFGGNLARAVFQAKKRVLEPLGLVEEPVKTAPGKKRPVEHSPAEPDSSSGTGKSGQQPAGKRLNFGRTGDADSVPDPQPLGQPPAAPSGLGTNTMASGSGAPMADNNEGADGVGNSSGNWHCDSTWMGDRVITTSTRTWALPTYNNHLYKQISSQSGASNDNHYFGYSTPWGYFDFNRFHCHFSPRDWQRLINNNWGFRPKRLNFKLFNIQVKEVTQNDGTTTIANNLTSTVQVFTDSEYQLPYVLGSAHQGCLPPFPADVFMVPQYGYLTLNNGSQAVGRSSFYCLEYFPSQMLRTGNNFTFSYTFEDVPFHSSYAHSQSLDRLMNPLIDQYLYYLSRTNTPSGTTTQSRLQFSPAGASDIRDQSRNWLPGPCYRQQRVSKTAADNNNSDYSWTGATKYHLNGRDSLVNPGTAMASHKDDEEKYFPQSGVLIFGKQDSGKTNVDIEKVMITDEEEIRTTNPVATEQYGSVSTNLQSGNTQAATSDVNTQGVLPGMVWQDRDVYLQGPIWAKIPHTDGHFHPSPLMGGFGLKHPPPQILIKNTPVPANPSTTFSAAKFASFITQYSTGQVSVEIEWELQKENSKRWNPEIQYTSNYNKSVNVDFTVDTNGVYSEPRPIGTRYLTRNL

SEQ ID NO: 3148 - protein, 734 aa, Artificial Sequence
  source: /note="Description of Artificial Sequence: Synthetic polypeptide"
MAADGYLPDWLEDTLSEGIRQWWKLKPGPPPPKPAERHKDDSRGLVLPGYKYLGPFNGLDKGEPVNEADAAALEHDKAYDRQLDSGDNPYLKYNHADAEFQERLKEDTSFGGNLARAVFQAKKRVLEPLGLVEEPVKTAPGKKRPVEHSPAEPDSSSGTGKSGQQPARKRLNFGQTGDADSVPDPQPLGQPPAAPSGLGTNTMASGSGAPMADNNEGADGVGNSSGNWHCDSTWMGDRVITTSTRTWALPTYNNHLYKQISSQSGASNDNHYFGYSTPWGYFDFNRFHCHFSPRDWQRLINNNWGFRPKRLNFKLFNIQVKEVTQNDGTTTIANNLTSTVQVFTDSEYQLPYVLGSAHQGCLPPFPADVFMVPQYGYLTLNNGSQAVGRSSFYCLEYFPSQMLRTGNNFTFSYTFEDVPFHSSYAHSQSLDRLMNPLIDQYLYYLSRTNTPSGTTTQSRLQFSQAGASDIRDQSRNWLPGPCYRQQRVSKTAADNNSDYSWTGATKYHLNGRDSLVNPGTAMASHKDDEEKYFPQSGVLIFGKQDSGKTNVDIEKVMITDEEEIRTTNPVATEQYGSVSTNLQSGNTQAATSDVNTQGVLPGMVWQDRDVYLQGPIWAKIPHTDGHFHPSPLMGGFGLKHPPPQILIKNTPVPANPSTTFSAAKFASFITQYSTGQVSVEIEWELQKENSKRWNPEIQYTSNYNKSVNVDFTVDTNGVYSEPRPIGTRYLTRNL

SEQ ID NO: 3149 - protein, 738 aa, Artificial Sequence
  source: /note="Description of Artificial Sequence: Synthetic polypeptide"
MAADGYLPDWLEDNLSEGIREWWALKPGAPKPKANQQKQDDGRGLVLPGYKYLGPFNGLDKGEPVNAADAAALEHDKAYDQQLQAGDNPYLRYNHADAEFQERLQEDTSFGGNLGRAVFQAKKRVLEPLGLVEEGAKTAPGKKRPVEPSPQRSPDSSTGIGKKGQQPARKRLNFGQTGDSESVPDPQPLGEPPAAPSGVGPNTMAAGGGAPMADNNEGADGVGSSSGNWHCDSTWLGDRVITASTRTWALPTYNNHLYKQISNGTSGGATNDNTYFGYSTPWGYFDFNRFHCHFSPRDWQRLINNNWGFRPKRLSFKLFNIQVKEVTQNEGTKTIANNLTSTIQVFTDSEYQLPYVLGSAHQGCLPPFPADVFTIPQYGYLTLNNGSQAVGRSSFYCLEYFPSQMLRTGNNFQFTYTFEDVPFHSSYAHSQSLDRLMNPLIDQYLYYLSRTQTTGGTANTQTLGFSQGGPNTMANQAKNWLPGPCYRQQRVSTTTGQNNNSNFAWTAGTKYHLNGRNSLANPGIAMATHKDDEERFFPSNGILIFGKQNAARDNADYSDVMLTSEEEIKTTNPVATEEYGIVADNLQQQNTAPQIGTVNSQGALPGMVWQNRDVYLQGPIWAKIPHTDGNFHPSPLMGGFGLKHPPPQILIKNTPVPADPPTTFNQSKLNSFITQYSTGQVSVEIEWELQKENSKRWNPEIQYTSNYYKSTSVDFAVNTEGVYSEPRPIGTRYLTRNL

SEQ ID NO: 3150 - protein, 738 aa, Artificial Sequence
  source: /note="Description of Artificial Sequence: Synthetic polypeptide"
MAADGYLPDWLEDNLSEGIREWWALKPGAPKPKANQQKQDDGRGLVLPGYKYLGPFNGLDKGGPVNAADAAALEHDKAYDQQLQAGDNPYLRYNHADAEFQERLQEDTSFGGNLGRAVFQAKKRVLEPLGLVEEGAKTAPGKKRPVEPSPQRSPDSSTGIGKKGQQPARKRLNFGQTGDSESVPDPQPLGEPPAAPSGVGPNTMAAGGGAPMADNNEGADGVGSSSGNWHCDSTWLGDRVITTSTRTWALPTYNNHLYKQISNGTSGGATNDNTYFGYSTPWGYFDFNRFHCHFSPRDWQRLINNNWGFRPKRLSFKLFNIQVKEVTQNEGTKTIANNLTSTIQVFTDSEYQLPYVLGSAHQGCLPPFPADVFMIPQYGYLTLNNGSQAVGRSSFYCLEYFPSQMLRTGNNFQFTYTFEDVPFHSSYAHSQSLDRLMNPLIDQYLYYLSRTQTTGGTANTQTLGFSQGGPNTMANQAKNWLPGPCYRQQRVSTTTGQNNNSNFAWTAGTKYHLNGRNSLANPGIAMATHKDDEERFFPSNGILIFGKQNAARDNADYSDVMLTSEEEIKTTNPVATEEYGIVADNLQQQNTAPQIGTVNSQGALPGMVWQNRDVYLQGPIWAKIPHTDGNFHPSPLMGGFGLKHPPPQILIKNTPVPADPPTTFNQSKLNSFITQYSTGQVSVEIEWELQKENSKRWNPEIQYTSNYYKSTSVDFAVNTEGVYSEPRPIGTRYLTRNL

SEQ ID NO: 3151 - protein, 738 aa, Artificial Sequence
  source: /note="Description of Artificial Sequence: Synthetic polypeptide"
MAADGYLPDWLEDNLSEGIREWWALKPGAPKPKANQQKQDDGRGLVLPGYKYLGPFNGLDKGEPVNAADAAALEHDKAYDQQLQAGDNPYLRYNHADAEFQERLQEDTSFGGNLGRAVFQAKKRVLEPLGLVEEGAKTAPGKKRPVEPSPQRSPDSSTGIGKKGQQPARKRLNFGQTGDSESVPDPQPLGEPPAAPSGVGPNTMAAGGGAPMADNNEGADGVGSSSGNWHCDSTWLGDRVITTSTRTWALPTYNNHLYRQISNGTSGGATNDNTYFGYSTPWGYFDFNRFHCHFSPRDWQRLINNNWGFRPKRLSFKLFNIQVKEVTQNEGTKTIANNLTSTIQVFTDSEYQLPYVLGSAHQGCLPPFPADVFMIPQYGYLTLNNGSQAVGRSSFYCLEYFPSQMLRTGNNFQFTYTFEDVPFHSSYAHSQSLDRLMNPLIDQYLYYLSRTQTTGGTANTQTLGFSQGGPNTMANQAKNWLPGPCYRQQRVSTTTGQNNNSNFAWTAGTKYHLNGRNSLANPGIAMATHKDDEERFFPSNGILIFGKQNAARDNADYSDVMLTSEEEIKTTNPVATEEYGIVADNLQQQNTAPQIGTVNSQGALPGMVWQNRDVYLQGPIWAKIPHTDGNFHPSPLMGGFGLKHPPPQILIKNTPVPADPPTTFNQSKLNSFITQYSTGQVSVEIEWELQKENSKRWNPEIQYTSNYYKSTSVDFAVNTEGVYSEPRPIGTRYLTRNL

SEQ ID NO: 3152 - protein, 738 aa, Artificial Sequence
  source: /note="Description of Artificial Sequence: Synthetic polypeptide"
MAADGYLPDWLEDNLSEGIREWWALKPGAPKPKANQQKQDDGRGLVLPGYKYLGPFNGLDKGEPVNAADAAALEHDKAYDQQLQAGDNPYLRYNHADAEFQERLQEDTSFGGNLGRAVFQAKKRVLEPLGLVEEGAKTAPGKKRPVEPSPQRSPDSSTGIGKKGQQPARKRLNFGQTGDSESVPDPQPLGEPPAAPSGVGPNTMAAGGGAPMADSNEGADGVGSSSGNWHCDSTWLGDRVITTSTRTWALPTYNNHLYKQISNGTSGGATNDNTYFGYSTPWGYFDFNRFHCHFSPRDWQRLINNNWGFRPKRLSFKLFNIQVKEVTQNEGTKTIANNLTSTIQVFTDSEYQLPYVLGSAHQGCLPPFPADVFMIPQYGYLTLNNGSQAVGRSSFYCLEYFPSQMLRTGNNFQFTYTFEDVPFHSSYAHSQSLDRLMNPLIDQYLYYLSRTQTTGGTANTQTLGFSQGGPNTMANQAKNWLPGPCYRQQRVSTTTGQNNNSNFAWTAGTKYHLNGRNSLANPGIAMATHKDDEERFFPSNGILIFGKQNAARDNADYSDVMLTSEEEIKTTNPVATEEYGIVADNLQQQNTAPQIGTVNSQGALPGMVWQNRDVYLQGPIWAKIPHTDGNFHPSPLMGGFGLKHPPPQILIKNTPVPADPPTTFNQSKLNSFITQYSTGQVSVEIEWELQKENSKRWNPEIQYTSNYYKSTSVDFAVNTEGVYSEPRPIGTRYLTRNL

SEQ ID NO: 3153 - protein, 738 aa, Artificial Sequence
  source: /note="Description of Artificial Sequence: Synthetic polypeptide"
MAADGYLPDWLEDNLSEGIREWWALKPGAPKPKANQQKQDDGRGLVLPGYKYLGPFNGLDKGEPVNAADAAALEHDKAYDQQLQAGDNPYLRYNHADAEFQERLQEDTSFGGNLGRAVFQAKKRVLEPLGLVEEGAKTAPGKKRPVEPSPQRSPDSSTGIGKKGQQPARKRLNFGQTGDSESVPDPQPLGEPPAAPSGVGPNTMAAGGGAPMADNNEGADGVGSSSGNWHCDSTWLGDRVITTSTRTWALPTYNNHLYKQISNGTSGGATNDNTYFGYSTPWGYFDFNRFHCHFSPRDWQRLINNNWGFRPKRLSFKLFNIQVKEVTQNEGTKTIANNLTSTIQVFTDSEYQLPYVLGSAHQGCLPPFPADVFMIPQYGYLTLNNGSQAMGRSSFYCLEYFPSQMLRTGNNFQFTYTFEDVPFHSSYAHSQSLDRLMNPLIDQYLYYLSRTQATGGTANTQTLGFSQGGPNTMANQAKNWLPGPCYRQQRVSTTTGQNNNSNFAWTAGTKYHLNGRNSLANPGIAMATHKDDEERFFPSNGILIFGKQNAARDNADYSDVMLTSEEEIKTTNPVATEEYGIVADNLQQQNTAPQIGTVNSQGALPGMVWQNRDVYLQGPIWAKIPHTDGNFHPSPLMGGFGLKHPPPQILIKNTPVPADPPTTFNQSKLNSFITQYSTGQVSVEIEWELQKENSKRWNPEIQYTSNYYKSTSVDFAVNTEGVYSEPRPIGTRYLTRNL

SEQ ID NO: 3154 - protein, 738 aa, Artificial Sequence
  source: /note="Description of Artificial Sequence: Synthetic polypeptide"
MAADGYLPDWLEDNLSEGIREWWALKPGAPKPKANQQKQDDGRGLVLPGYKYLGPFNGLDKGEPVNAADAAALEHDKAYDQQLQAGNNPYLRYNHADAEFQERLQEDTSFGGNLGRAVFQAKKRVLGPLGLVEEGAKTAPGKKRPVEPSPQRSPDSSTGIGKKGQQPARKRLNFGQTGDSESVPDPQPLGEPPAAPSGVGPNTMAAGGGAPMADNNEGADGVGSSSGNWHCDSTWLGDRVITTSTRTWALPTYNNHLYKQISNGTSGGATNDNTYFGYSTPWGYFDFNRFHCHFSPRDWQRLINNNWGFRPKRLSFKLFNIQVKEVTQNEGTKTIANNLTSTIQVFTDSEYQLPYVLGSAHQGCLPPFPADVFMIPQYGYLTLNNGSRAVGRSSFYCLEYFPSQMLRTGNNFQFTYTFEDVPFHSSYAHSQSLDRLMNPLIDQYLYYLSRTQTTGGTANTQTLGFSQGGPNTMANQAKNWLPGPCYRQQRVSTTTGQNNNSNFAWTAGTKYHLNGRNSLANPGIAMATHKDDEERFFPSNGILIFGKQNAARDNADYSDVMLTSEEEIKTTNPVATEEYGIVADNLQQQNTAPQIGTVNSQGALPGMVWQNRDVYLQGPIWAKIPHTDGNFHPSPLMGGFGLKHPPPQILIKNTPVPADPPTTFNQSKLNSFITQYSTGQVSVEIEWELQKENSKRWNPEIQYTSNYYKSTSVDFAVNTEGVYSEPRPIGTRYLTRNL

SEQ ID NO: 3155 - protein, 738 aa, Artificial Sequence
  source: /note="Description of Artificial Sequence: Synthetic polypeptide"
MAADGYLPDWLEDNLSEGIREWWALKPGAPKPKANQQKQDDGRGLVLPGYKYLGPFNGLDKGEPVNAADAAALEHDKAYDQQLQAGDNPYLRYNHADAEFQERLQEDTSFGGNLGRAVFQAKKRVLEPLGLVEEGAKTAPGKKRPVEPSPQRSPDSSTGIGKKGQQPARKRLNFGQTGDSESVPDPQPLGEPPAAPSGVGPNTMAAGGGAPMADNNEGADGVGSSSGNWHCDSTWLGDRVITTSTRTWALPTYNNHLYKQISNGTSGGATNDNTYFGYSTPWGYFDFNRFHCHFSPRDWQRLINNNWGFRPKRLSFKLFNIQVKEVTQNEGTKTIANNLTSTIQVFTDSEYQLPYVLGSAHQGCLPPFPADVFMIPQYGYLTLNNGSQAVGRSSFYCLEYFPSQMLRTGNNFQFTYTFEDVPFHSSYAHSQSLDRLMNPLIDQYLYYLSRTQTTGGTANTQTLGFSQGGPNTMANQAKNWLPGPCYRQQRVSTTTGQNNNSDFAWTAGTKYHLNGRNSLANPGIAMATHKDDEERFFPSNGILIFGKQNAARDNADYSDVMLTSEEEIKTTNPVATEEYGIVADNLQQQNTAPQIGTVNSQGALPGMVWQNRDVYLQGPVWAKIPHTDGNFHPSPLMGGFGLKHPPPQILIKNTPVPADPPTTFNQSKLNSFITQYSTGQVSVEIEWELQKENSKRWNPEIQYTSNYYKSTSVDFAVNTEGVYSEPRPIGTRYLTRNL

SEQ ID NO: 3156 - protein, 738 aa, Artificial Sequence
  source: /note="Description of Artificial Sequence: Synthetic polypeptide"
MAADGYLPDWLEDNLSEGIREWWALKPGAPKPKANQQKQDDGRGLVLPGYKYLGPFNGLDKGEPVNAADAAALEHDKAYDQQLQAGDNPYLRYNHADAEFQERLQEDTSFGGSLGRAVFQAKKRVLEPLGLVEEGAKTAPGKKRPVEPSPQRSPDSSTGIGKKGQQPARKRLNFGQTGDSESVPDPQPLGEPPAAPSGVGPNTMAAGGGAPMADNNEGADGVGSSSGNWHCDSTWLGDRVITTSTRTWALPTYNNHLYKQISNGTSGGATNDNTYFGYSTPWGYFDFNRFHCHFSPRDWQRLINNNWGFRPKRLSFKLFNIQVKEVTQNEGTKTIANNLTSTIQVFTDSEYQLPYVLGSAHQGCLPPFPADVFMIPQYGYLTLNNGSQAVGRSSFYCLEYFPSQMLRTGNNFQFTYTFEDVPFHSSYAHSQSLDRLMNPLIDQYLYYLSRTQTTGGTANTQTLGFSQGGPNTMANQAKNWLPGPCYRQQRVSTTTGQNNNSNFAWTAGTKYHLNGRNSLANPGIAMATHKDDEERFFPSNGILIFGKQNAARDNADYSDVMLTSEEEIKTTNPVATEEYGIVADNLQQQNTAPQIGTVNSQGALPGMVWQNRDVYLQGPIWAKIPHTDGNFHPSPLMGGFGLKHPPPQILIKNTPVPADPPTTFNQSKLNSFITQYSTGQVSVEIEWELQKENSKRWNPEIQYTSNYYKSTSVDFAVNTEGVYSEPRPIGTRYLTRNL

SEQ ID NO: 3157 - protein, 738 aa, Artificial Sequence
  source: /note="Description of Artificial Sequence: Synthetic polypeptide"
MAADGYLPDWLEDNLSEGIREWWALKPGAPKPKANQQKQDDGRGLVLPGYKYLGPFNGLDKGEPVNAADAAALEHDKAYDQQLQAGDNPYQRYNHADAEFQERLQEDTSFGGNLGRAVFQAKKRVLEPLGLVEEGAKTAPGKKRPVEPSPQRSPDSSTGIGKKGQQPARKRLNFGQTGDSESVPDPQPLGEPPAAPSGVGPNTMAAGGGAPMADNNEGADGVGSSSGNWHCDSAWLGDRVITTSTRTWALPTYNNHLYKQISNGTSGGATNDNTYFGYSTPWGYFDFNRFHCHFSPRDWQRLINNNWGFRPKRLSFKLFNIQVKEVTQNEGTKTIANNLTSTIQVFTDSEYQLPYVLGSAHQGCLPPFPADVFTIPQYGYLTLNNGSQAVGRSSFYCLEYFPSQMLRTGNNFQFTYTFEDVPFHSSYAHSQSLDRLMNPLIDQYLYYLSRTQTTGGTANTQTLGFSQGGPNTMANQAKNWLPGPCYRQQRVSTTTGQNNNSNFAWTAGTKYHLNGRNSLANPGIAMATHKDDEERFFPSNGILIFGKQNAARDNADYSDVMLTSEEEIKTTNPVATEEYGIVADNLQQQNTAPQIGTVNSQGALPGMVWQNRDVYLQGPIWAKIPHTDGNFHPSPLMGGFGLKHPPPQILIKNTPVPADPPTTFNQSKLNSFITQYSTGQVSVEIEWELQKENSKRWNPEIQYTSNYYKSTSVDFAVNTEGVYSEPRPIGTRYLTRNL

SEQ ID NO: 3158 - protein, 738 aa, Artificial Sequence
  source: /note="Description of Artificial Sequence: Synthetic polypeptide"
MAADGYLPDWLEDNLSEGIREWWALKPGAPKPKANQQKQDDGRGLVLPGYKYLGPFNGLDKGEPVNAADTAALEHDKAYDQQLQAGDNPYLRYNHADAEFQERLQEDTSFGGNLGRAVFQAKKRVLEPLGLVEEGAKTAPGKKRPVEPSPQRSPDSSTGIGKKGQQPARKRLNFGQTGDSESVPDPQPLGEPPAAPSGVGPNTMAAGGGAPMADNNEGADGVGSSSGNWHCDSTWLGDRVITTSTRTWALPTYNNHLYKQISNGTSGGATNDNTYFGYSTPWGYFDFNRFHCHFSPRDWQRLINNNWGFRPKRLSFKLFNIQVKEVTQNEGTKTIANNLTSTIQVFTDSEYQLPYVLGSAHQGCLPPFPADVFMIPQYGYLTLNNGSQAVGRSSFYCLEYFPSQMLRTGNNFQFTYTFEDVPFHSSYAHSQSLDRLMNPLIDQYLYYLSRTQTTGGTANTQTLGFSQGGPNTMANQAKNWLPGPCYRQQRVSTTTGQNNNSNFAWTAGTKYHLNGRNSLANPGIAMATHKDDEERFFPSNGILIFGKQNAARDNADYSDVMLTSEEEIKTTNPVATEEYGIVADNLQQQNTAPQIGTVNSQGALPGMVWQNRDVYLQGPIWAKIPHTDGNFHPSPLMGGFGLKHPPPQILIKNTPVPADPPTTFNQSKLNSFITQYSTGQVSVEIEWELQKENSKRWNPEIQYTSNYYKSTSVDFAVNTEGVYSEPRPIGTRYLTRNL

SEQ ID NO: 3159 - protein, 738 aa, Artificial Sequence
  source: /note="Description of Artificial Sequence: Synthetic polypeptide"
MAADGYLPDWLEDNLSEGIREWWALKPGAPKPKANQQKQDDGRGLVLPGYKYLGPFNGLDKGEPVNAADAAALEHDKAYDQQLQAGDNPYLRYNHADAEFQERLQEDTSFGGNLGRAVFQAKKRVLEPLGLVEEGAKTAPGKKRPVEPSPQRSPDSSTGIGKKGQQPARKRLNFGQTGDSESVPDPQPLGEPPAAPSGVGPNTMAAGGGAPMADNNEGADGVGSSSGNWHCDSTWLGDRVITTSTRTWALPTYNNHLYKQISNGTSGGATNDNTYFGYSTPWGYFDFNRFHCHFSPRDWQRLINNNWGFRPKRLSFKLFNIQVKEVTQNEGTKTIANNLTSTIQVFTDSEYQLPYVLGSAHQGCLPPFPADVFMIPQYGYLTLNNGSQAVGRSSFYCLEYFPSQMLRTGNNFQFTYTFEDVPFHSSYAHSQSLDRLMNPLIDQYLYYLSRTQTTGGTANTQTLGFSQGGPNTMANQAKNWLPGPCYRQQRVSTTTGQNNNSNFAWTAGTKYHLNGRNSLANPGIAMATHKDDEERFFPSNGILIFGKQNAARDNADYSDVMLTSEEEIKTTNPVATEEYGIVADNLQQQNAAPQIGTVNSQGALPGMVWQNRDVYLQGPIWAKIPHTDGNFHPSPLMGGFGLKHPPPQILIKNTPVPADPPTTFNQSKLNSFITQYSTGQVSVEIEWELQKENSKRWNPEIQYTSNYYKSTSVDFAVNTEGVYSEPRPIGTRYLTRNL

SEQ ID NO: 3160 - protein, 738 aa, Artificial Sequence
  source: /note="Description of Artificial Sequence: Synthetic polypeptide"
MAADGYLPDWLEDNLSEGIREWWALKPGAPKPKANQQKQDDGRGLVLPGYKYLGPFNGLDKGEPVNAADAAALEHDKAYDQQLQAGDNPYLRYNHADAEFQERLQEDTSFGGNLGRAVFQAKKRVLEPLGLVEEGAKTAPGKKRPVEPSPQRSPDSSTGIGKKGQQPARKRLNFGQTGDSESVPDPQPLGEPPAAPSGVGPNTMAAGGGAPMADNNEGADGVGSSSGNWHCDSTWLGDRVITTSTRTWALPTYNNHLYKQISNGTSGGATNDNTYFGYSTPWGYFDFNRFHCHFSPRDWQRLINNNWGFRPKRLSFKLFNIQVKEVTQNEGTKTIANNLTSTIQVFTDSEYQLPYVLGSAHQGCLPPFPADVFTIPQYGYLTLNNGSQAVGRSSFYCLEYFPSQMLRTGNNFQFTYTFEDVPFHSSYAHSQSLDRLMNPLIDQYLYYLSRTQTTGGTANTQTLGFSQGGPNTMANQAKNWLPGPCYRQQRVSTTTGRNNNSNFAWTAGTKYHLNGRNSLANPGIAMATHKDDEERFFPSNGILIFGKQNAARDNADYSDVMLTSEEEIKTTNPVATEEYGIVADNLQQQNTAPQIGTVNSQGALPGMVWQNRDVYLQGPIWAKIPHTDGNFHPSPLMGGFGLKHPPPQILIKNTPVPADPPTTFNQSKLNSFITQYSTGQVSVEIEWELQKENSKRWNPEIQYTSNYYKSTSVDFAVNTEGVYSEPRPIGTRYLTRNL

SEQ ID NO: 3161 - protein, 738 aa, Artificial Sequence
  source: /note="Description of Artificial Sequence: Synthetic polypeptide"
MAADGYLPDWLEDNLSEGIREWWALKPGAPKPKANQQKQDDGRGLVLPGYKYLGPFNGLDKGEPVNAADAAALEHDKAYDQQLQAGDNPYLRYNHADAEFQERLQEDTSFGGNLGRAVFQAKKRVLEPLGLVEEGAKTAPGKKRPVEPSPQRSPDSSTGIGKKGQQPARKRLNFGQTGDSESVPDPQPLGEPPAAPSGVGPNTMAAGGGAPMADNNEGADGVGSSSGNWHCDSTWLGDRVITTSTRTWALPTYNNHLYKQISNGTSGGATNDNTYFGYSTPWGYFDFNRFHCHFSPRDWQRLINNNWGFRPKRLSFKLFNIQVKEVTQNEGTKTIANNLTSTIQVFTDSEYQLPYVLGSAHQGCLPPFPADVFTIPQYGYLTLNNGSQAVGRSSFYCLEYFPSQMLRTGNNFQFTYTFEDVPFHSSYAHSQSLDRLMNPLIDQYLYYLSRTQTTGGTANTQTLGFSQGGPNTMANQAKNWLPGPCYRQQRVSTTTGQNNNSNFAWTAGTKYHLNGRNSLANPGIAMATHKDDEERFFPSNGILIFGKQNAARDNADYSDVVLTSEEEIKTTNPVATEEYGIVADNLQQQNTAPQIGTVNSQGALPGMVWQNRDVYLQGPIWAKIPHTDGNFHPSPLMGGFGLKHPPPQILIKNTPVPADPPTTFNQSKLNSFITQYSTGQVSVEIEWELQKENSKRWNPEIQYTSNYYKSTSVDFAVNTEGVYSEPRPIGTRYLTRNL

SEQ ID NO: 3162 - protein, 738 aa, Artificial Sequence
  source: /note="Description of Artificial Sequence: Synthetic polypeptide"
MAADGYLPDWLEDNLSEGIREWWALKPGAPKPKANQQKQDDGRGLVLPGYKYLGPFNGLDKGEPVNAADAAALEHDKAYDQQLQAGDNPYLRYNHADAEFQERLQEDTSFGGNLGRAVFQAKKRVLEPLGLVEEGAKTAPGKKRPVEPSPQRSPDSSTGIGKKGQQPARKRLNFGQTGDSESVPDPQPLGEPPAAPSGVGPNTMAAGGGAPMADNNEGADGVGSSSGNWHCDSTWLGDRVITTSTRTWALPTYNNHLYKQISNGTSGGATNDNTYFGYSTPWGYFDFNRFHCHFSPRDWQRLINNNWGFRPKRLSFKLFNIQVKEVTQNEGTKTIANNLTSTIQVFTDSEYQLPYVLGSAHQGCLPPFPADVFMIPQYGYLTLNNGSQAVGRSSFYCLEYFPSQMLRAGNNFQFTYTFEDVPFHSSYAHSQSLDRLMNPLIDQYLYYLSRTQTTGGTANTQTLGFSQGGPNTMANQAKNWLPGPCYRQQRVSTTTGQNNNSNFAWTAGTKYHLNGRNSLANPGIAMATHKDDEERFFPSNGILIFGKQNAARDNADYSDVMLTSEEEIKTTNPVATEEYGIVADNLQQQNTAPQIGTVDSQGALPGMVWQNRDVYLQGPIWAKIPHTDGNFHPSPLMGGFGLKHPPPQILIKNTPVPADPPTTFNQSKLNSFITQYSTGQVSVEVEWELQKENSKRWNPEIQYTSNYYKSTSVDFAVNTEGVYSEPRPIGTRYLTRNL

SEQ ID NO: 3163 - protein, 738 aa, Artificial Sequence
  source: /note="Description of Artificial Sequence: Synthetic polypeptide"
MAADGYLPDWLEDNLSEGIREWWALKPGAPKPKANQQKQDDGRGLVLPGYKYLGPFNGLDKGEPVNAADAAALEHDKAYDQQLQAGDNPYLRYNHADAEFQERLQEDTSFGGSLGRAVFQAKKRVLEPLGLVEEGAKTAPGKKRPVEPSPQRSPDSSTGIGKKGQQPARKRLNFGQTGDSESVPDPQPLGEPPAAPSGVGPNTMAAGGGAPMADNNEGADGVGSSSGNWHCDSTWLGDRVITTSTRTWALPTYNNHLYKQISNGTSGGATNDNTYFGYSTPWGYFDFNRFHCHFSPRDWQRLINNNWGFRPKRLSFKLFNIQVKEVTQNEGTKTIANNLTSTIQVFTDSEYQLPYVLGSAHQGCLPPFPADVFMIPQYGYLTLNNGSQAVGRSSFYCLEYFPSQMLRTGNNFQFTYTFEDVPFHSSYAHSQSLDRLMNPLIDQYLYYLSRTQTTGGTANTQTLGFSQGGPNTMANQAKNWLPGPCYRQQRVSTTTGQNNNSNFAWTAGTKYHLNGRNSLANPGIAMATHKDDEERFFPSNGILIFGKQNAARDNADYSDVMLTSEEEIKTTNPVATEEYGIVADNLQQQNTAPQIGTVNSQGALPGMVWQNRDVYLQGPIWAKIPHTDGNFHPSPLMGGFGLKHPPPQILIKNTPVPADPPTTFNQSKLNSFITQYSTGQVSVEIEWELQKENSKRWNPEIQYTSNYYKSTSVDFAVNTEGVYSEPRPIGTRHLTRNL

SEQ ID NO: 3164 - protein, 738 aa, Artificial Sequence
  source: /note="Description of Artificial Sequence: Synthetic polypeptide"
MAADGYLPDWLEDNLSEGIREWWALKPGAPKPKANQQKQDDGRGLVLPGYKYLGPFNGLDKGEPVNAADAAALEHDKAYDQQLQAGDNPYLRYNHADAEFQERLQEDTSFGGNLGRAVFQAKKRVLEPLGLVEEGAKTAPGKKRPVEPSPQRSPDSSTGIGKKGQQPARKRLNFGQTGDSESVPDPQPLGEPPAAPSGVGPNTMAAGGGAPMADNNEGADGVGSSSGNWHCDSTWLGDRVITTSTRTWALPTYNNHLYKQISNGTSGGATNDNTYFGYSTPWGYFDFNRFHCHFSPRDWQRLINNNWGFRPKRLSFKLFNIQVKEVTQNEGTKTIANNLTSTIQVFTDSEYQLPYVLGSAHQGCLPPFPADVFTIPQYGYLTLNNGSQAVGRSSFYCLEYFPSQMLRTGNNFQFTYTFEDVPFHSSYAHSQSLDRLMNPLIDQYLYYLSRTQTTGGTANTQTLGFSQGGPNTMANQAKNWLPGPCYRQQRVSTTTGQNNNSNFAWTAGTKYHLNGRNSLANPGIAMVTHKDDEERFFPSNGILIFGKQNAARDNADYSDVMLTSEEEIKTTNPVATEEYGIVADNLQQQNTAPQIGTVNSQGALPGMVWQNRDVYLQGPIWAKIPHTDGNFHPSPLMGGFGLKHPPPQILIKNTPVPADPPTTFNQSKLNSFITQYSTGQVSVEIEWELQKENSKRWNPEIQYTSNYYKSTSVDFAVNTEGVYSEPRPIGTRYLTRNL

SEQ ID NO: 3165 - DNA, 2208 bp, Artificial Sequence
  source: /note="Description of Artificial Sequence: Synthetic polynucleotide"
atggctgccgatggttatcttccagattggctcgaggacactctctctgaaggaataagacagtggtggaagctcaaacctggcccaccaccgccaaagcccgcagagcggcataaggacgacagcaggggtcttgtgcttcctgggtacaagtacctcggacccttcaacggactcgacaaaggagagccggtcaacgaggcagacgccgcggccctcgagcacgacaaggcctacgaccggcagctcgacagcggagacaacccgtacctcaagtacaaccacgccgacgcggagtttcaggagcgccttaaagaagatacgtcttttgggggcaacctcgcaagagcagtattccaggcgaaaaagagggttcttgaacctctgggcctggttgaggagcctgttaagacggctccgggaaaaaagaggccggtagagcactctcctgcggagccagattcctcctccggaactggaaagtcgggccaacagcctgcaagaaagagattgaattttggtcagactggagacgcagactccgtacctgacccccagcctctcggacagccaccagcagccccctctggtctgggaactaatacgatggcttcaggcagtggcgcaccaatggcagacaataacgagggcgccgacggagtgggtaattcctcgggaaattggcattgcgattccacatggatgggcgacagagtcatcaccaccagcacccgcacctgggctctgcccacctacaacaaccatctgtacaagcaaatttccagccagtctggagccagcaacgacaaccactactttggctacagcaccccttgggggtattttgacttcaacagattccactgccacttctccccacgtgactggcaaagactcatcaacaacaattggggattccggcccaaaagactcaacttcaagctctttaacattcaagtcaaggaggtcacgcagaatgacggtacgacgacgattgccaataaccttaccagcacggttcaggtgtttactgactcggagtaccagctcccgtacgtcctcggctcggcgcatcaaggatgcctcccgccgttcccagcagacgtcttcatggtgccacagtatggatacctcaccctgaacaacgggagtcaggcggtaggacgctcttcattttactgcctggagtactttccttctcagatgctgcgtaccggaaacaactttaccttcagctacacctttgaggacgttccttttcacagcagctacgctcacagccagagtttggaccgtcttatgaatcctctcatcgaccagtacctgtattacttgagcagaacaaacactccaagcggaaccactacgcagtccaggcttcagttttctcaagccggagcgagtgacattcgggaccagtctaggaactggcttcctagaccctgttaccgccagcagcgagtatcaaagacagctgcggacaacaacaacagtgattactcgtggactggagctaccaagtatcacctcaatggaagagactctctggtgaatccgggcacagccatggccagccacaaggacgatgaagaaaagtattttcctcagagcggggttctcatcttcggaaaacaagactcgggaaaaactaatgtggacattgaaaaggtcatgattacagacgaagaggaaatcaggaccaccaatcccgtggctacggagcagtatggttctgtatctaccaatctccagagcggcaacacacaagcagctacctcagatgtcaacacacaaggcgttcttccaggcatggtccggcaggacagagacgtgtacctgcagggacccatctgggcaaagattccacacacggacggacattttcacccttctcctcttatgggaggatttggactgaagcaccctcccccgcagattctcatcaagaataccccggtacctgcgaatccttctaccaccttcagcgcggcaaagtttgcttccttcatcacacagtactccacggggcaggtcagcgtggagatcgagtgggagccgcagaaagagaacagcaaacgctggaaccccgagatccagtatacctccaactacaacaagtctgttaatgtggactttactgtggacactaatggcgtgtattcagagcctcgccccattggcacaagatacctgactcgtaatctgtaa

SEQ ID NO: 3166 - DNA, 2208 bp, Artificial Sequence
  source: /note="Description of Artificial Sequence: Synthetic polynucleotide"
atggctgccgatggttatcttccagattggctcgaggacactctctctgaaggaataagacagtggtggaagctcaaacctggcccaccaccgccaaagcccgcagagcggcataaggacgacagcaggggtcttgtgcttcctgggtacaagtacctcggacccttcaacggactcgacaaaggagagccggtcaacgaggcagacgccgcggccctcgagcacgacaaggcctacgaccggcagctcgacagcggagacaacccgtacctcaagtacaaccacgccgacgcggagtttcaggagcgccttaaagaagatacgtcttttgggggcaacctcgcaagagcagtattccaggcgaaaaagagggttcttgaacctctgggcctggttgaggagcctgttaagacggctccgggaaaaaagaggccggtagagcactctcctgcggagccagattcctcctccggaactggaaagtcgggccaacagcctgcaagaaagagattgaattttggtcagactggagacgcagactccgtacctgacccccagcctctcggacagccaccagcagccccctctggtctgggaactaatacgatggcttcaggcagtggcgcaccaatggcagacaataacgagggcgccgacggagtgggtaattcctcgggaaattggcattgcgattccacatggatgggcgacagagtcatcaccaccagcacccgcacctgggctctgcccacctacaacaaccatctgtacaagcaaatttccagccagtctggagccagcaacgacaaccactactttggctacagcaccccttgggggtattttgacttcaacggattccactgccacttctccccacgtgactggcaaagactcatcaacaacaattggggattccggcccaaaagactcaacttcaagctctttaacattcaagtcaaggaggtcacgcagaatgacggtacgacgacgattgccaataaccttaccagcacggttcaggtgtttactgactcggagtaccagctcccgtacgtcctcggctcggcgcatcaaggatgcctcccgccgttcccagcagacgtcttcatggtgccacagtatggatacctcaccctgaacaacgggagtcaggcggtaggacgctcttcattttactgcctggagtactttccttctcagatgctgcgtaccggaaacaactttaccttcagctacacctttgaggacgttccttttcacagcagctacgctcacagccagagtttggaccgtcttatgaatcctctcatcgaccagtacctgtattacttgagcagaacaaacactccaagcggaaccactacgcagtccaggcttcagttttctcaagccggagcgagtgacattcgggaccagtctaggaactggcttcctggaccctgttaccgccagcagcgagtatcaaagacagctgcggacaacaacaacagtgattactcgtggactggagctaccaagtatcacctcaatggaagagactctctggtgaatccgggcacagccatggccagccacaaggacgatgaagaaaagtattttcctcagagcggggttctcatcttcggaaaacaagactcgggaaaaactaatgtggacattgaaaaggtcatgattacagacgaagaggaaatcaggaccaccaatcccgtggctacggagcagtatggttctgtatctaccaatctccagagcggcgacacacaagcagctacctcagatgtcaacacacaaggcgttcttccaggcatggcccggcaggacagagacgtgtacctgcagggacccatctgggcaaagattccacacacggacggacattttcacccttctcctcttatgggaggatttggactgaagcaccctcccccgcagattctcatcaagaataccccggtacctgcgaatccttctaccaccttcagcgcggcaaagtttgcttccttcatcacacagtactccacggggcaggtcagcgtggagatcgagtgggagccgcagaaagagaacagcaaacgctggaaccccgagatccagtatacctccaactacaacaagtctgttaatgtggactttactgtggacactaatggcgtgtattcagagcctcgccccattggcacaagatacctgactcgtaatctgtaa

SEQ ID NO: 3167 - DNA, 2208 bp, Artificial Sequence
  source: /note="Description of Artificial Sequence: Synthetic polynucleotide"
atggctgccgatggttatcttccagattggctcgaggacactctctctgaaggaataagacagtggtggaagctcaaacctggcccaccaccgccaaagcccgcagagcggcataaggacgacagcaggggtcttgtgcttcctgggtacaagtacctcggacccttcaacggactcgacaaaggagagccggtcaacgaggcagacgccgcggccctcgagcacgacaaggcctacgaccggcagctcgacagcggagacaacccgtacctcaagtacaaccgcgccgacgcggagtttcaggagcgccttaaagaagatacgtcttttgggggcaacctcgcaagagcagtattccaggcgaaaaagagggttcttgaacctctgggcctggttgaggagcctgttaagacggctccgggaaaaaagaggccggtagagcactctcctgcggagccagattcctcctccggaactggaaagtcgggccaacagcctgcaagaaagagattgaattttggtcagactggagacgcagactccgtacctgacccccagcctctcggacagccaccagcagccccctctggtctgggaactaatacgatggcttcaggcagtggcgcaccaatggcagacaataacgagggcgccgacggagtgggtaattcctcgggaaattggcattgcgattccacatggatgggcgacagagtcatcaccaccagcacccgcacctgggctctgcccacctacaacaaccatctgtacaagcaaatttccagccagtctggagccagcaacgacaaccactactttggctacagcaccccttgggggtattttgacttcaacagattccactgccacttctccccacgtgactggcaaagactcatcaacaacaattggggattccggcccaaaagactcaacttcaagctctttaacattcaagtcaaggaggtcacgcagaatgacggtacgacgacgattgccaataaccttaccagcacggttcaggtgtttactgactcggagtaccagctcccgtacgtcctcggctcggcgcatcaaggatgcctcccgccgttcccagcagacgtcttcatggtgccacagtatggatacctcaccctgaacaacgggagtcaggcggtaggacgctcttcattttactgcctggagtactttccttctcagatgctgcgtaccggaaacaactttaccttcagctacacctttgaggacgttccttttcacagcagctacgctcacagccagagtttggaccgtcttatgaatcctctcatcgaccagtacctgtattacttgagcagaacaaacactccaagcggaaccactacgcagtccaggcttcagttttctcaagccggagcgagtgacattcgggaccagtctaggaactggcttcctggaccctgttaccgccagcagcgagtatcaaagacagctgcggacaacaacaacagtgattactcgtggactggagctaccaagtatcacctcaatggaagagactctctggtgaatccgggcacagccatggccagccacaaggacgatgaagaaaagtattttcctcagagcggggttctcatcttcggaaaacaagactcgggaaaaactaatgtggacattgaaaaggtcatgattacagacgaagaggaaatcaggaccaccaatcccgtggctacggagcagtatggttctgtatctaccaatctccagagcggcaacacacaagcagctacctcagatgtcaacacacaaggcgttcttccaggcatggtccggcaggacagagacgtgtacctgcagggacccatctgggcaaagattccacacacggacggacattttcacccttctcctcttatgggaggatttggactgaagcaccctcccccgcagattctcatcaagaataccccggtacctgcgaatccttctaccaccttcagcgcggcaaagtttgcttccttcatcacacagtactccacggggcaggtcagcgtggagatcgagtgggagccgcagaaagagaacagcaaacgctggaaccccgagatccagtatacctccaactacaacaagtctgttaatgtggactttactgtggacactaatggcgtgtattcagagcctcgccccattggcacaagatacctgactcgtaatctgtaa

SEQ ID NO: 3168 - DNA, 2208 bp, Artificial Sequence
  source: /note="Description of Artificial Sequence: Synthetic polynucleotide"
atggctgccgatggttatcttccagattggctcgaggacactctctctgaaggaataagacagtggtggaagctcaaacctggcccaccaccgccaaagcccgcagagcggcataaggacgacagcaggggtcttgtgcttcctgggtacaagtacctcggacccttcaacggactcgacaaaggagagccggtcaacgaggcagacgccgcggccctcgagcacgacaaggcctacgaccggcagctcgacagcggagacaacccgtacctcaagtacaaccacgccgacgcggagtttcaggagcgccttaaagaagatacgtcttttgggggcaacctcgcaagagcagtattccaggcgaaaaagagggttcttgaacctctgggcctggttgaggagcctgttaagacggctccgggaaaaaagaggccggtagagcactctcctgcggagccagattcctcctccggaactggaaagtcgggccaacagcctgcaagaaagagattgaattttggtcagactggagacgcagactccgtacctgacccccagcctctcggacagccaccagcagccccctctggtctgggaactaatacgatggcttcaggcagtggcgcaccaatggcagacaataacgagggcgccgacggagtgggtaattcctcgggaaattggcattgcgattccacatggatgggcgacagagtcatcaccaccagcacccgcacctgggctctgcccacctacaacaaccatctgtacaagcaaatttccagccagtctggagccagcaacgacaaccactacttcggctacagcaccccttgggggtattttgacttcaacagattccactgccacttctccccacgtgactggcaaagactcatcaacaacaattggggattccggcccaaaagactcaacttcaagctctttaacattcaagtcaaggaggtcacgcagaatgacggtacgacgacgattgccaataaccttaccagcacggttcaggtgtttactgactcggagtaccagctcccgtacgtcctcggctcggcgcatcaaggatgcctcccgccgttcccagcagacgtcttcatggtgccacagtatggatacctcaccctgaacaacgggagtcaggcggtaggacgctcttcattttactgcctggagtactttccttctcagatgctgcgtaccggaaacaactttaccttcagctacacctttgaggacgttccttttcacagcagctacgctcacagccagagtttggaccgtcttatgaatcctctcatcgaccagtacctgtattacttgagcagaacaaacactccaagcggaaccactacgcagtccaggcttcagttttctcaagccggagcgagtgacattcgggaccagtctaggaactggcttcctggaccctgttaccgccagcagcgagtatcaaagacagctgcggacaacaacaacagtgattactcgtggactggagctaccaagtatcacctcaatggaagagactctctggtgaatccgggcacagccatggccagccacaaggacgatgaagaaaagtattttcctcagagcggggttctcatcttcggaaaacaagactcgggaaaaactaatgtggacattgaaaaggtcatgattacagacgaagaggaagtcaggaccaccaatcccgtggctacggagcagtatggttctgtatctaccaatctccagagcggcaacacacaagcagctacctcagatgtcaacacacaaggcgttcttccaggcatggtccggcaggacagagacgtgtacctgcagggacccatctgggcaaagattccacacacggacggacattttcacccttctcctcttatgggaggatttggactgaagcaccctcccccgcagattctcatcaagaataccccggtacctgcgaatccttctaccaccttcagcgcggcaaagtttgcttccttcatcacacagtactccacggggcaggtcagcgtggagatcgagtgggagccgcagaaagagaacagcaaacgctggaaccccgagatccagtatacctccaactacaacaagtctgttaatgtggactttactgtggacactaatggcgtgtattcagagcctcgccccattggcacaagatacctgactcgtaatctgtaa

SEQ ID NO: 3169 - DNA, 2208 bp, Artificial Sequence
  source: /note="Description of Artificial Sequence: Synthetic polynucleotide"
atggctgccgatggttatcttccagattggctcgaggacactctctctgaaggaataagacagtggtggaagctcaaacctggcccaccaccgccaaagcccgcagagcggcataaggacgacagcaggggtcttgtgcttcctgggtacaagtacctcggacccttcaacggactcgacaaaggagagccggtcaacgaggcagacgccgcggccctcgagcacgacaaggcctacgaccggcagctcgacagcggagacaacccgtacctcaagtacaaccacgccgacgcggagtttcaggagcgccttaaagaagatacgtcttttgggggcaacctcgcaagagcagtattccaggcgaaaaagagggttcttgaacctctgggcctggttgaggagcctgttaagacggctccgggaaaaaagaggccggtagagcactctcctgcggggccagattcctcctccggaactggaaagtcgggccaacagcctgcaagaaagagattgaattttggtcagactggagacgcagactccgtacctgacccccagcctctcggacagccaccagcagccccctctggtctgggaactaatacgatggcttcaggcagtggcgcaccaatggcagacaataacgagggcgccgacggagtgggtaattcctcgggaaattggcattgcgattccacatggatgggcgacagagtcatcaccaccagcacccgcacctgggctctgcccacctacaacaaccatctgtacaagcaaatttccagccagtctggagccagcaacgacaaccactactttggctacagcaccccttgggggtattttgacttcaacagattccactgccacttctccccacgtgactggcaaagactcatcaacaacaattggggattccggcccaaaagactcaacttcgagctctttaacattcaagtcaaggaggtcacgcagaatgacggtacgacgacgattgccaataaccttaccagcacggttcaggtgtttactgactcggagtaccagctcccgtacgtcctcggctcggcgcatcaaggatgcctcccgccgttcccagcagacgtcttcatggtgccacagtatggatacctcaccctgaacaacgggagtcaggcggtaggacgctcttcattttactgcctggagtactttccttctcagatgctgcgtaccggaaacaactttaccttcagctacacctttgaggacgttccttttcacagcagctacgctcacagccagagtttggaccgtctcatgaatcctctcatcgaccagtacctgtattacttgagcagaacaaacactccaagcggaaccactacgcagtccaggcttcagttttctcaagccggagcgagtgacattcgggaccagtctaggaactggcttcctggaccctgttaccgccagcagcgagtatcaaagacagctgcggacaacaacaacagtgattactcgtggactggagctaccaagtatcacctcaatggaagagactctctggtgaatccgggcacagccatggccagccacaaggacgatgaagaaaagtattttcctcagagcggggttctcatcttcggaaaacaagactcgggaaaaactaatgtggacattgaaaaggtcatgattacagacgaagaggaaatcaggaccaccaatcccgtggctacggagcagtatggttctgtatctaccaatctccagagcggcaacacacaagcagctacctcagatgtcaacacacaaggcgttcttccaggcatggtctggcaggacagagacgtgtacctgcagggacccatctgggcaaagattccacacacggacggacactttcacccttctcctcttatgggaggatttggactgaagcaccctcccccgcagattctcatcaagagtaccccggtacctgcgaatccttctaccaccttcagcgcggcaaagtttgcttccttcatcacacagtactccacggggcaggtcagcgtggagatcgagtgggagctgcagaaagagaacagcaaacgctggaaccccgagatccagtatacctccaactacaacaagtctgttaatgtggactttactgtggacactaatggcgtgtattcagagcctcgccccattggcacaagatacctgactcgtaatctgtaa

SEQ ID NO: 3170 - DNA, 2208 bp, Artificial Sequence
  source: /note="Description of Artificial Sequence: Synthetic polynucleotide"
atggctgccgatggttatcttccagattggctcgaggacactctctctgaaggaataagacagtggtggaagctcaaacctggcccaccaccgccaaagcccgcagagcggcataaggacgacagcaggggtcttgtgcttcctgggtacaagtacctcggacccttcaacggactcgacaaaggagagccggtcaacgaggcagacgccgcggccctcgagcacgacaaggcctacgaccggcagctcgacagcggagacaacccgtacctcaagtacaaccacgccgacgcggagtttcaggagcgccttaaagaagatacgtcttttgggggcaacctcgcaagagcagtattccaggcgaaaaagagggttcttgaacctctgggcctggttgaggagcctgttaagacggctccgggaaaaaagaggccggtagagcactctcctgcggggccagattcctcctccggaactggaaagtcgggccaacagcctgcaagaaagagattgaattttggtcagactggagacgcagactccgtacctgacccccagcctctcggacagccaccagcagccccctctggtctgggaactaatacgatggcttcaggcagtggcgcaccaatggcagacaataacgagggcgccgacggagtgggtaattcctcgggaaattggcattgcgattccacgtggatgggcgacagagtcatcaccaccagcacccgcacctgggctctgcccacctacaacaaccatctgtacaagcaaatttccagccagtctggagccagcaacgacaaccactactttggctacagcaccccttgggggtattttgacttcaacagattccactgctacttctccccacgtgactggcaaagactcatcaacaacaattggggattccggcccaaaagactcaacttcgagctctttaacattcaagtcaaggaggtcacgcagaatgacggtacgacgacgattgccaataaccttaccagcacggttcaggtgtttactgactcggagtaccagctcccgtacgtcctcggctcggcgcatcaaggatgcctcccgccgttcccagcagacgtcttcatggtgccacagtatggatacctcaccctgaacaacgggagtcaggcggtaggacgctcttcattttactgcctggagtactttccttctcagatgctgcgtaccggaaacaactttaccttcagctacacctttgaggacgttccttttcacagcagctacgctcacagccagagtttggaccgtctcatgaatcctctcatcgaccagtacctgtattacttgagcagaacaaacactccaagcggaaccactacgcagtccaggcttcagttttctcaagccggagcgagtgacattcgggaccagtctaggaactggcttcctggaccctgttaccgccagcagcgagtatcaaagacagctgcggacaacaacaacagtgattactcgtggactggagctaccaagtatcacctcaatggaagagactctctggtgaatccgggcacagccatggccagccacaaggacgatgaagaaaagtattttcctcagagcggggttctcatcttcggaaaacaagactcgggaaaaactaatgtggacattgaaaaggtcatgattacagacgaagaggaaatcaggaccaccaatcccgtggctacggagcagtatggttctgtatctaccaatctccagagcggcaacacacaagcagctacctcagatgtcaacacacaaggcgttcttccaggcatggtctggcaggacagagacgtgtacctgcagggacccatctgggcaaagattccacacacggacggacactttcacccttctccacttatgggaggatttggactgaagcaccctcccccgcagattctcatcaagagtaccccggtacctgcgaatccttctaccaccttcagcgcggcaaagtttgcttccttcatcacacagtactccacggggcaggtcagcgtggagatcgagtgggagctgcagaaagagaacagcaaacgctggaaccccgagatccagtatacctccaactacaacaagtccgttaatgtggactttactgtggacactaatggcgtgtattcagagcctcgccccattggcacaagatacctgactcgtaatctgtaa

SEQ ID NO: 3171 - DNA, 2205 bp, Artificial Sequence
  source: /note="Description of Artificial Sequence: Synthetic polynucleotide"
atggctgccgatggttatcttccagattggctcgaggacactctctctgaaggaataagacagtggtggaagctcaaacctggcccaccaccgccaaagcccgcagagcggcataaggacgacagcaggggtcttgtgcttcctgggtacaagtacctcggacccttcaacggactcgacaaaggagagccggtcaacgaggcagacgccgcggccctcgagcacgacaaggcctacgaccggcagctcgacagcggagacaacccgtacctcaagtacaaccacgccgacgcggagtttcaggagcgccttaaagaagatacgtcttttgggggcaacctcgcaagagcagtattccaggcgaaaaagagggttcttgaacctctgggcctggttgaggagcctgttaagacggctccgggaaaaaagaggccggtagagcactctcctgcggagccagattcctcctccggaactggaaagtcgggccaacagcctgcaagaaagagattgaattttggtcagactggagacgcagactccgtacctgacccccagcctctcggacagccaccagcagccccctctggtctgggaactaatacgatggcttcaggcagtggcgcaccaatggcagacaataacgagggcgccgacggagtgggtaattcctcgggaaattggcattgcgattccacatggatgggcgacagagtcatcaccaccagcacccgcacctgggctctgcccacctacaacaaccatctgtacaagcaaatttccagccagtctggagccagcaacgacaaccactactttggctacagcaccccttgggggtattttgacttcaacagattccactgccacttctccccacgtgactggcaaagactcatcaacaacaattggggattccggcccaaaagactcaacttcaagctctttaacattcaagtcaaggaggtcacgcagaatgacggtacgacgacgattgccaataaccttaccagcacggttcaggtgtttactgactcggagtaccagctcccgtacgtcctcggctcggcgcatcaaggatgcctcccgccgttcccagcagacgtcttcatggtgccacagtatggatacctcaccctgaacaacgggagtcaggcggtaggacgctcttcattttactgcctggagtactttccttctcagatgctgcgtaccggaaacaactttaccttcagctacacctttgaggacgttccttttcacagcagctacgctcacagccagagtttggaccgtcttatgaatcctctcatcgaccagtacctgtattacttgagcagaacaaacactccaagcggaaccactacgcagtccaggcttcagttttctcaagccggagcgagtgacattcgggaccagtctaggaactggcttcctggaccctgttaccgccagcagcgagtatcaaagacagctgcggacaacaacagtgattactcgtggactggagctaccaagtatcacctcaatggaagagactctctggtgaatccgggcacagccatggccagccacaaggacgatgaagaaaagtattttcctcagagcggggttctcatcttcggaaaacaagactcgggaaaaactaatgtggacattgaaaaggtcatgattacagacgaagaggaaatcaggaccaccaatcccgtggctacggagcagtatggttctgtatctaccaatctccagagcggcaacacacaagcagctacctcagatgtcaacacacaaggcgttcttccaggcatggtccggcaggacagagacgtgtacctgcagggacccatctgggcaaagattccacacacggacggacattttcacccttctcctcttatgggaggatttggactgaagcaccctcccccgcagattctcatcaagaataccccggtacctgcgaatccttctaccaccttcagcgcggcaaagtttgcttccttcatcacacagtactccacggggcaggtcagcgtggagatcgagtgggagccgcagaaagagaacagcaaacgctggaaccccgagatccagtatacctccaactacaacaagtctgttaatgtggactttactgtggacactaatggcgtgtattcagagcctcgccccattggcacaagatacctgactcgtaatctgtaa

SEQ ID NO: 3172 - DNA, 2208 bp, Artificial Sequence
  source: /note="Description of Artificial Sequence: Synthetic polynucleotide"
atggctgccgatggttatcttccagattggctcgaggacactctctctgaaggaataagacagtggtggaagctcaaacctggcccaccaccgccaaagcccgcagagcggcataaggacgacagcaggggtcttgtgcttcctgggtacaagtgcctcggacccttcaacggactcgacaaaggagagccggtcaacgaggcagacgccgcggccctcgagcacgacaaggcctacgaccggcagctcgacagcggagacaacccgtacctcaagtacaaccacgccgacgcggagtttcaggagcgccttaaagaagatacgtcttttgggggcaacctcgcaagagcagtattccaggcgaaaaagagggttcttgaacctctgggcctggttgaggagcctgttaagacggctccgggaaaaaagaggccggtagagcactctcctgcggagtcagattcctcctccggaactggaaagtcgggccaacagcctgcaagaaagagattgaattttggtcagactggagacgcagactccgtacctgacccccagcctctcggacagccaccagcagccccctctggtctgggaactaatacgatggcttcaggcagtggcgcaccaatggcagacaataacgagggcgccgacggagtgggtaattcctcgggaaattggcattgcgattccacatggatgggcgacagagtcatcaccaccagcacccgcacctgggctctgcccacctacaacaaccatctgtacaagcaaatttccagccagtctggagccagcaacgacaaccactactttggctacagcaccccttgggggtattttgacttcaacagattccactgccacttctccccacgtgactggcaaagactcatcaacaacaattggggattccggcccaaaagactcaacttcaagctctttaacattcaagtcaaggaggtcacgcagaatgacggtacgacgacgattgccaataaccttaccagcacggttcaggtgtttactgactcggagtaccagctcccgtacgtcctcggctcggcgcatcaaggatgcctcccgccgttcccagcagacgtcttcatggtgccacagtatggatacctcaccctgaacaacgggagtcaggcggtaggacgctcttcattttactgcctggagtactttccttctcagatgctgcgtaccggaaacaactttaccttcagctacacctttgaggacgttccttttcacagcagctacgctcacagccagagtttggaccgtctcatgaatcctctcatcgaccagtacctgtattacttgagcagaacaaacactccaagcggaaccactacgcagtccaggcttcagttttctcaagccggagcgagtgacattcgggaccagtctaggaactggcttcctggaccctgttaccgccagcagcgagtatcaaagacagctgcggacaacaacaacagtgattactcgtggactggagctaccaagtatcacctcaatggaagagactctctggtgaatccgggcacagccatggccagccacaaggacgatgaagaaaagtattttcctcagagcggggttctcatcttcggaaaacaagactcgggaaaaactaatgtggacattgaaaaggtcatgattacagacgaagaggaaatcaggaccaccaatcccgtggctacggagcagtatggttctgtatctaccaatctccagagcggcaacacacaagcagctacctcagatgtcaacacacaaggcgttcttccaggcatggtctggcaggacagagacgtgtacctgcagggacccatctgggcaaagattccacacacggacggacattttcacccttctcctcttatgggaggatttggactgaagcaccctcccccgcagattctcatcaagaataccccggtacctgcgaatccttctaccaccttcagcgcggcaaagtttgcttccttcatcacacagtactccacggggcaggtcagcgtggagatcgagtgggagctgcagaaagagaacagcaaacgctggaaccccgagatccagtatacctccaactacaacaagtctgttaatgtggactttactgtggacactaatggcgtgtattcagagcctcgccccattggcacaagatacctgactcgtaatctgtaa

SEQ ID NO: 3173 - DNA, 2208 bp, Artificial Sequence
  source: /note="Description of Artificial Sequence: Synthetic polynucleotide"
atggctgccgatggttatcttccagattggctcgaggacattctctctgaaggaataagacagtggtggaagctcaaacctggcccaccaccaccaaagcccgcagagcggcataaggacgacagcaggggtcttgtgcttcctgggtacaagtacctcggacccttcaacggactcgacaaaggagagccggtcaacgaggcagacgccgcggccctcgagcacgacaaggcctacgaccggcagctcgacagcggagacaacccgtacctcaagtacaaccacgccgacgcggagtttcaggagcgtcttaaagaagatacgtcttttgggggcaacctcggacgagcagtcttccaggcaaaaaagagggttcttgaacctctgggcctggttgaggaacctgttaagacggctccgggaaaaaagaggccggtagagcaatctcctgcggagccagactcctcctcgggaaccggaaaggcgggcaaccagcctgcaagaaagagattgaattttggtcagactggagacgcagactccgtacctgacccccagcctctcggacagccaccagcagccccctctggtctgggaactaatacgatggcttcaggcagtggcgcaccaatggcagacaataacgagggcgccgacggagtgggtaattcctcgggaaattggcattgcgattccacatggatgggcgacagagtcatcaccaccagcacccgcacctgggctctgcccacctacaacaaccatctgtacaagcaaatttccagccagtctggagccagcaacgacaaccactactttggctacagcaccccttgggggtattttgacttcaacagattccactgccacttctccccacgtgactggcaaagactcatcaacaacaattggggattccggcccaaaagactcaacttcaagctctttaacattcaagtcaaggaggtcacgcagaatgacggtacgacgacgattgccaataaccttaccagcacggttcaggtgtttactgactcggagtaccagctcccgtacgtcctcggctcggcgcatcaaggatgcctcccgccgttcccagcagacgtcttcatggtgccacagtatggatacctcaccctgaacaacgggagtcaggcggtaggacgctcttcattttactgcctggagtactttccttctcagatgctgcgtaccggaaacaactttaccttcagctacacctttgaggacgttccttttcacagcagctacgctcacagccagagtttggaccgtcttatgaatcctctcatcgaccagtacctgtattacttgagcagaacaaacactccaagcggaaccactacgcagtccaggcttcagttttctcaagccggagcgagtgacattcgggaccagtctaggaactggcttcctggaccctgttaccgccagcagcgagtatcaaagacagctgcggacaacaacaacagtgattactcgtggactggagctaccaagtatcacctcaatggaagagactctctggtgaatccgggcacagccatggccagccacaaggacgatgaagaaaagtattttcctcagagcggggttctcatcttcggaaaacaagactcgggaaaaactaatgtggacattgaaaaggtcatgattacagacgaagaggaaatcaggaccaccaatcccgtggctacggagcagtatggttctgtatctaccaatctccagagcggcaacacacaagcagctacctcagatgtcaacacacaaggcgttcttccaggcatggtccggcaggacagagacgtgtacctgcagggacccatctgggcaaagattccacacacggacggacattttcacccttctcctcttatgggaggatttggactgaagcaccctcccccgcagattctcatcaagaataccccggtacctgcgaatccttctaccaccttcagcgcggcaaagtttgcttccttcatcacacagtactccacggggcaggtcagcgtggagatcgagtgggagccgcagaaagagaacagcaaacgctggaaccccgagatccagtatacctccaactacaacaagtctgttaatgtggactttactgtggacactaatggcgtgtattcagagcctcgccccattggcacaagatacctgactcgtaatctgtaa

SEQ ID NO: 3174 - DNA, 2208 bp, Artificial Sequence
  source: /note="Description of Artificial Sequence: Synthetic polynucleotide"
atggctgccgatggttatcttccagattggctcgaggacactctctctgaaggaataagacagtggtggaagctcaaacctggcccaccaccgccaaagcccgcagagcggcataaggacgacagcaggggtcttgtgcttcctgggtacaagtacctcggacccttcaacggactcgacaaaggagagccggtcaacgaggcagacgccgcggccctcgagcacgacaaggcctacgaccggcagctcgacagcggagacaacccgtacctcaagtacaaccacgccgacgcggagtttcaggagcgccttaaagaagatacgtcttttgggggcaacctcgcaagagcagtattccaggcgaaaaagagggttcttgaacctctgggcctggttgaggagcctgttaagacggctccgggaaaaaagaggccggtagagcactctcctgcggagccagattcctcctccggaactggaaagtcgggccaacagcctgcaagaaagagattgaattttggtcagactggagacgcagactccgtacctgacccccagcctctcggacagccaccagcagccccctctggtctgggaactaatacgatggcttcaggcagtggcgcaccaatggcagacaataacgagggcgccgacggagtgggtaattcctcgggaaattggcattgcgattccacatggatgggcgacagagtcatcaccaccagcacccgcacctgggctctgcccacctacaacaaccatctgtacaagcaaatttccagccagtctggagccagcaacgacaaccactacttcggctacagcaccccttgggggtattttgacttcaacagattccactgccacttctccccacgtgactggcaaagactcatcaacaacaattggggattccggcccaaaagactcaacttcaagctctttaacattcaagtcaaggaggtcacgcagaatgacggtacgacgacgattgccaataaccttaccagcacggttcaggtgtttactgactcggagtaccagctcccgtacgtcctcggctcggcgcatcaaggatgcctcccgccgttcccagcagacgtcttcatggtgccacagtatggatacctcaccctgaacaacgggagtcaggcggtaggacgctcttcattttactgcctggagtactttccttctcagatgctgcgtaccggaaacaactttaccttcagctacacctttgaggacgttccttttcacagcagctacgctcacagccagagtttggaccgtcttatgaatcctctcatcgaccagtacctgtattacttgagcagaacaaacactccaagcggaaccactacgcagtccaggcttcagttttctcaagccggagcgagtgacattcgggaccagtctaggaactggcttcctggaccctgttaccgccagcagcgagtatcaaagacagctgcggacaacaacaacagtgattactcgtggactggagctaccaagtatcacctcaatggaagagactctctggtgaatccgggcacagccatggccagccacaaggacgatgaagaaaagtattttcctcagagcggggttctcatcttcggaaaacaagactcgggaaaaactaatgtggacattgaaaaggtcatgattacagacgaagaggaaatcaggaccaccaatcccgtggctacggagcagtatggttctgtatctaccaatctccagagcggcaacacacaagcagctacctcagatgtcaacacacaaggcgttcttccaggcatggtccggcaggacagagacgtgtacctgcagggacccatctgggcaaagattccacacacggacggacattttcacccttctcctcttatgggaggatttggactgaagcaccctcccccgcagattctcatcaagaataccccggtacctgcgaatccttctaccaccttcagcgcggcaaagtttgcttccttcatcacacagtactccacggggcaggtcagcgtggagatcgagtgggagccgcagaaagagaacagcaaacgctggaaccccgagatccagtatacctccaactacaacaagtctgttaatgtggactttactgtggacactaatggcgtgtattcagagcctcgccccattggcacaagatgcctgactcgtaatctgtaa

SEQ ID NO: 3175 - DNA, 2208 bp, Artificial Sequence
  source: /note="Description of Artificial Sequence: Synthetic polynucleotide"
atggctgccgatggttatcttccagattggctcgaggacactctctctgaaggaataagacagtggtggaagctcaaacctggcccaccaccgccaaagcccgcagagcggcataaggacgacagcaggggtcttgtgcttcctgggtacaagtacctcggacccttcaacggactcgacaaaggagagccggtcaacgaggcagacgccgcggccctcgagcacgacaaggcctacgaccggcagctcgacagcggagacaacccgtacctcaagtacaaccacgccgacgcggagtttcaggagcgccttaaagaagatacgtcttttgggggcaacctcgcaagagcagtattccaggcgaaaaagagggttcttgaacctctgggcctggttgaggagcctgttaagacggctccgggaaaaaagaggccggtagagcactctcctgcggagccagattcctcctccggaactggaaagtcgggccaacagcctgcaagaaagagattgaattttggtcagactggagacgcagactccgtacctgacccccagcctctcggacagccaccagcagccccctctggtctgggaactaatacgatggcttcaggcagtggcgcaccaatggcagacaataacgagggcgccgacggagtgggtaattcctcgggaaattggcattgcgattccacatggatgggcgacagagtcatcaccaccagcacccgcacctgggctctgcccacctacaacaaccatctgtacaagcaaatttccagccagtctggagccagcaacgacaaccactacttcggctacagcaccccttgggggtattttgacttcaacagattccactgccacttctccccacgtgactggcaaagactcatcaacaacaattggggattccggcccaaaagactcaacttcaagctctttaacattcaagtcaaggaggtcacgcagaatgacggtacgacgacgattgccaataaccttaccagcacggttcaggtgtttactgactcggagtaccagctcccgtacgtcctcggctcggcgcatcaaggatgcctcccgccgttcccagcagacgtcttcatggtgccacagtatggatacctcaccctgaacaacgggagtcaggcggtaggacgctcttcattttactgcctggagtactttccttctcagatgctgcgtaccggaaacaactttaccttcagctacacctttgaggacgttccttttcacagcagctacgctcacagccagagtttggaccgtcttatgaatcctctcatcgaccagtacctgtattacttgagcagaacaaacactccaagcggaaccactacgcagtccaggcttcagttttctcaagccggagcgagtgacattcgggaccagtctaggaactggcttcctggaccctgttaccgccagcagcgagtatcaaagacagctgcggacaacaacaacagtgattactcgtggactggagctaccaagtatcacctcaatggaagagactctctggtgaatccgggcacagccatggccagccacaaggacgatgaagaaaagtattttcctcagagcggggttctcatcttcggaaaacaagactcgggaaaaactaatgtggacattgaaaaggtcatgattacagacgaagaggaaatcaggaccaccaatcccgtggctacggagcagtatggttctgtatctaccaatctccagagcggcaacacacaagcagctacctcagatgtcaacacacaaggcgttcttccaggcatggtccggcagggcagagacgtgtacctgcagggacccatctgggcaaagattccacacacggacggacattttcacccttctcctcttatgggaggatttggactgaagcaccctcccccgcagattctcatcaagaataccccggtacctgcgaatccttctaccaccttcagcgcggcaaagtttgcttccttcatcacacagtactccacggggcaggtcagcgtggagatcgagtgggagccgcagaaagagaacagcaaacgctggaaccccgagatccagtatacctccaactacaacaagtctgttaatgtggactttactgtggacactaatggcgtgtattcagagcctcgccccattggcacaagatacctgactcgtaatctgtaa

SEQ ID NO: 3176 - DNA, 2208 bp, Artificial Sequence
  source: /note="Description of Artificial Sequence: Synthetic polynucleotide"
atggctgccgatggttatcttccagattggctcgaggacactctctctgaaggaataagacagtggtggaagctcaaacctggcccaccaccgccaaagcccgcagagcggcataaggacgacagcaggggtcttgtgcttcctgggtacaagtacctcggacccttcaacggactcgacaaaggagagccggtcaacgaggcagacgccgcggccctcgagcacgacaaggcctacgaccggcagctcgacagcggagacaacccgtacctcaagtacaaccacgccgacgcggagtttcaggagcgccttaaagaagatacgtcttttgggggcaacctcgcaagagcagtattccaggcgaaaaagagggttcttgaacctctgggcctggttgaggagcctgttaagacggctccgggaaaaaagaggccggtagagcactctcctgcggagccagattcctcctccggaactggaaagtcgggccaacagcctgcaagaaagagattgaattttggtcagactggagacgcagactccgtacctgacccccagcctctcggacagccaccagcagccccctctggtctgggaactaatacgatggcttcaggcagtggcgcaccaatggcagacaataacgagggcgccgacggagtgggtaattcctcgggaaattggcattgcgattccacatggatgggcgacagagtcatcaccaccagcacccgcacctgggctctgcccacctacaacaaccatctgtacaagcaaatttccagccagtctggagccagcaacgacaaccactacttcggctacagcaccccttgggggtattttgacttcaacagattccactgccacttctccccacgtgactggcaaagactcatcaacaacaattggggattccggcccaaaagactcaacttcaagctctttaacattcaagtcaaggaggtcacgcagaatgacggtacgacgacgattgccaataaccttaccagcacggttcaggtgtttactgactcggagtaccagctcccgtacgtcctcggctcggcgcatcaaggatgcctcccgccgttcccagcagacgtcttcatggtgccacagtatggatacctcaccctgaacaacgggagtcaggcggtaggacgctcttcattttactgcctggagtactttccttctcagatgctgcgtaccggaaacaactttaccttcagctacacctttgaggacgttccttttcacagcagctacgctcacagccagagtttggaccgtcttatgaatcctctcatcgaccagtacctgtattacttgagcagaacaaacactccaagcggaaccactacgcagtccaggcttcagttttctcaagccggagcgagtgacattcgggaccagtctaggaactggcttcctggaccctgttaccgccagcagcgagtatcaaagacagctgcggacaacaacaacagtgattactcgtggactggagctaccaagtatcacctcaatggaagagactctctggtgaatccgggcacagccatggccagccacaaggacgatgaagaaaagtattttcctcagagcggggttctcatcttcggaaaacaagactcgggaaaaactaatgtggacattgaaaaggtcatgattacagacgaaggggaaatcaggaccaccaatcccgtggctacggagcagtatggttctgtatctaccaatctccagagcggcaacacacaagcagctacctcagatgtcaacacacaaggcgttcttccaggcatggtccggcaggacagagacgtgtacctgcagggacccatctgggcaaagattccacacacggacggacattttcacccttctcctcttatgggaggatttggactgaagcaccctcccccgcagattctcatcaagaataccccggtacctgcgaatccttctaccaccttcagcgcggcaaagtttgcctccttcatcacacagtactccacggggcaggtcagcgtggagatcgagtgggagccgcagaaagagaacagcaaacgctggaaccccgagatccagtatacctccaactacaacaagtctgttaatgtggactttactgtggacactaatggcgtgtattcagagcctcgccccattggcacaagatacctgactcgtaatctgtaa

SEQ ID NO: 3177 - DNA, 2208 bp, Artificial Sequence
  source: /note="Description of Artificial Sequence: Synthetic polynucleotide"
atggctgccgatggttatcttccagattggctcgaggacactctctctgaaggaataagacagtggtggaagctcaaacctggcccaccaccgccaaagcccgcagagcggcataaggacgacagcaggggtcttgtgcttcctgggtacaagtacctcggacccttcaacggactcgacaaaggagagccggtcaacgaggcagacgccgcggccctcgagcacgacaaggcctacgaccggcagctcgacagcggagacaacccgtacctcaagtacaaccacgccgacgcggagtttcaggagcgccttaaagaagatacgtcttttgggggcaacctcgcaagagcagtattccaggcgaaaaagagggttcttgaacctctgggcctggttgaggagcctgttaagacggctccgggaaaaaagaggccggtagagcactctcctgcggagccagattcctcctccggaactggaaagtcgggccaacagcctgcaagaaagagattgaattttggtcagactggagacgcagactccgtacctgacccccagcctctcggacagccaccagcagccccctctggtctgggaactaatacgatggcttcaggcagtggcgcaccaatggcagacaataacgagggcgccgacggagtgggtaattcctcgggaaattggcattgcgattccacgtggatgggcgacagagtcatcaccaccagcacccgcacctgggctctgcccacctacaacaaccatctgtacaagcaaatttccagccagtctggagccagcaacgacaaccactactttggctacagcaccccttgggggtattttgacttcaacagattccactgccacttctccccacgtgactggcaaagactcatcaacaacaattggggattccggcccaaaagactcaacttcgagctctttaacattcaagtcaaggaggtcacgcagaatgacggtacgacgacgattgccaataaccttaccagcacggttcaggtgtttactgactcggagtaccagctcccgtacgtcctcggctcggcgcatcaaggatgcctcccgccgttcccagcagacgtcttcatggtgccacagtatggatacctcaccctgaacaacgggagtcaggcggtaggacgctcttcattttactgcctggagtactttccttctcagatgctgcgtaccggaaacaactttaccttcagctacacctttgaggacgttccttttcacagcagctacgctcacagccagagtttggaccgtctcatgaatcctctcatcgaccagtacctgtattacttgagcagaacaaacactccaagcggaaccactacgcagtccaggcttcagttttctcaagccggagcgagtgacattcgggaccagtctaggaactggcttcctggaccctgttaccgccagcagcgagtatcaaagacagctgcggacaacaacaacagtgattactcgtggactggagctaccaagtatcacctcaatggaagagactctctggtgaatccgggcacagccatggccagccacaaggacgatgaagaaaagtattttcctcagagcggggttctcatcttcggaaaacaagactcgggaaaaactaatgtggacattgaaaaggtcatgattacagacgaagaggaaatcaggaccaccaatcccgtggctacggagcagtatggttctgtatctaccaatctccagagcggcaacacacaagcagctacctcagatgtcaacacacaaggcgttcttccaggcatggtctggcaggacagagacgtgtacctgcagggacccatctgggcaaagattccacacacggacggacactttcacccttctccacttatgggaggatttggactgaagcaccctcccccgcagattctcatcaagagtaccccggtacctgcgaatccttctaccaccttcagcgcggcaaagtttgcttccttcatcacacagtactccacggggcaggtcagcgtggagatcgagtgggagctgcagaaagagaacagcaaacgctggaaccccgagatccagtatacctccaactacaacaagtctgttaatgtggactttactgtggacactaatggcgtgtattcagagcctcgccccattggcacaagatacctgactcgtaatctgtaa

SEQ ID NO: 3178 - DNA, 2208 bp, Artificial Sequence
  source: /note="Description of Artificial Sequence: Synthetic polynucleotide"
atggctgccgatggttatcttccagattggctcgaggacattctctctgaaggaataagacagtggtggaagctcaaacctggcccaccaccaccaaagcccgcagagcggcataaggacgacagcaggggtcttgtgcttcctgggtacaagtacctcggacccttcaacggactcgacaaaggagagccggtcaacgaggcagacgccgcggccctcgagcacgacaaggcctacgaccggcagctcgacagcggagacaacccgtacctcaagtacaaccacgccgacgcggagtttcaggagcgtcttaaagaagatacgtcttttgggggcaacctcggacgagcagtcttccaggcaaaaaagagggttcttgaacctctgggcctggttgaggaacctgttaagacggctccgggaaaaaagaggccggtagagcaatctcctgcggagccagactcctcctcgggaaccggaaaggcgggcaaccagcctgcaagaaagagattgaattttggtcagactggagacgcagactccgtacctgacccccagcctctcggacagccaccagcagccccctctggtctgggatctactacaatggctacaggcagtggcgcaccaatggcagacaataacgagggtgccgatggagtgggtaattcctcaggaaattggcattgcgattccacatggatgggcgacagagtcatcaccaccagcacccgcacctgggctctgcccacctacaacaaccatctgtacaagcaaatttccagccagtctggagccagcaacgacaaccactactttggctacagcaccccttgggggtattttgacttcaacagattccactgccacttctccccacgtgactggcaaagactcatcaacaacaattggggattccggcccaaaagactcaacttcaagctctttaacattcaagtcaaggaggtcacgcagaatgacggtacgacgacgattgccaataaccttaccagcacggttcaggtgtttactgactcggagtaccagctcccgtacgtcctcggctcggcgcatcaaggatgcctcccgccgttcccagcagacgtcttcatggtgccacagtatggatacctcaccctgaacaacgggagtcaggcggtaggacgctcttcattttactgcctggagtactttccttctcagatgctgcgtaccggaaacaactttaccttcagctacacctttgaggacgttccttttcacagcagctacgctcacagccagagtttggaccgtcttatgaatcctctcatcgaccagtacctgtattacttgagcagaacaaacactccaagcggaaccactacgcagtccaggcttcagttttctcaagccggagcgagtgacattcgggaccagtctaggaactggcttcctggaccctgttaccgccagcagcgagtatcaaagacagctgcggacaacaacaacagtgattactcgtggactggagctaccaagtatcacctcaatggaagagactctctggtgaatccgggcacagccatggccagccacaaggacgatgaagaaaagtattttcctcagagcggggttctcatcttcggaaaacaagactcgggaaaaactaatgtggacattgaaaaggtcatgattacagacgaagaggaaatcaggaccaccaatcccgtggctacggagcagtatggttctgtatctaccaatctccagagcggcaacacacaagcagctacctcagatgtcaacacacaaggcgttcttccaggcatggtccggcaggacagagacgtgtacctgcagggacccatctgggcaaagattccacacacggacggacattttcacccttctcctcttatgggaggatttggactgaagcaccctcccccgcagattctcatcaagaataccccggtacctgcgaatccttctaccaccttcagcgcggcaaagtttgcttccttcatcacacagtactccacggggcaggtcagcgtggagatcgagtgggagccgcagaaagagaacagcaaacgctggaaccccgagatccagtatacctccaactacaacaagtctgttaatgtggactttactgtggacactaatggcgtgtattcagagcctcgccccattggcacaagatacctgactcgtaatctgtaa

SEQ ID NO: 3179 - DNA, 2208 bp, Artificial Sequence
  source: /note="Description of Artificial Sequence: Synthetic polynucleotide"
atggctgccgatggttatcttccagattggctcgaggacactctctctgaaggaataagacagtggtggaagctcaaacctggcccaccaccgccaaagcccgcagagcggcataaggacgacagcaggggtcttgtgcttcctgggtacaagtacctcggacccttcaacggactcgacaaaggagagccggtcaacgaggcagacgccgcggccctcgagcacgacaaggcctacgaccggcagctcgacagcggagacaacccgtacctcaagtacaaccacgccgacgcggagtttcaggagcgccttaaagaagatacgtcttttgggggcaacctcgcaagagcagtattccaggcgaaaaagagggttcttgaacctctgggcctggttgaggagcctgttaagacggctccgggaaaaaagaggccggtagagcactctcctgcggagccagattcctcctccggaactggaaagtcgggccaacagcctgcaagaaagagattgaattttggtcagactggagacgcagactccgtacctgacccccagcctctcggacagccaccagcagccccctctggtctgggaactaatacgatggcttcaggcagtggcgcaccaatggcagacaataacgagggcgccgacggagtgggtaattcctcgggaaattggcattgcgattccacatggatgggcgacagagtcatcaccaccagcacccgcacctgggctctgcccacctacaacaaccatctgtacaagcaaatttccagccagtctggagccagcaacgacaaccactactttggctacagcaccccttgggggtattttgacttcaacagattccactgccacttctccccacgtgactggcaaagactcatcaacaacaattggggattccggcccaaaagactcaacttcaagctctttaacattcaagtcaaggaggtcacgcagaatgacggtacgacgacgattgccaataaccttaccagcacggttcaggtgtttactgactcggagtaccagctcccgtacgtcctcggctcggcgcatcaaggatgcctcccgccgttcccagcagacgtcttcatggtgccacagtatggatacctcaccctgaacaacgggagtcaggcggtaggacgctcttcattttactgcctggagtactttccttctcagatgctgcgtaccggaaacaactttaccttcagctacacctttgaggacgttccttttcacagcagctacgctcacagccagagtttggaccgtcttatgaatcctctcatcgaccagtacctgtattacttgagcagaacaaacactccaagcggaaccactacgcagtccaggcttcagttttctcaagccggagcgagtgacattcgggaccagtctaggaactggcttcctggaccctgttaccgccagcagcgagtatcaaagacagctgcggacaacaacaacagtgattactcgtggactggagctaccaagtatcacctcaatggaagagactctctggtgaatccgggcacagccatggccagccacaaggacgatgaagaaaagtattttcctcagagcggggttctcatcttcggaaaacaagactcgggaaaaactaatgtggacattgaaaaggtcatgattacagacgaagaggaaatcaggaccaccaatcccgtggctacggagcagtatggttctgtatctaccaatctccagagcggcaacacacaagcagctacctcagatgtcaacacacaaggcgttcttccaggcatggtccggcaggacagagacgtgtacctgcagggacccatctgggcaaagattccacacacggacggacattttcacccttctcctcttatgggaggatttggactgaagcaccctcccccgcagattctcatcaagaataccccggtacctgcgaatccttctaccaccttcagcgcggcaaagtttgcttccttcatcacacagtactccacggggcaggtcagcgtggagatcgagtgggagccgcagaaagagaacagcaaacgctggaaccccgagatccagtatacctccaactacaacaagtctgttaatgtggactttactgtggacactaatggcgtgtattcagagcctcgccccattggcacaagatacctgactcgtaatctgtaa

SEQ ID NO: 3180 - DNA, 2208 bp, Artificial Sequence
  source: /note="Description of Artificial Sequence: Synthetic polynucleotide"
atggctgccgatggttatcttccagattggctcgaggacactctctctgaaggaataagacagtggtggaagctcaaacctggcccaccaccgccaaagcccgcagagcggcataaggacgacagcaggggtcttgtgcttcctgggtacaagtacctcggacccttcaacggactcgacaaaggagagccggtcaacgaggcagacgccgcggccctcgagcacgacaaggcctacgaccggcagctcgacagcggagacaacccgtacctcaagtacaaccacgccgacgcggagtttcaggagcgccttaaagaagatacgtcttttgggggcaacctcgcaagagcagtattccaggcgaaaaagagggttcttgaacctctgggcctggttgaggagcctgttaagacggctccgggaaaaaagaggccggtagagcactctcctgcggagccagattcctcctccggaactggaaagtcgggccaacagcctgcaagaaagagattgaattttggtcagactggagacgcagactccgtacctgacccccagcctctcggacagccaccagcagccccctctggtctgggaactaatacgatggcttcaggcagtggcgcaccaatggcagacaataacgagggcgccgacggagtgggtaattcctcgggaaattggcattgcgattccacatggatgggcgacagagtcatcaccaccagcacccgcacctgggctctgcccacctacaacaaccatctgtacaagcaaatttccagccagtctggagccagcaacgacaaccactacttcggctacagcaccccttgggggtattttgacttcaacagattccactgccacttctccccacgtgactggcaaagactcatcaacaacaattggggattccggcccaaaagactcaacttcaagctctttaacattcaagtcaaggaggtcacgcagaatgacggtacgacgacgattgccaataaccttaccagcacggttcaggtgtttactgactcggagtaccagctcccgtacgtcctcggctcggcgcatcaaggatgcctcccgccgttcccagcagacgtcttcatggtgccacagtatggatacctcacccagaacaacgggagtcaggcggtaggacgctcttcattttactgcctggagtactttccttctcagatgctgcgtaccggaaacaactttaccttcagctacacctttgaggacgttccttttcacagcagctacgctcacagccagagtttggaccgtcttatgaatcctctcatcgaccagtacctgtattacttgagcagaacaaacactccaagcggaaccactacgcagtccaggcttcagttttctcaagccggagcgagtgacattcgggaccagtctaggaactggcttcctggaccctgttaccgccagcagcgagtatcaaagacagctgcggacaacaacaacagtgattactcgtggactggagctaccaagtatcacctcaatggaagagactctctggtgaatccgggcacagccatggccagccacaaggacgatgaagaaaagtattttcctcagagcggggttctcatcttcggaaaacaagactcgggaaaaactaatgtggacattgaaaaggtcatgattacagacgaagaggaaatcaggaccaccaatcccgtggctacggagcagtatggttctgtatctaccaatctccagagcggcaacacacaagcagctacctcagatgtcaacacacaaggcgttcttccaggcatggtccggcaggacagagacgtgtacctgcagggacccatctgggcaaagattccacacacggacggacattttcacccttctcctcttatgggaggatttggactgaagcaccctcccccgcagattctcatcaagaataccccggtacctgcgaatccttctaccaccttcagcgcggcaaagtttgcttccttcatcacacagtactccacggggcaggtcagcgtggagatcgagtgggagccgcagaaagagaacagcaaacgctggaaccccgagatccagtatacctccaactacaacaagtctgttaatgtggactttactgtggacactaatggcgtgtattcagagcctcgccccattggcacaagatacctgactcgtaatctgtaa

SEQ ID NO: 3181 - DNA, 2208 bp, Artificial Sequence
  source: /note="Description of Artificial Sequence: Synthetic polynucleotide"
atggctgccgatggttatcttccagattggctcgaggacactctctctgaaggaataagacagtggtggaagctcaaacctggcccaccaccgccaaagcccgcagagcggcataaggacgacagcaggggtcttgtgcttcctgggtacaagtacctcggacccttcaacggactcgacaaaggagagccggtcaacgaggcagacgccgcggccctcgagcacgacaaggcctacgaccggcagctcgacagcggagacaacccgtacctcaagtacaaccgcgccgacgcggagtttcaggagcgccttaaagaagatacgtcttttgggggcaacctcgcaagagcagtattccaggcgaaaaagagggttcttgaacctctgggcctggttgaggagcctgttaagacggctccgggaaaaaagaggccggtagagcactctcctgcggggccagattcctcctccggaactggaaagtcgggccaacagcctgcaagaaagagattgaattttggtcagactggagacgcagactccgtacctgacccccagcctctcggacagccaccagcagccccctctggtctgggaactaatacgatggcttcaggcagtggcgcaccaatggcagacaataacgagggcgccgacggagtgggtaattcctcgggaaattggcattgcgattccacatggatgggcgacagagtcatcaccaccagcacccgcacctgggctctgcccacctacaacaaccatctgtacaagcaaatttccagccagtctggagccagcaacgacaaccactactttggctacagcaccccttgggggtattttgacttcaacagattccactgccacttctccccacgtgactggcaaagactcatcaacaacaattggggattccggcccaaaagactcaacttcgagctctttaacattcaagtcaaggaggtcacgcagaatgacggtacgacgacgattgccaataaccttaccagcacggttcaggtgtttactgactcggagtaccagctcccgtacgtcctcggctcggcgcatcaaggatgcctcccgccgttcccagcagacgtcttcatggtgccacagtatggataccccaccctgaacaacgggagtcaggcggtaggacgctcttcattttactgcctggagtactttccttctcagatgctgcgtaccggaaacaactttaccttcagctacacctttgaggacgttccttttcacagcagctacgctcacagccagagtttggaccgtctcatgaatcctctcatcgaccagtacctgtattacttgagcagaacaaacactccaagcggaaccactacgcagtccaggcttcagttttctcaagccggagcgagtgacattcgggaccagtctaggaactggcttcctggaccctgttaccgccagcagcgagtatcaaagacagctgcggacaacaacaacagtgattactcgtggactggagctaccaagtatcacctcaatggaagagactctctggtgaatccgggcacagccatggccagccacaaggacgatgaagaaaagtattttcctcagagcggggttctcatcttcggaaaacaagactcgggaaaaactaatgtggacattgaaaaggtcatgattacagacgaagaggaaatcaggaccaccaatcccgtggctacggagcagtatggttctgtatctaccaatctccagagcggcaacacacaagcagctacctcagatgtcaacacacaaggcgttcttccaggcatggtctggcaggacagagacgtgtacctgcagggacccatctgggcaaagattccacacacggacggacactttcacccttctcctcttatgggaggatttggactgaagcaccctcccccgcagattctcatcaagagtaccccggtacctgcgaatccttctaccaccttcagcgcggcaaagtttgcttccttcatcacacagtactccacggggcaggtcagcgtggagatcgagtgggagctgcagaaagagaacagcaaacgctggaaccccgagatccagtatacctccaactacaacaagtctgttaatgtggactttactgtggacactaatggcgtgtattcagagcctcgccccattggcacaagatacctgactcgtaatctgtaa

SEQ ID NO: 3182 - DNA, 2208 bp, Artificial Sequence
  source: /note="Description of Artificial Sequence: Synthetic polynucleotide"
atggctgccgatggttatcttccagattggctcgaggacactctctctgaaggaataagacagtggtggaagctcaaacctggcccaccaccgccaaagcccgcagagcggcataaggacgacagcaggggtcttgtgcttcctgggtacaagtacctcggacccttcaacggactcgacaaaggagagccggtcaacgaggcagacgccgcggccctcgagcacgacaaggcctacgaccggcagctcgacagcggagacaacccgtacctcaagtacaaccacgccgacgcggagtttcaggagcgccttaaagaagatacgtcttttgggggcaacctcgcaagagcagtattccaggcgaaaaagagggttcttgaacctctgggcctggttgaggagcctgttaagacggctccgggaaaaaagaggccggtagagcactctcctgcggagccagattcctcctccggaactggaaagtcgggccaacagcctgcaagaaagagattgaattttggtcagactggagacgcagactccgtacctgacccccagcctctcggacagccaccagcagccccctctggtctgggaactaatacgatggcttcaggcagtggcgcaccaatggcagacaataacgagggcgccgacggagtgggtaattcctcgggaaattggcattgcgattccacatggatgggcgacagagtcatcaccaccagcacccgcacctgggctctgcccacctacaacaaccatctgtacaagcaaatttccagccagtctggagccagcaacgacaaccactactttggctacagcaccccttgggggtattttgacttcaacggattccactgccacttctccccacgtgactggcaaagactcatcaacaacaattggggattccggcccaaaagactcaacttcaagctctttaacattcaagtcaaggaggtcacgcagaatgacggtacgacgacgattgccaataaccttaccagcacggttcaggtgtttactgactcggagtaccagctcccgtacgtcctcggctcggcgcatcaaggatgcctcccgccgttcccagcagacgtcttcatggtgccacagtatggatacctcaccctgaacaacgggagtcaggcggtaggacgctcttcattttactgcctggagtactttccttctcagatgctgcgtaccggaaacaactttaccttcagctacacctttgaggacgttccttttcacagcagctacgctcacagccagagtttggaccgtcttatgaatcctctcatcgaccagtacctgtattacttgagcagaacaaacactccaagcggaaccactacgcagtccaggcttcagttttctcaagccggagcgagtgacattcgggaccagtctaggaactggcttcctggaccctgttaccgccagcagcgagtatcaaagacagctgcggacaacaacaacagtgattactcgtggactggagctaccaagtatcacctcaatggaagagactctctggtgaatccgggcacagccatggccagccacaaggacgatgaagaaaagtattttcctcagagcggggttctcatcttcggaaaacaagactcgggaaaaactaatgtggacattgaaaaggtcatgattacagacgaagaggaaatcaggaccaccaatcccgtggctacggagcagtatggttctgtatctaccaatctccagagcggcaacacacaagcagctacctcagatgtcaacacacaaggcgttcttccaggcatggtccggcaggacagagacgtgtacctgcagggacccatctgggcaaagattccacacacggacggacattttcacccttctcctcttatgggaggatttggactgaagcaccctcccccgcagattctcatcaagaataccccggtacctgcgaatccttctaccaccttcagcgcggcaaagtttgcttccttcatcacacagtactccacggggcaggtcagcgtggagatcgagtgggagccgcagaaagagaacagcaaacgctggaaccccgagatccagtatacctccaactacaacaagtctgttaatgtggactttactgtggacactaatggcgtgtattcagagcctcgccccattggcacaagatacctgactcgtaatctgtaa

SEQ ID NO: 3183 - DNA, 2208 bp, Artificial Sequence
  source: /note="Description of Artificial Sequence: Synthetic polynucleotide"
atggctgccgatggttatcttccagattggctcgaggacactctctctgaaggaataagacagtggtggaagctcaaacctggcccaccaccgccaaagcccgcagagcggcataaggacgacagcaggggtcttgtgcttcctgggtacaagtacctcggacccttcaacggactcgacaaaggagagccggtcaacgaggcagacgccgcggccctcgagcacgacaaggcctacgaccggcagctcgacagcggagacaacccgtacctcaagtacaaccacgccgacgcggagtttcaggagcgccttaaagaagatacgtcttttgggggcaacctcgcaagagcagtattccaggcgaaaaagagggttcttgaacctccgggcctggttgaggagcctgttaagacggctccgggaaaaaagaggccggtagagcactctcctgcggagccagattcctcctccggaactggaaagtcgggccaacagcctgcaagaaagagattgaattttggtcagaccggagacgcagactccgtacctgacccccagcctctcggacagccaccagcagccccctctggtctgggaactaatacgatggcttcaggcagtggcgcaccaatggcagacaataacgagggcgccgacggagtgggtaattcctcgggaaattggcattgcgattccacatggatgggcgacagagtcatcaccaccagcacccgcacctgggctctgcccacctacaacaaccatctgtacaagcaaatttccagccagtctggagccagcaacgacaaccactacttcggctacagcaccccttgggggtattttgacttcaacagattccactgccacttctccccacgtgactggcaaagactcatcaacaacaattggggattccggcccaaaagactcaacttcaagctctttaacattcaagtcaaggaggtcacgcagaatgacggtacgacgacgattgccaataaccttaccagcacggttcaggtgtttactgactcggagtaccagctcccgtacgtcctcggctcggcgcatcaaggatgcctcccgccgttcccagcagacgtcttcatggtgccacagtatggatacctcaccctgaacaacgggagtcaggcggtaggacgctcttcattttactgcctggagtactttccttctcagatgctgcgtaccggaaacaactttaccttcagctacacctttgaggacgttccttttcacagcagctacgctcacagccagagtttggaccgtcttatgaatcctctcatcgaccagtacctgtattacttgagcagaacaaacactccaagcggaaccactacgcagtccaggcttcagttttctcaagccggagcgagtgacattcgggaccagtctaggaactggcttcctggaccctgttaccgccagcagcgagtatcaaagacagctgcggacaacaacaacagtgattactcgtggactggagctaccaagtatcacctcaatggaagagactctctggtgaatccgggcacagccatggccagccacaaggacgatgaagaaaagtattttcctcagagcggggttctcatcttcggaaaacaagactcgggaaaaactaatgtggacattgaaaaggtcatgattacagacgaaggggaaatcaggaccaccaatcccgtggctacggagcagtatggctctgtatctaccaatctccagagcggcaacacacaagcagctacctcagatgtcaacacacaaggcgttcttccaggcatggtccggcaggacagagacgtgtacctgcagggacccatctgggcaaagattccacacacggacggacattttcacccttctcctcttatgggaggatttggactgaagcaccctcccccgcagattctcatcaagaataccccggtacctgcgaatccttctaccaccttcagcgcggcaaagtttgcttccttcatcacacagtactccacggggcaggtcagcgtggagatcgagtgggagccgcagaaagagaacagcaaacgctggaaccccgagatccagtatacctccaactacagcaagtctgttaatgtggactttactgtggacactaatggcgtgtattcagagcctcgccccattggcacaagatacctgactcgtaatctgtaa

SEQ ID NO: 3184 - DNA, 2208 bp, Artificial Sequence
  source: /note="Description of Artificial Sequence: Synthetic polynucleotide"
atggctgccgatggttatcttccagattggctcgaggacattctctctgaaggaataagacagtggtggaagctcaaacctggcccaccaccaccaaagcccgcagagcggcataaggacgacagcaggggtcttgtgcttcctgggtacaagtacctcggacccttcaacggactcgacaaaggagagccggtcaacgaggcagacgccgcggccctcgagcacgacaaggcctacgaccggcagctcgacagcggagacaacccgtacctcaagtacaaccacgccgacgcggagtttcaggagcgtcttaaagaagatacgtcttttgggggcaacctcggacgagcagtcttccaggcaaaaaagagggttcttgaacctctgggcctggttgaggaacctgttaagacggctccgggaaaaaagaggccggtagagcaatctcctgcggagccagactcctcctcgggaaccggaaaggcgggcaaccagcctgcaagaaagagattgaattttggtcagactggagacgcagactccgtacctgacccccagcctctcggacagccaccagcagccccctctggtctgggatctactacaatggctacaggcagtggcgcaccaatggcagacaataacgagggtgccgatggagtgggtaattcctcaggaaattggcattgcgattcccaatggttgggcgacagagtcatcaccaccagcacccgaacctgggccctgcccacctacaacaatcacctctacaagcaaatctccagccaatcaggagccagcaacgacaaccactactttggctacagcaccccctgggggtattttgacttcaacagattccactgccacttctccccacgtgactggcaaagactcatcaacaacaattggggattccggcccaaaagactcaacttcaagctctttaacattcaagtcaaggaggtcacgcagaatgacggtacgacgacgattgccaataaccttaccagcacggttcaggtgtttactgactcggagtaccagctcccgtacgtcctcggctcggcgcatcaaggatgcctcccgccgttcccagcagacgtcttcatggtgccacagtatggatacctcaccctgaacaacgggagtcaggcggtaggacgctcttcattttactgcctggagtactttccttctcagatgctgcgtaccggaaacaactttaccttcagctacacctttgaggacgttccttttcacagcagctacgctcacagccagagtttggaccgtcttatgaatcctctcatcgaccagtacctgtattacttgagcagaacaaacactccaagcggaaccactacgcagtccaggcttcagttttctcaagccggagcgagtgacattcgggaccagtctaggaactggcttcctggaccctgttaccgccagcagcgagtatcaaagacagctgcggacaacaacaacagtgattactcgtggactggagctaccaagtatcacctcaatggaagagactctctggtgaatccgggcacagccatggccagccacaaggacgatgaagaaaagtattttcctcagagcggggttctcatcttcggaaaacaagactcgggaaaaactaatgtggacattgaaaaggtcatgattacagacgaagaggaaatcaggaccaccaatcccgtggctacggagcagtatggttctgtatctaccaatctccagagcggcaacacacaagcagctacctcagatgtcaacacacaaggcgttcttccaggcatggtccggcaggacagagacgtgtacctgcagggacccatctgggcaaagattccacacacggacggacattttcacccttctcctcttatgggaggatttggactgaagcaccctcccccgcagattctcatcaagaataccccggtacctgcgaatccttctaccaccttcagcgcggcaaagtttgcttccttcatcacacagtactccacggggcaggtcagcgtggagatcgagtgggagccgcagaaagagaacagcaaacgctggaaccccgagatccagtatacctccaactacaacaagtctgttaatgtggactttactgtggacactaatggcgtgtattcagagcctcgccccattggcacaagatacctgactcgtaatctgtaa

SEQ ID NO: 3185 - DNA, 2208 bp, Artificial Sequence
  source: /note="Description of Artificial Sequence: Synthetic polynucleotide"
atggctgccgatggttatcttccagattggctcgaggacactctctctgaaggaataagacagtggtggaagctcaaacctggcccaccaccgccaaagcccgcagagcggcataaggacgacagcaggggtcttgtgcttcctgggtacaagtacctcggacccttcaacggactcgacaaaggagagccggtcaacgaggcagacgccgcggccctcgagcacgacaaggcctacgaccggcagctcgacagcggagacaacccgtacctcaagtacaaccacgccgacgcggagtttcaggagcgccttaaagaagatacgtcttttgggggcaacctcgcaagagcagtattccaggcgaaaaagagggttcttgaacctctgggcctggttgaggagcctgttaagacggctccgggaaaaaagaggccggtagagcactctcctgcggagccagattcctcctccggaactggaaagtcgggccaacagcctgcaagaaagagattgaattttggtcagactggagacgcagactccgtacctgacccccagcctctcggacagccaccagcagccccctctggtctgggaactaatacgatggcttcaggcagtggcgcaccaatggcagacaataacgagggcgccgacggagtgggtaattcctcgggaaattggcattgcgattccacatggatgggcgacagagtcatcaccaccagcacccgcacctgggctctgcccacctacaacaaccatctgtacaagcaaatttccagccagtctggagccagcaacgacaaccactacttcggctacagcaccccttgggggtattttgacttcaacagattccactgccacttctccccacgtgactggcaaagactcatcaacaacaattggggattccggcccaaaagactcaacttcaagctctttaacattcaagtcaaggaggtcacgcagaatgacggtacgacgacgattgccaataaccttaccagcacggttcaggtgtttactgactcggagtaccagctcccgtacgtcctcggctcggcgcatcaaggatgcctcccgccgttcccagcagacgtcttcatggtgccacagtatggatacctcaccctgaacaacgggagtcaggcggtaggacgctcttcattttactgcctggagtactttccttctcagatgctgcgtaccggaaacaactttaccttcagctacacctttgaggacgttccttttcacagcagctacgctcacagccagagtttggaccgtcttatgaatcctctcatcgaccagtacctgtattacttgagcagaacaaacactccaagcggaaccactacgcagtccaggcttcagttttctcaagccggagcgagtgacattcgggaccagtctaggaactggcttcctggaccctgttaccgccagcagcgagtatcaaagacagctgcggacaacaacaacagtgattactcgtggactggagctaccaagtatcacctcaatggaagagactctctggtgaatccgggcacagccatggccagccacaaggacgatgaagaaaagtattttcctcagagcggggttctcatcttcggaaaacaagactcgggaaaaactaatgtggacattgaaaaggtcatgattacagacgaagaggaaatcaggaccaccaatcccgtggctacggagcagtatggttctgtatctaccaatctccagagcggcaacacacaagcagctacctcagatgtcaacacacaaggcgttcttccaggcacggtccggcaggacagagacgtgtacctgcagggacccatctgggcaaagattccacacacggacggacattttcacccttctcctcttatgggaggatttggactgaagcaccctcccccgcagattctcatcaagaataccccggtacctgcgaatccttctaccaccttcagcgcggcaaagtttgcttccttcatcacacagtactccacggggcaggtcagcgtggagatcgagtgggagccgcagaaagagaacagcaaacgctggaaccccgagatccagtatacctccaactacaacaagtctgttaatgtggactttactgtggacactaatggcgtgtattcagagcctcgccccattggcacaagatacctgactcgtaatctgtaa

SEQ ID NO: 3186 - DNA, 2208 bp, Artificial Sequence
  source: /note="Description of Artificial Sequence: Synthetic polynucleotide"
atggctgccgatggttatcttccagattggctcgaggacattctctctgaaggaataagacagtggtggaagctcaaacctggcccaccaccaccaaagcccgcagagcggcataaggacgacagcaggggtcttgtgcttcctgggtacaagtacctcggacccttcaacggactcgacaaaggagagccggtcaacgaggcagacgccgcggccctcgagcacgacaaggcctacgaccggcagctcgacagcggagacaacccgtacctcaagtacaaccacgccgacgcggagtttcaggagcgtcttaaagaagatacgtcttttgggggcaacctcggacgagcagtcttccaggcaaaaaagagggttcttgaacctctgggcctggttgaggarcctgttaagacggctccgggaaaaaagaggccggtagagcactctcctgcggagccagattcctcctccggaactggaaagtcgggccaacagcctgcaagaaagagattgaattttggtcagactggagacgcagactccgtacctgacccccagcctctcggacagccaccagcagccccctctggtctgggaactaatacgatggcttcaggcagtggcgcaccaatggcagacaataacgagggcgccgacggagtgggtaattcctcgggaaattggcattgcgattccacatggatgggcgacagagtcatcaccaccagcacccgcacctgggctctgcccacctacaacaaccatctgtacaagcaaatttccagccagtctggagccagcaacgacaaccactacttcggctacagcaccccttgggggtattttgacttcaacagattccactgccacttctccccacgtgactggcaaagactcatcaacaacaattggggattccggcccaaaagactcaacttcaagctctttaacattcaagtcaaggaggtcacgcagaatgacggtacgacgacgattgccaataaccttaccagcacggttcaggtgtttactgactcggagtaccagctcccgtacgtcctcggctcggcgcatcaaggatgcctcccgccgttcccagcagacgtcttcatggtgccacagtatggatacctcaccctgaacaacgggagtcaggcggtaggacgctcttcattttactgcctggagtactttccttctcagatgctgcgtaccggaaacaactttaccttcagctacacctttgaggacgttccttttcacagcagctacgctcacagccagagtttggaccgtcttatgaatcctctcatcgaccagtacctgtattacttgagcagaacaaacactccaagcggaaccactacgcagtccaggcttcagttttctcaagccggagcgagtgacattcgggaccagtctaggaactggcttcctggaccctgttaccgccagcagcgagtatcaaagacagctgcggacaacaacaacagtgattactcgtggactggagctaccaagtatcacctcaatggaagagactctctggtgaatccgggcacagccatggccagccacaaggacgatgaagaaaagtattttcctcagagcggggttctcatcttcggaaaacaagactcgggaaaaactaatgtggacattgaaaaggtcatgattacagacgaagaggaaatcaggaccaccaatcccgtggctacggagcagtatggttctgtatctaccaatctccagagcggcaacacacaagcagctacctcagatgtcaacacacaaggcgttcttccaggcatggtccggcaggacagagacgtgtacctgcagggacccatctgggcaaagattccacacacggacggacattttcacccttctcctcttatgggaggatttggactgaagcaccctcccccgcagattctcatcaagaataccccggtacctgcgaatccttctaccaccttcagcgcggcaaagtttgcttccttcatcacacagtactccacggggcaggtcagcgtggagatcgagtgggagccgcagaaagagaacagcaaacgctggaaccccgagatccagtatacctccaactacaacaagtctgttaatgtggactttactgtggacactaatggcgtgtattcagagcctcgccccattggcacaagatacctgactcgtaatctgtaa

SEQ ID NO: 3187 - DNA, 2208 bp, Artificial Sequence
  source: /note="Description of Artificial Sequence: Synthetic polynucleotide"
atggctgccgatggttatcttccagattggctcgaggacactctctctgaaggaataagacagtggtggaagctcaaacctggcccaccaccgccaaagcccgcagagcggcataaggacgacagcaggggtcttgtgcttcctgggtacaagtacctcggacccttcaacggactcgacaaaggagagccggtcaacgaggcagacgccgcggccctcgagcacgacaaggcctacgaccggcagctcgacagcggagacaacccgtacctcaagtacaaccacgccgacgcggagtttcaggagcgccttaaagaagatacgtcttttgggggcaacctcgcaagagcagtattccaggcgaaaaagagggttcttgaacctctgggcctggttgaggagcctgttaagacggctccgggaaaaaagaggccggtagagcactctcctgcggagtcagattcctcctccggaactggaaagtcgggccaacagcctgcaagaaagagattgaattttggtcagactggagacgcagactccgtacctgacccccagcctctcggacagccaccagcagccccctctggtctgggaactaatacgatggcttcaggcagtggcgcaccaatggcagacaataacgagggcgccgacggagtgggtaattcctcgggaaattggcattgcgattccacatggatgggcgacagagtcatcaccaccagcacccgcacctgggctctgcccacctacaacaaccatctgtacaagcaaatttccagccagtctggagccagcaacgacaaccactactttggctacagcaccccttgggggtattttgacttcaacagattccactgccacttctccccacgtgactggcaaagactcatcaacaacaattggggattccggcccaaaagactcaacttcaagctctttaacattcaagtcaaggaggtcacgcagaatgacggtacgacgacgattgccaataaccttaccagcacggttcaggtgtttactgactcggagtaccagctcccgtacgtcctcggctcggcgcatcaaggatgcctcccgccgttcccagcagacgtcttcatggtgccacagtatggatacctcaccctgaacaacgggagtcaggcggtaggacgctcttcattttactgcctggagtactttccttctcagatgctgcgtaccggaaacaactttaccttcagctacacctttgaggacgttccttttcacagcagctacgctcacagccagagtttggaccgtctcatgaatcctctcatcgaccagtacctgtattacttgagcagaacaaacactccaagcggaaccactacgcagtccaggcttcagttttctcaagccggagcgagtgacattcgggaccagtctaggaactggcttcctggaccctgttaccgccagcagcgagtatcaaagacagctgcggacaacaacaacagtgattactcgtggactggagctaccaagtatcacctcaatggaagagactctctggtgaatccgggcacagccatggccagccacaaggacgatgaagaaaagtattttcctcagagcggggttctcatcttcggaaaacaagactcgggaaaaactaatgtggacattgaaaaggtcatgattacagacgaagaggaaatcaggaccaccaatcccgtggctacggagcagtatggttctgtatctaccaatctccagagcggcaacacacaagcagctacctcagatgtcaacacacaaggcgttcttccaggcatggtctggcaggacagagacgtgtacctgcagggacccatctgggcaaagattccacacacggacggacattttcacccttctcctcttatgggaggatttggactgaagcaccctcccccgcagattctcatcaagaataccccggtacctgcgaatccttctaccaccttcagcgcggcaaagtttgcttccttcatcacacagtactccacggggcaggtcagcgtggagatcgagtgggagctgcagaaagagaacagcaaacgctggaaccccgagatccagtatacctccaactacaacaagtctgttaatgtggactttactgtggacactaatggcgtgtattcagagcctcgccccattggcacaagatacctgactcgtaatctgtaa

SEQ ID NO: 3188 - DNA, 2208 bp, Artificial Sequence
  source: /note="Description of Artificial Sequence: Synthetic polynucleotide"
atggctgccgatggttatcttccagattggctcgaggacactctctctgaaggaataagacagtggtggaagctcaaacctggcccaccaccgccaaagcccgcagagcggcataaggacgacagcaggggtcttgtgcttcctgggtacaagtacctcggacccttcaacggactcgacaaaggagagccggtcaacgaggcagacgccgcggccctcgagcacgacaaggcctacgaccggcagctcgacagcggagacaacccgtacctcaagtacaaccacgccgacgcggagtttcaggagcgccttaaagaagatacgtcttttgggggcaacctcgcaagagcagtattccaggcgaaaaagagggttcttgaacctctgggcctggttgaggagcctgttaagacggctccgggaaaaaagaggccggtagagcactctcctgcggagccagattcctcctccggaactggaaagtcgggccaacagcctgcaagaaagagattgaattttggtcagactggagacgcagactccgtacctgacccccagcctctcggacagccaccagcagccccctctggtctgggaactaatacgatggcttcaggcagtggcgcaccaatggcagacaataacgagggcgccgacggagtgggtaattcctcgggaaattggcattgcgattccacatggatgggcgacagagtcatcaccaccagcacccgcacctgggctctgcccacctacaacaaccatctgtacaagcaaatttccagccagtctggagccagcaacgacaaccactactttggctacagcaccccttgggggtattttgacttcaacagattccactgccacttctccccacgtgactggcaaagactcatcaacaacaattggggattccggcccaaaagactcaacttcaagctctttaacattcaagtcaaggaggtcacgcagaatgacggtacgacgacgattgccaataaccttaccagcacggttcaggtgtttactgactcggagtaccagctcccgtacgtcctcggctcggcgcatcaaggatgcctcccgccgttcccagcagacgtcttcatggtgccacagtatggatacctcaccctgaacaacgggagtcaggcggtaggacgctcttcattttactgcctggagtactttccttctcagatgctgcgtaccggaaacaactttaccttcagctacacctttgaggacgttccttttcacagcagctacgctcacagccagagtttggaccgtcttatgaatcctctcatcgaccagtacctgtattacttgagcagaacaaacactccaagcggaaccactacgcagtccaggcttcagttttctcaagccggagcgagtgacattcgggaccagtctaggaactggcttcctggaccctgttaccgccagcagcgagtatcaaagacagctgcggacaacaacaacagtgattactcgtggactggagctaccaagtatcacctcaatggaagagactctctggtgaatccgggcacagccatggccagccacaaggacgatgaagaaaagtattttcctcagagcggggttctcatcttccggaaacaagactcgggaaaaactaatgtggacattgaaaaggtcatgattacagacgaagaggaaatcaggaccaccaatcccgtggctacggagcagtatggttctgtatctaccaatctccagagcggcaacacacaagcagctacctcagatgtcaacacacaaggcgttcttccaggcatggtccggcaggacagagacgtgtacctgcagggacccatctgggcaaagattccacacacggacggacattttcacccttctcctcttatgggaggatttggactgaagcaccctcccccgcagattctcatcaagaataccccggtacctgcgaatccttctaccaccttcagcgcggcaaagtttgcttccttcatcacacagtactccacggggcaggtcagcgtggagatcgagtgggagccgcagaaagagaacagcaaacgctggaaccccgagatccagtatacctccaactacaacaagtctgttaatgtggactttactgtggacactaatggcgtgtattcagagcctcgccccattggcacaagatacctgactcgtaatctgtaa

SEQ ID NO: 3189 - DNA, 2208 bp, Artificial Sequence
  source: /note="Description of Artificial Sequence: Synthetic polynucleotide"
atggctgccgatggttatcttccagattggctcgaggacactctctctgaaggaataagacagtggtggaagctcaaacctggcccaccaccaccaaagcccgcagagcggcatcaggacgacagcaggggtcttgtgcttcctgggtacaagtacctcggacccttcaacggactcgacaagggagagccggtcaacgaggcagacgccgcggccctcgagcacgacaaggcctacgaccggcagctcgacagcggagacaacccgtacctcaagtacaaccacgccgacgcggagtttcaggagcgtcttaaagaagatacgtcttttgggggcaacctcggacgagcagtcttccaggcgaaaaagagggttcttgaacctctgggcctggttgaggaacctgttaagacggctccgggaaaaaagaggccggtagagcattctcctgcggagccagactcctcctcgggaaccggaaaggcgggccagcagcctgcgagaaagagattgaatttcggtcagactggagacgcagactccgtacctgacccccagcctctcggacagccaccagcagccccctccggtctgggaactaatacgacggctacaggcagtggcgcaccaatggcagacaataacgagggcgccgacggagtgggtaattcctcgggaaattggcattgcgattccacatggatgggcgacagagtcatcaccaccagcacccgaacctgggccctgcccacctacaacaaccacctctacaagcaaatctccagccaatctggagcctcaaacgacaaccactactttggctacagcaccccttgggggtattttgacttcaacagattccactgtcacttctccccacgtgactggcaaagactcatcaacaacaactggggattccgacccaagagactcaacttcaagctctttaacattcaagtcaaagaggtcacgcagaatgacggtacgacgacgattgccaataaccttaccagcacggttcaagtctttgctgactcggagtaccagctcccgtacgtcctcggctcggcgcatcaaggatgcctcccgccgtttccagcagacgtcttcatggtgccacagtatggatacctcaccctgaacaacgggagtcaggcggtaggacgctcttccttttactgcctggagtactttccttctcagatgctgcgtaccggaaacaactttaccttcagctacacctttgaggacgttcctttccacagcagctacgctcacagccagagtttggaccggctgatgaatcctctgatcgaccagtatctgtattacttgagcaaaacaaacgctccaagcggaaccaccacgatgtccaggcttcagttttctcaggccggagcgagtgacattcgggaccagtctaggaactggcttcctggaccctgttaccgccagcagcgagtatcaaaaacagctgcggataacaacaacagtgattattcgtggactggagctaccaagtaccacctcaatggaagagactctctggtgaatccgggcccagctatggccagccacaaggacgatgaagaaaaatattttcctcagagcggggttctcatctttggaaaacaagactcgggaaaaactaatgtggacattgaaaaggtcatgattacagacgaagaggaaatcaggaccaccaatcccgtggctacggagcagtatggttctgtatctaccaacctccagagcggcaacacacaggcagccaccacagatgtcaacacacaaggcgttcttccaggcatggtctggcaggacagagacgtgtacctgcaaggacccatctgggcaaagattcctcacacggacggacactttcacccttctcccctcatgggaggatttggactcaaacaccctcctccgcaaatcctcatcaagaatacccccgtacctgcgaatccttcgaccacattcagcgcggcaaagtttgcttctttcatcacacagtactctacggggcaggtcagcgtggagattgagtgggagctgcagaaggagaacagcaaacgctggaaccccgaaatccagtacacttccaactacaacaagtctgttaatgtggactttactgtggacactaatggtgtgtattcagagcctcgccccattggcacaagatacctgactcgtaatctgtaa

SEQ ID NO: 3190 - DNA, 2208 bp, Artificial Sequence
  source: /note="Description of Artificial Sequence: Synthetic polynucleotide"
atggctgccgatggttatcttccagattggctcgaggacactctctctgaaggaataagacagtggtggaagctcaaacctggcccaccaccaccaaagcccgcagagcggcatcaggacgacagcaggggtcttgtgcttcctgggtacaagtacctcggacccttcaacggactcgacaagggagagccggtcaacgaggcagacgccgcggccctcgagcacgacaaggcctacgaccggcagctcgacagcggagacaacccgtacctcaagtacaaccacgccgacgcggagtttcaggagcgtcttaaagaagatacgtcttttgggggcaacctcggacgagcagtcttccaggcgaaaaagagggttcttgaacctctgggcctggttgaggaacctgttaagacggctccgggaaaaaagaggccggtagagcattctcctgcggagccagactcctcctcgggaaccggaaaggcgggccagcagcctgcgagaaagagattgaatttcggtcagactggagacgcagactccgtacctgacccccagcctctcggacagccaccagcagccccctctggtctgggaactaatacgatggctacaggcagtggcgcaccaatggcagacaataacgagggcgccgacggagtgggtaattcctcgggaaattggcattgcgattccacatggatgggcgacagagtcatcaccaccagcacccgaacctgggccctgcccacctacaacaaccacctctacaagcaaatctccagccaatctggagcctcaaacgacaaccactactttggctacagcaccccttgggggtattttgacttcaacagattccactgtcacttctccccacgtgactggcaaagactcatcaacaacaactggggattccgacccaagagactcaacttcaagctctttaacattcaagtcaaagaggtcacgcagaatgacggtacgacgacgattgccaataaccttaccagcacggttcaagtctttactgactcggagtaccagctcccgtacgtcctcggctcggcgcatcaaggatgcctcccgccgtttccagcagacgtcttcatggtgccacagtatggatacctcaccctgaacaacgggagtcaggcggtaggacgctcttccttttactgcctggagtactttccttctcagatgctgcgtaccggaaacaactttaccttcagctacacctttgaggacgttcctttccacagcagctacgctcacagccagagtttggaccggctgatgaatcctctgatcgaccagtatctgtattacttgagcaaaacaaacgctccaagcggaaccaccacgatgtccaggcttcagttttctcaggccggagcgagtgacattcgggaccagtctaggaactggcttcctggaccctgttaccgccagcagcgagtatcaaaaacagctgcggataacaacaacagtgattattcgtggactggagctaccaagtaccaccccaatggaagagactctctggtgaatccgggcccagctatggccagccacaaggacgatgaagaaaaatattttcctcagagcggggttctcatctttggaaaacaagactcgggaaaaactaatgtggacattgaaaaggtcatgattacagacgaagaggaaatcaggaccaccaatcccgtggctacggagcagtatggttctgtatctaccaacctccagagcggcaacacacaggcagccaccacagatgtcaacacacaaggcgttcttccaggcatggtctggcaggacagagacgtgtacctgcacggacccatctgggcaaagattcctcacacggacggacactttcacccttctcccctcatgggaggatttggactcaaacaccctcctccgcaaatcctcatcaagaatacccccgtacctgcgaatccttcgaccacattcagcgcggcaaagtttgcttctttcatcacacagtactctacggggcaggtcagcgtggagattgagtgggagctgcagaaggagaacagcaaacgctggaaccccgaaatccagtacacttccaactacaacaagtctgttaatgtggactttactgtggacactaatggtgtgtattcagagcctcgccccattggcacaagatacctgactcgtaatctgtaa

SEQ ID NO: 3191 - DNA, 2208 bp, Artificial Sequence
  source: /note="Description of Artificial Sequence: Synthetic polynucleotide"
atggctgccgatggttatcttccagattggctcgaggacactctctctgaaggaataagacagtggtggaagctcaaacctggcccaccaccaccaaagcccgcagagcggcatcaggacgacagcaggggtcttgtgcttcctgggtacaagtacctcggacccttcaacggactcgacaagggagagccggtcaacgaggcagacgccgcggccctcgagcacgacaaggcctacgaccggcagctcgacagcggagacaacccgtacctcaagtacaaccacgccgacgcggagtttcaggagcgtcttaaagaagatacgtcttttgggggcaacctcggacgagcagtcttccaggcgaaaaagagggttcttgaacctctgggcctggttgaggaacctgttaagacggctccgggaaaaaagaggccggtagagcattctcctgcggagccagactcctcctcgggaaccggaaaggcgggccagcagcctgcgagaaagagattgaatttcggtcagactggagacgcagactccgtacctgacccccagcctctcggacagccaccagcagccccctctggtctgggaactaatacgatggctacaggcagtggcgcaccaatggcagacaataacgagggcgccgacggagtgggtaattcctcgggaaattggcattgcgattccacatggatgggcgacagagccatcaccaccagcacccgaacctgggccctgcccacctacaacaaccacctctacaagcaaatctccagccaatctggagcctcaaacgacaaccactactttggctacagcaccccttgggggtattttgacttcaacagattccactgtcacttctccccacgtgactggcaaagactcatcaacaacaactggggattccgacccaagagactcaacttcaagctctttaacattcaagtcaaagaggtcacgcagaatgacggtacgacgacgattgccaataaccttaccagcacggttcaagtctttactgactcggagtaccagctcccgtacgtcctcggctcggcgcatcaaggatgcctcccgccgtttccagcagacgtcttcatggtgccacagtatggatacctcaccctgaacaacgggagtcaggcggtaggacgctcttccttttactgcctggagtactttccttctcagatgctgcgtaccggaaacaactttaccttcagctacacctttgaggacgttcctttccacagcagctacgctcacagccagagtttggaccggctgatgaatcctctgatcgaccagtatctgtattacttgagcaaaacaaacgctccaagcggaaccaccacgatgtccaggcttcagttttctcaggccggagcgagtgacattcgggaccagtctaggaactggcttcctggaccctgttaccgccagcagcgagtatcaaaaacagctgcggataacaacaacagtgattattcgtggactggagctaccaagtaccacctcaatggaagagactctctggtgaatccgggcccagctatggccagccacaaggacgatgaagaaaaatattttcctcagagcggggttctcatctttggaaaacaagactcgggaaaaactaatgtggacattgaaaaggtcatgattacggacgaagaggaaatcaggaccaccaatcccgtggctacggagcagtatggttctgtatctaccaacctccagagcggcaacacacaggcagccaccacagatgtcaacacacaaggcgttcttccaggcatggtctggcaggacagagacgtgtacctgcaaggacccatctgggcaaagattcctcacacggacggacactttcacccttctcccctcatgggaggatttggactcaaacaccctcctccgcaaatcctcatcaagaatacccccgtacctgcgaatccttcgaccacattcagcgcggcaaagcttgcttctttcatcacacagtactctacggggcaggtcagcgtggagattgagtgggagctgcagaaggagaacagcaaacgctggaaccccgaaatccagtacacttccaactacaacaagtctgttaatgtggactttactgtggacactaatggtgtgtattcagagcctcgccccattggcacaagatacctgactcgtaatctgtaa

SEQ ID NO: 3192 - DNA, 2208 bp, Artificial Sequence
  source: /note="Description of Artificial Sequence: Synthetic polynucleotide"
atggctgccgatggttatcttccagattggctcgaggacactctctctgaaggaataagacagtggtggaagctcaaacctggcccaccaccaccaaagcccgcagagcggcatcaggacgacagcaggggtcttgtgcttcctgggtacaagtacctcggacccttcaacggactcgacaagggagagccggtcaacgaggcagacgccgcggccctcgagcacgacaaggcctacgaccggcagctcgacagcggagacaacccgtacctcaagtacaaccacgccgacgcggagtttcaggagcgtcttaaagaagatacgtcttttgggggcaacctcggacgagcagtcttccaggcgaaaaagagggttcttgaacctctaggcctggttgaggaacctgttaagacggctccgggaaaaaagaggccggtagagcattctcctgcggagccagactcctcctcgggaaccggaaaggcgggccagcagcctgcgagaaagagattgaatttcggtcagactggagacgcagactccgtacctgacccccagcctcccggacagccaccagcagccccctctggtctgggaactaatacgatggctacaggcagtggcgcaccaatggcagacaataacgagggcgccgacggagtgggtaattcctcgggaaattggcattgcgattccacatggatgggcgacagagtcatcaccaccagcacccgaacctgggccctgcccacctacaacaaccacctctacaagcaaatctccagccaatctggagcctcaaacgacaaccactactttggctacagcaccccttgggggtattttgacttcaacagattccactgtcacttctccccacgtgactggcaaagactcatcaacaacaactggggattccgacccaagagactcaacttcaagctctttaacattcaagtcaaagaggtcacgcagaatgacggtacgacgacgattgccaataaccttaccagcacggttcaagtctttactgactcggagtaccagctcccgtacgtcctcggctcggcgcatcaaggatgcctcccgccgtttccagcagacgtcttcatggtgccacagtatggatacctcaccctgaacaacgggagtcaggcggtaggacgctcttccttttactgcctggagtactttccttctcagatgctgcgtaccggaaacaactttaccttcagctacacctttgaggacgttcctttccacagcagctacgctcacagccagagtttggaccggctgatgaatcctctgatcgaccagtatctgtattacttgagcaaaacaaacgctccaagcggaaccaccacgatgtccaggcttcagttttctcaggccggagcgagtgacattcgggaccagtctaggaactggcttcctggaccctgttaccgccagcagcgagtatcaaaaacagctgcggataacaacaacagtgattattcgtggactggagctaccaagtaccacctcaatggaagagactctctggtgaatccgggcccagctatggccagccacaaggacgatgaagaaaaatattttcctcagagcggggttctcatctttggaaaacaagactcgggaaaaactaatgtggacattgaaaaggtcatgattacagacgaagaggaagtcaggaccaccaatcccgtggctacggagcagtatggttctgtatctaccaacctccagagcggcaacacacaggcagccaccacagatgtcaacacacaaggcgttcttccaggcatggtctggcaggacagagacgtgtacctgcaaggacccatctgggcaaagattcctcacacggacggacactttcacccttctcccctcatgggaggatttggactcaaacaccctcctccgcaaatcctcatcaagaatacccccgtacctgcgaatccttcgaccacattcagcgcggcaaagtttgcttctttcatcacacagtactctacggggcaggtcagcgtggagattgagtgggagctgcagaaggagaacagcaaacgctggaaccccgaaatccagtacacttccaactacaacaagtctgttaatgtggactttactgtggacactaatggtgtgtattcagagcctcgccccattggcacaggatacctgactcgtaatctgtaa

SEQ ID NO: 3193 - DNA, 2208 bp, Artificial Sequence
  source: /note="Description of Artificial Sequence: Synthetic polynucleotide"
atggctgccgatggttatcttccagattggctcgaggacactctctctgaaggaataagacagtggtggaagctcaaacctggcccaccaccaccaaagcccgcagagcggcatcaggacgacagcaggggtcttgtgcttcctgggtacaagtacctcggacccttcaacggactcgacaagggagagccggtcaacgaggcagacgccgcggccctcgagcacgacaaggcctacgaccggcagctcgacagcggagacaacccgtacctcaagtacaaccacgccgacgcggagtttcaggagcgtcttaaagaagatacgtcttttgggggcaacctcggacgagcagtcttccaggcgaaaaagagggttcttgaacctctgggcctggttgaggaacctgttaagacggctccgggaaaaaagaggccggtagagcattctcctgcggagccagactcctcctcgggaaccggaaaggcgggccagcagcctgcgagaaagagattgaatttcggtcagactggagacgcagactccgtacctgacccccagcctctcggacagccaccagcagccccctctggtctgggaactaatacggtggctacaggcagtggcgcaccaatggcagacaataacgagggcgccgacggagtgggtaattcctcgggaaattggcattgcgattccacatggatgggcgacagagtcatcaccaccagcacccgaacctgggccctgcccacctacaacaaccacctctacaagcaaatctccagccaatctggagcctcaaacgacaaccactactttggctacagcaccccttgggggtattttgacttcaacagattccactgtcacttctccccacgtgactggcaaagactcatcaacaacaactggagattccgacccaagagactcaacttcaagctctttaacattcaagtcaaagaggtcacgcagaatgacggtacgacgacgattgccgataaccttaccagcacggttcaagtctttactgactcggagtaccagctcccgtacgtcctcggctcggcgcatcaaggatgcctcccgccgtttccagcagacgtcttcatggtgccacagtatggatacctcaccctgaacaacgggagtcaggcggtaggacgctcttccttttactgcctggagtactttccttctcagatgctgcgtaccggaaacaactttaccttcagctacacctttgaggacgttcctctccacagcagctacgctcacagccagagtttggaccggctgatgaatcctctgatcgaccagtatctgtattacttgagcaaaacaaacgctccaagcggaaccaccacgatgtccaggcttcagttttctcaggccggagcgagtgacattcgggaccagtctaggaactggcttcctggaccctgttaccgccagcagcgagtatcaaaaacagctgcggataacaacaacagtgattattcgtggactggagctaccaagtaccacctcaatggaagagactctctggtgaatccgggcccagctatggccagccacaaggacgatgaagaaaaatattttcctcagagcggggttctcatctttggaaaacaagactcgggaaaaactaatgtggacattgaaaaggtcatgattacagacgaagaggaaatcaggaccaccaatcccgtggctacggagcagtatggttctgtatctaccaacctccagagcggcaacacacaggcagccaccacagatgtcaacacacaaggcgttcttccaggcatggtctggcaggacagagacgtgtacctgcaaggacccatctgggcaaagattcctcacacggacggacactttcacccttctcccctcatgggaggatttggactcaaacaccctcctccgcaaatcctcatcaagaatacccccgtacctgcgaatccttcgaccacattcagcgcggcaaagcttgcttctttcatcacacagtactctacggggcaggtcagcgtggagattgagtgggagctgcagaaggagaacagcaaacgctggaaccccgaaatccagtacacttccaactacaacaagtctgttaatgtggactttactgcggacactaatggtgtgtattcagagcctcgccccattggcacaagatacctgactcgtaatctgtaa

SEQ ID NO: 3194 - DNA, 2208 bp, Artificial Sequence
  source: /note="Description of Artificial Sequence: Synthetic polynucleotide"
atggctgccgatggttatcttccagattggctcgaggacactctctctgaaggaataagacagtggtggaagctcaaacctggcccaccaccaccaaagcccgcagagcggcatcaggacgacagcaggggtcttgtgcttcctgggtacaagtacctcggacccttcaacggactcgacaagggagagccggtcaacgaggcagacgccgcggccctcgagcacgacaaggcctacgaccggcagctcgacagcggagacaacccgtacctcaagtacaaccacgccgacgcggagtttcaggagcgtcttaaagaggatacgtcttttgggggcaacctcggacgagcagtcttccaggcgaaaaagagggttcttgaacctctgggcctggttgaggaacctgttaagacggctccgggaaaaaagaggccggtagagcattctcctgcggagccagactcctcctcgggaaccggaaaggcgggccagcagcctgcgagaaagagatcgaatttcggtcagactggagacgcagactccgtacctgacccccagcctctcggacagccaccagcagccccctctggtctgggaactaatacgatggctacaggcagtggcgcaccaatggcagacaataacgagggcgccgacggagtgggtaattcctcgggaaattggcattgcgattccacatggatgggcgacagagtcatcaccaccagcacccgaacctgggccctgcccacctacaacaaccacctctacaagcaaatctccagccaatctggagcctcaaacgacaaccactactttggctacagcaccccttgggggtattttgacttcaacagattccactgtcacttctccccacgtgactggcaaagactcatcaacaacaactggggattccgacccaagagactcaacttcaagctctttaacattcaagtcaaagaggtcgcgcagaatgacggtacgacgacgattgccaataaccttaccagcacggttcaagtctttactgactcggagtaccagctcccgtacgtcctcggctcggcgcatcaaggatgcctcccgccgtttccagcagacgtcttcatggtgccacagtatggatacctcaccctgaacaacgggagtcaggcggtaggacgctcttccttttactgcctggagtactttccttctcagatgctgcgtaccggaaacaactttaccttcagctacacctttgaggacgttcctttccacagcagctacgctcacagccagagtttggaccggctgatgaatcctctgatcgaccagtatctgtattacttgagcaaaacaaacgctccaagcggaaccaccacgatgtccaggcttcagttttctcaggccggagcgagtgacattcgggaccagtctaggaactggcttcctggaccctgttaccgccagcagcgagtatcaaaaacagctgcggataacaacaacagtgattattcgtggactggagctaccaagtaccacctcaatggaagagactctctggtgaatccgggcccagctatggccagccacaaggacgatgaagaaaaatattttcctcagagcggggttctcatctttggaaaacaagactcgggaaaaactaatgtggacattaaaaaggtcatgattacagacgaagaggaaatcaggaccaccaatcccgtggctacggagcagtatggttctgtatctaccaacctccagagcggcaacacacaggcagccaccacagatgtcaacacacaaggcgttcttccaggcatggtctggcaggacagagacgtgtacctgcaaggacccatctgggcaaagatccctcacacggacggacactttcacccttctcccctcatgggaggatttggactcaaacaccctcctccgcaaatcctcatcaagaatacccccgtacctgcgaatccttcgaccacattcagcgcggcaaagtttgcttctttcatcacacagtactctacggggcaggtcagcgtggagattgagtgggagctgcagaaggagaacagcaaacgctggaaccccgaaatccagtacacttccaactacaacaagtctgttaatgtggactttactgtggacactaatggtgtgtattcagagcctcgccccattggcacaagatacctgactcgtaatctgtaa

SEQ ID NO: 3195 - DNA, 2205 bp, Artificial Sequence
  source: /note="Description of Artificial Sequence: Synthetic polynucleotide"
atggctgccgatggttatcttccagattggctcgaggacactctctctgaaggaataagacagtggtggaagctcaaacctggcccaccaccaccaaagcccgcagagcggcatcaggacgacagcaggggtcttgtgcttcctgggtacaagtacctcggacccttcaacggactcgacaagggagagccggtcaacgaggcagacgccgcggccctcgagcacgacaaggcctacgaccggcagctcgacagcggagacaacccgtacctcaagtacaaccacgccgacgcggagtttcaggagcgtcttaaagaagatacgtcttttgggggcaacctcggacgagcagtcttccaggcgaaaaagagggttcttgaacctctgggcctggttgaggaacctgttaagacggctccgggaaaaaagaggccggtagagcattctcctgcggagccagactcctcctcgggaaccggaaaggcgggccagcagcctgcgagaaagagattgaatttcggtcagactggagacgcagactccgtacctgacccccagcctctcggacagccaccagcagccccctctggtctgggaactaatacgatggctacaggcagtggcgcaccaatggcagacaataacgagggcgccgacggagtgggtaattcctcgggaaattggcattgcgattccacatggatgggcgacagagtcatcaccaccagcacccgaacctgggccctgcccacctacaacaaccacctctacaagcaaatctccagccaatctggagcctcaaacgacaaccactactttggctacagcaccccttgggggtattttgacttcaacagattccactgtcacttctccccacgtgactggcaaagactcatcaacaactggggattccgacccaagagactcaacttcaagctctttaacattcaagtcaaagaggtcacgcagaatgacggtacgacgacgattgccaataaccttaccagcacggttcaagtctttactgactcggagtaccagctcccgtacgtcctcggctcggcgcatcaaggatgcctcccgccgtttccagcagacgtcttcatggtgccacagtatggatacctcaccctgaacaacgggagtcaggcggtaggacgctcttccttttactgcctggagtactttccttctcagatgctgcgtaccggaaacaactttaccttcagctacacctttgaggacgttcctttccacagcagctacgctcacagccagagtttggaccggctgatgaatcctctgatcgaccagtatctgtattacttgagcaaaacaaacgctccaagcggaaccaccacgatgtccaggcttcagttttctcaggccggagcgagtgacattcgggaccagtctaggaactggcttcctggaccctgttaccgccagcagcgagtatcaaaaacagctgcggataacaacaacagtgattattcgtggactggagctaccaagtaccacctcaatggaagagactctctggtgaatccgggcccagctatggccagccacaaggacgatgaagaaaaatattttcctcagagcggggttctcatctttggaaaacaagactcgggaaaaactaatgtggacattgaaaaggtcatgattacagacgaagaggaaatcaggaccaccaatcccgtggctacggagcagtatggttctgtatctaccaacctccagagcggcaacacacaggcagccaccacagatgtcaacacacaaggcgttcttccaggcatggtctggcaggacagagacgtgtacctgcaaggacccatctgggcaaagattcctcacacggacggacactttcacccttctcccctcatgggaggatttggactcaaacaccctcctccgcaaatcctcatcaagaatacccccgtacctgcgaatccttcgaccacattcagcgcggcaaagtttgcttctttcatcacacagtactctacggggcaggtcagcgtggagattgagtgggagctgcagaaggagaacagcaaacgctggaaccccgaaatccagtacacttccaactacaacaagtctgttaatgtggactttactgtggacactaatggtgtgtattcagagcctcgccccattggcacaagatacctgactcgtaatctgtaa

SEQ ID NO: 3196 - DNA, 2208 bp, Artificial Sequence
  source: /note="Description of Artificial Sequence: Synthetic polynucleotide"
atggctgccgatggttatcttccagattggctcgaggacactctctctgaaggaataagacagtggtggaagctcaaacctggcccaccaccaccaaagcccgcagagcggcatcaggacgacagcaggggtcttgtgcttcctgggtacaagtacctcggacccttcaacggactcgacaagggagagccggtcaacgaggcagacgccgcggccctcgagcacgacaaggcctacgaccggcagctcgacagcggagacaacccgtacctcaagtacaaccacgccgacgcggagtttcaggagcgtcttaaagaagatacgtcttttgggggcaacctcggacgagcagtcttccaggcgaaaaagagggttcttgaacctctgggcctggttgaggaacctgttaagacggctccgggaaaaaagaggccggtagagcattctcctgcggagccagactcctcctcgggaaccggaaaggcgggccagcagcctgcgagaaagagattgaatttcggtcagactggagacgcagactccgtacctgacccccagcctctcggacagccaccagcagccccctctggtctgggaactaatacgatggctacaggcagtggcgcaccaatggcagacaataacgagggcgccgacggagtgggtaattcctcgggaaattggcattgcgattccacatggatgggcgacagagtcatcaccaccagcacccgaacctgggccctgcccacctacaacaaccacctctacaagcaaatctccagccaatctggagcctcaaacgacaaccactactttggctacagcaccccttgggggtattttgacttcaacagattccactgtcacttctccccacgtgactggcaaagactcatcaacaacaactggggattccgacccaagagactcaacttcaagctctttaacattcaagtcaaagaggtcacgcagaatgacggtacgacgacgattgccaataaccttaccagcacggttcaagtctttactgactcggagtaccagctcccgtacgtcctcggctcggcgcatcaaggatgcctcccgccgtttccagcagacgtcttcatggtgccacagtatggatacctcaccctgaacaacgggagtcaggcggtaggacgctcttccttttactgcctggagtactttccttctcagatgctgcgtaccggaaacaactttaccttcagctacacctttgaggacgttcctttccacagcagctacgctcacagccagagtttggaccggctgatgaatcctctgatcgaccagtatctgtattacttgagcaaaacaaacgctccaagcggaaccaccacgatgtccaggcttcagttttctcaggccggagcgagtgacattcgggaccagtctaggaactggcttcctggaccctgttaccgccagcagcgagtatcaaaaacagctgcggataacaacaacagtgattattcgtggactggagctaccaagtaccacctcaatggaagagactctctggtgaatccgggcccagctatggccagccacaaggacgatgaagaaaaatattttcctcagagcggggttctcatctttggaaaacaagactcgggaaaaactaatgtggacattgaaaaggtcatgattacagacgaagaggaaatcaggaccaccaatcccgtggctacggagcagtatggttctgtatctaccaacctccagagcggcaacacacaggcagccaccacagatgtcaacacacaaggcgttcttccaggcatggtctggcaggacagagacgtgtacctgcaaggacccatctgggcaaagattcctcacacggacggacactttcacccttctcccctcatgggaggatttggactcaaacaccctcctccgcaaatcctcatcaagaatacccccgtacctgcgaatccttcgaccacattcagcgcggcaaagtttgcttctttcatcacacagtactctacggggcaggtcagcgtggagattgagtgggagctgcagaaggagaacagcaaacgctggaaccccgaaatccagtacacttccaactacaacaagtctgttaatgtggactttactgtggacactaatggtgtgtattcagagcctcgccccattgacacaagatacctgactcgtaatctgtaa

SEQ ID NO: 3197 - DNA, 2208 bp, Artificial Sequence
  source: /note="Description of Artificial Sequence: Synthetic polynucleotide"
atggctgccgatggttatcttccagattggctcgaggacactctctctgaaggaataagacagtggtggaagctcaaacctggcccaccaccaccaaagcccgcagagcggcatcaggacgacagcaggggtcttgtgcttcctgggtacaagtacctcggacccttcaacggactcgacaagggagagccggtcaacgaggcagacgccgcggccctcgagcacgacaaggcctacgaccggcagctcgacagcggagacaacccgtacctcaagtacaaccacgccgacgcggagtttcaggagcgtcttaaagaagatacgtcttttgggggcaacctcggacgagcagtcttccaggcgaaaaagagggttcttgaacctctgggcctggttgaggaacctgttaagacggctccgggaaaaaagaggccggtagagcattctcctgcggagccagactcctcctcgggaaccggaaaggcgggccagcagcctgcgagaaagagattgaatttcggtcagactggagacgcagactccgtacctgacccccagcctctcggacagccaccagcagccccctctggtctgggaactaatacgatggctacaggcagtggcgcaccaatggcagacaataacgagggcgccgacggagtgggtaattcctcgggaaattggcattgcgattccacatggatgggcgacagagtcatcaccaccagcacccgaacctgggccctgcccacctacaacaaccacctctacaagcaaatctccagccaatctggagcctcaaacgacaaccactactttggctacagcaccccttgggggtattttgacttcaacagattccactgtcacttctccccacgtgactggcaaagactcatcaacaacaactggggattccgacccaagagactcaacttcaagctctttaacattcaagtcaaagaggtcacgcagaatgacggtacgacgacgattgccaataaccttaccagcacggttcaagtctttactgactcggagtaccagctcccgtacgtcctcggctcggcgcatcaaggatgcctcccgccgtttccagcagacgtcttcatggtgccacagtatggatacctcaccctgaacaacgggagtcaggcggtaggacgctcttccttttactgcctggagtactttccttctcagatgctgcgtaccggaaacaactttaccttcagctacacctttgaggacgttcctttccacagcagctacgctcacagccagagtttggaccggctgatgaatcctctgatcaaccagtatctgtattacttgagcaaaacaaacgctccaagcggaaccaccacgatgtccaggcttcagttttctcaggccggagcgagtgacattcgggaccagtctaggaactggcttcctggaccctgttaccgccagcagcgagtatcaaaaacagctgcggataacaacaacagtgattattcgtggactggagctaccaagtaccacctcaatggaagagactctctggtgaatccgggcccagctatggccagccacaaggacgatgaagaaaaatattttcctcagagcggggttctcatctttggaaaacaagactcgggaaaaactaatgtggacattgaaaaggtcatgattacagacgaagaggaaatcaggaccaccaatcccgtggctacggagcagtatggttctgtatctaccaacctccagagcggcaacacacaggcagccaccacagatgtcaacacacaaggcgttcttccaggcatggtctggcaggacagagacgtgtacctgcaaggacccatctgggcaaagattcctcacacggacggacactttcacccttctcccctcatgggaggatttggactcaaacaccctcctccgcaaatcctcatcaagaatacccccgtacctgcgaatccttcgaccacattcagcgcggcaaagtttgcttctttcatcacacagtactctacggggcaggtcagcgtggagattgagtgggagctgcagaaggagaacagcaaacgctggaaccccgaaatccagtacacttccaactacaacaagtctgttaatgtggactttactgtggacactaatggtgtgtattcagagcctcgccccattggcacaagatacctgactcgtaatctgtaa

SEQ ID NO: 3198 - DNA, 2208 bp, Artificial Sequence
  source: /note="Description of Artificial Sequence: Synthetic polynucleotide"
atggctgccgatggttatcttccagattggctcgaggacactctctctgaaggaataagacagtggtggaagctcaaacctggcccaccaccaccaaagcccgcagagcggcatcaggacgacagcaggggtcttgtgcttcctgggtacaagtacctcggacccttcaacggactcgacaagggagagccggtcaacgaggcagacgccgcggccctcgagcacgacaaggcctacgaccggcagctcgacagcggagacaacccgtacctcaagtacaaccacgccgacgcggagtttcaggagcgtcttaaagaagatacgtcttttgggggcaacctcggacgagcagtcttccaggcgaaaaagagggttcttgaacctctgggcctggttgaggaacctgttaagatggctccgggaaaaaagaggccggtagagcattctcctgcggagccagactcctcctcgggaaccggaaaggcgggccagcagcctgcgagaaagagattgaatttcggtcagactggagacgcagactccgtacctgacccccagcctctcggacagccaccagcagccccctctggtctgggaactaatacgacggctacaggcagtggcgcaccaatggcagacaataacgagggcgccgacggagtgggtaattcctcgggaaattggcattgcgattccacatggatgggcgacagagtcatcaccaccagcacccgaacctgggccctgcccacctacaacaaccacctctacaagcaaatctccagccaatctggagcctcaaacgacaaccactactttggctacagcaccccttgggggtattttgacttcaacagattccactgtcacttctccccacgtgactggcaaagactcatcaacaacaactggggattccgacccaagagactcaacttcaagctctttaacattcaagtcaaagaggtcacgcagaatgacggtacgacgacgattgccaataaccttaccagcacggttcaagtctttactgactcggagtaccagctcccgtacgtcctcggctcggcgcatcaaggatgcctcccgccgtttccagcagacgtcttcatggtgccacagtatggatacctcaccctgaacaacgggagtcaggcggtaggacgctcttccttttactgcctggagtactttccttctcagatgctgcgtaccggaaacaactttaccttcagctacacctttgaggacgttcctttccacagcagctacgctcacagccagagtttggaccggctgatgaatcctctgatcgaccagtatctgtattacttgagcaaaacaaacgctccaagcggaaccaccacgatgtccaggcttcagttttctcaggccggagcgagtgacattcgggaccagtctaggaactggcttcctggaccctgttaccgccagcagcgagtatcaaaaacagctgcggataacaacaacagtgattattcgtggactggagctaccaagtaccacctcaatggaagagactctctggtgaatccgggcccagctatggccagccacaaggacgatgaagaaaaatattttcctcagagcggggttctcatctttggaaaacaagactcgggaaaaactaatgtggacattgaaaaggtcatgattacagacgaagaggaaatcaggaccaccaatcccgtggctacggagcagtatggttctgtatctaccaacctccagagcggcaacacacaggcagccaccacagatgtcaacacacaaggcgttcttccaggcatggtctggcaggacagagacgtgtacctgcaaggacccatctgggcaaagattcctcacacggacggacactttcacccttctcccctcatgggaggatttggactcaaacaccctcctccgcaaatcctcatcaagaatacccccgtacctgcgaatccttcgaccacattcagcgcggcaaagtttgcttctttcatcacacagtactctacggggcaggtcagcgtggagattgagtgggagctgcagaaggagaacagcaaacgctggaaccccgaaatccagtacacttccaactacaacaagtctgttaatgtggactttactgtggacactaatggtgtgtattcagagcctcgccccattggcacaagatacctgactcgtaatctgtaa

SEQ ID NO: 3199 - DNA, 2208 bp, Artificial Sequence
  source: /note="Description of Artificial Sequence: Synthetic polynucleotide"
atggctgccgatggttatcttccagattggctcgaggacactctctctgaaggaataagacagtggtggaagctcaaacctggcccaccaccaccaaagcccgcagagcggcatcaggacgacagcaggggtcttgtgcttcctgggtacaagtacctcggacccttcaacggactcgacaagggagagccggtcaacgaggcagacgccgcggccctcgagcacgacaaggcctacgaccggcagctcgacagcggagacaacccgtacctcaagtacaaccacgccgacgcggagtttcaggagcgtcttaaagaagatacgtcttttgggggcaacctcggacgagcagtcttccaggcgaaaaagagggttcttgaacctctgggcctggttgaggaacctgttaagacggctccgggaaaaaagaggccggtagagcattctcctgcggagccagactcctcctcgggaaccggaaaggcgggccagcagcctgcgagaaagagattgaatttcggtcagactggagacgcagactccgtacctgacccccagcctctcggacagccaccagcagccccctctggtctgggaactaatacgatggctacaggcagtggcgcaccaatggcagacaataacgagggcgccgacggagtgggtaattcctcgggaaattggcattgcgattccacatggatgggcgacagagtcatcaccaccagcacccgaacctgggccctgcccacctacaacaaccacctctacaagcaaatctccagccaatctggagcctcaaacgacaaccactactttggctacagcaccccttgggggtattttgacttcaacagattccactgtcacttctccccacgtgactggcaaagactcatcaacaacaactggggattccgacccaagagactcaacttcaagctctttaacattcaagtcaaagaggtcacgcagaatgacggtacgacgacgattgccaataaccttaccagcacggttcaagtctttactgactcggagtaccagctcccgtacgtcctcggctcggcgcatcaaggatgcctcccgccgtttccagcagacgtcttcatggtgccacagtatggatacctcaccctgaacaacgggagtcaggcggtaggacgctcttccttttactgcctggagtactttccttctcagatgctgcgtaccggaaacaactttaccttcagctacacctttgaggacgttcctttccacagcagctacgctcacagccagagtttggaccggctgatgaatcctctgatcgaccagtatctgtattacttgagcaaaacaaacgctccaagcggaaccaccacgatgtccaggcttcagttttctcaggccggagcgagtgacattcgggaccagtctaggaactggcttcctggaccctgttaccgccagcagcgagtatcaaaaacagctgcggataacaacaacagtgattattcgtggactggagctaccaagtaccacctcaatggaagagactctctggtgaatccgggcccagctatggccagccacaaggacgatgaagaaaaatattttcctcagagcggggttctcatctttggaaaacaagactcgggaaaaactaatgtggacattgaaaaggtcatgattacagacgaagaggaaatcaggaccaccaatcccatggctacggagcagtatggttctgtatctaccaacctccagagcggcaacacacaggcagccaccacagatgtcaacacacaaggcgttcttccaggcatggtctggcaggacagagacgtgtacctgcaaggacccatctgggcaaagattcctcacacggacggacactttcacccttctcccctcatgggaggatttggactcaaacaccctcctccgcaaatcctcatcaagaatacccccgtacctgcgaatccttcgaccacattcagcgcggcaaagtttgcttctttcatcacacagtactctacggggcaggtcagcgtggagattgagtgggagctgcagaaggagaacagcaaacgctggaaccccgaaatccagtacacttccaactacaacaagtctgttaatgtggactttactgtggacactaatggtgtgtattcagagcctcgccccattggcacaagatacctgactcgtaatctgtaa

SEQ ID NO: 3200 - DNA, 2208 bp, Artificial Sequence
  source: /note="Description of Artificial Sequence: Synthetic polynucleotide"
atggctgccgatggttatcttccagattggctcgaggacactctctctgaaggaataagacagtggtggaagctcaaacctggcccaccaccaccaaagcccgcagagcggcatcaggacgacagcaggggtcttgtgcttcctgggtacaagtacctcggacccttcaacggactcgacaagggagagccggtcaacgaggcagacgccgcggccctcgagcacgacaaggcctacgaccggcagctcgacagcggagacaacccgtacctcaagtacaaccacgccgacgcggagtttcaggagcgtcttaaagaagatacgtcttttgggggcaacctcggacgagcagtcttccaggcgaaaaagagggttcttgaacctctgggcctggttgaggaacctgttaagacggctccgggaaaaaagaggccggtagagcattctcctgcggagccagactcctcctcgggaaccggaaaggcgggccagcagcctgcgagaaagagattgaatttcggtcagactggagacgcagactccgtacctgacccccagcctctcggacagccaccagcagccccctctggtctgggaactaatacgatggctacaggcagtggcgcaccaatggcagacaataacgagggcgccgacggagtgggtaattcctcgggaaattggcattgcgattccacatggatgggcgacagagtcatcaccaccagcacccgaacctgggccctgcccacctacaacaaccacctctacaagcaaatctccagccaatctggagcctcaaacgacaaccactactttggctacagcaccccttgggggtattttgacttcaacagattccactgtcacttctccccacgtgactggcaaagactcatcaacaacaactggggattccgacccaagagactcaacttcaagctctttaacattcaagtcaaagaggtcacgcagaatgacggtacgacgacgattgccaataaccttaccagcacggttcaagtctttactgactcggagtaccagctcccgtacgtcctcggctcggcgcatcaaggatgcctcccgccgtttccagcagacgtctccatggtgccacagtatggatacctcaccctgaacaacgggagtcaggcggtaggacgctcttccttttactgcctggagtactttccttctcagatgctgcgtaccggaaacaactttaccttcagctacacctttgaggacgttcctttccacagcagctacgctcacagccagagtttggaccggctgatgaatcctctgatcgaccagtatctgtattacttgagcaaaacaaacgctccaagcggaaccaccacgatgtccaggcttcagttttctcaggccggagcgagtgacattcgggaccagtctaggaactggcttcctggaccctgttaccgccagcagcgagtatcaaaaacagctgcggataacaacaacagtgattattcgtggactggagctaccaagtaccacctcaatggaagagactctctggtgaatccgggcccagctatggccagccacaaggacgatgaagaaaaatattttcctcagagcggggttctcatctttggaaaacaagactcgggaaaaactaatgtggacattgaaaaggtcatgattacagacgaagaggaaatcaggaccaccaatcccgtggctacggagcagtatggttctgtatctaccaacctccagagcggcaacacacaggcagccaccacagatgtcaacacacaaggcgttcttccaggcatggtctggcaggacagagacgtgtacctgcaaggacccatctgggcaaagattcctcacacggacggacactttcacccttctcccctcatgggaggatttggactcaaacaccctcctccgcaaatcctcatcaagaatacccccgtacctgcgaatccttcgaccacattcagcgcggcaaagcttgcttctttcatcacacagtactctacggggcaggtcagcgtggagattgagtgggagctgcagaaggagaacagcaaacgctggaaccccgaaatccagtacacttccaactacaacaagtctgttaatgtggactttactgtggacactaatggtgtgtattcagagcctcgccccattggcacaagatacctgactcgtaatctgtaa

SEQ ID NO: 3201 - DNA, 2208 bp, Artificial Sequence
  source: /note="Description of Artificial Sequence: Synthetic polynucleotide"
atggctgccgatggttatcttccagattggcccgaggacactctctctgaaggaataagacagtggtggaagctcaaacctggcccaccaccaccaaagcccgcagagcggcatcaggacgacagcaggggtcttgtgcttcctgggtacaagtacctcggacccttcaacggactcgacaagggagagccggtcaacgaggcagacgccgcggccctcgagcacgacaaggcctacgaccggcagctcgacagcggagacaacccgtacctcaagtacaaccacgccgacgcggagtttcaggagcgtcttaaagaagatacgtcttttgggggcaacctcggacgagcagtcttccaggcgaaaaagagggttcttgaacctctgggcctggttgaggaacctgttaagacggctccgggaaaaaagaggccggtagagcattctcctgcggagccagactcctcctcgggaaccggaaaggcgggccagcagcctgcgagaaagagattgaatttcggtcagactggagacgcagactccgtacctgacccccagcctctcggacagccaccagcagccccctctggtctgggaactaatacgatggctacaggcagtggcgcaccaatggcagacaataacgagggcgccgacggagtgggtaattcctcgggaaattggcattgcgattccacatggatgggcgacagagtcatcaccaccagcacccgaacctgggccctgcccacctacaacaaccacctctacaagcaaatctccagccaatctggagcctcaaacgacaaccactactttggctacagcaccccttgggggtattttgacttcaacagattccactgtcacttctccccacgtgactggcaaagactcatcaacaacaactggggattccgacccaagagactcaacttcaagctctttaacattcaagtcaaagaggtcacgcagaatgacggtacgacgacgattgccaataaccttaccagcacggttcaagtctttactgactcggagtaccagctcccgtacgtcctcggctcggcgcatcaaggatgcctcccgccgtttccagcagacgtcttcatggtgccacagtatggatacctcaccctgaacaacgggagtcaggcggtaggacgctcttccttttactgcctggagtactttccttctcagatgctgcgtaccggaaacaactttaccttcagctacacctttgaggacgttcctttccacagcagctacgctcacagccagagtttggaccggctgatgaatcctctgatcgaccagtatctgtattacttgagcaaaacaaacgctccaagcggaaccaccacgatgtccaggcttcagttttctcaggccggagcgagtgacattcgggaccagtctaggaactggcttcctggaccctgttaccgccagcagcgagtatcaaaaacagctgcggataacaacaacagtgattattcgtggactggagctaccaagtaccacctcaatggaagagactctctggtgaatccgggcccagctatggccagccacaaggacgatgaagaaaaatattttcctcagagcggggttctcatctttggaaaacaagactcgggaaaaactaatgtggacattgaaaaggtcatgattacagacgaagaggaaatcaggaccaccaatcccgtggctacggagcagtatggttctgtatctaccaacctccagagcggcaacacacaggcagccaccacagatgtcaacacacaaggcgttcttccaggcatggtctggcaggacagagacgtgtacctgcaaggacccatctgggcaaagattcctcacacggacggacactttcacccttctcccctcatgggaggatttggactcaaacaccctcctccgcaaatcctcatcaagaatacccccgtacctgcgaatccttcgaccacattcagcgcggcaaagtttgcttctttcatcacacagtactctacggggcaggtcagcgtggagattgagtgggagctgcagaaggagaacagcaaacgctggaaccccgaaatccagtacacttccaactacaacaagtctgttaatgtggactttactgtggacactaatggtgtgtattcagagcctcgccccattggcacaagatacctgactcgtaatctgtaa

SEQ ID NO: 3202 - DNA, 2208 bp, Artificial Sequence
  source: /note="Description of Artificial Sequence: Synthetic polynucleotide"
atggctgccgatggttatcttccagattggctcgaggacactctctctgaaggaataagacagtggtggaagctcaaacctggcccaccaccaccaaagcccgcagagcggcatcaggacgacagcaggggtcttgtgcttcctgggtacaagtacctcggacccttcaacggactcgacaagggagagccggtcaacgaggcagacgccgcggccctcgagcacgacaaggcctacgaccggcagctcgacagcggagacaacccgtacctcaagtacaaccacgccgacgcggagtttcaggagcgtcttaaagaagatacgtcttttgggggcaacctcggacgagcagtcttccaggcgaaaaagagggttcttgaacctctgggcctggttgaggaacctgttaagacggctccgggaaaaaagaggccggtagagcattctcctgcggagccagactcctcctcgggaaccggaaaggcgggccagcagcctgcgagaaagagattgaatttcggtcagactggagacgcagactccgtacctgacccccagcctctcggacagccaccagcagccccctctggtctgggaactaatacgatggctacaggcagtggcgcaccaatggcagacaataacgagggcgccgacggagtgggtaattcctcgggaaattggcattgcgattccacatggatgggcgacagagtcatcaccaccagcacccgaacctgggccctgcccacctacaacaaccacctctacaagcaaatctccagccaatctggagcctcaaacgacaaccactactttggctacagcaccccttgggggtattttgacttcaacagattccactgtcacttctccccacgtgactggcaaagactcatcaacaacaactggggattccgacccaagagactcaacttcaagctctttaacattcaagtcaaagaggtcacgcagaatgacggtacgacgacgattgccaataaccttaccagcacggttcaagtctttactgactcggagtaccagctcccgtacgtcctcggctcggcgcatcaaggatgcctcccgccgtttccagcagacgtcttcatggtgccacagtatggatacctcaccctgaacaacgggagtcaggcggtaggacgctcttccttttactgcctggagtactttccttctcagatgctgcgtaccggaaacaactttaccttcagctacacctttgaggacgttcctttccacagcagctacgctcacagccagagtttggaccggctgatgaatcctctgatcgaccagtatctgtattacttgagcaaaacaaacgctccaagcggaaccaccacgatgtccaggcttcagttttctcaggccggagcgagtgacattcgggaccagtctaggaactggcttcctggaccctgttaccgccagcagcgagtatcaaaaacagctgcggataacaacaacagtgattattcgtggactggagctaccaagtaccacctcaatggaagagactctctggtgaatccgggcccagctatggccagccacaaggacgatgaagaaaaattttttcctcagagcggggttctcatctttggaaaacaagactcgggaaaaactaatgtggacattgaaaaggtcatgattacagacgaagaggaaatcaggaccaccaatcccgtggctacggagcagtatggttctgtatctaccaacctccagagcggcaacacacaggcagccaccacagatgtcaacacacaaggcgttcttccaggcatggtctggcaggacagagacgtgtacctgcaaggacccatctgggcaaagattcctcacacggacggacactttcacccttctcccctcatgggaggatttggactcaaacaccctcctccgcaaatcctcatcaagaatacccccgtacctgcgaatccttcgaccacattcagcgcggcaaagtttgcttctttcatcacacagtactctacggggcaggtcagcgtggagattgagtgggagctgcagaaggagaacagcaaacgctggaaccccgaaatccagtacacttccaactacaacaagtctgttaatgtggactttactgtggacactaatggtgtgtattcagagcctcgccccattggcacaagatacctgactcgtaatctgtaa

SEQ ID NO: 3203 - DNA, 2208 bp, Artificial Sequence
  source: /note="Description of Artificial Sequence: Synthetic polynucleotide"
atggctgccgatggttatcttccagattggctcgaggacactctctctgaaggaataagacagtggtggaagctcaaacctggcccaccaccaccaaagcccgcagagcggcatcaggacgacagcaggggtcttgtgcttcctgggtacaagtacctcggacccttcaacggactcgacaagggagagccggtcaacgaggcagacgccgcggccctcgagcacgacaaggcctacgaccggcagctcgacagcggagacaacccgtacctcaagtacaaccacgccgacgcggagtttcaggagcgtcttaaagaagatacgtcttttgggggcaacctcggacgagcagtcttccaggcgaaaaagagggttcttgaacctctgggcctggttgaggaacctgttaagacggctccgggaaaaaagaggccggtagagcattctcctgcggagccagactcctcctcgggaatcggaaaggcgggccagcagcctgcgagaaagagattgaatttcggtcagactggagacgcagactccgtacctgacccccagcctctcggacagccaccagcagccccctctggtctgggaactaatacgatggctacaggcagtggcgcaccaatggcagacaataacgagggcgccgacggagtgggtaattcctcgggaaattggcattgcgattccacatggatgggcgacagagtcatcaccaccagcacccgaacctgggccctgcccacctacaacaaccacctctacaagcaaatctccagccaatctggagcctcaaacgacaaccactactttggctacagcaccccttgggggtattttgacttcaacagattccactgtcacttctccccacgtgactggcaaagactcatcaacaacaactggggattccgacccaagagactcaacttcaagctctttaacattcaagtcaaagaggtcacgcagaatgacggtacgacgacgattgccaataaccttaccagcacggttcaagtctttactgactcggagtaccagctcccgtacgtcctcggctcggcgcatcaaggatgcctcccgccgtttccagcagacgtcttcatggtgccacagtatggatacctcaccctgaacaacgggagtcaggcggtaggacgctcttccttttactgcctggagtactttccttctcagatgctgcgtaccggaaacaactttaccttcagctacacctttgaggacgttcctttccacagcagctacgctcacagccagagtttggaccggctgatgaatcctctgatcgaccagtatctgtattacttgagcaaaacaaacgctccaagcggaaccaccacgatgtccaggcttcagttttctcaggccggagcgagtgacattcgggaccagtctaggaactggcttcctggaccctgttaccgccagcagcgagtatcaaaaacagctgcggataacaacaacagtgattattcgtggactggagctaccaagtaccacctcaatggaagagactctctggtgaatccgggcccagctatggccagccacaaggacgatgaagaaaaatattttcctcagagcggggttctcatctttggaaaacaagactcgggaaaaactaatgtggacattgaaaaggtcatgattacagacgaagaggaaatcaggaccaccaatcccgtggctacggagcagtatggttctgtatctaccaacctccagagcggcaacacacaggcagccaccacagatgtcaacacacaaggcgttcttccaggcatggtctggcaggacagagacgtgtacctgcaaggacccatctgggcaaagattcctcacacggacggacactttcacccttctcccctcatgggaggatttggactcaaacaccctcctccgcaaatcctcatcaagaatacccccgtacctgcgaatccttcgaccacattcagcgcggcaaagtttgcttctttcatcacacagtactctacggggcaggtcagcgtggagattgagtgggagctgcagaaggagaacagcaaacgctggaaccccgaaatccagtacacttccaactacaacaagtctgttaatgtggactttactgtggacactaatggtgtgtattcagagcctcgccccattggcacaagatacctgactcgtaatctgtaa

SEQ ID NO: 3204 - DNA, 2208 bp, Artificial Sequence
  source: /note="Description of Artificial Sequence: Synthetic polynucleotide"
atggctgccgatggttatcttccagattggctcgaggacactctctctgaaggaataagacagtggtggaagctcaaacctggcccaccaccaccaaagcccgcagagcggcatcaggacgacagcaggggtcttgtgcttcctgggtacaagtacctcggacccttcaacggactcgacaagggagagccggtcaacgaggcagacgccgcggccctcgagcacgacaaggcctacgaccggcagctcgacagcggagacaacccgtacctcaagtacaaccacgccgacgcggagtttcaggagcgtcttaaagaagatacgtcttttgggggcaacctcggacgagcagtcttccaggcgaaaaagagggttcttgaacctctgggcctggttgaggaacctgttaagacggctccgggaaaaaagaggccggtagagcattctcctgcggagccagactcctcctcgggaaccggaaaggcgggccagcagcctgcgagaaagagattgaatttcggtcagactggagacgcagactccgtacctgacccccagcctctcggacagccaccagcagccccctctggtctgggaactaatacgatggctacaggcagtggcgcaccaatggcagacaataacgagggcgccgacggagtgggtaattcctcgggaaattggcattgcgattccacatggatgggcgacagagtcatcaccaccagcacccgaacctgggccctgcccacctacaacaaccacctctacaagcaaatctccagccaatctggagcctcaaacgacaaccactactttggctacagcaccccttgggggtattttgacttcaacagattccactgtcacttctccccacgtgactggcaaagactcatcaacaacaactggagattccgacccaagagactcaacttcaagctctttaacattcaagtcaaagaggtcacgcagaatgacggtacgacgacgattgccaataaccttaccagcacggttcaagtctttactgactcggagtaccagctcccgtacgtcctcggctcggcgcatcaaggatgcctcccgccgtttccagcagacgtcttcatggtgccacagtatggatacctcaccctgaacaacgggagtcaggcggtaggacgctcttccttttactgcctggagtactttccttctcagatgctgcgtaccggaaacaactttaccttcagctacacctttgaggacgttcctttccacagcagctacgctcacagccagagtttggaccggctgatgaatcctctgatcgaccagtatctgtattacttgagcaaaacaaacgctccaagcggaaccaccacgatgtccaggcttcagttttctcaggccggagcgagtgacattcgggaccagtctaggaactggcttcctggaccctgttaccgccagcagcgagtatcaaaaacagctgcggataacaacaacagtgattattcgtggactggagctaccaagtaccacctcaatggaagagactctctggtgaatccgggcccagctatggccagccacaaggacgatgaagaaaaatattttcctcagagcggggttctcatctttggaaaacaagactcgggaaaaactaatgtggacattgaaaaggtcatgattacagacgaagaggaaatcaggaccaccaatcccgtggctacggagcagtatggttctgtatctaccaacctccagagcggcaacacacaggcagccaccacagatgtcaacacacaaggcgttcttccaggcatggtctggcaggacagagacgtgtacctgcaaggacccatctgggcaaagattcctcacacggacggacactttcacccttctcccctcatgggaggatttggactcaaacaccctcctccgcaaatcctcatcaagaatacccccgtacctgcgaatccttcgaccacattcagcgcggcaaagcttgcttctttcatcacacagtactctacggggcaggtcagcgtggagattgagtgggagctgcagaaggagaacagcaaacgctggaaccccgaaatccagtacacttccaactacaacaagtctgttaatgtggactttactgtggacactaatggtgtgtattcagagcctcgccccattggcacaagatacctgactcgtaatctgtaa

SEQ ID NO: 3205 - DNA, 2208 bp, Artificial Sequence
  source: /note="Description of Artificial Sequence: Synthetic polynucleotide"
atggctgccgatggttatcttccagattggctcgaggacactctctctgaaggaataagacagtggtggaagctcaaacctggcccaccaccaccaaagcccgcagagcggcatcaggacgacagcaggggtcttgtgcttcctgggtacaagtacctcggacccttcaacggactcgacaagggagagccggtcaacgaggcagacgccgcggccctcgagcacgacaaggcctacgaccggcagctcgacagcggagacaacccgtacctcaagtacaaccacgccgacgcggagtttcaggagcgtcttaaagaagatacgtcttttgggggcaacctcggacgagcagtcttccaggcgaaaaagagggttcttgaacctctgggcctggttgaggaacctgttaagacggctccgggaaaaaagaggccggtagagcattctcctgcggagccagactcctcctcgggaaccggaaaggcgggccagcagcctgcgagaaagagattgaatttcggtcagactggagacgcagactccgtacctgacccccagcctctcggacagccaccagcagccccctctggtctgggaactaatacgatggctacaggcagtggcgcaccaatggcagacaataacgagggcgccgacggagtgggtaattcctcgggaaattggcattgcgattccacatggatgggcgacagagtcatcaccaccagcacccgaacctgggccctgcccacctacaacaaccacctctacaagcaaatctccagccaatctggagcctcaaacgacaaccactactttggctacagcactccttgggggtattttgacttcaacagattccactgtcacttctccccacgtgactggcaaagactcatcaacaacaactggggattccgacccaagagactcaacttcaagctctttaacattcaagtcaaagaggtcacgcagaatgacggtacgacgacgattgccaataaccttaccagcacggttcaagtctttactgactcggagtaccagctcccgtacgtcctcggctcggcgcatcaaggatgcctcccgccgtttccagcagacgtcttcatggtgccacagtatggatacctcaccctgaacaacgggagtcaggcggtaggacgctcttccttttactgcctggagtactttccttctcagatgctgcgtaccggaaacaactttaccttcagctacacctttgaggacgttcctttccacagcagctacgctcacagccagagtttggaccggctgatgaatcctctgatcgaccagtatctgtattacttgagcaaaacaaacgctccaagcggaaccaccacgatgtccaggcttcagttttctcaggccggagcgagtgacattcgggaccagtctaggaactggcttcctggaccctgttaccgccagcagcgagtatcaaaaacagctgcggataacaacaacagtgattattcgtggactggagctaccaagtaccacctcaatggaagagactctctggtgaatccgggcccagctatggccagccacaaggacgatgaagaaaaatattttcctcagagcggggttctcatctttggaaaacaagactcgggaaaaactaatgtggacattgaaaaggtcatgattacagacgaagaggaaatcaggaccaccaatcccgtggctacggagcagtatggttctgtatctaccaacctccagagcggcaacacacaggcagccaccacagatgtcaacacacaaggcgttcttccaggcatggtctggcaggacagagacgtgtacctgcaaggacccatctgggcaaagattcctcacacggacggacactttcacccttctcccctcatgggaggatttggactcaaacaccctcctccgcaaatcctcatcaagaatacccccgtacctgcgaatccttcgaccacattcagcgcggcaaagtttgcttctttcatcacacagtactctacggggcaggtcagcgtggagattgagtgggagctgcagaaggagaacagcaaacgctggaaccccgaaatccagtacacttccaactacaacaagtctgttaatgtggactttactgtggacactaatggtgtgtattcagagcctcgccccattggcacaagatacctggctcgtaatctgtaa

SEQ ID NO: 3206 - DNA, 2208 bp, Artificial Sequence
  source: /note="Description of Artificial Sequence: Synthetic polynucleotide"
atggctgccgatggttatcttccagattggctcgaggacactctctctgaaggaataagacagtggtggaagctcaaacctggcccaccaccaccaaagcccgcagagcggcatcaggacgacagcaggggtcttgtgcttcctgggtacaagtacctcggacccttcaacggactcgacaagggagagccggtcaacgaggcagacgccgcggccctcgagcacgacaaggcctacgaccggcagctcgacagcggagacaacccgtacctcaagtacaaccacgccgacgcggagtttcaggagcgtcttaaagaagatacgtcttttgggggcaacctcggacgagcagtcttccaggcgaaaaagagggttcttgaacctctgggcctggttgaggaacctgttaagacggctccgggaaaaaagaggccggtagagcattctcctgcggagccagactcctcctcgggaaccggaaaggcgggccagcagcctgcgaggaagagattgaatttcggtcagactggagacgcagactccgtacctgacccccagcctctcggacagccaccagcagccccctctggtctgggaactaatacgatggctacaggcagtggcgcaccaatggcagacaataacgagggcgccgacggagtgggtaattcctcgggaaattggcattgcgattccacatggatgggcgacagagtcatcaccaccagcacccgaacctgggccctgcccacctacaacaaccacctctacaagcaaatctccagccaatctggagcctcaaacgacgaccactactttggctacagcaccccttgggggtattttgacttcaacagattccactgtcacttctccccacgtgactggcaaagactcatcaacaacaactggggattccgacccaagagactcaacttcaagctctttaacattcaagtcaaagaggtcacgcagaatgacggtacgacgacgattgccaataaccttaccagcacggttcaagtctttactgactcggagtaccagctcccgtacgtcctcggctcggcgcatcaaggatgcctcccgccgtttccagcagacgtcttcatggtgccacagtatggatacctcaccctgaacaacgggagtcaggcggtaggacgctcttccttttactgcctggagtactttccttctcagatgctgcgtaccggaaacaactttaccttcagctacacctttgaggacgttcctttccacagcagctacgctcacagccagagtttggaccggctgatgaatcctctgatcgaccagtatctgtattacttgagcaaaacaaacgctccaagcggaaccaccacgatgtccaggcttcagttttctcaggccggagcgagtgacattcgggaccagtctaggaactggcttcctggaccctgttaccgccagcagcgagtatcaaaaacagctgcggataacaacaacagtgattattcgtggactggagctaccaagtaccacctcaatggaagagactctctggtgaatccgggcccagctatggccagccacaaggacgatgaagaaaaatattttcctcagagcggggttctcatctttggaaaacaagactcgggaaaaactaatgtggacattgaaaaggtcatgattacagacgaagaggaaatcaggaccaccaatcccgtggctacggagcagtatggttctgtatctaccaacctccagagcggcaacacacaggcagccaccacagatgtcaacacacaaggcgttcttccaggcatggtctggcaggacagagacgtgtacctgcaaggacccatctgggcaaagattcctcacacggacggacactttcacccttctcccctcatgggaggatttggactcaaacaccctcctccgcaaatcctcatcaagaatacccccgtacctgcgaatccttcgaccacattcagcgcggcaaagtttgcttctttcatcacacagtactctacggggcaggtcagcgtggagattgagtgggagctgcagaaggagaacagcaaacgctggaaccccgaaatccagtacacttccaactacaacaagtctgttaatgtggactttactgtggacactaatggtgtgtattcagagcctcgccccattggcacaagatacctgactcgtaatctgtaa

SEQ ID NO: 3207 - DNA, 2208 bp, Artificial Sequence
  source: /note="Description of Artificial Sequence: Synthetic polynucleotide"
atggctgccgatggttatcttccagattggctcgaggacactctctctgaaggaataagacagtggtggaagctcaaacctggcccaccaccaccaaagcccgcagagcggcatcaggacgacagcaggggtcttgtgcttcctgggtacaagtacctcggacccttcaacggactcgacaagggagagccggtcaacgaggcagacgccgcggccctcgagcacgacaaggcctacgaccggcagctcgacagcggagacaacccgtacctcaagtacaaccacgccgacgcggagtttcaggagcgtcttaaagaagatacgtcttttgggggcaacctcggacgagcagtcttccaggcgaaaaagggggttcttgaacctctgggcctggttgaggaacctgttaagacggctccgggaaaaaagaggccggtagagcattctcctgcggagccagactcctcctcgggaaccggaaaggcgggccagcagcctgcgagaaagagattgaatttcggtcagactggagacgcagactccgtacctgacccccagcctctcggacagccaccagcagccccctctggtctgggaactaatacgatggctacaggcagtggcgcaccaatggcagacaataacgagggcgccgacggagtgggtaattcctcgggaaattggcattgcgattccacatggatgggcgacagagtcatcaccaccagcacccgaacctgggccctgcccacctacaacaaccacctctacaagcaaatctccagccaatctggagcctcaaacgacaaccactactttggctacagcaccccttgggggtattttgacttcaacagattccactgtcacttctccccacgtgactggcaaagactcatcaacaacaactggggattccgacccaagagactcaacttcaagctctttaacattcaagtcaaagaggtcacgcagaatgacggtacgacgacgattgccaataaccttaccagcacggttcaagtctttactgactcggagtaccagctcccgtacgtcctcggctcggcgcatcaaggatgcctcccgccgtttccagcagacgtcttcatggtgccacagtatggatacctcaccctgaacaacgggagtcaggcggtaggacgctcttccttttactgcctggagtactttccttctcagatgctgcgtaccggaaacaactttaccttcagctacacctttgaggacgttcctttccacagcagctacgctcacagccagagtttggaccggctgatgaatcctctgatcgaccagtatctgtattacttgagcaaaacaaacgctccaagcggaaccaccacgatgtccaggcttcagttttctcaggccggagcgagtgacattcgggaccagtctaggaactggcttcctggaccctgttaccgccagcagcgagtatcaaaaacagctgcggataacaacaacagtgattattcgtggactggagctaccaagtaccacctcaatggaagagactctctggtgaatccgggcccagctatggccagccacaaggacgatgaagaaaaatattttcctcagagcggggttctcatctttggaaaacaagactcgggaaaaactaatgtggacattgaaaaggtcatgattacagacgaagaggaaatcaggaccaccaatcccgtggctacggagcagtatggttctgtatctaccaacctccagagcggcaacacacaggcagccaccacagatgtcaacacacaaggcgttcttccaggcatggtctggcaggacagagacgtgtacctgcaaggacccatctgggcaaagattcctcacacggacggacactttcacccttctcccctcatgggaggatttggactcaaacaccctcctccgcaaatcctcatcaagaatacccccgtacctgcgaatccttcgaccacattcagcgcggcaaagcttgcttctttcatcacacagtactctacggggcaggtcagcgtggagattgagtgggagctgcagaaggagaacagcaaacgctggaaccccgaaatccagtacacttccaactacaacaagtctgttaatgtggactttactgtggacactaatggtgtgtattcagagcctcgccccattggcacaagatacctgactcgtaatctgtaa

SEQ ID NO: 3208 - DNA, 2208 bp, Artificial Sequence
  source: /note="Description of Artificial Sequence: Synthetic polynucleotide"
atggctgccgatggttatcttccagattggctcgaggacactctctctgaaggaataagacagtggtggaagctcaaacctggcccaccaccaccaaagcccgcagagcggcatcaggacgacagcaggggtcttgtgcttcctgggtacaagtacctcggacccttcaacggactcgacaagggagagccggtcaacgaggcagacgccgcggccctcgagcacgacaaggcctacgaccggcagctcgacagcggagacaacccgtacctcaagtacaaccacgccgacgcggagtttcaggagcgtcttaaagaagatacgtcttttgggggcaacctcggacgagcagtcttccaggcgaaaaagagggttcttgaacctctgggcctggttgaggaacctgttaagacggctccgggaaaaaagaggccggtagagcattctcctgcggagccagactccccctcgggaaccggaaaggcgggccagcagcctgcgagaaagagattgaatttcggtcagactggagacgcagactccgtacctgacccccagcctctcggacagccaccagcagccccctctggtctgggaactaatacgatggctacaggcagtggcgcaccaatggcagacaataacgagggcgccgacggagtgggtaattcctcgggaaattggcattgcgattccacatggatgggcgacagagtcatcaccaccagcacccgaacctgggccctgcccacctacaacaaccacctctacaagcaaatctccagccaatctggagcctcaaacgacaaccactactttggctacagcaccccttgggggtattttgacttcaacagattccactgtcacttctccccacgtgactggcaaagactcatcaacaacaactggggattccgacccaagagactcaacttcaagctctttaacattcaagtcaaagaggtcacgcagaatgacggtacgacgacgattgccaataaccttaccagcacggttcaagtctttactgactcggagtaccagctcccgtacgtcctcggctcggcgcatcaaggatgcctcccgccgtttccagcagacgtcttcatggtgccacagtatggatacctcaccctgaacaacgggagtcaggcggtaggacgctcttccttttactgcctggagtactttccttctcagatgctgcgtaccggaaacaactttaccttcagctacacctttgaggacgttcctttccacagcagctacgctcacagccagagtttggaccggctgatgaatcctctgatcgaccagtatctgtattacttgagcaaaacaaacgctccaagcggaaccaccacgatgtccaggcttcagttttctcaggccggagcgagtgacattcgggaccagtctaggaactggcttcctggaccctgttaccgccagcagcgagtatcaaaaacagctgcggataacaacaacagtgattattcgtggactggagctaccaagtaccacctcaatggaagagactctctggtgaatccgggcccagctatggccagccacaaggacgatgaagaaaaatattttcctcagagcggggttctcatctttggaaaacaagactcgggaaaaactaatgtggacattgaaaaggtcatgattacagacgaagaggaaatcaggaccaccaatcccgtggctacggagcagtatggttctgtatctaccaacctccagagcggcaacacacaggcagccaccacagatgtcaacacacaaggcgttcttccaggcatggtctggcaggacagagacgtgtacctgcaaggacccatctgggcaaagattcctcacacggacggacactttcacccttctcccctcatgggaggatttggactcaaacaccctcctccgcaaatcctcatcaagaatacccccgtacctgcgaatccttcgaccacattcagcgcggcaaagtttgcttctttcatcacacagtactctacggggcaggtcagcgtggagattgagtgggagctgcagaaggagaacagcaaacgctggaaccccgaaatccagtacacttccaactacaacaagtctgttaatgtggactttactgtggacactaatggtgtgtattcagagcctcgccccattggcacaagatacctgactcgtaatctgtaa

SEQ ID NO: 3209 - DNA, 2208 bp, Artificial Sequence
  source: /note="Description of Artificial Sequence: Synthetic polynucleotide"
atggctgccgatggttatcttccagattggctcgaggacactctctctgaaggaataagacagtggtggaagctcaaacctggcccaccaccaccaaagcccgcagagcggcatcaggacgacagcaggggtcttgtgcttcctgggtacaagtacctcggacccttcaacggactcgacaagggagagccggtcaacgaggcagacgccgcggccctcgagcacgacaaggcctacgaccggcagctcgacagcggagacaacccgtacctcaagtacaaccacgccgacgcggagtttcaggagcgtcttaaagaagatacgtcttttgggggcaacctcggacgagcagtcttccaggcgaaaaagagggttcttgaacctctgggcctggttgaggaacctgttaagacggctccgggaaaaaagaggccggtagagcattctcctgcggagccagactcctcctcgggaaccggaaaggcgggccagcagcctgcgagaaagagattgaatttcggtcagactggagacgcagactccgtacctgacccccagcctctcggacagccaccagcagccccctctggtctgggaactaatacgatggctacaggcagtggcgcaccaatggcagacaataacgagggcgccgacggagtgggtaattcctcgggaaattggcattgcgattccacatggatgggcgacagagtcatcaccaccagcacccgaacctgggccctgcccacctacaacaaccacccctacaagcaaatctccagccaatctggagcctcaaacgacaaccactactttggctacagcaccccttgggggtattttgacttcaacagattccactgtcacttctccccacgtgactggcaaagactcatcaacaacaactggggattccgacccaagagactcaacttcaagctctttaacattcaagtcaaagaggtcacgcagaatgacggtacgacgacgattgccaataaccttaccagcacggttcaagtctttactgactcggagtaccagctcccgtacgtcctcggctcggcgcatcaaggatgcctcccgccgtttccagcagacgtcttcatggtgccacagtatggatacctcaccctgaacaacgggagtcaggcggtaggacgctcttccttttactgcctggagtactttccttctcagatgctgcgtaccggaaacaactttaccttcagctacacctttgaggacgttcctttccacagcagctacgctcacagccagagtttggaccggctgatgaatcctctgatcgaccagtatctgtattacttgagcaaaacaaacgctccaagcggaaccaccacgatgtccaggcttcagttttctcaggccggagcgagtgacattcgggaccagtctaggaactggcttcctggaccctgttaccgccagcagcgagtatcaaaaacagctgcggataacaacaacagtgattattcgtggactggagctaccaagtaccacctcaatggaagagactctctggtgaatccgggcccagctatggccagccacaaggacgatgaagaaaaatattttcctcagagcggggttctcatctttggaaaacaagactcgggaaaaactaatgtggacattgaaaaggtcatgattacagacgaagaggaaatcaggaccaccaatcccgtggctacggagcagtatggttctgtatctaccaacctccagagcggcaacacacaggcagccaccacagatgtcaacacacaaggcgttcttccaggcatggtctggcaggacagagacgtgtacctgcaaggacccatctgggcaaagattcctcacacggacggacactttcacccttctcccctcatgggaggatttggactcaaacaccctcctccgcaaatcctcatcaagaatacccccgtacctgcgaatccttcgaccacattcagcgcggcaaagtttgcttctttcatcacacagtactctacggggcaggtcagcgtggagattgagtgggagctgcagaaggagaacagcaaacgctggaaccccgaaatccagtacacttccaactacaacaagtctgttaatgtggactttactgtggacactaatggtgtgtattcagagcctcgccccattggcacaagatacctgactcgtaatctgtaa

SEQ ID NO: 3210 - DNA, 2208 bp, Artificial Sequence
  source: /note="Description of Artificial Sequence: Synthetic polynucleotide"
atggctgccgatggttatcttccagattggctcgaggacactctctctgaaggaataagacagtggtggaagctcaaacctggcccaccaccaccaaagcccgcagagcggcatcaggacgacagcaggggtcttgtgcttcctgggtacaagtacctcggacccttcaacggactcgacaagggagagccggtcagcgaggcagacgtcgcggccctcgagcacgacaaggcctacgaccggcagctcgacagcggagacaacccgtacctcaagtacaaccacgccgacgcggagtttcaggagcgtcttaaagaagatacgtcttttgggggcaacctcggacgagcagtcttccaggcgaaaaagagggttcttgaacctctgggcctggttgaggaacctgttaagacggctccgggaaaaaagaggccggtagagcattctcctgcggagccagactcctcctcgggaaccggaaaggcgggccagcagcctgcgagaaagagattgaatttcggtcagactggagacgcagactccgtacctgacccccagcctctcggacagccaccagcagccccctctggtctgggaactaatacgatggctacaggcagtggcgcaccaatggcagacaataacgagggcgccgacggagtgggtaattcctcgggaaattggcattgcgattccacatggatgggcgacagagtcatcaccaccagcacccgaacctgggccctgcccacctacaacaaccacctctacaagcaaatctccagccaatctggagcctcaaacgacaaccactactttggctacagcaccccttgggggtattttgacttcaacagattccactgtcacttctccccacgtgactggcaaagactcatcaacaacaactggggattccgacccaagagactcaacttcaagctctttaacattcaagtcaaagaggtcacgcagaatgacggtacgacgacgattgccaataaccttaccagcacggttcaagtctttactgactcggagtaccagctcccgtacgtcctcggctcggcgcatcaaggatgcctcccgccgtttccagcagacgtcttcatggtgccacagtatggatacctcaccctgaacaacgggagtcaggcggtaggacgctcttccttttactgcctggagtactttccttctcagatgctgcgtaccggaaacaactttaccttcagctacacctttgaggacgttcctttccacagcagctacgctcacagccagagtttggaccggctgatgaatcctctgatcgaccagtatctgtattacttgagcaaaacaaacgctccaagcggaaccaccacgatgtccaggcttcagttttctcaggccggagcgagtgacattcgggaccagtctaggaactggcttcctggaccctgttaccgccagcagcgagtatcaaaaacagctgcggataacaacaacagtgattattcgtggactggagctaccaagtaccacctcaatggaagagactctctggtgaatccgggcccagctatggccagccacaaggacgatgaagaaaaatattttcctcagagcggggttctcatctttggaaaacaagactcgggaaaaactaatgtggacattgaaaaggtcatgattacagacgaagaggaaatcaggaccaccaatcccgtggctacggagcagtatggttctgtatctaccaacctccagagcggcaacacacaggcagccaccacagatgtcaacacacaaggcgttcttccaggcatggtctggcaggacagagacgtgtacctgcaaggacccatctgggcaaagattcctcacacggacggacactttcacccttctcccctcatgggaggatttggactcaaacaccctcctccgcaaatcctcatcaagaatacccccgtacctgcgaatccttcgaccacattcagcgcggcaaagtttgcttctttcatcacacagtactctacggggcaggtcagcgtggagattgagtgggagctgcagaaggagaacagcaaacgctggaaccccgaaatccagtacacttccaactacaacaagtctgttaatgtggactttactgtggacactaatggtgtgtattcagagcctcgccccattggcacaagatacctgactcgtaatctgtaa

SEQ ID NO: 3211 - DNA, 2208 bp, Artificial Sequence
  source: /note="Description of Artificial Sequence: Synthetic polynucleotide"
atggctgccgatggttatcttccagattggctcgaggacactctctctgaaggaataagacagtggtggaagctcaaacctggcccaccaccaccaaagcccgcagagcggcatcaggacgacagcaggggtcttgtgcttcctgggtacaagtacctcggacccttcaacggactcgacaagggagagccggtcaacgaggcagacgccgcggccctcgagcacgacaaggcctacgaccggcagctcgacagcggagacaacccgtacctcaagtacaaccacgccgacgcggagtttcaggagcgtcttaaagaagatacgtcttttgggggcaacctcggacgagcagtcttccaggcgaaaaagagggttcttgaacctctgggcctggttgaggaacctgttaagacggctccgggaaaaaagaggccggtagagcattctcctgcggagccagactcctcctcgggaaccggaaaggcgggccagcagcctgcgagaaagagattgaatttcggtcagactggagacgcagactccgtacctgacccccagcctctcggacagccaccagcagccccctctggtctgggaactaatacgatggctacaggcagtggcgcaccaatggcagacaataacgagggcgccgacggagtgggtaattcctcgggaaattggcattgcgattccacatggatgggcgacagagtcatcaccaccagcacccgaacctgggccctgcccacctacaacaaccacctctacaagcaaatctccagccaatctggagcctcaaacgacaaccactactttggctacagcaccccttgggggtattttgacttcaacagattccactgtcacttctccccacgtgactggcaaagactcatcaacaacaactggggattccgacccaagagactcaacttcaagctctttaacattcaagtcaaagaggtcacgcagaatgacggtacgacgacgattgccaataaccttaccagcacggttcaagtctttactgactcggagtaccagctcccgtacgtcctcggctcggcgcatcaaggatgcctcccgccgtttccagcagacgtcttcatggtgccacagtatggatacctcaccctgaacaacgggagtcaggcggtaggacgctcttccttttactgcctggagtactttccttctcagatgctgcgtaccggaaacaactttaccttcagctacacctttgaggacgttcctttccacagcagctacgctcacagccagagtttggaccggctgatgaatcctctgatcgaccagtatctgtattacttgagcaaaacaaacgctccaagcggaaccaccacgatgtccaggcttcagttttctcaggccggagcgagtgacattcgggaccagtctaggaactggcttcctggaccctgttaccgccagcagcgagtatcaaaaacagctgcggataacaacaacagtgattattcgtggactggagctaccaagtaccacctcaatggaagagactctctggtgaatccgggcccagctatggccagccacaaggacgatgaagaaaaatattttcctcagagcggggttctcatctttggaaaacaagactcgggaaaaattaatgtggacattgaaaaggtcatgattacagacgaagaggaaatcaggaccaccaatcccgtggctacggagcagtatggttctgtatctaccaacctccagagcggcaacacacaggcagccaccacagatgtcaacacacaaggcgttcttccaggcatggtctggcaggacagagacgtgtacctgcaaggacccatctgggcaaagattcctcacacggacggacactttcacccttctcccctcatgggaggatttggactcaaacaccctcctccgcaaatcctcatcaagaatacccccgtacctgcgaatccttcgaccacattcagcgcggcaaagtttgcttctttcatcacacagtactctacggggcaggtcagcgtggagattgagtgggagctgcagaaggagaacagcaaacgctggaaccccgaaatccagtacacttccaactacaacaagtctgttaatgtggactttactgtggacactaatggtgtgtattcagagcctcgccccattggcacaagatacctgactcgtaatctgtaa

SEQ ID NO: 3212 - DNA, 2208 bp, Artificial Sequence
  source: /note="Description of Artificial Sequence: Synthetic polynucleotide"
atggctgccgatggttatcttccagattggctcgaggacactctctctgaaggaataagacagtggtggaagctcaaacctggcccaccaccactaaagcccgcagagcggcatcaggacgacagcaggggtcttgtgcttcctgggtacaagtacctcggacccttcaacggactcgacaagggagagccggtcaacgaggcagacgccgcggccctcgagcacgacaaggcctacgaccggcagctcgacagcggagacaacccgtacctcaagtacaaccacgccgacgcggagtttcaggagcgtcttaaagaagatacgtcttttgggggcaacctcggacgagcagtcttccaggcgaaaaagagggttcttgaacctctgggcctggttgaggaacctgttaagacggctccgggaaaaaagaggccggtagagcattctcctgcggagccagactcctcctcgggaaccggaaaggcgggccagcagcctgcgagaaagagattgaatttcggtcagactggagacgcagactccgtacctgacccccagcctctcggacagccaccagcagccccctctggtctgggaactaatacgatggctacaggcagtggcgcaccaatggcagacaataacgagggcgccgacggagtgggtaattcctcgggaaattggcattgcgattccacatggatgggcgacagagtcatcaccaccagcacccgaacctgggccctgcccacctacaacaaccacctctacaagcaaatctccagccaatctggagcctcaaacgacaaccactactttggctacagcaccccttgggggtattttgacttcaacagattccactgtcacttctccccacgtgactggcaaagactcatcaacaacaactggggattccgacccaagagactcaacttcaagctctttaacattcaagtcaaagaggtcacgcagaatgacggtacgacgacgattgccaataaccttaccagcacggttcaagtctttactgactcggagtaccagctcccgtacgtcctcggctcggcgcatcaaggatgcctcccgccgtttccagcagacgtcttcatggtgccacagtatggatacctcaccctgaacaacgggagtcaggcggtaggacgctcttccttttactgcctggagtactttccttctcagatgctgcgtaccggaaacaactttaccttcagctacacctttgaggacgttcctttccacagcagctacgctcacagccagagtttggaccggctgatgaatcctctgatcgaccagtatctgtattacttgagcaaaacaaacgctccaagcggaaccaccacgatgtccaggcttcagttttctcaggccggagcgagtgacattcgggaccagtctaggagctggcttcctggaccctgttaccgccagcagcgagtatcaaaaacagctgcggataacaacaacagtgattattcgtggactggagctaccaagtaccacctcaatggaagagactctctggtgaatccgggcccagctatggccagccacaaggacgatgaagaaaaatattttcctcagagcggggttctcatctttggaaaacaagactcgggaaaaactaatgtggacattgaaaaggtcatgattacagacgaagaggaaatcaggaccaccaatcccgtggctacggagcagtatggttctgtatctaccaacctccagagcggcaacacacaggcagccaccacagatgtcaacacacaaggcgttcttccaggcatggtctggcaggacagagacgtgtacctgcaaggacccatctgggcaaagattcctcacacggacggacactttcacccttctcccctcatgggaggatttggactcaaacaccctcctccgcaaatcctcatcaagaatacccccgtacctgcgaatccttcgaccacattcagcgcggcaaagtttgcttctttcatcacacagtactctacggggcaggtcagcgtggagattgagtgggagctgcagaaggagaacagcaaacgctggaaccccgaaatccagtacacttccaactacaacaagtctgttaatgtggactttactgtggacactaatggtgtgtattcagagcctcgccccattggcacaagatacctgactcgtaatctgtaa

SEQ ID NO: 3213 - DNA, 2208 bp, Artificial Sequence
  source: /note="Description of Artificial Sequence: Synthetic polynucleotide"
atggctgccgatggttatcttccagattggctcgaggacactctctctgaaggaataagacagtggtggaagctcaaacctggcccaccaccaccaaagcccgcagagcggcatcaggacgacagcaggggtcttgtgcttcctgggtacaagtacctcggacccttcaacggactcgacaagggagagccggtcaacgaggcagacgccgcggccctcgagcacgacaaggcctacgaccggcagctcgacagcggagacaacccgtacctcaagtacaaccacgccgacgcggagtttcaggagcgtcttaaagaagatacgtcttttgggggcaacctcggacgagcagtcttccaggcgaaaaagagggttcttgaacctctaggcctggttgaggaacctgttaagacggctccgggaaaaaagaggccggtagagcattctcctgcggagccagactcctcctcgggaaccggaaaggcgggccagcagcctgcgagaaagagattgaatttcggtcagactggagacgcagactccgtacctgacccccagcctctcggacagccaccagcagccccctctggtctgggaactaatacgatggctacaggcagtggcgcaccaatggcagacaataacgagggcgccgacggagtgggtaattcctcgggaaattggcattgcgattccacatggatgggcgacagagtcatcaccaccagcacccgaacctgggccctgcccacctacaacaaccacctctacaagcaaatctccagccaatctggagcctcaaacgacaaccactactttggctacagcaccccttgggggtattttgacttcaacagattccactgtcacttctccccacgtgactggcaaagactcatcaacaacaactggggattccgacccaagagactcaacttcaagctctttaacattcaagtcaaagaggtcacgcagaatgacggtacgacgacgattgccaataaccttaccagcacggttcaagtctttactgactcggagtaccagctcccgtacgtcctcggctcggcgcatcaaggatgcctcccgccgtttccagcagacgtcttcatggtgccacagtatggatacctcaccctgaacaacgggagtcaggcggtaggacgctcttccttttactgcctggagtactttccttctcagatgctgcgtaccggaaacaactttaccttcagctacacctttgaggacgttcctttccacagcagctacgctcacagccagagtttggaccggctgatgaatcctctgatcgaccagtatctgtattacttgagcaaaacaaacgctccaagcggaaccaccacgatgtccaggcttcagttttctcaggccggagcgagtgacattcgggaccagtctaggaactggcttcctggaccctgttaccgccagcagcgagtatcaaaaacagctgcggataacaacaacagtgattattcgtggactggagctaccaagtaccacctcaatggaagagactctctggtgaatccgggcccagctatggccagccacaaggacgatgaagaaaaatattttcctcagagcggggttctcatctttggaaaacaagactcgggaaaaactaatgtggacattgaaaaggtcatgattacagacgaagaggaaatcgggaccaccaatcccgtggctacggagcagtatggttctgtatctaccaacctccagagcggcaacacacaggcagccaccacagatgtcaacacacaaggcgttcttccaggcatggtctggcaggacagagacgtgtacctgcaaggacccatctgggcaaagattcctcacacggacggacactttcacccttctcccctcatgggaggatttggactcaaacaccctcctccgcaaatcctcatcaagaatacccccgtacctgcgaatccttcgaccacattcagcgcggcaaagtttgcttctttcatcacacagtactctacggggcaggtcagcgtggagattgagtgggagctgcagaaggagaacagcaaacgctggaaccccgaaatccagtacacttccaactacaacaagtctgttaatgtggactttactgtggacactaatggtgtgtattcagagcctcgccccattggcacaagatacctgactcgtaatctgtaa

SEQ ID NO: 3214 - DNA, 2208 bp, Artificial Sequence
  source: /note="Description of Artificial Sequence: Synthetic polynucleotide"
atggctgccgatggttatcttccagattggctcgaggacactctctctgaaggaataagacagtggtggaagctcaaacctggcccaccaccaccaaagcccgcagagcggcatcaggacgacagcaggggtcttgtgcttcctgggtacaagtacctcggacccttcaacggactcgacaagggagagccggtcaacgaggcagacgccgcggccctcgagcacgacaaggcctacgaccggcagctcgacagcggagacaacccgtacctcaagtacaaccacgccgacgcggagtttcaggagcgtcttaaagaagatacgtcttttgggggcaacctcggacgagcagtcttccaggcgaaaaagagggttcttgaacctctgggcctggttgaggaacctgttaagacggctccgggaaaaaagaggccggtagagcattctcctgcggagccagactcctcctcgggaaccggaaaggcgggccagcagcctgcgagaaagagattgaatttcggtcagactggagacgcagactccgtacctgacccccagcctctcggacagccaccagcagccccctctggtctgggaactaatacgatggctacaggcagtggcgcaccaatggcagacaataacgagggcgccgacggagtgggtaattcctcgggaaattggcattgcgattccacatggatgggcgacagagtcatcaccaccagcacccgaacctgggccctgcccacctacaacaaccacctctacaagcaaatctccagccaatctggagcctcaaacgacaaccactactttggctacagcaccccttgggggtattttgacttcaacagattccactgtcacttctccccacgtgactggcaaagactcatcaacaacaactggggattccgacccaagagactcaacttcaagctctttaacattcaagtcaaagaggtcacgcagaatgacggtacgacgacgattgccaataaccttaccagcacggttcaagtctttactgactcggagtaccggctcccgtacgtcctcggctcggcgcatcaaggatgcctcccgccgtttccagcagacgtcttcatggtgccacagtatggatacctcaccctgaacaacgggagtcaggcggtaggacgctcttccttttactgcctggagtactttccttctcagatgctgcgtaccggaaacaactttaccttcagctacacctttgaggacgttcctttccacagcagctacgctcacagccagagtttggaccggctgatgaatcctctgatcgaccagtatctgtattacttgagcaaaacaaacgctccaagcggaaccaccacgatgtccaggcttcagttttctcaggccggagcgagtgacattcgggaccagtctaggaactggcttcctggaccctgttaccgccagcagcgagtatcaaaaacagctgcggataacaacaacagtgattattcgtggactggagctaccaagtaccacctcaatggaagagactctctggtgaatccgggcccagctatggccagccacaaggacgatgaagaaaaatattttcctcagagcggggttctcatctttggaaaacaagactcgggaaaaactaatgtggacattgaaaaggtcatgattacagacgaagaggaaatcaggaccaccaatcccgtggctacggagcagtatggttctgtatctaccaacctccagagcggcaacacacaggcagccaccacagatgtcaacacacaaggcgttcttccaggcatggtctggcaggacagagacgtgtacctgcaaggacccatctgggcaaagattcctcacacggacggacactttcacccttctcccctcatgggaggatttggactcaaacaccctcctccgcaaatcctcatcaagaatacccccgtacctgcgaatccttcgaccacattcagcgcggcaaagtttgcttctttcatcacacagtactctacggggcaggtcagcgtggagattgagtgggagctgcagaaggagaacagcaaacgctggaaccccgaaatccagtacacttccaactacaacaagtctgttaatgtggactttactgtggacactaatggtgtgtattcagagcctcgccccattggcacaagatacctgactcgtaatctgtaa

SEQ ID NO: 3215 - DNA, 2208 bp, Artificial Sequence
  source: /note="Description of Artificial Sequence: Synthetic polynucleotide"
atggctgccgatggttatcttccagattggctcgaggacactctctctgaaggaataagacagtggtggaagctcaaacctggcccaccaccaccaaagcccgcagagcggcatcaggacgacagcaggggtcttgtgcttcctgggtacaagtacctcggacccttcaacggactcgacaagggagagccggtcaacgaggcagacgccgcggccctcgagcacgacaaggcctacgaccggcagctcgacagcggagacaacccgtacctcaagtacaaccacgccgacgcggagtttcaggagcgtcttaaagaagatacgtcttttgggggcaacctcggacgagcagtcttccaggcgaaaaagagggttcttgaacctctgggcctggttgaggaacctgttaagacggctccgggaaaaaagaggccggtagagcattctcctgcggagccagactcctcctcgggaaccggaaaggcgggccagcagcctgcgagaaagagattgaatttcggtcagactggagacgcagactccgtacctgacccccagcctctcggacagccaccagcagccccctctggtctgggaactaatacgatggctacaggcagtggcgcaccaatggcagacaataacgagggcgccgacggagtgggtaattcctcgggaaattggcattgcgattccacatggatgggcgacagagtcatcaccaccagcacccgaacctgggccctgcccacctacaacaaccacctctacaagcaaatctccagccaatctggagcctcaaacgacaaccactactttggctacagcaccccttgggggtattttgacttcaacagattccactgtcacttctccccacgtgactggcaaagactcatcaacaacaactggggattccgacccaagagactcaacttcaagctctttaacattcaagtcaaagaggtcacgcagaatgacggtacgacgacgattgccaataaccttaccagcacggttcaagtctttactgactcggagtaccagctcccgtacgtcctcggctcggcgcatcaaggatgcctcccgccgtttccagcagacgtcttcatggtgccacagtatggatacctcaccctgaacaacgggagtcaggcggtaggacgctcttccttttactgcctggagtactttccttctcagatgctgcgtaccgggaacaactttaccttcagctacacctttgaggacgttcctttccacagcagctacgctcacagccagagtttggaccggctgatgaatcctctgatcgaccagtatctgtattacttgagcaaaacaaacgctccaagcggaaccaccacgatgtccaggcttcagttttctcaggccggagcgagtgacattcgggaccagtctaggaactggcttcctggaccctgttaccgccagcagcgagtatcaaaaacagctgcggataacaacaacagtgattattcgtggactggagctaccaagtaccacctcaatggaagagactctctggtgaatccgggcccagctatggccagccacaaggacgatgaagaaaaatattttcctcagagcggggttctcatctttggaaaacaggactcgggaaaaaccaatgtggacattgaaaaggtcatgattacagacgaagaggaaatcaggaccaccaatcccgtggctacggagcagtatggttctgtatctaccaacctccagagcggcaacacacaggcagccaccacagatgtcaacacacaaggcgttcttccaggcatggtctggcaggacagagacgtgtacctgcaaggacccatctgggcaaagattcctcacacggacggacactttcacccttctcccctcatgggaggatttggactcaaacaccctcctccgcaaatcctcatcaagaatacccccgtacctgcgaatccttcgaccacattcagcgcggcaaagtttgcttctttcatcacacagtactctacggggcaggtcagcgtggagattgagtgggagctgcagaaggagaacagcaaacgctggaaccccaaaatccagtacacttccaactacaacaagtctgttaatgtggactttactgtggacactaatggtgtgtattcagagcctcgccccattggcacaagatacctgactcgtaatctgtaa

SEQ ID NO: 3216 - DNA, 2208 bp, Artificial Sequence
  source: /note="Description of Artificial Sequence: Synthetic polynucleotide"
atggctgccgatggttatcttccagattggctcgaggacactctctctgaaggaataagacagtggtggaagctcaaacctggcccaccaccaccaaagcccgcagagcggcatcaggacgacagcaggggtcttgtgcttcctgggtacaagtacctcggacccttcaacggactcgacaagggagagccggtcaacgaggcagacgccgcggccctcgagcacgacaaggcctacgaccggcagctcgacagcggagacaacccgtacctcaagtacaaccacgccgacgcggagtctcaggagcgtcttaaagaagatacgtcttttgggggcaacctcggacgagcagtcttccaggcgaaaaagagggttcttgaacctctgggcctggttgaggaacctgttaagacggctccgggaaaaaagaggccggtagagcattctcctgcggagccagactcctcctcgggaaccggaaaggcgggccagcagcctgcgagaaagagattgaatttcggtcagactggagacgcagactccgtacctgacccccagcctctcggacagccaccagcagccccctctggtctgggaactaatacgatggctacaggcagtggcgcaccaatggcagacaataacgagggcgccgacggagtgggtaattcctcgggaaattggcattgcgattccacatggatgggcgacagagtcatcaccaccagcacccgaacctgggccctgcccacctacaacaaccacctctacaagcaaatctccagccaatctggagcctcaaacgacaaccactactttggctacagcaccccttgggggtattttgacttcaacagattccactgtcacttctccccacgtgactggcaaagactcatcaacaacaactggggattccgacccaagagactcaacttcaagctctttaacattcaagtcaaagaggtcacgcagaatgacggtacgacgacgattgccaataaccttaccagcacggttcaagtctttactgactcggagtaccagctcccgtacgtcctcggctcggcgcatcaaggatgcctcccgccgtttccagcagacgtcttcatggtgccacagtatggatacctcaccctgaacaacgggagtcaggcggtaggacgctcttccttttactgcctggagtactttccttctcagatgctgcgtaccggaaacaactttaccttcagctacacctttgaggacgttcctttccacagcagctacgctcacagccagagtttggaccggctgatgaatcctctgatcgaccagtatctgtattacttgagcaaaacaaacgctccaagcggaaccaccacgatgtccaggcttcagttttctcaggccggagcgagtgacattcgggaccagtctaggaactggcttcctggaccctgttaccgccagcagcgagtatcaaaaacagctgcggataacaacaacagtgattattcgtggactggagctaccaagtaccacctcaatggaagagactctctggtgaatccgggcccagctatggccagccacaaggacgatgaagaaaaatattttcctcagagcggggttctcatctttggaaaacaagactcgggaaaaactaatgtggacattgaaaaggtcatgattacagacgaagaggaaatcaggaccaccaatcccgtggctacggagcagtatggttctgtatctaccaacctccagagcggcaacacacaggcagccaccacagatgtcaacacacaaggcgttcttccaggcatggtctggcaggacagagacgtgtacctgcaaggacccatctgggcaaagattcctcacacggacggacactttcacccttctcccctcatgggaggatttggactcaaacaccctcctccgcaaatcctcatcaagaatacccccgtacctgcgaatccttcgaccacattcagcgcggcaaagtttgcttctttcatcacacagtactctacggggcaggtcagcgtggagattgagtgggagctgcagaaggagaacagcaaacgctggaaccccgaaatccagtacacttccaactacaacaagtctgttaatgtggactttactgtggacactaatggtgtgtattcagagcctcgccccattggcacaagatacctgactcgtaatctgtaa

SEQ ID NO: 3217 - DNA, 2208 bp, Artificial Sequence
  source: /note="Description of Artificial Sequence: Synthetic polynucleotide"
atggctgccgatggttatcttccagattggctcgaggacactctctctgaaggaataagacagtggtggaagctcaaacctggcccaccaccaccaaagcccgcagagcggcatcaggacgacagcaggggtcttgtgcttcctgggtacaagtacctcggacccttcaacggactcgacaagggagagccggtcaacgaggcagacgccgcggccctcgagcacgacaaggcctacgaccggcagctcgacagcggagacaacccgtacctcaagtacaaccacgccgacgcggagtttcaggagcgtcttaaagaagatacgtcttttgggggcaacctcggacgagcagtcttccaggcgaaaaagagggttcttgaacctctgggcctggttgaggaacctgttaagacggctccgggaaaaaagaggccggtagagcattctcctgcggagccagactcctcctcgggaaccggaaaggcgggccagcagcctgcgagaaagagattgaatttcggtcagactggagacgcagactccgtacctgacccccagcctctcggacagccaccagcagccccctctggtctgggaactaatacgatggctacaggcagtggcgcaccaacggcagacaataacgagggcgccgacggagtgggtaattcctcgggaaattggcattgcgattccacatggatgggcgacagagtcatcaccaccagcacccgaacctgggccctgcccacctacaacaaccacctctacaagcaaatctccagccaatctggagcctcaaacgacaaccactactttggctacagcaccccttgggggtattttgacttcaacagattccactgtcacttctccccacgtgactggcaaagactcatcaacaacaactggggattccgacccaagagactcaacttcaagctctttaacattcaagtcaaagaggtcacgcagaatgacggtacgacgacgattgccaataaccttaccagcacggttcaagtctttactgactcggagtaccagctcccgtacgtcctcggctcggcgcatcaaggatgcctcccgccgtttccagcagacgtcttcatggtgccacagtatggatacctcaccctgaacaacgggagtcaggcggtaggacgctcttccttttactgcctggagtactttccttctcagatgctgcgtaccggaaacaactttaccttcagctacacctttgaggacgttcctttccacagcagctacgctcacagccagagtttggaccggctgatgaatcctctgatcgaccagtatctgtattacttgagcaaaacaaacgctccaagcggaaccaccacgatgtccaggcttcagttttctcaggccggagcgagtgacattcgggaccagtctaggaactggcttcctggaccctgttaccgccagcagcgagtatcaaaaacagctgcggataacaacaacagtgattattcgtggactggagctaccaagtaccacctcaatggaagagactctctggtgaatccgggcccagctatggccagccacaaggacgatgaagaaaaatattttcctcagagcggggttctcatctttggaaaacaagactcgggaaaaactaatgtggacattgaaaaggtcatgattacagacgaagaggaaatcaggaccaccaatcccgtggctacggagcagtatggttctgtatctaccaacctccagagcggcaacacacaggcagccaccacagatgtcaacacacaaggcgttcttccaggcatggtctggcaggacagagacgtgtacctgcaaggacccatctgggcaaagattcctcacacggacggacactttcacccttctcccctcatgggaggatttggactcaaacaccctcctccgcaaatcctcatcaagaatacccccgtacctgcgaatccttcgaccacattcagcgcggcaaagtttgcttctttcatcacacagtactctacggggcaggtcagcgtggagattgagtgggagctgcagaaggagaacagcaaacgctggaaccccgaaatccagtacacttccaactacaacaagtctgttaatgtggactttactgtggacactaatggtgtgtattcagagcctcgccccattggcacaagatacctgactcgtaatctgtaa

SEQ ID NO: 3218 - DNA, 2208 bp, Artificial Sequence
  source: /note="Description of Artificial Sequence: Synthetic polynucleotide"
atggctgccgatggttatcttccagattggctcgaggacactctctctgaaggaataagacagtggtggaagctcaaacctggcccaccaccaccaaagcccgcagagcggcatcaggacgacagcaggggtcttgtgcttcctgggtacaagtacctcggacccttcaacggactcgacaagggagagccggtcaacgaggcagacgccgcggccctcgagcacgacaaggcctacgaccggcagctcgacagcggagacaacccgtacctcaagtacaaccacgccgacgcggagtttcaggagcgtcttaaagaagatacgtcttttgggggcaacctcggacgagcagtcttccaggcgaaaaagagggttcttgaacctctgggcctggttgaggaacctgttaagacggctccgggaaaaaagaggccggtagagcattctcctgcggagccagacgcctcctcgggaaccggaaaggcgggccagcagcctgcgagaaagagattgaatttcggtcagactggagacgcagactccgtacctgacccccagcctctcggacagccaccagcagccccctctggtctgggaactaatacgatggctacaggcagtggcgcaccaatggcagacaataacgagggcgccgacggagtgggtaattcctcgggaaattggcattgcgattccacatggatgggcgacagagtcatcaccaccagcacccgaacctgggccctgcccacctacaacaaccacctctacaagcaaatctccagccaatctggagcctcaaacgacaaccactactttggctacagcaccccttgggggtattttgacttcaacagattccactgtcacttctccccacgtgactggcaaagactcatcaacaacaactggggattccgacccaagagactcaacttcaagctctttaacattcaagtcaaagaggtcacgcagaatgacggtacgacgacgattgccaataaccttaccagcacggttcaagtctttactgactcggagtaccagctcccgtacgtcctcggctcggcgcatcaaggatgcctcccgccgtttccagcagacgtcttcatggtgccacagtatggatacctcaccctgaacaacgggagtcaggcggtaggacgctcttccttttactgcccggagtactttccttctcagatgctgcgtaccggaaacaactttaccttcagctacacctttgaggacgttcctttccacagcagctacgctcacagccagagtttggaccggctgatgaatcctctgatcgaccagtatctgtattacttgagcaaaacaaacgctccaagcggaaccaccacgatgtccaggcttcagttttctcaggccggagcgagtgacattcgggaccagtctaggaactggcttcctggaccctgttaccgccagcagcgagtatcaaaaacagctgcggataacaacaacagtgattattcgtggactggagctaccaagtaccacctcaatggaagagactctctggtgaatccgggcccagctatggccagccacaaggacgatgaagaaaaatattttcctcagagcggggttctcatctttggaaaacaagactcgggaaaaactaatgtggacattgaaaaggtcatgattacagacgaagaggaaatcaggaccaccaatcccgtggctacggagcagtatggttctgtatctaccaacctccagagcggcaacacacaggcagccaccacagatgtcaacacacaaggcgttcttccaggcatggtctggcaggacagagacgtgtacctgcaaggacccatctgggcaaagattcctcacacggacggacactttcacccttctcccctcatgggaggatttggactcaaacaccctcctccgcaaatcctcatcaagaatacccccgtacctgcgaatccttcgaccacattcagcgcggcaaagtttgcttctttcatcacacagtactctacggggcaggtcagcgtggagattgagtgggagctgcagaaggagaacagcaaacgctggaaccccgaaatccagtacacttccaactacaacaagtctgttaatgtggactttactgtggacactaatggtgtgtattcagagcctcgccccattggcacaagatacctgactcgtaatctgtaa

SEQ ID NO: 3219 - DNA, 2208 bp, Artificial Sequence
  source: /note="Description of Artificial Sequence: Synthetic polynucleotide"
atggctgccgatggttatcttccagattggctcgaggacactctctctgaaggaataagacagtggtggaagctcaaacctggcccaccaccaccaaagcccgcagagcggcatcaggacgacagcaggggtcttgtgcttcctgggtacaagtacctcggacccttcaacggactcgacaagggagagccggtcaacgaggcagacgccgcggccctcgagcacgacaaggcctacgaccggcagctcgacagcggagacaacccgtacctcaagtacaaccacgccgacgcggagtttcaggagcgtcttaaagaagatacgtcttttgggggcaacctcggacgagcagtcttccaggcgaaaaagagggttcttgaacctctgggcctggttgaggaacctgttaagacggctccgggaaaaaagaggccggtagagcattctcctgcggagccagactcctcctcgggaaccggaaaggcgggccagcagcctgcgagaaagagattgaatttcggtcagactggagacgcagactccgtacctgacccccagcctctcggacagccaccagcagccccctctggtctgggaactaatacgatggctacaggcagtggcgcaccaatggcagacaataacgagggcgccgacggagtgggtaattcctcgggaaattggcattgcgattccacatggatgggcgacagagtcatcaccaccagcacccgaacctgggccctgcccacctacaacaaccacctctacaagcaaatctccagccaatctggagcctcaaacgacaaccactactttggctacagcaccccttgggggtattttgacttcaacagattccactgtcacttctccccacgtgactggcaaagactcatcaacaacaactggggactccgacccaagagactcaacttcaagctctttaacattcaagtcaaagaggtcacgcagaatgacggtacgacgacgattgccaataaccttaccagcacggttcaagtctttactgactcggagtaccagctcccgtacgtcctcggctcggcgcatcaaggatgcctcccgccgtttccagcagacgtcttcatggtgccacagtatggatacctcaccctgaacaacgggagtcaggcggtaggacgctcttccttttactgcctggagtactttccttctcagatgctgcgtaccggaaacaactttaccttcagctacacctttgaggacgttcctttccacagcagctacgctcacagccagagtttggaccggctgatgaatcctctgatcgaccagtatctgtattacttgagcaaaacaaacgctccaagcggaaccaccacgatgtccaggcttcagttttctcaggccggagcgagtgacattcgggaccagtctaggaactggcttcctggaccctgttaccgccagcagcgagtatcaaaaacagctgcggataacaacaacagtgattattcgtggactggagctaccaagtaccacctcaatggaagagactctctggtgaatccgggcccagctatggccagccacaaggacgatgaagaaaaatattttcctcagagcggggttctcatctttggaaaacaagactcgggaaaaactaatgtggacattgaaaaggtcatgattacagacgaagaggaaatcaggaccaccaatcccgtggctacggagcagtatggttctgtatctaccaacctccagagcggcaacacacaggcagccaccacagatgtcaacacacaaggcgttcttccaggcatggtctggcaggacagagacgtgtacctgcaaggacccatctgggcaaagattcctcacacggacggacactttcacccttctcccctcatgggaggatttggactcaaacaccctcctccgcaaatcctcatcaagaatacccccgtacctgcgaatccttcgaccacattcagcgcggcaaagtttgcttctttcatcacacagtactctacggggcaggtcagcgtggagattgagtgggagctgcagaaggagaacagcaaacgctggaaccccgaaatccagtacacttccaactacaacaagtctgttaatgtggactttactgtggacactaatggtgtgtattcagagcctcgccccattggcacaagatacctgactcgtaatctgtaa

SEQ ID NO: 3220 - DNA, 2208 bp, Artificial Sequence
  source: /note="Description of Artificial Sequence: Synthetic polynucleotide"
atggctgccgatggttatcttccagattggctcgaggacactctctctgaaggaataagacagtggtggaagctcaaacctggcccaccaccaccaaagcccgcagagcggcatcaggacgacagcaggggtcttgtgcttcctgggtacaagtacctcggacccttcaacggactcgacaagggagagccggtcaacgaggcagacgccgcggccctcgagcacgacaaggcctacgaccggcagctcgacagcggagacaacccgtacctcaagtacaaccacgccgacgcggagtttcaggagcgtcttaaagaagatacgtcttttgggggcaacctcggacgagcagtcttccaggcgaaaaagagggttcttgaacctctgggcctggttgaggaacctgttaagacggctccgggaaaaaagaggccggtagagcattttcctgcggagccagactcctcctcgggaaccggaaaggcgggccagcagcctgcgagaaagagattgaatttcggtcagactggagacgcagactccgtacctgacccccagcctctcggacagccaccagcagccccctctggtctgggaactaatacgatggctacaggcagtggcgcaccaatggcagacaataacgagggcgccgacggagtgggtaattcctcgggaaattggcattgcgattccacatggatgggcgacagagtcatcaccaccagcacccgaacctgggccctgcccacctacaacaaccacctctacaagcaaatctccagccaatctggagcctcaaacgacaaccactactttggctacagcaccccttgggggtattttgacttcaacagattccactgtcacttctccccacgtgactggcaaagactcatcaacaacaactggggattccgacccaagagactcaacttcaagctctttaacattcaagtcaaagaggtcacgcagaatgacggtacgacgacgattgccaataaccttaccagcacggttcaagtctttactgactcggagtaccagctcccgtacgtcctcggctcggcgcatcaaggatgcctcccgccgtttccagcagacgtcttcatggtgccacagtatggatacctcaccctgaacaacgggagtcaggcggtaggacgctcttccttttactgcctggagtactttccttctcagatgctgcgtaccggaaacaactttaccttcagctacacctttgaggacgttcctttccacagcagctacgctcacagccagagtttggaccggctgatgaatcctctgatcgaccagtatctgtattacttgagcaaaacaaacgctccaagcggaaccaccacgatgtccaggcttcagttttctcaggccggagcgagtgacattcgggaccagtctaggaactggcttcctggaccctgttaccgccagcagcgagtatcaaaaacagctgcggataacaacaacagtgattattcgtggactggagctaccaagtaccacctcaatggaagagactctctggtgaatccgggcccagctatggccagccacaaggacgatgaagaaaaatattttcctcagagcggggttctcatcttcggaaaacaagactcgggaaaaactaatgtggacattgaaaaggtcatgattacagacgaagaggaaatcaggaccaccaatcccgtggctacggagcagtatggttctgtatctaccaacctccagagcggcaacacacaggcagccaccacagatgtcaacacacaaggcgttcttccaggcatggtctggcaggacagagacgtgtacctgcaaggacccatctgggcaaagattcctcacacggacggacactttcacccttctcccctcatgggaggatttggactcaaacaccctcctccgcaaatcctcatcaagaatacccccgtacctgcgaatccttcgaccacattcagcgcggcaaagtttgcttctttcatcacacagtactctacggggcaggtcagcgtggagattgagtgggagctgcagaaggagaacagcaaacgctggaaccccgaaatccagtacacttccaactacaacaagtctgttaatgtggactttactgtggacactaatggtgtgtattcagagcctcgccccattggcacaagatacctgactcgtaatctgtaa

SEQ ID NO: 3221 - DNA, 2208 bp, Artificial Sequence
  source: /note="Description of Artificial Sequence: Synthetic polynucleotide"
atggctgccgatggttatcttccagattggctcaaggacactctctctgaaggaataagacagtggtggaagctcaaacctggcccaccaccaccaaagcccgcagagcggcatcaggacgacagcaggggtcttgtgcttcctgggtacaagtacctcggacccttcaacggactcgacaagggagagccggtcaacgaggcagacgccgcggccctcgagcacgacaaggcctacgaccggcagctcgacagcggagacaacccgtacctcaagtacaaccacgccgacgcggagtttcaggagcgtcttaaagaagatacgtcttttgggggcaacctcggacgagcagtcttccaggcgaaaaagagggttcttgaacctctgggcctggttgaggaacctgttaagacggctccgggaaaaaagaggccggtagagcattctcctgcggagccagactcctcctcgggaaccggaaaggcgggccagcagcctgcgagaaagagattgaatttcggtcagactggagacgcagactccgtacctgacccccagcctctcggacagccaccagcagccccctctggtctgggaactaatacgatggctacaggcagtggcgcaccaatggcagacaataacgagggcgccgacggagtgggtaattcctcgggaaattggcattgcgattccacatggatgggcgacagagtcatcaccaccagcacccgaacctgggccctgcccacctacaacaaccacctctacaagcaaatctccagccaatctggagcctcaaacgacaaccactactttggctacagcaccccttgggggtattttgacttcaacagattccactgtcacttctccccacgtgactggcaaagactcatcaacaacaactggggattccgacccaagagactcaacttcaagctctttaacattcaagtcaaagaggtcacgcagaatgacggtacgacgacgattgccaataaccttaccagcacggttcaagtctttactgactcggagtaccagctcccgtacgtcctcggctcggcgcatcaaggatgcctcccgccgtttccagcagacgtcttcatggtgccacagtatggatacctcaccctgaacaacgggagtcaggcggtaggacgctcttccttttactgcctggagtactttccttctcagatgctgcgtaccggaaacaactttaccttcagctacacctttgaggacgttcctttccacagcagctacgctcacagccagagtttggaccggctgatgaatcctctgatcgaccagtatctgtattacttgagcaaaacaaacgctccaagcggaaccaccacgatgtccaggcttcagttttctcaggccggagcgagtgacattcgggaccagtctaggaactggcttcctggaccctgttaccgccagcagcgagtatcaaaaacagctgcggataacaacaacagtgattattcgtggactggagctaccaagtaccacctcaatggaagagactctctggtgaatccgggcccagctatggccagccacaaggacgatgaagaaaaatattttcctcagagcggggttctcatctttggaaaacaagactcgggaaaaaccaatgtggacattgaaaaggtcatgattacagacgaagaggaaatcaggaccaccaatcccgtggctacggagcagtatggttctgtatctaccaacctccagagcggcaacacacaggcagccaccacagatgtcaacacacaaggcgttcttccaggcatggtctggcaggacagagacgtgtacctgcaaggacccatctgggcaaagattcctcacacggacggacactttcacccttctcccctcatgggaggatttggactcaaacaccctcctccgcaaatcctcatcaagaatacccccgtacctgcgaatccttcgaccacattcagcgcggcaaagtttgcttctttcatcacacagtactctacggggcaggtcagcgtggagattgagtgggagctgcagaaggagaacagcaaacgctggaaccccgaaatccagtacacttccaactacaacaagtctgttaatgtggactttactgtggacactaatggtgtgtattcagagcctcgccccattggcacaagatacctgactcgtaatctgtaa

SEQ ID NO: 3222 - DNA, 2208 bp, Artificial Sequence
  source: /note="Description of Artificial Sequence: Synthetic polynucleotide"
atggctgccgatggttatcttccagattggctcgaggacactctctctgaaggaataagacagtggtggaagctcaaacctggcccaccaccaccaaagcccgcagagcggcatcaggacgacagcaggggtcttgtgcttcctgggtacaagtacctcggacccttcaacggactcgacaagggagagccggtcaacgaggcagacgtcgcggccctcgagcacgacaaggcctacgaccggcagctcgacagcggagacaacccgtacctcaagtacaaccacgccgacgcggagtttcaggagcgtcttaaagaagatacgtcttttgggggcaacctcggacgagcagtcttccaggcgaaaaggagggttcttgaacctctgggcctggttgaggaacctgttaagacggctccgggaaaaaagaggccggtagagcattctcctgcggagccagactcctcctcgggaaccggaaaggcgggccagcagcctgcgagaaagagattgaatttcggtcagactggagacgcagactccgtacctgacccccagcctctcggacagccaccagcagccccctctggtctgggaactaatacgatggctacaggcagtggcgcaccaatggcagacaataacgagggcgccgacggagtgggtaattcctcgggaaattggcattgcgattccacatggatgggcgacagagtcatcaccaccagcacccgaacctgggccctgcccacctacaacaaccacctctacaagcaaatctccagccaatctggagcctcaaacgacaaccactactttggctacagcaccccttgggggtattttgacttcaacagattccactgtcacttctccccacgtgactggcaaagactcatcaacaacaactggggattccgacccaagagactcaacttcaagctctttaacattcaagtcaaagaggtcacgcagaatgacggtacgacgacgattgccaataaccttaccagcacggttcaagtctttactgactcggagtaccagctcccgtacgtcctcggctcggcgcatcaaggatgcctcccgccgtttccagcagacgtcttcatggtgccacagtatggatacctcaccctgaacaacgggagtcaggcggtaggacgctcttccttttactgcctggagtactttccttctcagatgctgcgtaccggaaacaactttaccttcagctacacctttgaggacgttcctttccacagcagctacgctcacagccagagtttggaccggctgatgaatcctctgatcgaccagtatctgtattacttgagcaaaacaaacgctccaagcggaaccaccacgatgtccaggcttcagttttctcaggccggagcgagtgacattcgggaccagtctaggaactggcttcctggaccctgttaccgccagcagcgagtatcaaaaacagctgcggataacaacaacagtgattattcgtggactggagctaccaagtaccacctcaatggaagagactctctggtgaatccgggcccagctatggccagccacaaggacgatgaagaaaaatattttcctcagagcggggttctcatctttggaaaacaagactcgggaaaaactaatgtggacattgaaaaggtcatgattacagacgaagaggaaatcaggaccaccaatcccgtggctacggagcagtatggttctgtatctaccaacctccagagcggcaacacacaggcagccaccacagatgtcaacacacaaggcgttcttccaggcatggtctggcaggacagagacgtgtacctgcaaggacccatctgggcaaagattcctcacacggacggacactttcacccttctcccctcatgggaggatttggactcaaacaccctcctccgcaaatcctcatcaagaatacccccgtacctgcgaatccttcgaccacattcagcgcggcaaagtttgcttctttcatcacacagtactctacggggcaggtcagcgtggagattgagtgggagctgcagaaggagaacagcaaacgctggaaccccgaaatccagtacacttccaactacaacaagtctgttaatgtggactttactgtggacactaatggtgtgtattcagagcctcgccccattggcacaagatacctgactcgtaatctgtaa

SEQ ID NO: 3223 - DNA, 2208 bp, Artificial Sequence
  source: /note="Description of Artificial Sequence: Synthetic polynucleotide"
atggctgccgatggttatcttccagattggctcgaggacactctctctgaaggaataagacagtggtggaagctcaaacctggcccaccaccaccaaagcccgcagagcggcatcaggacgacagcaggggtcttgtgcttcctgggtacaagtacctcggacccttcaacggactcgacaagggagagccggtcaacgaggcagacgccgcggccctcgagcacgacaaggcctacgaccggcagctcgacagcggagacaacccgtacctcaagtacaaccacgccgacgcggagtttcaggagcgtcttaaagaagatacgtcttttgggggcaacctcggacgagcagtcttccaggcgaaaaagagggttcttgaacctctgggcctggttgaggaacctgttaagacggctccgggaaaaaagaggccggtagagcattctcctgcggagccagactcctcctcgggaaccggaaaggcgggccagcagcctgcgagaaagagattgaatttcggtcagactggagacgcagactccgtacctgacccccagcctctcggacagccaccagcagccccctctggtctgggaactaatacgatggctacaggcagtggcgcaccaatggcagacaataacgagggcgccgacggagtgggtaattcctcgggaaattggcattgcgattccacatggatgggcgacagagtcatcaccaccagcacccgaacctgggccctgcccacctacaacaaccacctctacaagcaaatctccagccaatctggagcctcaaacgacaaccactactttggctacagcaccccttgggggtattttgacttcaacagattccactgtcacttctccccacgtgactggcaaagactcatcaacaacaactggggattccgacccaagagactcaacttcaagctctttaacattcaagtcaaagaggtcacgcagaatgacggtacgacgacgattgccaataaccttaccagcacggttcaagtctttactgactcggagtaccagctcccgtacgtcctcggctcggcgcatcaaggatgcctcccgccgtttccagcagacgtcttcatggtgccacagtatggatacctcaccctgaacaacgggagtcaggcggtaggacgctcttccttttactgcctggagtactttccttctcagatgctgcgtaccggaaacaactttaccttcagctacacctttgaggacgttcctttccacagcagctacgctcacagccagagtttggaccggctgatgaatcctctgatcgaccagtatctgtattacttgagcaaaacaaacgctctaagcggaaccaccacgatgtccaggcttcagttttctcaggccggagcgagtgacattcgggaccagtctaggaactggcttcctggaccctgttaccgccagcagcgagtatcaaaaacagctgcggataacaacaacagtgattattcgtggactggagctaccaagtaccacctcaatggaagagactctctggtgaatccgggcccagctatggccagccacaaggacgatgaagaaaaatattttcctcagagcgaggttctcatctttggaaaacaagactcgggaaaaactaatgtggacattgaaaaggtcatgattacagacgaagaggaaatcaggaccaccaatcccgtggctacggagcagtatggttctgtatctaccaacctccagagcggcaacacacaggcagccaccacagatgtcaacacacaaggcgttcttccaggcatggtctggcaggacagagacgtgtacctgcaaggacccatctgggcaaagattcctcacacggacggacactttcacccttctcccctcatgggaggatttggactcaaacaccctcctccgcaaatcctcatcaagaatacccccgtacctgcgaatccttcgaccacattcagcgcggcaaagcttgcttctttcatcacacagtactctacggggcaggtcagcgtggagattgagtgggagctgcagaaggagaacagcaaacgctggaaccccgaaatccagtacacttccaactacaacaagtctgttaatgtggactttactgtggacactaatggtgtgtattcagagcctcgccccattggcacaagatacctgactcgtaatctgtaa

SEQ ID NO: 3224 - DNA, 2208 bp, Artificial Sequence
  source: /note="Description of Artificial Sequence: Synthetic polynucleotide"
atggctgccgatggttatcttccagattggctcgaggacactctctctgaaggaataagacagtggtggaagctcaaacctggcccaccaccaccaaagcccgcagagcggcatcaggacgacagcaggggtcttgtgcttcctgggtacaagtacctcggacccttcaacggactcgacaagggagagccggtcaacgaggcagacgccgcggccctcgagcacgacaaggcctacgaccggcagctcgacagcggagacaacccgtacctcaagtacaaccacgccgacgcggagtttcaggagcgtcttaaagaagatacgtcttttgggggcaacctcggacgagcagtcttccaggcgaaaaagagggttcttgaacctctgggcctggttgaggaacctgttaagacggctccgggaaaaaagaggccggtagagcattctcctgcggagccagactcctcctcgggaaccggaaaggcgggccagcagcctgcgagaaagagattgaatttcggtcagactggagacgcagactccgtacctgacccccagcctctcggacagccaccagcagccccctctggtctgggaactaatacgatggctacaggcagtggcgcaccaatggcagacaataacgagggcgccgacggagtgggtaattcctcgggaaattggcattgcgattccacatggatgggcgacagagtcatcaccaccagcacccgaacctgggccctgcccacctacaacaaccacctctacaagcaaatctccagccaatctggagcctcaaacgacaaccactactttggctacagcaccccttgggggtattttgacttcaacagattccactgtcacttctccccacgtgactggcaaagactcatcaacaacaactggggattccgacccaagagactcaacttcaagctctttaacattcaagtcaaagaggtcacgcagaatgacggtacgacgacgattgccaataaccttaccagcacggttcaagtctttactgactcggagtaccagctcccgtacgccctcggctcggcgcatcaaggatgcctcccgccgtttccagcagacgtcttcatggtgccacagtatggatacctcaccctgaacaacgggagtcaggcggtaggacgctcttccttttactgcctggagtactttccttctcagatgctgcgtaccggaaacaactttaccttcagctacacctttgaggacgttcctttccacagcagctacgctcacagccagagtttggaccggctgatgaatcctctgatcgaccagtatctgtattacttgagcaaaacaaacgctccaagcggaaccaccacgatgtccaggcttcagttttctcaggccggagcgagtgacattcgggaccagtctaggaactggcttcctggaccctgttaccgccagcagcgagtatcaaaaacagctgcggataacaacaacagtgattattcgtggactggagctaccaagtaccacctcaatggaagagactctctggtgaatccgggcccagctatggccagccacaaggacgatgaagaaaaatattttcctcagagcggggttctcatctttggaaaacaagactcgggaaaaaccaatgtggacattgaaaaggtcatgattacagacgaagaggaaatcaggaccaccaatcccgtggctacggagcagtatggttctgtatctaccaacctccagagcggcaacacacaggcagccaccacagatgtcaacacacaaggcgttcttccaggcatggtctggcaggacagagacgtgtacctgcaaggacccatctgggcaaagattcctcacacggacggacactttcacccttctcccctcatgggaggatttggactcaaacaccctcctccgcaaatcctcatcaagaatacccccgtacctgcgaatccttcgaccacattcagcgcggcaaagtttgcttctttcatcacacagtactctacggggcaggtcagcgtggagattgagtgggagctgcagaaggagaacagcaaacgctggaaccccgaaatccagtacacttccaactacaacaagtctgttaatgtggactttactgtggacactaatggtgtgtattcagagcctcgccccattggcacaagatacctgactcgtaatctgtaa

SEQ ID NO: 3225 - DNA, 2208 bp, Artificial Sequence
  source: /note="Description of Artificial Sequence: Synthetic polynucleotide"
atggctgccgatggttatcttccagattggctcgaggacactctctctgaaggaataagacagtggtggaagctcaaacctggcccaccaccaccaaagcccgcagagcggcatcaggacgacagcaggggtcttgtgcttcctgggtacaagtacctcggacccttcaacggactcgacaagggagagccggtcaacgaggcagacgccgcggccctcgagcacgacaaggcctacgaccggcagctcgacagcggagacaacccgtacctcaagtacaaccacgccgacgcggagtttcaggagcgtcttaaagaagatacgtcttttgggggcaacctcggacgagcagtcttccaggcgaaaaagagggttcttgaacctctgggcctggttgaggaacctgttaagacggctccgggaaaaaagaggccggtagagcattctcctgcggagccagactcctcctcgggaaccggaaaggcgggccagcagcctgcgagaaagagattgaatttcggtcagactggagacgcagactccgtacctgacccccagcctctcggacagccaccagcagccccctctggtctgggaactaatacgatggctacaggcagtggcgcaccaatggcagacaataacgagggcgccgacggagtgggtaattcctcgggaaattggcattgcgattccacatggatgggcgacagagtcatcaccaccagcacccgaacctgggccctgcccacctacaacaaccacctctacaagcaaatctccagccaatctggagcctcaaacgacaaccactactttggctacagcaccccttgggggtattttgacttcagcagattccactgtcacttctccccacgtgactggcaaagactcatcaacaacaactggggattccgacccaagagactcaacttcaagctctttaacattcaagtcaaagaggtcacgcagaatgacggtacgacgacgattgccaataaccttaccagcacggttcaagtctttactgactcggagtaccagctcccgtacgtcctcggctcggcgcatcaaggatgcctcccgccgtttccagcagacgtcttcatggtgccacagtatggatacctcaccctgaacaacgggagtcaggcggtaggacgctcttccttttactgcctggagtactttccttctcagatgctgcgtaccggaaacaactttaccttcagctacacctttgaggacgttcctttccacagcagctacgctcacagccagagtttggaccggctgatgaatcctctgatcgaccagtatctgtattacttgagcaaaacaaacgctccaagcggaaccaccacgatgtccaggcttcagttttctcaggccggagcgagtgacattcgggaccagtctaggaactggcttcctggaccctgttaccgccagcagcgagtatcaaaaacagctgcggataacaacaacagtgattattcgtggactggagctaccaagtaccacctcaatggaagagactctctggtgaatccgggcccagctatggccagccacaaggacgatgaagaaaaatattttcctcagagcggggttctcatctttggaaaacaagactcgggaaaaaccaatgtggacattgaaaaggtcatgattacagacgaagaggaaatcaggaccaccaatcccgtggctacggagcagtatggttctgtatctaccaacctccagagcggcaacacacaggcagccaccacagatgtcaacacacaaggcgttcttccaggcatggtctggcaggacagagacgtgtacctgcaaggacccatctgggcaaagattcctcacacggacggacactttcacccttctcccctcatgggaggatttggactcaaacaccctcctccgcaaatcctcatcaagaatacccccgtacctgcgaatccttcgaccacattcagcgcggcaaagtttgcttctttcatcacacagtactctacggggcaggtcagcgtggagattgagtgggagctgcagaaggagaacagcaaacgctggaaccccgaaatccagtacacttccaactacaacaagtctgttaatgtggactttactgtggacactaatggtgtgtattcagagcctcgccccattggcacaagatacctgactcgtaatctgtaa

SEQ ID NO: 3226 - DNA, 2208 bp, Artificial Sequence
  source: /note="Description of Artificial Sequence: Synthetic polynucleotide"
atggctgccgatggttatcttccagattggctcgaggacactctctctgaaggaataagacagtggtggaagctcaaacctggcccaccaccaccaaagcccgcagagcggcatcaggacgacagcaggggtcttgtgcttcctgggtacaagtacctcggacccttcaacggactcgacaagggagagccggtcaacgaggcagacgccgcggccctcgagcacgacaaggcctacgaccggcagctcgacagcggagacaacccgtacctcaagtacaaccacgccgacgcggagtttcaggagcgtcttaaagaagatacgtcttttgggggcaacctcggacgagcagtcttccaggcgaaaaagagggttcttgaacccctgggcctggttgaggaacctgttaagacggctccgggaaaaaagaggccggtagagcattctcctgcggagccagactcctcctcgggaaccggaaaggcgggccagcagcctgcgagaaagagattgaatttcggtcagactggagacgcagactccgtacctgacccccagcctctcggacagccaccagcagccccctctggtctgggaactaatacgatggctacaggcagtggcgcaccaatggcagacaataacgagggcgccgacggagtgggtaattcctcgggaaattggcattgcgattccacatggatgggcgacagagtcatcaccaccagcacccgaacctgggccctgcccacctacaacaaccacctctacaagcaaatctccagccaatctggagcctcaaacgacaaccactacgttggctacagcaccccttgggggtattttgacttcaacagattccactgtcacttctccccacgtgactggcaaagactcatcaacaacaactggggattccgacccaagagactcaacttcaagctctttaacattcaagtcaaagaggtcacgcagaatgacggtacgacgacgattgccaataaccttaccagcacggttcaagtctttactgactcggagtaccagctcccgtacgtcctcggctcggcgcatcaaggatgcctcccgccgtttccagcagacgtcttcatggtgccacagtatggatacctcaccctgaacaacgggagtcaggcggtaggacgctcttccttttactgcctggagtactttccttctcagatgctgcgtaccggaaacaactttaccttcagctacacctttgaggacgttcctttccacagcagctacgctcacagccagagtttggaccggctgatgaatcctctgatcgaccagtatctgtattacttgagcaaaacaaacgctccaagcggaaccaccacgatgtccaggcttcagttttctcaggccggagcgagtgacattcgggaccagtctaggaactggcttcctggaccctgttaccgccagcagcgagtatcaaaaacagctgcggataacaacaacagtgattattcgtggactggagctaccaagtaccacctcaatggaagagactctctggtgaatccgggcccagctatggccagccacaaggacgatgaagaaaaatattttcctcagagcggggttctcatctttggaaaacaagactcgggaaaaactaatgtggacattgaaaaggtcatgattacagacgaagaggaaatcaggaccaccaatcccgtggctacggagcagtatggttctgtatctaccaacctccagagcggcaacacacaggcagccaccacagatgtcaacacacaaggcgttcttccaggcatggtctggcaggacagagacgtgtacctgcaaggacccatctgggcaaagattcctcacacggacggacactttcacccttctcccctcatgggaggatttggactcaaacaccctcctccgcaaatcctcatcaagaatacccccgtacctgcgaatccttcgaccacattcagcgcggcaaagtttgcttctttcatcacacagtactctacggggcaggtcagcgtggagattgagtgggagctgcagaaggagaacagcaaacgctggaaccccgaaatccagtacacttccaactacaacaagtctgttaatgtggactttactgtggacactaatggtgtgtattcagagcctcgccccattggcacaagatacctgactcgtaatctgtaa

SEQ ID NO: 3227 - DNA, 2208 bp, Artificial Sequence
  source: /note="Description of Artificial Sequence: Synthetic polynucleotide"
atggctgccgatggttatcttccagattggctcgaggacactctctctgaaggaataagacagtggtggaagctcaaacctggcccaccaccaccaaagcccgcagagcggcatcaggacgacagcaggggtcttgtgcttcctgggtacaagtacctcggacccttcaacggactcgacaagggagagccggtcaacgaggcagacgccgcggccctcgagcacgacaaggcctacgaccggcagctcgacagcggagacaacccgtacctcaagtacaaccacgccgacgcggagtttcaggagcgtcttaaagaagatacgtcttttgggggcaacctcggacgagcagtcttccaggcgaaaaagagggttcttgaacctctgggcctggttgaggaacctgttaagacggctccgggaaaaaagaggccggtagagcattctcctgcggagccagactcctcctcgggaaccggaaaggcgggccagcagcctgcgagaaagagattgaatttcggtcagactggagacgcagactccgtacctgacccccagcctctcggacagccaccagcagccccctctggtctgggaactaatacgatggctacaggcagtggcgcaccaatggcagacaataacgagggcgccgacggagtgggtaattcctcgggaaattggcattgcgattccacatggatgggcgacagagtcatcaccaccagcacccgaacctgggccctgcccacctacaacaaccacctctacaagcaaatctccagccaatctggagcctcaaacgacaaccactactttggctacagcaccccttgggggcattttgacttcaacagattccactgtcacttctccccacgtgactggcaaagactcatcaacaacaactggggattccgacccaagagactcaacttcaagctctttaacattcaagtcaaagaggtcacgcagaatgacggtacgacgacgattgccaataaccttaccagcacggttcaagtctttactgactcggagtaccagctcccgtacgtcctcggctcggcgcatcaaggatgcctcccgccgtttccagcagacgtcttcatggtgccacagtatggatacctcaccctgaacaacgggagtcaggcggtaggacgctcttccttttactgcctggagtactttccttctcagatgctgcgtaccggaaacaactttaccttcagctacacctttgaggacgttcctttccacagcagctacgctcacagccagagtttggaccggctgatgaatcctctgatcgaccagtatctgtattacttgagcaaaacaaacgctccaagcggaaccaccacgatgtccaggcttcagttttctcaggccggagcgagtgacattcgggaccagtctaggaactggcttcctggaccctgttaccgccagcagcgagtatcaaaaacagctgcggataacaacaacagtgattattcgtggactggagctaccaagtaccacctcaatggaagagactctctggtgaatccgggcccagctatggccagccacaaggacgatgaagaaaaatattttcctcagagcggggttctcatctttggaaaacaagactcgggaaaaaccaatgtggacattgaaaaggtcatgattacagacgaagaggaaatcaggaccaccaatcccgtggctacggagcagtatggttctgtatctaccaacctccagagcggcaacacacaggcagccaccacagatgtcaacacacaaggcgttcttccaggcatggtctggcaggacagagacgtgtacctgcaaggacccatctgggcaaagattcctcacacggacggacactttcacccttctcccctcatgggaggatttggactcaaacaccctcctccgcaaatcctcatcaagaatacccccgtacctgcgaatccttcgaccacattcagcgcggcaaagtttgcttctttcatcacacagtactctacggggcaggtcagcgtggagattgagtgggagctgcagaaggagaacagcaaacgctggaaccccgaaatccagtacacttccaactacaacaagtctgttaatgtggactttactgtggacactaatggtgtgtattcagagcctcgccccattggcacaagatacctgactcgtaatctgtaa

SEQ ID NO: 3228 - DNA, 2208 bp, Artificial Sequence
  source: /note="Description of Artificial Sequence: Synthetic polynucleotide"
atggctgccgatggttatcttccagattggctcgaggacactctctctgaaggaataagacagtggtggaagctcaaacctggcccaccaccaccaaagcccgcagagcggcatcaggacgacagcaggggtcttgtgcttcctgggtacaagtacctcggacccttcaacggactcgacaagggagagccggtcaacgaggcagacgtcgcggccctcgagcacgacaaggcctacgaccggcagctcgacagcggagacaacccgtacctcaagtacaaccacgccgacgcggagtttcaggagcgtcttaaagaagatacgtcttttgggggcaacctcggacgagcagtcttccaggcgaaaaagagggttcttgaacctctgggcctggttgaggaacctgttaagacggctccgggaaaaaagaggccggtagagcattctcctgcggagccagactcctcctcgggaaccggaaaggcgggccagcagcctgcgagaaagagattgaatttcggtcagactggagacgcagactccgtacctgacccccagcctctcggacagccaccagcagccccctctggtctgggaactaatacgatggctacaggcagtggcgcaccaatggcagacaataacgagggcgccgacggagtgggtaattcctcgggaaattggcattgcgattccacatggatgggcgacagagtcatcaccaccagcacccgaacctgggccctgcccacctacaacaaccacctctacaagcaaatctccagccaatctggagcctcaaacgacaaccactactttggctacagcaccccttgggggtattttgacttcaacagattccactgtcacttctccccacgtgactggcaaagactcatcaacaacgactggggattccgacccaagagactcaacttcaagctctttaacattcaagtcaaagaggtcacgcagaatgacggtacgacgacgattgccaataaccttaccagcacggttcaagtctttactgactcggagtaccagctcccgtacgtcctcggctcggcgcatcaaggatgcctcccgccgtttccagcagacgtcttcatggtgccacagtatggatacctcaccctgaacaacgggagtcaggcggtaggacgctcttccttttactgcctggagtactttccttctcagatgctgcgtaccggaaacaactttaccttcagctacacctttgaggacgttcctttccacagcagctacgctcacagccagagtttggaccggctgatgaatcctctgatcgaccagtatctgtattacttgagcaaaacaaacgctccaagcggaaccaccacgatgtccaggcttcagttttctcaggccggagcgagtgacattcgggaccagtctaggaactggcttcctggaccctgttaccgccagcagcgagtatcaaaaacagctgcggataacaacaacagtgattattcgtggactggagctaccaagtaccacctcaatggaagagactctctggtgaatccgggcccagctatggccagccacaaggacgatgaagaaaaatattttcctcagagcggggttctcatctttggaaaacaggactcgggaaaaactaatgtggacattgaaaaggtcatgattacagacgaagaggaaatcaggaccaccaatcccgtggctacggagcagtatggttctgtatctaccaacctccagagcggcaacacacaggcagccaccacagatgtcaacacacaaggcgttcttccaggcatggtctggcaggacagagacgtgtacctgcaaggacccatctgggcaaagattcctcacacggacggacactttcacccttctcccctcatgggaggatttggactcaaacaccctcctccgcaaatcctcatcaagaatacccccgtacctgcgaatccttcgaccacattcagcgcggcaaagtttgcttctttcatcacacagtactctacggggcaggtcagcgtggagattgagtgggagctgcagaaggagaacagcaaacgctggaaccccgaaatccagtacacttccaactacaacaagtctgttaatgtggactttactgtggacactaatggtgtgtattcagagcctcgccccattggcacaagatacctgactcgtaatctgtaa

SEQ ID NO: 3229 - DNA, 2208 bp, Artificial Sequence
  source: /note="Description of Artificial Sequence: Synthetic polynucleotide"
atggctgccgatggttatcttccagattggctcgaggacactctctctgaaggaataagacagtggtggaagctcaaacctggcccaccaccaccaaagcccgcagagcggcatcaggacgacagcaggggtcttgtgcttcctgggtacaagtacctcggacccttcaacggactcgacaagggagagccggtcaacgaggcagacgccgcggccctcgagcacgacaaggcctacgaccggcagctcgacagcggagacaacccgtacctcaagtacaaccacgccgacgcggagtttcaggagcgtcttaaagaagatacgtcttttgggggcaacctcggacgagcagtcttccaggcgaaaaagagggttcttgaacctctgggcctggttgaggaacctgttaagacggctccgggaaaaaagaggccggtagagcattctcctgcggagccagactcctcctcgggaaccggaaaggcgggccagcagcctgcgagaaagagattgaatttcggtcagactggagacgcagactccgtacctgacccccagcctctcggacagccaccagcagccccctctggtctgggaactaatacgatggctacaggcagtggcgcaccaatggcagacaataacgagggcgccgacggagtgggtaattcctcgggaaattggcattgcgattccacatggatgggcgacagagtcatcaccaccagcacccgaacctgggccctgcccacctacaacaaccacctctacaagcaaatctccagccaatctggagcctcaaacgacaaccactactttggctacagcaccccttgggggtattttgacttcaacagattccactgtcacttctccccacgtgactggcaaagactcatcaacaacaactggggattccgacccaagagactcaacttcaagctctttaacattcaagtcaaagaggtcacgcagaatgacggtacgacgacgattgccaataaccttaccagcacggttcaagtctttactgactcggagtaccagctcccgtacgtcctcggctcggcgcatcaaggatgcctcccgccgtttccagcagacgtcttcatggtgccacagtatggatacctcaccctgaacaacgggagtcaggcggtaggacgctcttccttttactgcctggagtactttccttctcagatgctgcgtaccggaaacaactttaccttcagctacacctttgaggacgttcctttccacagcagctacgctcacagccagagtttggaccggctgatgaatcctctgatcgaccagtatctgtattacttgagcaaaacaaacgctccaagcggaaccaccacgatgtccaggcttcagttttctcaggccggagcgagtgacattcgggaccagtctaggaactggcttcctggaccctgttaccgccagcagcgagtatcaaaaacagctgcggataacaacaacagtgattattcgtggactggagctaccaagtaccacctcaatggaagagactctctggtgaatccgggcccagctatggccagccacaaggacgatgaagaaaaatattttcctcagagcggggttctcatctttggaaaacaagactcggaaaaaaccaatgtggacattgaaaaggtcatgattacagacgaagaggaaatcaggaccaccaatcccgtggctacggagcagtatggttctgtatctaccaacctccagagcggcaacacacaggcagccaccacagatgtcaacacacaaggcgttcttccaggcatggtctggcaggacagagacgtgtacctgcaaggacccatctgggcaaagattcctcacacggacggacactttcacccttctcccctcatgggaggatttggactcaaacaccctcctccgcaaatcctcatcaagaatacccccgtacctgcgaatccttcgaccacattcagcgcggcaaagtttgcttctttcatcacacagtactctacggggcaggtcagcgtggagattgagtgggagctgcagaaggagaacagcaaacgctggaaccccgaaatccagtacacttccaactacaacaagtctgttaatgtggactttactgtggacactaatggtgtgtattcagagcctcgccccattggcacaagatacctgactcgtaatctgtaa

SEQ ID NO: 3230 - DNA, 2208 bp, Artificial Sequence
  source: /note="Description of Artificial Sequence: Synthetic polynucleotide"
atggctgccgatggttatcttccagattggctcgaggacactctctctgaaggaataagacagtggtggaagctcaaacctggcccaccaccaccaaagcccgcagagcggcatcaggacgacagcaggggtcttgtgcttcctgggtacaagtacctcggacccttcaacggactcgacaagggagagccggtcaacgaggcagacgccgcggccctcgagcacgacaaggcctacgaccggcagctcgacagcggagacaacccgtacctcaagtacaaccacgccgacgcggagtttcaggagcgtcttaaagaagatacgtcttttgggggcaacctcggacgagcagtcttccaggcgaaaaagagggttcttgaacctctgggcctggttgaggaacctgttaagacggctccgggaaaaaagaggccggtagagcattctcctgcggagccagactcctcctcgggaaccggaaaggcgggccagcagcctgcgagaaagagattgaatttcggtcagactggagacgcagactccgtacctgacccccagcctctcggacagccaccagcagccccctctggtctgggaactaatacgatggctacaggcagtggcgcaccaatggcagacaataacgagggcgccgacggagtgggtaattcctcgggaaattggcattgcgattccacatggatgggcgacagagtcatcaccaccagcacccgaacctgggccctgcccacctacaacaaccacctctacaagcaaatctccagccaatctggagcctcaaacgacaaccactactttggctacagcaccccttgggggtattttgacttcaacagattccactgtcacttctccccacgtgactggcaaagactcatcaacaacaactggggattccgacccaagagactcaacttcaagctctttaacattcaagtcaaagaggtcacgcagaatgacggtacgacgacgattgccaataaccttaccagcacggttcaagtctttactgactcggagtaccagctcccgtacgtcctcggctcggcgcatcaaggatgcctcccgccgtttccagcagacgtcttcatggtgccacagtatggatacctcaccctgaacaacgggagtcaggcggtaggacgctcttccttttactgcctggagtactttccttctcagatgctgcgtaccggaaacaactttaccttcagctacacctttgaggacgttcctttccacagcagctacgctcacagccagagtttggaccggctgatgaatcctctgatcgaccagtatctgtattacttgagcaaaacaaacgctccaagcggaaccaccacgatgtccaggcttcagttttctcaggccggagcgagtgacattcgggaccagtctaggaactggcttcctggaccctgttaccgccagcagcgagtatcaaaaacagctgcggataacaacaacagtgattattcgtggactggagctaccaagtaccacctcaatggaagagactctctggtgaatccgggcccagctatggccagccacaaggacgatgaagaaaaatattttcctcagagcggggttctcatctttggaaaacaagactcgggaaaaactaatgtggacattgaaaaggtcatgattacagacgaagaggaaatcaggaccaccaatcccgtggctacggagcagtatggttctgtatctaccaacctccagagcggcaacacacaggcagccaccacagatgtcaacacacaaggcgttcttccaggcatggtctggcaggacagagacgtgtacctgcaaggacccatctgggcaaagattcctcacacggacggacactttcacccttctcccctcatgggaggatttggactcaaacaccctcctccgcaaatcctcatcaagaatacccccgtacctgcgaatccttcgaccacattcagcgcggcaaagtttgcttctttcatcacacagtactctacggggcaggtcagcgtggagattgagtgggagctgcagaaggagaacagcaaacgctggaaccccgaaatccagtacacttccaactacaacaagtctgttaatgtggactttactgtggacactaatggtgtgtattcagagcctcgccccattggcacaagatacctgactcgtaatctgtaa

SEQ ID NO: 3231 - DNA, 2208 bp, Artificial Sequence
  source: /note="Description of Artificial Sequence: Synthetic polynucleotide"
atggctgccgatggttatcttccagattggctcgaggacactctctctgaaggaataagacagtggtggaagctcaaacctggcccaccaccaccaaagcccgcagagcggcatcaggacgacagcaggggtcttgtgcttcctgggtacaagtacctcggacccttcaacggactcgacaagggagagccggtcaacgaggcagacgtcgcggccctcgagcacgacaaggcctacgaccggcagctcgacagcggagacaacccgtacctcaagtacaaccacgccgacgcggagtttcaggagcgtcttaaagaagatacgtcttttgggggcaacctcggacgagcagtcttccaggcgaaaaagagggttcttgaacctctgggcctggttgaggaacctgttaagacggctccgggaaaaaagaggccggtagagcattctcctgcggagccagactcctcctcgggaaccggaaaggcgggccagcagcctgcgagaaagagattgaatttcggtcagactggagacgcagactccgtacctgacccccagcctctcggacagccaccagcagccccctctggtctgggaactaatacgatggctacaggcagtggcgcaccaatggcagacaataacgagggcgccgacggagtgggtaattcctcgggaaattggcattgcgattccacatggatgggcgacagagtcatcaccaccagcacccgaacctgggccctgcccacctacaacaaccacctctacaagcaaatctccagccaatctggagcctcaaacgacaaccactactttggctacagcaccccttgggggtattttgacttcaacagattccactgtcacttctccccacgtgactggcaaagactcatcaacaacaactggggattccgacccaagagactcaacttcaagctctttaacattcaagtcaaagaggtcacgcagaatgacggtacgacgacgattgccaataaccttaccagcacggttcaagtctttactgactcggagtaccagctcccgtacgtcctcggctcggcgcatcaaggatgcctcccgccgtttccagcagacgtcttcatggtgccacagtatggatacctcaccctgaacaacgggagtcaggcggtaggacgctcttccttttactgcctggagtactttccttctcagatgctgcgtaccggaaacaactttaccttcagctacacctttgaggacgttcctttccacagcagctacgctcacagccagagtttggaccggctgatgaatcctctgatcgaccagtatctgtattacttgagcaaaacaaacgctccaagcggaaccaccacgatgtccaggcttcagttttctcaggccggagcgagtgacattcgggaccagtctaggaactggcttcctggaccctgttaccgccagcagcgagtatcaaaaacagctgcggataacaacaacagtgattattcgtggactggagctaccaagtaccacctcaatggaagagactctctggtgaatccgggcccagctatggccagccacaaggacgatgaagaaaaatattttcctcagagcggggttctcatctttggaaaacaagactcgggaaaaactaatgtggacattgaaaaggtcatgattacagacgaagaggaaatcaggaccaccaatcccgtggctacggagcagtatggttctgtatctaccaacctccagagcggcaacacacaggcagccaccacagatgtcaacacacaaggcgttcttccaggcatggtctggcaggacagagacgtgtacctgcaaggacccatctgggcaaagattcctcacacggacggacactttcacccttctcccctcatgggaggatttggactcaaacaccctcctccgcaaatcctcatcaagaatacccccgtacctgcgaatccttcgaccacattcagcgcggcaaagtttgcttctttcatcacacagtactctacggggcaggtcagcgtggagattgagtgggagctgcagaaggagaacagcaaacgctggaaccccgaaatccagtacacttccaactacaacaagtctgttaatgtggactttactgtggacactaatggtgtgtattcagagcctcgccccattggcacaagatacctgactcgtaatctgtaa

SEQ ID NO: 3232 - DNA, 2208 bp, Artificial Sequence
  source: /note="Description of Artificial Sequence: Synthetic polynucleotide"
atggctgccgatggttatcttccagattggctcgaggacactctctctgaaggaataagacagtggtggaagctcaaacctggcccaccaccaccaaagcccgcagagcggcatcaggacgacagcaggggtcttgtgcttcctgggtacaagtacctcggacccttcaacggactcgacaagggagagccggtcaacgaggcagacgccgcggccctcgagcacgacaaggcctacgaccggcagctcgacagcggagacaacccgtacctcaagtacaaccacgccgacgcggagtttcaggagcgtcttaaagaagatacgtcttttgggggcaacctcggacgagcagtcttccaggcgaaaaagagggttcttgaacctctgggcctggttgaggaacctgttaagacggctccgggaaaaaagaggccggtagagcattctcctgcggagccagactcctcctcgggaaccggaaaggcgggccagcagcctgcgagaaagagattgaatttcggtcagactggagacgcagactccgtacctgacccccagcctctcggacagccaccagcagccccctctggtctgggaactaatacgatggctacaggcagtggcgcaccaatggcagacaataacgagggcgccgacggagtgggtaattcctcgggaaattggcattgcgattccacatggatgggcgacagagtcatcaccaccagcacccgaacctgggccctgcccacctacaacaaccacctctacaagcaaatctccagccaatctggagcctcaaacgacaaccactactttggctacagcaccccttgggggtattttgacttcaacagattccactgtcacttctccccacgtgactggcaaagactcatcaacaacaactggggattccgacccaagagactcaacttcaagctctttaacattcaagtcaaagaggtcacgcagaatgacggtacgacgacgattgccaataaccttaccagcacggttcaagtctttactgactcggagtaccagctcccgtacgtcctcggctcggcgcatcaaggatgcctcccgccgtttccagcagacgtcttcatggtgccacagtatggatacctcaccctgaacaacgggagtcaggcggtaggacgctcttccttttactgcctggagtactttccttctcagatgctgcgtaccggaaacaactttaccttcagctacacctttgaggacgttcctttccacagcagctacgctcacagccagagtttggaccggctgatgaatcctctgatcgaccagtatctgtattacttgagcaaaacaaacgctccaagcggaaccaccacgatgtccaggcttcagttttctcaggccggagcgagtgacattcgggaccagtctaggaactggcttcctggaccctgttaccgccagcagcgagtatcaaaaacagctgcggataacaacaacagtgattatccgtggactggagctaccaagtaccacctcaatggaagagactctctggtgaatccgggcccagctatggccagccacaaggacgatgaagaaaaatattttcctcagagcggggttctcatctttggaaaacaagactcgggaaaaaccaatgtggacattgaaaaggtcatgattacagacgaagaggaaatcaggaccaccaatcccgtggctacggagcagtatggttctgtatctaccaacctccagagcggcaacacacaggcagccaccacagatgtcaacacacaaggcgttcttccaggcatggtctggcaggacagagacgtgtacctgcaaggacccatctgggcaaagattcctcacacggacggacactttcacccttctcccctcatgggaggatttggactcaaacaccctcctccgcaaatcctcatcaagaatacccccgtacctgcgaatccttcgaccacattcagcgcggcaaagtttgcttctttcatcacacagtactctacggggcaggtcagcgtggagattgagtgggagctgcagaaggagaacagcaaacgctggaaccccgaaatccagtacacttccaactacaacaagtctgttaatgtggactttactgtggacactaatggtgtgtattcagagcctcgccccattggcacaagatacctgactcgtaatctgtaa

SEQ ID NO: 3233 - DNA, 2208 bp, Artificial Sequence
  source: /note="Description of Artificial Sequence: Synthetic polynucleotide"
atggctgccgatggttatcttccagattggctcgaggacactctctctgaaggaataagacagtggtggaagctcaaacctggcccaccaccaccaaagcccgcagagcggcatcaggacgacagcaggggtcttgtgcttcctgggtacaagtacctcggacccttcaacggactcgacaagggagagccggtcaacgaggcagacgccgcggccctcgagcacgacaaggcctacgaccggcagctcgacagcggagacaacccgtacctcaagtacaaccacgccgacgcggagtttcaggagcgtcttaaagaagatacgtcttttgggggcaacctcggacgagcagtcttccaggcgaaaaagagggttcttgaacctctgggcctggttgaggaacctgttaagacggctccgggaaaaaagaggccggtagagcattctcctgcggagccagactcctcctcgggaaccggaaaggcgggccagcagcctgcgagaaagagattgaatttcggtcagactggagacgcagactccgtacctgacccccagcctctcggacagccaccagcagccccctctggtctgggaactaatacgatggctacaggcagtggcgcaccaatggcagacaataacgagggcgccgacggagtgggtaattcctcgggaaattggcattgcgattccacatggatgggcgacagagtcatcaccaccagcacccgaacctgggccctgcccacctacaacaaccacctctacaagcaaatctccagccaatctggagcctcaaacgacaaccactactttggctacagcaccccttgggggtattttgacttcaacagattccactgtcacttctccccacgtgactggcaaagactcatcaacaacaactggggattccgacccaagagactcaacttcaagctctttaacattcaagtcaaagaggtcacgcagaatgacggtacgacgacgattgccaataaccttaccagcacggttcaagtctttactgactcggagtaccagctcccgtacgtcctcggctcggcgcatcaaggatgcctcccgccgtttccagcagacgtcttcatggtgccacagtatggatacctcaccctgaacaacgggagtcaggcggtaggacgctcttccttttactgcctggagtactttccttctcagatgctgcgtaccggaaacaactttaccttcagctacacctttgaggacgttcctttccacagcagctacgctcacagccagagtttggaccggctgatgaatcctctgatcgaccagtatctgtattacttgagcaaaacaaacgctccaagcggaaccaccacgatgtccaggcttcagttttctcaggccggagcgagtgacattcgggaccagtctaggaactggcttcctggaccctgttaccgccagcagcgagtatcaaaaacagctgcggataacaacaacagtgattattcgtggactggagctaccaagtaccacctcaatggaagagactctctggtgaatccgggcccagctatggccagccacaaggacgatgaagaaaaatattttcctcagagcggggttctcatctttggaaaacaagactcgggaaaaactaatgtggacattgaaaaggtcatgattacagacgaagaggaaatcaggaccaccaatcccgtggctacggagcagtatggttctgtatctaccaacctccagagcggcaacacacaggcagccaccacagatgtcaacacacaaggcgctcttccaggcatggtctggcaggacagagacgtgtacctgcaaggacccatctgggcaaagattcctcacacggacggacactttcacccttctcccctcatgggaggatttggactcaaacaccctcctccgcaaatcctcatcaagaatacccccgtacctgcgaatccttcgaccacattcagcgcggcaaagtttgcttctttcatcacacagtactctacggggcaggtcagcgtggagattgagtgggagctgcagaaggagaacagcaaacgctggaaccccgaaatccagtacacttccaactacaacaagtctgttaatgtggactttactgtggacactaatggtgtgtattcagagcctcgccccattggcacaagatacctgactcgtaatctgtaa

SEQ ID NO: 3234 - DNA, 2208 bp, Artificial Sequence
  source: /note="Description of Artificial Sequence: Synthetic polynucleotide"
atggctgccgatggttatcttccagattggctcgaggacactctctctgaaggaataagacagtggtggaagctcaaacctggcccaccaccaccaaagcccgcagagcggcatcaggacgacagcaggggtcttgtgcttcctgggtacaagtacctcggacccttcaacggactcgacaagggagagccggtcaacgaggcagacgccgcggccctcgagcacgacaaggcctacgaccggcagctcgacagcggagacaacccgtacctcaagtacaaccacgccgacgcggagtttcaggagcgtcttaaagaagatacgtcttttgggggcaacctcggacgagcagtcttccaggcgaaaaagagggttcttgaacctctgggcctggttgaggaacctgttaagacggctccgggaaaaaagaggccggtagagcattctcctgcggagccagactcctcctcgggaaccggaaaggcgggccagcagcctgcgagaaagagattgaatttcggtcagactggagacgcagactccgtacctgacccccagcctctcggacagccaccagcagccccctctggtctgggaactaatacgatggctacaggcagtggcgcaccaatggcagacaataacgagggcgccgacggagtgggtaattcctcgggaaattggcattgcgattccacatggatgggcgacagagtcatcaccaccagcacccgaacctgggccctgcccacctacaacaaccacctctacaagcaaatctccagccaatctggagcctcaaacgacaaccactactttggctacagcaccccttgggggtattttgacttcaacagattccactgtcacttctccccacgtgactggcaaagactcatcaacaacaactggggattccgacccaagagactcaacttcaagctctttaacattcaagtcaaagaggtcacgcagaatgacggtacgacgacgattgccaataaccttaccagcacggttcaagtctttactgactcggagtaccagctcccgtacgtcctcggctcggcgcatcaaggatgcctcccgccgtttccagcagacgtcttcatggtgccacagtatggatacctcaccctgaacaacgggagtcaggcggtaggacgctcttccttttactgcctggagtactttccttctcagatgctgcgtaccggaaacaactttaccttcagctacacctttgaggacgttcctttccacagcagctacgctcacagccagagtttggaccggctgatgaatcctctgatcgaccagtatctgtattacttgagcaaaacaaacgctccaagcggaaccaccacgatgtccaggcttcagttttctcaggccggagcgagtgacattcgggaccagtctaggaactggcttcctggaccctgttaccgccagcagcgagtatcaaaaacagctgcggataacaacaacagtgattattcgtggactggagctaccaagtaccacctcaatggaagagactctctggtgaatccgggcccagctatggccagccacaaggacgatgaagagaaatattttcctcagagcggggttctcatctttggaaaacaagactcgggaaaaactaatgtggacattgaaaaggtcatgattacagacgaagaggaaatcaggaccaccaatcccgtggctacggagcagtatggttctgtatctaccaacctccagagcggcaacacacaggcagccaccacagatgtcaacacacaaggcgttcttccaggcatggtctggcaggacagagacgtgtacctgcaaggacccatctgggcaaagattcctcacacggacggacactttcacccttctcccctcatgggaggatttggactcaaacaccctcctccgcaaatcctcatcaagaatacccccgtacctgcgaatccttcgaccacattcagcgcggcaaagcttgcttctttcatcacacagtactctacggggcaggtcagcgtggaggttgagtgggagctgcagaaggagaacagcaaacgctggaaccccgaaatccagtacacttccaactacaacaagtctgttaatgtggactttactgtggacactaatggtgtgtattcagagcctcgccccattggcacaagatacctgactcgtaatctgtaa

SEQ ID NO: 3235 - DNA, 2208 bp, Artificial Sequence
  source: /note="Description of Artificial Sequence: Synthetic polynucleotide"
atggctgccgatggttatcttccagattggctcgaggacactctctctgaaggaataagacagtggtggaagctcaaacctggcccaccaccaccaaagcccgcagagcggcatcaggacgacagcaggggtcttgtgcttcctgggtacaagtacctcggacccttcaacggactcgacaagggagagccggtcaacgaggcagacgtcgcggccctcgagcacgacaaggcctacgaccggcagctcgacagcggagacaacccgtacctcaagtacaaccacgccgacgcggagtttcaggagcgtcttaaagaagatacgtcttttgggggcaacctcggacgagcagtcttccaggcgaaaaagagggttcttgaacctctgggcctggttgaggaacctgttaagacggctccgggaaaaaagaggccggtagagcattctcctgcggagccagactcctcctcgggaaccggaaaggcgggccagcagcctgcgagaaagagattgaatttcggtcagactggagacgcagactccgtacctgacccccagcctctcggacagccaccagcagccccctctggtctgggaactaatacgatggctacaggcagtggcgcaccaatggcagacaataacgagggcgccgacggagtgggtaattcctcgggaaattggcattgcgattccacatggatgggcgacagagtcatcaccaccagcacccgaacctgggccctgcccacctacaacaaccacctctacaagcaaatctccagccaatctggagcctcaaacgacaaccactactttggctacagcaccccttgggggtattttgacttcaacagattccactgtcacttctccccacgtgactggcaaagactcatcaacaacaactggggattccgacccaagagactcaacttcaagctctttaacattcaagtcaaagaggtcacgcagaatgacggtacgacgacgattgccaataaccttaccagcacggttcaagtctttactgactcggagtaccagctcccgtacgtcctcggctcggcgcatcaaggatgcctcccgccgtttccagcagacgtcttcatggtgccacagtatggatacctcaccctgaacagcgggagtcaggcggtaggacgctcttccttttactgcctggagtactttccttctcagatgctgcgtaccggaaacaactttaccttcagctacacctttgaggacgttcctttccacagcagctacgctcacagccagagtttggaccggctgatgaatcctctgatcgaccagtatctgtattacttgagcaaaacaaacgctccaagcggaaccaccacgatgtccaggcttcagttttctcaggccggagcgagtgacattcgggaccagtctaggaactggcttcctggaccctgttaccgccagcagcgagtatcaaaaacagctgcggataacaacaacagtgattattcgtggactggagctaccaagtaccacctcaatggaagagactctctggtgaatccgggcccagctatggccagccacaaggacgatgaagaaaaatattttcctcagagcggggttctcatctttggaaaacaagactcgggaaaaactaatgtggacattgaaaaggtcatgattacagacgaagaggaaatcaggaccaccaatcccgtggctacggagcagtatggttctgtatctaccaacctccagagcggcaacacacaggcagccaccacagatgtcaacacacaaggcgttcttccaggcatggtctggcaggacagagacgtgtacctgcaaggacccatctgggcaaagattcctcacacggacggacactttcacccttctcccctcatgggaggatttggactcaaacaccctcctccgcaaatcctcatcaagaatacccccgtacctgcgaatccttcgaccacattcagcgcggcaaagtttgcttctttcatcacacagtactctacggggcaggtcagcgtggagattgagtgggagctgcagaaggagaacagcaaacgctggaaccccgaaatccagtacacttccaactacaacaagtctgttaatgtggactttactgtggacactaatggtgtgtattcagagcctcgccccattggcacaagatacctgactcgtaatctgtaa

SEQ ID NO: 3236 - DNA, 2208 bp, Artificial Sequence
  source: /note="Description of Artificial Sequence: Synthetic polynucleotide"
atggctgccgatggttatcttccagattggctcgaggacactctctctgaaggaataagacagtggtggaagctcaaacctggcccaccaccaccaaagcccgcagagcggcatcaggacgacagcaggggtcttgtgcttcctgggtacaagtacctcggacccttcaacggactcgacaagggagagccggtcaacgaggcagacgtcgcggccctcgagcacgacaaggcctacgaccggcagctcgacagcggagacaacccgtacctcaagtacaaccacgccgacgcggagtttcaggagcgtcttaaagaagatacgtcttttgggggcaacctcggacgagcagtcttccaggcgaaaaagagggttcttgaacctctgggcctggttgaggaacctgttaagacggctccgggaaaaaagaggccggtagagcattctcctgcggagccagactcctcctcgggaaccggaaaggcgggccagcagcctgcgagaaagagattgaatttcggtcagactggaggcgcagactccgtacctgacccccagcctctcggacagccaccagcagccccctctggtctgggaactaatacgatggctacaggcagtggcgcaccaatggcagacaataacgagggcgccgacggagtgggtaattcctcgggaaattggcattgcgattccacatggatgggcgacagagtcatcaccaccagcacccgaacctgggccctgcccacctacaacaaccacctctacaagcaaatctccagccaatctggagcctcaaacgacaaccactactttggctacagcaccccttgggggtattttgacttcaacagattccactgtcacttctccccacgtgactggcaaagactcatcaacaacaactggggattccgacccaagagactcaacttcaagctctttaacattcaagtcaaagaggtcacgcagaatgacggtacgacgacgattgccaataaccttaccagcacggttcaagtctttactgactcggagtaccagctcccgtacgtcctcggctcggcgcatcaaggatgcctcccgccgtttccagcagacgtcttcatggtgccacagtatggatacctcaccctgaacaacgggagtcaggcggtaggacgctcttccttttactgcctggagtactttccttctcagatgctgcgtaccggaaacaactttaccttcagctacacctttgaggacgttcctttccacagcagctacgctcacagccagagtttggaccggctgatgaatcctctgatcgaccagtatctgtattacttgagcaaaacaaacgctccaagcggaaccaccacgatgtccaggcttcagttttctcaggccggagcgagtgacattcgggaccagtctaggaactggcttcctggaccctgttaccgccagcagcgagtatcaaaaacagctgcggataacaacaacagtgattattcgtggactggagctaccaagtaccacctcaatggaagagactctctggtgaatccgggcccagctatggccagccacaaggacgatgaagaaaaatattttcctcagagcggggttctcatctttggaaaacaagactcgggaaaaactaatgtggacattgaaaaggtcatgattacagacgaagaggaaatcaggaccaccaatcccgtggctacggagcagtatggttctgtatctaccaacctccagagcggcaacacacaggcagccaccacagatgtcaacacacaaggcgttcttccaggcatggtctggcaggacagagacgtgtacctgcaaggacccatctgggcaaagattcctcacacggacggacactttcacccttctcccctcatgggaggatttggactcaaacaccctcctccgcaaatcctcatcaagaatacccccgtacctgcgaatccttcgaccacattcagcgcggcaaagtttgcttctttcatcacacagtactctacggggcaggtcagcgtggagattgagtgggagctgcagaaggagaacagcaaacgctggaaccccgaaatccagtacacttccaactacaacaagtctgttaatgtggactttactgtggacactaatggtgtgtattcagagcctcgccccattggcacaagatacctgactcgtaatctgtaa

SEQ ID NO: 3237 - DNA, 2208 bp, Artificial Sequence
  source: /note="Description of Artificial Sequence: Synthetic polynucleotide"
atggctgccgatggttatcttccagattggctcgaggacactctctctgaaggaataagacagtggtggaagctcaaacctggcccaccaccaccaaagcccgcagagcggcatcaggacgacagcaggggtcttgtgcttcctgggtacaagtacctcggacccttcaacggactcgacaagggagagccggtcaacgaggcagacgccgcggccctcgagcacgacaaggcctacgaccggcagctcgacagcggagacaacccgtacctcaagtacaaccacgccgacgcggagtttcaggagcgtcttaaagaagatacgtcttttgggggcaacctcggacgagcagtcttccaggcgaaaaagagggttcttgaacctctgggcctggttgaggaacctgttaagacggctccgggaaaaaagaggccggtagagcattctcctgcggagccagactcctcctcgggaaccggaaaggcgggccagcagcctgcgagaaagagattgaatttcggtcagactggagacgcagactccgtacctgacccccagcctctcggacagccaccagcagccccctctggtctgggaactaatacgatggctacaggcagtggcgcaccaatggcagacaataacgagggcgccgacggagtgggtaattcctcgggaaattggcattgcgattccacatggatgggcgacagagtcatcaccaccagcacccgaacctgggccctgcccacctacaacaaccacctctacaagcaaatctccagccaatctggagcctcaaacgacaaccactactttggctacagcaccccttgggggtattttgacttcaacagattccactgtcacttctccccacgtgactggcaaagactcatcaacaacaactggggattccgacccaagagactcaacttcaagctctttaacattcaagtcaaagaggtcacgcagaatgacggtacgacgacgattgccaataaccttaccagcacggttcaagtctttactgactcggagtaccagctcccgtacgccctcggctcggcgcatcaaggatgcctcccgccgtttccagcagacgtcttcatggtgccacagtatggatacctcaccctgaacaacgggagtcaggcggtaggacgctcttccttttactgcctggagtactttccttctcagatgctgcgtaccggaaacaactttaccttcagctacacctttgaggacgttcctttccacagcagctacgctcacagccagagtttggaccggctgatgaatcctctgatcgaccagtatctgtattacttgagcaaaacaaacgctccaagcggaaccaccacgatgtccaggcttcagttttctcaggccggagcgagtgacattcgggaccagtctaggaactggcttcctggaccctgttaccgccagcagcgagtatcaaaaacagctgcggataacaacaacagtgattattcgtggactggagctaccaagtaccacctcaatggaagagactctctggtgaatccgggcccagctatggccagccacaaggacgatgaagaaaaatattttcctcagagcggggttctcatctttggaaaacaagactcgggaaaaaccaatgtggacattgaaaaggtcatgattacagacgaagaggaaatcaggaccaccaatcccgtggctacggagcagtatggttctgtatctaccaacctccagagcggcaacacacaggcagccaccacagatgtcaacacacaaggcgttcttccaggcatggtctggcaggacagagacgtgtacctgcaaggacccatctgggcaaagattcctcacacggacggacactttcacccttctcccctcatgggaggatttggactcaaacaccctcctccgcaaatcctcatcaagaatacccccgtacctgcgaatccttcgaccacattcagcgcggcaaagtttgcttctttcatcacacagtactctacggggcaggtcagcgtggagattgagtgggagctgcagaaggaggacagcaaacgctggaaccccgaaatccagtacacttccaactacaacaagtctgttaatgtggactttactgtggacactaatggtgtgtattcagagcctcgccccattggcacaagatacctgactcgtaatctgtaa

SEQ ID NO: 3238 - DNA, 2208 bp, Artificial Sequence
  source: /note="Description of Artificial Sequence: Synthetic polynucleotide"
atggctgccgatggttatcttccagattggctcgaggacactctctctgaaggaataagacagtggtggaagctcaaacctggcccaccaccaccaaagcccgcagagcggcatcaggacgacagcaggggtcttgtgcttcctgggtacaagtacctcggacccttcaacggactcgacaagggagagccggtcaacgaggcagacgccgcggccctcgagcacgacaaggcctacgaccggcagctcgacagcggagacaacccgtacctcaagtacaaccacgccgacgcggagtttcaggagcgtcttaaagaagatacgtcttttgggggcaacctcggacgagcagtcttccaggcgaaaaagagggttcttgaacctctgggcctggttgaggaacctgttaagacggctccgggaaaaaagaggccggtagagcattctcctgcggagccagactcctcctcgggaaccggaaaggcgggccagcagcctgcgagaaagagattgaatttcggtcagactggagacgcagactccgtacctgacccccagcctctcggacagccaccagcagccccctctggtctgggaactaatacgatggctacaggcagtggcgcaccaatggcagacaataacgagggcgccgacggagtgggtaattcctcgggaaattggcattgcgattccacatggatgggcgacagagtcatcaccaccagcacccgaacctgggccctgcccacctacaacaaccacctctacaagcaaatctccagccaatctggagcctcaaacgacaaccactactttggctacagcaccccttgggggtattttgacttcaacagattccactgtcacttctccccacgtgactggcaaagactcatcaacaacaactggggattccgacccaagagactcaacttcaagctctttaacattcaagtcaaagaggtcacgcagaatgacggtacgacgacgattgccaataaccttaccagcacggttcaagtctttactgactcggagtaccagctcccgtacgtcctcggctcggcgcatcaaggatgcctcccgccgtttccagcagacgtcttcatggtgccacagtatggatacctcaccctgaacaacgggagtcaggcggtaggacgctcttccttttactgcctggagtactttccttctcagatgctgcgtaccggaaacaactttaccttcagctacacctttgaggacgttcctttccacagcagctacgctcacagccagagtttggaccggctgatgaatcctctgatcgaccagtatctgtattacttgagcaaaacaaacgctccaagcggaaccaccacgatgtccaggcttcagttttctcaggccggagcgagtgacattcgggaccagtctaggaactggcttcctggaccctgttaccgccagcagcgagtatcaaaaacagctgcggataacaacaacagtgattattcgtggactggagctaccaagtaccacctcaatggaagagactctctggtgaatccgggcccagctatggccagccacaaggacgatgaagaaaaatattttcctcagagcggggttctcatctttggaaaacaagactcgggaaaaactaatgtggacattgaaaaggtcatgattacagacgaagaggaaatcaggaccaccaatcccgtggctacggagcagtatggttctgtatctaccaacctccagagcggcaacacacaggcagccaccacagatgtcaacacacaaggcgttcttccaggcatggtctggcaggacagagacgtgtacctgcaaggacccatctgggcaaagattcctcacacggacggacactttcacccttctcccctcatgggaggatttggactcaaacaccctcctccgcaaatcctcatcaagaatacccccgtacctgcgaatccttcgaccacatccagcgcggcaaagtttgcttctttcatcacacagtactctacggggcaggtcagcgtggagattgagtgggagctgcagaaggagaacagcaaacgctggaaccccgaaatccagtacacttccaactacaacaagtctgttaatgtggactttactgtggacactaatggtgtgtattcagagcctcgccccattggcacaagatacctgactcgtaatctgtaa

SEQ ID NO: 3239 - DNA, 2208 bp, Artificial Sequence
  source: /note="Description of Artificial Sequence: Synthetic polynucleotide"
atggctgccgatggttatcttccagattggctcgaggacactctctctgaaggaataagacagtggtggaagctcaaacctggcccaccaccactaaagcccgcagagcggcatcaggacgacagcaggggtcttgtgcttcctgggtacaagtacctcggacccttcaacggactcgacaagggagagccggtcaacgaggcagacgccgcggccctcgagcacgacaaggcctacgaccggcagctcgacagcggagacaacccgtacctcaagtacaaccacgccgacgcggagtttcaggagcgtcttaaagaagatacgtcttttgggggcaacctcggacgagcagtcttccaggcgaaaaagagggttcttgaacctctgggcctggttgaggaacctgttaagacggctccgggaaaaaagaggccggtagagcattctcctgcggagccagactcctcctcgggaaccggaaaggcgggccagcagcctgcgagaaagagattgaatttcggtcagactggagacgcagactccgtacctgacccccagcctctcggacagccaccagcagccccctctggtctgggaactaatacgatggctacaggcagtggcgcaccaatggcagacaataacgagggcgccgacggagtgggtaattcctcgggaaattggcattgcgattccacatggatgggcgacagagtcatcaccaccagcacccgaacctgggccctgcccacctacaacaaccacctctacaagcaaatctccagccaatctggagcctcaaacgacaaccactactttggctacagcaccccttgggggtattttgacttcaacagattccactgtcacttctccccacgtgactggcaaagactcatcaacaacaactggggattccgacccaagagactcaacttcaagctctttaacattcaagtcaaagaggtcacgcagaatgacggtacgacgacgattgccaataaccttaccagcacggttcaagtctttactgactcggagtaccagctcccgtacgtcctcggctcggcgcatcaaggatgcctcccgccgtttccagcagacgtcttcatggtgccacagtatggatacctcaccctgaacaacgggagtcaggcggtaggacgctcttccttttactgcctggagtactttccttctcagatgctgcgtaccggaaacaactttaccttcagctacacctttgaggacgttcctttccacagcagctacgctcacagccagagtttggaccggctgatgaatcctctgatcgaccagtatctgtattacttgagcaaaacaaacgctccaagcggaaccaccacgatgtccaggcttcagttttctcaggccggagcgagtgacattcgggaccagtctaggaactggcttcctggaccctgttaccgccagcagcgagtatcaaaaacagctgcggataacaacaacagtgattattcgtggactggagctaccaagtaccacctcaatggaagagactctctggtgaatccgggcccagctatggccagccacaaggacgatgaagaaaaatattttcctcagagcggggttctcatctttggaaaacaagactcgggaaaaactaatgtggacattgaaaaggtcatgattacagacgaagaggaaatcaggaccaccaatcccgtggctacggagcagtatggttctgtatctaccaacctccagagcggcaacacacaggcagccaccacagatgtcaacacacaaggcgttcttccaggcatggtctggcaggacagagacgtgtacctgcaaggacccatctgggcaaagattcctcacacggacggacactttcacccttctcccctcatgggaggatttggactcaaacaccctcctccgccaatcctcatcaagaatacccccgtacctgcgaatccttcgaccacattcagcgcggcaaagtttgcttctttcatcacacagtactctacggggcaggtcagcgtggagattgagtgggagctgcagaaggagaacagcaaacgctggaaccccgaaatccagtacacttccaactacaacaagtctgttaatgtggactttactgtggacactaatggtgtgtattcagagcctcgccccattggcacaagatacctgactcgtaatctgtaa

SEQ ID NO: 3240 - DNA, 2208 bp, Artificial Sequence
  source: /note="Description of Artificial Sequence: Synthetic polynucleotide"
atggctgccgatggttatcttccagattggctcgaggacactctctctgaaggaataagacagtggtggaagctcaaacctggcccaccaccaccaaagcccgcagagcggcatcaggacgacagcaggggtcttgtgcttcctgggtacaagtacctcggacccttcaacggactcgacaagggagagccggtcaacgaggcagacgccgcggccctcgagcacgacaaggcctacgaccggcagctcgacagcggagacaacccgtacctcaagtacaaccacgccgacgcggagtttcaggagcgtcttaaagaagatacgtcttttgggggcaacctcggacgagcagtcttccaggcgaaaaagagggttcttgaacctctgggcctggttgaggaacctgttaagacggctccgggaaaaaagaggccggtagagcattctcctgcggagccagactcctcctcgggaaccggaaaggcgggccagcagcctgcgagaaagagattgaatttcggtcagactggagacgcagactccgtacctgacccccagcctctcggacagccaccagcagccccctctggtctgggaactaatacgatggctacaggcagtggcgcaccaatggcagacaataacgagggcgccgacggagtgggtaattcctcgggaaattggcattgcgattccacatggatgggcgacagagtcatcaccaccagcacccgaacctgggccctgcccacctacaacaaccacctctacaagcaaatctccagccaatctggagcctcaaacgacaaccactactttggctacagcaccccttgggggtattttgacttcaacagattccactgtcacttctccccacgtgactggcaaagactcatcaacaacaactggggattccgacccaagagactcaacttcaagctctttaacattcaagtcaaagaggtcacgcagaatgacggtacgacgacgattgccaataaccttaccagcacggttcaagtctttactgactcggagtaccagctcccgtacgtcctcggctcggcgcatcaaggatgcctcccgccgtttccagcagacgtcttcatggtgccacagtatggatacctcaccctgaacaacgggagtcaggcggtaggacgctcttccttttactgcctggagtactttccttctcagatgctgcgtaccggaaacaactttaccttcagctacacctttgaggacgttcctttccacagcagctacgctcacagccagagtttggaccggctgatgaatcctctgatcgaccagtatctgtattacttgagcaaaacaaacgctccaagcggaaccaccacgatgtccaggcttcagttttctcaggccggagcgagtgacattcgggaccagtctaggaactggcttcctggaccctgttaccgccagcagcgagtatcaaaaacagctgcggataacaacaacagtgattattcgtggactggagctaccaagtaccacctcaatggaagagactctctggtgaatccgggcccagctatggccagccacaaggacgatgaagaaaaatattttcctcagagcggggttctcatctttggaaaacaagactcgggaaaaactaatgtggacattgaaaaggtcatgattacagacgaagaggaaatcagggccaccaatcccgtggctacggagcagtatggttctgtatctaccaacctccagagcggcaacacacaggcagccaccacagatgtcaacacacaaggcgttcttccaggcatggtctggcaggacagagacgtgtacctgcaaggacccatctgggcaaagattcctcacacggacggacactttcacccttctcccctcatgggaggatttggactcaaacaccctcctccgcaaatcctcatcaagaatacccccgtacctgcgaatccttcgaccacattcagcgcggcaaagtttgcttctttcatcacacagtactctacggggcaggtcagcgtggagattgagtgggagctgcagaaggagaacagcaaacgctggaaccccgaaatccagtacacttccaactacaacaagtctgttaatgtggactttactgtggacactaatggtgtgtattcagagcctcgccccattggcacaagatacctgactcgtaatctgtaa

SEQ ID NO: 3241 - DNA, 2208 bp, Artificial Sequence
  source: /note="Description of Artificial Sequence: Synthetic polynucleotide"
atggctgccgatggttatcttccagattggctcgaggacactctctctgaaggaataagacagtggtggaagctcaaacctggcccaccaccaccaaagcccgcagagcggcatcaggacgacagcaggggtcttgtgcttcctgggtacaagtacctcggacccttcaacggactcgacaagggagagccggtcaacgaggcagacgccgcggccctcgagcacgacaaggcctacgaccggcagctcgacagcggagacaacccgtacctcaagtacaaccacgccgacgcggagtttcaggagcgtcttaaagaagatacgtcttttgggggcaacctcggacgagcagtcttccaggcgaaaaagagggttcttgaacctctgggcctggttgaggaacctgttaagacggctccgggaaaaaagaggccggtagagcattctcctgcggagccagactcctcctcgggaaccggaaaggcgggccagcagcctgcgagaaagagattgaatttcggtcagactggagacgcagactccgtacctgacccccagcctctcggacagccaccagcagccccctctggtctgggaactaatacgatggctacaggcagtggcgcaccaatggcagacaataacgagggcgccgacggagtgggtaattcctcgggaaattggcattgcgattccacatggatgggcgacagagtcatcaccaccagcacccgaacctgggccctgcccacctacaacaaccacctctacaagcaaatctccagccaatctggagcctcaaacgacaaccactactttggctacagcaccccttgggggtattttgacttcaacagattccactgtcacttctccccacgtgactggcaaagactcatcagcaacaactggggattccgacccaagagactcaacttcaagctctttaacattcaagtcaaagaggtcacgcagaatgacggtacgacgacgattgccaataaccttaccagcacggttcaagtctttactgactcggagtaccagctcccgtacgtcctcggctcggcgcatcaaggatgcctcccgccgtttccagcagacgtcttcatggtgccacagtatggatacctcaccctgaacaacgggagtcaggcggtaggacgctcttccttttactgcctggagtactttccttctcagatgctgcgtaccggaaacaactttaccttcagctacacctttgaggacgttcctttccacagcagctacgctcacagccagagtttggaccggctgatgaatcctctgatcgaccagtatctgtattacttgagcaaaacaaacgctccaagcggaaccaccacgatgtccaggcttcagttttctcaggccggagcgagtgacattcgggaccagtctaggaactggcttcctggaccctgttaccgccagcagcgagtatcaaaaacagctgcggataacaacaacagtgattattcgtggactggagctaccaagtaccacctcaatggaagagactctctggtgaatccgggcccagctatggccagccacaaggacgatgaagaaaaatattttcctcagagcggggttctcatctttggaaaacaagactcgggaaaaactaatgtggacattgaaaaggtcatgattacagacgaagaggaaatcaggaccaccaatcccgtggctacggagcagtatggttctgtatctaccaacctccagagcggcaacacacaggcagccaccacagatgtcaacacacaaggcgttcttccaggcatggtctggcaggacagagacgtgtacctgcaaggacccatctgggcaaagattcctcacacggacggacactttcacccttctcccctcatgggaggatttggactcaaacaccctcctccgcaaatcctcatcaagaatacccccgtacctgcgaatccttcgaccacattcagcgcggcaaagtttgcttctttcatcacacagtactctacggggcaggtcagcgtggagattgagtgggagccgcagaaggagaacagcaaacgctggaaccccgaaatccagtacacttccaactacaacaagtctgttaatgtggactttactgtggacactaatggtgtgtattcagagcctcgccccattggcacaagatacctgactcgtaatctgtaa

SEQ ID NO: 3242 - DNA, 2208 bp, Artificial Sequence
  source: /note="Description of Artificial Sequence: Synthetic polynucleotide"
atggctgccgatggttatcttccagattggctcgaggacactctctctgaaggaataagacagtggtggaagctcaaacctggcccaccaccaccaaagcccgcagagcggcatcaggacgacagcaggggtcttgtgcttcctgggtacaagtacctcggacccttcaacggactcgacaagggagagccggtcaacgaggcagacgccgcggccctcgagcacgacaaggcctacgaccggcagctcgacagcggagacaacccgtacctcaagtacaaccacgccgacgcggagtttcaggagcgtcttaaagaagatacgtcttttgggggcaacctcggacgagcagtcttccaggcgaaaaagggggttcttgaacctctgggcctggttgaggaacctgttaagacggctccgggaaaaaagaggccggtagagcattctcctgcggagccagactcctcctcgggaaccggaaaggcgggccagcagcctgcgagaaagagattgaatttcggtcagactggagacgcagactccgtacctgacccccagcctctcggacagccaccagcagccccctctggtctgggaactaatacgatggctacaggcagtggcgcaccaatggcagacaataacgagggcgccgacggagtgggtaattcctcgggaaattggcattgcgattccacatggatgggcgacagagtcatcaccaccagcacccgaacctgggccctgcccacctacaacaaccacctctacaagcaaatctccagccaatctggagcctcaaacgacaaccactactttggctacagcaccccttgggggtattttgacttcaacagattccactgtcacttctccccacgtgactggcaaagactcatcaacaacaactggggattccgacccaagagactcaacttcaagctctttaacattcaagtcaaagaggtcacgcagaatgacggtacgacgacgattgccaataaccttaccagcacggttcaagtctttactgactcggagtaccagctcccgtacgtcctcggctcggcgcatcaaggatgcctcccgccgtttccagcagacgtcttcatggtgccacagtatggatacctcaccctgaacaacgggagtcaggcggtaggacgctcttccttttactgcctggagtactttccttctcagatgctgcgtaccggaaacaactttaccttcagctacacctttgaggacgttcctttccacagcagctacgctcacagccagagtttggaccggctgatgaatcctctgatcgaccagtatctgtattacttgagcaaaacaaacgctccaagcggaaccaccacgatgtccaggcttcagttttctcaggccggagcgagtgacattcgggaccagtctaggaactggcttcctggaccctgttaccgccagcagcgagtatcaaaaacagctgcggataacaacaacagtgattattcgtggactggagctaccaagtaccacctcaatggaagagactctctggtgaatccgggcccagctatggccagccacaaggacgatgaagaaaaatattttcctcagagcggggttctcatctttggaaaacaagactcgggaaaaactaatgtggacattgaaaaggtcatgattacagacgaagaggaaatcaggaccaccaatcccgtggctacggagcagtatggttctgtatctaccaacctccagagcggcaacacacaggcagccaccacagatgtcaacacacaaggcgttcttccaggcatggtctggcaggacagagacgtgtacctgcaaggacccatctgggcaaagattcctcacacggacggacactttcacccttctcccctcatgggaggatttggactcaaacaccctcctccgcaaatcctcatcaagaatacccccgtacctgcgaatccttcgaccacattcagcgcggcaaagtttgcttctttcatcacacagtactctacggggcaggtcagcgtggagattgagtgggagctgcagaaggagaacagcaaacgctggaaccccgaaatccagtacacttccaactacaacaagtctgttaatgtggactttactgtggacactaatggtgtgtattcagagcctcgccccattggcacaagatacctgactcgtaatctgtaa

SEQ ID NO: 3243 - DNA, 2208 bp, Artificial Sequence
  source: /note="Description of Artificial Sequence: Synthetic polynucleotide"
atggctgccgatggttatcttccagattggctcgaggacactctctctgaaggaataagacagtggtggaagctcaaacctggcccaccaccaccaaagcccgcagagcggcatcaggacgacagcaggggtcttgtgcttcctgggtacaagtacctcggacccttcaacggactcgacaagggagagccggtcaacgaggcagacgccgcggccctcgagcacgacaaggcctacgaccggcagctcgacagcggagacaacccgtacctcaagtacaaccacgccgacgcggagtttcaggagcgtcttaaagaagatacgtcttttgggggcaacctcggacgagcagtcttccaggcgaaaaagagggttcttgaacctctgggcctggttgaggaacctgttaagacggctccgggaaaaaagaggccggtagagcattctcctgcggagccagactcctcctcgggaaccggaaaggcgggccagcagcctgcgagaaagagattgaatttcggtcagactggagacgcggactccgtacctgacccccagcctctcggacagccaccagcagccccctctggtctgggaactaatacgatggctacaggcagtggcgcaccaatggcagacaataacgagggcgccgacggagtgggtaattcctcgggaaattggcattgcgattccacatggatgggcgacagagtcatcaccaccagcacccgaacctgggccctgcccacctacaacaaccacctctacaagcaaatctccagccaatctggagcctcaaacgacaaccactactttggctacagcaccccttgggggtattttgacttcaacagattccactgtcacttctccccacgtgactggcaaagactcatcaacaacaactggggattccgacccaagagactcaacttcaagctctttaacattcaagtcaaagaggtcacgcagaatgacggtacgacgacgattgccaataaccttaccagcacggttcaagtctttactgactcggagtaccagctcccgtacgtcctcggctcggcgcatcaaggatgcctcccgccgtttccagcagacgtcttcatggtgccacagtatggatacctcaccctgaacaacgggagtcaggcggtaggacgctcttccttttactgcctggagtactttccttctcagatgctgcgtaccggaaacaactttaccttcagctacacctttgaggacgttcctttccacagcagctacgctcacagccagagtttggaccggctgatgaatcctctgatcgaccagtatctgtattacttgagcagaacaaacgctccaagcggaaccaccacgatgtccaggcttcagttttctcaggccggagcgagtgacattcgggaccagtctaggaactggcttcctggaccctgttaccgccagcagcgagtatcaaaaacagctgcggataacaacaacagtgattattcgtggactggagctaccaagtaccacctcaatggaagagactctctggtgaatccgggcccagctatggccagccacaaggacgatgaagaaaaatattttcctcagagcggggttctcatctttggaaaacaagactcgggaaaaactaatgtggacattgaaaaggtcatgattacagacgaagaggaaatcaggaccaccaatcccgtggctacggagcagtatggttctgtatctaccaacctccagagcggcaacacacaggcagccaccacagatgtcaacacacaaggcgttcttccaggcatggtctggcaggacagagacgtgtacctgcaaggacccatctgggcaaagattcctcacacggacggacactttcacccttctcccctcatgggaggatttggactcaaacaccctcctccgcaaatcctcatcaagaatacccccgtacctgcgaatccttcgaccacattcagcgcggcaaagtttgcttctttcatcacacagtactctacggggcaggtcagcgtggagattgagtgggagctgcagaaggagaacagcaaacgctggaaccccgaaatccagtacacttccaactacaacaagtctgttaatgtggactttactgtggacactaatggtgtgtattcagagcctcgccccattggcacaagatacctgactcgtaatctgtaa

SEQ ID NO: 3244 - DNA, 2208 bp, Artificial Sequence
  source: /note="Description of Artificial Sequence: Synthetic polynucleotide"
atggctgccgatggttatcttccagattggctcgaggacactctctctgaaggaataagacagtggtggaagctcaaacctggcccaccaccaccaaagcccgcagagcggcatcaggacgacagcaggggtcttgtgcttcctgggtacaagtacctcggacccttcaacggactcgacaagggagagccggtcaacgaggcagacgccgcggccctcgagcacgacaaggcctacgaccggcagctcgacagcggagacaacccgtacctcaagtacaaccacgccgacgcggagtttcaggagcgtcttaaagaagatacgtcttttgggggcaacctcggacgagcagtcttccaggcgaaaaagagggttcttgaacctctgggcctggttgaggaacctgttaagacggctccgggaaaaaagaggccggtagagcattctcctgcggagccagactcctcctcgggaaccggaaaggcgggccagcagcctgcgagaaagagattgaatttcggtcagactggagacgcagactccgtacctgacccccagcctctcggacagccaccagcagccccctctggtctgggaactaatacgatggctacaggcagtggcgcaccaatggcagacaataacgagggcgccgacggagtgggtaattcctcgggaaattggcattgcgattccacatggatgggcgacagagtcatcaccaccagcacccgaacctgggccctgcccacctacaacaaccacctctacaagcaaatctccagccaatctggagcctcaaacgacaaccactactttggctacagcaccccttgggggtattttgacttcaacagattccactgtcacttctccccacgtgactggcaaagactcatcaacaacaactggggattccgacccaagagactcaacttcaagctctttaacattcaagtcaaagaggtcacgcagaatgacggtacgacgacgattgccaataaccttaccagcacggttcaagtctttactgactcggagtaccagctcccgtacgtcctcggctcggcgcatcaaggatgcctcccgccgtttccagcagacgtcttcatggtgccacagtatggatacctcaccctgaacaacgggagtcaggcggtaggacgctcttccttttactgcctggagtactttccttctcagatgctgcgtaccggaaacaactttaccttcagctacacctttgaggacgttcctttccacagcagctacgctcacagccagagtttggaccggctgatgaatcctctgatcgaccagtatctgtattacttgagcaaaacaaacgctccaagcggaaccaccacgatgtccaggcttcagttttctcaggccggagcgagtgacattcgggaccagtctaggaactggcttcctggaccctgttaccgccagcagcgagtatcaaaaacagctgcggataacaacaacagtgattattcgtggactggagctaccaagtaccacctcaatggaagagactctctggtgaatccgggcccagctatggccagccacaaggacgatgaagaaaaatattttcctcagagcggggttctcatctttggaaaacaagactcgggaaaaactaatgtggacattgaaaaggtcatgattacagacgaagaggaaatcaggaccaccaatcccgtggctacggagcagtatggttctgtatctaccaacctccagagcggcaacacacaggcagccaccacagatgtcaacacacaaggcgttcttccaggcatggtctggcaggacagagacgtgtacctgcaaggacccatctgggcaaagattcctcacacggacggacactttcacccttctcccctcatgggaggatttggactcaaacaccctcctccgcaaatcctcatcaagaatacccccgtacctgcgaatccttcgaccacattcagcgcggcaaagtttgcttctttcatcacacagtactctacggggcaggtcagcgtggagattgagtgggagctgcagaaggagaacagcaaacgctggaaccccgaaatccagtacacttccaactacaacaagtctgttaatgtggaccttactgtggacactaatggtgtgtattcagagcctcgccccattggcacaagatacctgactcgtaatctgtaa

SEQ ID NO: 3245 - DNA, 2208 bp, Artificial Sequence
  source: /note="Description of Artificial Sequence: Synthetic polynucleotide"
atggctgccgatggttatcttccagattggctcgaggacactctctctgaaggaataagacagtggtggaagctcaaacctggcccaccaccactaaagcccgcagagcggcatcaggacgacagcaggggtcttgtgcttcctgggtacaagtacctcggacccttcaacggactcgacaagggagagccggtcaacgaggcagacgccgcggccctcgagcacgacaaggcctacgaccggcagctcgacagcggagacaacccgtacctcaagtacaaccacgccgacgcggagtttcaggagcgtcttaaagaagatacgtcttttgggggcaacctcggacgagcagtcttccaggcgaaaaagagggttcttgaacctctgggcctggttgaggaacctgttaagacggctccgggaaaaaagaggccggtagagcattctcctgcggagccagactcctcctcgggaaccggaaaggcgggccagcagcctgcgagaaagagattgaatttcggtcagactggagacgcagactccgtacctgacccccagcctctcggacagccaccagcagccccctctggtctgggaactaatacgatggctgcaggcagtggcgcaccaatggcagacaataacgagggcgccgacggagtgggtaattcctcgggaaattggcattgcgattccacatggatgggcgacagagtcatcaccaccagcacccgaacctgggccctgcccacctacaacaaccacctctacaagcaaatctccagccaatctggagcctcaaacgacaaccactactttggctacagcaccccttgggggtattttgacttcaacagattccactgtcacttctccccacgtgactggcaaagactcatcaacaacaactggggattccgacccaagagactcaacttcaagctctttaacattcaagtcaaagaggtcacgcagaatgacggtacgacgacgattgccaataaccttaccagcacggttcaagtctttactgactcggagtaccagctcccgtacgtcctcggctcggcgcatcaaggatgcctcccgccgtttccagcagacgtcttcatggtgccacagtatggatacctcaccctgaacaacgggagtcaggcggtaggacgctcttccttttactgcctggagtactttccttctcagatgctgcgtaccggaaacaactttaccttcagctacacctttgaggacgttcctttccacagcagctacgctcacagccagagtttggaccggctgatgaatcctctgatcgaccagtatctgtattacttgagcaaaacaaacgctccaagcggaaccaccacgatgtccaggcttcagttttctcaggccggagcgagtgacattcgggaccagtctaggaactggcttcctggaccctgttaccgccagcagcgagtatcaaaaacagctgcggataacaacaacagtgattattcgtggactggagctaccaagtaccacctcaatggaagagactctctggtgaatccgggcccagctatggccagccacaaggacgatgaagaaaaatattttcctcagagcggggttctcatctttggaaaacaagactcgggaaaaactaatgtggacattgaaaaggtcatgattacagacgaagaggaaatcaggaccaccaatcccgtggctacggagcagtatggttctgtatctaccaacctccagagcggcaacacacaggcagccaccacagatgtcaacacacaaggcgttcttccaggcatggtctggcaggacagagacgtgtacctgcaaggacccatctgggcaaagattcctcacacggacggacactttcacccttctcccctcatgggaggatttggactcaaacaccctcctccgcaaatcctcatcaagaatacccccgtacctgcgaatccttcgaccacattcagcgcggcaaagtttgcttctttcatcacacagtactctacggggcaggtcagcgtggagattgagtgggagctgcagaaggagaacagcaaacgctggaaccccgaaatccagtacacttccaactacaacaagtctgttaatgtggactttactgtggacactaatggtgtgtattcagagcctcgccccattggcacaagatacctgactcgtaatctgtaa

SEQ ID NO: 3246 - DNA, 2208 bp, Artificial Sequence
  source: /note="Description of Artificial Sequence: Synthetic polynucleotide"
atggctgccgatggttatcttccagattggctcgaggacactctctctgaaggaataagacagtggtggaagctcaaacctggcccaccaccaccaaagcccgcagagcggcatcaggacgacagcaggggtcttgtgcttcctgggtacaagtacctcggacccttcaacggactcgacaagggagagccggtcaacgaggcagacgccgcggccctcgagcacgacaaggcctacgaccggcagctcgacagcggagacaacccgtacctcaagtacaaccacgccgacgcggagtttcaggagcgtcttaaagaagatacgtcttttgggggcaacctcggacgagcagtcttccaggcgaaaaagagggttcttgaacctctgggcctggttgaggaacctgttaagacggctccgggaaaaaagaggccggtagagcattctcctgcggagccagactcctcctcgggaaccggaaaggcgggccagcagcctgcgagaaagagattgaatttcggtcagactggagacgcagactccgtacctgacccccagcctctcggacagccaccagcagccccctctggtctgggaactaatacgatggctacaggcagtggcgcaccaatggcagacaataacgagggcgccgacggagtgggtaattcctcgggaaattggcattgcgattccacatggatgggcgacagagtcatcaccaccagcacccgaacctgggccctgcccacctacaacaaccacctctacaagcaaatctccagccaatctggagcctcaaacgacaaccactactttggctacagcaccccttgggggtattttgacttcaacagattccactgtcacttctccccacgtgactggcaaagactcatcaacaacaactggggattccgacccaagagactcaacttcaagctctttaacattcaagtcaaagaggtcacgcagaatgacggtacgacgacgattgccaataaccttaccagcacggttcaagtctttactgactcggagtaccagctcccgtacgtcctcggctcggcgcatcaaggatgcctcccgccgtttccagcagacgtcttcatggtgccacagtatggatacctcaccctgaacaacgggagtcaggcggtaggacgctcttccttttactgcctggagtactttccttctcagatgctgcgtaccggaaacaactttaccttcagctacacctttgaggacgttcctttccacagcagctacgctcacagccagagtttggaccggctgatgaatcctctgatcgaccagtatctgtattacttgagcaaaacaaacgctccaagcggaaccaccacgatgtccaggcttcagttttctcaggccggagcgagtgacattcgggaccagtctaggaactggcttcctggaccctgttaccgccagcagcgagtatcaaaaacagctgcggataacaacaacagtgattattcgtggactggagctaccaagtaccacctcaatggaagagactctctggtgaatccgggcccagctatggccagccacaaggacgatgaagaaaaatattttcctcagagcggggttctcatctttggaaaacaagactcgggaaaaactaatgtggacattgaaaaggtcatgattacagacgaagaggaaatcaggaccaccaatcccgtggctacggagcagtatggttctgtatctaccaacctccagagcggcgacacacaggcagccaccacagatgtcaacacacaaggcgttcttccaggcatggtctggcaggacagagacgtgtacctgcaaggacccatctgggcaaagattcctcacacggacggacactttcacccttctcccctcatgggaggatttggactcaaacaccctcctccgcaaatcctcatcaagaatacccccgtacctgcgaatccttcgaccacattcagcgcggcaaagtttgcttctttcatcacacagtactctacggggcaggtcagcgtggagattgagtgggagctgcagaaggagaacagcaaacgctggaaccccgaaatccagtacacttccaactacaacaagtctgttaatgtggactttactgtggacactaatggtgtgtattcagagcctcgccccattggcacaagatacctgactcgtaatctgtaa

SEQ ID NO: 3247 - DNA, 2208 bp, Artificial Sequence
  source: /note="Description of Artificial Sequence: Synthetic polynucleotide"
atggctgccgatggttatcttccagattggctcgaggacactctctctgaaggaataagacagtggtggaagctcaaacctggcccaccaccaccaaagcccgcagagcggcatcaggacgacagcaggggtcttgtgcttcctgggtacaagtacctcggacccttcaacggactcgacaagggagagccggtcaacgaggcagacgccgcggccctcgagcacgacaaggcctacgaccggcagctcgacagcggaggcaacccgtacctcaagtacaaccacgccgacgcggagtttcaggagcgtcttaaagaagatacgtcttttgggggcaacctcggacgagcagtcttccaggcgaaaaagagggttcttgaacctctgggcctggttgaggaacctgttaagacggctccgggaaaaaagaggccggtagagcattctcctgcggagccagactcctcctcgggaaccggaaaggcgggccagcagcctgcgagaaagagattgaatttcggtcagactggagacgcagactccgtacctgacccccagcctctcggacagccaccagcagccccctctggtctgggaactaatacgatggctacaggcagtggcgcaccaatggcagacaataacgagggcgccgacggagtgggtaattcctcgggaaattggcattgcgattccacatggatgggcgacagagtcatcaccaccagcacccgaacctgggccctgcccacctacaacaaccacctctacaagcaaatctccagccaatctggagcctcaaacgacaaccactactttggctacagcaccccttgggggtattttgacttcaacagattccactgtcacttctccccacgtgactggcaaagactcatcaacaacaactggggattccgacccaagagactcaacttcaagctctttaacattcaagtcaaagaggtcacgcagaatgacggtacgacgacgattgccaataaccttaccagcacggttcaagtctttactgactcggagtaccagctcccgtacgtcctcggctcggcgcatcaaggatgcctcccgccgtttccagcagacgtcttcatggtgccacagtatggatacctcaccctgaacaacgggagtcaggcggtaggacgctcttccttttactgcctggagtactttccttctcagatgctgcgtaccggaaacaactttaccttcagctacacctttgaggacgttcctttccacagcagctacgctcacagccagagtttggaccggctgatgaatcctctgatcgaccagtatctgtattacttgagcaaaacaaacgctccaagcggaaccaccacgatgtccaggcttcagttttctcaggccggagcgagtgacattcgggaccagtctaggaactggcttcctggaccctgttaccgccagcagcgagtatcaaaaacagctgcggataacaacaacagtgattattcgtggactggagctaccaagtaccacctcaatggaagagactctctggtgaatccgggcccagctatggccagccacaaggacgatgaagaaaaatattttcctcagagcggggttctcatctttggaaaacaagactcgggaaaaactaatgtggacattgaaaaggtcatgattacagacgaagaggaaatcaggaccaccaatcccgtggctacggagcagtatggttctgtatctaccaacctccagagcggcaacacacaggcagccaccacagatgtcaacacacaaggcgttcttccaggcatggtctggcaggacagagacgtgtacctgcaaggacccatctgggcaaagattcctcacacggacggacactttcacccttctcccctcatgggaggatttggactcaaacaccctcctccgcaaatcctcatcaagaatacccccgtacctgcgaatccttcgaccacattcagcgcggcaaagtttgcttctttcatcacacagtactctacggggcaggtcagcgtggagattgagtgggagctgcagaaggagaacagcaaacgctggaaccccgaaatccagtacacttccaactacaacaagtctgttaatgtggactttactgtggacactaatggtgtgtattcagagcctcgccccattggcacaagatacctgactcgtaatctgtaa

SEQ ID NO: 3248 - DNA, 2208 bp, Artificial Sequence
  source: /note="Description of Artificial Sequence: Synthetic polynucleotide"
atggctgccgatggttatcttccagattggctcgaggacactctctctgaaggaataagacagtggtggaagctcaaacctggcccaccaccaccaaagcccgcagagcggcatcaggacgacagcaggggtcttgtgcttcctgggtacaagtacctcggacccttcaacggactcgacaagggagagccggtcaacgaggcagacgccgcggccctcgagcacgacaaggcctacgaccggcagctcgacagcggagacaacccgtacctcaagtacaaccacgccgacgcggagtttcaggagcgtcttaaagaagatacgtcttttgggggcaacctcggacgagcagtcttccaggcgaaaaagagggttcttgaacctctgggcctggttgaggaacctgttaagacggctccgggaaaaaagaggccggtagagcattctcctgcggagccagactcctcctcgggaaccggaaaggcgggccagcagcctgcgagaaagagattgaatttcggtcagactggagacgcagactccgtacctgacccccagcctctcggacagccaccagcagccccctctggtctgggaactaatacgatggctacaggcagtggcgcaccaatggcagacaataacgagggcgccgacggagtgggtaattcctcgggaaattggcattgcgattccacatggatgggcgacagagtcatcaccaccagcacccgaacctgggccctgcccacctacaacaaccacctctacaagcaaatctccagccaatctggagcctcaaacgacaaccactactttggctacagcaccccttgggggtattttgacttcaacagattccactgtcacttctccccacgtgactggcaaagactcatcaacaacaactggggattccgacccaagagactcaacttcaagctctttaacattcaagtcaaagaggtcacgcagaatgacggtacgacgacgattgccaataaccttaccagcacggttcaagtctttactgactcggagtaccagctcccgtacgtcctcggctcggcgcatcaaggatgcctcccgccgtttccagcagacgtcttcatggtgccacagtatggatacctcaccctgaacaacgggagtcaggcggtaggacgctcttccttttactgcctggagtactttccttctcagatgctgcgtaccggaaacaactttaccttcagctacacctttgaggacgttcctttccacagcagctacgctcacagccagagtttggaccggctgatgaatcctctgatcgaccagtatctgtattacttgagcaaaacaaacgctccaagcggaaccaccacgatgtccaggcttcagttttctcaggccggagcgagtgacattcgggaccagtctaggaactggcttcctggaccctgttaccgccagcagcgagtatcaaaaacagctgcggataacaacaacagtgattattcgtggactggagctaccaagtaccacctcaatggaagagactctctggtgaatccgggcccagctatggccagccacaaggacgatgaagaaaaatattttcctcagagcggggttctcatctttggaaaacaagactcgggaaaaactaatgtggacattgaaaaggtcatgattacagacgaagaggaaatcaggaccaccaatcccgtggctacggagcagtatggttctgtatctaccaacctccagagcggcaacacacaggcagccaccacagatgtcaacacacaaggcgttcttccaggcatggtctggcaggacagagacgtgtacctgcaaggacccatctgggcaaagattcctcacacggacggacactttcacccttctcccctcatgggaggatttggactcaaacaccctcctccgcaaatcctcatcaagaatacccccgtacctgcgaatccttcgaccacattcagcgcggcaaagcttgcttctttcatcacacagtactctacggggcaggtcagcgtggagattgagtgggagctgcagaaggagaacagcaaacgctggaaccccgaaatccagtacacttccaactacaacaagtctgttaatgtggactttactgtggacactaatggtgtgtattcagagcctcgccccattggcacaagatacctgactcgtaatctgtaa

SEQ ID NO: 3249 - DNA, 2208 bp, Artificial Sequence
  source: /note="Description of Artificial Sequence: Synthetic polynucleotide"
atggctgccgatggttatcttccagattggctcgaggacactctctctgaaggaataagacagtggtggaagctcaaacctggcccaccaccaccaaagcccgcagagcggcatcaggacgacagcaggggtcttgtgcttcctgggtacaagtacctcggacccttcaacggactcgacaagggagagccggtcaacgaggcagacgccgcggccctcgagcacgacaaggcctacgaccggcagctcgacagcggagacaacccgtacctcaagtacaaccacgccgacgcggagtttcaggagcgtcttaaagaagatacgtcttttgggggcaacctcggacgagcagtcttccaggcgaaaaagagggttcttgaacctctaggcctggttgaggaacctgttaagacggctccgggaaaaaagaggccggtagagcattctcctgcggagccagactcctcctcgggaaccggaaaggcgggccagcagcctgcgagaaagagattgaatttcggtcagactggagacgcagactccgtacctgacccccagcctctcggacagccaccagcagccccctctggtctgggaactaatacgatggctacaggcagtggcgcaccaatggcagacaataacgagggcgccgacggagtgggtaattcctcgggaaattggcattgcgattccacatggatgggcgacagagtcatcaccaccagcacccgaacttgggccctgcccacctacaacaaccacctctacaagcaaatctccagccaatctggagcctcaaacgacaaccactactttggctacagcaccccttgggggtattttgacttcaacagattccactgtcacttctccccacgtgactggcaaagactcatcaacaacaactggggattccgacccaagagactcaacttcaagctctttaacattcaagtcaaagaggtcacgcagagtgacggtacgacgacgattgccaataaccttaccagcacggttcaagtctttactgactcggagtaccagctcccgtacgtcctcggctcggcgcatcaaggatgcctcccgccgtttccagcagacgtcttcatggtgccacagtatggatacctcaccctgaacaacgggagtcaggcggtaggacgctcttccttttactgcctggagtactttccttctcagatgctgcgtaccggaaacaactttaccttcagctacacctttgaggacgttcctttccacagcagctacgctcacagccagagtttggaccggctgatgaatcctctgatcgaccagtatctgtattacttgagcaaaacaaacgctccaagcggaaccaccacgatgtccaggcttcagttttctcaggccggagcgagtgacattcgggaccagtctaggaactggcttcctggaccctgttaccgccagcagcgagtatcaaaaacagctgcggataacaacaacagtgattattcgtggactggagctaccaagtaccacctcaatggaagagactctctggtgaatccgggcccagctatggccagccacaaggacgatgaagaaaaatattttcctcagagcgggattctcatctttggaaaacaagactcgggaaaaactaatgtggacattgaaaaggtcatgattacagacgaagaggaaatcaggaccaccaatcccgtggctacggagcagtatggttctgtatctaccaacctccagagcggcaacacacaggcagccaccacagatgtcaacacacaaggcgttcttccaggcatggtctggcaggacagagacgtgtacctgcaaggacccatctgggcaaagattcctcacacggacggacactttcacccttctcccctcatgggaggatttggactcaaacaccctcctccgcaaatcctcatcaagaatacccccgtacctgcgaatccttcgaccacattcagcgcggcaaagtttgcttctttcatcacacagtaccctacggggcaggtcagcgtggagattgagtgggagctgcagaaggagaacagcaaacgctggaaccccgaaatccagtacacttccaactacaacaagtctgttaatgtggactttactgtggacactaatggtgtgtattcagagcctcgccccattggcacaagatacctgactcgtaatctgtaa

SEQ ID NO: 3250 - DNA, 2208 bp, Artificial Sequence
  source: /note="Description of Artificial Sequence: Synthetic polynucleotide"
atggctgccgatggttatcttccagattggctcgaggacactctctctgaaggaataagacagtggtggaagctcaaacctggcccaccaccaccaaagcccgcagagcggcatcaggacgacagcaggggtcttgtgcttcctgggtacaagtacctcggacccttcaacggactcgacaagggagagccggtcaacgaggcagacgccgcggccctcgagcacgacaaggcctacgaccggcagctcgacagcggagacaacccgtacctcaagtacaaccacgccgacgcggagtttcaggagcgtcttaaagaagatacgtcttttgggggcaacctcggacgagcagtcttccaggcgaaaaagagggttcttgaacctctgggcctggttgaggaacctgttaagacggctccgggaaaaaagaggccggtagagcattctcctgcggagccagacgcctcctcgggaaccggaaaggcgggccagcagcctgcgagaaagagattgaatttcggtcagactggagacgcagactccgtacctgacccccagcctctcggacagccaccagcagccccctctggtctgggaactaatacgatggctacaggcagtggcgcaccaatggcagacaataacgagggcgccgacggagtgggtaattcctcgggaaattggcattgcgattccacatggatgggcgacagagtcatcaccaccagcacccgaacctgggccctgcccacctacaacaaccacctctacaagcaaatctccagccaatctggagcctcaaacgacaaccactactttggctacagcaccccttgggggtattttgacttcaacagattccactgtcacttctccccacgtgactggcaaagactcatcaacaacaactggggattccgacccaagagactcaacttcaagctctttaacattcaagtcaaagaggtcacgcagaatgacggtacgacgacgattgccaataaccttaccagcacggttcaagtctttactgactcggagtaccagctcccgtacgtcctcggctcggcgcatcaaggatgcctcccgccgtttccagcagacgtcttcatggtgccacagtatggatacctcaccctgaacaacgggagtcaggcggtaggacgctcttccttttactgcctggagtactttccttctcagatgctgcgtaccggaaacaactttaccttcagctacacctttgaggacgttcctttccacagcagctacgctcacagccagagtttggaccggctgatgaatcctctgatcgaccagtatctgtattacttgagcaaaacaaacgctccaagcggaaccaccacgatgtccaggcttcagttttctcaggccggagcgagtgacattcgggaccagtctaggaactggcttcctggaccctgttaccgccagcagcgagtatcaaaaacagctgcggataacaacaacagtgattattcgtggactggagctaccaagtaccacctcaatggaagagactctctggtgaatccgggcccagctatggccagccacaaggacgatgaagaaaaatattttcctcagagcggggttctcatctttggaaaacaagactcgggaaaaactaatgtggacattgaaaaggtcatgattacagacgaagaggaaatcaggaccaccaatcccgtggctacggagcagtatggttctgtatctaccaacctccagagcggcaacacacaggcagccaccacagatgtcaacacacaaggcgttcttccaggcatggtctggcaggacagagacgtgtacctgcaaggacccatctgggcaaagattcctcacacggacggacactttcacccttctcccctcatgggaggatttggactcaaacaccctcctccgcaaatcctcatcaagaatacccccgtacctgcgaatccttcgaccacattcagcgcggcaaagtttgcttctttcatcacacagtactctacggggcaggtcagcgtggagattgagtgggagctgcagaaggagaacagcaaacgctggaaccccgaaatccagtacacttccaactacaacaagtctgttaatgtggactttactgtggacactaatggtgtgtattcagagcctcgccccattggcacaagatacctgactcgtaatctgtaa

SEQ ID NO: 3251 - DNA, 2208 bp, Artificial Sequence
  source: /note="Description of Artificial Sequence: Synthetic polynucleotide"
atggctgccgatggttatcttccagattggctcgaggacactctctctgaaggaataagacagtggtggaagctcaaacctggcccaccaccaccaaagcccgcagagcggcatcaggacgacagcaggggtctcgtgcttcctgggtacaagtacctcggacccttcaacggactcgacaagggagggccggtcaacgaggcagacgccgcggccctcgagcacgacaaggcctacgaccggcagctcgacagcggagacaacccgtacctcaagtacaaccacgccgacgcggagtttcaggagcgtcttaaagaagatacgtcttttgggggcaacctcggacgagcagtcttccaggcgaaaaagagggttcttgaacctctgggcctggttgaggaacctgttaagacggctccgggaaaaaagaggccggtagagcattctcctgcggagccagactcctcctcgggaaccggaaaggcgggccagcagcctgcgagaaagagattgaatttcggtcagactggagacgcagactccgtacctgacccccagcctctcggacagccaccagcagccccctctggtctgggaactaatacgatggctacaggcagtggcgcaccaatggcagacaataacgagggcgccgacggagtgggtaattcctcgggaaattggcattgcgattccacatggatgggcgacagagtcatcaccaccagcacccgaacctgggccctgcccacctacaacaaccacctctacaagcaaatctccagccaatctggagcctcaaacgacaaccactactttggctacagcaccccttgggggtattttgacttcaacagattccactgtcacttctccccacgtgactggcaaagactcatcaacaacaactggggattccgacccaagagactcaacttcaagctctttaacattcaagtcaaagaggtcacgcagaatgacggtacgacgacgattgccaataaccttaccagcacggttcaagtctttactgactcggagtaccagctcccgtacgtcctcggctcggcgcatcaaggatgcctcccgccgtttccagcagacgtcttcatggtgccacagtatggatacctcaccctgaacaacgggagtcaggcggtaggacgctcttccttttactgcctggagtactttccttctcagatgctgcgtaccggaaacaactttaccttcagctacacctttgaggacgttcctttccacagcagctacgctcacagccagagtttggaccggctgatgaatcctctgatcgaccagtatctgtattacttgagcaaaacaaacgctccaagcggaaccaccacgatgtccaggcttcagttttctcaggccggagcgagtgacattcgggaccagtctaggaactggcttcctggaccctgttaccgccagcagcgagtatcaaaaacagctgcggataacaacaacagtgattattcgtggactggagctaccaagtaccacctcaatggaagagactctctggtgaatccgggcccagctatggccagccacaaggacgatgaagaaaaatattttcctcagagcggggttctcatctttggaaaacaagactcgggaaaaactaatgtggacattgaaaaggtcatgattacagacgaagaggaaatcaggaccaccaatcccgtggctacggagcagtatggttctgtatctaccaacctccagagcggcaacacacaggcagccaccacagatgtcaacacacaaggcgttcttccaggcatggtctggcaggacagagacgtgtacctgcaaggacccatctgggcaaagattcctcacacggacggacactttcacccttctcccctcatgggaggatttggactcaaacaccctcctccgcaaatcctcatcaagaatacccccgtacctgcgaatccttcgaccacattcagcgcggcaaagtttgcttctttcatcacacagtactctacggggcaggtcagcgtggagattgagtgggagctgcagaaggagaacagcaaacgctggaaccccgaaatccagtacacttccaactacaacaagtctgttaatgtggactttactgtggacactaatggtgtgtattcagagcctcgccccattggcacaagatacctgactcgtaatctgtaa

SEQ ID NO: 3252 - DNA, 2208 bp, Artificial Sequence
  source: /note="Description of Artificial Sequence: Synthetic polynucleotide"
atggctgccgatggttatcttccagattggctcgaggacactctctctgaaggaataagacagtggtggaagctcaaacctggcccaccaccaccaaagcccgcagagcggcatcaggacgacagcaggggtcttgtgcttcctgggtacaagtacctcggacccttcaacggactcgacaagggagagccggtcaacgaggcagacgccgcggccctcgagcacgacaaggcctacgaccggcagctcgacagcggagacaacccgtacctcaagcacaaccacgccgacgcggagtttcaggagcgtcttaaagaagatacgtcttttgggggcaacctcggacgagcagtcttccaggcgaaaaagagggttcttgaacctctgggcctggttgaggaacctgttaagacggctccgggaaaaaagaggccggtagagcattctcctgcggagccagactcctcctcgggaaccggaaaggcgggccagcagcctgcgagaaagagattgaatttcggtcagactggagacgcagactccgtacctgacccccagcctctcggacagccaccagcagccccctctggtctgggaactaatacgatggctacaggcagtggcgcaccaatggcagacaataacgagggcgccgacggagtgggtaattcctcgggaaattggcattgcgattccacatggatgggcgacagagtcatcaccaccagcacccgaacctgggccctgcccacctacaacaaccacctctacaagcaaatctccagccaatctggagcctcaaacgacaaccactactttggctacagcaccccttgggggtattttgacttcaacagattccactgtcacttctccccacgtgactggcaaagactcatcaacaacaactggggattccgacccaagagactcaacttcaagctctttaacattcaagtcaaagaggtcacgcagaatgacggtacgacgacgattgccaataaccttaccagcacggttcaagtctttactgactcggagtaccagctcccgtacgtcctcggctcggcgcatcaaggatgcctcccgccgtttccagcagacgtcttcatggtgccacagtatggatacctcaccctgaacaacgggagtcaggcggtaggacgctcttccttttactgcctggagtactttccttctcagatgctgcgtaccggaaacaactttaccttcagctacacctttgaggacgttcctttccacagcagctacgctcacagccagagtttggaccggctgatgaatcctctgatcgaccagtatctgtattacttgagcaaaacaaacgctccaagcggaaccaccacgatgtccaggcttcagttttctcaggccggagcgagtgacattcgggaccagtctaggaactggcttcctggaccctgttaccgccagcagcgagtatcaaaaacagctgcggataacaacaacagtgattattcgtggactggagctaccaagtaccacctcaatggaagagactctctggtgaatccgggcccagctatggccagccacaaggacgatgaagaaaaatattttcctcagagcggggttctcatctttggaaaacaagactcgggaaaaactaatgtggacattgaaaaggtcatgattacagacgaagaggaaatcaggaccaccaatcccgtggctacggagcagtatggttctgtatctaccaacctccagagcggcaacacacaggcagccaccacagatgtcaacacacaaggcgttcttccaggcatggtctggcaggacagagacgtgtacctgcaaggacccatctgggcaaagattcctcacacggacggacactttcacccttctcccctcatgggaggatttggactcaaacaccctcctccgcaaatcctcatcaagaatacccccgtacctgcgaatccttcgaccacattcagcgcggcaaagtttgcttctttcatcacacagtactctacggggcaggtcagcgtggagattgagtgggagctgcagaaggagaacagcaaacgctggaaccccgaaatccagtacacttccaactacaacaagtctgttaatgtggactttactgtggacactaatggtgtgtattcagagcctcgccccattggcacaagatacctgactcgtaatctgtaa

SEQ ID NO: 3253 - DNA, 2208 bp, Artificial Sequence
  source: /note="Description of Artificial Sequence: Synthetic polynucleotide"
atggctgccgatggttatcttccagattggctcgaggacactctctctgaaggaataagacagtggtggaagctcaaacctggcccaccaccaccaaagcccgcagagcggcatcaggacgacagcaggggtcttgtgcttcctgggtacaagtacctcggacccttcaacggactcgacaagggagagccggtcaacgaggcagacgccgcggccctcgagcacgacaaggcctacgaccggcagctcgacagcggagacaacccgtacctcaagtacaaccacgccgacgcggagtttcaggagcgtcttaaagaagatacgtcttttgggggcaacctcggacgagcagtcttccaggcgaaaaagagggttcttgaacctctgggcctggttgaggaacctgttaagacggctccgggaaaaaagaggccggtagagcattctcctgcggagccagactcctcctcgggaaccggaaaggcgggccagcagcctgcgagaaagagattgaatttcggtcagactggagacgcagactccgtacctgacccccagcctctcggacagccaccagcagccccctctggtctgggaactaatacgatggctacaggcagtggcgcaccaatggcagacaataacgagggcgccgacggagtgggtaattcctcgggaaattggcattgcgattccacatggatgggcgacagagtcatcaccaccagcacccgaacctgggccctgcccacctacaacaaccacctctacaagcaaatctccagccaatctggagcctcaaacgacaaccactactttggctacagcaccccttgggggtattttgacttcaacagattccactgtcacttctccccacgtgactggcaaagactcatcaacaacaactggggattccgacccaagagactcaacttcaagctctttaacattcaagtcaaagaggtcacgcagaatgacggtacgacgacgattgccaataaccttaccagcacggttcaagtctttactgactcggagtaccagctcccgtacgtcctcggctcggcgcatcaaggatgcctcccgccgtttccagcaggcgtcttcatggtgccacagtatggatacctcaccctgaacaacgggagtcaggcggtaggacgctcttccttttactgcctggagtactttccttctcagatgctgcgtaccggaaacaactttaccttcagctacacctttgaggacgttcctttccacagcagctacgctcacagccagagtttggaccggctgatgaatcctctgatcgaccagtatctgtattacttgagcaaaacaaacgctccaagcggaaccaccacgatgtccaggcttcagttttctcaggccggagcgagtgacattcgggaccagtctaggaactggcttcctggaccctgttaccgccagcagcgagtatcaaaaacagctgcggataacaacaacagtgattattcgtggactggagctaccaagtaccacctcaatggaagagactctctggtgaatccgggcccagctatggccagccacaaggacgatgaagaaaaatattttcctcagagcggggttctcatctttggaaaacaagactcgggaaaaactaatgtggacattgaaaaggtcatgattacagacgaagaggaaatcaggaccaccaatcccgtggctacggagcagtatggttctgtatctaccaacctccagagcggcaacacacaggcagccaccacagatgtcaacacacaaggcgttcttccaggcatggtctggcaggacagagacgtgtacctgcaaggacccatctgggcaaagattcctcacacggacggacactttcacccttctcccctcatgggaggatttggactcaaacaccctcctccgcaaatcctcatcaagaatacccccgtacctgcgaatccttcgaccacattcagcgcggcaaagtttgcttctttcatcacacagtactctacggggcaggtcagcgtggagattgagtgggagctgcagaaggagaacagcaaacgctggaaccccgaaatccagtacacttccaactacaacaagtctgttaatgtggactttactgtggacactaatggtgtgtattcagagcctcgccccattggcacaagatacctgactcgtaatctgtaa

SEQ ID NO: 3254 - DNA, 2208 bp, Artificial Sequence
  source: /note="Description of Artificial Sequence: Synthetic polynucleotide"
atggctgccgatggttatcttccagattggctcgaggacactctctctgaaggaataagacagtggtggaagctcaaacctggcccaccaccaccaaagcccgcagagcggcatcaggacgacagcaggggtcttgtgcttcctgggtacaagtacctcggacccttcaacggactcgacaagggagagccggtcaacgaggcagacgccgcggccctcgagcacgacaaggcctacgaccggcagctcgacagcggagacaacccgtacctcaagtacaaccacgccgacgcggagtttcaggagcgtcttaaagaagatacgtcttttgggggcaacctcggacgagcagtcttccaggcgaaaaagagggttcttgaacctctgggcctggttgaggaacctgttaagacggctccgggaaaaaagaggccggtagagcattctcctgcggagccagactcctcctcgggaaccggaaaggcgggccagcagcctgcgagaaagagattgaatttcggtcagactggagacgcagactccgtacctgacccccagcctctcggacagccaccagcagccccctctggtctgggaactaatacgacagctacaggcagtggcgcaccaatggcagacaataacgagggcgccgacggagtgggtaattcctcgggaaattggcattgcgattccacatggatgggcgacagagtcatcaccaccagcacccgaacctgggccctgcccacctacaacaaccacctctacaagcaaatctccagccaatctggagcctcaaacgacaaccactactttggctacagcaccccttgggggtattttgacttcaacagattccactgtcacttctccccacgtgactggcaaagactcatcaacaacaactggggattccgacccaagagactcaacttcaagctctttaacattcaagtcaaagaggtcacgcagaatgacggtacgacgacgattgccaataaccttaccagcacggttcaagtctttactgactcggagtaccagctcccgtacgtcctcggctcggcgcatcaaggatgcctcccgccgtttccagcagacgtcttcatggtgccacagtatggatacctcaccctgaacaacgggagtcaggcggtaggacgctcttccttttactgcctggagtactttccttctcagatgctgcgtaccggaaacaactttaccttcagctacacctttgaggacgttcctttccacagcagctacgctcacagccagagtttggaccggctgatgaatcctctgatcgaccagtatctgtattacttgagcaaaacaaacgctccaagcggaaccaccacgatgtccaggcttcagttttctcaggccggggcgagtgacattcgggaccagtctaggaactggcttcctggaccctgttaccgccagcagcgagtatcaaaaacagctgcggataacaacaacagtgattattcgtggactggagctaccaagtaccacctcaatggaagagactctctggtgaatccgggcccagctatggccagccacaaggacgatgaagaaaaatattttcctcagagcggggttctcatctttggaaaacaagactcgggaaaaactaatgtggacattgaaaaggtcatgattacagacgaagaggaaatcaggaccaccaatcccgtggctacggagcagtatggttctgtatctaccaacctccagagcggcaacacacaggcagccaccacagatgtcaacacacaaggcgttcttccaggcatggtctggcaggacagagacgtgtacctgcaaggacccatctgggcaaagattcctcacacggacggacactttcacccttctcccctcatgggaggatttggactcaaacaccctcctccgcaaatcctcatcaagaatacccccgtacctgcgaatccttcgaccacattcagcgcggcaaagtttgcttctttcatcacacagtactctacggggcaggtcagcgtggagattgagtgggagctgcagaaggagaacagcaaacgctggaaccccgaaatccagtacacttccaactacaacaagtctgttaatgtggactttactgtggacactaatggtgtgtattcagagcctcgccccattggcacaagatacctgactcgtaatctgtaa

SEQ ID NO: 3255 - DNA, 2208 bp, Artificial Sequence
  source: /note="Description of Artificial Sequence: Synthetic polynucleotide"
atggctgccgatggttatcttccagattggctcgaggacactctctctgaaggaataagacagtggtggaagctcaaacctggcccaccaccaccaaagcccgcagagcggcatcaggacgacagcaggggtcttgtgcttcctgggtacaagtacctcggacccttcaacggactcgacaagggagagccggtcaacgaggcagacgccgcggccctcgagcacgacaaggcctacgaccggcagctcgacagcggagacaacccgtacctcaagtacaaccacgccgacgcggagtttcaggagcgtcttaaagaagatacgtcttttgggggcaacctcggacgagcagtcttccaggcgaaaaagagggttcttgaacctctgggcctggttgaggaacctgttaagacggctccgggaaaaaagaggccggtagagcattctcctgcggagccagactcctcctcgggaaccggaaaggcgggccagcagcctgcgagaaagagattgaatttcggtcagaccggagacgcagactccgtacctgacccccagcctctcggacagccaccagcagccccctctggtctgggaactaatacgatggctacaggcagtggcgcaccaatggcagacaataacgagggcgccgacggagtgggtaattcctcgggaaattggcattgcgattccacatggatgggcgacagagtcatcaccaccagcacccgaacctgggccctgcccacctacaacaaccacctctacaagcaaatctccagccaatctggagcctcaaacgacaaccactactttggctacagcaccccttgggggtattttgacttcaacagattccactgtcacttctccccacgtgactggcaaagactcatcatcaacaactggggattccgacccaagagactcaacttcaagctctttaacattcaagtcaaagaggtcacgcagaatgacggtacgacgacgattgccaataaccttaccagcacggttcaagtctttactgactcggagtaccagctcccgtacgtcctcggctcggcgcatcaaggatgcctcccgccgtttccagcagacgtcttcatggtgccacagtatggatacctcaccctgaacaacgggagtcaggcggtaggacgctcttccttttactgcctggagtactttccttctcagatgctgcgtaccggaaacaactttaccttcagctacacctttgaggacgttcctttccacagcagctacgctcacagccagagtttggaccggctgatgaatcctctgatcgaccagtatctgtattacttgagcaaaacaaacgctccaagcggaaccaccacgatgtccaggcttcagttttctcaggccggagcgagtgacattcgggaccagtctaggaactggcttcctggaccctgttaccgccagcagcgagtatcaaaaacagctgcggataacaacaacagtgattattcgtggactggagctaccaagtaccacctcaatggaagagactctctggtgaatccgggcccagctatggccagccacaaggacgatgaagaaaaatattttcctcagagcggggttctcatctttggaaaacaagactcgggaaaaactaatgtggacattgaaaaggtcatgattacagacgaagaggaaatcaggaccaccaatcccgtggctacggagcagtatggttctgtatctaccaacctccagagcggcaacacacaggcagccaccacagatgtcaacacacaaggcgttcttccaggcatggtctggcaggacagagacgtgtacctgcaaggacccatctgggcaaagattcctcacacggacggacactttcacccttctcccctcatgggaggatttggactcaaacaccctcctccgcaaatcctcatcaagaatacccccgtacctgcgaatccttcgaccacattcagcgcggcaaagtttgcttctttcatcacacagtactctacggggcaggtcagcgtggagattgagtgggagctgcagaaggagaacagcaaacgctggaaccccgaaatccagtacacttccaactacaacaagtctgttaatgtggactttactgtggacactaatggtgtgtattcagagcctcgccccattggcacaagatacctgactcgtaatctgtaa

SEQ ID NO: 3256 - DNA, 2208 bp, Artificial Sequence
  source: /note="Description of Artificial Sequence: Synthetic polynucleotide"
atggctgccgatggttatcttccagattggctcgaggacactctctctgaaggaataagacagtggtggaagctcaaacctggcccaccaccaccaaagcccgcagagcggcatcaggacgacagcaggggtcttgtgcttcctgggtacaagtacctcggacccttcaacggactcgacaagggagagccggtcaacgaggcagacgccgcggccctcgagcacgacaaggcctacgaccggcagctcgacagcggagacaacccgtacctcaagtacaaccacgccgacgcggagtttcaggagcgtcttaaagaagatacgtcttttgggggcaacctcggacgagcagtcttccaggcgaaaaagagggttcttgaacctctgggcctggttgaggaacctgttaagacggctccgggaaaaaagaggccggtagagcattctcctgcggagccagactcctcctcgggaaccggaaaggcgggccagcagcctgcgagaaagagattgaatttcggtcagactggagacgcagactccgtacctgacccccagcctctcggacagccaccagcagccccctctggtctgggaactaatacgatggctacaggcagtggcgcaccaatggcagacaataacgagggcgccgacggagtgggtaattcctcgggaaattggcattgcgattccacatggatgggcgacagagtcatcaccaccagcacccgaacctgggccctgcccacctacaacaaccacctctacaagcaaatctccagccaatctggagcctcaaacgacaaccactactttggctacagcaccccttgggggtattttgacttcaacagattccactgtcacttctccccacgtgactggcaaagactcatcaacaacaactggggattccgacccaagagactcaacttcaagctctttaacattcaagtcaaagaggtcacgcagaatgacggtacgacgacgattgccaataaccttaccagcacggttcaagtctttactgactcggagtaccagctcccgtacgtcctcggctcggcgcatcaaggatgcctcccgccgtttccagcagacgtcttcatggtgccacagtatggatacctcaccctgaacaacgggagtcaggcggtaggacgctcttccttttactgcctggagtactttccttctcagatgctgcgtaccggaaacaactttaccttcagctacacctttgaggacgttcctttccacagcagctacgctcacagccagagtttggaccggctgatgaatcctctgatcgaccagtatctgtattacttgagcaaaacaaacgctccaagcggaaccaccacgatgtccaggcttcagttttctcaggccggagcgagtgacattcgggaccagtctaggaactggcttcctggaccctgttaccgccagcagcgagtatcaaaaacagctgcggataacaacaacagtgattattcgtggactggagctaccaagtaccacctcaatggaagagactctctggtgaatccgggcccagctatggccagccacaaggacgatgaagagaaatattttcctcagagcggggttctcatctttggaaaacaagactcgggaaaaactaatgtggacattgaaaaggtcatgattacagacgaagaggaaatcaggaccaccaatcccgtggctacggagcagtatggttctgtatctaccaacctccagagcggcaacacacaggcagccaccacagatgtcaacacacaaggcgttcttccaggcatggtctggcaggacagagacgtgtaccagcaaggacccatctgggcaaagattcctcacacggacggacactttcacccttctcccctcatgggaggatttggactcaaacaccctcctccgcaaatcctcatcaagaatacccccgtacctgcgaatccttcgaccacattcagcgcggcaaagcttgcttctttcatcacacagtactctacggggcaggtcagcgtggaggttgagtgggagctgcagaaggagaacagcaaacgctggaaccccgaaatccagtacacttccaactacaacaagtctgttaatgtggactttactgtggacactaatggtgtgtattcagagcctcgccccattggcacaagatacctgactcgtaatctgtaa

SEQ ID NO: 3257 - DNA, 2208 bp, Artificial Sequence
  source: /note="Description of Artificial Sequence: Synthetic polynucleotide"
atggctgccgatggttatcttccagattggctcgaggacactctctctgaaggaataagacagtggtggaagctcaaacctggcccaccaccaccaaagcccgcagagcggcatcaggacgacagcaggggtcttgtgcttcctgggtacaagtacctcggacccttcaacggactcgacaagggagagccggtcaacgaggcagacgccgcggccctcgagcacgacaaggcctacgaccggcagctcgacagcggagacaacccgtacctcaagtacaaccacgccgacgcggagtttcaggagcgtcttaaagaagatacgtcttttgggggcaacctcggacgagcagtcttccaggcgaaaaagagggttcttgaacctctgggcctggttgaggaacctgttaagacggctccgggaaaaaagaggccggtagagcattctcctgcggagccagactcctcctcgggaaccggaaaggcgggccagcagcctgcgagaaagagattgaatttcggtcagactggagacgcagactccgtacctgacccccagcctctcggacagccaccagcagccccctctggtctgggaactaatacgatggctacaggcagtggcgcaccaatggcagacagtaacgagggcgccgacggagtgggtaattcctcgggaaattggcattgcgattccacatggatgggcgacagagtcatcaccaccagcacccgaacctgggccctgcccacctacaacaaccacctctacaagcaaatctccagccaatctggagcctcaaacgacaaccactactttggctacagcaccccttgggggtattttgacttcaacagattccactgtcacttctccccacgtgactggcaaagactcatcaacaacaactggggattccgacccaagagactcaacttcaagctctttaacattcaagtcaaagaggtcacgcagaatgacggtacgacgacgattgccaataaccttaccagcacggttcaagtctttactgactcggagtaccagctcccgtacgtcctcggctcggcgcatcaaggatgcctcccgccgtttccagcagacgtcttcatggtgccacagtatggatacctcaccctgaacaacgggagtcaggcggtaggacgctcttccttttactgcctggagtactttccttctcagatgctgcgtaccggaaacaactttaccttcagctacacctttgaggacgttcctttccacagcagctacgctcacagccagagtttggaccggctgatgaatcctctgatcgaccagtatctgtattacttgagcaaaacaaacgctccaagcggaaccaccacgatgtccaggcttcagttttctcaggccggagcgagtgacattcgggaccagtctaggaactggcttcctggaccctgttaccgccagcagcgagtatcaaaaacagctgcggataacaacaacagtgattattcgtggactggagctaccaagtaccacctcaatggaagagactctctggtgaatccgggcccagctatggccagccacaaggacgatgaagaaaaatattttcctcagagcggggttctcatctttggaaaacaagactcgggaaaaactaatgtggacattgaaaaggtcatgattacagacgaagaggaaatcaggaccaccaatcccgtggctacggagcagtatggttctgtatctaccaacctccagagcggcaacacacaggcagccaccacagatgtcaacacacaaggcgttcttccaggcatggtctggcaggacagagacgtgtacctgcaaggacccatctgggcaaagattcctcacacggacggacactttcacccttctcccctcatgggaggatttggactcaaacaccctcctccgcaaatcctcatcaagaatacccccgtacctgcgaatccttcgaccacattcagcgcggcaaagtttgcttctttcatcacacagtactctacggggcaggtcagcgtggagattgagtgggagctgcagaaggagaacagcaaacgctggaaccccgaaatccagtacacttccaactacaacaagtctgttaatgtggactttactgtggacactaatggtgtgtattcagagcctcgccccattggcacaagatacctgactcgtaatctgtaa

SEQ ID NO: 3258 - DNA, 2208 bp, Artificial Sequence
  source: /note="Description of Artificial Sequence: Synthetic polynucleotide"
atggctgccgatggttatcttccagattggctcgaggacactctctctgaaggaataagacagtggtggaagctcaaacctggcccaccaccaccaaagcccgcagagcggcatcaggacgacagcaggggtcttgtgcttcctgggtacaagtacctcggacccttcaacggactcgacaagggagagccggtcaacgaggcagacgccgcggccctcgagcacgacaaggcctacgaccggcagctcgacagcggagacaacccgtacctcaagtacaaccacgccgacgcggagtttcaggagcgtcttaaagaagatacgtcttttgggggcaacctcggacgagcagtcttccaggcgaaaaagagggttcttgaacctctgggcctggttgaggaacctgttaagacggctccgggaaaaaagaggccggtagagcattctcctgcggagccagactcctcctcgggaaccggaaaggcgggccagcagcctgcgagaaagagattgaatttcggtcagactggagacgcagactccgtacctgacccccagcctctcggacagccaccagcagccccctctggtctgggaactaatacgatggctacaggcagtggcgcaccaatggcagacaataacgagggcgccgacggagtgggtaattcctcgggaaattggcattgcgattccacatggatgggcgacagagtcatcaccaccagcacccgaacctgggccctgcccacctacaacaaccacctctacaagcaaatctccagccaatctggagcctcaaacgacaaccactactttggctacagcaccccttgggggtattttgacttcaacagattccactgtcacttctccccacgtgactggcaaagactcatcaacaacaactggggattccgacccaagagactcaacttcaagctctttaacattcaagtcaaagaggtcacgcagaatgacggtacgacgacgattgccaataaccttaccagcacggttcaagtctttactgactcggagtaccagctcccgtacgtcctcggctcggcgcatcaaggatgcctcccgccgtttccagcagacgtctccatggtgccacagtatggatacctcaccctgaacaacgggagtcaggcggtaggacgctcttccttttactgcctggagtactttccttctcagatgctgcgtaccggaaacaactttaccttcagctacacctttgaggacgttcctttccacagcagctacgctcacagccagagtttggaccggctgatgaatcctctgatcgaccagtatctgtattacttgagcaaaacaaacgctccaagcggaaccaccacgatgtccaggcttcagttttctcaggccggagcgagtgacattcgggaccagtctaggaactggcttcctggaccctgttaccgccagcagcgagtatcaaaaacagctgcggataacaacaacagtgattattcgtggactggagctaccaagtaccacctcaatggaagagactctctggtgaatccgggcccagctatggccagccacaaggacgatgaagaaaaatattttcctcagagcggggttctcatctttggaaaacaagactcgggaaaaactaatgtggacattgaaaaggtcatgattacagacgaagaggaaatcaggaccaccaatcccgtggctacggagcagtatggttctgtatctaccaacctccagagcggcaacacacaggcagccaccacagatgtcaacacacaaggcgttcttccaggcatggtctggcaggacagagacgtgtacctgcaaggacccatctgggcaaagattcctcacacggacggacactttcacccttctcccctcatgggaggatttggactcaaacaccctcctccgcaaatcctcatcaagaatacccccgtacctgcgaatccttcgaccacattcagcgcggcaaagtttgcttctttcatcacacagtactctacggggcaggtcagcgtggagattgagtgggagctgcagaaggagaacagcaaacgctggaaccccgaaatccagtacacttccaactacaacaagtctgttaatgtggactttactgtggacactaatggtgtgtattcagagcctcgccccattggcacaagatacctgactcgtaatctgtaa

SEQ ID NO: 3259 - DNA, 2208 bp, Artificial Sequence
  source: /note="Description of Artificial Sequence: Synthetic polynucleotide"
atggctgccgatggttatcttccagattggctcgaggacactctctctgaaggaataagacagtggtggaagctcaaacctggcccaccaccaccaaagcccgcagagcggcatcaggacgacagcaggggtcttgtgcttcctgggtacaagtacctcggacccttcaacggactcgacaagggagagccggtcaacgaggcagacgtcgcggccctcgagcacgacaaggcctacgaccggcagctcgacagcggagacaacccgtacctcaagtacaaccacgccgacgcggagtttcaggagcgtcttaaagaagatacgtcttttgggggcaacctcggacgagcagtcttccaggcgaaaaagagggttcttgaacctctgggcctggttgaggaacctgttaagacggctccgggaaaaaagaggccggtagagcattctcctgcggagccagactcctcctcgggaaccggaaaggcgggccagcagcctgcgagaaagagattgaatttcggtcagactggagacgcagactccgtacctgacccccagcctctcggacagccaccagcagccccctctggtctgggaactaatacgatggctacaggcagtggcgcaccaatggcagacaataacgagggcgccgacggagtgggtaattcctcgggaaattggcattgcgattccacatggatgggcgacagagtcatcaccaccagcacccgaacctgggccctgcccacctacaacaaccacctctacaagcaaatctccagccaatctggagcctcaaacgacaaccactactttggctacagcaccccttgggggtattttgacttcaacagattccactgtcacttctccccacgtgactggcaaagactcatcaacaacaactggggattccgacccaagagactcaacttcaagctctttaacattcaagtcaaagaggtcacgcagaatgacggtacgacgacgattgccaataaccttaccagcacggttcaagtctttactgactcggagtaccagctcccgtacgtcctcggctcggcgcatcaaggatgcctcccgccgtttccagcagacgtcttcatggtgccacagtatggatacctcaccctgaacaacgggagtcaggcggtaggacgctcttccttttactgcctggagtactttccttctcagatgctgcgtaccggaaacaactttaccttcagctacacctttgaggacgttcctttccacagcagctacgctcacagccagagtttggaccggctgatgaatcctctgatcgaccagtatctgtattacttgagcaaaacaaacgctccaagcggaaccaccacgatgtccaggcttcagttttctcaggccggagcgagtgacattcgggaccagtctaggaactggcttcctggaccctgttaccgccagcagcgagtatcaaaaacagctgcggataacaacaacagtgattattcgtggactggagctaccaagtaccacctcaatggaagagactctctggtgaatccgggcccagctatggccagccacaaggacgatgaagaaaaatattttcctcagagcggggttctcatctttggaaaacaagactcgggaaaaactaatgtggacattgaaaaggtcatgattacagacgaagaggaaatcaggaccaccaatcccgtggctacggagcagtatggtcctgtatctaccaacctccagagcggcaacacacaggcagccaccacagatgtcaacacacaaggcgttcttccaggcatggtctggcagggcagagacgtgtacctgcaaggacccatctgggcaaagattcctcacacggacggacactttcacccttctcccctcatgggaggatttggactcaaacaccctcctccgcaaatcctcatcaagaatacccccgtacctgcgaatccttcgaccacattcagcgcggcaaagtttgcttctttcatcacacagtactctacggggcaggtcagcgtggagattgagtgggagctgcagaaggagaacagcaaacgctggaaccccgaaatccagtacacttccaactacaacaagtctgttaatgtggactttactgtggacactaatggtgtgtattcagagcctcgccccattggcacaagatacctgactcgtaatctgtaa

SEQ ID NO: 3260 - DNA, 2208 bp, Artificial Sequence
  source: /note="Description of Artificial Sequence: Synthetic polynucleotide"
atggctgccgatggttatcttccagattggctcgagggcactctctctgaaggaataagacagtggtggaagctcaaacctggcccaccaccaccaaagcccgcagagcggcatcaggacgacagcaggggtcttgtgcttcctgggtacaagtacctcggacccttcaacggactcgacaagggagagccggtcaacgaggcagacgccgcggccctcgagcacgacaaggcctacgaccggcagctcgacagcggagacaacccgtacctcaagtacaaccacgccgacgcggagtttcaggagcgtcttaaagaagatacgtcttttgggggcaacctcggacgagcagtcttccaggcgaaaaagagggttcttgaacctctgggcctggttgaggaacctgttaagacggctccgggaaaaaagaggccggtagagcattctcctgcggagccagactcctcctcgggaaccggaaaggcgggccagcagcctgcgagaaagagattgaatttcggtcagactggagacgcagactccgtacctgacccccagcctctcggacagccaccagcagccccctctggtctgggaactaatacgatggctacaggcagtggcgcaccaatggcagacaataacgagggcgccgacggagtgggtaattcctcgggaaattggcattgcgattccacatggatgggcgacagagtcatcaccaccagcacccgaacctgggccctgcccacctacaacaaccacctctacaagcaaatctccagccaatctggagcctcaagcgacaaccactactttggctacagcaccccttgggggtattttgacttcaacagattccactgtcacttctccccacgtgactggcaaagactcatcaacaacaactggggattccgacccaagagactcaacttcaagctctttaacattcaagtcaaagaggtcacgcagaatgacggtacgacgacgattgccaataaccttaccagcacggttcaagtctttactgactcggagtaccagctcccgtacgtcctcggctcggcgcatcaaggatgcctcccgccgtttccagcagacgtcttcatggtgccacagtatggatacctcaccctgaacaacgggagtcaggcggtaggacgctcttccttttactgcctggagtactttccttctcagatgctgcgtaccggaaacaactttaccttcagctacacctttgaggacgttcctttccacagcagctacgctcacagccagagtttggaccggctgatgaatcctctgatcgaccagtatctgtattacttgagcaaaacaaacgctccaagcggaaccaccacgatgtccaggcttcagttttctcaggccggagcgagtgacattcgggaccagtctaggaactggcttcctggaccctgttaccgccagcagcgagtatcaaaaacagctgcggataacaacaacagtgattattcgtggactggagctaccaagtaccacctcaatggaagagactctctggtgaatccgggcccagctatggccagccacaaggacgatgaagaaaaatattttcctcagagcggggttctcatctttggaaaacaagactcgggaaaaactaatgtggacattgaaaaggtcatgattacagacgaagaggaaatcaggaccaccaatcccgtggctacggagcagtatggttctgtatctaccaacctccagagcggcaacacacaggcagccaccacagatgtcaacacacaaggcgttcttccaggcatggtctggcaggacagagacgtgtacctgcaaggacccatctgggcaaagattcctcacacggacggacactttcacccttctcccctcatgggaggatttggactcaaacaccctcctccgcaaatcctcatcaagaatacccccgtacctgcgaatccttcgaccacattcagcgcggcaaagcttgcttctttcatcacacagtactctacggggcaggtcagcgtggagattgagtgggagctgcagaaggagaacagcaaacgctggaaccccgaaatccagtacacttccaactacaacaagtctgttaatgtggactttactgtggacactaatggtgtgtattcagagcctcgccccattggcacaagatacctgactcgtaatctgtaa

SEQ ID NO: 3261 - DNA, 2208 bp, Artificial Sequence
  source: /note="Description of Artificial Sequence: Synthetic polynucleotide"
atggctgccgatggttatcttccagattggctcgaggacactctctctgaaggaataagacagtggtggaagctcaaacctggcccaccaccaccaaagcccgcagagcggcatcaggacgacagcaggggtcttgtgcttcctgggtacaagtacctcggacccttcaacggactcgacaagggagagccggtcaacgaggcagacgtcgcggccctcgagcacgacaaggcctacgaccggcagctcgacagcggagacaacccgtacctcaagtacaaccacgccgacgcggagtttcaggagcgtcttaaagaagatacgtcttttgggggcaacctcggacgagcagtcttccaggcgaaaaagagggttcttgaacctctgggcctggttgaggaacctgttaagacggctccgggaaaaaagaggccggtagagcattctcctgcggagccagactcctcctcgggaaccggaaaggcgggccagcagcctgcgagaaagagattgaatttcggtcagactggagacgcagactccgtacctgacccccagcctctcggacagccaccagcagccccctctggtctgggaactaatacgatggctacaggcagtggcgcaccaatggcagacaataacgagggcgccgacggagtgggtaattcctcgggaaattggcattgcgattccacatggatgggcgacagagtcatcaccaccagcacccgaacctgggccctgcccacctacaacaaccacctctacaagcaaatctccagccaatctggagcctcaaacgacaaccactactttggctacagcaccccttgggggtattttgacttcaacagattccactgtcacttctccccacgtgactggcaaagactcatcaacaacaactggggattccgacccaagagacccaacttcaagctctttaacattcaagtcaaagaggtcacgcagaatgacggtacgacgacgattgccaataaccttaccagcacggttcaagtctttactgactcggagtaccagctcccgtacgtcctcggctcggcgcatcaaggatgcctcccgccgtttccagcagacgtcttcatggtgccacagtatggatacctcaccctgaacaacgggagtcaggcggtaggacgctcttccttttactgcctggagtactttccttctcagatgctgcgtaccggaaacaactttaccttcagctacacctttgaggacgttcctttccacagcagctacgctcacagccagagtttggaccggctgatgaatcctctgatcgaccagtatctgtattacttgagcaaaacaaacgctccaagcggaaccaccacgatgtccaggcttcagttttctcaggccggagcgagtgacattcgggaccagtctaggaactggcttcctggaccctgttaccgccagcagcgagtatcaaaaacagctgcggataacaacaacagtgattattcgtggactggagctaccaagtaccacctcaatggaagagactctctggtgaatccgggcccagctatggccagccacaaggacgatgaagaaaaatattttcctcagagcggggttctcatctttggaaaacaagactcgggaaaaactaatgtggacattgaaaaggtcatgattacagacgaagaggaaatcaggaccaccaatcccgtggctacggagcagtatggttctgtatctaccaacctccagagcggcaacacacaggcagccaccacagatgtcaacacacaaggcgttcttccaggcatggtctggcaggacagagacgtgtacctgcaaggacccatctgggcaaagattcctcacacggacggacactttcacccttctcccctcatgggaggatttggactcaaacaccctcctccgcaaatcctcatcaagaatacccccgtacctgcgaatccttcgaccacattcagcgcggcaaagtttgcttctttcatcacacagtactctacggggcaggtcagcgtggagattgagtgggagctgcagaaggagaacagcaaacgctggaaccccgaaatccagtacacttccaactacaacaagtctgttaatgtggactttactgtggacactaatggtgtgtattcagagcctcgccccattggcacaagatacctgactcgtaatctgtaa

SEQ ID NO: 3262 - DNA, 2208 bp, Artificial Sequence
  source: /note="Description of Artificial Sequence: Synthetic polynucleotide"
atggctgccgatggttatcttccagattggctcgaggacactctctctgaaggaataagacagtggtggaagctcaaacctggcccaccaccaccaaagcccgcagagcggcatcaggacgacagcaggggtcttgagcttcctgggtacaagtacctcggacccttcaacggactcgacaagggagagccggtcaacgaggcagacgccgcggccctcgagcacgacaaggcctacgaccggcagctcgacagcggagacaacccgtacctcaagtacaaccacgccgacgcggagtttcaggagcgtcttaaagaagatacgtcttttgggggcaacctcggacgagcagtcttccaggcgaaaaagagggttcttgaacctctgggcctggttgaggaacctgttaagacggctccgggaaaaaagaggccggtagagcattctcctgcggagccagactcctcctcgggaaccggaaaggcgggccagcagcctgcgagaaagagattgaatttcggtcagactggagacgcagactccgtacctgacccccagcctctcggacagccaccagcagccccctctggtctgggaactaatacgatggctacaggcagtggcgcaccaatggcagacaataacgagggcgccgacggagtgggtaattcctcgggaaattggcattgcgattccacatggatgggcgacagagtcatcaccaccagcacccgaacctgggccctgcccacctacaacaaccacctctacaagcaaatctccagccaatctggagcctcaaacgacaaccactactttggctacagcaccccttgggggtattttgacttcaacagattccactgtcacttctccccacgtgactggcaaagactcatcaacaacaactggggattccgacccaagagactcaacttcaagctctttaacattcaagtcaaagaggtcacgcagaatgacggtacgacgacgattgccaataaccttaccagcacggttcaagtctttactgactcggagtaccagctcccgtacgtcctcggctcggcgcatcaaggatgcctcccgccgtttccagcagacgtcttcatggtgccacagtatggatacctcaccctgaacaacgggagtcaggcggtaggacgctcttccttttactgcctggagtactttccttctcagatgctgcgtaccggaaacaactttaccttcagctacacctttgaggacgttcctttccacagcagctacgctcacagccagagtttggaccggctgatgaatcctctgatcgaccagtatctgtattacttgagcaaaacaaacgctccaagcggaaccaccacgatgtccaggcttcagttttctcaggccggagcgagtgacattcgggaccagtctaggaactggcttcctggaccctgttaccgccagcagcgagtatcaaaaacagctgcggataacaacaacagtgattattcgtggactggagctaccaagtaccacctcaatggaagagactctctggtgaatccgggcccagctatggccagccacaaggacgatgaagaaaaatattttcctcagagcggggttctcatctttggaaaacaagactcgggaaaaactaatgtggacattgaaaaggtcatgattacagacgaagaggaaatcaggaccaccaatcccgtggctacggagcagtatggttctgtatctaccaacctccagagcggcaacacacaggcagccaccacagatgtcaacacacaaggcgttcttccaggcatggtctggcaggacagagacgtgtacctgcaaggacccatctgggcaaagattcctcacacggacggacactttcacccttctcccctcatgggaggatttggactcaaacaccctcctccgcaaatcctcatcaagaatacccccgtacctgcgaatccttcgaccacattcagcgcggcaaagtttgcttctttcatcacacagtactctacggggcaggtcagcgtggagattgagtgggagctgcagaaggagaacagcaaacgctggaaccccgaaatccagtacacttccaactacaacaagtctgttaatgtggactttactgtggacactaatggtgtgtattcagagcctcgccccattggcacaagatacctgactcgtaatctgtaa

SEQ ID NO: 3263 - DNA, 2208 bp, Artificial Sequence
  source: /note="Description of Artificial Sequence: Synthetic polynucleotide"
atggctgccgatggttatcttccagattggctcgaggacaccctctctgagggaataagacagtggtggaagctcaaacctggcccaccaccaccaaagcccgcagagcggcatcaggacgacagcaggggtcttgtgcttcctgggtacaagtacctcggacccttcaacggactcgacaagggagagccggtcaacgaggcagacgccgcggccctcgagcacgacaaggcctacgaccggcagctcgacagcggagacaacccgtacctcaagtacaaccacgccgacgcggagtttcaggagcgtcttaaagaagatacgtcttttgggggcaacctcggacgagcagtcttccaggcgaaaaagagggttcttgaacctctgggcctggttgaggaacctgttaagacggctccgggaaaaaagaggccggtagagcattctcctgcggagccagactcctcctcgggaaccggaaaggcgggccagcagcctgcgagaaagagattgaatttcggtcagactggagacgcagactccgtacctgacccccagcctctcggacagccaccagcagccccctctggtctgggaactaatacgatggctacaggcagtggcgcaccaatggcagacaataacgagggcgccgacggagtgggtaattcctcgggaaattggcattgcgattccacatggatgggcgacagagtcatcaccaccagcacccgaacctgggccctgcccacctacaacaaccacctctacaagcaaatctccagccaatctggagcctcaaacgacaaccactactttggctacagcaccccttgggggtattttgacttcaacagattccactgtcacttctccccacgtgactggcaaagactcatcaacaacaactggggattccgacccaagagactcaacttcaagctctttaacattcaagtcaaagaggtcacgcagaatgacggtatgacgacgattgccaataaccttaccagcacggttcaagtctttactgactcggagtaccagctcccgtacgtcctcggctcggcgcatcaaggatgcctcccgccgtttccagcagacgtcttcatggtgccacagtatggatacctcaccctgaacaacgggagtcaggcggtaggacgctcttccttttactgcctggagtactttccttctcagatgctgcgtaccggaaacaactttaccttcagctacacctttgaggacgttcctttccacagcagctacgctcacagccagagtttggaccggctgatgaatcctctgatcgaccagtatctgtattacttgagcaaaacaaacgctccaagcggaaccaccacgatgtccaggcttcagttttctcaggccggagcgagtgacattcgggaccagtctaggaactggcttcctggaccctgttaccgccagcagcgagtatcaaaaacagctgcggataacaacaacagtgattattcgtggactggagctaccaagtaccacctcaatggaagagactctctggtgaatccgggcccagctatggccagccacaaggacgatgaagaaaaatattttcctcagagcggggttctcatctttggaaaacaagactcgggaaaaactaatgtggacattgaaaaggtcatgattacagacgaagaggaaatcaggaccaccaatcccgtggctacggagcagtatggttctgtatctaccaacctccagagcggcaacacacaggcagccaccacagatgtcaacacacaaggcgttcttccaggcatggtctggcaggacagagacgtgtacctgcaaggacccatctgggcaaagattcctcacacggacggacactttcacccttctcccctcatgggaggatttggactcaaacaccctcctccgcaaatcctcatcaagaatacccccgtacctgcgaatccttcgaccacattcagcgcggcaaagtttgcttctttcatcacacagtactctacggggcaggtcagcgtggagattgagtgggagctgcagaaggagaacagcaaacgctggaaccccgaaatccagtacacttccaactacaacaagtctgttaatgtggactttactgtggacactaatggtgtgtattcagagcctcgccccattggcacaagatacctgactcgtaatctgtaa

SEQ ID NO: 3264 - DNA, 2208 bp, Artificial Sequence
  source: /note="Description of Artificial Sequence: Synthetic polynucleotide"
atggctgccgatggttatcttccagattggctcgaggacactctctctgaaggaataagacagtggtggaagctcaaacctggcccaccaccactaaagcccgcagagcggcatcaggacgacagcaggggtcttgtgcttcctgggtacaagtacctcggacccttcaacggactcgacaagggagagccggtcaacgaggcagacgccgcggccctcgagcacgacaaggcctacgaccggcagctcgacagcggagacaacccgtacctcaagtacaaccacgccgacgcggagtttcaggagcgtcttaaagaagatacgtcttttgggggcaacctcggacgagcagtcttccaggcgaaaaagagggttcttgaacctctgggcctggttgaggaacctgttaagacggctccgggaaaaaagaggccggtagagcattctcctgcggagccagactcctcctcgggaaccggaaaggcgggccagcagcctgcgagaaagagattgaatttcggtcagactggagacgcagactccgtacctgacccccagcctctcggacagccaccagcagccccctctggtctgggaactaatacgatggctacaggcagtggcgcaccaatggcagacaataacgagggcgccgacggagtgggtaattcctcgggaaattggcattgcgattccacatggatgggcgacagagtcatcaccaccagcacccgaacctgggccctgcccacctacaacaaccacctctacaagcaaatctccagccaatctggagcctcaaacgacaaccactactttggctacagcaccccttgggggtattttgacttcaacagattccactgtcacttctccccacgtgactggcaaagactcatcaacaacaactggggattccgacccaagagactcaacttcaagctctttaacattcaagtcaaagaggtcacgcagaatgacggtacgacgacgattgccaataaccttaccagcacggttcaagtctttactgactcggagtaccagctcccgtacgtcctcggctcggcgcatcaaggatgcctcccgccgtttccagcagacgtcttcatggtgccacagtatggatacctcaccctgaacaacgggagtcaggcggtaggacgctcttccttttactgcctggagtactttccttctcagatgctgcgtaccggaaacaactttaccttcagctacacctttgaggacgttcctttccacagcagctacgctcacagccagagtttggaccggctgatgaatcctctgatcgaccagtatctgtattacttgagcaaaacaaacgctccaagcggaaccaccacgatgtccaggcttcagttttctcaggccggagcgagtgacattcgggaccagtctaggaactggcttcctggaccctgttaccgccagcagcgagtatcaaaaacagctgcggataacaacaacagtgattattcgtggactggagctaccaagtaccacctcaatggaagagactctctggtgaatccgggcccagctatggccagccacaaggacgatgaagaaaaatattttcctcagagcggggttctcatctttggaaaacaagactcgggaaaaactaatgtggacattgaaaaggtcatgattacagacgaagaggaaatcaggaccaccaatcccgtggctacggagcagtatggttctgtatctaccaacctccagagcggcaacacacaggcagccaccacagatgtcaacacacaaggcgttcctccaggcatggtctggcaggacagagacgtgtacctgcaaggacccatctgggcaaagattcctcacacggacggacactttcacccttctcccctcatgggaggatttggactcaaacaccctcctccgcaaatcctcatcaagaatacccccgtacctgcgaatccttcgaccacattcagcgcggcaaagtttgcttctttcatcacacagtactctacggggcaggtcagcgtggagattgagtgggagctgcagaaggagaacagcaaacgctggaaccccgaaatccagtacacttccaactacaacaagtctgttaatgtggactttactgtggacactaatggtgtgtattcagagcctcgccccattggcacaagatacctgactcgtaatctgtaa

SEQ ID NO: 3265 - DNA, 2208 bp, Artificial Sequence
  source: /note="Description of Artificial Sequence: Synthetic polynucleotide"
atggctgccgatggttatcttccagattggctcgaggacactctctctgaaggaataagacagtggtggaagctcaaacctggcccaccaccaccaaagcccgcagagcggcatcaggacgacagcaggggtcttgtgcttcctgggtacaagtacctcggacccttcaacggactcgacaagggagagccggtcaacgaggcagacgccgcggccctcgagcacgacaaggcctacgaccggcagctcgacagcggagacaacccgtacctcaagtacaaccacgccgacgcggagtttcaggagcgtcttaaagaagatacgtcttttgggggcaacctcggacgagcagtcttccaggcgaaaaagagggttcttgaacctctgggcctggttgaggaacctgttaagacggctccgggaaaaaagaggccggtagagcattctcctgcggagccagactcctcctcgggaaccggaaaggcgggccagcagcctgcgagaaagagattgaatttcggtcagactggagacgcagactccgtacctgacccccagcctctcggacagccaccagcagccccctctggtctgggaactaatacgatggctacaggcagtggcgcaccaatggcagacaataacgagggcgccgacggagtgggtaattcctcgggaaattggcattgcgattccacatggatgggcgacagagtcatcaccaccagcacccgaacctgggccctgcccacctacaacaaccacctctacaagcaaatctccagccaatctggagcctcaaacgacaaccactactttggctacagcaccccttgggggtattttgacttcaacagattccactgtcacttctccccacgtgactggcaaagactcatcaacaacaactggggattccgacccaagagactcaacttcaagctctttaacattcaagtcaaagaggtcacgcagaatgacggtacgacgacgattgccaataaccttaccagcacggttcaagtctttactgactcggagtaccagctcccgtacgtcctcggctcggcgcatcaaggatgcctcccgccgtttccagcagacgtcttcatggtgccacagtatggatacctcaccctgaacaacgggagtcaggcggtaggacgctcttccttttactgcctggagtactttccttctcagatgctgcgtaccggaaacaactttaccttcagctacacctttgaggacgttcctttccacagcagctacgctcacagccagagtttggaccggctgatgaatcctctgatcgaccagtatctgtattacttgagcaaaacaaacgctccaagcggaaccaccacgatgtccaggcttcagttttctcaggccggagcgagtgacattcgggaccagtctaggaactggcttcctggaccctgttaccgccagcagcgagtatcaaaaacagctgcggataacaacaacagtgattattcgtggactggagctaccaagtaccacctcaatggaagagactctctggtgaatccgggcccagctatggccagccacaaggacgatgaagaaaaatattttcctcagagcggggttctcatctttggaaaacaagactcgggaaaaaccaatgtggacattgaaaaggtcatgattacagacgaagaggaaatcaggaccaccaatcccgtggctacggagcagtatggttctgtatctaccaacctccagagcggcaacacacaggcagccaccacagatgtcaacacacaaggcgttcttccaggcatggcctggcaggacagagacgtgtacctgcaaggacccatctgggcaaagattcctcacacggacggacactttcacccttctcccctcatgggaggatttggactcaaacaccctcctccgcaaatcctcatcaagaatacccccgtacctgcgaatccttcgaccacactcagcgcggcaaagtttgcttctttcatcacacagtactctacggggcaggtcagcgtggagattgagtgggagctgcagaaggagaacagcaaacgctggaaccccgaaatccagtacacttccaactacaacaagtctgttaatgtggactttactgtggacactaatggtgtgtattcagagcctcgccccattggcacaagatacctgactcgtaatctgtaa

SEQ ID NO: 3266 - DNA, 2208 bp, Artificial Sequence
  source: /note="Description of Artificial Sequence: Synthetic polynucleotide"
atggctgccgatggttatcttccagattggctcgaggacactctctctgaaggaataagacagtggtggaagctcaaacctggcccaccaccaccaaagcccgcagagcggcatcaggacgacagcaggggtcttgtgcttcctgggtacaagtacctcggacccttcaacggactcgacaagggagagccggtcaacgaggcagacgccgcggccctcgagcacgacaaggcccacgaccggcagctcgacagcggagacaacccgtacctcaagtacaaccacgccgacgcggagtttcaggagcgtcttaaagaagatacgtcttttgggggcaacctcggacgagcagtcttccaggcgaaaaagagggttcttgaacctctgggcctggttgaggaacctgttaagacggctccgggaaaaaagaggccggtagagcattctcctgcggagccagactcctcctcgggaaccggaaaggcgggccagcagcctgcgagaaagagattgaatttcggtcagactggagacgcagactccgtacctgacccccagcctctcggacagccaccagcagccccctctggtctgggaactaatacgatggctacaggcagtggcgcaccaatggcagacaataacgagggcgccgacggagtgggtaattcctcgggaaattggcattgcgattccacatggatgggcgacagagtcatcaccaccagcacccgaacctgggccctgcccacctacaacaaccacctctacaagcaaatctccagccaatctggagcctcaaacgacaaccactactttggctacagcaccccttgggggtattttgacttcaacagattccactgtcacttctccccacgtgactggcaaagactcatcaacaacaactggggattccgacccaagagactcaacttcaagctctttaacattcaagtcaaagaggtcacgcagaatgacggtacgacgacgattgccaataaccttaccagcacggttcaagtctttactgactcggagtaccagctcccgtacgtcctcggctcggcgcatcaaggatgcctcccgccgtttccagcagacgtcttcatggtgccacagtatggatacctcaccctgaacaacgggagtcaggcggtaggacgctcttccttttactgcctggagtactttccttctcagatgctgcgtaccggaaacaactttaccttcagctacacctttgaggacgttcctttccacagcagctacgctcacagccagagtttggaccggctgatgaatcctctgatcgaccagtatctgtattacttgagcaaaacaaacgctccaagcggaaccaccacgatgtccaggcttcagttttctcaggccggagcgagtgacattcgggaccagtctaggaactggcttcctggaccctgttaccgccagcagcgagtatcaaaaacagctgcggataacaacaacagtgattattcgtggactggagctaccaagtaccacctcaatggaagagactctctggtgagtccgggcccagctatggccagccacaaggacgatgaagaaaaatattttcctcagagcggggttctcatctttggaaaacaagactcgggaaaaactaatgtggacattgaaaaggtcatgattacagacgaagaggaaatcaggaccaccaatcccgtggctacggagcagtatggttctgtatctaccaacctccagagcggcaacacacaggcagccaccacagatgtcaacacacaaggcgttcttccaggcatggtctggcaggacagagacgtgtacctgcaaggacccatctgggcaaagattcctcacacggacggacactttcacccttctcccctcatgggaggatttggactcaaacaccctcctccgcaaatcctcatcaagaatacccccgtacctgcgaatccttcgaccacattcagcgcggcaaagtttgcttctttcatcacacagtactctacggggcaggtcagcgtggagattgagtgggagctgcagaaggagaacagcaaacgctggaaccccgaaatccagtacacttccaactacaacaagtctgttaatgtggactttactgtggacactaatggtgtgtattcagagcctcgccccattggcacaagatacctgactcgtaatctgtaa

SEQ ID NO: 3267 - DNA, 2208 bp, Artificial Sequence
  source: /note="Description of Artificial Sequence: Synthetic polynucleotide"
atggctgccgatggttatcttccagattggctcgaggacactctctctgaaggaataagacagtggtggaagctcaaacctggcccaccaccactaaagcccgcagagcggcatcaggacgacagcaggggtcttgtgcttcctgggtacaagtacctcggacccttcaacggactcgacaagggagagccggtcaacgaggcagacgccgcggccctcgagcacgacaaggcctacgaccggcagctcgacagcggagacaacccgtacctcaagtacaaccacgccgacgcggagtttcaggagcgtcttaaagaagatacgtcttttgggggcaacctcggacgagcagtcttccaggcgaaaaagagggttcttgaacctctgggcctggttgaggaacctgttaagacggctccgggaaaaaagaggccggtagagcattctcctgcggagccagactcctcctcgggaaccggaaaggcgggccagcagcctgcgagaaagagattgaatttcggtcagactggagacgcagactccgtacctgacccccagcctctcggacagccaccagcagccccctctggtctgggaactaatacgatggctacaggcagtggcgcaccaatggcagacaataacgagggcgccgacggagtgggtaattcctcgggaaattggcattgcgattccacatggatgggcgacagagtcatcaccaccagcacccgaacctgggccctgcccacctacaacaaccacctctacaagcaaatctccagccaatctggagcctcaaacgacaaccactactttggctacagcaccccttgggggtattttgacttcaacagattccactgtcacttctccccacgtgactggcaaagactcatcaacaacaactggggattccgacccaagagactcaacttcaagctctttaacattcaagtcaaagaggtcacgcagaatgacggtacgacgacgattgccaataaccttaccagcacggttcaagtctttactgactcggagtaccagctcccgtacgtcctcggctcggcgcatcaaggatgcctcccgccgtttccagcagacgtcttcatggtgccacagtatggatacctcaccctgaacaacgggagtcaggcggtaggacgctcttccttttactgcctggagtactttccttctcagatgctgcgtaccggaaacaactttaccttcagctacacctttgaggacgttcctttccacagcagctacgctcacagccagagtttggaccggctgatgaatcctctgatcgaccagtatctgtattacttgagcaaaacaaacgctccaagcggaaccaccacgatgtccaggcttcagttttctcaggccggagcgagtgacattcgggaccagtctaggaactggcttcctggaccctgttaccgccagcagcgagtatcaaaaacagctgcggataacaacaacagtgattattcgtggactggagctaccaagtaccacctcaatggaagagactctctggtgaatccgggcccagctatggccagccacaaggacgatgaagaaaaatattttcctcagagcggggttctcatctttggaaaacaagactcgggaaaaactaatgtggacattgaaaaggtcatgattacagacgaagaggaaatcaggaccaccaatcccgtggctacggagcagtatggttctgtatctaccaacctccagagcggcaacacacaggcagccaccacagatgtcaacacacaaggcgttcttccaggcatggtctggcaggacagagacgtgtacctgcaaggacccatctgggcaaagattcctcacacggacggacactttcacccttctcccctcatgggaggatttggactcaaacaccctcctccgcaaatcctcatcaagaatacccccgtacctgcgaatccttcgaccacattcagcgcggcaaagtttgcttctttcatcacacagtactctacggggcaggtcagcgtggggattgagtgggagctgcagaaggagaacagcaaacgctggaaccccgaaatccagtacacttccaactacaacaagtctgttaatgtggactttactgtggacactaatggtgtgtattcagagcctcgccccattggcacaagatacctgactcgtaatctgtaa

SEQ ID NO: 3268 - DNA, 2208 bp, Artificial Sequence
  source: /note="Description of Artificial Sequence: Synthetic polynucleotide"
atggctgccgatggttatcttccagattggctcgaggacactctctctgaaggaataagacagtggtggaagctcaaacctggcccaccaccaccaaagcccgcagagcggcatcaggacgacagcaggggtcttgtgcttcctgggtacaagtacctcggacccttcaacggactcgacaagggagagccggtcaacgaggcagacgccgcggccctcgagcacgacaaggcctacgaccggcagctcgacagcggagacaacccgtacctcaagtacaaccacgccgacgcggagtttcaggagcgtcttaaagaagatacgtcttttgggggcaacctcggacgagcagtcttccaggcgaaaaagagggttcttgaacctctgggcctggttgaggaacctgttaagacggctccgggaaaaaagaggccggtagagcattctcctgcggagccagactcctcctcgggaaccggaaaggcgggccagcagcctgcgagaaagagattgaatttcggtcagactggagacgcagactccgtacctgacccccagcctctcggacagccaccagcagccccctctggtctgggaactaatacgatggctacaggcagtggcgcaccaatggcagacaataacgagggcgccgacggagtgggtaattcctcgggaaattggcattgcgactccacatggatgggcgacagagtcatcaccaccagcacccgaacctgggccctgcccacctacaacaaccacctctacaagcaaatctccagccaatctggagcctcaaacgacaaccactactttggctacagcaccccttgggggtattttgacttcaacagattccactgtcacttctccccacgtgactggcaaagactcatcaacaacaactggggattccgacccaagagactcaacttcaagctctttaacattcaagtcaaagaggtcacgcagaatgacggtacgacgacgattgccaataaccttaccagcacggttcaagtctttactgactcggagtaccagctcccgtacgtcctcggctcggcgcatcaaggatgcctcccgccgtttccagcagacgtcttcatggtgccacagtatggatacctcaccctgaacaacgggagtcaggcggtaggacgctcttccttttactgcctggagtactttccttctcagatgctgcgtaccggaaacaactttaccttcagctacacctttgaggacgttcctttccacagcagctacgctcacagccagagtttggaccggctgatgaatcctctgatcgaccagtatctgtattacttgagcaaaacaaacgctccaagcggaaccaccacgatgtccaggcttcagttttctcaggccggagcgagtgacattcgggaccagtctaggaactggcttcctggaccctgttaccgccagcagcgagtatcaaaaacagctgcggataacaacaacagtgattattcgtggactggagctaccaagtaccacctcaatggaagagactctctggtgaatccgggcccagctatggccagccacaaggacgatgaagaaaaatattttcctcagagcggggttctcatctttggaaaacaagactcgggaaaaactaatgtggacattgaaaaggtcatgattacagacgaagaggaaatcaggaccaccaatcccgtggctacggagcagtatggttctgtatctaccaacctccagagcggcaacacacaggcagccaccacagatgtcaacacacaaggcgttcttccaggcatggtctggcaggacagagacgtgtgcctgcaaggacccatttgggcaaagattcctcacacggacggacactttcacccttctcccctcatgggaggatttggactcaaacaccctcctccgcaaatcctcatcaagaatacccccgtacctgcgaatccttcgaccacattcagcgcggcaaagtttgcttctttcatcacacagtactctacggggcaggtcagcgtggagattgagtgggagctgcagaaggagaacagcaaacgttggaaccccgaaatccagtacacttccaactacaacaagtctgttaatgtggactttactgtggacactaatggtgtgtattcagagcctcgccccattggcacaagatacctgactcgtaatctgtaa

SEQ ID NO: 3269 - DNA, 2208 bp, Artificial Sequence
  source: /note="Description of Artificial Sequence: Synthetic polynucleotide"
atggctgccgatggttatcttccagattggctcgaggacactctctctgaaggaataagacagtggtggaagctcaaacctggcccaccaccaccaaagcccgcagagcggcatcaggacgacagcaggggtcttgtgcttcctgggtacaagtacctcggacccttcaacggactcgacaagggagagccggtcaacgaggcagacgccgcggccctcgagcacgacaaggcctacgaccggcagctcgacagcggagacaacccgtacctcaagtacaaccacgccgacgcggagtttcaggagcgtcttaaagaagatacgtcttttgggggcaacctcggacgagcagtcttccaggcgaaaaagagggttcttgaacctctgggcctggttgaggaacctgttaagacggctccgggaaaaaagaggccggtagagcattctcctgcggagccagactcctcctcgggaaccggaaaggcgggccagcagcctgcgagaaagagattgaatttcggtcagactggagacgcagactccgtacctgacccccagcctctcggacagccaccagcagccccctctggtctgggaactaatacgatggctacaggcagtggcgcaccaatggcagacaataacgagggcgccgacggagtgggtaattcctcgggaaattggcattgcgattccacatggatgggcgacagagtcatcaccaccagcacccgaacctgggccctgcccacctacaacaaccacctctacaagcaaatctccagccaatctggagcctcaaacgacaaccactactttggctacagcaccccttgggggtattttgacttcaacagattccactgtcacttctccccacgtgactggcaaagactcatcaacaacaactggggattccgacccaagagactcaacttcaagctctttaacattcaagtcaaagaggtcgcgcagaatgacggtacgacgacgattgccaataaccttaccagcacggttcaagtctttactgactcggagtaccagctcccgtacgtcctcggctcggcgcatcaaggatgcctcccgccgtttccagcagacgtcttcatggtgccacagtatggatacctcaccctgaacaacgggagtcaggcggtaggacgctcttccttttactgcctggagtactttccttctcagatgctgcgtaccggaaacaactttaccttcagctacacctttgaggacgttcctttccacagcagctacgctcacagccagagtttggaccggctgatgaatcctctgatcgaccagtatctgtattacttgagcaaaacaaacgctccaagcggaaccaccacgatgtccaggcttcagttttctcaggccggagcgagtgacattcgggaccagtctaggaactggcttcctggaccctgttaccgccagcagcgagtatcaaaaacagctgcggataacaacaacagtgattattcgtggactggagctaccaagtaccacctcaatggaagagactctctggtgaatccgggcccagctatggccagccacaaggacgatgaagaaaaatattttcctcagagcggggttctcatctttggaaaacaagactcgggaaaaactaatgtggacattgaaaaggtcatgattacagacgaagaggaaatcaggaccaccaatcccgtggctacggagcagtatggttctgtatctaccaacctccagagcggcaacacacaggcagccaccacagatgtcaacacacaaggcgttcttccaggcatggtctggcaggacagagacgtgtacctgcaaggacccatctgggcaaagattcctcacacggacggacactttcacccttctcccctcatgggaggatttggactcaaacaccctcctccgcaaatcctcatcaagaatacccccgtacctgcgaatccttcgaccacattcagcgcggcaaagtttgcttctttcatcacacagtactctacggggcaggtcagcgtggagattgagtgggagctgcagaaggagaacagcaaacgctggaaccccgaaatccagtacacttccaactacaacaagtctgttaatgtggactttactgtggacactaatggtgtgtattcagagcctcgccccattggcacaagatacctgactcgtaatctgtaa

SEQ ID NO: 3270 - DNA, 2208 bp, Artificial Sequence
  source: /note="Description of Artificial Sequence: Synthetic polynucleotide"
atggctgccgatggttatcttccagattggctcgaggacactctctctgaaggaataagacagtggtggaagctcaaacctggcccaccaccgccaaagcccgcagagcggcataaggacgacagcaggggtcttgtgcttcctgggtacaagtacctcggacccttcaacggactcgacaaaggagagccggtcaacgaggcagacgccgcggccctcgagcacgacaaggcctacgaccggcagctcgacagcggagacaacccgtacctcaagtacaaccacgccgacgcggagtttcaggagcgccttaaagaagatacgtcttttgggggcaacctcgcaagagcagtattccaggcgaaaaagagggttcttgaacctctgggcctggttgaggagcctgttaagacggctccgggaaaaaagaggccggtagagcactctcctgcggagccagattcctcctccggaactggaaagtcgggccaacagcctgcaagaaagagattgaattttggtcagactggagacgcagactccgtacctgacccccagcctctcggacagccaccagcagccccctctggtctgggaactaatacgatggcttcaggcagtggcgcaccaatggcagacaataacgagggcgccgacggagtgggtaattcctcgggaaattggcattgcgattccacatggatgggcgacagagtcatcaccaccagcacccgcacctgggctctgcccacctacaacaaccatctgtacaagcaaatttccagccagtctggagccagcaacgacaaccactactttggctacagcaccccttgggggtattttgacttcaacagattccactgccacttctccccacgtgactggcaaagactcatcaacaacaattggggattccggcccaaaagactcaacttcaagctctttaacattcaagtcaaggaggtcacgcagaatgacggtacgacgacgattgccaataaccttaccagcacggttcaggtgtttactgactcggagtaccagctcccgtacgtcctcggctcggcgcatcaaggatgcctcccgccgttcccagcagacgtcttcatggtgccacagtatggatacctcaccctgaacaacgggagtcaggcggtaggacgctcttcattttactgcccggagtaccttccttctcagatgctgcgtaccggaaacaactttaccttcagctacacctttgaggacgttccttttcacagcagctacgctcacagccagagtttggaccgtctcatgaatcctctcatcgaccagtacctgtattacttgagcagaacaaacactccaagcggaaccactacgcagtccaggcttcagttttctcaagccggagcgagtgacattcgggaccagtctaggaactggcttcctggaccctgttaccgccagcagcgagtatcaaagacagctgcggacaacaacaacagtgattactcgtggactggagctaccaagtatcacctcaatggaagagactctctggtgaatccgggcacagccatggccagccacaaggacgatgaagaaaagtattttcctcagagcggggttctcatcttcggaaaacaagactcgggaaaaactaatgtggacattgaaaaggtcatgattacagacgaagaggaaaccaggaccaccaatcccgtggctacggagcagtatggttctgtatctaccaatctccagagcggcaacacacaagcagctacctcagatgtcaacacacaaggcgttcttccaggcatggtctggcaggacagagacgtgtacctgcagggacccatctgggcaaagattccacacacggacggacattttcacccttctcctcttatgggaggatttggactgaagcaccctcccccgcagattctcatcaagaataccccggtacctgcgaatccttctaccgccttcagcgcggcaaagtttgcttccttcatcacacagtactccacggggcaggtcagcgtggagatcgagtgggagctgcagaaagagaacagcgaacgctggaaccccgagatccagtatacctccaactacaacaagtctgttaatgtggactttactgtggacactaatggcgtgtattcagagcctcgccccattggcacaaggtacctgactcgtaatctgtaa

SEQ ID NO: 3271 - DNA, 2208 bp, Artificial Sequence
  source: /note="Description of Artificial Sequence: Synthetic polynucleotide"
atggctgccgatggttatcttccagattggctcgaggacactctctctgaaggaataagacagtggtggaagctcaaacctggcccaccaccgccaaagcccgcagagcggcataaggacgacagcaggggtcttgtgcttcctgggtacaagtacctcggacccttcaacggactcgacaaaggagagccggtcaacgaggcagacgccgcggccctcgagcacgacaaggcctacgaccggcagctcgacagcggagacaacccgtacctcaagtacaaccacgccgacgcggagtttcaggagcgccttaaagaagatacgtcttttgggggcaacctcgcaagagcagtattccaggcgaaaaagagggttcttgaacctctgggcctggttgaggagcctgttaagacggctccgggaaaaaagaggccggtagagcactctcctgcggagccagattcctcctccggaactggaaagtcgggccaacagcctgcaagaaagagattgaattttggtcagactggagacgcagactccgtacctgacccccagcctctcggacagccaccagcagccccctctggtctgggaactaatacgatggcttcaggcagtggcgcaccaatggcagacaataacgagggcgccgacggagtgggtaattcctcgggaaattggcattgcgattccacatggatgggcgacagagtcatcaccaccagcacccgcacctgggctctgcccacctacaacaaccatctgtacaagcaaatttccagccagtctggagccagcaacgacaaccactactttggctacagcaccccttgggggtattttgacttcaacagattccactgccacttctccccacgtgactggcaaagactcatcaacaacaattggggattccggcccaaaagactcaacttcaagctctttaacattcaagtcaaggaggtcacgcagaatgacggtacgacgacgattgccaataaccttaccagcacggttcaggtgtttactgactcggagtaccagctcccgtacgtcctcggctcggcgcatcaaggatgcctcccgccgttcccagcagacgtcctcatggtgccacagtatggatacctcaccctgaacaacgggagtcaggcggtaggacgctcttcattttactgcccggagtaccttccttctcagatgctgcgtaccggaaacaactttaccttcagctacacctttgaggacgttccttttcacagcagctacgctcacagccagagtttggaccgtctcatgaatcctctcatcgaccagtacctgtattacttgagcagaacaaacactccaagcggaaccactacgcagtccaggcttcagttttctcaagccggagcgagtgacattcgggaccagtctaggaactggcttcctggaccctgttaccgccagcagcgagtatcaaagacagctgcggacaacaacaacagtgattactcgtggactggagctaccaagtatcacctcaatggaagagactctctggtgaatccgggcacagccatggccagccacaaggacgatgaagaaaagtattttcctcagagcggggttctcatcttcggaaaacaagactcgggaaaaactaatgtggacattgaaaaggtcatgattacagacgaagaggaaatcaggaccaccaatcccgtggctacggagcagtatggttctgtatctaccaatctccagagcggcaacacacaagcagctacctcagatgtcaacacacaaggcgttcttccaggcatggtctggcaggacagagacgtgtacctgcagggacccatctgggcaaagattccacacacggacggacattttcacccttctcctcttatgggaggatttggactgaagcaccctcccccgcagattctcatcaagaataccccggtacctgcgaatccttctaccgccttcagcgcggcaaagtttgcttccttcatcacacagtactccacggggcaggtcagcgtggagatcgagtgggagctgcagaaagagaacagcgaacgctggaaccccgagatccagtatacctccaactacaacaagtctgttaatgtggactttactgcggacactaatggcgtgtattcagagcctcgccccattggcacaaggtacctgactcgtaatctgtaa

SEQ ID NO: 3272 - DNA, 2208 bp, Artificial Sequence
  source: /note="Description of Artificial Sequence: Synthetic polynucleotide"
atggctgccgatggttatcttccagattggctcgaggacactctctctgaaggaataagacagtggtggaagctcaaacctggcccaccaccgccaaagcccgcagagcggcataaggacgacagcaggggtcttgtgcttcctgggtacaagtacctcggacccttcaacggactcgacaaaggagagccggtcaacgaggcagacgccgcggccctcgagcacgacaaggcctacgaccggcagctcgacagcggagacaacccgtacctcaagtacaaccacgccgacgcggagtttcaggagcgccttaaagaagatacgtcttttgggggcaacctcgcaagagcagtattccaggcgaaaaagagggttcttgaacctctgggcctggttgaggagcctgttaagacggctccgggaaaaaagaggccggtagagcactctcctgcggagccagattcctcctccggaactggaaagtcgggccaacagcctgcaagaaagagattgaattttggtcagactggagacgcagactccgtacctgacccccagcctctcggacagccaccagcagccccctctggtctgggaactaatacgatggcttcaggcagtggcgcaccaatggcagacaataacgagggcgccgacggagtgggtaattcctcgggaaattggcattgcgattccacatggatgggcgacagagtcatcaccaccagcacccgcgcctgggctctgcccacctacaacaaccatctgtacaagcaaatttccagccagtctggagccagcaacgacaaccactactttggctacagcaccccttgggggtattttgacttcaacagattccactgccacttctccccacgtgactggcaaagactcatcaacaacaattggggattccggcccaaaagactcaacttcaagctctttaacattcaagtcaaggaggtcacgcagaatgacggtacgacgacgattgccaataaccttaccagcacggttcaggtgtttactgactcggagtaccagctcccgtacgtcctcggctcggcgcatcaaggatgcctcccgccgttcccagcagacgtcctcatggtgccacagtatggatacctcaccctgaacaacgggagtcaggcggtaggacgctcttcattttactgcccggagtaccttccttctcagatgctgcgtaccggaaacaactttaccttcagctacacctttgaggacgttccttttcacagcagctacgctcacagccagagtttggaccgtctcatgaatcctctcatcgaccagtacctgtattacttgagcagaacaaacactccaagcggaaccactacgcagtccaggcttcagttttctcaagccggagcgagtgacattcgggaccagtctaggaactggcttcctggaccctgttaccgccagcagcgagtatcaaagacagctgcggacaacaacaacagtgattactcgtggactggagctaccaagtatcacctcaatggaagagactctctggtgaatccgggcacagccatggccagccacaaggacgatgaagaaaagtattttcctcagagcggggttctcatcttcggaaaacaagactcgggaaaaactaatgtggacattgaaaaggtcatgattacagacgaagaggaaatcaggaccaccaatcccgtggctacggagcagtatggttctgtatctaccaatctccagagcggcaacacacaagcagctacctcagatgtcaacacacaaggcgttcttccaggcatggtctggcaggacagagacgtgtacctgcagggacccatctgggcaaagattccacacacggacggacattttcacccttctcctcttatgggaggatttggactgaagcaccctcccccgcagattctcatcaagaataccccggtacctgcgaatccttctaccgccttcagcgcggcaaagtttgcttccttcatcacacagtactccacggggcaggtcagcgtggagatcgagtgggagctgcagaaagagaacagcgaacgctggaaccccgagatccagtatacctccaactacaacaagtctgttaatgtggactttactgtggacactaatggcgtgtattcagagcctcgccccattggcacaaggtacctgactcgtaatctgtaa

SEQ ID NO: 3273 - DNA, 2208 bp, Artificial Sequence
  source: /note="Description of Artificial Sequence: Synthetic polynucleotide"
atggctgccgatggttatcttccagattggctcgaggacactctctctgaaggaataagacagtggtggaagctcaaacctggcccaccaccgccaaagcccgcagagcggcataaggacgacagcaggggtcttgtgcttcctgggtacaagtacctcggacccttcaacggactcgacaaaggagagccggtcaacgaggcagacgccgcggccctcgagcacgacaaggcctacgaccggcagctcgacagcggagacaacccgtacctcaagtacaaccacgccgacgcggagtttcaggagcgccttaaagaagatacgtcttttgggggcaacctcgcaagagcagtattccaggcgaaaaagagggttcttgaacctctgggcctggttgaggagcctgttaagacggctccgggaaaaaagaggccggtagagcactctcctgcggagccagattcctcctccggaactggaaagtcgggccaacagcctgcaagaaagagattgaattttggtcagactggagacgcagactccgtacctgacccccagcctctcggacagccaccagcagccccctctggtctgggaactaatacgatggcttcaggcagtggcgcaccaatggcagacaataacgagggcgccgacggagtgggtaattcctcgggaaattggcattgcgattccacatggatgggcgacagagtcatcaccaccagcacccgcacctgggctctgcccacctacaacaaccatctgtacaagcaaatttccagccagtctggagccagcaacgacaaccactactttggctacagcaccccttgggggtattttgacttcaacagattccactgccacttctccccacgtgactggcaaagactcatcaacaacaattggggattccggcccaaaagactcaacttcaagctctttaacattcaagtcaaggaggtcacgcagaatgacggtacgacgacgattgccaataaccttaccagcacggttcaggtgtttactgactcggagtaccagctcccgtacgtcctcggctcggcgcatcaaggatgcctcccgccgttcccagcagacgtcttcatggtgccacagtatggatacctcaccctgaacaacgggagtcaggcggtaggacgctcttcattttactgcccggagtaccttccttctcagatgctgcgtaccggaaacaactttaccttcagctacacctttgaggacgttccttttcacagcagctacgctcacagccagagtttggaccgtctcatgaatcctctcatcgaccagtacctgtattacttgagcagaacaaacactccaagcggaaccactacgcagtccaggcttcagttttctcaagccggagcgagtgacattcgggaccagtctaggaactggcttcctggaccctgttaccgccagcagcgagtatcaaagacagctgcggacaacaacaacagtgattactcgtggactggagctaccaagtatcacctcaatggaagagactctctggtgaatccgggcacagccacggccagccacaaggacgatgaagaaaagtattttcctcagagcggggttctcatcttcggaaaacaagactcgggaaaaactaatgtggacattgaaaaggtcatgattacagacgaagaggaaatcaggaccaccaatcccgtggctacggagcagtatggttctgtatctaccaatctccagagcggcaacacacaagcagctacctcagatgtcaacacacaaggcgttcttccaggcatggtctggcaggacagagacgtgtacctgcagggacccatctgggcaaagattccacacacggacggacattttcacccttctcctcttatgggaggatttggactgaagcaccctcccccgcagattctcatcaagaataccccggtacctgcgaatccttctaccgccttcagcgcggcaaagtttgcttccttcatcacacagtactccacggggcaggtcagcgtggagatcgagtgggagctgcagaaagagaacagcgaacgctggaaccccgagatccagtatacctccaactacaacaagtctgttaatgtggactttactgtggacactaatggcgtgtattcagagcctcgccccattggcacaaggtacctgactcgtaatctgtaa

SEQ ID NO: 3274 - DNA, 2205 bp, Artificial Sequence
  source: /note="Description of Artificial Sequence: Synthetic polynucleotide"
atggctgccgatggttatcttccagattggctcgaggacactctctctgaaggaataagacagtggtggaagctcaaacctggcccaccaccgccaaagcccgcagagcggcataaggacgacagcaggggtcttgtgcttcctgggtacaagtacctcggacccttcaacggactcgacaaaggagagccggtcaacgaggcagacgccgcggccctcgagcacgacaaggcctacgaccggcagctcgacagcggagacaacccgtacctcaagtacaaccacgccgacgcggagtttcaggagcgccttaaagaagatacgtcttttgggggcaacctcgcaagagcagtattccaggcgaaaaagagggttcttgaacctctgggcctggttgaggagcctgttaagacggctccgggaaaaaagaggccggtagagcactctcctgcggagccagattcctcctccggaactggaaagtcgggccaacagcctgcaagaaagagattgaattttggtcagactggagacgcagactccgtacctgacccccagcctctcggacagccaccagcagccccctctggtctgggaactaatacgatggcttcaggcagtggcgcaccaatggcagacaataacgagggcgccgacggagtgggtaattcctcgggaaattggcattgcgattccacatggatgggcgacagagtcatcaccaccagcacccgcacctgggctctgcccacctacaacaaccatctgtacaagcaaatttccagccagtctggagccagcaacgacaaccactactttggctacagcaccccttgggggtattttgacttcaacagattccactgccacttctccccacgtgactggcaaagactcatcaacaacaattggggattccggcccaaaagactcaacttcaagctctttaacattcaagtcaaggaggtcacgcagaatgacggtacgacgacgattgccaataaccttaccagcacggttcaggtgtttactgactcggagtaccagctcccgtacgtcctcggctcggcgcatcaaggatgcctcccgccgttcccagcagacgtcttcatggtgccacagtatggatacctcaccctgaacaacgggagtcaggcggtaggacgctcttcattttactgcccggagtaccttccttctcagatgctgcgtaccggaaacaactttaccttcagctacacctttgaggacgttccttttcacagcagctacgctcacagccagagtttggaccgtctcatgaatcctctcatcgaccagtacctgtattacttgagcagaacaaacactccaagcggaaccactacgcagtccaggcttcagttttctcaagccggagcgagtgacattcgggaccagtctaggaactggcttcctggaccctgttaccgccagcagcgagtatcaaagacagctgcggacaacaacagtgattactcgtggactggagctaccaagtatcacctcaatggaagagactctctggtgaatccgggcacagccatggccagccacaaggacgatgaagaaaagtattttcctcagagcggggttctcatcttcggaaaacaagactcgggaaaaactaatgtggacattgaaaaggtcatgattacagacgaagaggaaatcaggaccaccaatcccgtggctacggagcagtatggttctgtatctaccaatctccagagcggcaacacacaagcagctacctcagatgtcaacacacaaggcgttcttccaggcatggtctggcaggacagagacgtgtacctgcagggacccatctgggcaaagattccacacacggacggacattttcacccttctcctcttatgggaggatttggactgaagcaccctcccccgcagattctcatcaagaataccccggtacctgcgaatccttctaccgccttcagcgcggcaaagtttgcttccttcatcacacagtactccacggggcaggtcagcgtggagatcgagtgggagctgcagaaagagaacagcgaacgctggaaccccgagatccagtatacctccaactacaacaagtctgttaatgtggactttactgtggacactaatggcgtgtattcagagcctcgccccattggcacaaggtacctgactcgtaatctgtaa

SEQ ID NO: 3275 - DNA, 2208 bp, Artificial Sequence
  source: /note="Description of Artificial Sequence: Synthetic polynucleotide"
atggctgccgatggttatcttccagattggctcgaggacactctctctgaaggaataagacagtggtggaagctcaaacctggcccaccaccgccaaagcccgcagagcggcataaggacgacagcaggggtcttgtgcttcctgggtacaagtacctcggacccttcaacggactcgacaaaggagagccggtcaacgaggcagacgccgcggccctcgagcacgacaaggcctacgaccggcagctcgacagcggagacaacccgtacctcaagtacaaccacgccgacgcggagtttcaggagcgccttaaagaagatacgtcttttgggggcaacctcgcaagagcagtattccaggcgaaaaagagggttcttgaccctctgggcctggttgaggagcctgttaagacggctccgggaaaaaagaggccggtagagcactctcctgcggagccagattcctcctccggaactggaaagtcgggccaacagcctgcaagaaagagattgaattttggtcagactggagacgcagactccgtacctgacccccagcctctcggacagccaccagcagccccctctggtctgggaactaatacgatggcttcaggcagtggcgcaccaatggcagacaataacgagggcgccgacggagtgggtaattcctcgggaaattggcattgcgattccacatggatgggcgacagagtcatcaccaccagcacccgcacctgggctctgcccacctacaacaaccatctgtacaagcaaatttccagccagtctggagccagcaacgacaaccactactttggctacagcaccccttgggggtattttgacttcaacagattccactgccacttctccccacgtgactggcaaagactcatcaacaacaattggggattccggcccaaaagactcaacttcaagctctttaacattcaagtcaaggaggtcacgcagaatgacggtacgacgacgattgccaataaccttaccagcacggttcaggtgtttactgactcggagtaccagctcccgtacgtcctcggctcggcgcatcaaggatgcctcccgccgttcccagcagacgtcttcatggtgccacagtatggatacctcaccctgaacaacgggagtcaggcggtaggacgctcttcattttactgcccggagtaccttccttctcagatgctgcgtaccggaaacaactttaccttcagctacacctttgaggacgttccttttcacagcagctacgctcacagccagagtttggaccgtctcatgaatcctctcatcgaccagtacctgtattacttgagcagaacaaacactccaagcggaaccactacgcagtccaggcttcagttttctcaagccggagcgagtgacattcgggaccagtctaggaactggcttcctggaccctgttaccgccagcagcgagtatcaaagacagctgcggacaacaacaacagtgattactcgtggactggagctaccaagtatcacctcaatggaagagactctctggtgaatccgggcacagccatggccagccacaaggacgatgaagaaaagtattttcctcagagcggggttctcatcttcggaaaacaagactcgggaaaaactaatgtggacattgaaaaggtcatgattacagacgaagaggaaatcaggaccaccaatcccgtggctacggagcagtatggttctgtatctaccaatctccagagcggcaacacacaagcagctacctcagatgtcaacacacaaggcgttcttccaggcatggtctggcaggacagagacgtgtacctgcagggacccatctgggcaaagattccacacacggacggacattttcacccttctcctcttatgggaggatttggactgaagcaccctcccccgcagattctcatcaagaataccccggtacctgcgaatccttctaccgccttcagcgcggcaaagtttgcttccttcatcacacagtactccacggggcaggtcagcgtggagatcgagtgggagctgcagaaagagaacagcgaacgctggaaccccgagatccagtatacctccaactacaacaagtctgttaatgtggactttactgtggacactaatggcgtgtattcagagcctcgccccattggcacaaggtacctgactcgtaatctgtaa

SEQ ID NO: 3276 - DNA, 2208 bp, Artificial Sequence
  source: /note="Description of Artificial Sequence: Synthetic polynucleotide"
atggctgccgatggttatcttccagattggctcgaggacactctctctgaaggaataagacagtggtggaagctcaaacctggcccaccaccgccaaagcccgcagagcggcataaggacgacagcaggggtcttgtgcttcctgggtacaagtacctcggacccttcaacggactcgacaaaggagagccggtcaacgaggcagacgccgcggccctcgagcacgacaaggcctacgaccggcagctcgacagcggagacaacccgtacctcaagtacaaccacgccgacgcggagtttcaggagcgccttaaagaagatacgtcttttgggggcaacctcgcaagagcagtattccaggcgaaaaagagggttcttgaacctctgggcctggttgaggagcctgttaagacggctccgggaaaaaagaggccggtagagcactctcctgcggagccagattcctcctccggaactggaaagtcgggccaacagcctgcaagaaagagattgaattttggtcagactggagacgcagactccgtacctgacccccagcctctcggacagccaccagcagccccctctggtctgggaactaatacgatggcttcaggcagtggcgcaccaatggcagacaataacgagggcgccgacggagtgggtaattcctcgggaaattggcattgcgattccacatggatgggcgacagagtcatcaccaccagcacccgcacctgggctctgcccacctacaacaaccatctgtacaagcaaatttccagccagtctggagccagcaacgacaaccactactttggctacagcaccccttgggggtattttgacttcaacagattccactgccacttctccccacgtgactggcaaagactcatcaacaacaattggggattccggcccaaaagactcaacttcaagctctttaacattcaagtcaaggaggtcacgcagaatgacggtacgacgacgattgccaataaccttaccagcacggttcaggtgtttactgactcggagtaccagctcccgtacgtcctcggctcggcgcatcaaggatgcctcccgccgttcccagcagacgtcttcatggtgccacagtatggatacctcaccctgaacaacgggagtcaggcggtaggacgctcttcattttactgcccggagtaccttccttctcagatgctgcgtaccggaaacaactttaccttcagctacacctttgaggacgttccttttcacagcagctacgctcacagccagagtttggaccgtctcatgaatcctctcatcgaccagtacctgtattacttgagcagaacaaacactccaagcggaaccactacgcagtccaggcttcagttttctcaagccggagcgagtgacattcgggaccagtctaggaactggcttcctggaccctgttaccgccagcagcgagtatcaaagacagctgcggacaacaacaacagtgattactcgtggactggagctaccaagtatcacctcaatggaagagactctctggtgaatccgggcacagccatggccagccacaaggacgatgaagaaaagtattttcctcagagcggggttctcatctttcggaaacaagactcgggaaaaactaatgtggacattgaaaaggtcatgattacagacgaagaggaaatcaggaccaccaatcccgtggctacggagcagtatggttctgtatctaccaatctccagagcggcaacacacaagcagctacctcagatgtcaacacacaaggcgttcttccaggcatggtctggcaggacagagacgtgtacctgcagggacccatctgggcaaagattccacacacggacggacattttcacccttctcctcttatgggaggatttggactgaagcaccctcccccgcagattctcatcaagaataccccggtacctgcgaatccttctaccgccttcagcgcggcaaagtttgcttccttcatcacacagtactccacggggcaggtcagcgtggagatcgagtgggagctgcagaaagagaacagcgaacgctggaaccccgagatccagtatacctccaactacaacaagtctgttaatgtggactttactgtggacactaatggcgtgtattcagagcctcgccccattggcacaaggtacctgactcgtaatctgtaa

SEQ ID NO: 3277 - DNA, 2208 bp, Artificial Sequence
  source: /note="Description of Artificial Sequence: Synthetic polynucleotide"
atggctgccgatggttatcttccagattggctcgaggacactctctctgaaggaataagacagtggtggaagctcaaacctggcccaccaccgccaaagcccgcagagcggcataaggacgacagcaggggtcttgtgcttcctgggtacaagtacctcggacccttcaacggactcgacaaaggagagccggtcaacgaggcagacgccgcggccctcgagcacgacaaggcctacgaccggcagctcgacagcggagacaacccgtacctcaagtacaaccacgccgacgcggagtttcaggagcgccttaaagaagatacgtcttttgggggcaacctcgcaagagcagtattccaggcgaaaaagagggttcttgaacctctgggcctggttgaggagcctgttaagacggctccgggaaaaaagaggccggtagagcactctcctgcggagccagattcctcctccggaactggaaagtcgggccaacagcctgcaagaaagagattgaattttggtcagactggagacgcagactccgtacctgacccccagcctctcggacagccaccagcagccccctctggtctgggaactaatacgatggcttcaggcagtggcgcaccaatggcagacaataacgagggcgccgacggagtgggtaattcctcgggaaattggcattgcgattccacatggatgggcgacagagtcatcaccaccagcacccgcacctgggctctgcccacctacaacaaccatctgtacaagcaaatttccagccagtctggagccagcaacgacaaccactactttggctacagcaccccttgggggtattttgacttcaacagattccactgccacttctccccacgtgactggcaaagactcatcaacaacaattggggattccggcccaaaagactcaacttcaagctctttaacattcaagtcaaggaggtcacgcagaatgacggtacgacgacgattgccaataaccttaccagcacggttcaggtgtttactgactcggagtaccagctcccgtacgtcctcggctcggcgcatcaaggatgcctcccgccgttcccagcagacgtcctcatggtgccacagtatggatacctcaccctgaacaacgggagtcaggcggtaggacgctcttcattttactgcccggagtaccttccttctcagatgctgcgtaccggaaacaactttaccttcagctacacctttgaggacgttccttttcacagcagctacgctcacagccagagtttggaccgtctcatgaatcctctcatcgaccagtacctgtattacttgagcagaacaaacactccaagcggaaccactacgcagtccaggcttcagttttctcaagccggagcgagtgacattcgggaccagtctaggaactggcttcctggaccctgttaccgccagcagcgagtatcaaagacagctgcggacaacaacaacagtgattactcgtggactggagctaccaagtatcacctcaatggaagagactctctggtgaatccgggcacagccatggccagccacaaggacgatgaagaaaagtattttcctcagagcggggttctcatcttccggaaacaagactcgggaaaaactaatgtggacattgaaaaggtcatgattacagacgaagaggaaatcaggaccaccaatcccgtggctacggagcagtatggttctgtatctaccaatctccagagcggcaacacacaagcagctacctcagatgtcaacacacaaggcgttcttccaggcatggtctggcaggacagagacgtgtacctgcagggacccatctgggcaaagattccacacacggacggacattttcacccttctcctcttatgggaggatttggactgaagcaccctcccccgcagattctcatcaagaataccccggtacctgcgaatccttctaccgccttcagcgcggcaaagtttgcttccttcatcacacagtactccacggggcaggtcagcgtggagatcgagtgggagctgcagaaagagaacagcgaacgctggaaccccgagatccagtatacctccaactacaacaagtctgttaatgtggactttactgtggacactaatggcgtgtattcagagcctcgccccattggcacaaggtacctgactcgtaatctgtaa

SEQ ID NO: 3278 - DNA, 2208 bp, Artificial Sequence
  source: /note="Description of Artificial Sequence: Synthetic polynucleotide"
atggctgccgatggttatcttccagattggctcgaggacactctctctgaaggaataagacagtggtggaagctcaaacctggcccaccaccgccaaagcccgcagagcggcataaggacgacagcaggggtcttgtgcttcctgggtacaagtacctcggacccttcaacggactcgacaaaggagagccggtcaacgaggcagacgccgcggccctcgagcacgacaaggcctacgaccggcagctcgacagcggagacaacccgtacctcaagtacaaccacgccgacgcggagtttcaggagcgccttaaagaagatacgtcttttgggggcaacctcgcaagagcagtattccaggcgaaaaagagggttcttgaacctctgggcctggttgaggagcctgttaagacggctccgggaaaaaagaggccggtagagcactctcctgcggagccagattcctcctccggaactggaaagtcgggccaacagcctgcaagaaagagattgaattttggtcagactggagacgcagactccgtacctgacccccagcctctcggacagccaccagcagccccctctggtctgggaactaatacgatggcttcaggcagtggcgcaccaatggcagacaataacgagggcgccgacggagtgggtaattcctcgggaaattggcattgcgattccacatggatgggcgacagagtcatcaccaccagcacccgcacctgggctctgcccacctacaacaaccatctgtacaagcaaatttccagccagtctggagccagcaacgacaaccactactttggctacagcaccccttgggggtattttgacttcaacagattccactgccacttctccccacgtgactggcaaagactcatcaacaacaattggggattccggcccaaaagactcaacttcaagctctttaacattcaagtcaaggaggtcacgcagaatgacggtacgacgacgattgccaataaccttaccagcacggttcaggtgtttactgactcggagtaccagctcccgtacgtcctcggctcggcgcatcaaggatgcctcccgccgttcccagcagacgtcctcatggtgccacagtatggatacctcaccctgaacaacgggagtcaggcggtaggacgctcttcattttactgcccggagtaccttccttctcagatgctgcgtaccggaaacaactttaccttcagctacacctttgaggacgttccttttcacagcagctacgctcacagccagagtttggaccgtctcatgaatcctctcatcgaccagtacctgtattacttgagcagaacaaacactccaagcggaaccactacgcagtccaggcttcagttttctcaagccggagcgagtgacattcgggaccagtctaggaactggcttcctggaccctgttaccgccagcagcgagtatcaaagacagctgcggacaacaacaacagtgattactcgtggactggagctaccaagtatcacctcaatggaagagactctctggtgaatccgggcacagccatggccagccacaaggacgatgaagaaaagtattttcctcagagcggggttctcatcttcggaaaacaagactcgggaaaaactaatgtggacattgaaaaggtcatgattacagacgaagaggaaatcaggaccaccaatcccgtggctacggagcagtatggttctgtatctaccaatctccagagcggcaacacacaagcagctacctcagatgtcaacacacaaggcgttcttccaggcatggtctggcaggacagagacgtgtacctgcagggacccatctgggcaaagattccacacacggacggacattttcacccttctcctcttatgggaggatttggactgaagcaccctcccccgcagattctcatcaagaataccccggtacctgcgaatccttctaccgccttcagcgcggcaaagtttgcttccttcatcacacagtactccacggggcaggtcagcgtggagatcgagtgggagctgcagaaagagaacagcgaacgctggaaccccgagatccagtatacctccaactacaacaagtctgttaatgtggactttactgtggacactaatggcgtgtattcagagcctcgccccattggcacaaggtacctgactcgtaatctgtaa

SEQ ID NO: 3279 - DNA, 2208 bp, Artificial Sequence
  source: /note="Description of Artificial Sequence: Synthetic polynucleotide"
atggctgccgatggttatcttccagattggctcgaggacactctctctgaaggaataagacagtggtggaagctcaaacctggcccaccaccgccaaagcccgcagagcggcataaggacgacagcaggggtcttgtgcttcctgggtacaagtacctcggacccttcaacggactcgacaaaggagagccggtcaacgaggcagacgccgcggccctcgagcacgacaaggcctacgaccggcagctcgacagcggagacaacccgtacctcaagtacaaccacgccgacgcggagtttcaggagcgccttaaagaagatacgtcttttgggggcaacctcgcaagagcagtattccaggcgaaaaagagggttcttgaacctctgggcctggttgaggagcctgttaagacggctccgggaaaaaagaggccggtagagcactctcctgcggagccagattcctcctccggaactggaaagtcgggccaacagcctgcaagaaagagattgaattttggtcagactggagacgcagactccgtacctgacccccagcctctcggacagccaccagcagccccctctggtctgggaactaatacgatggcttcaggcagtggcgcaccaatggcagacaataacgagggcgccgacggagtgggtaattcctcgggaaattggcattgcgattccacatggatgggcgacagagtcatcaccaccagcacccgcacctgggctctgcccacctacaacaaccatctgtacaagcaaatttccagccagtctggagccagcaacgacaaccactactttggctacagcaccccttgggggtattttgacttcaacagattccactgccacttctccccacgtgactggcaaagactcatcaacaacaattggggattccggcccaaaagactcaacttcaagctctttaacattcaagtcaaggaggtcacgcagaatgacggtacgacgacgattgccaataaccttaccagcacggttcaggtgtttactgactcggagtaccagctcccgtacgtcctcggctcggcgcatcaaggatgcctcccgccgttcccagcagacgtcttcatggtgccacagtatggatacctcaccctgaacaacgggagtcaggcggtaggacgctcttcattttactgcccggagtaccttccttctcagatgctgcgtaccggaaacaactttaccttcagctacacctttgaggacgttccttttcacagcagctacgctcacagccagagtttggaccgtctcatgaatcctctcatcgaccagtacctgtattacttgagcagaacaaacactccaagcggaaccactacgcagtccaggcttcagttttctcaagccggagcgagtgacattcgggaccagtctaggaactggcttcctggaccctgttaccgccagcagcgagtatcaaagacagctgcggacaacaacaacagtgattactcgtggactggagctaccaagtatcacctcaatggaagagactctctggtgaatccgggcacagccatggccagccacaaggacgatgaagaaaagtattttcctcagagcggggttctcatcttcggaaaacaagactcgggaaaaactaatgtggacattgaaaaggtcatgattacagacgaagaggaaatcaggaccaccaatcccgtggctacggagcagtatggttctgtatctaccaatctccagagcggcaacacacaagcagctacctcagatgtcaacacacaaggcgttcttccaggcatggtctggcaggacagagacgtgtacctgcagggacccatctgggcaaagattccacacacggacggacattttcacccttctcctcttatgggaggatttggactgaagcaccctcccccgcagattctcatcaagaataccccggtacctgcgaatccttctaccgccttcagcgcggcaaagtttgcttccttcatcacacagtactccacggggcaggtcagcgtggagatcgagtgggagctgcagaaagagaacagcgaacgctggaaccccgagatccagtatacctccaactacaacaagtctgttaatgtggactttactgtggacactaatggcgtgtattcagagcctcgccccattggcacaaggtacctgactcgtaatctgtaa

SEQ ID NO: 3280 - DNA, 2208 bp, Artificial Sequence
  source: /note="Description of Artificial Sequence: Synthetic polynucleotide"
atggctgccgatggttatcttccagattggctcgaggacactctctctgaaggaataagacagtggtggaagctcaaacctggcccaccaccgccaaagcccgcagagcggcataaggacgacagcaggggtcttgtgcttcctgggtacaagtacctcggacccttcaacggactcgacaaaggagagccggtcaacgaggcagacgccgcggccctcgagcacgacaaggcctacgaccggcagctcgacagcggagacaacccgtacctcaagtacaaccacgccgacgcggagtttcaggagcgccttaaagaagatacgtcttttgggggcaacctcgcaagagcagtattccaggcgaaaaagagggttcttgaacctctgggcctggttgaggagcctgttaagacggctccgggaaaaaagaggccggtagagcactctcctgcggagccagattcctcctccggaactggaaagtcgggccaacagcctgcaagaaagagattgaattttggtcagactggagacgcagactccgtacctgacccccagcctctcggacagccaccagcagccccctctggtctgggaactaatacgatggcttcaggcagtggcgcaccaatggcagacaataacgagggcgccgacggagtgggtaattcctcgggaaattggcattgcgattccacatggatgggcgacagagtcatcaccaccagcacccgcacctgggctctgcccacctacaacaaccatctgtacaagcaaatttccagccagtctggagccagcaacgacaaccactactttggctacagcaccccttgggggtattttgacttcaacagattccactgccacttctccccacgtgactggcaaagactcatcaacaacaattggggattccggcccaaaagactcaacttcaagctctttaacattcaagtcaaggaggtcacgcagaatgacggtacgacgacgattgccaataaccttaccagcacggttcaggtgtttactgactcggagtaccagctcccgtacgtcctcggctcggcgcatcaaggatgcctcccgccgttcccagcagacgtcctcatggtgccacagtatggatacctcaccctgaacaacgggagtcaggcggtaggacgctcttcattttactgcccggagtaccttccttctcagatgctgcgtaccggaaacaactttaccttcagctacacctttgaggacgttccttttcacagcagctacgctcacagccagagtttggaccgtctcatgaatcctctcatcgaccagtacctgtattacttgagcagaacaaacactccaagcggaaccactacgcagtccaggcttcagttttctcaagccggagcgagtgacattcgggaccagtctaggaactggcttcctggaccctgttaccgccagcagcgagtatcaaagacagctgcggacaacaacaacagtgattactcgtggactggagctaccaagtatcacctcaatggaagagactctctggtgaatccgggcacagccacggccagccacaaggacgatgaagaaaagtattttcctcagagcggggttctcatcttcggaaaacaagactcgggaaaaactaatgtggacattgaaaaggtcatgattacagacgaagaggaaatcaggaccaccaatcccgtggctacggagcagtatggttctgtatctaccaatctccagagcggcaacacacaagcagctacctcagatgtcaacacacaaggcgttcttccaggcatggtctggcaggacagagacgtgtacctgcagggacccatctgggcaaagattccacacacggacggacattttcacccttctcctcttatgggaggatttggactgaagcaccctcccccgcagattctcatcaagaataccccggtacctgcgaatccttctaccgccttcagcgcggcaaagtttgcttccttcatcacacagtactccacggggcaggtcagcgtggagatcgagtgggagctgcagaaagagaacagcgaacgctggaaccccgagatccagtatacctccaactacaacaagtctgttaatgtggactttactgtggacactaatggcgtgtattcagagcctcgccccattggcacaaggtacctgactcgtaatctgtaa

SEQ ID NO: 3281 - DNA, 2208 bp, Artificial Sequence
  source: /note="Description of Artificial Sequence: Synthetic polynucleotide"
atggctgccgatggttatcttccagattggctcgaggacactctctctgaaggaataagacagtggtggaagctcaaacctggcccaccaccgccaaagcccgcagagcggcataaggacgacagcaggggtcttgtgcttcctgggtacaagtacctcggacccttcaacggactcgacaaaggagagccggtcaacgaggcagacgccgcggccctcgagcacgacaaggcctacgaccggcagctcgacagcggagacaacccgtacctcaagtacaaccacgccgacgcggagtttcaggagcgccttaaagaagatacgtcttttgggggcaacctcgcaagagcagtattccaggcgaaaaagagggttcttgaacctctgggcctggttgaggagcctgttaagacggctccgggaaaaaagaggccggtagagcactctcctgcggagccagattcctcctccggaactggaaagtcgggccaacagcctgcaagaaagagattgaattttggtcagactggagacgcagactccgtacctgacccccagcctctcggacagccaccagcagccccctctggtctgggaactaatacgatggcttcaggcagtggcgcaccaatggcagacaataacgagggcgccgacggagtgggtaattcctcgggaaattggcattgcgattccacatggatgggcgacagagtcatcaccaccagcacccgcacctgggctctgcccacctacaacaaccatctgtacaagcaaatttccagccagtctggagccagcaacgacaaccactactttggctacagcaccccttgggggtattttgacttcaacagattccactgccacttctccccacgtgactggcaaagactcatcaacaacaattggggattccggcccaaaagactcaacttcaagctctttaacattcaagtcaaggaggtcacgcagaatgacggtacgacgacgattgccaataaccttaccagcacggttcaggtgtttactgactcggagtaccagctcccgtacgtcctcggctcggcgcatcaaggatgcctcccgccgttcccagcagacgtcttcatggtgccacagtatggatacctcaccctgaacaacgggagtcaggcggtaggacgctcttcattttactgcccggagtaccttccttctcagatgctgcgtaccggaaacaactttaccttcagctacacctttgaggacgttccttttcacagcagctacgctcacagccagagtttggaccgtctcatgaatcctctcatcgaccagtacctgtattacttgagcagaacaaacactccaagcggaaccactacgcagtccaggcttcagttttctcaagccggagcgagtgacattcgggaccagtctaggaactggcttcctggaccctgttaccgccagcagcgagtatcaaagacagctgcggacaacaacaacagtgattactcgtggactggagctaccaagtatcacctcaatggaagagactctctggtgaatccgggcacagccatggccagccacaaggacgatggagaaaagtattttcctcagagcggggttctcatcttcggaaaacaagactcgggaaaaactaatgtggacattgaaaaggtcatgattacagacgaagaggaaatcaggaccaccaatcccgtggctacggagcagtatggttctgtatctaccaatctccagagcggcaacacacaagcagctacctcagatgtcaacacacaaggcgttcttccaggcatggtctggcaggacagagacgtgtacctgcagggacccatctgggcaaagattccacacacggacggacattttcacccttctcctcttatgggaggatttggactgaagcaccctcccccgcagattctcatcaagaataccccggtacctgcgaatccttctaccgccttcagcgcggcaaagtttgcttccttcatcacacagtactccacggggcaggtcagcgtggagatcgagtgggagctgcagaaagagaacagcgaacgctggaaccccgagatccagtatacctccaactacaacaagtctgttaatgtggaccttactgtggacactaatggcgtgtattcagagcctcgccccattggcacaaggtacctgactcgtaatctgtaa

SEQ ID NO: 3282 - DNA, 2208 bp, Artificial Sequence
  source: /note="Description of Artificial Sequence: Synthetic polynucleotide"
atggctgccgatggttatcttccagattggctcgaggacactctctctgaaggaataagacagtggtggaagctcaaacctggcccaccaccgccaaagcccgcagagcggcataaggacgacagcaggggtcttgtgcttcctgggtacaagtacctcggacccttcaacggactcgacaaaggagagccggtcaacgaggcagacgccgcggccctcgagcacgacaaggcctacgaccggcagctcgacagcggagacaacccgtacctcaagtacaaccacgccgacgcggagtttcaggagcgccttaaagaagatacgtcttttgggggcaacctcgcaagagcagtattccaggcgaaaaagagggttcttgaacctctgggcctggttgaggagcctgttaagacggctccgggaaaaaaggggccggtagagcactctcctgcggagccagattcctcctccggaactggaaagtcgggccaacagcctgcaagaaagagattgaattttggtcagactggagacgcagactccgtacctgacccccagcctctcggacagccaccagcagccccctctggtctgggaactaatacgatggcttcaggcagtggcgcaccaatggcagacaataacgagggcgccgacggagtgggtaattcctcgggaaattggcattgcgattccacatggatgggcgacagagtcatcaccaccagcacccgcacctgggctctgcccacctacaacaaccatctgtacaagcaaatttccagccagtctggagccagcaacgacaaccactactttggctacagcaccccttgggggtattttgacttcaacagattccactgccacttctccccacgtgactggcaaagactcatcaacaacaattggggattccggcccaaaagactcaacttcaagctctttaacattcaagtcaaggaggtcacgcagaatgacggtacgacgacgattgccaataaccttaccagcacggttcaggtgtttactgactcggagtaccagctcccgtacgtcctcggctcggcgcatcaaggatgcctcccgccgttcccagcagacgtcttcatggtgccacagtatggatacctcaccctgaacaacgggagtcaggcggtaggacgctcttcattttactgcctggagtactttccttctcagatgctgcgtaccggaaacaactttaccttcagctacacctttgaggacgttccttttcacagcagctacgctcacagccagagtttggaccgtctcatgaatcctctcatcgaccagtacctgtattacttgagcagaacaaacactccaagcggaaccactacgcagtccaggcttcggttttctcaagccggagcgagtgacattcgggaccagtctaggaactggcttcctggaccctgttaccgccagcagcgagtatcaaagacagctgcggacaacaacaacagtgattactcgtggactggagctaccaagtatcacctcaatggaagagactctctggtgaatccgggcacagccatggccagccacaaggacgatgaagaaaagtattttcctcagagcggggttctcatcttcggaaaacaagactcgggaaaaactaatgtggacattgaaagggtcatgattacagacgaagaggaaatcaggaccaccaatcccgtggctacggagcagtatggttctgtatctaccaatctccagagcggcaacacacaagcagctacctcagatgtcaacacacaaggcgttcttccaggcatggtctggcaggacagagacgtgtacctgcagggacccatctgggcaaagattccacacacggacggacattttcacccttctcctcttatgggaggatttggactgaagcaccctcccccgcagattctcatcaagaataccccggtacctgcgaatccttctaccaccttcagcgcggcaaagtttgcttccttcatcacacagtactccacggggcaggtcagcgtggagatcgagtgggagctgcagaaagagaacagcaaacgctggaaccccgagatccagtatacctccaactacaacaagtctgttaatgtggactttactgtggacactaatggcgtgtattcagagcctcgccccattggcacaagatacctgactcgtaatctgtaa

SEQ ID NO: 3283 - DNA, 2208 bp, Artificial Sequence
  source: /note="Description of Artificial Sequence: Synthetic polynucleotide"
atggctgccgatggttatcttccagattggctcgaggacactctctctgaaggaataagacagtggtggaagctcaaacctggcccaccaccgccaaagcccgcagagcggcataaggacgacagcaggggtcttgtgcttcctgggtacaagtacctcggacccttcaacggactcgacaaaggagagccggtcaacgaggcagacgccgcggccctcgagcacgacaaggcctacgaccggcagctcgacagcggagacaacccgtacctcaagtacaaccacgccgacgcggagtttcaggagcgccttaaagaagatacgtcttttgggggcaacctcgcaagagcagtattccaggcgaaaaagagggttcttgaacctctgggcctggttgaggagcctgttaagacggctccgggaaaaaagaggccggtagagcactctcctgcggggccagattcctcctccggaactggaaagtcgggccaacagcctgcaagaaagagattgaattttggtcagactggagacgcagactccgtacctgacccccagcctctcggacagccaccagcagccccctctggtctgggaactaatacgatggcttcaggcagtggcgcaccaatggcagacaataacgagggcgccgacggagtgggtaattcctcgggaaattggcattgcgattccacatggatgggcgacagagtcatcaccaccagcacccgcacctgggctctgcccacctacaacaaccatctgtacaagcaaatttccagccagtctggagccagcaacgacaaccactactttggctacagcaccccttgggggtattttgacttcaacagattccactgccacttctccccacgtgactggcaaagactcatcaacaacaattggggattccggcccaaaagactcaacttcgagctctttaacattcaagtcaaggaggtcacgcagaatgacggtacgacgacgattgccaataaccttaccagcacggttcaggtgtttactgactcggagtaccagctcccgtacgtcctcggctcggcgcatcaaggatgcctcccgccgttcccagcagacgtcttcatggtgccacagtatggatacctcaccctgaacaacgggagtcaggcggtaggacgctcttcattttactgcctggagtactttccttctcagatgctgcgtaccggaaacaactttaccttcagctacacctttgaggacgttccttttcacagcagctacgctcacagccagagtttggaccgtctcatgaatcctctcatcgaccagtacctgtattacttgagcagaacaaacactccaagcggaaccactacgcagtccaggcttcagttttctcaagccggagcgagtgacattcgggaccagtctaggaactggcttcctggaccctgttaccgccagcagcgagtatcaaagacagctgcggacaacaacaacagtgattactcgtggactggagctaccaagtatcacctcaatggaagagactctctggtgaatccgggcacagccatggccagccacaaggacgatgaagaaaagtattttcctcagagcggggttctcatcttcggaaaacaagactcgggaaaaactaatgtggacattgaaaaggtcatgattacagacgaagaggaaatcaggaccaccaatcccgtggctacggagcagtatggttctgtatctaccaatctccagagcggcaacacacaagcagctacctcagatgtcaacacacaaggcgttcttccaggcatggtctggcaggacagagacgtgtacctgcagggacccatctgggcaaagattccacacacggacggacactttcacccttctcctcttatgggaggatttggactgaagcaccctcccccgcagattctcatcaagagtaccccggtacctgcgaatccttctaccaccttcagcgcggcaaagtttgcttccttcatcacacagtactccacggggcaggtcagcgtggagatcgagtgggagctgcagaaagagaacagcaaacgctggaaccccgagatccagtatacctccaactacaacaagtctgttaatgtggactttactgtggacactaatggcgtgtattcagatcctcgccccattggcacaagatacctgactcgtaatctgtaa

SEQ ID NO: 3284 - DNA, 2208 bp, Artificial Sequence
  source: /note="Description of Artificial Sequence: Synthetic polynucleotide"
atggctgccgatggttatcttccagattggctcgaggacactctctctgaaggaataagacagtggtggaagctcaaacctggcccaccaccaccaaggcccgcagagcggcatcaggacgacagcaggggtcttgtgcttcctgggtacaagtacctcggacccttcaacggactcgacaaaggagagccggtcaacgaggcagacgctgcggccctcgagcacgacaaggcctacgaccggcagctcgacagcggagacaacccgtacctcaagtacaaccacgccgacgcggagtttcaggagcgtcttaaagaagatacgtcttttgggggcaacctcggacgagcagtcttccaggcgaaaaagagggttcttgaacctctgggcctggttgaggaacctgttaagacggctccgggaaaaaagaggccggtagagcactctcctgcggagccagactcctcctcgggaaccggaaaagcgggccagcagcctgcaagaaagagattgaatttcggtcagactggagacgcagactccgtacctgacccccagcctctcggacagccaccagcagcccccacaagtttgggatctactacaatggctacaggcagtggcgcaccaatggcagacaataacgagggtgccgatggagtgggtaattcctcaggaaattggcattgcgattcccaatggctgggcgacagagtcatcaccaccagcacccgaacctgggccctgcccacctacaacaaccacctctacaagcaaatctccagccaatcaggagcatcgaacgacaaccactactttggctacagcaccccttgggggtattttgacttcaacagattccactgtcacttctccccacgtgactggcaaagactcatcaacaacaactggggattccgacccaagagactcaacttcaagctctttaacattcaagtcaaagaggtcacgcagaatgacggtacgacgacgattgccaataaccttaccagcacggttcaggtgtttactgactcggagtaccagctcccgtacgtcctcggctcggcgcatcaaggatgcctcccgccgtttccagcggacgtcttcatggtcccacagtatggatacctcaccctgaacaacgggagtcaggcggtaggacgctcttcattttactgcctggagtactttccttctcagatgctgcgtaccggaaacaactttaccttcagctacacctttgaggacgttccttttcacagcagctacgctcacagccagagtttggaccgtctcatgaatcctctcatcgaccagtacctgtattacttgagcagaacaaacactccaagcggaaccactacgcagtccaggcttcggttttctcaagccggagcgagtgacattcgggaccagtctaggaactggcttcctggaccctgttaccgccagcagcgagtatcaaagacagctgcggacaacaacaacagtgattactcgtggactggagctaccaagtatcacctcaatggaagagactctctggtgaatccgggcacagccatggccagccacaaggacgatgaagaaaagtattttcctcagagcggggttctcatcttcggaaaacaagactcgggaaaaactaatgtggacattgaaagggtcatgattacagacgaagaggaaatcaggaccaccaatcccgtggctacggagcagtatggttctgtatctaccaatctccagagcggcaacacacaagcagctacctcagatgtcaacacacaaggcgttcttccaggcatggtctggcaggacagagacgtgtacctgcagggacccatctgggcaaagattccacacacggacggacattttcacccttctcctcttatgggaggatttggactgaagcaccctcccccgcagattctcatcaagaataccccggtacctgcgaatccttctaccaccttcagcgcggcaaagtttgcttccttcatcacacagtactccacggggcaggtcagcgtggagatcgagtgggagctgcagaaagagaacagcaaacgctggaaccccgagatccagtatacctccaactacaacaagtctgttaatgtggactttactgtggacactaatggcgtgtattcagagcctcgccccattggcacaagatacctgactcgtaatctgtaa

SEQ ID NO: 3285 - DNA, 2208 bp, Artificial Sequence
  source: /note="Description of Artificial Sequence: Synthetic polynucleotide"
atggctgccgatggttatcttccagattggctcgaggacactctctctgaaggaataagacagtggtggaagctcaaacctggcccaccaccaccaaggcccgcagagcggcatcaggacgacagcaggggtcttgtgcttcctgggtacaagtacctcggacccttcaacggactcgacaaaggagagccggtcaacgaggcagacgctgcggccctcgagcacgacaaggcctacgaccggcagctcgacagcggagacaacccgtacctcaagtacaaccacgccgacgcggagtttcaggagcgtcttaaagaagatacgtcttttgggggcaacctcggacgagcagtcttccaggcgaaaaagagggttcttgaacctctgggcctggttgaggaacctgttaagacggctccgggaaaaaagaggccggtagagcactctcctgcggagccagactcctcctcgggaaccggaaaagcgggccagcagcctgcaagaaagagattgaatttcggtcagactggagacgcagactccgtacctgacccccagcctctcggacagccaccagcagccccctctggtctgggaactaatacgatggcttcaggcagtggcgcaccaatggcagacaataacgagggcgccgacggagtgggtaattcctcgggaaattggcattgcgattccacatggatgggcgacagagtcatcaccaccagcacccgcacctgggctctgcccacctacaacaaccatctgtacaagcaaatttccagccagtctggagccagcaacgacaaccactactttggctacagcaccccttgggggtattttgacttcaacagattccactgccacttctccccacgtgactggcaaagactcatcaacaacaattggggattccggcccaaaagactcaacttcaagctctttaacattcaagtcaaggaggtcacgcagaatgacggtacgacgacgattgccaataaccttaccagcacggttcaggtgtttactgactcggagtaccagctcccgtacgtcctcggctcggcgcatcaaggatgcctcccgccgttcccagcagacgtcttcatggtgccacagtatggatacctcaccctgaacaacgggagtcaggcggtaggacgctcttcattttactgcctggagtactttccttctcagatgctgcgtaccggaaacaactttaccttcagctacacctttgaggacgttccttttcacagcagctacgctcacagccagagtttggaccgtctcatgaatcctctcatcgaccagtacctgtattacttgagcagaacaaacactccaagcggaaccactacgcagtccaggcttcggttttctcaagccggagcgagtgacattcgggaccagtctaggaactggcttcctggaccctgttaccgccagcagcgagtatcaaagacagctgcggacaacaacaacagtgattactcgtggactggagctaccaagtatcacctcaatggaagagactctctggtgaatccgggcacagccatggccagccacaaggacgatgaagaaaagtattttcctcagagcggggttctcatcttcggaaaacaagactcgggaaaaactaatgtggacattgaaagggtcatgattacagacgaagaggaaatcaggaccaccaatcccgtggctacggagcagtatggttctgtatctaccaatctccagagcggcaacacacaagcagctacctcagatgtcaacacacaaggcgttcttccaggcatggtctggcaggacagagacgtgtacctgcagggacccatctgggcaaagattccacacacggacggacattttcacccttctcctcttatgggaggatttggactgaagcaccctcccccgcagattctcatcaagaataccccggtacctgcgaatccttctaccaccttcagcgcggcaaagtttgcttccttcatcacacagtactccacggggcaggtcagcgtggagatcgagtgggagctgcagaaagagaacagcaaacgctggaaccccgagatccagtatacctccaactacaacaagtctgttaatgtggactttactgtggacactaatggcgtgtattcagagcctcgccccattggcacaagatacctgactcgtaatctgtaa

SEQ ID NO: 3286 - DNA, 2208 bp, Artificial Sequence
  source: /note="Description of Artificial Sequence: Synthetic polynucleotide"
atggctgccgatggttatcttccagattggctcgaggacactctctctgaaggaataagacagtggtggaagctcaaacctggcccaccaccgccaaagcccgcagagcggcataaggacgacagcaggggtcttgtgcttcctgggtacaagtacctcggacccttcaacggactcgacaaaggagagccggtcaacgaggcagacgccgcggccctcgagcacgacaaggcctacgaccggcagctcgacagcggagacaacccgtacctcaagtacaaccacgccgacgcggagtttcaggagcgccttaaagaagatacgtcttttgggggcaacctcgcaagagcagtattccaggcgaaaaagagggttcttgaacctctgggcctggttgaggagcctgttaagacggctccgggaaaaaagaggccggtagagcactctcctgcggggccagattcctcctccggaactggaaagtcgggccaacagcctgcaagaaagagattgaattttggtcagactggagacgcagactccgtacctgacccccagcctctcggacagccaccagcagccccctctggtctgggaactaatacgatggcttcaggcagtggcgcaccaatggcagacaataacgagggcgccgacggagtgggtaattcctcgggaaattggcattgcgattccacatggatgggcgacagagtcatcaccaccagcacccgcacctgggctctgcccacctacaacaaccatctgtacaagcaaatttccagccagtctggagccagcaacgacaaccactactttggctacagcaccccttgggggtattttgacttcaacagattccactgccacttctccccacgtgactggcaaagactcatcaacaacaattggggattccggcccaaaagactcaacttcgagctctttaacattcaagtcaaggaggtcacgcagaatgacggtacgacgacgattgccaataaccttaccagcacggttcaggtgtttactgactcggagtaccagctcccgtacgtcctcggctcggcgcatcaaggatgcctcccgccgttcccagcagacgtcttcatggtgccacagtatggatacctcaccctgaacaacgggagtcaggcggtaggacgctcttcattttactgcctggagtactttccttctcagatgctgcgtaccggaaacaactttaccttcagctacacctttgaggacgttccttttcacagcagctacgctcacagccagagtttggaccgtctcatgaatcctctcatcgaccagtacctgtattacttgagcagaacaaacactccaagcggaaccactacgcagtccaggcttcagtttcctcaagccggagcgagtgacattcgggaccagtctaggaactggcttcctggaccctgttaccgccagcagcgagtatcaaagacagctgcggacaacaacaacagtgattactcgtggactggagctaccaagtatcacctcaatggaagagactctctggtgaatccgggcacagccatggccagccacaaggacgatgaagaaaagtattttcctcagagcggggttctcatcttcggaaaacaagactcgggaaaaactaatgtggacattgaaaaggtcatgattacagacgaagaggaaatcaggaccaccaatcccgtggctacggagcagtatggttctgtatctaccaatctccagagcggcaacacacaagcagctacctcagatgtcaacacacaaggcgttcttccaggcatggtctggcaggacagagacgtgtacctgcagggacccatctgggcaaagattccacacacggacggacactttcacccttctcctcttatgggaggatttggactgaagcaccctcccccgcagattctcatcaagagtaccccggtacctgcgaatccttctaccaccttcagcgcggcaaagtttgcttccttcatcacacagtactccacggggcaggtcagcgtggagatcgagtgggagctgcagaaagagaacagcaaacgctggaaccccgagatccagtatacctccaactacaacaagtctgttaatgtggactttactgtggacactaatggcgtgtattcagagcctcgccccattggcacaagatacctgactcgtaatctgtaa

SEQ ID NO: 3287 - DNA, 2208 bp, Artificial Sequence
  source: /note="Description of Artificial Sequence: Synthetic polynucleotide"
atggctgccgatggttatcttccagattggctcgaggacactctctctgaaggaataagacagtggtggaagctcaaacctggcccaccaccaccaaggcccgcagagcggcatcaggacgacagcaggggtcttgtgcttcctgggtacaagtacctcggacccttcaacggactcgacaaaggagagccggtcaacgaggcagacgctgcggccctcgagcacgacaaggcctacgaccggcagctcgacagcggagacaacccgtacctcaagtacaaccacgccgacgcggagtttcaggagcgtcttaaagaagatacgtcttttgggggcaacctcggacgagcagtcttccaggcgaaaaagagggttcttgaacctctgggcctggttgaggaacctgttaagacggctccgggaaaaaagaggccggtagagcactctcctgcggagccagattcctcctccggaactggaaagtcgggccaacagcctgcaagaaagagattgaattttggtcagactggagacgcagactccgtacctgacccccagcctctcggacagccaccagcagccccctctggtctgggaactaatacgatggcttcaggcagtggcgcaccaatggcagacaataacgagggcgccgacggagtgggtaattcctcgggaaattggcattgcgattccacatggatgggcgacagagtcatcaccaccagcacccgcacctgggctctgcccacctacaacaaccatctgtacaagcaaatttccagccagtctggagccagcaacgacaaccactactttggctacagcaccccttgggggtattttgacttcaacagattccactgccacttctccccacgtgactggcaaagactcatcaacaacaattggggattccggcccaaaagactcaacttcaagctctttaacattcaagtcaaggaggtcacgcagaatgacggtacgacgacgattgccaataaccttaccagcacggttcaggtgtttactgactcggagtaccagctcccgtacgtcctcggctcggcgcatcaaggatgcctcccgccgttcccagcagacgtcttcatggtgccacagtatggatacctcaccctgaacaacgggagtcaggcggtaggacgctcttcattttactgcctggagtactttccttctcagatgctgcgtaccggaaacaactttaccttcagctacacctttgaggacgttccttttcacagcagctacgctcacagccagagtttggaccgtctcatgaatcctctcatcgaccagtacctgtattacttgagcagaacaaacactccaagcggaaccactacgcagtccaggcttcggttttctcaagccggagcgagtgacattcgggaccagtctaggaactggcttcctggaccctgttaccgccagcagcgagtatcaaagacagctgcggacaacaacaacagtgattactcgtggactggagctaccaagtatcacctcaatggaagagactctctggtgaatccgggcacagccatggccagccacaaggacgatgaagaaaagtattttcctcagagcggggttctcatcttcggaaaacaagactcgggaaaaactaatgtggacattgaaagggtcatgattacagacgaagaggaaatcaggaccaccaatcccgtggctacggagcagtatggttctgtatctaccaatctccagagcggcaacacacaagcagctacctcagatgtcaacacacaaggcgttcttccaggcatggtctggcaggacagagacgtgtacctgcagggacccatctgggcaaagattccacacacggacggacattttcacccttctcctcttatgggaggatttggactgaagcaccctcccccgcagattctcatcaagaataccccggtacctgcgaatccttctaccaccttcagcgcggcaaagtttgcttccttcatcacacagtactccacggggcaggtcagcgtggagatcgagtgggagctgcagaaagagaacagcaaacgctggaaccccgagatccagtatacctccaactacaacaagtctgttaatgtggactttactgtggacactaatggcgtgtattcagagcctcgccccattggcacaagatacctgactcgtaatctgtaa

SEQ ID NO: 3288 - DNA, 2208 bp, Artificial Sequence
  source: /note="Description of Artificial Sequence: Synthetic polynucleotide"
atggctgccgatggttatcttccagattggctcgaggacactctctctgaaggaataagacagtggtggaagctcaaacctggcccaccaccgccaaagcccgcagagcggcataaggacgacagcaggggtcttgtgcttcctgggtacaagtacctcggacccttcaacggactcgacaaaggagagccggtcaacgaggcagacgccgcggccctcgagcacgacaaggcctacgaccggcagctcgacagcggagacaacccgtacctcaagtacaaccacgccgacgcggagtttcaggagcgccttaaagaagatacgtcttttgggggcaacctcgcaagagcagtattccaggcgaaaaagagggttcttgaacctctgggcctggttgaggagcctgttaagacggctccgggaaaaaagaggccggtagagcactctcctgcggagccagattcctcctccggaactggaaagtcgggccaacagcctgcaagaaagagattgaattttggtcagactggagacgcagactccgtacctgacccccagcctctcggacagccaccagcagccccctctggtctgggaactaatacgatggcttcaggcagtggcgcaccaatggcagacaataacgagggcgccgacggagtgggtaattcctcgggaaattggcattgcgattccacatggatgggcgacagagtcatcaccaccagcacccgcacctgggctctgcccacctacaacaaccatctgtacaagcaaatttccagccagtctggagccagcaacgacaaccactactttggctacagcaccccttgggggtattttgacttcaacagattccactgccacttctccccacgtgactggcaaagactcatcaacaacaattggggattccggcccaaaagactcaacttcaagctctttaacattcaagtcaaggaggtcacgcagaatgacggtacgacgacgattgccaataaccttaccagcacggttcaggtgtttactgactcggagtaccagctcccgtacgtcctcggctcggcgcatcaaggatgcctcccgccgttcccagcagacgtcttcatggtgccacagtatggatacctcaccctgaacaacgggagtcaggcggtaggacgctcttcattttactgcctggagtactttccttctcagatgctgcgtaccggaaacaactttaccttcagctacacctttgaggacgttccttttcacagcagctacgctcacagccagagtttggaccgtctcatgaatcctctcatcgaccagtacctgtattacttgagcagaacaaacactccaagcggaaccactacgcagtccaggcttcggttttctcaagccggagcgagtgacattcgggaccagtctaggaactggcttcctggaccctgttaccgccagcagcgagtatcaaagacagctgcggacaacaacaacagtgattactcgtggactggagctaccaagtatcacctcaatggaagagactctctggtgaatccgggcacagccatggccagccacaaggacgatgaagaaaagtattttcctcagagcggggttctcatcttcggaaaacaagactcgggaaaaactaatgtggacattgaaagggtcatgattacagacgaagaggaaatcaggaccaccaatcccgtggctacggagcagtatggttctgtatctaccaatctccagagcggcaacacacaagcagctacctcagatgtcaacacacaaggcgttcttccaggcatggtctggcaggacagagacgtgtacctgcagggacccatctgggcaaagattccacacacggacggacattttcacccttctcctcttatgggaggatttggactgaagcaccctcccccgcagattctcatcaagaataccccggtacctgcgaatccttctaccaccttcagcgcggcaaagtttgcttccttcatcacacagtactccacggggcaggtcagcgtggagatcgagtgggagctgcagaaagagaacagcaaacgctggaaccccgagatccagtatacctccaactacaacaagtctgttaatgtggactttactgtggacactaatggcgtgtattcagagcctcgccccattggcacaagatacctgactcgtaatctgtaa

SEQ ID NO: 3289 - DNA, 2208 bp, Artificial Sequence
  source: /note="Description of Artificial Sequence: Synthetic polynucleotide"
atggctgccgatggttatcttccagattggctcgaggacactctctctgaaggaataagacagtggtggaagctcaaacctggcccaccaccgccaaagcccgcagagcggcataaggacgacagcaggggtcttgtgcttcctgggtacaagtacctcggacccttcaacggactcgacaaaggagagccggtcaacgaggcagacgccgcggccctcgagcacgacaaggcctacgaccggcagctcgacagcggagacaacccgtacctcaagtacaaccacgccgacgcggagtttcaggagcgccttaaagaagatacgtcttttgggggcaacctcgcaagagcagtattccaggcgaaaaagagggttcttgaacctctgggcctggttgaggagcctgttaagacggctccgggaaaaaagaggccggtagagcactctcctgcggagccagattcctcctccggaactggaaagtcgggccaacagcctgcaagaaagagattgaattttggtcagactggagacgcagactccgtacctgacccccagcctctcggacagccaccagcagccccctctggtctgggaactaatacgatggcttcaggcagtggcgcaccaatggcagacaataacgagggcgccgacggagtgggtaattcctcgggaaattggcattgcgattccacatggatgggcgacagagtcatcaccaccagcacccgcacctgggctctgcccacctacaacaaccatctgtacaagcaaatttccagccagtctggagccagcaacgacaaccactactttggctacagcaccccttgggggtattttgacttcaacagattccactgccacttctccccacgtgactggcaaagactcatcaacaacaattggggattccggcccaaaagactcaacttcaagctctttaacattcaagtcaaggaggtcacgcagaatgacggtacgacgacgattgccaataaccttaccagcacggttcaggtgtttactgactcggagtaccagctcccgtacgtcctcggctcggcgcatcaaggatgcctcccgccgttcccagcagacgtcttcatggtgccacagtatggatacctcaccctgaacaacgggagtcagacggtaggacgctcttcattttactgcctggagtactttccttctcagatgctgcgtaccggaaacaactttaccttcagctacacctttgaggacgttccttttcacagcagctacgctcacagccagagtttggaccgtctcatgaatcctctcatcgaccagtacctgtattacttgagcagaacaaacactccaagcggaaccactacgcagtccaggcttcggttttctcaagccggagcgagtgacattcgggaccagtctaggaactggcttcctggaccctgttaccgccagcagcgagtatcaaagacagctgcggacaacaacaacagtgattactcgtggactggagctaccaagtatcacctcaatggaagagactctctggtgaatccgggcacagccatggccagccacaaggacgatgaagaaaagtattttcctcagagcggggttctcatcttcggaaaacaagactcgggaaaaactaatgtggacattgaaagggtcatgattacagacgaagaggaaatcaggaccaccaatcccgtggctacggagcagtatggttctgtatctaccaatctccagagcggcaacacacaagcagctacctcagatgtcaacacacaaggcgttcttccaggcatggtctggcaggacagagacgtgtacctgcagggacccatctgggcaaagattccacacacggacggacattttcacccttctcctcttatgggaggatttggactgaagcaccctcccccgcagattctcatcaagaataccccggtacctgcgaatccttctaccaccttcagcgcggcaaagtttgcttccttcatcacacagtactccacggggcaggtcagcgtggagatcgagtgggagctgcagaaagagaacagcaaacgctggaaccccgagatccagtatacctccaactacaacaagtctgttaatgtggactttactgtggacactaatggcgtgtattcagagcctcgccccattggcacaagatacctgactcgtaatctgtaa

SEQ ID NO: 3290 - DNA, 2208 bp, Artificial Sequence
  source: /note="Description of Artificial Sequence: Synthetic polynucleotide"
atggctgccgatggttatcttccagattggctcgaggacactctctctgaaggaataagacagtggtggaagctcaaacctggcccaccaccgccaaagcccgcagagcggcataaggacgacagcaggggtcttgtgcttcctgggtacaagtacctcggacccttcaacggactcgacaaaggagagccggtcaacgaggcagacgccgcggccctcgagcacgacaaggcctacgaccggcagctcgacagcggagacaacccgtacctcaagtacaaccacgccgacgcggagtttcaggagcgccttaaagaagatacgtcttttgggggcaacctcgcaagagcagtattccaggcgaaaaagagggttcttgaacctctgggcctggttgaggagcctgttaagacggctccgggaaaaaagaggccggtagagcactctcctgcggagccagattcctcctccggaactggaaagtcgggccaacagcctgcaagaaagagattgaattttggtcagactggagacgcagactccgtacctgacccccagcctctcggacagccaccagcagccccctctggtctgggaactaatacgatggcttcaggcagtggcgcaccaatggcagacaataacgagggcgccgacggagtgggtaattcctcgggaaattggcattgcgattccacatggatgggcgacagagtcatccccaccagcacccgcacctgggctctgcccacctacaacaaccatctgtacaagcaaatttccagccagtctggagccagcaacgacaaccactactttggctacagcaccccttgggggtattttgacttcaacagattccactgccacttctccccacgtgactggcaaagactcatcaacaacaattggggattccggcccaaaagactcaacttcaagctctttaacattcaagtcaaggaggtcacgcagaatgacggtacgacgacgattgccaataaccttaccagcacggttcaggtgtttactgactcggggtaccagctcccgtacgtcctcggctcggcgcatcaaggatgcctcccgccgttcccagcagacgtcttcatggtgccacagtatggatacctcaccctgaacaacgggagtcaggcggtaggacgctcttcattttactgcctggagtactttccttctcagatgctgcgtaccggaaacaactttaccttcagctacacctttgaggacgttccttttcacagcagctacgctcacagccagagtttggaccgtctcatgaatcctctcatcgaccagtacctgtattacttgagcagaacaaacactccaagcggaaccactacgcagtccaggcttcggttttctcaagccggagcgagtgacattcgggaccagtctaggaactggcttcctggaccctgttaccgccagcagcgagtatcaaagacagctgcggacaacaacaacagtgattactcgtggactggagctaccaagtatcacctcaatggaagagactctctggtgaatccgggcacagccatggccagccacaaggacgatgaagaaaagtattttcctcagagcggggttctcatcttcggaaaacaagactcgggaaaaactaatgtggacattgaaagggtcatgattacagacgaagaggaaatcaggaccaccaatcccgtggctacggagcagtatggttctgtatctaccaatctccagagcggcaacacacaagcagctacctcagatgtcaacacacaaggcgttcttccaggcatggtctggcaggacagagacgtgtacctgcagggacccatctgggcaaagattccacacacggacggacattttcacccttctcctcttatgggaggatttggactgaagcaccctcccccgcagattctcatcaagaataccccggtacctgcgaatccttctaccaccttcagcgcggcaaagtttgcttccttcatcacacagtactccacggggcaggtcagcgtggagatcgagtgggagctgcagaaagagaacagcaaacgctggaaccccgagatccagtatacctccaactacaacaagtctgttaatgtggactttactgtggacactaatggcgtgtattcagagcctcgccccattggcacaagatacctgactcgtaatctgtaa

SEQ ID NO: 3291 - DNA, 2208 bp, Artificial Sequence
  source: /note="Description of Artificial Sequence: Synthetic polynucleotide"
atggctgccgatggttatcttccagattggctcgaggacactctctctgaaggaataagacagtggtggaagctcaaacctggcccaccaccgccaaagcccgcagagcggcataaggacgacagcaggggtcttgtgcttcctgggtacaagtacctcggacccttcaacggactcgacaaaggagagccggtcaacgaggcagacgccgcggccctcgagcacgacaaggcctacgaccggcagctcgacagcggagacaacccgtacctcaagtacaaccacgccgacgcggagtttcaggagcgccttaaagaagatacgtcttttgggggcaacctcgcaagagcagtattccaggcgaaaaagagggttcttgaacctctgggcctggttgaggagcctgttaagacggctccgggaaaaaagaggccggtagagcactctcctgcggagccagattcctcctccggaactggaaagtcgggccaacagcctgcaagaaagagattgaattttggtcagactggagacgcagactccgtacctgacccccagcctctcggacagccaccagcagccccctctggtctgggaactaatacgatggcttcaggcagtggcgcaccaatggcagacaataacgagggcgccgacggagtgggtaattcctcgggaaattggcattgcgattccacatggatgggcgacagagtcatcaccaccagcacccgcacctgggctctgcccacctacaacaaccatctgtacaagcaaatttccagccagtctggagccagcaacgacaaccactactttggctacagcaccccttgggggtattttgacttcaacagattccactgccacttctccccacgtgactggcaaagactcatcaacaacaattggggattccggcccaaaagactcaacttcaagctctttaacattcaagtcaaggaggtcacgcagaatgacggtacgacgacgattgccaataaccttaccagcacggttcaggtgtttactgactcggagtaccagctcccgtacgtcctcggctcggcgcatcaaggatgcctcccgccgttcccagcagacgtcttcatggtgccacagtatggatacctcaccctgaacaacgggagtcaggcggtaggacgctcttcattttactgcctggagtactttccttctcagatgctgcgtaccggaaacaactttaccttcagctacacctttgaggacgttccttttcacagcagctacgctcacagccagagtttggaccgtctcatgaatcctctcatcgaccagtacctgtattacttgagcagaacaaacactccaagcggaaccactacgcagtccaggcttcggttttctcaagccggagcgagtgacattcgggaccagtctaggaactggcttcctggaccctgttaccgccagcagcgagtatcaaagacagctgcggacaacaacaacagtgattactcgtggactggagctaccaagtatcacctcaatggaagagactctctggtgaatccgggcacagccatggccagccacaaggacgatgaagaaaagtattttcctcagagcggggttctcatcttcggaaaacaagactcgggaaaaactaatgtggacattgaaagggtcatgattacagacgaagaggaaatcaggaccaccaatcccgtggctacggagcagtatggttctgtatctaccaatctccagagcggcgacacacaagcagctacctcagatgtcaacacacaaggcgttcttccaggcatggtctggcaggacagagacgtgtacctgcagggacccatctgggcaaagattccacacacggacggacattttcacccttctcctcttatgggaggatttggactgaagcaccctcccccgcagattctcatcaagaataccccggtacctgcgaatccttctaccaccttcagcgcggcaaagtttgcttccttcatcacacagtactccacggggcaggtcagcgtggagatcgagtgggagctgcagaaagagaacagcaaacgctggaaccccgagatccagtatacctccaactacaacaagtctgttaatgtggactttactgtggacactaatggcgtgtattcagagcctcgccccattggcacaagatacctgactcgtaatctgtaa

SEQ ID NO: 3292 - DNA, 2205 bp, Artificial Sequence
  source: /note="Description of Artificial Sequence: Synthetic polynucleotide"
atggctgccgatggttatcttccagattggctcgaggacactctctctgaaggaataagacagtggtggaagctcaaacctggcccaccaccgccaaagcccgcagagcggcataaggacgacagcaggggtcttgtgcttcctgggtacaagtacctcggacccttcaacggactcgacaaaggagagccggtcaacgaggcagacgccgcggccctcgagcacgacaaggcctacgaccggcagctcgacagcggagacaacccgtacctcaagtacaaccacgccgacgcggagtttcaggagcgccttaaagaagatacgtcttttgggggcaacctcgcaagagcagtattccaggcgaaaaagagggttcttgaacctctgggcctggttgaggagcctgttaagacggctccgggaaaaaagaggccggtagagcactctcctgcggagccagattcctcctccggaactggaaagtcgggccaacagcctgcaagaaagagattgaattttggtcagactggagacgcagactccgtacctgacccccagcctctcggacagccaccagcagccccctctggtctgggaactaatacgatggcttcaggcagtggcgcaccaatggcagacaataacgagggcgccgacggagtgggtaattcctcgggaaattggcattgcgattccacatggatgggcgacagagtcatcaccaccagcacccgcacctgggctctgcccacctacaacaaccatctgtacaagcaaatttccagccagtctggagccagcaacgacaaccactactttggctacagcaccccttgggggtattttgacttcaacagattccactgccacttctccccacgtgactggcaaagactcatcaacaacaattggggattccggcccaaaagactcaacttcaagctctttaacattcaagtcaaggaggtcacgcagaatgacggtacgacgacgattgccaataaccttaccagcacggttcaggtgtttactgactcggagtaccagctcccgtacgtcctcggctcggcgcatcaaggatgcctcccgccgttcccagcagacgtcttcatggtgccacagtatggatacctcaccctgaacaacgggagtcaggcggtaggacgctcttcattttactgcctggagtactttccttctcagatgctgcgtaccggaaacaactttaccttcagctacacctttgaggacgttccttttcacagcagctacgctcacagccagagtttggaccgtctcatgaatcctctcatcgaccagtacctgtattacttgagcagaacaaacactccaagcggaaccactacgcagtccaggcttcggttttctcaagccggagcgagtgacattcgggaccagtctaggaactggcttcctggaccctgttaccgccagcagcgagtatcaaagacagctgcggacaacaacagtgattactcgtggactggagctaccaagtatcacctcaatggaagagactctctggtgaatccgggcacagccatggccagccacaaggacgatgaagaaaagtattttcctcagagcggggttctcatcttcggaaaacaagactcgggaaaaactaatgtggacattgaaagggtcatgattacagacgaagaggaaatcaggaccaccaatcccgtggctacggagcagtatggttctgtatctaccaatctccagagcggcaacacacaagcagctacctcagatgtcaacacacaaggcgttcttccaggcatggtctggcaggacagagacgtgtacctgcagggacccatctgggcaaagattccacacacggacggacattttcacccttctcctcttatgggaggatttggactgaagcaccctcccccgcagattctcatcaagaataccccggtacctgcgaatccttctaccaccttcagcgcggcaaagtttgcttccttcatcacacagtactccacggggcaggtcagcgtggagatcgagtgggagctgcagaaagagaacagcaaacgctggaaccccgagatccagtatacctccaactacaacaagtctgttaatgtggactttactgtggacactaatggcgtgtattcagagcctcgccccattggcacaagatacctgactcgtaatctgtaa

SEQ ID NO: 3293 - DNA, 2208 bp, Artificial Sequence
  source: /note="Description of Artificial Sequence: Synthetic polynucleotide"
atggctgccgatggttatcttccagattggctcgaggacactctctctgaaggaataagacagtggtggaagctcaaacctggcccaccaccgccaaagcccgcagagcggcataaggacgacagcaggggtcttgtgcttcctgggtacaagtacctcggacccttcaacggactcgacaaaggagagccggtcaacgaggcagacgccgcggccctcgagcacgacaaggcctacgaccggcagctcgacagcggagacaacccgtacctcaagtacaaccacgccgacgcggagtttcaggagcgccttaaagaagatacgtcttttgggggcaacctcgcaagagcagtattccaggcgaaaaagagggttcttgaacctctgggcctggttgaggagcctgttaagacggctccgggaaaaaagaggccggtagagcactctcctgcggagccagattcctcctccggaactggaaagtcgggccaacagcctgcaagaaagagattgaattttggtcagactggagacgcagactccgtacctgacccccagcctctcggacagccaccagcagccccctctggtctgggaactaatacgatggcttcaggcagtggcgcaccaatggcagacaataacgagggcgccgacggagtgggtaattcctcgggaaattggcattgcgattccacatggatgggcgacagagtcatcaccaccagcacccgcacctgggctctgcccacctacaacaaccatctgtacaagcaaatttccagccagtctggagccagcaacgacaaccactactttggctacagcaccccttgggggtattttgacttcaacagattccactgccacttctccccacgtgactggcaaagactcatcaacaacaattggggattccggcccaaaagactcaacttcaagctctttaacattcaagtcaaggaggtcacgcagaatgacggtacgacgacgattgccaataaccttaccagcacggttcaggtgtttactgactcggagtaccagctcccgtacgtcctcggctcggcgcatcaaggatgcctcccgccgttcccagcagacgtcttcatggtgccacagtatggatacctcaccctgaacaacgggagtcaggcggtaggacgctcttcattttactgcctggagtactttccttctcagatgctgcgtaccggaaacaactttaccttcagctacacctttgaggacgttccttttcacagtagctacgctcacagccagagttcggaccgtctcatgaatcctctcatcgaccagtacctgtattacttgagcagaacaaacactccaagcggaaccactacgcagtccaggcttcggttttctcaagccggagcgagtgacattcgggaccagtctaggaactggcttcctgggccctgttaccgccagcagcgagtatcaaagacagctgcggacaacaacaacagtgattactcgtggactggagctaccaagtatcacctcaatggaagagactctctggtgaatccgggcacagccatggccagccacaaggacgatgaagaaaagtattttcctcagagcggggttctcatcttcggaaaacaagactcgggaaaaactaatgtggacattgaaagggtcatgattacagacgaagaggaaatcaggaccaccaatcccgtggctacggagcagtatggttctgtatctaccaatctccagagcggcaacacacaagcagctacctcagatgtcaacacacaaggcgttcttccaggcatggtctggcaggacagagacgtgtacctgcagggacccatctgggcaaagattccacacacggacggacattttcgcccttctcctcttatgggaggatttggactgaagcaccctcccccgcagattctcatcaagaataccccggtacctgcgaatccttctaccaccttcagcgcggcaaagtttgcttccttcatcacacagtactccacggggcaggtcagcgtggagatcgagtgggagctgcagaaagagaacagcaaacgctggaaccccgagatccagtatacctccaactacaacaagtctgttaatgtggactttactgtggacactaatggcgtgtattcagagcctcgccccattggcacaagatacctgactcgtaatctgtaa

SEQ ID NO: 3294 - DNA, 2208 bp, Artificial Sequence
  source: /note="Description of Artificial Sequence: Synthetic polynucleotide"
atggctgccgatggttatcttccagattggctcgaggacactctctctgaaggaataagacagtggtggaagctcaaacctggcccaccaccgccaaagcccgcagagcggcataaggacgacagcaggggtcttgtgcttcctgggtacaagtacctcggacccttcaacggactcgacaaaggagagccggtcaacgaggcagacgccgcggccctcgagcacgacaaggcctacgaccggcagctcgacagcggagacaacccgtacctcaagtacaaccacgccgacgcggagtttcaggagcgccttaaagaagatacgtcttttgggggcaacctcgcaagagcagtattccaggcgaaaaagagggttcttgaacctctgggcctggttgaggagcctgttaagacggctccgggaaaaaagaggccggtagagcactctcctgcggggccagattcctcctccggaactggaaagtcgggccaacagcctgcaagaaagagattgaattttggtcagactggagacgcagactccgtacctgacccccagcctctcggacagccaccagcagccccctctggtctgggaactaatacgatggcttcaggcagtggcgcaccaatggcagacaataacgagggcgccgacggagtgggtaattcctcgggaaattggcattgcgattccacatggatgggcgacagagtcatcaccaccagcacccgcacctgggctctgcccacctacaacaaccatctgtacaagcaaatttccagccagtctggagccagcaacgacaaccactactttggctacagcaccccttgggggtattttgacttcaacagattccactgccacttctccccacgtgactggcaaagactcatcaacaacaattggggtttccggcccaaaagactcaacttcgagctctttaacattcaagtcaaggaggtcacgcagaatgacggtacgacgacgattgccaataaccttaccagcacggttcaggtgtttactgactcggagtaccagctcccgtacgtcctcggctcggcgcatcaaggatgcctcccgccgttcccagcagacgtcttcatggtgccacagtatggatacctcaccctgaacaacgggagtcaggcggtaggacgctcttcattttactgcctggagtactttccttctcagatgctgcgtaccggaaacaactttaccttcagctacacctttgaggacgttccttttcacagcagctacgctcacagccagagtttggaccgtctcatgaatcctctcatcgaccagtacctgtattacttgagcagaacaaacactccaagcggaaccactacgcagtccaggcttcagttttctcaagccggagcgagtgacattcgggaccagtctaggaactggcttcctggaccctgttaccgccagcagcgagtatcaaagacagctgcggacaacaacaacagtgattactcgtggactggagctaccaagtatcacctcaatggaagagactctctggtgaatccgggcacagccatggccagccacaaggacgatgaagaaaagtattttcctcagagcggggttctcatcttcggaaaacaagactcgggaaaaactaatgtggacattgaaaaggtcatgattacagacgaagaggaaatcaggaccaccaatcccgtggctacggagcagtatggttctgtatctaccaatctccagagcggcaacacacaagcagctacctcagatgtcaacacacaaggcgttcttccaggcatggtctggcaggacagaggcgtgtacctgcagggacccatctgggcaaagattccacacacggacggacactttcacccttctcctcttatgggaggatttggactgaagcaccctcccccgcagattctcatcaagagtaccccggtacctgcgaatccttctaccaccttcagcgcggcaaagtttgcttccttcatcacacagtactccacggggcaggtcagcgtggagatcgagtgggagctgcagaaagagaacagcaaacgctggaaccccgagatccagtatacctccaactacaacaagtctgttaatgtggactttactgtggacactaatggcgtgtattcagatcctcgccccattggcacaagatacctgactcgtaatctgtaa

SEQ ID NO: 3295 - DNA, 2208 bp, Artificial Sequence
  source: /note="Description of Artificial Sequence: Synthetic polynucleotide"
atggctgccgatggttatcttccagattggctcgaggacactctctctgaaggaataagacagtggtggaagctcaaacctggcccaccaccgccaaagcccgcagagcggcataaggacgacagcaggggtcttgtgcttcctgggtacaagtacctcggacccttcaacggactcgacaaaggagagccggtcaacgaggcagacgccgcggccctcgagcacgacaaggcctacgaccggcagctcgacagcggagacaacccgtacctcaagtacaaccacgccgacgcggagtttcaggagcgccttaaagaagatacgtcttttgggggcaacctcgcaagagcagtattccaggcgaaaaagagggttcttgaacctctgggcctggttgaggagcctgttaagacggctccgggaaaaaagaggccggtagagcactctcctgcggagccagattcctcctccggaactggaaagtcgggccaacagcctgcaagaaagagattgaattttggtcagactggagacgcagactccgtacctgacccccagcctctcggacagccaccagcagccccctctggtctgggaactaatacgatggcttcaggcagtggcgcaccaatggcagacaataacgagggcgccgacggagtgggtaattcctcgggaaattggcattgcgattccacatggatgggcgacagagtcatcaccaccagcacccgcacctgggctctgcccacctacaacaaccatctgtacaagcaaatttccagccagtctggagccagcaacgacaaccactactttggctacagcaccccttgggggtattttgacttcaacagattccactgccacttctccccacgtggctggcaaagactcatcaacaacaattggggattccggcccaaaagactcaacttcaagctctttaacattcaagtcaaggaggtcacgcagaatgacggtacgacgacgattgccaataaccttaccagcacggttcaggtgtttactgactcggagtaccagctcccgtacgtcctcggctcggcgcatcaaggatgcctcccgccgttcccagcagacgtcttcatggtgccacagtatggatacctcaccctgaacaacgggagtcaggcggtaggacgctcttcattttactgcctggagtactttccttctcagatgctgcgtaccggaagcaactttaccttcagctacacctttgaggacgttccttttcacagcagctacgctcacagccagagtttggaccgtctcatgaatcctctcatcgaccagtacctgtattacttgagcagaacaaacactccaagcggaaccactacgcagtccaggcttcggttttctcaagccggagcgagtgacattcgggaccagtctaggaactggcttcctgggccctgttaccgccagcagcgagtatcaaagacagctgcggacaacaacaacagtgattactcgtggactggagctaccaagtatcacctcaatggaagagactctctggtgaatccgggcacagccatggccagccacaaggacgatgaagaaaagtattttcctcagagcggggttctcatcttcggaaaacaagactcgggaaaaactaatgtggacattgaaagggtcatgattacagacgaagaggaaatcaggaccaccaatcccgtggctacggagcagtatggttctgtatctaccaatctccagagcggcaacacacaagcagctacctcagatgtcaacacacaaggcgttcttccaggcatggtctggcaggacagagacgtgtacctgcagggacccatctgggcaaagattccacacacggacggacattttcacccttctcctcttatgggaggatttggactgaagcaccctcccccgcagattctcatcaagaataccccggtacctgcgaatccttctaccaccttcagcgcggcaaagtttgcttccttcatcacacagtactccacggggcaggtcagcgtggagatcgagtgggagctgcagaaagagaacagcaaacgctggaaccccgagatccagtatacctccaactacaacaagtctgttaatgtggactttactgtggacactaatggcgtgtattcagagcctcgccccattggcacaagatacctgactcgtaatctgtaa

SEQ ID NO: 3296 - DNA, 2208 bp, Artificial Sequence
  source: /note="Description of Artificial Sequence: Synthetic polynucleotide"
atggctgccgatggttatcttccagattggctcgaggacactctctctgaaggaataagacagtggtggaagctcaaacctggcccaccaccaccaaggcccgcagagcggcatcaggacgacagcaggggtcttgtgcttcctgggtacaagtacctcggacccttcaacggactcgacaaaggagagccggtcaacgaggcagacgctgcggccctcgagcacgacaaggcctacgaccggcagctcgacagcggagacaacccgtacctcaagtacaaccacgccgacgcggagtttcaggagcgtcttaaagaagatacgtcttttgggggcaacctcgcaagagcagtattccaggcgaaaaagagggttcttgaacctctgggcctggttgaggagcctgttaagacggctccgggaaaaaagaggccggtagagcactctcctgcggagccagattcctcctccggaactggaaagtcgggccaacagcctgcaagaaagagattgaattttggtcagactggagacgcagactccgtacctgacccccagcctctcggacagccaccagcagccccctctggtctgggaactaatacgatggcttcaggcagtggcgcaccaatggcagacaataacgagggcgccgacggagtgggtaattcctcgggaaattggcattgcgattccacatggatgggcgacagagtcatcaccaccagcacccgcacctgggctctgcccacctacaacaaccatctgtacaagcaaatttccagccagtctggagccagcaacgacaaccactactttggctacagcaccccttgggggtattttgacttcaacagattccactgccacttctccccacgtgactggcaaagactcatcaacaacaattggggattccggcccaaaagactcaacttcaagctctttaacattcaagtcaaggaggtcacgcagaatgacggtacgacgacgattgccaataaccttaccagcacggttcaggtgtttactgactcggagtaccagctcccgtacgtcctcggctcggcgcatcaaggatgcctcccgccgttcccagcagacgtcttcatggtgccacagtatggatacctcaccctgaacaacgggagtcaggcggtaggacgctcttcattttactgcctggagtactttccttctcagatgctgcgtaccggaaacaactttaccttcagctacacctttgaggacgttccttttcacagcagctacgctcacagccagagtttggaccgtctcatgaatcctctcatcgaccagtacctgtattacttgagcagaacaaacactccaagcggaaccactacgcagtccaggcttcggttttctcaagccggagcgagtgacattcgggaccagtctaggaactggcttcctggaccctgttaccgccagcagcgagtatcaaagacagctgcggacaacaacaacagtgattactcgtggactggagctaccaagtatcacctcaatggaagagactctctggtgaatccgggcacagccatggccagccacaaggacgatgaagaaaagtattttcctcagagcggggttctcatcttcggaaaacaagactcgggaaaaactaatgtggacattgaaagggtcatgattacagacgaagaggaaatcaggaccaccaatcccgtggctacggagcagtatggttctgtatctaccaatctccagagcggcaacacacaagcagctacctcagatgtcaacacacaaggcgttcttccaggcatggtctggcaggacagagacgtgtacctgcagggacccatctgggcaaagattccacacacggacggacattttcacccttctcctcttatgggaggatttggactgaagcaccctcccccgcagattctcatcaagaataccccggtacctgcgaatccttctaccaccttcagcgcggcaaagtttgcttccttcatcacacagtactccacggggcaggtcagcgtggagatcgagtgggagctgcagaaagagaacagcaaacgctggaaccccgagatccagtatacctccaactacaacaagtctgttaatgtggactttactgtggacactaatggcgtgtattcagagcctcgccccattggcacaagatacctgactcgtaatctgtaa

SEQ ID NO: 3297 - DNA, 2208 bp, Artificial Sequence
  source: /note="Description of Artificial Sequence: Synthetic polynucleotide"
atggctgccgatggttatcttccagattggctcgaggacactctctctgaaggaataagacagtggtggaagctcaaacctggcccaccaccgccaaagcccgcagagcggcataaggacgacagcaggggtcttgtgcttcctgggtacaagtacctcggacccttcaacggactcgacaaaggagagccggtcaacgaggcagacgccgcggccctcgagcacgacaaggcctacgaccggcagctcgacagcggagacaacccgtacctcaagtacaaccacgccgacgcggagtttcaggagcgccttaaagaagatacgtcttttgggggcaacctcgcaagagcagtattccaggcgaaaaagagggttcttgaacctctgggcctggttgaggagcctgttaagacggctccgggaaaaaagaggccggtagagcactctcctgcggagccagattcctcctccggaactggaaagtcgggccaacagcctgcaagaaagagattgaattttggtcagactggagacgcagactccgtacctgacccccagcctctcggacagccaccagcagccccctctggtctgggaactaatacgatggcttcaggcagtggcgcaccaatggcagacaataacgagggcgccgacggagtgggtaattcctcgggaaattggcattgcgattccacatggatgggcgacagagtcatcaccaccagcacccgcacctgggctctgcccacctacaacaaccatctgtacaagcaaatttccagccagtctggagccagcaacgacaaccactactttggctacagcaccccttgggggtattttgacttcaacagattccactgccacttctccccacgtgactggcaaagactcatcaacaacaattggggattccggcccaaaagactcaacttcaagctctttaacattcaagtcaaggaggtcacgcagaatgacggtacgacgacgattgccaataaccttaccagcacggttcaggtgtttactgactcggagtaccagctcccgtacgtccccggctcggcgcatcaaggatgcctcccgccgttcccagcagacgtcttcatggtgccacagtatggatacctcaccctgaacaacgggagtcaggcggtaggacgctcttcattttactgcctggagtactttccttctcagatgctgcgtaccggaaacaactttaccttcagctacacctttgaggacgttccttttcacagcagctacgctcacagccagagtttggaccgtctcatgaatcctctcatcgaccagtacctgtattacttgagcagaacaaacactccaagcggaaccactacgcagtccaggcttcggttttctcaagccggagcgagtgacattcgggaccagtctaggaactggcttcctggaccctgttaccgccagcagcgagtatcaaagacggctgcggacaacaacaacagtgattactcgtggactggagctaccaagtatcacctcaatggaagagactctctggtgaatccgggcacagccatggccagccacaaggacgatgaagaaaagtattttcctcagagcggggttctcatcttcggaaaacaagactcgggaaaaactaatgtggacattgaaagggtcatgattacagacgaagaggaaatcaggaccaccaatcccgtggctacggagcagtatggttctgtatctaccaatctccagagcggcaacacacaagcagctacctcagatgtcaacacacaaggcgttcttccaggcatggtctggcaggacagagacgtgtacctgcagggacccatctgggcaaagattccacacacggacggacattttcacccttctcctcttatgggaggatttggactgaagcaccctcccccgcagattctcatcaagaataccccggtacctgcgaatccttctaccaccttcagcgcggcaaagtttgcttccttcatcacacagtactccacggggcaggtcagcgtggagatcgagtgggagctgcagaaagagaacagcaaacgctggaaccccgagatccagtatacctccaactacaacaagtctgttaatgtggactttactgtggacactaatggcgtgtattcagagcctcgccccattggcacaagatacctgactcgtaatctgtaa

SEQ ID NO: 3298 - DNA, 2208 bp, Artificial Sequence
  source: /note="Description of Artificial Sequence: Synthetic polynucleotide"
atggctgccgatggttatcttccagattggctcgaggacactctctctgaaggaataagacagtggtggaagctcaaacctggcccaccaccgccaaagcccgcagagcggcataaggacgacagcaggggtcttgtgcttcctgggtacaagtacctcggacccttcaacggactcgacaaaggagagccggtcaacgaggcagacgccgcggccctcgagcacgacaaggcctacgaccggcagctcgacagcggagacaacccgtacctcaagtacaaccacgccgacgcggagtttcaggagcgccttaaagaagatacgtcttttgggggcaacctcgcaagagcagtattccaggcgaaaaagagggttcttgaacctctgggcctggttgaggagcctgttaagacggctccgggaaaaaagaggccggtagagcactctcctgcggagccagattcctcctccggaactggaaagtcgggccaacagcctgcaagaaagagattgaattttggtcagactggagacgcagactccgtacctgacccccagcctctcggacagccaccagcagccccctctggtctgggaactaatacgatggcttcaggcagtggcgcaccaatggcagacaataacgagggcgccgacggagtgggtaattcctcgggaaattggcattgcgattccacatggatgggcgacagagtcatcaccaccagcacccgcacctgggctctgcccacctacgacaaccatctgtacaagcaaatttccagccagtctggagccagcaacgacaaccactactttggctacagcaccccttgggggtattttgacttcaacagattccactgccacttctccccacgtgactggcaaagactcatcaacaacaattggggattccggcccaaaagactcaacttcaagctctttaacattcaagtcaaggaggtcacgcagaatgacggtacgacgacgattgccaataaccttaccagcacggttcaggtgtttactgactcggagtaccagctcccgtacgtcctcggctcggcgcatcaaggatgcctcccgccgttcccagcagacgtcttcatggtgccacagtatggatacctcaccctgaacaacgggagtcaggcggtaggacgctcttcattttactgcctggagtactttccttctcagatgctgcgtaccggaaacaactttaccttcagctacacctttgaggacgttccttttcacagcagctacgctcacagccagagtttggaccgtctcatgaatcctctcatcgaccagtacctgtattacttgagcagaacaaacacttcaagcggaaccactacgcagtccaggcttcggttttctcaagccggagcgagtgacattcgggaccagtctaggaactggcttcctggaccctgttaccgccagcagcgagtatcaaagacagctgcggacaacaacaacagtgattactcgtggactggagctaccaagtatcacctcaatggaagagactctctggtgaatccgggcacagccatggccagccacaaggacgatgaagaaaagtattttcctcagagcggggttctcatcttcggaaaacaagactcgggaaaaactaatgtggacattgaaagggtcatgattacagacgaagaggaaatcaggaccaccaatcccgtggctacggagcagtatggttctgtatctaccaatctccagagcggcaacacacaagcagctacctcagatgtcaacacacaaggcgttcttccaggcatggtctggcaggacagagacgtgtacctgcagggacccatctgggcaaagattccacacacggacggacattttcacccttctcctcttatgggaggatttggactgaagcaccctcccccgcagattctcatcaagaataccccggtacctgcgaatccttctaccaccttcagcgcggcaaagtttgcttccttcatcacacagtactccacggggcaggtcagcgtggagatcgagtgggagctgcagaaagagaacagcaaacgctggaaccccgagatccagtatacctccaactacaacaagtctgttaatgtggactttactgtggacactaatggcgtgtattcagagcctcgccccattggcacaagatacctgactcgtaatctgtaa

SEQ ID NO: 3299 - DNA, 2208 bp, Artificial Sequence
  source: /note="Description of Artificial Sequence: Synthetic polynucleotide"
atggctgccgatggttatcttccagattggctcgaggacactctctctgaaggaataagacagtggtggaagctcaaacctggcccaccaccaccaaggcccgcagagcggcatcaggacgacagcaggggtcttgtgcttcctgggtacaagtacctcggacccttcaacggactcgacaaaggagagccggtcaacgaggcagacgctgcggccctcgagcacgacaaggcctacgaccggcagctcgacagcggagacaacccgtacctcaagtacaaccacgccgacgcggagtttcaggagcgtcttaaagaagatacgtcttttgggggcaacctcggacgagcagtcttccaggcgaaaaagagggttcttgaacctctgggcctggttgaggaacctgttaagacggctccgggaaaaaagaggccggtagagcactctcctgcggagccagactcctcctcgggaaccggaaaagcgggccagcagcctgcaagaaagagattgaatttcggtcagactggagacgcagactccgtacctgacccccagcctctcggacagccaccagcagcccccacaagtttgggatctactacaatggctacaggcagtggcgcaccaatggcagacaataacgagggtgccgatggagtgggtaattcctcaggaaattggcattgcgattcccaatggctgggcgacagagtcatcaccaccagcacccgaacctgggccctgcccacctacaacaaccacctctacaagcaaatctccagccaatcaggagcatcgaacgacaaccactactttggctacagcaccccttgggggtattttgacttcaacagattccactgtcacttctccccacgtgactggcaaagactcatcaacaacaactggggattccgacccaagagactcaacttcaagctctttaacattcaagtcaaagaggtcacgcagaatgacggtacgacgacgattgccaataaccttaccagcacggttcaggtgtttactgactcggagtaccagctcccgtacgtcctcggctcggcgcatcaaggatgcctcccgccgtttccagcggacgtcttcatggtcccacagtatggatacctcaccctgaacaacgggagtcaggcggtaggacgctcttccttttactgcctggagtactttccttctcagatgctgcgtaccggaaacaactttaccttcagctacacctttgaggacgttccttttcacagcagctacgctcacagccagagtttggaccgtctcatgaatcctctcatcgaccagtacctgtattacttgagcagaacaaacactccaagcggaaccactacgcagtccaggcttcagttttctcaagccggagcgagtgacattcgggaccagtctaggaactggcttcctggaccctgttaccgccagcagcgagtatcaaagacagctgcggacaacaacaacagtgattactcgtggactggagctaccaagtatcacctcaatggaagagactctctggtgaatccgggcacagccatggccagccacaaggacgatgaagaaaagtattttcctcagagcggggttctcatcttcggaaaacaagactcgggaaaaactaatgtggacattgaaaaggtcatgattacagacgaagaggaaatcaggaccaccaatcccgtggctacggagcagtatggttctgtatctaccaatctccagagcggcaacacacaagcagctacctcagatgtcaacacacaaggcgttcttccaggcatggtctggcaggacagagacgtgtacctgcagggacccatctgggcaaagattccacacacggacggacactttcacccttctcctcttatgggaggatttggactgaagcaccctcccccgcagattctcatcaagagtaccccggtacctgcgaatccttctaccaccttcagcgcggcaaagtttgcttccttcatcacacagtactccacggggcaggtcagcgtggagatcgagtgggagctgcagaaagagaacagcaaacgctggaaccccgagatccagtatacctccaactacaacaagtctgttaatgtggactttactgtggacactaatggcgtgtattcagagcctcgccccattggcacaagatacctgactcgtaatctgtaa

SEQ ID NO: 3300 - DNA, 2208 bp, Artificial Sequence
  source: /note="Description of Artificial Sequence: Synthetic polynucleotide"
atggctgccgatggttatcttccagattggctcgaggacactctctctgaaggaataagacagtggtggaagctcaaacctggcccaccaccgccaaagcccgcagagcggcataaggacgacagcaggggtcttgtgcttcctgggtacaagtacctcggacccttcaacggactcgacaaaggagagccggtcaacgaggcagacgccgcggccctcgagcacgacaaggcctacgaccggcagctcgacagcggagacaacccgtacctcaagtacaaccacgccgacgcggagtttcaggagcgccttaaagaagatacgtcttttgggggcaacctcgcaagagcagtattccaggcgaaaaagagggttcttgaacctctgggcctggttgaggagcctgttaagacggctccgggaaaaaagaggccggtagagcactctcctgcggagccagattcctcctccggaactggaaagtcgggccaacagcctgcaagaaagagattgaattttggtcagactggagacgcagactccgtacctgacccccagcctctcggacagccaccagcagccccctctggtctgggaactaatacgatggcttcaggcagtggcgcaccaatggcagacaataacgagggcgccgacggagtgggtaattcctcgggaaattggcattgcgattccacatggatgggcgacagagtcatcaccaccagcacccgcacctgggctctgcccacctacaacaaccatctgtacaagcaaatttccagccagtctggagccagcaacgacaaccactactttggctacagcaccccttgggggtattttgacttcaacagattccactgccacttctccccacgtgactggcaaagactcatcaacaacaattggggattccggcccaaaagactcaacttcaagctctttaacattcaagtcaaggaggtcacgcagaatgacggtacgacgacgattgccaataaccttaccagcacggttcaggtgtttactgactcggagtaccagctcccgtacgtcctcggctcggcgcatcaaggatgcctcccgccgttcccagcagacgtcttcatggtgccacagtatggatacctcaccctgaacaacgggagtcaggcggtaggacgctcttcattttactgcctggagtactttccttctcagatgctgcgtaccggaaacaactttaccttcagctacacctttgaggacgttccttttcacagcagctacgctcacagccagagttcggaccgtctcatgaatcctctcatcgaccagtacctgtattacttgagcagaacaaacactccaagcggaaccactacgcagtccaggcttcggttttctcaagccggagcgagtgacattcgggaccagtctaggaactggcttcctggaccctgttaccgccagcagcgagtatcaaagacagctgcggacaacaacaacagtgattactcgtggactggagctaccaagtatcacctcaatggaagagactctctggtgaatccgggcacagccatggccagccacaaggacgatgaagaaaagtattttcctcagagcggggttctcatcttcggaaaacaagactcgggaaaaactaatgtggacattgaaagggtcatgattacagacgaagaggaaatcaggaccaccaatcccgtggctacggagcagtatggttctgtatctaccaatctccagagcggcaacacacaagcagctacctcagatgtcaacacacaaggcgttcttccaggcatggtctggcaggacagagacgtgtacctgcagggacccatctgggcaaagattccacacacggacggacattttcacccttctcctcttatgggaggatttggactgaagcaccctcccccgcagattctcatcaagaataccccggtacctgcgaatccttctaccaccttcagcgcggcaaagcttgcttccttcatcacacagtactccacggggcaggtcagcgtggagatcgagtgggagctgcagaaagagaacagcaaacgctggaaccccgagatccagtatacctccaactacaacaagtctgttaatgtggactttactgtggacactaatggcgtgtattcagagcctcgccccattggcacaagatacctgactcgtaatctgtaa

SEQ ID NO: 3301 - DNA, 2208 bp, Artificial Sequence
  source: /note="Description of Artificial Sequence: Synthetic polynucleotide"
atggctgccgatggttatcttccagattggctcgaggacactctctctgaaggaataagacagtggtggaagctcaaacctggcccaccaccgccaaagcccgcagagcggcataaggacgacagcaggggtcttgtgcttcctgggtacaagtacctcggacccttcaacggactcgacaaaggagagccggtcaacgaggcagacgccgcggccctcgagcacgacaaggcctacgaccggcagctcgacagcggagacaacccgtacctcaagtacaaccacgccgacgcggagtttcaggagcgccttaaagaagatacgtcttttgggggcaacctcgcaagagcagtattccaggcgaaaaagagggttcttgaacctctgggcctggttgaggagcctgttaagacggctccgggaaaaaagaggccggtagagcactctcctgcggagccagattcctcctccggaactggaaagtcgggccaacagcctgcaagaaagagattgaattttggtcagactggagacgcagactccgtacctgacccccagcctctcggacagccaccagcagccccctctggtctgggaactaatacgatggcttcaggcagtggcgcaccaatggcagacaataacgagggcgccgacggagtgggtaattcctcgggaaattggcattgcgattccacatggatgggcgacagagtcatcaccaccagcacccgcacctgggctctgcccacctacaacaaccatctgtacaagcaaatttccagccagtctggagccagcaacgacaaccactactttggctacagcaccccttgggggtattttgacttcaacagattccactgccacttctccccacgtgactggcaaagactcatcaacaacaattggggattccggcccaaaagactcaacttcaagctctttaacattcaagtcaaggaggtcacgcagaatgacggtacgacgacgattgccaataaccttaccagcacggttcaggtgtttactgactcggagtaccagctcccgtacgtcctcggctcggcgcatcaaggatgcctcccgccgttcccagcagacgtcttcatggtgccacagtatggatacctcaccctgaacaacgggagtcaggcggtaggacgctcttcattttactgcctggagtactttccttctcagatgctgcgtaccggaaacaactttaccttcagctacacctttgaggacgttccttttcacagcagctacgctcacagccagagtttggaccgtctcatgaatcctctcatcgaccagtacctgtattacttgagcagaacaaacactccaagcggaaccactacgcagtccaggcttcggttttctcaagccggagcgagtgacattcgggaccagtctaggaactggcttcctggaccctgttaccgccagcagcgagtatcaaagacagctgcggacaacaacaacagtgattactcgtggactggagctaccaagtatcacctcaatggaagagactctctggtgaatccgggcacagccatggccagccacaaggacgatgaagaaaagtattttcctcagagcggggttctcatcttcggaaaacaagactcgggaaaaactaatgtggacattgaaagggtcatgattacagacgaagaggaaatcaggaccaccaatcccgtggctacggagcagtatggttctgtatctaccaatctccagagcggcaacacacaagcagctacctcagatgtcaacacacaaggcgttcttccaggcatggtctggcaggacagagacgtgtacctgcagggacccatctgggcaaagattccacacacggacggacattttcacccttctcctcttatgggaggatttggactgaagcaccctcccccgcagattctcatcaagaataccccggtacctgcgaatccttctaccaccttcagcgcggcaaagtttgcttccttcatcacacagtactccacggggcaggtcagcgtggagatcgagtgggagctgcagaaggagaacagcaaacgctggaaccccgagatccagtacacttccaactacaacaaatctgttaatgtggactttactgtggacgctaatggtgtgtattcagagcctcgccccattggcaccagatacctgactcgtaatctgtaa

SEQ ID NO: 3302 - DNA, 2208 bp, Artificial Sequence
  source: /note="Description of Artificial Sequence: Synthetic polynucleotide"
atggctgccgatggttatcttccagattggctcgaggacactctctctgaaggaataagacagtggtggaagctcaaacctggcccaccaccgccaaagcccgcagagcggcataaggacgacagcaggggtcttgtgcttcctgggtacaagtacctcggacccttcaacggactcgacaaaggagagccggtcaacgaggcagacgccgcggccctcgagcacgacaaggcctacgaccggcagctcgacagcggagacaacccgtacctcaagtacaaccacgccgacgcggagtttcaggagcgccttaaagaagatacgtcttttgggggcaacctcgcaagagcagtattccaggcgaaaaagagggttcttgaacctctgggcctggttgaggagcctgttaagacggctccgggaaaaaagaggccggtagagcactctcctgcggggccagattcctcctccggaactggaaagtcgggccaacagcctgcaagaaagagattgaattttggtcagactggagacgcagactccgtacctgacccccagcctctcggacagccaccagcagccccctctggtctgggaactaatacgatggcttcaggcagtggcgcaccaatggcagacaataacgagggcgccgacggagtgggtaattcctcgggaaattggcattgcgattccacatggatgggcgacagagtcatcaccaccagcacccgcacctgggctctgcccacctacaacaaccatctgtacaagcaaatttccagccagtctggagccagcaacgacaaccactactttggctacagcaccccttgggggtattttgacttcaacagattccactgccacttctccccacgtgactggcaaagactcatcaacaacaattggggattccggcccaaaagactcaacttcgagctctttaacattcaagtcaaggaggtcacgcagaatgacggtacgacgacgattgccaataaccttaccagcacggttcaggtgtttactgactcggagtaccagctcccgtacgtcctcggctcggcgcatcaaggatgcctcccgccgttcccagcagacgtcttcatggtgccacagtatggatacctcaccctgaacaacgggagtcaggcggtaggacgctcttcattttactgcctggagtactttccttctcagatgctgcgtaccggaaacaactttaccttcagctacacctttgaggacgttccttttcacagcagctacgctcacagccagagtttggaccgtctcatgaatcctctcatcgaccagtacctgtattacttgagcagaacaaacactccaagcggaaccactacgcagtccaggcttcagttttctcaagccggagcgagtgacattcgggaccagtctaggaactggcttcctggaccctgttaccgccagcagcgagtatcaaagacagctgcggacaacaacaacagtgattactcgtggactggagctaccaagtatcacctcaatggaagagactctctggtgaatccgggcacagccatggccagccacaaggacgatgaagaaaagtattttcctcagagcggggttctcatcttcggaaaacaagactcgggaaaaactaatgtggacattgaaaaggtcatgattacagacgaagaggaaatcaggaccaccaatcccgtggctacggagcagtatggttctgtatctaccaatctccagagcggcaacacacaagcagctacctcagatgtcaacacacaaggcgttcttccaggcatggtctggcaggacagagacgtgtacctgcagggacccatctgggcaaagattccacacacggacggacactttcacccttctcctcttatgggaggatttggactgaagcaccctcccccgcagattctcatcaagagtaccccggtacctgcgaatccttctaccaccttcagcgcggcaaagtttgcttccttcatcacacagtactccacggggcaggtcagcgtggagatcgagtgggagctgcagaaagagaacagcaaacgctggaaccccgagatccagtatacctccaactgcaacaagtctgttaatgtggactttactgtggacactaatggcgtgtattcagatcctcgccccattggcacaagatacctgactcgtaatctgtaa

SEQ ID NO: 3303 - DNA, 2208 bp, Artificial Sequence
  source: /note="Description of Artificial Sequence: Synthetic polynucleotide"
atggctgccgatggttatcttccagattggctcgaggacactctctctgaaggaataagacagtggtggaagctcaaacctggcccaccaccgccaaagcccgcagagcggcataaggacgacagcaggggtcttgtgcttcctgggtacaagtacctcggacccttcaacggactcgacaaaggagagccggtcaacgaggcagacgccgcggccctcgagcacgacaaggcctacgaccggcagctcgacagcggagacaacccgtacctcaagtacaaccacgccgacgcggagcttcaggagcgccttaaagaagatacgtcttttgggggcaacctcgcaagagcagtattccaggcgaaaaagagggttcttgaacctctgggcctggttgaggagcctgttaagacggctccgggaaaaaagaggccggtagagcactctcctgcggagccagattcctcctccggaactggaaagtcgggccaacagcctgcaagaaagagattgaattttggtcagactggagacgcagactccgtacctgacccccagcctctcggacagccaccagcagccccctctggtctgggaactaatacgatggcttcaggcagtggcgcaccaatggcagacaataacgagggcgccgacggagtgggtaattcctcgggaaattggcattgcgattccacatggatgggcgacagagtcatcaccaccagcacccgcacctgggctctgcccacctacaacaaccatctgtacaagcaaatttccagccagtctggagccagcaacgacaaccactactttggctacagcaccccttgggggtattttgacttcaacagattccactgccacttctccccacgtgactggcaaagactcatcaacaacaattggggattccggcccaaaagactcaacttcaagctctttaacattcaagtcaaggaggtcacgcagaatgacggtacgacgacgattgccaataaccttaccagcacggttcaggtgtatactgactcggagtaccagctcccgtacgtcctcggctcggcgcatcaaggatgcctcccgccgttcccagcagacgtcttcatggtgccacagtatggatacctcaccctgaacaacgggagtcaggcggtaggacgctcttcattttactgcctggagtactttccttctcagatgctgcgtaccggaaacaactttaccttcagctacacctttgaggacgttccttttcacagcagctacgctcacagccagagtttggaccgtctcatgaatcctctcatcgaccagtacctgtattacttgagcagaacaaacactccaagcggaaccactacgcagtccaggcttcggttttctcaagccggagcgagtgacattcgggaccagtctaggaactggcttcctggaccctgttaccgccagcagcgagtatcaaagacagctgcggacaacaacaacagtgattactcgtggactggagctaccaagtatcacctcaatggaagagactctctggtgaatccgggcacagccatggccagccacaaggacgatgaagaaaagtattttcctcagagcggggttctcatcttcggaaaacaagactcgggaaaaactaatgtggacattgaaagggtcatgattacagacgaagaggaaatcaggaccaccaatcccgtggctacggagcagtatggttctgtatctaccaatctccagagcggcaacacacaagcagctacctcagatgtcaacacacaaggcgttcttccaggcatggtctggcaggacagagacgtgtacctgcagggacccatctgggcaaagattccacacacggacggacattttcacccttctcctcttatgggaggatttggactgaagcaccctcccccgcagattctcatcaagaataccccggtacctgcgaatccttctaccaccttcagcgcggcaaagtttgcttccttcatcacacagtactccacggggcaggtcagcgtggagatcgagtgggagctgcagaaagagaacagcaaacgctggaaccccgagatccagtatacctccaactacaacaagtctgttaatgtggactttactgtggacactaatggcgtgtattcagagcctcgccccattggcacaagatacctgactcgtaatctgtaa

SEQ ID NO: 3304 - DNA, 2208 bp, Artificial Sequence
  source: /note="Description of Artificial Sequence: Synthetic polynucleotide"
atggctgccgatggttatcttccagattggctcgaggacactctctctgaaggaataagacagtggtggaagctcaaacctggcccaccaccgccaaagcccgcagagcggcataaggacgacagcaggggtcttgtgcttcctgggtacaagtacctcggacccttcaacggactcgacaaaggagagccggtcaacgaggcagacgccgcggccctcgagcacgacaaggcctacgaccggcagctcgacagcggagacaacccgtacctcaagtacaaccacgccgacgcggagtttcaggagcgccttaaagaagatacgtcttttgggggcaacctcgcaagagcagtattccaggcgaaaaagagggttcttgaacctctgggcctggttgaggagcctgttaagacggctccgggaaaaaagaggccggtagagcactctcctgcggagccagattcctcctccggaactggaaagtcgggccaacagcctgtaagaaagagattgaattttggtcagactggagacgcagactccgtacctgacccccagcctctcggacagccaccagcagccccctctggtctgggaactaatacgatggcttcaggcagtggcgcaccaatggcagacaataacgagggcgccgacggagtgggtaattcctcgggaaattggcattgcgattccacatggatgggcgacagagtcatcaccaccagcacccgcacctgggctctgcccacctacaacaaccatctgtacaagcaaatttccagccagtctggagccagcaacgacaaccactactttggctacagcaccccttgggggtattttgacttcaacagattccactgccacttctccccacgtgactggcaaagactcatcaacaacaattggggattccggcccaaaagactcaacttcaagctctttaacattcaagtcaaggaggtcacgcagaatgacggtacgacgacgattgccaataaccttaccagcacggttcaggtgtttactgactcggagtaccagctcccgtacgtcctcggctcggcgcatcaaggatgcctcccgccgttcccagcagacgtcttcatggtgccacagtatggatacctcaccctgaacaacgggagtcaggcggtaggacgctcttcattttactgcctggagtactttccttctcagatgctgcgtaccggaagcaactttaccttcagctacacctttgaggacgttccttttcacagcagctacgctcacagccagagtttggaccgtctcatgaatcctctcatcgaccagtacctgtattacttgagcagaacaaacactccaagcggaaccactacgcagtccaggcttcggttttctcaagccggagcgagtgacattcgggaccagtctaggaactggcttcctgggccctgttaccgccagcagcgagtatcaaagacagctgcggacaacaacaacagtgattactcgtggactggagctaccaagtatcacctcaatggaagagactctctggtgaatccgggcacagccatggccagccacaaggacgatgaagaaaagtattttcctcagagcggggttctcatcttcggaaaacaagactcgggaaaaactaatgtggacattgaaagggtcatgattacagacgaagaggaaatcaggaccaccaatcccgtggctacggagcagtatggttctgtatctaccaatctccagagcggcaacacacaagcagctacctcagatgtcaacacacaaggcgttcttccaggcatggtctggcaggacagagacgtgtacctgcagggacccatctgggcaaagattccacacacggacggacattttcacccttctcctcttatgggaggatttggactgaagcaccctcccccgcagattctcatcaagaataccccggtacctgcgaatccttctaccaccttcagcgcggcaaagtttgcttccttcatcacacagtactccacggggcaggtcagcgtggagatcgagtgggagctgcagaaagagaacagcaaacgctggaaccccgagatccagtatacctccaactacaacaagtctgttaatgtggactttactgtggacactaatggcgtgtattcagagcctcgccccattggcacaagatacctgactcgtaatctgtaa

SEQ ID NO: 3305 - DNA, 2208 bp, Artificial Sequence
  source: /note="Description of Artificial Sequence: Synthetic polynucleotide"
atggctgccgatggttatcttccagattggctcgaggacactctctctgaaggaataagacagtggtggaagctcaaacccggcccaccaccaccaaggcccgcagagcggcatcaggacgacagcaggggtcttgtgcttcctgggtacaagtacctcggacccttcaacggactcgacaaaggagagccggtcaacgaggcagacgctgcggccctcgagcacgacaaggcctacgaccggcagctcgacagcggagacaacccgtacctcaagtacaaccacgccgacgcggagtttcaggagcgtcttaaagaagatacgtcttttgggggcaacctcggacgagcagtcttccaggcgaaaaagagggttcttgaacctctgggcctggttgaggagcctgttaagacggctccgggaaaaaagaggccggtagagcactctcctgcggggccagattcctcctccggaactggaaagtcgggccaacagcctgcaagaaagagattgaattttggtcagactggagacgcagactccgtacctgacccccagcctctcggacagccaccagcagccccctctggtctgggaactaatacgatggcttcaggcagtggcgcaccaatggcagacaataacgagggcgccgacggagtgggtaattcctcgggaaattggcattgcgattccacatggatgggcgacagagtcatcaccaccagcacccgcacctgggctctgcccacctacaacaaccatctgtacaagcaaatttccagccagtctggagccagcaacgacaaccactactttggctacagcaccccttgggggtattttgacttcaacagattccactgccacttctccccacgtgactggcaaagactcatcaacaacaattggggattccggcccaaaagactcaacttcgagctctttaacattcaagtcaaggaggtcacgcagaatgacggtacgacgacgattgccaataaccttaccagcacggttcaggtgtttactgactcggagtaccagctcccgtacgtcctcggctcggcgcatcaaggatgcctcccgccgttcccagcagacgtcttcatggtgccacagtatggatacctcaccctgaacaacgggagtcaggcggtaggacgctcttcattttactgcctggagtactttccttctcagatgctgcgtaccggaaacaactttaccttcagctacacctttgaggacgttccttttcacagcagctacgctcacagccagagtttggaccgtctcatgaatcctctcatcgaccagtacctgtattacttgagcagaacaaacactccaagcggaaccactacgcagtccaggcttcagttttctcaagccggagcgagtgacattcgggaccagtctaggaactggcttcctggaccctgttaccgccagcagcgagtatcaaagacagctgcggacaacaacaacagtgattactcgtggactggagctaccaagtatcacctcaatggaagagactctctggtgaatccgggcacagccatggccagccacaaggacgatgaagaaaagtattttcctcagagcggggttctcatcttcggaaaacaagactcgggaaaaactaatgtggacattgaaaaggtcatgattacagacgaagaggaaatcaggaccaccaatcccgtggctacggagcagtatggttctgtatctaccaatctccagagcggcaacacacaagcagctacctcagatgtcaacacacaaggcgttcttccaggcatggtctggcaggacagagacgtgtacctgcagggacccatctgggcaaagattccacacacggacggacactttcacccttctcctcttatgggaggatttggactgaagcaccctcccccgcagattctcatcaagagtaccccggtacctgcgaatccttctaccaccttcagcgcggcaaagtttgcttccttcatcacacagtactccacggggcaggtcagcgtggagatcgagtgggagctgcagaaagagaacagcaaacgctggaaccccgagatccagtatacctccaactacaacaagtctgttaatgtggactttactgtggacactaatggcgtgtattcagagcctcgccccattggcacaagatacctgactcgtaatctgtaa

SEQ ID NO: 3306 - DNA, 2208 bp, Artificial Sequence
  source: /note="Description of Artificial Sequence: Synthetic polynucleotide"
atggctgccgatggttatcttccagattggctcgaggacactctctctgaaggaataagacagtggtggaagctcaaacctggcccaccaccgccaaagcccgcagagcggcataaggacgacagcaggggtcttgtgcttcctgggtacaagtacctcggacccttcaacggactcgacaaaggagagccggtcaacgaggcagacgccgcggccctcgagcacgacaaggcctacgaccggcagctcgacagcggagacaacccgtacctcaagtacaaccacgccgacgcggagtttcaggagcgccttaaagaagatacgtcttttgggggcaacctcgcaagagcagtattccaggcgaaaaagagggttcttgaacctctgggcctggttgaggagcctgttaagacggctccgggaaaaaagaggccggtagagcactctcctgcggagccagattcctcctccggaactggaaagtcgggccaacagcctgcaagaaagagattgaattttggtcagactggagacgcagactccgtacctgacccccagcctctcggacagccaccagcagccccctctggtctgggaactaatacgatggcttcaggcagtggcgcaccaatggcagacaataacgagggcgccgacggagtgggtaattcctcgggaaattggcattgcgattccacatggatgggcgacagagtcatcaccaccagcacccgcacctgggctctgcccacctacaacaaccatctgtacaagcaaatttccagccagtctggagccagcaacgacaaccactactttggctacagcaccccttgggggtattttgacttcaacagattccacggccacttctccccacgtgactggcaaagactcatcaacaacaattggggattccggcccaaaagactcaacttcaagctctttaacattcaagtcaaggaggtcacgcagaatgacggtacgacgacgattgccaataaccttaccagcacggttcaggtgtttactgactcggagtaccagctcccgtacgtcctcggctcggcgcatcaaggatgcctcccgccgttcccagcagacgtcttcatggtgccacagtatggatacctcaccctgaacaacgggagtcaggcggtaggacgctcttcattttactgcctggagtactttccttctcagatgctgcgtaccggaaacaactttaccttcagctacacctttgaggacgttccttttcacagcagctacgctcacagccagagtttggaccgtctcatgaatcctctcatcgaccagtacctgtattacttgagcagaacaaacactccaagcggaaccactacgcagtccaggcttcggttttctcaagccggagcgagtgacattcgggaccagtctaggaactggcttcctggaccctgttaccgccagcagcgagtatcaaagacagctgcggacaacaacaacagtgattactcgtggactggagctaccaagtatcacctcaatggaagagactctctggtgaatccgggcacagccatggccagccacaaggacgatgaagaaaagtattttcctcagagcggggttctcatcttcggaaaacaagactcgggaaaaactaatgtggacattgaaagggtcatgattacagacgaagaggaaatcaggaccaccaatcccgtggctacggagcagtatggttctgtatctaccaatctccagagcggcaacacacaagcagctacctcagatgtcaacacacaaggcgttcttccaggcatggtctggcaggacagagacgtgtacctgcagggacccatctgggcaaagattccacacacggacggacattttcacccttctcctcttatgggaggatttggactgaagcaccctcccccgcagattctcatcaagaataccccggtacctgcgaatccttctaccaccttcagcgcggcaaagtttgcttccttcatcacacagtactccacggggcaggtcagcgtggagatcgagtgggagctgcagaaagagaacagcaaacgctggaaccccgagatccagtatacctccaactacaacaagtctgttaatgtggactttactgtggacactaatggcgtgtattcagagcctcgccccattggcacaagatacctgactcgtaatctgtaa

SEQ ID NO: 3307 - DNA, 2208 bp, Artificial Sequence
  source: /note="Description of Artificial Sequence: Synthetic polynucleotide"
atggctgccgatggttatcttccagattggctcgaggacactctctctgaaggaataagacagtggtggaagctcaaacctggcccaccaccgccaaagcccgcagagcggcataaggacgacagcaggggtcttgtgcttcctgggtacaagtacctcggacccttcaacggactcgacaaaggagagccggtcaacgaggcagacgccgcggccctcgagcacgacaaggcctacgaccggcagctcgacagcggagacaacccgtacctcaagtacaaccacgccgacgcggagtttcaggagcgccttaaagaagatacgtcttttgggggcaacctcgcaagagcagtattccaggcgaaaaagagggttcttgaacctctgggcctggttgaggagcctgttaagacggctccgggaaaaaagaggccggtagagcactctcctgcggagccagattcctcctccggaactggaaagtcgggccaacagcctgcaagaaagagattgaattttggtcagactggagacgcagactccgtacctgacccccagcctctcggacagccaccagcagccccctctggtctgggaactaatacgatggcttcaggcagtggcgcaccaatggcagacaataacgagggcgccgacggagtgggtaattcctcgggaaattggcattgcgattccacatggatgggcgacagagtcatcaccaccagcacccgcacctgggctctgcccacctacaacaaccatctgtacaagcaaatttccagccagtctggagccagcaacgacaaccactactttggctacagcaccccttgggggtattttgacttcaacagattccactgccacttctccccacgtgactggcaaagactcatcaacaacaattggggattccggcccaaaagactcaacttcaagctctttaacattcaagtcaaggaggtcacgcagaatgacggtacgacgacgattgccaataaccttaccagcacggttcaggtgtttactgactcggagtaccagctcccgtacgtcctcggctcggcgcatcaaggatgcctcccgccgttcccagcagacgtcttcatggtgccacagtatggatacctcaccctgaacaacgggagtcaggcggtaggacgctcttcattttactgcctggagtactttccttctcagatgctgcgtaccggaaacaactttaccttcagctacacctttgaggacgttccttttcacagtagctacgctcacagccagagtttggaccgtctcatgaatcctctcatcgaccagtacctgtattacttgagcagaacaaacactccaagcggaaccactacgcagtccaggcttcggttttctcaagccggagcgagtgacattcgggaccagtctaggaactggcttcctgggccctgttaccgccagcagcgagtatcaaagacagctgcggacaacaacaacagtgattactcgtggactggagctaccaagtatcacctcaatggaagagactctctggtgaatccgggcacagccatggccagccacaaggacgatgaagaaaagtattttcctcagagcggggttctcatcttcggaaaacaagactcgggaaaaactaatgtggacattgaaagggtcatgattacagacgaagaggaaatcaggaccaccaatcccgtggctacggagcagtatggttctgtatctaccaatctccagagcggcaacacacaagcagctacctcagatgtcaacacacaaggcgttcttccaggcatggtctggcaggacagagacgtgtacctgcagggacccatctgggcaaagattccacacacggacggacattttcgcccttctcctcttatgggaggatttggactgaagcaccctcccccgcagattctcatcaagaataccccggtacctgcgaatccttctaccaccttcagcgcggcaaagtttgcttccttcatcacacagtactccacggggcaggtcagcgtggagatcgagtgggagctgcagaaagagaacagcaaacgctggaaccccgagatccagtatacctccaactacaacaagtctgttaatgtggactttactgtggacactaatggcgtgtattcagagcctcgccccattggcacaagatacctgactcgtaatctgtaa

SEQ ID NO: 3308 - DNA, 2208 bp, Artificial Sequence
  source: /note="Description of Artificial Sequence: Synthetic polynucleotide"
atggctgccgatggttatcttccagattggctcgaggacactctctctgaaggaataagacagtggtggaagctcaaacctggcccaccaccaccaaagcccgcagagcggcataaggacgacagcaggggtcttgtgcttcctgggtacaagtacctcggacccttcaacggactcgacaagggagagccggtcaacgaggcagacgccgcggccctcgagcacgacaaagcctacgaccggcagctcgacagcggagacaacccgtacctcaagtacaaccacgccgacgcggagtttcaggagcgccttaaagaagatacgtcttttgggggcaacctcggacgagcagtcttccaggcgaaaaagagggctcttgaacctctgggcctggttgaggaacctgttaagacggctccgggaaaaaagaggccggtagagcactctcctgtggagccagactcctcctcgggaaccggaaaggcgggccagcagcctgcaagaaaaagattgaattttggtcagactggagacgcagactcggtacctgacccccagcctctcggacagccaccagcagccccctctggtctgggaactaatacgatggctacaggcagtggcgcaccaatggcagacaataacgagggcgccgacggagtgggtaattcctcgggaaattggcattgcgattccacatggatgggcgacagagtcatcaccaccagcacccgaacctgggccctgcccacctacaacaaccacctctacaaacaaatttccagccaatcaggagcctcgaacgacaatcactactttggctacagcaccccttgggggtattttgacttcaacagattccactgccacttttcaccacgtgactggcaaagactcatcaacaacaactggggattccgacccaagagactcaacttcaagctctttaacattcaagtcaaagaggtcacgcagaatgacggtacgacgacgattgccaataaccttaccagcacggttcaggtgtttactgactcggagtaccagctcccgtacgtcctcggctcggcgcatcaaggatgcctcccgccgttcccagcagacgtcttcatggtgccacagtatggatacctcaccctgaacaacgggagtcaggcagtaggacgctcttcattttactgcctggagtactttccttctcagatgctgcgtaccggaaacaactttaccttcagctacacttttgaggacgttcctttccacagcagctacgctcacagccagagtctggaccgtctcatgaatcctctcatcgaccagtacctgtattacttgagcagaacaaacactccaagtggaaccaccacgcagtcaaggcttcagttttctcaggccggagcgagtgacattcgggaccagtctaggaactggcttcctggaccctgttaccgccagcagcgagtatcaaagacatctgcggataacaacaacagtgaatactcgtggactggagctaccaagtaccacctcaatggcagagactctctggtgaatccgggcccggccatggcaagccacaaggacgatgaagaaaagttttttcctcagagcggggttctcatctttgggaagcaaggctcagagaaaacaaatgtggacattgaaaaggtcatgattacagacgaagaggaaatcaggacaaccaatcccgtggctacggagcagtatggttctgtatctaccaacctccagagaggcaacagacaagcagctaccgcagatgtcaacacacaaggcgttcttccaggcatggtctggcaggacagagatgtgtaccttcaggggcccatctgggcaaagattccacacacggacggacattttcacccctctcccctcatgggtggattcggacttaaacaccctcctccacagattctcatcaagaacaccccggtacctgcgaatccttcgaccaccttcagtgcggcaaagtttgcttccttcatcacacagtactccacgggacaggtcagcgtggagatcgagtgggagctgcagaaggaaaacagcaaacgctggaatcccgaaattcagtacacttccaactacaacaagtctgttaatgtggactttactgtggacactaatggcgtgtattcagagcctcgccccattggcaccagatacctgactcgtaatctgtaa

SEQ ID NO: 3309 - DNA, 2208 bp, Artificial Sequence
  source: /note="Description of Artificial Sequence: Synthetic polynucleotide"
atggctgccgatggttatcttccagattggctcgaggacactctctctgaaggaataagacagtggtggaagctcaaacctggcccaccaccaccaaagcccgcagagcggcataaggacgacagcaggggtcttgtgcttcctgggtacaagtacctcggacccttcaacggactcgacaagggagagccggtcaacgaggcagacgccgcggccctcgagcacgacaaagcctacgaccggcagctcgacagcggagacaacccgtacctcaagtacaaccacgccgacgcggagtttcaggagcgccttaaagaagatacgtcttttgggggcaacctcggacgagcagtcttccaggcgaaaaagagggtccttgaacctctgggcctggttgaggaacctgttaagacggctccgggaaaaaagaggccggtagagcactctcctgtggagccagactcctcctcgggaaccggaaaggcgggccagcagcctgcaagaaaaagattgaattttggtcagactggagacgcagactcagtacctgacccccagcctctcggacagccaccagcagccccctctggtctgggaactaatacgatggctacaggcagtggcgcaccaatggcagacaataacgagggcgccgacggagtgggtaattcctcgggaaattggcattgcgattccacatggatgggcgacagagtcatcaccaccagcacccgaacctgggccctgcccacctacaacaaccacctctacaaacaaatttccagccaatcaggagcctcgaacgacaatcactactttggctacagcaccccttgggggtattttgacttcaacagattccactgccacttttcaccacgtgactggcaaagactcatcaacaacaactggggattccgacccaagagactcaacttcaagctctttaacattcaagtcaaagaggtcacgcagaatgacggtacgacgacgattgccaataaccttaccagcacggttcaggtgtttactgactcggagtaccagctcccgtacgtcctcggctcggcgcatcaaggatgcctcccgccgttcccagcagacgtcttcatggtgccacagtatggatacctcaccctgaacaacgggagtcaggcagtaggacgctcttcattttactgcctggagtactttccttctcagatgctgcgtaccggaaacaactttaccttcagctacacttttgaggacgttcctttccacagcagctacgctcacagccagagtctggaccgtctcatgaatcctctcatcgaccagtacctgtattacttgagcagaacaaacactccaagtggaaccaccacgcagtcaaggcttcagttttctcaggccggagcgagtgacattcgggaccagtctaggaactggcttcctggaccctgttaccgccagcagcgagtatcaaagacatctgcggataacaacaacagtgaatactcgtggactggagctaccaagtaccacctcaatggcagagactctctggtgaatccgggcccggccatggcaagccacaaggacgatgaagaaaagttttttcctcagagcggggttctcatctttgggaagcaaggctcagagaaaacaaatgtggacattgaaaaggtcatgattacagacgaagaggaaatcaggacaaccaatcccgtggctacggagcagtatggttctgtatctaccaacctccagagaggcaacagacaagcagctaccgcagatgtcaacacgcaaggcgttcttccaggcacggtctggcaggacagagatgtgtaccttcaggggcccatctgggcaaagattccacacacggacggacattttcacccctctcccctcatgggtggattcggacttaaacaccctcctccacagattctcatcaagaacaccccggtacctgcgaatccttcgaccaccttcagtgcggcaaagtttgcttccttcatcacacagtactccacgggacaggtcagcgtggagatcgagtgggagctgcagaaggaaaacagcaaacgctggaatcccgaaattcagtacacttccaactacaacaagtctgttaatgtggactttactgtggacactaatggcgtgtattcagagcctcgccccattggcaccagatacctgactcgtaatctgtaa

SEQ ID NO: 3310 - DNA, 2208 bp, Artificial Sequence
  source: /note="Description of Artificial Sequence: Synthetic polynucleotide"
atggctgccgatggttatcttccagattggctcgaggacactctctctgaaggaataagacagtggtggaagctcaaacctggcccaccaccaccaaagcccgcagagcggcataaggacgacagcaggggtcttgtgcttcctgggtacaagtacctcggacccttcaacggactcgacaagggagagccggtcaacgaggcagacgccgcggccctcgagcacgacaaagcctacaaccggcagctcgacagcggagacaacccgtacctcaagtacaaccacgccgacgcggagtttcaggagcgccttaaagaagatacgtcttttgggggcaacctcggacgagcagtcttccaggcgaaaaagagggttcttgaacctctgggcctggttgaggaacctgttaagacggctccgggaaaaaagaggccggtagagcactctcctgtggagccagactcctcctcgggaaccggaaaggcgggccagcagcctgcaagaaaaagattgaattttggtcagactggagacgcagactcagtacctgacccccagcctctcggacagccaccagcagccccctctggtctgggaactaatacgatggctacaggcagtggcgcaccaatggcagacaataacgagggcgccgacggagtgggtaattcctcgggaaattggcattgcgattccacatggatgggcgacagagtcatcaccaccagcacccgaacctgggccctgcccacctacaacaaccacctctacaaacaaatttccagccaatcaggagcctcgaacgacaatcactactttggctacagcaccccttgggggtattttgacttcaacagattccactgccacttttcaccacgtgactggcaaagactcatcaacaacaactggggattccgacccaagagactcaacttcaagctctttaacattcaagtcaaagaggtcacgcagaatgacggtacgacgacgattgccaataaccttaccagcacggttcaggtgtttactgactcggagtaccagctcccgtacgtcctcggctcggcgcatcaaggatgcctcccgccgttcccagcagacgtcttcatggtgccacagtatggatacctcaccctgaacaacgggagtcaggcagtaggacgctcttcattttactgcctggagtactttccttctcagatgctgcgtaccggaaacaactttaccttcagctacacttttgaggacgttcctttccacagcagctacgctcacagccagagtctggaccgtctcatgaatcctctcatcgaccagtacctgtattacttgagcagaacaaacactccaagtggaaccaccacgcagtcaaggcttcagttttctcaggccggagcgagtgacattcgggaccagtctaggaactggcttcctggaccctgttaccgccagcagcgagtatcaaagacatctgcggataacaacaacagtgaatactcgtggactggagctaccaagtaccacctcaatggcagggactctctggtgaatccgggcccggccatggcaagccacaaggacgatgaagaaaagttttttcctcagagcggggttctcatctttgggaagcaaggctcagagaaaacaaatgtggacattgaaaaggtcatgattacagacgaagaggaaatcaggacaaccaatcccgtggctacggagcagtatggttctgtatctaccaacctccagagaggcaacagacaagcagctaccgcagatgtcaacacacaaggcgttcttccaggcatggtctggcaggacagagatgtgtaccttcaggggcccatctgggcaaagattccacacacggacggacattttcacccctctcccctcatgggtggattcggacttaaacaccctcctccacagattctcatcaagaacaccccggtacctgcgaatccttcgaccaccttcagtgcggcaaagtttgcttccttcatcacacagtactccacgggacaggtcagcgtggagatcgagtgggagctgcagaaggaaaacagcaaacgcgggaatcccgaaattcagtacacttccaactacaacaagtctgttaatgtggactttactgtggacactaatggcgtgtattcagagcctcgccccattggcaccagatacctgactcgtaatctgtaa

SEQ ID NO: 3311 - DNA, 2208 bp, Artificial Sequence
  source: /note="Description of Artificial Sequence: Synthetic polynucleotide"
atggctgccgatggttatcttccagattggctcgaggacactctctctgaaggaataagacagtggtggaagctcaaacctggcccaccaccaccaaagcccgcagagcggcataaggacgacagcaggggtcttgtgcttcctgggtacaagtacctcggacccttcaacggactcgacaagggagagccggtcaacgaggcagacgccgcggccctcgagcacgacaaagcctacgaccggcagctcgacagcggagacaacccgtacctcaagtacaaccacgccgacgcggagtttcaggagcgccttaaagaagatacgtcttttgggggcaacctcggacgagcagtcttccaggcgaaaaagagggttcttgaacctctgggcctggttgaggaacctgttaagacggctccgggaaaaaagaggccggtagagcactctcctgtggagccagactcctcctcgggaaccggaaaggcgggccagcagcctgcaagaaaaagattgaattttggtcagactggagacgcagactcagtacctgacccccagcctctcggacagccaccagcagccccctctggtctgggaactaatacgatggctacaggcagtggcgcaccaatggcagacaataacgagggcgccgacggagtgggtaattcctcgggaaattggcattgcgattccacatggatgggcgacagagtcatcaccaccagcacccgaacctgggccctgcccacctacaacaaccacctctacaaacaaatttccagccaatcaggagcctcgaacgacaatcactactttggctacagcaccccttgggggtattttgacttcaacagattccactgccacttttcaccacgtgactggcaaagactcatcaacaacaactggggattccgacccaagagactcaacttcaagctctttaacattcaagtcaaagaggtcacgcagaatgacggtacgacgacgattgccaataaccttaccagcacggttcaggtgtttactgactcggagtaccagctcccgtacgtcctcggctcggcgcatcaaggatgcctcccgccgttcccagcagacgtcttcatggtgccacagtatggatacctcaccctgaacaacgggagtcaggcagtaggacgctcttcattttactgcctggagtactttccttctcagatgctgcgtaccggaaacaactttaccttcagctacacttttgaggacgttcctttccacagcagctacgctcacagccagagtctggaccgtctcatgaatcctctcatcgaccagtacctgtattacttgagcagaacaaacactccaagtggaaccaccacgcagtcaaggcttcagttttctcaggccggagcgagtgacattcgggaccagtctaggaactggcttcctggaccctgttaccgccagcagcgagtatcaaagacatctgcggataacaacaacagtgaatacccgtggactggagctaccaagtaccacctcaatggcagagactctctggtgaatccgggcccggccatggcaagccacaaggacgatgaagaaaagttttttcctcagagcggggttctcatctttgggaagcaaggctcagagaaaacaaatgtggacattgaaaaggtcatgattacagacgaagaggaaatcaggacaaccaatcccgtggctacggagcagtatggttctgtatctaccaacctccagagaggcaacagacaagcagctaccgcagatgtcaacacacaaggcgttcttccaggcacggtctggcaggacagagatgtgtaccttcaggggcccatctgggcaaagattccacacacggacggacattttcacccctctcccctcatgggtggattcggacttaaacaccctcctccacagattctcatcaagaacaccccggtacctgcgaatccttcgaccaccttcagtgcggcaaagtttgcttccttcatcacacagtactccacgggacaggtcagcgtggagatcgagtgggagctgcagaaggaaaacagcaaacgctggaatcccgaaattcagtacacttccaactacaacaagtctgttaatgtggactttactgtggacactaatggcgtgtattcagagcctcgccccattggcaccagatacctgactcgtaatctgtaa

SEQ ID NO: 3312 - DNA, 2208 bp, Artificial Sequence
  source: /note="Description of Artificial Sequence: Synthetic polynucleotide"
atggctgccgatggttatcttccagattggctcgaggacactctctctgaaggaataagacagtggtggaagctcaaacctggcccaccaccaccaaagcccgcagagcggcataaggacgacagcaggggtcttgtgcttcctgggtacaagtacctcggacccttcaacggactcgacaagggagagccggtcaacgaggcagacgccgcggccctcgagcacgacaaagcctacgaccggcagctcgacagcggagacaacccgtacctcaagtacaaccacgccgacgcggagtttcaggagcgccttaaagaagatacgtcttttgggggcaacctcggacgagcagtcttccaggcgaaaaagagggttcttgaacctctgggcctggttgaggaacctgttaagacggctccgggaaaaaagaggccggtagagcactctcctgtggagccagactcctcctcgggaaccggaaaggcgggccagcagcctgcaagaaaaagattgaattttggtcagactggagacgcagactcagtacctgacccccagcctctcggacagccaccagcagccccctctggtctgggaactaatacgatggctacaggcagtggcgcaccaatggcagacaataacgagggcgccgacggagtgggtaattcctcgggaaattggcattgcgattccacatggatgggcgacagagtcatcaccaccagcacccgaacctgggccctgcccacctacaacaaccacctctacaaacaaatttccagccaatcaggagcctcgaacgacaatcactactttggctacagcaccccttgggggtattttgacttcaacagattccactgccacttttcaccacgtgactggcaaagactcatcaacaacaactggggattccgacccaagagactcaacttcaagctctttaacattcaagtcaaagaggtcacgcagaatgacggtacgacgacgattgccaataaccttaccagcacggttcaggtgtttactgactcggagtaccagctcccgtacgtcctcggctcggcgcatcaaggatgcctcccgccgttcccagcagacgtcttcatggtgccacagtatggatacctcaccctgaacaacgggagtcaggcagtaggacgctcttcattttactgcctggagtactttccttctcagatgctgcgtaccggaaacaactttaccttcagctacacttttgaggacgttcctttccacagcagctacgctcacagccagagtctggaccgtctcatgaatcctctcatcgaccagtacctgtattacttgagcagaacaaacactccaagtggaaccaccacgcagtcaaggcttcagttttctcaggccggagcgagtgacattcgggaccagtctaggaactggcttcctggaccctgttaccgccagcagcgagtatcaaagacatctgcggataacaacaacagtgaatactcgtggactggagctaccaagtaccacctcaatggcagagactctctggtgaatccgggcccggccatggcaagccacaaggacgatgaagaaaagttttttcctcagagcggggttctcatctttgggaagcaaggctcagagaaaacaaatgtgggcattgaaaaggtcatgattacagacgaagaggaaatcaggacaaccaatcccgtggctacggagcagtatggttctgtatctaccaacctccagagaggcaacagacaagcagctaccgcagatgtcaacacacaaggcgttcttccaggcacggtctggcaggacagagatgtgtaccttcaggggcccatctgggcaaagattccacacacggacggacattttcacccctctcccctcatgggtggattcggacttaaacaccctcctccacagattctcatcaagaacaccccggtacctgcgaatccttcgaccaccttcagtgcggcaaagtttgcttccttcatcacacagtactccacgggacaggtcagcgtggagatcgagtgggagctgcagaaggaaaacagcaaacgctggaatcccgaaattcagtacacttccaactacaacaagtctgttaatgtggactttactgtggacactaatggcgtgtattcagagcctcgccccattggcaccagatacctgactcgtaatctgtaa

SEQ ID NO: 3313 - DNA, 2208 bp, Artificial Sequence
  source: /note="Description of Artificial Sequence: Synthetic polynucleotide"
atggctgccgatggttatcttccagattggctcgaggacactctctctgaaggaataagacagtggtggaagctcaaacctggcccaccaccaccaaagcccgcagggcggcataaggacgacagcaggggtcttgtgcttcctgggtacaagtacctcggacccttcaacggactcgacaagggagagccggtcaacgaggcagacgccgcggccctcgagcacgacaaagcctacgaccggcagctcgacagcggagacaacccgtacctcaagtacaaccacgccgacgcggagtttcaggagcgccttaaagaagatacgtcttttgggggcaacctcggacgagcagtcttccaggcgaaaaagagggctcttgaacctctgggcctggttgaggaacctgttaagacggctccgggaaaaaagaggccggtagagcactctcctgtggagccagactcctcctcgggaaccggaaaggcgggccagcagcctgcaagaaaaagattgaattttggtcagactggagacgcagactcagtacctgacccccagcctctcggacagccaccagcagccccctctggtctgggaactaatacgatggctacaggcagtggcgcaccaatggcagacaataacgagggcgccgacggagtgggtaattcctcgggaaattggcattgcgattccacatggatgggcgacagagtcatcaccaccagcacccgaacctgggccctgcccacctacaacaaccacctctacaaacaaatttccagccaatcaggagcctcgaacgacaatcactactttggctacagcaccccttgggggtattttgacttcaacagattccactgccacttttcaccacgtgactggcaaagactcatcaacaacaactggggattccgacccaagagactcaacttcaagctctttaacattcaagtcaaagaggtcacgcagaatgacggtacgacgacgattgccaataaccttaccagcacggttcaggtgtttactgactcggagtaccagctcccgtacgtcctcggctcggcgcatcaaggatgcctcccgccgttcccagcagacgtcttcatggtgccacagtatggatacctcaccctgaacaacgggagtcaggcagtaggacgctcttcattttactgcctggagtactttccttctcagatgctgcgtaccggaaacaactttaccttcagctacacttttgaggacgttcctttccacagcagctacgctcacagccagagtctggaccgtctcatgaatcctctcatcgaccagtacctgtattacttgagcagaacaaacactccaagtggaaccaccacgcagtcaaggcttcagttttctcaggccggagcgagtgacattcgggaccagtctaggaactggcttcctggaccctgttaccgccagcagcgagtatcaaagacatctgcggataacaacaacagtgaatactcgtggactggagctaccaagtaccacctcaatggcagagactctctggtgaatccgggcccggccatggcaagccacaaggacgatgaagaaaagttttttcctcagagcggggttctcatctttgggaagcaaggctcagagaaaacaaatgtggacattgaaaaggtcatgattacagacgaagaggaaatcaggacaaccaatcccgtggctacggagcagtatggttctgtatctaccaacctccagagaggcaacagacaagcagctaccgcagatgtcaacacacaaggcgttcttccaggcatggtctggcaggacagagatgtgtaccttcaggggcccatctgggcaaagattccacacacggacggacattttcacccctctcccctcatgggtggattcggacttaaacaccctcctccacagattctcatcaagaacaccccggtacctgcgaatccttcgaccaccttcagtgcggcaaagtttgcttccttcatcacacagtactccacgggacaggtcagcgtggagatcgagtgggagctgcagaaggaaaacagcaaacgctggaatcccgaaattcagtacacttccaactacaacaagtctgttaatgtggactttactgtggacactaatggcgtgtattcagagcctcgccccattggcaccagatacctgactcgtaatctgtaa

SEQ ID NO: 3314 - DNA, 2208 bp, Artificial Sequence
  source: /note="Description of Artificial Sequence: Synthetic polynucleotide"
atggctgccgatggttatcttccagattggctcgaggacactctctctgaaggaataagacagtggtggaagctcaaacctggcccaccaccaccaaagcccgcagagcggcataaggacgacagcaggggtcttgtgcttcctgggtacaagtacctcggacccttcaacggactcgacaagggagagccggtcaacgaggcagacgccgcggccctcgagcacgacaaagcctacgaccggcagctcgacagcggagacaacccgtacctcaagtacaaccacgccgacgcggagtttcaggagcgccttaaagaagatacgtcttttgggggcaacctcggacgagcagtcttccaggcgaaaaagagggttcttgaacctctgggcctggttgaggaacctgttaagacggctccgggaaaaaagaggccggtagagcactctcctgtggagccagactcctcctcgggaaccggaaaggcgggccagcagcctgcaagaaaaagattgaattttggtcagactggagacgcagactcagtacctgacccccagcctctcggacagccaccagcagccccctctggtctgggaactaatacgatggctacaggcagtggcgcaccaatggcagacaataacgagggcgccgacggagtgggtaattcctcgggaaattggcattgcgattccacatggatgggcgacagagtcatcaccaccagcacccgaacctgggccctgcccacctacaacaaccacctctacaaacaaatttccagccaatcaggagcctcgaacgacaatcactactttggctacagcaccccttgggggtattttgacttcaacagattccactgccacttttcaccacgtgactggcaaagactcatcaacaacaactggggattccgacccaagagactcaacttcaagctctttaacattcaagtcaaagaggtcacgcagaatgacggtacgacgacgattgccaataaccttaccagcacggttcaggtgtttactgactcggagtaccagctcccgtacgtcctcggctcggcgcatcaaggatgcctcccgccgttcccagcagacgtcttcatggtgccacagtatggatacctcaccctgaacaacgggagtcaggcagtaggacgctcttcattttactgcctggagtactttccttctcagatgctgcgtaccggaaacaactttaccttcagctacacttttgaggacgttcctttccacagcagctacgctcacagccagagtctggaccgtctcatgaatcctctcatcgaccagtacctgtattacttgagcagaacaaacactccaagtggaaccaccacgcagtcaaggcctcagttttctcaggccggagcgagtgacattcgggaccagtctaggaactggcttcctggaccctgttaccgccagcagcgagtatcaaagacatctgcggataacaacaacagtgaatactcgtggactggagctaccaagtaccacctcaatggcagagactctctggtgaatccgggcccggccatggcaagccacaaggacgatgaagaaaagttttttcctcagagcggggttctcatctttgggaagcaaggctcagagaaaacaaatgtggacattgaaaaggtcatgattacagacgaagaggaaatcaggacaaccaatcccgtggctacggagcagtatggttctgtatctaccaacctccagagaggcaacagacaagcagctaccgcagatgtcaacacacaaggcgttcttccaggcacggtctggcaggacagagatgtgtaccttcaggggcccatctgggcaaagattccacacacggacggacattttcacccctctcccctcatgggtggattcggacttaaacaccctcctccacagattctcatcaagaacaccccggtacctgcgaatccttcgaccaccttcagtgcggcaaagtttgcttccttcatcacacagtactccacgggacaggtcagcgtggagatcgagtgggagctgcagaaggaaaacagcaaacgctggaatcccgaaattcagtacacttccaactacaacaagtctgttaatgtggactttactgtggacactaatggcgtgtattcagagcctcgccccattggcaccagatacctgactcgtaatctgtaa

SEQ ID NO: 3315 - DNA, 2208 bp, Artificial Sequence; identical to SEQ ID NO: 21
  source: /note="Description of Artificial Sequence: Synthetic polynucleotide"

SEQ ID NO: 3316 - DNA, 2208 bp, Artificial Sequence
  source: /note="Description of Artificial Sequence: Synthetic polynucleotide"
atggctgccgatggttatcttccagattggctcgaggacactctctctgaaggaataagacagtggtggaagctcaaacctggcccaccaccaccaaagcccgcagagcggcataaggacgacagcaggggtcttgtgcttcctgggtacaagtacctcggacccttcaacggactcgacaagggagagccggtcaacgaggcagacgccgcggccctcgagcacgacaaagcctacaaccggcaactcgacagcggagacaacccgtacctcaagtacaaccacgccgacgcggagtttcaggagcgccttaaagaagatacgtcttttgggggcaacctcggacgagcagtcttccaggcgaaaaagagggttcttgaacctctgggcctggttgaggaacctgttaagacggctccgggaaaaaagaggccggtagagcactctcctgtggagccagactcctcctcgggaaccggaaaggcgggccagcagcctgcaagaaaaagattgaattttggtcagactggagacgcagactcagtacctgacccccagcctctcggacagccaccagcagccccctctggtctgggaactaatacgatggctacaggcagtggcgcaccaatggcagacaataacgagggcgccgacggagtgggtaattcctcgggaaattggcattgcgattccacatggatgggcgacagagtcatcaccaccagcacccgaacctgggccctgcccacctacaacaaccacctctacaaacaaatttccagccaatcaggagcctcgaacgacaatcactactttggctacagcaccccttgggggtattttgacttcaacagattccactgccacttttcaccacgtgactggcaaagactcatcaacaacaactggggattccgacccaagagactcaacttcaagctctttaacattcaagtcaaagaggtcacgcagaatgacggtacgacgacgattgccaataaccttaccagcacggttcaggtgtttactgactcggagtaccagctcccgtacgtcctcggctcggcgcatcaaggatgcctcccgccgttcccagcagacgtcttcatggtgccacagtatggatacctcaccctgaacaacgggagtcaggcagtaggacgctcttcattttactgcctggagtactttccttctcagatgctgcgtaccggaaacaactttaccttcagctacacttttgaggacgttcctttccacagcagctacgctcacagccagagtctggaccgtctcatgaatcctctcatcgaccagtacctgtattacttgagcagaacaaacactccaagtggaaccaccacgcagtcaaggcttcagttttctcaggccggagcgagtgacattcgggaccagtctaggaactggcttcctggaccctgttaccgccagcagcgagtatcaaagacatctgcggataacaacaacagtgaatactcgtggactggagctaccaagtaccacctcaatggcagggactctctggtgaatccgggcccggccatggcaagccacaaggacgatgaagaaaagttttttcctcagagcggggttctcatctttgggaagcaaggctcagagaaaacaaatgtggacattgaaaaggtcatgattacagacgaagaggaaatcaggacaaccaatcccgtggctacggagcagtatggttctgtatctaccaacctccagagaggcaacagacaagcagctaccgcagatgtcaacacacaaggcgttcttccaggcatggtctggcaggacagagatgtgtaccttcaggggcccatctgggcaaagattccacacacggacggacattttcacccctctcccctcatgggtggattcggacttaaacaccctcctccacagattctcatcaagaacaccccggtacctgcgaatccttcgaccaccttcagtgcggcaaagtttgcttccttcatcacacagtactccacgggacaggtcagcgtggagatcgagtgggagctgcagaaggaaaacagcaaacgctggaatcccgaaattcagtacacttccaactacaacaagtctgttaatgtggactttactgtggacactaatggcgtgtattcagagcctcgccccattggcaccagatacctgactcgtaatctgtaa

SEQ ID NO: 3317 - DNA, 2208 bp, Artificial Sequence
  source: /note="Description of Artificial Sequence: Synthetic polynucleotide"
atggctgccgatggttatcttccagattggctcgaggacactctctctgaaggaataagacagtggtggaagctcaaacctggcccaccaccaccaaagcccgcagagcggcataaggacgacagcaggggtcttgtgcttcctgggtacaagtacctcggacccttcaacggactcgacaagggagagccggtcaacgaggcagacgccgcggccctcgagcacgacaaagcctacgaccggcagctcgacagcggagacaacccgtacctcaagtacaaccacgccgacgcggagtttcaggagcgccttaaagaagatacgtcttttgggggcaacctcggacgagcagtcttccaggcgaaaaagagggttcttgaacctctgggcctggttgaggaacctgttaagacggctccgggaaaaaagaggccggtagagcactctcctgtggagccagactcctcctcgggaaccggaaaggcgggccagcagcctgcaagaaaaagattgaattttggtcagactggagacgcagactcagtacctgacccccagcctctcggacagccaccagcagccccctctggtctgggaactaatacgatggctacaggcagtggcgcaccaatggcagacaataacgagggcgccgacggagtgggtaattcctcgggaaattggcattgcgattccacatggatgggcgacagagtcatcaccaccagcacccgaacctgggccctgcccacctacaacaaccacctctacaaacaaatttccagccaatcaggagcctcgaacgacaatcactactttggctacagcaccccttgggggtattttgacttcaacagattccactgccacttttcaccacgtgactggcaaagactcatcaacaacaactggggattccgacccaagagactcaacttcaagctctttaacattcaagtcaaagaggtcacgcagaatgacggtacgacgacgattgccaataaccttaccagcacggttcgggtgtttactgactcggagtaccagctcccgtacgtcctcggctcggcgcatcaaggatgcctcccgccgttcccagcagacgtcttcatggtgccacagtatggatacctcaccctgaacaacgggagtcaggcagtaggacgctcttcattttactgcctggagtactttccttctcagatgctgcgtaccggaaacaactttaccttcagctacacttttgaggacgttcctttccacagcagctacgctcacagccagagtctggaccgtctcatgaatcctctcatcgaccagtacctgtattacttgagcagaacaaacactccaagtggaaccaccacgcagtcaaggcttcagttttctcaggccggagcgagtgacattcgggaccagtctaggaactggcttcctggaccctgttaccgccagcagcgagtatcaaagacatctgcggataacaacaacagtgaatactcgtggactggagctaccaagtaccacctcaatggcagagactctctggtgaatccgggcccggccatggcaagccacaaggacgatgaagaaaagttttttcctcagagcggggttctcatctttgggaagcaaggctcagagaaaacaaatgtggacattgaaaaggtcatgattacagacgaagaggaaatcaggacaaccaatcccgtggctacggagcagtatggttctgtatctaccaacctccagagaggcaacagacaagcagctaccgcagatgtcaacacacaaggcgttcttccaggcacggtctggcaggacagagatgtgtaccttcaggggcccatctgggcaaagattccacacacggacggacattttcacccctctcccctcatgggtggattcggacttaaacaccctcctccacagattctcatcaagaacaccccggtacctgcgaatccttcgaccaccttcagtgcggcaaagtttgcttccttcatcacacagtactccacgggacaggtcagcgtggagatcgagtgggagctgcagaaggaaaacagcaaacgctggaatcccgaaattcagtacacttccaactacaacaagtctgttaatgtggactttactgtggacactaatggcgtgtattcagagcctcgccccattggcaccagatacctgactcgtaatctgtaa

SEQ ID NO: 3318 - DNA, 2208 bp, Artificial Sequence
  source: /note="Description of Artificial Sequence: Synthetic polynucleotide"
atggctgccgatggttatcttccagattggctcgaggacactctctctgaaggaataagacagtggtggaagctcaaacctggcccaccaccaccaaagcccgcagagcggcataaggacgacagcaggggtcttgtgcttcctgggtacaagtacctcggacccttcaacggactcgacaagggagagccggtcaacgaggcagacgccgcggccctcgagcacgacaaagcctacgaccggcagctcgacagcggagacaacccgtacctcaagtacaaccacgccgacgcggagtttcaggagcgccttaaagaagatacgtcttttgggggcaacctcggacgagcagtcttccaggcgaaaaagagggttcttgaacctctgggcctggttgaggaacctgttaagacggctccgggaaaaaagaggccggtagagcactctcctgtggagccagactcctcctcgggaaccggaaaggcgggccagcagcctgcaagaaaaagattgaattttggtcagactggagacgcagactcagtacctgacccccagcctctcggacagccaccagcagccccctctggtctgggaactaatacgatggctacaggcagtggcgcaccaatggcagacaataacgagggcgccgacggagtgggtaattcctcgggaaattggcattgcgattccacatggatgggcgacagagtcatcaccaccagcacccgaacctgggccctgcccacctacaacaaccacctctacaaacaaatttccagccaatcaggagcctcgaacgacaatcactactttggctacagcaccccttgggggtattttgacttcaacagattccactgccacttttcaccacgtgactggcaaagactcatcaacaacaactggggattccgacccaagagactcaacttcaagctctttaacattcaagtcaaagaggtcacgcagaatgacggtacgacgacgattgccaataaccttaccagcacggttcaggtgtttactgactcggagtaccagctcccgtacgtcctcggctcggcgcatcaaggatgcctcccgccgttcccagcagacgtcttcatggtgccacagtatggatacctcaccctgaacaacgggagtcaggcagtaggacgctcttcattttactgcctggagtactttccttctcagatgctgcgtaccggaaacaactttaccttcagctacacttttgaggacgctcctttccacagcagctacgctcacagccagagtctggaccgtctcatgaatcctctcatcgaccagtacctgtattacttgagcagaacaaacactccaagtggaaccaccacgcagtcaaggcttcagttttctcaggccggagcgagtgacattcgggaccagtctaggaactggcttcctggaccctgttaccgccagcagcgagtatcaaagacatctgcggataacaacaacagtgaatactcgtggactggagctaccaagtaccacctcaatggcagagactctctggtgaatccgggcccggccatggcaagccacaaggacgatgaagaaaagttttttcctcagagcggggttctcatctttgggaagcaaggctcagagaaaacaaatgtggacattgaaaaggtcatgattacagacgaagaggaaatcaggacaaccaatcccgtggctacggagcagtatggttctgtatctaccaacctccagagaggcaacagacaagcagctaccgcagatgtcaacacacaaggcgttcttccaggcacggtctggcaggacagagatgtgtaccttcaggggcccatctgggcaaagattccacacacggacggacattttcacccctctcccctcatgggtggattcggacttaaacaccctcctccacagattctcatcaagaacaccccggtacctgcgaatccttcgaccaccttcagtgcggcaaagtttgcttccttcatcacacagtactccacgggacaggtcagcgtggagatcgagtgggagctgcagaaggaaaacagcaaacgctggaatcccgaaattcagtacacttccaactacaacaagtctgttaatgtggactttactgtggacactaatggcgtgtattcagagcctcgccccattggcaccagatacctgactcgtaatctgtaa

SEQ ID NO: 3319 - DNA, 2205 bp, Artificial Sequence
  source: /note="Description of Artificial Sequence: Synthetic polynucleotide"
atggctgccgatggttatcttccagattggctcgaggacactctctctgaaggaataagacagtggtggaagctcaaacctggcccaccaccaaagcccgcagagcggcataaggacgacagcaggggtcttgtgcttcctgggtacaagtacctcggacccttcaacggactcgacaagggagagccggtcaacgaggcagacgccgcggccctcgagcacgacaaagcctacgaccggcagctcgacagcggagacaacccgtacctcaagtacaaccacgccgacgcggagtttcaggagcgccttaaagaagatacgtcttttgggggcaacctcggacgagcagtcttccaggcgaaaaagagggttcttgaacctctgggcctggttgaggaacctgttaagacggctccgggaaaaaagaggccggtagagcactctcctgtggagccagactcctcctcgggaaccggaaaggcgggccagcagcctgcaagaaaaagattgaattttggtcagactggagacgcagactcagtacctgacccccagcctctcggacagccaccagcagccccctctggtctgggaactaatacgatggctacaggcagtggcgcaccaatggcagacaataacgagggcgccgacggagtgggtaattcctcgggaaattggcattgcgattccacatggatgggcgacagagtcatcaccaccagcacccgaacctgggccctgcccacctacaacaaccacctctacaaacaaatttccagccaatcaggagcctcgaacgacaatcactactttggctacagcaccccttgggggtattttgacttcaacagattccactgccacttttcaccacgtgactggcaaagactcatcaacaacaactggggattccgacccaagagactcaacttcaagctctttaacattcaagtcaaagaggtcacgcagaatgacggtacgacgacgattgccaataaccttaccagcacggttcaggtgtttactgactcggagtaccagctcccgtacgtcctcggctcggcgcatcaaggatgcctcccgccgttcccagcagacgtcttcatggtgccacagtatggatacctcaccctgaacaacgggagtcaggcagtaggacgctcttcattttactgcctggagtactttccttctcagatgctgcgtaccggaaacaactttaccttcagctacacttttgaggacgttcctttccacagcagctacgctcacagccagagtctggaccgtctcatgaatcctctcatcgaccagtacctgtattacttgagcagaacaaacactccaagtggaaccaccacgcagtcaaggcttcagttttctcaggccggagcgagtgacattcgggaccagtctaggaactggcttcctggaccctgttaccgccagcagcgagtatcaaagacatctgcggataacaacaacagtgaatactcgtggactggagctaccaagtaccacctcaatggcagagactctctggtgaatccgggcccggccatggcaagccacaaggacgatgaagaaaagttttttcctcagagcggggttctcatctttgggaagcaaggctcagagaaaacaaatgtggacattgaaaaggtcatgattacagacgaagaggaaatcaggacaaccaatcccgtggctacggagcagtatggttctgtatctaccaacctccagagaggcaacagacaagcagctaccgcagatgtcaacacacaaggcgttcttccaggcacggtctggcaggacagagatgtgtaccttcaggggcccatctgggcaaagattccacacacggacggacattttcacccctctcccctcatgggtggattcggacttaaacaccctcctccacagattctcatcaagaacaccccggtacctgcgaatccttcgaccaccttcagtgcggcaaagtttgcttccttcatcacacagtactccacgggacaggtcagcgtggagatcgagtgggagctgcagaaggaaaacagcaaacgctggaatcccgaaattcagtacacttccaactacaacaagtctgttaatgtggactttactgtggacactaatggcgtgtattcagagcctcgccccattggcaccagatacctgactcgtaatctgtaa

SEQ ID NO: 3320 - DNA, 2208 bp, Artificial Sequence
  source: /note="Description of Artificial Sequence: Synthetic polynucleotide"
atggctgccgatggttatcttccagattggctcgaggacactctctctgaaggaataagacagtggtggaagctcaaacctggcccaccaccaccaaagcccgcagagcggcataaggacgacagcaggggtcttgtgcttcctgggtacaagtacctcggacccttcaacggactcgacaagggagagccggtcaacgaggcagacgccgcggccctcgagcacgacaaagcctacgaccggcagctcgacagcggagacaacccgtacctcaagtacaaccacgccgacgcggagtttcaggagcgccttaaagaagatacgtcttttgggggcaacctcggacgagcagtcttccaggcgaaaaagagggctcttgaacctctgggcctggttgaggaacctgttaagacggctccgggaaaaaagaggccggtagagcactctcctgtggagccagactcctcctcgggaaccggaaaggcgggccagcagcctgcaagaaaaagattgaattttggtcagactggagacgcagactcagtacctgacccccagcctctcggacagccaccagcagccccctctggtctgggaactaatacgatggctacaggcagtggcgcaccaatggcagacaataacgagggcgccgacggagtgggtaattcctcgggaaattggcattgcgattccacatggatgggcgacagagtcatcaccaccagcacccgaacctgggccctgcccacctacaacaaccacctctacaaacaaatttccagccaatcaggagcctcgaacgacaatcactactttggctacagcaccccttgggggtattttgacttcaacagattccactgccacttttcaccacgtgactggcaaagactcatcaacaacaactggggattccgacccaagagactcaacttcaagctctttaacattcaagtcaaagaggtcacgcagaatgacggtacgacgacgattgccaataaccttaccagcacggttcaggtgtttactgactcggagtaccagctcccgtacgtcctcggctcggcgcatcaaggatgcctcccgccgttcccagcagacgtcttcatggtgccacagtatggatacctcaccctgaacaacgggagtcaggcagtaggacgctcttcattttactgcctggagtactttccttctcagatgctgcgtaccggaaacaactttaccttcagctacacttttgaggacgttcctttccacagcagctacgctcacagccagagtctggaccgtctcatgaatcctctcatcgaccagtacctgtattacttgagcagaacaaacactccaagtggaaccaccacgcagtcaaggcttcggttttctcaggccggagcgagtgacattcgggaccagtctaggaactggcttcctggaccctgttaccgccagcagcgagtatcaaagacatctgcggataacaacaacagtgaatactcgtggactggagctaccaagtaccacctcaatggcagagactctctggtgaatccgggcccggccatggcaagccacaaggacgatgaagaaaagttttttcctcagagcggggttctcatctttgggaagcaaggctcagagaaaacaaatgtggacattgaaaaggtcatgattacagacgaagaggaaatcaggacaaccaatcccgtggctacggagcagtatggttctgtatctaccaacctccagagaggcaacagacaagcagctaccgcagatgtcaacacacaaggcgttcttccaggcatggtctggcaggacagagatgtgtaccttcaggggcccatctgggcaaagattccacacacggacggacattttcacccctctcccctcatgggtggattcggacttaaacaccctcctccacagattctcatcaagaacaccccggtacctgcgaatccttcgaccaccttcagtgcggcaaagtttgcttccttcatcacacagtactccacgggacaggtcagcgtggagatcgagtgggagctgcagaaggaaaacagcaaacgctggaatcccgaaattcagtacacttccaactacaacaagtctgttaatgtggactttactgtggacactaatggcgtgtattcagagcctcgccccattggcaccagatacctgactcgtaatctgtaa

SEQ ID NO: 3321 - DNA, 2208 bp, Artificial Sequence
  source: /note="Description of Artificial Sequence: Synthetic polynucleotide"
atggctgccgatggttatcttccagattggctcgaggacactctctctgaaggaataagacagtggtggaagctcaaacctggcccaccaccaccaaagcccgcagagcggcataaggacgacagcaggggtcttgtgcttcctgggtacaagtacctcggacccttcaacggactcgacaagggagagccggtcaacgaggcagacgccgcggccctcgagcacgacaaagcctacgaccggcagctcgacagcggagacaacccgtacctcaagtacaaccacgccgacgcggagtttcaggagcgccttaaagaagatacgtcttttgggggcaacctcggacgagcagtcttccaggcgaaaaagagggttcttgaacctctgggcctggttgaggaacctgttaagacggctccgggaaaaaagaggccggtagagcactctcctgtggagccagactcctcctcgggaaccggaaaggcgggccagcggcctgcaagaaaaagattgaattttggtcagactggagacgcagactcagtacctgacccccagcctctcggacagccaccagcagccccctctggtctgggaactaatacgatggctacaggcagtggcgcaccaatggcagacaataacgagggcgccgacggagtgggtaattcctcgggaaattggcattgcgattccacatggatgggcgacagagtcatcaccaccagcacccgaacctgggccctgcccacctacaacaaccacctctacaaacaaatttccagccaatcaggagcctcgaacgacaatcactactttggctacagcaccccttgggggtattttgacttcaacagattccactgccacttttcaccacgtgactggcaaagactcatcaacaacaactggggattccgacccaagagactcaacttcaagctctttaacattcaagtcaaagaggtcacgcagaatgacggtacgacgacgattgccaataaccttaccagcacggttcaggtgtttactgactcggagtaccagctcccgtacgtcctcggctcggcgcatcaaggatgcctcccgccgttcccagcagacgtcttcatggtgccacagtatggatacctcaccctgaacaacgggagtcaggcagtaggacgctcttcattttactgcctggagtactttccttctcagatgctgcgtaccggaaacaactttaccttcagctacacttttgaggacgttcctttccacagcagctacgctcacagccagagtctggaccgtctcatgaatcctctcatcgaccagtacctgtattacttgagcagaacaaacactccaagtggaaccaccacgcagtcaaggcttcagttttctcaggccggagcgagtgacattcgggaccagtctaggaactggcttcctggaccctgttaccgccagcagcgagtatcaaagacatctgcggataacaacaacagtgaatactcgtggactggagctaccaagtaccacctcaatggcagagactctctggtgaatccgggcccggccatggcaagccacaaggacgatgaagaaaagttttttcctcagagcggggttctcatctttgggaagcaaggctcagagaaaacaaatgtggacattgaaaaggtcatgattacagacgaagaggaaatcaggacaaccaatcccgtggctacggagcagtatggttctgtatctaccaacctccagagaggcaacagacaagcagctaccgcagatgtcaacacacaaggcgttcttccaggcacggtctggcaggacagagatgtgtaccttcaggggcccatctgggcaaagattccacacacggacggacattttcacccctctcccctcatgggtggattcggacttaaacaccctcctccacagattctcatcaagaacaccccggtacctgcgaatccttcgaccaccttcagtgcggcaaagtttgcttccttcatcacacagtactccacgggacaggtcagcgtggagatcgagtgggagctgcagaaggaaaacagcaaacgctggaatcccgaaattcagtacacttccaactacaacaagtctgttaatgtggactttactgtggacactaatggcgtgtattcagagcctcgccccattggcaccagatacctgactcgtaatctgtaa

SEQ ID NO: 3322 - DNA, 2208 bp, Artificial Sequence
  source: /note="Description of Artificial Sequence: Synthetic polynucleotide"
atggctgccgatggttatcttccagattggctcgaggacactctctctgaaggaataagacagtggtggaagctcaaacctggcccaccaccaccaaagcccgcagagcggcataaggacgacagcaggggtcttgtgcttcctgggtacaagtacctcggacccttcaacggactcgacaagggagagccggtcaacgaggcagacgccgcggccctcgagcacgacaaagcctacgaccggcagctcgacagcggagacaacccgtacctcaagtacaaccacgccgacgcggagtttcaggagcgccttaaagaagatacgtcttttgggggcaacctcggacgagcagtcttccaggcgaaaaagagggttcttgaacctctgggcctggttgaggaacctgttaagacggctccgggaaaaaagaggccggtagagcactctcctgtggagccagactcctcctcgggaaccggaaaggcgggccagcagcctgcaagaaaaagattgaattttggtcagactggagacgcagactcagtacctgacccccagcctctcggacagccaccagcagccccctctggtctgggaactaatacgatggctacaggcagtggcgcaccaatggcagacaataacgagggcgccgacggagtgggtaattcctcgggaaattggcattgcgattccacatggatgggcgacagagtcatcaccaccagcacccgaacctgggccctgcccacctacaacaaccacctctacaaacaaatttccagccaatcaggagcctcgaacgacaatcactactttggctacagcaccccttgggggtattttgacttcaacagattccactgccacttttcaccacgtgactggcaaagactcatcaacaacaactggggattccgacccaagagactcaacttcaagctctttaacattcaagtcaaagaggtcacgcagaatgacggtacgacgacgattgccaataaccttaccagcacggttcaggtgtttactgactcggagtaccagctcccgtacgtcctcggctcggcgcatcaaggatgcctcccgccgttcccagcagacgtcttcatggtgccacagtatggatacctcaccctgaacaacgggagtcaggcagtaggacgctcttcattttactgcctggagtactttccttctcagatgctgcgtaccggaaacaactttaccttcagctacacttttgaggacgttcctttccacagcagctacgctcacagccagagtctggaccgtctcatgaatcctctcatcgaccagtacctgtattacttgagcagaacaaacactccaagtggaaccaccacgcagtcaaggcttcagttttctcaggccggagcgagtgacattcgggaccagtctaggaactggcttcctggaccctgttaccgccagcagcgagtatcaaagacatctgcggataacaacaacagtgaatactcgtggactggagctaccaagtaccacctcaatggcagagactctctggtgaatccgggcccggccatggcaagccacaaggacgatgaagaaaagttttttcctcagagcggggttctcatctttgggaagcaaggctcagagaaaacaaatgtggacattgaaaaggtcatgattacagacgaagaggaaatcaggacaaccaatcccgtggctacggagcagtatggttctgtatctaccaacctccagagaggcaacagacaagcagctaccgcagatgtcaacacacaaggcgttcttccaggcatggtctggcaggacagagatgtgtaccttcaggggcccatctgggcaaagattccacacacggacggacattttcacccctctcccctcatgggtggattcggacttaaacaccctcctccacagattctcatcaagaacaccccggtacctgcgaatccttcgaccaccttcagtgcggcaaagtttgcttccttcatcacacagtactccacgggacaggtcagcgtggagatcgagtgggagctgcagaaggaaaacagcaaccgctggaatcccgaaattcagtacacttccaactacaacaagtctgttaatgtggactttactgtggacactaatggcgtgtattcagagcctcgccccattggcaccagatacctgactcgtaatctgtaa

SEQ ID NO: 3323 - DNA, 2208 bp, Artificial Sequence
  source: /note="Description of Artificial Sequence: Synthetic polynucleotide"
atggctgccgatggttatcttccagattggctcgaggacactctctctgaaggaataagacagtggtggaagctcaaacctggcccaccaccaccaaagcccgcagagcggcataaggacgacagcaggggtcttgtgcttcctgggtacaagtacctcggacccttcaacggactcgacaagggagagccggtcaacgaggcagacgccgcggccctcgagcacgacaaagcctacgaccggcagctcgacagcggagacaacccgtacctcaagtacaaccacgccgacgcggagtttcaggagcgccttaaagaagatacgtcttttgggggcaacctcggacgagcagtcttccaggcgaaaaagagggttcttgaacctctgggcctggttgaggaacctgttaagacggctccgggaaaaaagaggccggtagagcactctcctgtggagccagactcctcctcgggaaccggaaaggcgggccagcagcctgcaagaaaaagattgaattttggtcagactggagacgcagactcagtacctgacccccagcctctcggacagccaccagcagccccctctggtctgggaactaatacgatggctacaggcagtggcgcaccaatggcagacaataacgagggcgccgacggagtgggtaattcctcgggaaattggcattgcgattccacatggatgggcgacagagtcatcaccaccagcacccgaacctgggccctgcccacctacaacaaccacctctacaaacaaatttccagccaatcaggagcctcgaacgacaatcactactttggctacagcaccccttgggggtattttgacttcaacagattccactgccacttttcaccacgtgactggcaaagactcatcaacaacaactggggattccgacccaagagactcaacttcaagctctttaacattcaagtcaaagaggtcacgcagaatgacggtacgacgacgattgccaataaccttaccagcacggttcaggtgtttactgactcggagtaccagctcccgtacgtcctcggctcggcgcatcaaggatgcctcccgccgttcccagcagacgtcttcatggtgccacagtatggatacctcaccctgaacaacgggagtcaggcagtaggacgctcttcattttactgcctggagtactttccttctcagatgctgcgtaccggaaacaactttaccttcagctacacttttgaggacgttcctttccacagcagctacgctcacagccagagtctggaccgtctcatgaatcctctcatcgaccagtacctgtattacttgagcagaacaaacactccaagtggaaccaccacgcagtcaaggcttcagttttctcaggccggagcgagtgacattcgggaccagtctaggaactggcttcctggaccctgttaccgccagcagcgagtatcaaagacatctgcggataacaacaacagtgaatactcgtggactggagctaccaagtaccacctcaatggcagagactctctggtgaatccgggcccggccatggcaagccacaaggacgatgaagaaaagttttttcctcagagcggggttctcatctttgggaagcaaggctcagagaaaacaaatgtggacattgaaaaggtcatgattacagacgaagaggaaatcaggacaaccaatcccgtggctacggagcagtatggttctgtatctaccaacctccagagaggcaacagacaagcagctaccgcagatgtcaacacacaaggcgttcttccaggcacggtctggcaggacagagatgtgtaccttcaggggcccatctgggcaaagattccacacacggacggacattttcacccctctcccctcatgggtggattcggacttaaacaccctcctccacagattctcatcaagaacaccccggtacctgcgaatccttcgaccaccttcagtgcggcaaagtttgcttccttcatcacacagtactccacgggacaggtcggcgtggagatcgagtgggagctgcagaaggaaaacagcaaacgctggaatcccgaaattcagtacacttccaactacaacaagtctgttaatgtggactttactgtggacactaatggcgtgtattcagagcctcgccccattggcaccagatacctgactcgtaatctgtaa

SEQ ID NO: 3324 - DNA, 2208 bp, Artificial Sequence
  source: /note="Description of Artificial Sequence: Synthetic polynucleotide"
atggctgccgatggttatcttccagattggctcgaggacactctctctgaaggaataagacagtggtggaagctcaaacctggcccaccaccaccaaagcccgcagagcggcataaggacgacagcaggggtcttgtgcttcctgggtacaagtacctcggacccttcaacggactcgacaagggagagccggtcaacgaggcagacgccgcggccctcgagcacgacaaagcctacgaccggcagctcgacagcggagacaacccgtacctcaagtacaaccacgccgacgcggagtttcaggagcgccttaaagaagatacgtcttttgggggcaacctcggacgagcagtcttccaggcgaaaaagagggttcttgaacctctgggcctggttgaggaacctgttaagacggctccgggaaaaaagaggccggtagagcactctcctgtggagccagactcctcctcgggaaccggaaaggcgggccagcagcctgcaagaaaaagattgaattttggtcagactggagacgcagactcagtacctgacccccagcctctcggacagccaccagcagccccctctggtctgggaactaatacgatggctacaggcagtggcgcaccaatggcagacaataacgagggcgccgacggagtgggtaattcctcgggaaattggcattgcgattccacatggatgggcgacagagtcatcaccaccagcacccgaacctgggccctgcccacctacaacaaccacctctacaaacaaatttccagccaatcaggagcctcgaacgacaatcactactttggctacagcaccccttgggggtattttgacttcaacagattccactgccacttttcaccacgtgactggcaaagactcatcaacaacaactggggattccgacccaagagactcaacttcaagctctttaacattcaagtcaaagaggtcacgcagaatgacggtacgacgacgattgccaataaccttaccagcacggttcaggtgtttactgactcggagtaccagctcccgtacgtcctcggctcggcgcatcaaggatgcctcccgccgttcccagcagacgtcttcatggtgccacagtatggatacctcaccctgaacaacgggagtcaggcagtaggacgctcttcattttactgcctggagtactttccttctcagatgctgcgtaccggaaacaactttaccttcagctacacttttgaggacgttcctttccacagcagctacgctcacagccagagtctggaccgtctcatgaatcctctcatcgaccagtacctgtattacttgagcagaacaaacactccaagtggaaccaccacgcagtcaaggcttcagttttctcaggccggagcgagtgacattcgggaccagtctaggaactggcttcctggaccctgttaccgccagcagcgagtatcaaagacatctgcggataacaacaacagtgaatactcgtggactggagctaccaagtaccacctcaatggcagagactctctggtgaatccgggcccggccatggcaagccacaaggacgatgaagaaaagttttttcctcagagcggggttctcatctttgggaagcaaggctcagagaaaacaaatgtggacattgaaaaggtcatgattacagacgaagaggaaatcagggcaaccaatcccgtggctacggagcagtgtggttctgtatctaccaacctccagagaggcaacagacaagcagctaccgcagatgtcaacacacaaggcgttcttccaggcacggtctggcaggacagagatgtgtaccttcaggggcccatctgggcaaagattccacacacggacggacattttcacccctctcccctcatgggtggattcggacttaaacaccctcctccacagattctcatcaagaacaccccggtacctgcgaatccttcgaccaccttcagtgcggcaaagtttgcttccttcatcacacagtactccacgggacaggtcagcgtggagatcgagtgggagctgcagaaggaaaacagcaaacgctggaatcccgaaattcagtacacttccaactacaacaagtctgttaatgtggactttactgtggacactaatggcgtgtattcagagcctcgccccattggcaccagatacctgactcgtaatctgtaa

SEQ ID NO: 3325 - DNA, 2208 bp, Artificial Sequence
  source: /note="Description of Artificial Sequence: Synthetic polynucleotide"
atggctgccgatggttatcttccagattggctcgaggacactctctctgaaggaataagacagtggtggaagctcaaacctggcccaccaccaccaaagcccgcagagcggcataaggacgacagcaggggtcttgtgcttcctgggtacaagtacctcggacccttcaacggactcgacaagggagagccggtcaacgaggcagacgccgcggccctcgagcacgacaaagcctacgaccggcagctcgacagcggagacaacccgtacctcaagtacaaccacgccgacgcggagtttcaggagcgccttaaagaagatacgtcttttgggggcaacctcggacgagcagtcttccaggcgaaaaagagggctcttgaacctctgggcctggttgaggaacctgttaagacggctccgggaaaaaagaggccggtagagcactctcctgtggagccagactcctcctcgggaaccggaaaggcgggccagcagcctgcaagaaaaagattgaattttggtcagactggagacgcagactcagtacctgacccccagcctctcggacagccaccagcagccccctctggtctgggaactaatacgatggctacaggcagtggcgcaccaatggcagacaataacgagggcgccgacggagtgggtaattcctcgggaaattggcattgcgattccacatggatgggcgacagagtcatcaccaccagcacccgaacctgggccctgcccacctacaacaaccacctctacaaacaaatttccagccaatcaggagcctcgaacgacaatcactactttggctacagcaccccttgggggtattttgacttcaacagattccactgccacttttcaccacgtgactggcaaagactcatcaacaacaactggggattccgacccaagagactcaacttcaagctctttaacattcaagtcaaagaggtcacgcagaatgacggtacgacgacgattgccaataaccttaccagcacggttcaggtgtttactgactcggagtaccagctcccgtacgtcctcggctcggcgcatcaaggatgcctcccgccgttcccagcagacgtcttcgtggtgccacagtatggatacctcaccctgaacaacgggagtcaggcagtaggacgctcttcattttactgcctggagtactttccttctcagatgctgcgtaccggaaacaactttaccttcagctacacttttgaggacgttcctttccacagcagctacgctcacagccagagtctggaccgtctcatgaatcctctcatcgaccagtacctgtattacttgagcagaacaaacactccaagtggaaccaccacgcagtcaaggcttcagttttctcaggccggagcgagtgacattcgggaccagtctaggaactggcttcctggaccctgttaccgccagcagcgagtatcaaagacatctgcggataacaacaacagtgaatactcgtggactggagctaccaagtaccacctcaatggcagagactctctggtgaatccgggcccggccatggcaagccacaaggacgatgaagaaaagttttttcctcagagcggggttctcatctttgggaagcaaggctcagagaaaacaaatgtggacattgaaaaggtcatgattacagacgaagaggaaatcaggacaaccaatcccgtggctacggagcagtatggttctgtatctaccaacctccagagaggcaacagacaagcagctaccgcagatgtcaacacacaaggcgttcttccaggcatggtctggcaggacagagatgtgtaccttcaggggcccatctgggcaaagattccacacacggacggacattttcacccctctcccctcatgggtggattcggacttaaacaccctcctccacagattctcatcaagaacaccccggtacctgcgaatccttcgaccaccttcagtgcggcaaagtttgcttccttcatcacacagtactccacgggacaggtcagcgtggagatcgagtgggagctgcagaaggaaaacagcaaacgctggaatcccgaaattcagtacacttccaactacaacaagtctgttaatgtggactttactgtggacactaatggcgtgtattcagagcctcgccccattggcaccagatacctgactcgtaatctgtaa

SEQ ID NO: 3326 - DNA, 2208 bp, Artificial Sequence
  source: /note="Description of Artificial Sequence: Synthetic polynucleotide"
atggctgccgatggttatcttccagattggctcgaggacactctctctgaaggaataagacagtggtggaagctcaaacctggcccaccaccaccaaagcccgcagagcggcataaggacgacagcaggggtcttgtgcttcctgggtacaagtacctcggacccttcaacggactcgacaagggagagccggtcaacgaggcagacgccgcggccctcgagcacgacaaagcctacgaccggcagctcgacagcggagacaacccgtacctcaagtacaaccacgccgacgcggagtttcaggagcgccttaaagaagatacgtcttttgggggcaacctcggacgagcagtcttccaggcgaaaaagagggttcttgaacctctgggcctggttgaggaacctgttaagacggctccgggaaaaaagaggccggtagagcactctcctgtggagccagactcctcctcgggaaccggaaaggcgggccagcagcctgcaagaaaaagattgaattttggtcagactggagacgcagactcagtacctgacccccagcctctcggacagccaccagcagccccctctggtctgggaactaatacgatggctacaggcagtggcgcaccaatggcagacaataacgagggcgccgacggagtgggtaattcctcgggaaattggcattgcgattccacatggatgggcgacagagtcatcaccaccagcacccgaacctgggccctgcccacctacaacaaccacctctacaaacaaatttccagccaatcaggagcctcgaacgacaatcactactttggctacagcaccccttgggggtattttgacttcaacagattccactgccacttttcaccacgtgactggcaaagactcatcaacaacaactggggattccgacccaagagactcaacttcaagctctttaacattcaagtcaaagaggtcacgcagaatgacggtacgacgacgattgccaataaccttaccagcacggttcaggtgtttactgactcggagtaccagctcccgtacgtcctcggctcggcgcatcaaggatgcctcccgccgttcccagcagacgtcttcatggtgccacagtatggatacctcaccctgaacaacgggagtcaggcagtaggacgctcttcattttactgcctggagtactttccttctcagatgctgcgtaccggaaacaactttaccttcagctacacttttgaggacgttcctttccacagcagctacgctcacagccagagtctggaccgtctcatgaatcctctcatcgaccagtacctgtattacttgagcagaacaaacactccaagtggaaccaccacgcagtcaaggcttcagttttctcaggccggagcgagtgacattcgggaccagtctaggaactggcttcctggaccctgttaccgccagcagcgagtatcaaagacatctgcggataacaacaacagtgaatactcgtggactggagctaccaagtaccacctcaatggcagagactctctggtgaatccgggcccggccatggcaagccacaaggacgatgaagaaaagttttttcctcagagcggggttctcatctttgggaagcaaggctcagagaaaacaaatgtggacattgaaaaggtcatgattacagacgaagaggaaatcaggacaaccaatcccgtggctacggagcagtatggttctgtatctaccaacctccagagaggcaacagacaagcagctaccgcagatgtcaacacacaaggcgttcttccaggcacggtctggcaggacagagatgtgtaccttcaggggcccatctgggcaaagattccacacacggacggacattttcacccctctcccctcgtgggtggattcggacttaaacaccctcctccacagattctcatcaagaacaccccggtacctgcgaatccttcgaccaccttcagtgcggcaaagtttgcttccttcatcacacagtactccacgggacaggtcagcgtggagatcgagtgggagctgcagaaggaaaacagcaaacgctggaatcccgaaattcagtacacttccaactacaacaagtctgttaatgtggactttactgtggacactaatggcgtgtattcagagcctcgccccattggcaccagatacctgactcgtaatctgtaa

SEQ ID NO: 3327 - DNA, 2208 bp, Artificial Sequence
  source: /note="Description of Artificial Sequence: Synthetic polynucleotide"
atggctgccgatggttatcttccagattggctcgaggacactctctctgaaggaataagacagtggtggaagctcaaacctggcccaccaccaccaaagcccgcagagcggcataaggacgacagcaggggtcttgtgcttcctgggtacaagtacctcggacccttcaacggactcgacaagggagagccggtcaacgaggcagacgccgcggccctcgagcacgacaaagcctacgaccggcagctcgacagcggagacaacccgtacctcaagtacaaccacgccgacgcggagtttcaggagcgccttaaagaagatacgtcttttgggggcaacctcggacgagcagtcttccaggcgaaaaagagggttcttgaacctctgggcctggttgaggaacctgttaagacggctccgggaaaaaagaggccggtagagcactctcctgtggagccagactcctcctcgggaaccggaaaggcgggccagcagcctgcaagaaaaagattgaattttggtcagactggagacgcagactcagtacctgacccccagcctctcggacagccaccagcagccccctctggtctgggaactaatacgatggctacaggcagtggcgcaccaatggcagacaataacgagggcgccgacggagtgggtaattcctcgggaaattggcattgcgattccacatggatgggcgacagagtcatcaccaccagcacccgaacctgggccctgcccacctacaacaaccacctctacaaacaaatttccagccaatcaggagcctcgaacgacaatcactactttggctacagcaccccttgggggtattttgacttcaacagattccactgccacttttcaccacgtgactggcaaagactcatcaacaacaactggggattccgacccaagagactcaacttcaagctctttaacattcaagtcaaagaggtcacgcagaatgacggtacgacgacgattgccaataaccttaccagcacggttcaggtgtttactgactcggagtaccagctcccgtacgtcctcggctcggcgcatcaaggatgcctcccgccgttcccagcagacgtcttcatggtgccacagtatggatacctcaccctgaacaacgggagtcaggcagtaggacgctcttcattttactgcctggagtactttccttctcagatgctgcgtaccggaaacaactttaccttcagctacacttttgaggacgttcctttccacagcagctacgctcacagccagagtctggaccgtctcatgaatcctctcatcgaccagtacctgtattacttgagcagaacaaacactccaagtggaaccaccacgcagtcaaggcttcagttttctcaggccggagcgagtgacattcgggaccagtctaggaactggcttcctggaccctgttaccgccagcagcgagtatcaaagacatctgcggataacaacaacagtgaatactcgtggactggagctaccaagtaccacctcaatggcagagactctctggtgaatccgggcccggccatggcaagccacaaggacgatgaagaaaagttttttcctcagagcggggttctcatctttgggaagcaaggctcagagaaaacaaatgtggacattgaaaaggtcatgattacagacgaagaggaaatcaggacaaccaatcccgtggctacggagcagtatggttctgtatctaccaacctccagagaggcaacagacaagcagctaccgcagatgtcaacacacaaggcgttcttccaggcacggtctggcaggacagagatgtgtaccttcaggggcccatctgggcaaagattccacacacggacggacattttcacccctctcccctcatgggtggattcggacttaaacaccctcctccacagattctcatcaagaacaccccggtacctgcgaatccttcgaccaccctcagtgcggcaaagtttgcttccttcatcacacagtactccacgggacaggtcagcgtggagatcgagtgggagctgcagaaggaaaacagcaaacgctggaatcccgaaattcagtacacttccaactacaacaagtctgttaatgtggactttactgtggacactaatggcgtgtattcagagcctcgccccattggcaccagatacctgactcgtaatctgtaa

SEQ ID NO: 3328 - DNA, 2208 bp, Artificial Sequence
  source: /note="Description of Artificial Sequence: Synthetic polynucleotide"
atggctgccgatggttatcttccagattggctcgaggacactctctctgaaggaataagacagtggtggaagctcaaacctggcccaccaccaccaaagcccgcagagcggcataaggacgacagcaggggtcttgtgcttcctgggtacaagtacctcggacccttcaacggactcgacaagggagagccggtcaacgaggcagacgccgcggccctcgagcacgacaaagcctacgaccggcagctcgacagcggagacaacccgtacctcaagtacaaccacgccgacgcggagtttcaggagcgccttaaagaagatacgtcttttgggggcaacctcggacgagcagtcttccaggcgaaaaagagggttcttgaacctctgggcctggttgaggaacctgttaagacggctccgggaaaaaagaggccggtagagcactctcctgtggagccagactcctcctcgggaaccggaaaggcgggccagcagcctgcaagaaaaagattgaattttggtcagactggagacgcagactcagtacctgacccccagcctctcggacagccaccagcagccccctctggtctgggaactaatacgatggctacaggcagtggcgcaccaatggcagacaataacgagggcgccgacggagtgggtaattcctcgggaaattggcattgcgattccacatggatgggcgacagagtcatcaccaccagcacccgaacctgggccctgcccacctacaacaaccacctctacaaacaaatttccagccaatcaggagcctcgaacgacaatcactactttggctacagcaccccttgggggtattttgacttcaacagattccactgccacttttcaccacgtgactggcaaagactcatcaacaacaactggggattccgacccaagagactcaacttcaagctctttaacattcaagtcaaagaggtcacgcagaatgacggtacgacgacgattgccaataaccttaccagcacggttcaggtgtttactgactcggagtaccagctcccgtacgtcctcggctcggcgcatcaaggatgcctcccgccgttcccagcagacgtcttcatggtgccacagtatggatacctcaccctgaacaacgggagtcaggcagtagggcgctcttcattttactgcctggagtactttccttctcagatgctgcgtaccggaaacaactttaccttcagctacacttttgaggacgttcctttccacagcagctacgctcacagccagagtctggaccgtctcatgaatcctctcatcgaccagtacctgtattacttgagcagaacaaacactccaagtggaaccaccacgcagtcaaggcttcagttttctcaggccggagcgagtgacattcgggaccagtctaggaactggcttcctggaccctgttaccgccagcagcgagtatcaaagacatctgcggataacaacaacagtgaatactcgtggactggagctaccaagtaccacctcaatggcagagactctctggtgaatccgggcccggccatggcaagccacaaggacgatgaagaaaagttttttcctcagagcggggttctcatctttgggaagcaaggctcagagaaaacaaatgtggacattgaaaaggtcatgattacagacgaaggggaaatcaggacaaccaatcccgtggctacggagcagtatggttctgtatctaccaacctccagagaggcaacagacaagcagctaccgcagatgtcaacacacaaggcgttcttccaggcacggtctggcaggacagagatgtgtaccttcaggggcccatctgggcaaagattccacacacggacggacattttcacccctctcccctcatgggtggattcggacttaaacaccctcctccacagattctcatcaagaacaccccggtacctgcgaatccttcgaccaccttcagtgcggcaaagtttgcttccttcatcacacagtactccacgggacaggtcagcgtggagatcgagtgggagctgcagaaggaaaacagcaaacgctggaatcccgaaattcagtacacttccaactacaacaagtctgttaatgtggactttactgtggacactaatggcgtgtattcagagcctcgccccattggcaccagatacctgactcgtaatctgtaa

SEQ ID NO: 3329 - DNA, 2208 bp, Artificial Sequence
  source: /note="Description of Artificial Sequence: Synthetic polynucleotide"
atggctgccgatggttatcttccagattggctcgaggacactctctctgaaggaataagacagtggtggaagctcaaacctggcccaccaccaccaaagcccgcagagcggcataaggacgacagcaggggtcttgtgcttcctgggtacaagtacctcggacccttcaacggactcgacaagggagagccggtcaacgaggcagacgccgcggccctcgagcacgacaaagcctacgaccggcagctcgacagcggagacaacccgtacctcaagtacaaccacgccgacgcggagtttcaggagcgccttaaagaagatacgtcttttgggggcaacctcggacgagcagtcttccaggcgaaaaagagggctcttgaacctctgggcctggttgaggaacctgttaagacggctccgggaaaaaagaggccggtagagcactctcctgtggagccagactcctcctcgggaaccggaaaggcgggccagcagcctgcaagaaaaagattgaattttggtcagactggagacgcagactcagtacctgacccccagcctctcggacagccaccagcagccccctctggtctgggaactaatacgatggctacaggcagtggcgcaccaatggcagacaataacgagggcgccgacggagtgggtaattcctcgggaaattggcattgcgattccacatggatgggcgacagagtcatcaccaccagcacccgaacctgggccctgcccacctacaacaaccacctctacaaacaaatttccagccaatcaggagcctcgaacgacaatcactactttggctacagcaccccttgggggtattttgacttcaacagattccactgccacttttcaccacgtgactggcaaagactcatcaacaacaactggggattccgacccaagagactcaacttcaagctctttaacattcaagtcaaagaggtcacgcagaatgacggtacgacgacgattgccaataaccttaccagcacggttcaggtgtttactgactcggagtaccagctcccgtacgtcctcggctcggcgcatcaaggatgcctcccgccgttcccagcagacgtcttcatggtgccacagtatggatacctcaccctgaacaacgggagtcaggcagtaggacgctcttcattttactgcctggagtactttccttctcagatgctgcgtaccggaaacaactttaccttcagctacacttttgaggacgttcctttccacagcagctacgctcacagccagagtctggaccgtctcatgaatcctctcatcgaccagtacctgtattacttgagcagaacaaacactccaagtggaaccaccacgcagtcaaggcttcagttttctcaggccggagcgagtgacattcgggaccagtctaggaactggcttcctggaccctgttaccgccagcagcgagtatcaaagacatctgcggataacaacaacagtgaatactcgtggactggagctaccaagtaccacctcaatggcagagactctctggtgaatccgggcccggccatggcaagccacaaggacgatgaagaaaagttttttcctcagagcggggttctcatctttgggaagcaaggctcagagaaaacaaatgtggacattgaaaaggtcatgattacagacgaagaggaaatcaggacaaccaatcccgtggctacggagcagtatggttctgtatctaccaacctccagagaggcaacagacaagcagctaccgcagatgtcaacacacaaggcgttcttccaggcatggtctggcaggacagagatgtgtaccttcaggggcccatctgggcaaagattccacacacggacggacattttcacccctctcccctcatgggtggattcggacttaaacaccctcctccacagattctcatcaaaaacaccccggtacctgcgaatccttcgaccaccttcagtgcggcaaagtttgcttccttcatcacacagtactccgcgggacaggtcagcgtggagatcgagtgggagctgcagaaggaaaacagcaaacgctggaatcccgaaattcagtacacttccaactacaacaagtctgttaatgtggactttactgtggacactaatggcgtgtattcagagcctcgccccattggcaccagatacctgactcgtaatctgtaa

SEQ ID NO: 3330 - DNA, 2208 bp, Artificial Sequence
  source: /note="Description of Artificial Sequence: Synthetic polynucleotide"
atggctgccgatggttatcttccagattggctcgaggacactctctctgaaggaataagacagtggtggaagctcaaacctggcccaccaccaccaaagcccgcagagcggcataaggacgacagcaggggtcttgtgcttcctgggtacaagtacctcggacccttcaacggactcgacaagggagagccggtcaacgaggcagacgccgcggccctcgagcacgacaaagcctacgaccggcagctcgacagcggagacaacccgtacctcaagtacaaccacgccgacgcggagtttcaggagcgccttaaagaagatacgtcttttgggggcaacctcggacgagcagtcttccaggcgaaaaagagggttcttgaacctctgggcctggttgaggaacctgttaagacggctccgggaaaaaagaggccggtagagcactctcctgtggagccagactcctcctcgggaaccggaaaggcgggccagcagcctgcaagaaaaagattgaattttggtcagactggagacgcagactcagtacctgacccccagcctctcggacagccaccagcagccccctctggtctgggaactaatacgatggctacaggcagtggcgcaccaatggcagacaataacgagggcgccgacggagtgggtaattcctcgggaaattggcattgcgattccacatggatgggcgacagagtcatcaccaccagcacccgaacctgggccctgcccacctacaacaaccacctctacaaacaaatttccagccaatcaggagcctcgaacgacaatcactactttggctacagcaccccttgggggtattttgacttcaacagattccactgccacttttcaccacgtgactggcaaagactcatcaacaacaactggggattccgacccaagagactcaacttcaagctctttaacattcaagtcaaagaggtcacgcagaatgacggtacgacgacgattgccaataaccttaccagcacggttcaggtgtttactgactcggagtaccagctcccgtacgtcctcggctcggcgcatcaaggatgcctcccgccgttcccagcagacgtcttcatggtgccacagtatggatacctcaccctgaacaacgggagtcaggcagtaggacgctcttcattttactgcctggagtactttccttctcagatgctgcgtaccggaaacaactttaccttcagctacacttttgaggacgttcctttccacagcagctacgctcacagccagagtctggaccgtctcatgaatcctctcatcgaccagtacctgtattacttgagcagaacaaacactccaagtggaaccaccacgcagtcaaggcttcagttttctcaggccggagcgagtgacattcgggaccagtctaggaactggcttcctggaccctgttaccgccagcagcgagtatcaaagacatctgcggataacaacaacagtgaatactcgtggactggagctaccgagtaccacctcaatggcagagactctctggtgaatccgggcccggccatggcaagccacaaggacgatgaagaaaagttttttcctcagagcggggttctcatctttgggaagcaaggctcagagaaaacaaatgtggacattgaaaaggtcatgattacagacgaagaggaaatcaggacaaccaatcccgtggctacggagcagtatggttctgtatctaccaacctccagagaggcaacagacaagcagctaccgcagatgtcaacacacaaggcgttcttccaggcacggtctggcaggacagagatgtgtaccttcaggggcccatctgggcaaagattccacacacggacggacattttcacccctctcccctcatgggtggattcggacttaaacaccctcccccacagattctcatcaagaacaccccggtacctgcgaatccttcgaccaccttcagtgcggcaaagtttgcttccttcatcacacagtactccacgggacaggtcagcgtggagatcgagtgggagctgcagaaggaaaacagcaaacgctggaatcccgaaattcagtacacttccaactacaacaagtctgttaatgtggactttactgtggacactaatggcgtgtattcagagcctcgccccattggcaccagatacctgactcgtaatctgtaa

SEQ ID NO: 3331 - DNA, 2208 bp, Artificial Sequence
  source: /note="Description of Artificial Sequence: Synthetic polynucleotide"
atggctgccgatggttatcttccagattggctcgaggacactctctctgaaggaataagacagtggtggaagctcaaacctggcccaccaccaccaaagcccgcagagcggcataaggacgacagcaggggtcttgtgcttcctgggtacaagtacctcggacccttcaacggactcgacaagggagagccggtcaacgaggcagacgccgcggccctcgagcacggcaaagcctacgaccggcagctcgacagcggagacaacccgtacctcaagtacaaccacgccgacgcggagtttcaggagcgccttaaagaagatacgtcttttgggggcaacctcggacgagcagtcttccaggcgaaaaagagggttcttgaacctctgggcctggttgaggaacctgttaagacggctccgggaaaaaagaggccggtagagcactctcctgtggagccagactcctcctcgggaaccggaaaggcgggccagcagcctgcaagaaaaagattgaattttggtcagactggagacgcagactcagtacctgacccccagcctctcggacagccaccagcagccccctctggtctgggaactaatacgatggctacaggcagtggcgcaccaatggcagacaataacgagggcgccgacggagtgggtaattcctcgggaaattggcattgcgattccacatggatgggcgacagagtcatcaccaccagcacccgaacctgggccctgcccacctacaacaaccacctctacaaacaaatttccagccaatcaggagcctcgaacgacaatcactactttggctacagcaccccttgggggtattttgacttcaacagattccactgccacttttcaccacgtgactggcaaagactcatcaacaacaactggggattccgacccaagagactcaacttcaagctctttaacattcaagtcaaagaggtcacgcagaatgacggtacgacgacgattgccaataaccttaccagcacggttcaggtgtttactgactcggagtaccagctcccgtacgtcctcggctcggcgcatcaaggatgcctcccgccgttcccagcagacgtcttcatggtgccacagtatggatacctcaccctgaacaacgggagtcaggcagtaggacgctcttcattttactgcctggagtactttccttctcagatgctgcgtaccggaaacaactttaccttcagctacacttttgaggacgttcctttccacagcagctacgctcacagccagagtctggaccgtctcatgaatcctctcatcgaccagtacctgtattacttgagcagaacaaacactccaagtggaaccaccacgcagtcaaggcttcagttttctcaggccggagcgagtgacattcgggaccagtctaggaactggcttcctggaccctgttaccgccagcagcgagtatcaaagacatctgcggataacaacaacagtgaatactcgtggactggagctaccaagtaccacctcaatggcagagactctctggtgaatccgggcccggccatggcaagccacaaggacgatgaagaaaagttttttcctcagagcggggttctcatctttgggaagcaaggctcagagaaaacaaatgtggacattgaaaaggtcatgattacagacgaagaggaaatcaggacaaccaatcccgtggctacggagcagtatggttctgtatctaccaacctccagagaggcaacagacaagcagctaccgcagatgtcaacacacaaggcgttcttccaggcacggtctggcaggacagagatgtgtaccttcaggggcccatctgggcaaagattccacacacggacggacattttcacccctctcccctcatgggtggattcggacttaaacaccctcctccacagattctcatcaagaacaccccggtacctgcgaatccttcgaccaccttcagtgcggcaaagtttgcttccttcatcacacagtactccacgggacaggtcagcgtggagatcgagtgggagctgcagaaggaaaacagcaaacgctggaatcccgaaattcagtacacttccaactacaacaagtctgttaatgtggactttactgtggacactaatggcgtgtattcagagcctcgccccattggcaccagatacctgactcgtaatctgtaa

SEQ ID NO: 3332 - DNA, 2208 bp, Artificial Sequence
  source: /note="Description of Artificial Sequence: Synthetic polynucleotide"
atggctgccgatggttatcttccagattggctcgaggacactctctctgaaggaataagacagtggtggaagctcaaacctggcccaccaccaccaaagcccgcagagcggcataaggacgacagcaggggtcttgtgcttcctgggtacaagtacctcggacccttcaacggactcgacaagggagagccggtcaacgaggcagacgccgcggccctcgagcacgacaaagcctacgaccggcagctcgacagcggagacaacccgtacctcaagtacaaccacgccgacgcggagtttcaggagcgccttaaagaagatacgtcttttgggggcaacctcggacgagcagtcttccaggcgaaaaagagggctcttgaacctctgggcctggttgaggaacctgttaagacggctccgggaaaaaagaggccggtagagcactctcctgtggagccagactcctcctcgggaaccggaaaggcgggccagcagcctgcaagaaaaagattgaattttggtcagactggagacgcagactcagtacctgacccccagcctctcggacagccaccagcagccccctctggtctgggaactaatacgatggctacaggcagtggcgcaccaatggcagacaataacgagggcgccgacggagtgggtaattcctcgggaaattggcattgcgattccacatggatgggcgacagagtcatcaccaccagcacccgaacctgggccctgcccacctacaacaaccacctctacaaacaaatttccagccaatcaggagcctcgaacgacaatcactactttggctacagcaccccttgggggtattttgacttcaacagattccactgccacttttcaccacgtgactggcaaagactcatcaacaacaactggggattccgacccaagagactcaacttcaagctctttaacattcaagtcaaagaggtcacgcagaatgacggtacgacgacgattgccaataaccttaccagcacggttcaggtgtttactgactcggagtaccagctcccgtacgtcctcggctcggcgcatcaaggatgcctcccgccgttcccagcagacgtcttcatggtgccacagtatggatacctcaccctgaacaacgggagtcaggcagtaggacgctcttcattttactgcctggagtactttccttctcagatgctgcgtaccggaaacaactttaccttcagctacacttttgaggacgttcctttccacagcagctacgctcacagccagagtctggaccgtctcatgaatcctctcgtcgaccagtacctgtattacttgagcagaacaaacactccaagtggaaccaccacgcagtcaaggcttcagttttctcaggccggagcgagtgacattcgggaccagtctaggaactggcttcctggaccctgttaccgccagcagcgagtatcaaagacatctgcggataacaacaacagtgaatactcgtggaccggagctaccaagtaccacctcaatggcagagactctctggtgaatccgggcccggccatggcaagccacaaggacgatgaagaaaagttttttcctcagagcggggttctcatctttgggaagcaaggctcagagaaaacaaatgtggacattgaaaaggtcatgattacagacgaagaggaaatcaggacaaccaatcccgtggctacggagcagtatggttctgtatctaccaacctccagagaggcaacagacaagcagctaccgcagatgtcaacacacaaggcgttcttccaggcatggtctggcaggacagagatgtgtaccttcaggggcccatctgggcaaagattccacacacggacggacattttcacccctctcccctcatgggtggattcggacttaaacgccctcctccacagattctcatcaagaacaccccggtacctgcgaatccttcgaccaccttcagtgcggcaaagtttgcttccttcatcacacagtactccacgggacaggtcagcgtggagatcgagtgggagctgcagaaggaaaacagcaaacgctggaatcccgaaattcagtacacttccaactacaacaagtctgttaatgtggactttactgtggacactaatggcgtgtattcagagcctcgccccattggcaccagatacctgactcgtaatctgtaa

SEQ ID NO: 3333 - DNA, 2208 bp, Artificial Sequence
  source: /note="Description of Artificial Sequence: Synthetic polynucleotide"
atggctgccgatggttatcttccagattggctcgaggacactctctctgaaggaataagacagtggtggaagctcaaacctggcccaccaccaccaaagcccgcagagcggcataaggacgacagcaggggtcttgtgcttcctgggtacaagtacctcggacccttcaacggactcgacaagggagagccggtcaacgaggcagacgccgcggccctcgagcacgacaaagcctacgaccggcagctcgacagcggagacaacccgtacctcaagtacaaccacgccgacgcggagtttcaggagcgccttaaagaagatacgtcttttgggggcaacctcggacgagcagtcttccaggcgaaaaagagggttcttgaacctctgggcctggttgaggaacctgttaagacggctccgggaaaaaagaggccggtagagcactctcctgtggagccagactcctcctcgggaaccggaaaggcgggccagcagcctgcaagaaaaagattgaattttggtcagactggagacgcagactcagtacctgacccccagcctctcggacagccaccagcagccccctctggtctgggaactaatacgatggctacaggcagtggcgcaccaatggcagacaataacgagggcgccgacggagtgggtaattcctcgggaaattggcattgcgattccacatggatgggcgacagagtcatcaccaccagcacccgaacctgggccctgcccacctacaacaaccacctctacaaacaaatttccagccaatcaggagcctcgaacgacaatcactactttggctacagcaccccttgggggtattttgacttcaacagattccactgccacttttcaccacgtgactggcaaagactcatcaacaacaactggggattccgacccaagagactcaacttcaagctctttaacattcaagtcaaagaggtcacgcagaatgacggtacgacgacgattgccaataaccttaccagcacggttcaggtgtttactgactcggagtaccagctcccgtacgtcctcggctcggcgcatcaaggatgcctcccgccgttcccagcagacgtcttcatggtgccacagtatggatacctcaccctgaacaacgggagtcaggcagtaggacgctcttcattttactgcctggagtactttccttctcagatgctgcgtaccggaaacaactttaccttcagctacacttttgaggacgttcctttccacagcagctacgctcacagccagagtctggaccgtctcatgaatcctctcatcgaccagtacctgtattacttgagcagaacaaacactccaagtggaaccaccacgcagtcaaggcttcagttttctcaggccggagcgagtgacattcgggaccagtctaggaactggcttcctggaccctgttaccgccagcagcgagtatcaaagacatctgcggataacaacaacagtgaatactcgtggactggagctaccaagtaccacctcaatggcagagactctctggtgaatccgggcccggccatggcaagccacaaggacgatgaagaaaagttttttcctcagagcggggttctcatctttgggaagcaaggctcagagaaaacaaatgtggacattgaaaaggtcatgattacagacgaagaggaaatcaggacaaccaatcccgtggctacggagcagtatggttctgtatctaccaacctccagagaggcaacagacaagcagctaccgcagatgtcaacacacaaggcgttcttccaggcacggtctggcaggacagagatgtgtaccttcaggggcccatctgggcaaagattccacacacggacggacattttcacccctctcccctcatgggtggattcggacttaaacaccctcctccacagattctcatcaagaacaccccggtacctgcgaatccttcgaccaccttcagtgcggcaaagtttgcttccttcatcacacagcactccacgggacaggtcagcgtggagatcgagtgggagctgcagaaggaaaacagcaaacgctggaatcccgaaattcagtacacttccaactacaacaagtctgttaatgtggactttactgtggacactaatggcgtgtattcagagcctcgccccattggcaccagatacctgactcgtaatctgtaa

SEQ ID NO: 3334 - DNA, 2208 bp, Artificial Sequence
  source: /note="Description of Artificial Sequence: Synthetic polynucleotide"
atggctgccgatggttatcttccagattggctcgaggacactctctctgaaggaataagacagtggtggaagctcaaacctggcccaccaccgccaaagcccgcagagcggcataaggacgacagcaggggtcttgtgcttcctgggtacaagtacctcggacccttcaacggactcgacaagggagagccggtcaacgaggcagacgccgcggccctcgagcacgacaaggcctacgaccggcagctcgacagcggagacgacccgtacctcaagtacaaccacgccgacgcggagtttcaggagcgccttaaagaagatacgtcttttgggggcaacctcgcaagagcagtattccaggcgaaaaagagggttcttgaacctctgggcctggttgaggagcctgttaagacggctccgggaaaaaagaggccggtagagcattctcctgcggagccagactcctcctcgggaaccggaaaagcgggccagcagcctgcgagaaagagattgaatttcggtcagactggagacgcagactccgtacctgacccccagcctctcggacagccaccagcagccccctctggtctgggaactaatacgatggctacaggcagtggcgcaccaatggcagacaataacgagggtgccgacggagtgggtaattcctcaggaaattggcattgcgattccacatggatgggcgacagagtcatcaccaccagcacccgcacctgggctctgcccacctacaacaaccatctgtacaagcagatctccagccaatctggagccagcaacgacaaccactactttggctacagcaccccttgggggtattttgacttcaacagattccactgccacttctccccacgtgactggcaaagactcatcaacaacaactggggattccggcccaagagactcagcttcaagctctttaacattcaagtcaaggaggtcacgcagaatgacggtacgacgacgattgccaataaccttaccagcacggttcaggtctttactgactcggagtaccagctcccgtacgtcctcggctcggcgcatcaaggatgcctcccgccgttcccagcagacgtcttcatggtgccacagtatggatacctcaccctgaacaacgggagtcaggcggtaggacgctcttcattttactgcctggagtacttcccttctcagatgcttcgcacgggaaacaactttaccttcagctacacctttgaggacgtgccttttcacagcagctacgctcacagccaaagtctggaccgtctcatgaatcctctcatcgaccagtacctgtattacttgagcaaaacaaacgctccaagcggaaccaccacgatgtccaggcttcagttttctcaggccggagcaagtgacattcgggaccagtctagaaactggcttcctggaccctgttaccgccagcagcgagtatcaaagacagctgcggacaacaacaacagtgattactcgtggactggagctaccaagtaccacctcaatggaagagactctctggtgaacccgggcccagctatggccagccacaaggacgatgaagaaaaatattttcctcagagcggggttctcatcttcgggaaacaaggctcaaataaaactaatgtggacattgaaaaggttatgattacagacgaagaggaaatcaggaccaccaatcccgtggctacggagcagtatggttctgtatctaccaaccttcaaagcggcaacacacaagcagctacctcagatgtcaacacacaaggcgttcttcctggcatggtctggcaggacagagatgtgtacctgcaggggcccatctgggcaaagattccacacacggatggacactttcacccttctcctcttatgggaggatttggactgaagcaccctcccccgcagattctcatcaagaataccccggtacctgcgaatccttcgaccaccttcagtgcggcaaagtttgcttctttcatcacacagtactccacggggcaggtcagcgtggagatcgagtgggagctgcagaaggagaacagcaaacgctggaaccccgagatccagtatacttccaactacaacaaatctgttaatgtggactttactgtggacactaatggtgtgtattcagagcctcgccccattggcaccagatacctgactcgtaatctgtaa

SEQ ID NO: 3335 - DNA, 2208 bp, Artificial Sequence
  source: /note="Description of Artificial Sequence: Synthetic polynucleotide"
atggctgccgatggttatcttccagattggctcgaggacactctctctgaaggaataagacagtggtggaagctcaaacctggcccaccaccaccaaagcccgcagagcggcataaggacgacagcaggggtcttgtgcttcctgggtacaagtacctcggacccttcaacggactcgacaagggagagccggtcaacgaggcagacgccgcggccctcgagcacgacaaagcctacgaccggcagctcgacagcggagacaacccgtacctcaagtacaaccacgccgacgcggagtttcaggagcgccttaaagaagatacgtcttttgggggcaacctcggacgagcagtcttccaggcgaaaaagagggttcttgaacctctgggcctggttgaggaacctgttaagacggctccgggaaaaaagaggccggtagagcactctcctgtggagccagactcctcctcgggaaccggaaaggcgggccagcagcctgcaagaaaaagattgaattttggtcagactggagacgcagactcagtacctgacccccagcctctcggacagccaccagcagccccctctggtctgggaactaatacgatggctacaggcagtggcgcaccaatggcagacaataacgagggcgccgacggagtgggtaattcctcgggaaattggcattgcgattccacatggatgggcgacagagtcatcaccaccagcacccgaacctgggccctgcccacctacaacaaccacctctacaaacaaatttccagccaatcaggagcctcgaacgacaatcactactttggctacagcaccccttgggggtattttgacttcaacagattccactgccacttttcaccacgtgactggcaaagactcatcaacaacaactggggattccgacccaagagactcaacttcaagctctttaacattcaagtcaaagaggtcacgcagaatgacggtacgacgacgattgccaataaccttaccagcacggttcaggtgtttactgactcggagtaccagctcccgtacgtcctcggctcggcgcatcaaggatgcctcccgccgttcccagcagacgtcttcatggtgccacagtatggatacctcaccctgaacaacgggagtcaggcagtaggacgctcttcattttactgcctggagtactttccttctcagatgctgcgtaccggaaacaactttaccttcagctacacttttgaggacgttcctttccacagcagctacgctcacagccagagtctggaccgtctcatgaatcctctcatcgaccagtacctgtattacttgagcagaacaaacactccaagtggaaccaccacgcagccaaggcttcagttttctcaggccggagcgagtgacattcgggaccagtctaggaactggcttcctggaccctgttaccgccagcagcgagtatcaaagacatctgcggataacaacaacagtgaatactcgtggactggagctaccaagtaccacctcaatggcagagactctctggtgaatccgggcccggccatggcaagccacaaggacgatgaagaaaagttttttcctcagagcggggttctcatctttgggaagcaaggctcagagaaaacaaatgtggacattgaaaaggtcatgattacagacgaagaggaaatcaggacaaccaatcccgtggctacggagcagtatggttctgtatctaccaacctccagagaggcaacagacaagcagctaccgcagatgtcaacacacaaggcgttcttccaggcacggtctggcaggacagagatgtgtaccttcaggggcccatctgggcaaagattccacacacggacggacattttcacccctctcccctcatgggtggattcggacttaaacaccctcctccacagattctcatcaagaacaccccggtacctgcgaatccttcgaccaccttcagtgcggcaaagtttgcttccttcatcacacagtactccacgggacaggtcagcgtggagatcgagtgggagctgcagaaggaaaacagcaaacgctggaatcccgaaattcagtacacttccaactacaacaagtctgttaatgtggactttactgtggacactaatggcgtgtattcagagcctcgccccattggcaccagatacctgactcgtaatctgtaa

SEQ ID NO: 3336 - DNA, 2208 bp, Artificial Sequence
  source: /note="Description of Artificial Sequence: Synthetic polynucleotide"
atggctgccgatggttatcttccagattggctcgaggacactctctctgaaggaataagacagtggtggaagctcaaacctggcccaccaccaccaaagcccgcagagcggcataaggacgacagcaggggtcttgtgcttcctgggtacaagtacctcggacccttcaacggactcgacaagggagagccggtcaacgaggcagacgccgcggccctcgagcacgacaaagcctacgaccggcagctcgacagcggagacaacccgtacctcaagtacaaccacgccgacgcggagtttcaggagcgccttaaagaagatacgtcttttgggggcaacctcggacgagcagtcttccaggcgaaaaagagggttcttgaacctctgggcctggttgaggaacctgttaagacggctccgggaaaaaagaggccggtagagcactctcctgtggagccagactcctcctcgggaaccggaaaggcgggccagcagcctgcaagaaaaagattgaattttggtcagactggagacgcagactcagtacctgacccccagcctctcggacagccaccagcagccccctctggtctgggaactaatacgatggctacaggcagtggcgcaccaatggcagacaataacgagggcgccgacggagtgggtaattcctcgggaaattggcattgcgattccacatggatgggcgacagagtcatcaccaccagcacccgaacctgggccctgcccacctacaacaaccacctctacaaacaaatttccagccaatcaggagcctcgaacgacaatcactactttggctacagcaccccttgggggtattttgacttcaacagattccactgccacttttcaccacgtgactggcaaagactcatcaacaacaactggggattccgacccaagagactcaacttcaagctctttaacattcaagtcaaagaggtcacgcagaatgacggtacgacgacgattgccaataaccttaccagcacggttcaggtgtttactgactcggagtaccagctcccgtacgtcctcggctcggcgcatcaaggatgcctcccgccgttcccagcagacgtcttcatggtgccacagtatggatacctcaccctgaacaacgggagtcaggcagtaggacgctcttcattttactgcctggagtactttccttctcagatgctgcgtaccggaaacaactttaccttcagctacacttttgaggacgttcctttccacagcagctacgctcacagccagagtctggaccgtctcatgaatcctctcatcgaccagtacctgtattacttgagcagaacaaacactccaagtggaaccaccacgcagtcaaggcttcagttttctcaggccggagcgagtgacattcgggaccagtctaggaactggcttcctggaccctgttaccgccagcagcgagtatcaaagacatctgcggataacaacaacagtgaatacttgtggactggagctaccaagtaccacctcaatggcagagactctctggtgaatccgggcccggccatggcaagccacaaggacgatgaagaaaagttttttcctcagagcggggttctcatctttgggaagcaaggctcagagaaaacaaatgtggacattgaaaaggtcatgattacagacgaagaggaaatcaggacaaccaatcccgtggctacggagcagtatggttctgtatctaccaacctccagagaggcaacaggcaagcagctaccgcagatgtcaacacacaaggcgttcttccaggcacggtctggcaggacagagatgtgtaccttcaggggcccatctgggcaaagattccacacacggacggacattttcacccctctcccctcatgggtggattcggacttaaacaccctcctccacagattctcatcaagaacaccccggtacctgcgaatccttcgaccaccttcagtgcggcaaagtttgcttccttcatcacacagtactccacgggacaggtcagcgtggagatcgagtgggagctgcagaaggaaaacagcaaacgctggaatcccgaaattcagtacacttccaactacaacaagtctgttaatgtggactttactgtggacactaatggcgtgtattcagagcctcgccccattggcaccagatacctgactcgtaatctgtaa

SEQ ID NO: 3337 - DNA, 2208 bp, Artificial Sequence
  source: /note="Description of Artificial Sequence: Synthetic polynucleotide"
atggctgccgatggttatcttccagattggctcgaggacactctctctgaaggaataagacagtggtggaagctcaaacctggcccaccaccaccaaagcccgcagagcggcataaggacgacagcaggggtcttgtgcttcctgggtacaagtacctcggacccttcaacggactcgacaagggagagccggtcaacgaggcagacgccgcggccctcgagcacgacaaagcctacgaccggcagctcgacagcggagacaacccgtacctcaagtacaaccacgccgacgcggagtttcaggagcgccttaaagaagatacgtcttttgggggcaacctcggacgagcagtcttccaggcgaaaaagagggttcttgaacctctgggcctggttgaggaacctgttaagacggctccgggaaaaaagaggccggtagagcactctcctgtggagccagactcctcctcgggaaccggaaaggcgggccagcagcctgcaagaaaaagattgaattttggtcagactggagacgcagactcagtacctgacccccagcctctcggacagccaccagcagccccctctggtctgggaactaatacgatggctacaggcagtggcgcaccaatggcagacaataacgagggcgccgacggagtgggtaattcctcgggaaattggcattgcgattccacatggatgggcgacagagtcatcaccaccagcacccgaacctgggccctgcccacctacaacaaccacctctacaaacaaatttccagccaatcaggagcctcgaacgacaatcactactttggctacagcaccccttgggggtattttgacttcaacagattccactgccacttttcaccacgtgactggcaaagactcatcaacaacaactggggattccgacccaagagactcaacttcaagccctttaacattcaagtcaaagaggtcacgcagaatgacggtacgacgacgattgccaataaccttaccagcacggttcaggtgtttactgactcggagtaccagctcccgtacgtcctcggctcggcgcatcaaggatgcctcccgccgttcccagcagacgtcttcatggtgccacagtatggatacctcaccctgaacaacgggagtcaggcagtaggacgctcttcattttactgcctggagtactttccttctcagatgctgcgtaccggaaacaactttaccttcagctacacttttgaggacgttcctttccacagcagctacgctcacagccagagtctggaccgtctcatgaatcctctcatcgaccagtacctgtattacttgagcagaacaaacactccaagtggaaccaccacgcagtcaaggcttcagttttctcaggccggagcgagtgacattcgggaccagtctaggaactggcttcctggaccctgttaccgccagcagcgagtatcaaagacatctgcggataacaacaacagtgaatactcgtggactggagctaccaagtaccacctcaatggcagagactctctggtgaatccgggcccggccatggcaagccacaaggacgatgaagaaaagttttttcctcagagcggggttctcatctttgggaagcaaggctcagagaaaacaaatgtggacattgaaaaggtcatgattacagacgaagaggaaatcaggacaaccaatcccgtggctacggagcagtatggttctgtatctaccaacctccagagaggcaacagacaagcagctaccgcagatgtcaacacacaaggcgttcttccaggcacggtctggcaggacagagatgtgtaccttcaggggcccatctgggcaaagattccacacacggacggacattttcacccctctcccctcatgggtggattcggacttaaacaccctcctccacagattctcatcaagaacaccccggtacctgcgaatccttcgaccaccttcagtgcggcaaagtttgcttccttcatcacacagtactccacgggacaggtcagcgtggagatcgagtgggagctgcagaaggaaaacagcaaacgctggaatcccgaaattcagtacacttccaactacaacaagtctgttaatgtggactttactgtggacactaatggcgtgtattcagagcctcgccccattggcaccagatacctgactcgtaatctgtaa

SEQ ID NO: 3338 - DNA, 2208 bp, Artificial Sequence
  source: /note="Description of Artificial Sequence: Synthetic polynucleotide"
atggctgccgatggttatcttccagattggctcgaggacactctctctgaaggaataagacagtggtggaagctcaaacctggcccaccaccaccaaagcccgcagagcggcataaggacgacagcaggggtcttgtgcttcctgggtacaagtacctcggacccttcaacggactcgacaagggagagccggtcaacgaggcagacgccgcggccctcgagcacgacaaagcctacgaccggcagctcgacagcggagacaacccgtacctcaagtacaaccacgccgacgcggagtttcaggagcgccttaaagaagatacgtcttttgggggcaacctcggacgagcagtcttccaggcgaaaaagagggttcttgaacctctgggcctggttgaggaacctgttaagacggctccgggaaaaaagaggccggtagagcactctcctgtggagccagactcctcctcgggaaccggaaaggcgggccagcagcctgcaagaaaaagattgaattttggtcagactggagacgcagactcagtacctgacccccagcctctcggacagccaccagcagccccctctggtctgggaactaatacgatggctacaggcagtggcgcaccaatggcagacaataacgagggcgccgacggagtgggtaattcctcgggaaattggcattgcgattccacatggatgggcgacagagtcatcaccaccagcacccgaacctgggccctgcccacctacaacaaccacctctacaaacaaatttccagccaatcaggagcctcgaacgacaatcactactttggctacagcaccccttgggggtattttgacttcaacagattccactgccacttttcaccacgtgactggcaaagactcatcaacaacaactggggattccgacccaagagactcaacttcaagctctttaacattcaagtcaaagaggtcacgcagaatgacggtacgacgacgattgccaataaccttaccagcacggttcaggtgtttactgactcggagtaccagctcccgtacgtcctcggctcggcgcatcaaggatgcctcccgccgttcccagcagacgtcttcatggtgccacagtatggatacctcaccctgaacaacgggagtcaggcagtaggacgctcttcattttactgcctggagtactttccttctcagatgctgcgtaccggaaacaactttaccttcagctacacttttgaggacgttcctttccacagcagctacgctcacagccagagtctggaccgtctcatgaatcctctcatcgaccagtacccgtattacttgagcagaacaaacactccaagtggaaccaccacgcagtcaaggcttcagttttctcaggccggagcgagtgacattcgggaccagtctaggaactggcttcctggaccctgttaccgccagcagcgagtatcaaagacatctgcggataacaacaacagtgaatactcgtggactggagctaccaagtaccacctcaatggcagagactctctggtgaatccgggcccggccatggcaagccacaaggacgatgaagaaaagttttttcctcagagcggggttctcatctttgggaagcaaggctcagagaaaacaaatgtggacattgaaaaggtcatgattacagacgaagaggaaatcaggacaaccaatcccgtggctacggagcagtatggttctgtatctaccaacctccagagaggcaacagacaagcagctaccgcagatgtcaacacacaaggcgttcttccaggcacggtctggcaggacagagatgtgtaccttcaggggcccatctgggcaaagattccacacacggacggacattttcacccctctcccctcatgggtggattcggacttaaacaccctcctccacagattctcatcaagaacaccccggtacctgcgaatccttcgaccaccttcagtgcggcaaagtttgcttccttcatcacacagtactccacgggacaggtcagcgtggagatcgagtgggagctgcagaaggaaaacagcaaacgctggaatcccgaaattcagtacacttccaactacaacaagtctgttaatgtggactttactgtggacactaatggcgtgtattcagagcctcgccccattggcaccagatacctgactcgtaatctgtaa

SEQ ID NO: 3339 - DNA, 2208 bp, Artificial Sequence
  source: /note="Description of Artificial Sequence: Synthetic polynucleotide"
atggctgccgatggttatcttccagattggctcgaggacactctctctgaaggaataagacagtggtggaagctcaaacctggcccaccaccaccaaagcccgcagagcggcataaggacgacagcaggggtcttgtgcttcctgggtacaagtacctcggacccttcaacggactcgacaagggagagccggtcaacgaggcagacgccgcggccctcgagcacgacaaagcctacgaccggcagctcgacagcggagacaacccgtacctcaagtacaaccacgccgacgcggagtttcaggagcgccttaaagaagatacgtcttttgggggcaacctcggacgagcagtcttccaggcgaaaaagagggctcttgaacctctgggcctggttgaggaacctgttaagacggctccgggaaaaaagaggccggtagagcactctcctgtggagccagactcctcctcgggaaccggaaaggcgggccagcagcctgcaagaaaaagattgaattttggtcagactggagacgcagactcagtacctgacccccagcctctcggacagccaccagcagccccctctggtctgggaactaatacgatggctacaggcagtggcgcaccaatggcagacaataacgagggcgccgacggagtgggtaattcctcgggaaattggcattgcgattccacatggatgggcgacagagtcatcaccaccagcacccgaacctgggccctgcccacctacaacaaccacctctacaaacaaatttccagccaatcaggagcctcgaacgacaatcactactttggctacagcaccccttgggggtattttgacttcaacagattccactgccacttttcaccacgtgactggcaaagactcatcaacaacaactggggattccgacccaagagactcaacttcaagctctttaacattcaagtcaaagaggtcacgcagaatgacggtacgacgacgattgccaataaccttaccagcacggttcaggtgtttactgactcggagtaccagctcccgtacgtcctcggctcggcgcatcaaggatgcctcccgccgttcccagcagacgtcttcatggtgccacagtatggatacctcaccctgaacaacgggagtcaggcagtaggacgctcttcattttactgcctggagtactttccttctcagatgctgcgtaccggaaacaactttaccttcagctacacttttgaggacgttcctttccacagcagctacgctcacagccagagtctggaccgtctcatgaatcctctcatcgaccagtacctgtattacttgagcagaacaaacactccaagtggaaccaccacgcagtcaaggcttcagttttctcaggccggagcgagtgacattcgggaccagtctaggaactggcttcctggaccctgttaccgccagcagcgagtatcaaagacatctgcggataacaacaacagtgaatactcgtggactggagctaccaagtaccacctcaatggcagagactctctggtgaatccgggcccggccatggcaagccacaaggacgatgaagaaaagttttttcctcagagcggggttctcatctttgggaagcaaggctcagagaaaacaaatgtggacattgaaaaggtcatgattacagacgaagaggaaatcaggacaaccaatcccgtggctacggagcagtatggttctgtatctaccaacctccagagaggcaacagacaagcagctaccgcagatgtcaacacacaaggcgttcttccaggcacggtctggcaggacagagatgtgtaccttcaggggcccatctgggcaaagattccacacacggacggacattttcacccctctcccctcatgggtggattcggacttaaacaccctcctccacagattctcatcaagaacaccccggtacctgcgaatccttcgaccaccttcagtgcggcaaagtttgcttccttcatcacacagtactccacgggacaggtcagcgtggagatcgagtgggagctgcagaaggaaaacagcaaacgctggaatcccgaaattcagtacacttccaactacaacaagtctgttaatgtggactttactgtggacactaatggcgtgtattcagagcctcgccccattggcaccagatacctgactcgtaatctgtaa

SEQ ID NO: 3340 - DNA, 2208 bp, Artificial Sequence
  source: /note="Description of Artificial Sequence: Synthetic polynucleotide"
atggctgccgatggttatcttccagattggctcgaggacactctctctgaaggaataagacagtggtggaagctcaaacctggcccaccaccaccaaagcccgcagagcggcataaggacgacagcaggggtcttgtgcttcctgggtacaagtacctcggacccttcaacggactcgacaagggagagccggtcaacgaggcagacgccgcggccctcgagcacgacaaagcctacgaccggcagctcgacagcggagacaacccgtacctcaagtacaaccacgccgacgcggagtttcaggagcgccttaaagaagatacgtcttttgggggcaacctcggacgagcagtcttccaggcgaaaaagagggttcttgaacctctgggcctggttggggaacctgttaagacggctccgggaaaaaagaggccggtagagcactctcctgtggagccagactcctcctcgggaaccggaaaggcgggccagcagcctgcaagaaaaagattgaattttggtcagactggagacgcagactcagtacctgacccccagcctctcggacagccaccagcagccccctctggtctgggaactaatacgatggctacaggcagtggcgcaccaatggcagacaataacgagggcgccgacggagtgggtaattcctcgggaaattggcattgcgattccacatggatgggcgacagagtcatcaccaccagcacccgaacctgggccctgcccacctacaacaaccacctctacaaacaaatttccagccaatcaggagcctcgaacgacaatcactactttggctacagcaccccttgggggtattttgacttcaacagattccactgccacttttcaccacgtgactggcaaagactcatcaacaacaactggggattccgacccaagagactcaacttcaagctctttaacattcaagtcaaagaggtcacgcagaatgacggtacgacgacgattgccaataaccttaccagcacggttcaggtgtttactgactcggagtaccagctcccgtacgtcctcggctcggcgcatcaaggatgcctcccgccgttcccagcagacgtcttcatggtgccacagtatggatacctcaccctgaacaacgggagtcaggcagtaggacgctcttcattttactgcctggagtactttccttctcagatgctgcgtaccggaaacaactttaccttcagctacacttttgaggacgttcctttccacagcagctacgctcacagccagagtctggaccgtctcatgaatcctctcatcgaccagtacctgtattacttgagcagaacaaacactccaagtggaaccaccacgcagtcaaggcttcagttttctcaggccggagcgagtgacattcgggaccagtctaggaactggcttcctggaccctgttaccgccagcagcgagtatcaaagacatctgcggataacaacaacagtgaatactcgtggactggagctaccaagtaccacctcaatggcagagactctctggtgaatccgggcccggccatggcaagccacaaggacgatgaagaaaagttttttcctcagagcggggttctcatctttgggaagcaaggctcagagaaaacaaatgtggacattgaaaaggtcatgattacagacgaagaggaaatcaggacaaccaatcccgtggctacggagcagtatggttctgtatctaccaacctccagagaggcaacagacaagcagctaccgcagatgtcaacacacaaggcgttcttccaggcatggtctggcaggacagagatgtgtaccttcaggggcccatctgggcaaagattccacacacggacggacattttcacccctctcccctcatgggtggattcggacttaaacaccctcctccacagattctcatcaagaacaccccggtacctgcgaatccttcgaccaccttcagtgcggcaaagtttgcttccttcatcacacagtactccacgggacaggtcagcgtggagatcgagtgggagctgcagaaggaaaacagcaaacgctggaatcccgaaattcagtacacttccaactacaacaagtctgttaatgtggactttactgtggacactaatggcgtgtattcagagcctcgccccattggcaccagatacctgactcgtaatctgtaa

SEQ ID NO: 3341 - DNA, 2208 bp, Artificial Sequence
  source: /note="Description of Artificial Sequence: Synthetic polynucleotide"
atggctgccgatggttatcttccagattggctcgaggacactctctctgaaggaataagacagtggtggaagctcaaacctggcccaccaccaccaaagcccgcagagcggcataaggacgacagcaggggtcttgtgcttcctgggtacaagtacctcggacccttcaacggactcgacaagggagagccggtcaacgaggcagacgccgcggccctcgagcacgacaaagcctacgaccggcagcccgacagcggagacaacccgtacctcaagtacaaccacgccgacgcggagtttcaggagcgccttaaagaagatacgtcttttgggggcaacctcggacgagcagtcttccaggcgaaaaagagggttcttgaacctctgggcctggttgaggaacctgttaagacggctccgggaaaaaagaggccggtagagcactctcctgtggagccagactcctcctcgggaaccggaaaggcgggccagcagcctgcaagaaaaagattgaattttggtcagactggagacgcagactcagtacctgacccccagcctctcggacagccaccagcagccccctctggtctgggaactaatacgatggctacaggcagtggcgcaccaatggcagacaataacgagggcgccgacggagtgggtaattcctcgggaaattggcattgcgattccacatggatgggcgacagagtcatcaccaccagcacccgaacctgggccctgcccacctacaacaaccacctctacaaacaaatttccagccaatcaggagcctcgaacgacaatcactactttggctacagcaccccttgggggtattttgacttcaacagattccactgccacttttcaccacgtgactggcaaagactcatcaacaacaactggggattccgacccaagagactcaacttcaagctctttaacattcaagtcaaagaggtcacgcagaatgacggtacgacgacgattgccaataaccttaccagcacggttcaggtgtttactgactcggagtaccagctcccgtacgtcctcggctcggcgcatcaaggatgcctcccgccgttcccagcagacgtcttcatggtgccacagtatggatacctcaccctgaacaacgggagtcaggcagtaggacgctcttcattttactgcctggagtactttccttctcagatgctgcgtaccggaaacaactttaccttcagctacacttttgaggacgttcctttccacagcagctacgctcacagccagagtctggaccgtctcatgaatcctctcatcgaccagtacctgtattacttgagcagaacaaacactccaagtggaaccaccacgcagtcaaggcttcagttttctcaggccggagcgagtgacattcgggaccagtctaggaactggcttcctggaccctgttaccgccagcagcgagtatcaaagacatctgcggataacaacaacagtgaatactcgtggactggagctaccaagtaccacctcaatggcagagactctctggtgaatccgggcccggccatggcaagccacaaggacgatgaagaaaagttttttcctcagagcggggttctcatctttgggaagcaaggctcagagaaaacaaatgtggacattgaaaaggtcatgattacagacgaagaggaaatcaggacaaccaatcccgtggctacggagcagtatggttctgtatctaccaacctccagagaggcaacagacaagcagctaccgcagatgtcaacacacaaggcgttcttccaggcacggtctggcaggacagagatgtgtaccttcaggggcccatctgggcaaagattccacacacggacggacattttcacccctctcccctcatgggtggattcggacttaaacaccctcctccacagattctcatcaagaacaccccggtacctgcgaatccttcgaccaccttcagtgcggcaaagtttgcttccttcatcacacagtactccacgggacaggtcagcgtggagatcgagtgggagctgcagaaggaaaacagcaaacgctggaatcccgaaattcagtacacttccaactacaacaagtctgttaatgtggactttactgtggacactaatggcgtgtattcagagcctcgccccattggcaccagatacctgactcgtaatctgtaa

SEQ ID NO: 3342 - DNA, 2208 bp, Artificial Sequence
  source: /note="Description of Artificial Sequence: Synthetic polynucleotide"
atggctgccgatggttatcttccagattggctcgaggacactctctctgaaggaataagacagtggtggaagctcaaacctggcccaccaccaccaaagcccgcagagcggcataaggacgacagcaggggtcttgtgcttcctgggtacaagtacctcggacccttcaacggactcgacaagggagagccggtcaacgaggcagacgccgcggccctcgagcacgacaaagcctacgaccggcagctcgacagcggagacaacccgtacctcaagtacaaccacgccgacgcggagtttcaggagcgccttaaagaagatacgtcttttgggggcaacctcggacgagcagtcttccaggcgaaaaagagggttcttgaacctctgggcctggttgaggaacctgttaagacggctccgggaaaaaagaggccggtagagcactctcctgtggagccagactcctcctcgggaaccggaaaggcgggccagcagcctgcaagaaaaagattgaattttggtcagactggagacgcagactcagtacctgacccccagcctctcggacagccaccagcagccccctctggtctgggaactaatacgatggctacaggcagtggcgcaccaatggcagacaataacgagggcgccgacggagtgggtaattcctcgggaaattggcattgcgattccacatggatgggcgacagagtcatcaccaccagcacccgaacctgggccctgcccacctacaacaaccacctctacaaacaaatttccagccaatcaggagcctcgaacgacaatcactactttggctacagcaccccttgggggtattttgacttcaacagattccactgccacttttcaccacgtgactggcaaagactcatcaacaacaactggggattccgacccaagagactcaacttcaagctctttaacattcaagtcaaagaggtcacgcagaatgacggtacgacgacgattgccaataaccttaccagcacggttcaggtgtttactgactcggagtaccagctcccgtacgtcctcggctcggcgcatcaaggatgcctcccgccgttcccagcagacgtcttcatggtgccacagtatggatacctcaccctgaacaacgggagtcaggcagtaggacgctcttcattttactgcctggagtactttccttctcagatgctgcgtaccggaaacaactttaccttcagctacacttttgaggacgttcctttccacagcagctacgctcacagccagagtctggaccgtctcatgaatcctctcatcgaccagtacctgtattacttgagcagaacaaacaccccaagtggaaccaccacgcagtcaaggcttcagttttctcaggccggagcgagtgacattcgggaccagtctaggaactggcttcctggaccctgttaccgccagcagcgagtatcaaagacatctgcggataacaacaacagtgaatactcgtggactggagctaccaagtaccacctcaatggcagagactctctggtgaatccgggcccggccatggcaagccacaaggacgatgaagaaaagttttttcctcagagcggggttctcatctttgggaagcaaggctcagagaaaacaaatgtggacattgaaaaggtcatgattacagacgaagaggaaatcaggacaaccaatcccgtggctacggagcagtatggttctgtatctaccaacctccagagaggcaacagacaagcagctaccgcagatgtcaacacacaaggcgttcttccaggcatggtctggcaggacagagatgtgtaccttcaggggcccatctgggcaaagattccacacacggacggacattttcacccctctcccctcatgggtggattcggacttaaacaccctcctccacagattctcatcaagaacaccccggtacctgcgaatccttcgaccaccttcagtgcggcaaagtttgcttcctccatcacacagtactccacgggacaggtcagcgtggagatcgagtgggagctgcagaaggaaaacagcaaacgctggaatcccgaaattcagtacacttccaactacaacaagtctgttaatgtggactttactgtggacactaatggcgtgtattcagagcctcgccccattggcaccagatacctgactcgtaatctgtaa

SEQ ID NO: 3343 - DNA, 2208 bp, Artificial Sequence
  source: /note="Description of Artificial Sequence: Synthetic polynucleotide"
atggctgccgatggttatcttccagattggctcgaggacactctctctgaaggaataagacagtggtggaagctcaaacctggcccaccaccaccaaagcccgcagagcggcataaggacgacagcaggggtcttgtgcttcctgggtacaagtacctcggacccttcaacggactcgacaagggagagccggtcaacgaggcagacgccgcggccctcgagcacgacaaagcctacgaccggcagctcgacagcggagacaacccgtacctcaagtacaaccacgccgacgcggagtttcaggagcgccttaaagaagatacgtcttttgggggcaacctcggacgagcagtcttccaggcgaaaaagagggttcttgaacctctgggcctggttgaggaacctgttaagacggctccgggaaaaaagaggccggtagagcactctcctgtggagccagactcctcctcgggaaccggaaaggcgggccagcagcctgcaagaaaaagattgaattttggtcagactggagacgcagactcagtacctgacccccagcctctcggacagccaccagcagccccctctggtctgggaactaatacgatggctacaggcagtggcgcaccaatggcagacaataacgagggcgccgacggagtgggtaattcctcgggaaattggcattgcgattccacatggatgggcgacagagtcatcaccaccagcacccgaacctgggccctgcccacctacaacaaccacctctacaaacaaatttccagccaatcaggagcctcgaacgacaatcactactttggctacagcaccccttgggggtattttgacctcaacagattccactgccacttttcaccacgtgactggcaaagactcatcaacaacaactggggattccgacccaagagactcaacttcaagctctttaacattcaagtcaaagaggtcacgcagaatgacggtacgacgacgattgccaataaccttaccagcacggttcaggtgtttactgactcggagtaccagctcccgtacgtcctcggctcggcgcatcaaggatgcctcccgccgttcccagcagacgtcttcatggtgccacagtatggatacctcaccctgaacaacgggagtcaggcagtaggacgctcttcattttactgcctggagtactttccttctcagatgctgcgtaccggaaacaactttaccttcagctacacttttgaggacgttcctttccacagcagctacgctcacagccagagtctggaccgtctcatgaatcctctcatcgaccagtacctgtattacttgagcagaacaaacactccaagtggaaccaccacgcagtcaaggcttcagttttctcaggccggagcgagtgacattcgggaccagtctaggaactggcttcctggaccctgttaccgccagcagcgagtatcaaagacatctgcggataacaacaacagtgaatactcgtggactggagctaccaagtaccacctcaatggcagagactctctggtgaatccgggcccggccatggcaagccacaaggacgatgaagaaaagttttttcctcagagcggggttctcatctttgggaagcaaggctcagagaaaacaaatgtggacattgaaaaggtcatgattacagacgaagaggaaatcaggacaaccaatcccgtggctacggagcagtatggttctgtatctaccaacctccagagaggcaacagacaagcagctaccgcagatgtcaacacacaaggcgttcttccaggcacggtctggcaggacagagatgtgtaccttcaggggcccatctgggcaaagattccacacacggacggacattttcacccctctcccctcatgggtggattcggacttaaacaccctcctccacagattctcatcaagaacaccccggtacctgcgaatccttcgaccaccttcagtgcggcaaagtttgcttccttcatcacacagtactccacgggacaggtcagcgtggagatcgagtgggagctgcagaaggaaaacagcaaacgctggaatcccgaaattcagtacacttccaactacaacaagtctgttaatgtggactttactgtggacactaatggcgtgtattcagagcctcgccccattggcaccagatacctgactcgtaatctgtaa

SEQ ID NO: 3344 - DNA, 2208 bp, Artificial Sequence
  source: /note="Description of Artificial Sequence: Synthetic polynucleotide"
atggctgccgatggttatcttccagattggctcgaggacactctctctgaaggaataagacagtggtggaagctcaaacctggcccaccaccaccaaagcccgcagagcggcataaggacgacagcaggggtcttgtgcttcctgggtacaagtacctcggacccttcaacggactcgacaagggagagccggtcaacgaggcagacgccgcggccctcgagcacgacaaagcctacgaccggcagctcgacagcggagacaacccgtacctcaagtacaaccacgccgacgcggagtttcaggagcgccttaaagaagatacgtcttttgggggcaacctcggacgagcagtcttccaggcgaaaaagagggttcttgaacctctgggcctggttgaggaacctgttaagacggctccgggaaaaaagaggccggtagagcactctcctgtggagccagactcctcctcgggaaccggaaaggcgggccagcagcctgcaagaaaaagattgaattttggtcagactggagacgcagactcagtacctgacccccagcctctcggacagccaccagcagccccctctggtctgggaactaatacgatggctacaggcagtggcgcaccaatggcagacaataacgagggcgccgacggagtgggtaattcctcgggaaattggcattgcgattccacatggatgggcgacagagtcatcaccaccagcacccgaacctgggccctgcccacctacaacaaccacctctacaaacaaatttccagccaatcaggagcctcgaacgacaatcgctactttggctacagcaccccttgggggtattttgacttcaacagattccactgccacttttcaccacgtgactggcaaagactcatcaacaacaactggggattccgacccaagagactcaacttcaagctctttaacattcaagtcaaagaggtcacgcagaatgacggtacgacgacgattgccaataaccttaccagcacggttcaggtgtttactgactcggagtaccagctcccgtacgtcctcggctcggcgcatcaaggatgcctcccgccgttcccagcagacgtcttcatggtgccacagtatggatacctcaccctgaacaacgggagtcaggcagtaggacgctcttcattttactgcctggagtactttccttctcagatgctgcgtaccggaaacaactttaccttcagctacacttttgaggacgttcctttccacagcagctacgctcacagccagagtctggaccgtctcatgaatcctctcatcgaccagtacctgtattacttgagcagaacaaacactccaagtggaaccaccacgcagtcaaggcttcagttttctcaggccggagcgagtgacattcgggaccagtctaggaactggcttcctggaccctgttaccgccagcagcgagtatcaaagacatctgcggataacaacaacagtgaatactcgtggactggagctaccaagtaccacctcaatggcagagactctctggtgaatccgggcccggccatggcaagccacaaggacgatgaagaaaagttttttcctcagagcggggttctcatctttgggaagcaaggctcagagaaaacaaatgtggacattgaaaaggtcatgattacagacgaagaggaaatcaggacaaccaatcccgtggctacggagcagtatggttctgtatctaccaacctccagagaggcaacagacaagcagctaccgcagatgtcaacacacaaggcgttcttccaggcacggtctggcaggacagagatgtgtaccttcaggggcccatctgggcaaagattccacacacggacggacattttcacccctctcccctcatgggtggattcggacttaaacaccctcctccacagattctcatcaagaacaccccggtacctgcgaatccttcgaccaccttcagtgcggcaaagtttgcttccttcatcacacagtactccacgggacaggtcagcgtggagatcgagtgggagctgcagaaggaaaacagcaaacgctggaatcccgaaattcagtacacttccaactacaacaagtctgttaatgtggactttactgtggacactaatggcgtgtattcagagcctcgccccattggcaccagatacctgactcgtaatctgtaa

SEQ ID NO: 3345 - DNA, 2208 bp, Artificial Sequence
  source: /note="Description of Artificial Sequence: Synthetic polynucleotide"
atggctgccgatggttatcttccagattggctcgaggacactctctctgaaggaataagacagtggtggaagctcaaacctggcccaccaccaccaaagcccgcagagcggcataaggacgacagcaggggtcttgtgcttcctgggtacaagtacctcggacccttcaacggactcgacaagggagagccggtcaacgaggcagacgccgcggccctcgagcacgacaaagcctacgaccggcagctcgacagcggagacaacccgtacctcaagtacaaccacgccgacgcggagtttcaggagcgccttaaagaagatacgtcttttgggggcaacctcggacgagcagtcttccaggcgaaaaagagggttcttgaacctctgggcctggttgaggaacctgttaagacggctccgggaaaaaagaggccggtagagcactctcctgtggagccagactcctcctcgggaaccggaaaggcgggccagcagcctgcaagaaaaagattgaattttggtcagactggagacgcagactcagtacctgacccccagcctctcggacagccaccagcagccccctctggtctgggaactaatacgatggctacaggcagtggcgcaccaatggcagacaataacgagggcgccgacggagtgggtaattcctcgggaaattggcattgcgattccacatggatgggcgacagagtcatcaccaccagcacccgaacctgggccctgcccacctacaacaaccacctctacaaacaaatttccagccaatcaggagcctcgaacgacaatcactactttggctacagcaccccttgggggtattttgacttcaacagattccactgccacttttcaccacgtgactggcaaagactcatcaacaacaactggggattccgacccaagagactcaacttcaagctctttaacattcaagtcaaagaggtcacgcagaatgacggtacgacgacgattgccaataaccttaccagcacggttcaggtgtttactgactcggagtaccagctcccgtacgtcctcggctcggcgcatcaaggatgcctcccgccgttcccagcagacgtcttcatggtgccacagtatggatacctcaccctgaacaacgggagtcaggcagtaggacgctcttcattttactgcctggagtactttccttctcagatgctgcgtaccggaaacaactttaccttcagctacacttttgaggacgttcctttccacagcagctacgctcacagccagagtctggaccgtctcatgaatcctctcatcgaccagtacctgtattacttgagcagaacaaacactccaagtggaaccaccacgcagtcaaggcttcagttttctcaggccggagcgagtgacattcgggaccagtctaggaactggcttcctggaccctgttaccgccagcagcgagtatcaaagacatctgcggataacaacaacagtgaatactcgtggactggagctaccaagtaccacctcaatggcagagactctctggtgaatccgggcccggccatggcaagccacaaggacgatgaagaaaagttttttcctcagagcggggttctcatctttgggaagcaaggctcagagaaaacaaatgtggacattgaaaaggtcatgattacagacgaagaggaaatcaggacaaccaatcccgtggctacggagcagtatggttctgtatctaccaacctccagagaggcaacagacaagcagctaccgcagatgtcaacacacaaggcgttcttccaggcacggtctggcaggacagagatgtgtaccttcaggggcccatctgggcaaagattccacacacggacggacattttcacccctctcccctcatgggtggattcggacttaaacaccctcctccacagattctcatcaagaacaccccggtacctgcgaatccttcgaccaccttcagtgcggcaaagtttgcttccttcatcacacagtactccacgggacaggtcagcgtggagatcgagtgggagctgcagaaggaaaacagcaaacgctggaatcccgaaattcagtacacttccaactacaacaagtctgctaatgtggactttactgtggacactaatggcgtgtattcagagcctcgccccattggcaccagatacctgactcgtaatctgtaa

SEQ ID NO: 3346 - DNA, 2208 bp, Artificial Sequence
  source: /note="Description of Artificial Sequence: Synthetic polynucleotide"
atggctgccgatggttatcttccagattggctcgaggacactctctctgaaggaataagacagtggtggaagctcaaacctggcccaccaccaccaaagcccgcagagcggcataaggacgacagcaggggtcttgtgcttcctgggtacaagtacctcggacccttcaacggactcgacaagggagagccggtcaacgaggcagacgccgcggccctcgagcacgacaaagcctacgaccggcagctcgacagcggagacaacccgtacctcaagtacaaccacgccgacgcggagtttcaggagcgccttaaagaagatacgtcttttgggggcaacctcggacgagcagtcttccaggcgaaaaagagggttcttgaacctctgggcctggttgaggaacctgttaagacggctccgggaaaaaagaggccggtagagcactctcctgtggagccagactcctcctcgggaaccggaaaggcgggccagcagcctgcaagaaaaagattgaattttggtcagactggagacgcagactcagtacctgacccccagcctctcggacagccaccagcagccccctctggtctgggaactaatacgatggctacaggcagtggcgcaccaatggcaggcaataacgagggcgccgacggagtgggtaattcctcgggaaattggcattgcgattccacatggatgggcgacagagtcatcaccaccagcacccgaacctgggccctgcccacctacaacaaccacctctacaaacaaatttccagccaatcaggagcctcgaacgacaatcactactttggctacagcaccccttgggggtattttgacttcaacagattccactgccacttttcaccacgtgactggcaaagactcatcaacaacaactggggattccgacccaagagactcaacttcaagctctttaacattcaagtcaaagaggtcacgcagaatgacggtacgacgacgattgccaataaccttaccagcacggttcaggtgtttactgactcggagtaccagctcccgtacgtcctcggctcggcgcatcaaggatgcctcccgccgttcccagcagacgtcttcatggtgccacagtatggatacctcaccctgaacaacgggagtcaggcagtaggacgctcttcattttactgcctggagtactttccttctcagatgctgcgtaccggaaacaactttaccttcagctacacttttgaggacgttcctttccacagcagctacgctcacagccagagtctggaccgtctcatgaatcctctcatcgaccagtacctgtattacttgagcagaacaaacactccaagtggaaccaccacgcagtcaaggcttcagttttctcaggccggagcgagtgacattcgggaccagtctaggaactggcttcctggaccctgttaccgccagcagcgagtatcaaagacatctgcggataacaacaacagtgaatactcgtggactggagctaccaagtaccacctcaatggcagagactctctggtgaatccgggcccggccatggcaagccacaaggacgatgaagaaaagttttttcctcagagcggggttctcatctttgggaagcaaggctcagagaaaacaaatgtggacattgaaaaggtcatgattacagacgaagaggaaatcaggacaaccaatcccgtggctacggagcagtatggttctgtatctaccaacctccagagaggcaacagacaagcagctaccgcagatgtcaacacacaaggcgttcttccaggcacggtctggcaggacagagatgtgtaccttcaggggcccatctgggcaaagattccacacacggacggacattttcacccctctcccctcatgggtggattcggacttaaacaccctcctccacagattctcatcaagaacaccccggtacctgcgaatccttcgaccaccttcagtgcggcaaagtttgcttccttcatcacacagtactccacgggacaggtcagcgtggagatcgagtgggagctgcagaaggaaaacagcaaacgctggaatcccgaaattcagtacacttccaactacaacaagtctgttaatgtggactttactgtggacactaatggcgtgtattcagagcctcgccccattggcaccagatacctgactcgtaatctgtaa

SEQ ID NO: 3347 - DNA, 2208 bp, Artificial Sequence
  source: /note="Description of Artificial Sequence: Synthetic polynucleotide"
atggctgccgatggttatcttccagattggctcgaggacactctctctgaaggaataagacagtggtggaagctcaaacctggcccaccaccaccaaagcccgcagagcggcataaggacgacagcaggggtcttgtgcttcctgggtacaagtacctcggacccttcaacggactcgacaagggagagccggtcaacgaggcagacgccgcggccctcgagcacgacaaagcctacaaccggcagctcgacagcggagacaacccgtacctcaagtacaaccacgccgacgcggagtttcaggagcgccttaaagaagatacgtcttttgggggcaacctcggacgagcagtcttccaggcgaaaaagagggttcttgaacctctgggcctggttgaggaacctgttaagacggctccgggaaaaaagaggccggtagagcactctcctgtggagccagactcctcctcgggaaccggaaaggcgggccagcagcctgcaagaaaaagattgaattttggtcagactggagacgcagactcagtacctgacccccagcctctcggacagccaccagcagccccctctggtctgggaactaatacgatggctacaggcagtggcgcaccaatggcagacaataacgagggcgccgacggagtgggtaattcctcgggaaattggcattgcgattccacatggatgggcgacagagtcatcaccaccagcacccgaacctgggccctgcccacctacaacaaccacctctacaaacaaatttccagccaatcaggagcctcgaacgacaatcactactttggctacagcaccccttgggggtattttgacttcaacagattccactgccacttttcaccacgtgactggcaaagactcatcaacaacaactggggattccgacccaagagactcaacttcaagctctttaacattcaagtcaaagaggtcacgcagaatgacggtacgacgacgattgccaataaccttaccagcacggttcaggtgtttactgactcggagtaccagctcccgtacgtcctcggctcggcgcatcaaggatgcctcccgccgctcccagcagacgtcttcatggtgccacagtatggatacctcaccctgaacaacgggagtcaggcagtaggacgctcttcattttactgcctggagtactttccttctcagatgctgcgtaccggaaacaactttaccttcagctacacttttgaggacgttcctttccacagcagctacgctcacagccagagtctggaccgtctcatgaatcctctcatcgaccagtacctgtattacttgagcagaacaaacactccaagtggaaccaccacgcagtcaaggcttcagttttctcaggccggagcgagtgacattcgggaccagtctaggaactggcttcctggaccctgttaccgccagcagcgagtatcaaagacatctgcggataacaacaacagtgaatactcgtggactggagctaccaagtaccacctcaatggcagggactctctggtgaatccgggcccggccatggcaagccacaaggacgatgaagaaaagttttttcctcagagcggggttctcatctttgggaagcaaggctcagagaaaacaaatgtggacattgaaaaggtcatgattacagacgaagaggaaatcaggacaaccaatcccgtggctacggagcagtatggttctgtatctaccaacctccagagaggcaacagacaagcagctaccgcagatgtcaacacacaaggcgttcttccaggcatggtctggcaggacagagatgtgtaccttcaggggcccatctgggcaaagattccacacacggacggacattttcacccctctcccctcatgggtggattcggacttaaacaccctcctccacagattctcatcaagaacaccccggtacctgcgaatccttcgaccaccttcagtgcggcaaagtttgcttccttcatcacacagtactccacgggacaggtcagcgtggagatcgagtgggagctgcagaaggaaaacagcaaacgctggaatcccgaaattcagtacacttccaactacaacaagtctgttaatgtggactttactgtggacactaatggcgtgtattcagagcctcgccccattggcaccagatacctgactcgtaatctgtaa

SEQ ID NO: 3348 - DNA, 2208 bp, Artificial Sequence
  source: /note="Description of Artificial Sequence: Synthetic polynucleotide"
atggctgccgatggttatcttccagattggctcgaggacactctctctgaaggaataagacagtggtggaagctcaaacctggcccaccaccgccaaagcccgcagagcggcataaggacgacagcaggggtcttgtgcttcctgggtacaagtacctcggacccttcaacggactcgacaagggagagccggtcaacgaggcagacgccgcggccctcgagcacgacaaggcctacgaccggcagctcgacagcggagacaacccgtacctcaagtacaaccacgccgacgcggagtttcaggagcgccttaaagaagatacgtcttttgggggcaacctcgcaagagcagtattccaggcgaaaaagagggttcttgaacctctgggcctggttgaggagcctgttaagacggctccgggaaaaaagaggccggtagagcattctcctgcggagccagactcctcctcgggaaccggaaaagcgggccagcagcctgcgagaaagagattgaatttcggtcagactggagacgcagactccgtacctgacccccagcctctcggacagccaccagcagccccctctggtctgggaactaatacgatggctacaggcagtggcgcaccaatggcagacaataacgagggtgccgacggagtgggtaattcctcaggaaattggcattgcgattccacatggatgggcgacagagtcatcaccaccagcacccgcacctgggctctgcccacctacaacaaccatctgtacaagcagatctccagccaatctggagccagcaacgacaaccactactttggctacagcaccccttgggggtattttgacttcaacagattccactgccacttctccccacgtgactggcaaagactcatcaacaacaactggggattccggcccaagagactcagcttcaagctctttaacattcaagtcaaggaggtcacgcagaatgacggtgcgacgacgattgccaataaccttaccagcacggttcaggtctttactgactcggagtaccagctcccgtacgtcctcggctcggcgcatcaaggatgcctcccgccgttcccagcagacgtcttcatggtgccacagtatggatacctcaccctgaacaacgggagtcaggcggtaggacgctcttcattttactgcctggagtacttcccttctcagatgcttcgcacgggaaacaactttaccttcagctacacctttgaggacgtgccttttcacagcagctacgctcacagccaaagtctggaccgtctcatgaatcctctcatcgaccagtacctgtattacttgagcaaaacaaacgctccaagcggaaccaccacgatgtccaggcttcagttttctcaggccggagcaagtgacattcgggaccagtctagaaactggcttcctggaccctgttaccgccagcagcgagtatcaaagacagctgcggacaacaacaacagtgattactcgtggactggagctaccaagtaccacctcaatggaagagactctctggtgaacccgggcccagctatggccagccacaaggacgatgaagaaaaatattttcctcagagcggggttctcatcttcgggaaacaaggctcaaataaaactaatgtggacattgaaaaggttatgattacagacgaagaggaaatcaggaccaccaatcccgtggctacggagcagtatggttctgtatctaccaaccttcaaagcggcaacacacaagcagctacctcagatgtcaacacacaaggcgttcttcctggcatggtctggcaggacagagatgtgtacctgcaggggcccatctgggcaaagattccacacacggatggacactttcacccttctcctcttatgggaggatttggactgaagcaccctcccccgcagattctcatcaagaataccccggtacctgcgaatccttcgaccaccttcagtgcggcaaagtttgcttctttcatcacacagtactccacggggcaggtcagcgtggagatcgagtgggagctgcagaaggagaacagcaaacgctggaaccccgagatccagtatacttccaactacaacaaatctgttaatgtggactttactgtggacactaatggtgtgtattcagagcctcgccccattggcaccagatacctgactcgtaatctgtaa

SEQ ID NO: 3349 - DNA, 2205 bp, Artificial Sequence
  source: /note="Description of Artificial Sequence: Synthetic polynucleotide"
atggctgccgatggttatcttccagattggctcgaggacactctctctgaaggaataagacagtggtggaagctcaaacctggcccaccaccaaagcccgcagagcggcataaggacgacagcaggggtcttgtgcttcctgggtacaagtacctcggacccttcaacggactcgacaagggagagccggtcaacgaggcagacgccgcggccctcgagcacgacaaagcctacgaccggcagctcgacagcggagacaacccgtacctcaagtacaaccacgccgacgcggagtttcaggagcgccttaaagaagatacgtcttttgggggcaacctcggacgagcagtcttccaggcgaaaaagagggctcttgaacctctgggcctggttgaggaacctgttaagacggctccgggaaaaaagaggccggtagagcactctcctgtggagccagactcctcctcgggaaccggaaaggcgggccagcagcctgcaagaaaaagattgaattttggtcagactggagacgcagactcagtacctgacccccagcctctcggacagccaccagcagccccctctggtctgggaactaatacgatggctacaggcagtggcgcaccaatggcagacaataacgagggcgccgacggagtgggtaattcctcgggaaattggcattgcgattccacatggatgggcgacagagtcatcaccaccagcacccgaacctgggccctgcccacctacaacaaccacctctacaaacaaatttccagccaatcaggagcctcgaacgacaatcactactttggctacagcaccccttgggggtattttgacttcaacagattccactgccacttttcaccacgtgactggcaaagactcatcaacaacaactggggattccgacccaagagactcaacttcaagctctttaacattcaagtcaaagaggtcacgcagaatgacggtacgacgacgattgccaataaccttaccagcacggttcaggtgtttactgactcggagtaccagctcccgtacgtcctcggctcggcgcatcaaggatgcctcccgccgttcccagcagacgtcttcatggtgccacagtatggatacctcaccctgaacaacgggagtcaggcagtaggacgctcttcattttactgcctggagtactttccttctcagatgctgcgtaccggaaacaactttaccttcagctacacttttgaggacgttcctttccacagcagctacgctcacagccagagtctggaccgtctcatgaatcctctcatcgaccagtacctgtattacttgagcagaacaaacactccaagtggaaccaccacgcagtcaaggcttcagttttctcaggccggagcgagtgacattcgggaccagtctaggaactggcttcctggaccctgttaccgccagcagcgagtatcaaagacatctgcggataacaacaacagtgaatactcgtggactggagctaccaagtaccacctcaatggcagagactctctggtgaatccgggcccggccatggcaagccacaaggacgatgaagaaaagttttttcctcagagcggggttctcatctttgggaagcaaggctcagagaaaacaaatgtggacattgaaaaggtcatgattacagacgaagaggaaatcaggacaaccaatcccgtggctacggagcagtatggttctgtatctaccaacctccagagaggcaacagacaagcagctaccgcagatgtcaacacacaaggcgttcttccaggcatggtctggcaggacagagatgtgtaccttcaggggcccatctgggcaaagattccacacacggacggacattttcacccctctcccctcatgggtggattcggacttaaacaccctcctccacagattctcatcaagaacaccccggtacctgcgaatccttcgaccaccttcagtgcggcaaagtttgcttccttcatcacacagtactccacgggacaggtcagcgtggagatcgagtgggagctgcagaaggaaaacagcaaacgctggaatcccgaaattcagtacacttccaactacaacaagtctgttaatgtggactttactgtggacactaatggcgtgtattcagagcctcgccccattggcaccagatacctgactcgtaatctgtaa

SEQ ID NO: 3350 - DNA, 2208 bp, Artificial Sequence
  source: /note="Description of Artificial Sequence: Synthetic polynucleotide"
atggctgccgatggttatcttccagattggctcgaggacactctctctgaaggaataagacagtggtggaagctcaaacctggcccaccaccgccaaagcccgcagagcggcataaggacgacagcaggggtcttgtgcttcctgggtacaagtacctcggacccttcaacggactcgacaagggagagccggtcaacgaggcagacgccgcggccctcgagcacgacaaggcctacgaccggcagctcgacagcggagacaacccgtacctcaagtacaaccacgccgacgcggagtttcaggagcgccttaaagaagatacgtcttttgggggcaacctcgcaagagcagtattccaggcgaaaaagagggttcttgaacctctgggcctggttgaggagcctgttaagacggctccgggaaaaaagaggccggtagagcattctcctgcggagccagactcctcctcgggaaccggaaaagcgggccagcagcctgcgagaaagagattgaatttcggtcagactggagacgcagactccgtacctgacccccagcctctcggacagccaccagcagccccctctggtctgggaactaatacgatggctacaggcagtggcgcaccaatggcagacaataacgagggtgccgacggagtgggtaattcctcaggaaattggcattgcgattccacatggatgggcgacagagtcatcaccaccagcacccgcacctgggctctgcccacctacaacaaccatctgtacaagcagatctccagccaatctggagccagcaacgacaaccactactttggctacagcaccccttgggggtattttgacttcaacagattccactgccacttctccccacgtgactggcaaagactcatcaacaacaactggggattccggcccaagagactcagcttcaagctctttaacattcaagtcaaggaggtcacgcagaatgacggtacgacgacgattgccaataaccttaccagcacggttcaggtctttactgactcggagtaccagctcccgtacgtcctcggctcggcgcatcaaggatgcctcccgccgttcccagcagacgtcttcatggtgccacagtatggatacctcaccctgaacaacgggagtcaggcggtaggacgctcttcattttactgcctggagtacttcccttctcagatgcttcgcacgggaaacaactttaccttcagctacacctttgaggacgtgccttttcacagcagctacgctcacagccaaagtctggaccgtctcatgaatcctctcatcgaccagtacctgtattacttgagcaaaacaaacgctccaagcggaaccaccacgatgtccaggcttcagttttctcaggccggagcaagtgacattcgggaccagtctagaaactggcttcctggaccctgttaccgccagcagcgagtatcaaagacagctgcggacaacaacaacagtgattactcgtggactggagctaccaagtaccacctcaatggaagagactctctggtgaacccgggcccagctatggccagccacaaggacgatgaagaaaaatattttcctcagagcggggttctcatcttcgggaaacaaggctcaaataaaactaatgtggacattgaaaaggttatgattacagacgaagaggaaatcaggaccaccaatcccgtggctacggagcagtatggttctgtatctaccaaccttcaaagcggcaacacacaagcagctacctcagatgtcaacacacaaggcgttcttcctggcatggtctggcaggacagagatgtgtacctgcaggggcccatctgggcaaagattccacacacggatggacactttcacccttctcctcttatgggaggatttggactgaagcaccctcccccgcagattctcatcaagaataccccggtacctgcgaatccttcgaccaccttcagtgcggcaaagtttgcttctttcatcacacagtactccacggggcaggtcagcgtggagatcgagtgggagctgcagaaggagaacggcaaacgctggaaccccgagatccagtatacttccaactacaacaaatctgttaatgtggactttactgtggacactaatggtgtgtattcagagcctcgccccattggcaccagatacctgactcgtaatctgtaa

SEQ ID NO: 3351 - DNA, 2208 bp, Artificial Sequence
  source: /note="Description of Artificial Sequence: Synthetic polynucleotide"
atggctgccgatggttatcttccagattggctcgaggacactctctctgaaggaataagacagtggtggaagctcaaacctggcccaccaccaccaaagcccgcagagcggcataaggacgacagcaggggtcttgtgcttcctgggtacaagtacctcggacccttcaacggactcgacaagggagagccggtcaacgaggcagacgccgcggccctcgagcacgacaaagcctacgaccggcagctcgacagcggagacaacccgtacctcaagtacaaccacgccgacgcggagtttcaggagcgccttaaagaagatacgtcttttgggggcaacctcggacgagcagtcttccaggcgaaaaagagggttcttgaacctctgggcctggttgaggaacctgttaagacggctccgggaaaaaagaggccggtagagcactctcctgtggagccagactcctcctcgggaaccggaaaggcgggccagcagcctgcaagaaaaagattgaattttggtcagactggagacgcagactcagtacctgacccccagcctctcggacagccaccagcagccccctctggtctgggaactaatacgatggctacaggcagtggcgcaccaatggcagacaataacgagggcgccgacggagtgggtaattcctcgggaaattggcattgcgattccacatggatgggcgacagagtcatcaccaccagcacccgaacctgggccctgcccacctacaacaaccacctctacaaacaaatttccagccaatcaggggcctcgaacgacaatcactactttggctacagcaccccttgggggtattttgacttcaacagattccactgccacttttcaccacgtgactggcaaagactcatcaacaacaactggggattccgacccaagagactcaacttcaagctctttaacattcaagtcaaagaggtcacgcagaatgacggtacgacgacgattgccaataaccttaccagcacggttcaggtgtttactgactcggagtaccagctcccgtacgtcctcggctcggcgcatcaaggatgcctcccgccgttcccagcagacgtcttcatggtgccacagtatggatacctcaccctgaacaacgggagtcaggcagtaggacgctcttcattttactgcctggagtactttccttctcagatgctgcgtaccggaaacaactttaccttcagctacacttttgaggacgttcctttccacagcagctacgctcacagccagagtctggaccgtctcatgaatcctctcattgaccagtacctgtattacttgagcagaacaaacactccaagtggaaccaccacgcagtcaaggcttcagttttctcaggccggagcgagtgacattcgggaccagtctaggaactggcttcctagaccctgttaccgccagcagcgagtatcaaagacatctgcggataacaacaacagtgaatactcgtggactggagctaccaagtaccacctcaatggcagagactctctggtgaatccgggcccggccatggcaagccacaaggacgatgaagaaaagttttttcctcagagcggggttctcatctttgggaagcaaggctcagagaaaacaaatgtggacattgaaaaggtcatgattacagacgaagaggaaatcaggacaaccaatcccgtggctacggagcagtatggttctgtatctaccaacctccagagaggcaacagacaagcagctaccgcagatgtcaacacacaaggcgttcttccaggcacggtctggcaggacagagatgtgtaccttcaggggcccatctgggcaaagattccacacacggacggacattttcacccctctcccctcatgggtggattcggacttaaacaccctcctccacagattctcatcaagaacaccccggtacctgcgaatccttcgaccaccttcagtgcggcaaagtttgcttccttcatcacacagtactccacgggacaggtcagcgtggagatcgagtgggagctgcagaaggaaaacagcaaacgctggaatcccgaaattcagtacacttccaactacaacaagtctgttaatgtggactttactgtggacactaatggcgtgtattcagagcctcgccccattggcaccagatacctgactcgtaatctgtaa

SEQ ID NO: 3352 - DNA, 2208 bp, Artificial Sequence
  source: /note="Description of Artificial Sequence: Synthetic polynucleotide"
atggctgccgatggttatcttccagattggctcgaggacactctctctgaaggaataagacagtggtggaagctcaaacctggcccaccaccaccaaagcccgcagagcggcataaggacgacagcaggggtcttgtgcttcctgggtacaagtacctcggacccttcaacggactcgacaagggagagccggtcaacgaggcagacgccgcggccctcgagcacgacaaagcctacgaccggcagctcgacagcggagacaacccgtacctcaagtacaaccacgccgacgcggagtttcaggagcgccttaaagaagatacgtcttttgggggcaacctcggacgagcagtcttccaggcgaaaaagagggctcttgaacctctgggcctggttgaggaacctgttaagacggctccgggaaaaaagaggccggtagagcactctcctgtggagccagactcctcctcgggaaccggaaaggcgggccagcagcctgcaagaaaaagattgaattttggtcagactggagacgcagactcagtacctgacccccagcctctcggacagccaccagcagccccctctggtctgggaactaatacgatggctacaggcagtggcgcaccaatggcagacaataacgagggcgccgacggagtgggtaattcctcgggaaattggcattgcgattccacatggatgggcgacagagtcatcaccaccagcacccgaacctgggccctgcccacctacaacaaccacctctacaaacaaatttccagccaatcaggagcctcgaacgacaatcactactttggctacagcaccccttgggggtattttgacttcaacagattccactgccacttttcaccacgtgactggcaaagactcatcaacaacaactggggattccgacccaagagactcaacttcaagctctttaacattcaagtcaaagaggtcacgcagaatgacggtacgacgacgattgccaataaccttaccagcacggttcaggtgtttactgactcggagtaccagctcccgtacgtcctcggctcggcgcatcaaggatgcctcccgccgttcccagcagacgtcttcatggtgccacagtatggatacctcaccctgaacaacgggagtcaggcagtaggacgctcttcattttactgcctggagtactttccttctcagatgctgcgtaccggaaacaactttaccttcagctacacttttgaggacgttcctttccacagcagctacgctcacagccagagtctggaccgtctcatgaatcctctcatcgaccagtacctgtattacttgagcagaacaaacactccaagtggaaccaccacgcagtcaaggcttcagttttctcaggccggagcgagtgacattcgggaccagtctaggaactggcttcctggaccctgttaccgccagcagcgagtatcaaagacatctgcggataacaacaacagtgaatactcgtggactggagctaccaagtaccacctcaatggcagagactctctggtgaatccgggcccggccatggcaagccacaaggacgatgaagaaaagttttttcctcagagcggggttctcatctttgggaagcaaggctcagaggaaacaaatgtggacattgaaaaggtcatgattacagacgaagaggaaatcaggacaaccaatcccgtggctacggagcagtatggttctgtatctaccaacctccagagaggcaacagacaagcagctaccgcagatgtcaacacacaaggcgttcttccaggcatggtctggcaggacagagatgtgtaccttcaggggcccatctgggcaaagattccacacacggacggacattttcacccctctcccctcatgggtggattcggacttaaacaccctcctccacagattctcatcaagaacaccccggtacctgcgaatccttcgaccaccttcagtgcggcaaagtttgcttccttcatcacacagtactccacgggacaggtcagcgtggagatcgagtgggagctgcagaaggaaaacagcaaacgctggaatcccgaaattcagtacacttccaactacaacaagtctgttaatgtggactttactgtggacactaatggcgtgtattcagagcctcgccccattggcaccagatacctgactcgtaatctgtaa

SEQ ID NO: 3353 - DNA, 2208 bp, Artificial Sequence
  source: /note="Description of Artificial Sequence: Synthetic polynucleotide"
atggctgccgatggttatcttccagattggctcgaggacaccctctctgaaggaataagacagtggtggaagctcaaacctggcccaccaccaccgaagcccgcagagcggcataaggacgacagcaggggtcttgtgcttcctgggtacaagtacctcggacccttcaacggactcgacaagggagagccggccaacgaggcagacgccgcggccctcgagcacgacaaagcctacgaccggcagctcgacagcggagacaacccgtacctcaagtacaaccacgccgacgcggagtttcaggagcgccttaaagaagatacgtcttttgggggcaacctcggacgagcagtcttccaggcgaaaaagagggttcttgaacctctgggcctggttgaggaacctgttaagacggctccgggaaaaaagaggccggtagagcactctcctgtggagccagactcctcctcgggaaccggaaaggcgggccagcagcctgcaagaaaaagattgaattttggtcagactggagacgcagactcagtacctgacccccagcctctcggacagccaccagcagccccctctggtctgggaactaatacgatggctacaggcagtggcgcaccaatggcagacaataacgagggcgccgacggagtgggtaattcctcgggaaattggcattgcgattccacatggatgggcgacagagtcatcaccaccagcacccgaacctgggccctgcccacctacaacaaccacctctacaaacaaatttccagccaatcaggagcctcgaacgacaatcactactttggctacagcaccccttgggggtattttgacttcaacagattccactgccacttttcaccacgtgactggcaaagactcatcaacaacaactggggattccgacccaagagactcaacttcaagctctttaacattcaagtcaaagaggtcacgcagaatgacggtacgacgacgattgccaataaccttaccagcacggttcaggtgtttactgactcggagtaccagctcccgtacgtcctcggctcggcgcatcaaggatgcctcccgccgttcccagcagacgtcttcatggtgccacagtatggatacctcaccctgaacaacgggagtcaggcagtaggacgctcttcattttactgcctggagtactttccttctcagatgctgcgtaccggaaacaactttaccttcagctacacttttgaggacgttcctttccacagcagctacgctcacagccagagtctggaccgtctcatgaatcctctcatcgaccagtacctgtattacttgagcagaacaaacactccaagtggaaccaccacgcagtcaaggcttcagttttctcaggccggagcgagtgacattcgggaccagtctaggaactggcttcctggaccctgttaccgccagcagcgagtatcaaagacatctgcggataacaacaacagtgaatactcgtggactggagctaccaagtaccacctcaatggcagagactctctggtgaatccgggcccggccatggcaagccacaaggacgatgaagaaaagttttttcctcagagcggggttctcatctttgggaagcaaggctcagagaaaacaaatgtggacattgaaaaggtcatgattacagacgaagaggaaatcaggacaaccaatcccgtggctacggagcagtatggttctgtatctaccaacctccagagaggcaacagacaagcagctaccgcagatgtcaacacacaaggcgttcttccaggcacggtctggcaggacagagatgtgtaccttcaggggcccatctgggcaaagattccacacacggacggacattttcacccctctcccctcatgggtggattcggacttaaacaccctcctccacagattctcatcaagaacaccccggtacctgcgaatccttcgaccaccttcagtgcggcaaagtttgcttccttcatcacacagtactccacgggacaggtcagcgtggagatcgagtgggagctgcagaaggaaaacagcaaacgctggaatcccgaaattcagtacacttccaactacaacaagtctgttaatgtggactttactgtggacactaatggcgtgtattcagagcctcgccccattggcaccagatacctgactcgtaatctgtaa

SEQ ID NO: 3354 - DNA, 2208 bp, Artificial Sequence
  source: /note="Description of Artificial Sequence: Synthetic polynucleotide"
atggctgccgatggttatcttccagattggctcgaggacactctctctgaaggaataagacagtggtggaagctcaaacctggcccaccaccaccaaagcccgcagagcggcataaggacgacagcaggggtcttgtgcttcctgggtacaagtacctcggacccttcaacggactcgacaagggagagccggtcaacgaggcagacgccgcggccctcgagcacgacaaagcctacgaccggcagctcgacagcggagacaacccgtacctcaagtacaaccacgccgacgcggagtttcaggagcgccttaaagaagatacgtcttttgggggcaacctcggacgagcagtcttccaggcgaaaaagagggttcttgaacctctgggcctggttgaggaacctgttaagacggctccgggaaaaaagaggccggtagagcactctcctgtggagccagactcctcctcgggaaccggaaaggcgggccagcagcctgcaagaaaaagattgaattttggtcagactggagacgcagactcagtacctgacccccagcctctcggacagccaccagcagccccctctggtctgggaactaatacgatggctacaggcagtggcgcaccaatggcagacaataacgagggcgccgacggagtgggtaattcctcgggaaattggcattgcgattccacatggatgggcgacagagtcatcaccaccagcacccgaacctgggccctgcccacctacaacaaccacctctacaaacaaatttccagccaatcaggagcctcgaacgacaatcactactttggctacagcaccccttgggggtattttgacttcaacagattccactgccacttttcaccacgtgactggcaaagactcatcaacaacaactggggattccgacccaagagactcaacttcaagctctttaacattcaagtcaaagaggtcacgcagaatgacggtacgacgacgattgccaataaccttaccagcacggttcaggtgtttactgactcggagtaccagctcccgtacgtcctcggctcggcgcatcaaggatgcctcccgccgttcccagcagacgtcttcatggtgccacagtatggatacctcaccctgaacaacgggagtcaggcagtaggacgctcttcattttactgcctggagtactttccttctcagatgctgcgtaccggaaacaactttaccttcagctacacttttgaggacgttcctttccacagcagctacgctcacagccagagtctggaccgtctcatgaatcctctcatcgaccagtacctgtattacttgagcagaacaaacactccaagtggaaccaccacgcagtcaaggcttcagttttctcaggccggagcgagtgacattcgggaccagtctaggaactggcttcctggaccctgttaccgccagcagcgagtatcaaagacatctgcggataacaacaacagtgaatactcgtggactggagctaccaagtaccacctcaatggcagagactctctggtgaatccgggcccggccatggcaagccacaaggacgatgaagaaaagttttttcctcagagcggggttctcatctttgggaagcaaggctcagagaaaacaaatgtggacattgaaaaggtcatggttacagacgaagaggaaatcaggacaaccaatcccgtggctacggagcagtatggttctgtatctaccaacctccagagaggcaacagacaagcagctaccgcagatgtcaacacacaaggcgttcttccaggcacggtctggcaggacagagatgtgtaccttcaggggcccatctgggcaaagattccacacacggacggacattttcacccctctcccctcatgggtggattcggacttaaacaccctcctccacagattctcatcaagaacaccccggtacctgcgaatccttcgaccaccttcagtgcggcaaagtttgcttccttcatcacacagtactccacgggacaggtcagcgtggagatcgagtgggagctgcagaaggaaaacagcaaacgctggaatcccgaaattcagtacacttccaactacaacaagtctgttaatgtggactttactgtggacactaatggcgtgtattcagagcctcgccccattggcaccagatacctgactcgtaatctgtaa

SEQ ID NO: 3355 - DNA, 2208 bp, Artificial Sequence
  source: /note="Description of Artificial Sequence: Synthetic polynucleotide"
atggctgccgatggttatcttccagattggctcgaggacactctctctgaaggaataagacagtggtggaagctcaaacctggcccaccaccaccaaagcccgcagagcggcataaggacgacagcaggggtcttgtgcttcctgggtacaagtacctcggacccttcaacggactcgacaagggagagccggtcaacgaggcagacgccgcggccctcgagcacgacaaagcctacgaccggcagctcgacagcggagacaacccgtacctcaagtacaaccacgccgacgcggagtttcaggagcgccttaaagaagatacgtcttttgggggcaacctcggacgagcagtcttccaggcgaaaaagagggttcttgaacctctgggcctggttgaggaacctgttaagacggctccgggaaaaaagaggccggtagagcactctcctgtggagccagactcctcctcgggaaccggaaaggcgggccagcagcctgcaagaaaaagattgaattttggtcagactggagacgcagactcagtacctgacccccagcctctcggacagccaccagcagccccctctggtctgggaactaatacgatggctacaggcagtggcgcaccaatggcagacaataacgagggcgccgacggagtgggtaattcctcgggaaattggcattgcgattccacatggatgggcgacagagtcatcaccaccagcacccgaacctgggccctgcccacctacaacaaccacctctacaaacaaatttccagccaatcaggagcctcgaacgacaatcactactttggctacagcaccccttgggggtattttgacttcaacagattccactgccacttttcaccacgtgactggcaaagactcatcaacaacaactggggattccgacccaagagactcaacttcaagctctttaacattcaagtcaaagaggtcacgcagaatgacggtacgacgacgattgccaataaccttaccagcacggttcaggtgtttactgactcggagtaccagctcccgtacgtcctcggctcggcgcatcaaggatgcctcccgccgttcccagcagacgtcttcatggcgccacagtatggatacctcaccctgaacaacgggagtcaggcagtaggacgctcttcattttactgcctggagtactttccttctcagatgctgcgtaccggaaacaactttaccttcagctacacttttgaggacgttcctttccacagcagctacgctcacagccagagtctggaccgtctcatgaatcctctcatcgaccagtacctgtattacttgagcagaacaaacactccaagtggaaccaccacgcagtcaaggcttcagttttctcaggccggagcgagtgacattcgggaccagtctaggaactggcttcctggaccctgttaccgccagcagcgagtatcaaagacatctgcggataacaacaacagtgaatactcgtggactggagctaccaagtaccacctcaatggcagagactctctggtgaatccgggcccggccatggcaagccacaaggacgatgaagaaaagttttttcctcagagcggggttctcatctttgggaagcaaggctcagagaaaacaaatgtggacattgaaaaggtcatgattacagacgaagaggaaatcaggacaaccaatcccgtggctacggagcagtatggttctgtatctaccaacctccagagaggcaacagacaagcagctaccgcagatgtcaacacacaaggcgttcttccaggcacggtctggcaggacagagatgtgtaccttcaggggcccatctgggcaaagattccacacacggacggacattttcacccctctcccctcatgggtggattcggacttaaacaccctcctccacagattctcatcaagaacaccccggtacctgcgaatccttcgaccaccttcagtgcggcaaagtttgcttccttcatcacacagtactccacgggacaggtcagcgtggagatcgagtgggagctgcagaaggaaaacagcaaacgctggaatcccgaaattcagtacacttccaactacaacaagtctgttaatgtggactttactgtggacactaatggcgtgtattcagagcctcgccccattggcaccagatacctgactcgtaatctgtaa

SEQ ID NO: 3356 - DNA, 2208 bp, Artificial Sequence
  source: /note="Description of Artificial Sequence: Synthetic polynucleotide"
atggctgccgatggttatcttccagattggctcgaggacactctctctgaaggaataagacagtggtggaagctcaaacctggcccaccaccaccaaagcccgcagagcggcataaggacgacagcaggggtcttgtgcttcctgggtacaagtacctcggacccttcaacggactcgacaagggagagccggtcaacgaggcagacgccgcggccctcgagcacgacaaagcctacgaccggcagctcgacagcggagacaacccgtacctcaagtacaaccacgccgacgcggagtttcaggagcgccttaaagaagatacgtcttttgggggcaacctcggacgagcagtcttccaggcgaaaaagagggttcttgaacctctgggcctggttgaggaacctgttaagacggctccgggaaaaaagaggccggtagagcactctcctgtggagccagactcctcctcgggaaccggaaagacgggccagcagcctgcaagaaaaagattgaattttggtcagactggagacgcagactcagtacctgacccccagcctctcggacagccaccagcagccccctctggtctgggaactaatacgatggctacaggcagtggcgcaccaatggcagacaataacgagggcgccgacggagtgggtaattcctcgggaaattggcattgcgattccacatggatgggcgacagagtcatcaccaccagcacccgaacctgggccctgcccacctacaacaaccacctctacaaacaaatttccagccaatcaggagcctcgaacgacaatcactactttggctacagcaccccttgggggtattttgacttcaacagattccactgccacttttcaccacgtgactggcaaagactcatcaacaacaactggggattccgacccaagagactcaacttcaagctctttaacattcaagtcaaagaggtcacgcagaatgacggtacgacgacgattgccaataaccttaccagcacggttcaggtgtttactgactcggagtaccagctcccgtacgtcctcggctcggcgcatcaaggatgcctcccgccgttcccagcagacgtcttcatggtgccacagtatggatacctcaccctgaacaacgggagtcaggcagtaggacgctcttcattttactgcctggagtactttccttctcagatgctgcgtaccggaaacaactttaccttcagctacacttttgaggacgttcctttccacagcagctacgctcacagccagagtctggaccgtctcatgaatcctctcatcgaccagtacctgtattacttgagcagaacaaacactccaagtggaaccaccacgcagtcaaggcttcagttttctcaggccggagcgagtgacattcgggaccagtctaggaactggcttcctggaccctgttaccgccagcagcgagtatcaaagacatctgcggataacaacaacagtgaatactcgtggactggagctaccaagtaccacctcaatggcagagactctctggtgaatccgggcccggccatggcaagccacaaggacgatgaagaaaagttttttcctcagagcggggttctcatctttgggaagcaaggctcagagaaaacaaatgtggacattgaaaaggtcatgattacagacgaagaggaaatcaggacaaccaatcccgtggctacggagcagtatggttctgtatctaccaacctccagagaggcaacagacaagcagctaccgcagatgtcaacacacaaggcgttcttccaggcatggtctggcaggacagagatgtgtaccttcaggggcccatctgggcaaagattccacacacggacggacattttcacccctctcccctcatgggtggattcggacttaaacaccctcctccacagattctcatcaagaacaccccggtatctgcgaatccttcgaccaccttcagtgcggcaaagtttgcttccttcatcacacagtactccacgggacaggtcagcgtggagatcgagtgggagctgcagaaggaaaacagcaaacgctgggatcccgaaattcagtacacttccaactacaacaagtctgttaatgtggactttactgtggacactaatggcgtgtattcagagcctcgccccattggcaccagatacctgactcgtaatctgtaa

SEQ ID NO: 3357 - DNA, 2205 bp, Artificial Sequence
  source: /note="Description of Artificial Sequence: Synthetic polynucleotide"
atggctgccgatggttatcttccagattggctcgaggacactctctctgaaggaataagacagtggtggaagctcaaacctggcccaccaccaccaaagcccgcagagcggcataaggacgacagcaggggtcttgtgcttcctgggtacaagtacctcggacccttcaacggactcgacaagggagagccggtcaacgaggcagacgccgcggccctcgagcacgacaaagcctacgaccggcagctcgacagcggagacaacccgtacctcaagtacaaccacgccgacgcggagtttcaggagcgccttaaagaagatacgtcttttgggggcaacctcggacgagcagtcttccaggcgaaaaagagggttcttgaacctctgggcctggttgaggaacctgttaagacggctccgggaaaaaagaggccggtagagcactctcctgtggagccagactcctcctcgggaaccggaaaggcgggccagcagcctgcaagaaaaagattgaattttggtcagactggagacgcagactcagtacctgacccccagcctctcggacagccaccagcagccccctctggtctgggaactaatacgatggctacaggcagtggcgcaccaatggcagacaataacgagggcgccgacggagtgggtaattcctcgggaaattggcattgcgattccacatggatgggcgacagagtcatcaccaccagcacccgaacctgggccctgcccacctacaacaaccacctctacaaacaaatttccagccaatcaggagcctcgaacgacaatcactactttggctacagcaccccttgggggtattttgacttcaacagattccactgccacttttcaccacgtgactggcaaagactcatcaacaactggggattccgacccaagagactcaacttcaagctctttaacattcaagtcaaagaggtcacgcagaatgacggtacgacgacgattgccaataaccttaccagcacggttcaggtgtttactgactcggagtaccagctcccgtacgtcctcggctcggcgcatcaaggatgcctcccgccgttcccagcagacgtcttcatggtgccacagtatggatacctcaccctgaacaacgggagtcaggcagtaggacgctcttcattttactgcctggagtactttccttctcagatgctgcgtaccggaaacaactttaccttcagctacacttttgaggacgttcctttccacagcagctacgctcacagccagagtctggaccgtctcatgaatcctctcatcgaccagtacctgtattacttgagcagaacaaacactccaagtggaaccaccacgcagtcaaggcttcagttttctcaggccggagcgagtgacattcgggaccagtctaggaactggcttcctggaccctgttaccgccagcagcgagtatcaaagacatctgcggataacaacaacagtgaatactcgtggactggagctaccaagtaccacctcaatggcagagactctctggtgaatccgggcccggccatggcaagccacaaggacgatgaagaaaagttttttcctcagagcggggttctcatctttgggaagcaaggctcagagaaaacaaatgtggacattgaaaaggtcatgattacagacgaagaggaaatcaggacaaccaatcccgtggctacggagcagtatggttctgtatctaccaacctccagagaggcaacagacaagcagctaccgcagatgtcaacacacaaggcgttcttccaggcacggtctggcaggacagagatgtgtaccttcaggggcccatctgggcaaagattccacacacggacggacattttcacccctctcccctcatgggtggattcggacttaaacaccctcctccacagattctcatcaagaacaccccggtacctgcgaatccttcgaccaccttcagtgcggcaaagtttgcttccttcatcacacagtactccacgggacaggtcagcgtggagatcgagtgggagctgcagaaggaaaacagcaaacgctggaatcccgaaattcagtacacttccaactacaacaagtctgttaatgtggactttactgtggacactaatggcgtgtattcagagcctcgccccattggcaccagatacctgactcgtaatctgtaa

SEQ ID NO: 3358 - DNA, 2208 bp, Artificial Sequence
  source: /note="Description of Artificial Sequence: Synthetic polynucleotide"
atggctgccgatggttatcttccagattggctcgaggacactctctctgaaggaataagacagtggtggaagctcaaacctggcccaccaccaccaaagcccgcagagcggcataaggacgacagcaggggtcttgtgcttcctgggtacaagtacctcggacccttcaacggactcgacaagggagagccggtcaacgaggcagacgccgcggccctcgagcacgacaaagcctacgaccggcagctcgacagcggagacaacccgtacctcaagtacaaccacgccgacgcggagtttcaggagcgccttaaagaagatacgtcttttgggggcaacctcggacgagcagtcttccaggcgaaaaagagggttcttgaacctctgggcctggttgaggaacctgttaagacggctccgggaaaaaagaggccggtagagcactctcctgtggagccagactcctcctcgggaaccggaaaggcgggccagcagcctgcaagaaaaagattgaattttggtcagactggagacgcagactcagtacctgacccccagcctctcggacagccaccagcagccccctctggtctgggaactaatacgatggctacaggcagtggcgcaccaatggcagacaataacgagggcgccgacggagtgggtaattcctcgggaaattggcattgcgattccacatggatgggcgacagagtcatcaccaccagcacccgaacctgggccctgcccacctacaacaaccacctctacaaacaaatttccagccaatcaggagcctcgaacgacaatcactactttggctacagcaccccttgggggtattttgacttcaacagattccactgccacttttcaccacgtgactggcaaagactcatcaacaacaactggggattccgacccaagagactcaacttcaagctctttaacattcaagtcaaagaggtcacgcagaatgacggtacgacgacgattgccaataaccttaccagcacggttcaggtgtttactgactcggagtaccagctcccgtacgtcctcggctcggcgcatcaaggatgcctcccgccgttcccagcagacgtcttcatggtgccacagtatggatacctcaccctgaacaacgggagtcaggcagtaggacgctcttcattttactgcctggagtactttccttctcagatgctgcgtaccggaaacaactttaccttcagctacacttttgaggacgttcctttccacagcagctacgctcacagccagagtctggaccgtctcatgaatcctctcatcgaccagtacctgtattacttgagcagaacaaacactccaagtggaaccaccacgcagtcaaggcttcagttttctcaggccggagcgagtgacattcgggaccagtctaggaactggcttcctggaccctgttaccgccagcagcgagtatcaaagacatctgcggataacaacaacagtgaatactcgtggactggagctaccaagtaccacctcaatggcagagactctctggtgaatccgggcccggccatggcaagccacaaggacgatgaagaaaagttttttcctcagagcggggttctcatctttgggaagcaaggctcagagaaaacaaatgtggacattgaaaaggtcatgattacagacgaagaggaaatcaggacaaccaatcccgtggctacggagcagtatggttctgtatctaccaacctccagagaggcaacagacaagcagctaccgcagatgtcaacacacaaggcgttcttccaggcacggtctggcaggacagagatgtgtaccttcaggggcccatctgggcaaagattccacacacggacggacattttcacccctctcccctcatgggtggattcggacttaaacaccctcctccacagattctcatcaagaacaccccggtacctgcgaatccttcgaccaccttcagtgcggcaaagtttgcttccttcatcacacagtactccacgggacaggtcagcgtggagatcgagtgggagctgcagaaggaaaacggcaaacgctggaatcccgaaattcagtacacttccaactacaacaagtctgttaatgtggactttactgtggacactaatggcgtgtattcagagcctcgccccattggcaccagatacctgactcgtaatctgtaa

SEQ ID NO: 3359 - DNA, 2208 bp, Artificial Sequence
  source: /note="Description of Artificial Sequence: Synthetic polynucleotide"
atggctgccgatggttatcttccagattggctcgaggacactctctctgaaggaataagacagtggtggaagctcaaacctggcccaccaccaccaaagcccgcagagcggcataaggacgacagcaggggtcttgtgcttcctgggtacaagtacctcggacccttcaacggactcgacaagggagagccggtcaacgaggcagacgccgcggccctcgagcacgacaaagcctacgaccggcagctcgacagcggagacaacccgtacctcaagtacaaccacgccgacgcggagtttcaggagcgccctaaagaagatacgtcttttgggggcaacctcggacgagcagtcttccaggcgaaaaagagggttcttgaacctctgggcctggttgaggaacctgttaagacggctccgggaaaaaagaggccggtagagcactctcctgtggagccagactcctcctcgggaaccggaaaggcgggccagcagcctgcaagaaaaagattgaattttggtcagactggagacgcagactcagtacctgacccccagcctctcggacagccaccagcagccccctctggtctgggaactaatacgatggctacaggcagtggcgcaccaatggcagacaataacgagggcgccgacggagtgggtaattcctcgggaaattggcattgcgattccacatggatgggcgacagagtcatcaccaccagcacccgaacctgggccctgcccacctacaacaaccacctctacaaacaaatttccagccaatcaggagcctcgaacgacaatcactactttggctacagcaccccttgggggtattttgacttcaacagattccactgccacttttcaccacgtgactggcaaagactcatcaacaacaactggggattccgacccaagagactcaacttcaagctctttaacattcaagtcaaagaggtcacgcagaatgacggtacgacgacgattgccaataaccttaccagcacggttcaggtgtttactgactcggagtaccagctcccgtacgtcctcggctcggcgcatcaaggatgcctcccgccgttcccagcagacgtcttcatggtgccacagtatggatacctcaccctgaacaacgggagtcaggcagtaggacgctcttcattttactgcctggagtactttccttctcagatgctgcgtaccggaaacaactttaccttcagctacacttttgaggacgttcctttccacagcagctacgctcacagccagagtctggaccgtctcatgaatcctctcatcgaccagtacctgtattacttgagcagaacaaacactccaagtggaaccaccacgcagtcaaggcttcagttttctcaggccggagcgagtgacattcgggaccagtctaggaactggcttcctggaccctgttaccgccagcagcgagtatcaaagacatctgcggataacaacaacagtgaatacttgtggactggagctaccaagtaccacctcaatggcagagactctctggtgaatccgggcccggccatggcaagccacaaggacgatgaagaaaagttttttcctcagagcggggttctcatctttgggaagcaaggctcagagaaaacaaatgtggacattgaaaaggtcatgattacagacgaagaggaaatcaggacaaccaatcccgtggctacggagcagtatggttctgtatctaccaacctccagagaggcaacaggcaagcagctaccgcagatgtcaacacacaaggcgttcttccaggcacggtctggcaggacagagatgtgtaccttcaggggcccatctgggcaaagattccacacacggacggacattttcacccctctcccctcatgggtggattcggacttaaacaccctcctccacagattctcatcaagaacaccccggtacctgcgaatccttcgaccaccttcagtgcggcaaagtttgcttccttcatcacacagtactccacgggacaggtcagcgtggagatcgagtgggagctgcagaaggaaaacagcaaacgctggaatcccgaaattcagtacacttccaactacaacaagtctgttaatgtggactttactgtggacactaatggcgtgtattcagagcctcgccccattggcaccagatacctgactcgtaatctgtaa

SEQ ID NO: 3360 - DNA, 2208 bp, Artificial Sequence
  source: /note="Description of Artificial Sequence: Synthetic polynucleotide"
atggctgccgatggttatcttccagattggctcgaggacactctctctgaaggaataagacagtggtggaagctcaaacctggcccaccaccaccaaagcccgcagagcggcataaggacgacagcaggggtcttgtgcttcctgggtacaagtacctcggacccttcaacggactcgacaagggagagccggtcaacgaggcagacgccgcggccctcgagcacgacaaagcctacgaccggcagctcgacagcggagacaacccgtacctcaagtacaaccacgccgacgcggagtttcaggagcgccttaaagaagatacgtcttttgggggcaacctcggacgagcagtcttccaggcgaaaaagagggctcttgaacctctgggcctggttgaggaacctgttaagacggctccgggaaaaaagaggccggtagagcactctcctgtggagccagactcctcctcgggaaccggaaaggcgggccagcagcctgcaagaaaaagattggattttggtcagactggagacgcagactcagtacctgacccccagcctctcggacagccaccagcagccccctctggtctgggaactaatacgatggctacaggcagtggcgcaccaatggcagacaataacgagggcgccgacggagtgggtaattcctcgggaaattggcattgcgattccacatggatgggcgacagagtcatcaccaccagcacccggacctgggccctgcccacctacaacaaccacctctacaaacaaatttccagccaatcaggagcctcgaacgacaatcactactttggctacagcaccccttgggggtattttgacttcaacagattccactgccacttttcaccacgtgactggcaaagactcatcaacaacaactggggattccgacccaagagactcaacttcaagctctttaacattcaagtcaaagaggtcacgcagaatgacggtacgacgacgattgccaataaccttaccagcacggttcaggtgtttactgactcggagtaccagctcccgtacgtcctcggctcggcgcatcaaggatgcctcccgccgttcccagcagacgtcttcatggtgccacagtatggatacctcaccctgaacaacgggagtcaggcagtaggacgctcttcattttactgcctggagtactttccttctcagatgctgcgtaccggaaacaactttaccttcagctacacttttgaggacgttcctttccacagcagctacgctcacagccagagtctggaccgtctcatgaatcctctcatcgaccagtacctgtattacttgagcagaacaaacactccaagtggaaccaccacgcagtcaaggcttcagttttctcaggccggagcgagtgacattcgggaccagtctaggaactggcttcctggaccctgttaccgccagcagcgagtatcaaagacatctgcggataacaacaacagtgaatactcgtggactggagctaccaagtaccacctcaatggcagagactctctggtgaatccgggcccggccatggcaagccacaaggacgatgaagaaaagttttttcctcagagcggggttctcatctttgggaagcaaggctcagagaaaacaaatgtggacattgaaaaggtcatgattacagacgaagaggaaatcaggacaaccaatcccgtggctacggagcagtatggttctgtatctaccaacctccagagaggcaacagacaagcagctaccgcagatgtcaacacacaaggcgttcttccaggcatggtctggcaggacagagatgtgtaccttcaggggcccatctgggcaaagattccacacacggacggacattttcacccctctcccctcatgggtggattcggacttaaacaccctcctccacagattctcatcaagaacaccccggtacctgcgaatccttcgaccaccttcagtgcggcaaagtttgcttccttcatcacacagtactccacgggacaggtcagcgtggagatcgagtgggagctgcagaaggaaaacagcaaacgctggaatcccgaaattcagtacacttccaactacaacaagtctgttaatgtggactttactgtggacactaatggcgtgtattcagagcctcgccccattggcaccagatacctgactcgtaatctgtaa

SEQ ID NO: 3361 - DNA, 2208 bp, Artificial Sequence
  source: /note="Description of Artificial Sequence: Synthetic polynucleotide"
atggctgccgatggttatcttccagattggctcgaggacactctctctgaaggaataagacagtggtggaagctcaaacctggcccaccaccgccaaagcccgcagagcggcataaggacgacagcaggggtcttgtgcttcctgggtacaagtacctcggacccttcaacggactcgacaagggagagccggtcaacgaggcagacgccgcggccctcgagcacgacaaggcctacgaccggcagctcgacagcggagacaacccgtacctcaagtacaaccacgccgacgcggagtttcaggagcgccttaaagaagatacgtcttttgggggcaacctcgcaagagcagtattccaggcgaaaaagagggttcttgaacctctgggcctggttgaggagcctgttaagacggctccgggaaaaaagaggccggtagagcattctcctgcggagccagactcctcctcgggaaccggaaaagcgggccagcagcctgcgagaaagagattgaatttcggtcagactggagacgcagactccgtacctgacccccagcctctcggacagccaccagcagccccctctggtctgggaactaatacgatggctacaggcagtggcgcaccaatggcagacaataacgagggtgccgacggagtgggtaattcctcaggaaattggcattgcgattccacatggatgggcgacagagtcatcaccaccagcacccgcacctgggctctgcccacctacaacaaccatctgtacaagcagatctccagccaatctggagccagcaacgacaaccactactttggctacagcaccccttgggggtattttgacttcaacagattccactgccacttctccccacgtgactggcaaagactcatcaacaacaactggggattccggcccaagagactcagcttcaagctctttaacattcaagtcaaggaggtcacgcagaatgacggtacgacgacgattgccaataaccttaccagcacggttcaggtctttactgactcggagtaccagctcccgtacgtcctcggctcggcgcatcaaggatgcctcccgccgttcccagcagacgtcttcatggtgccacagtatggatacctcaccctgaacaacgggagtcaggcggtaggacgctcttcattttactgcctggagtacttcccttctcagatgcttcgcacgggaaacaactttaccttcagctacacctttgaggacgtgccttttcacagcagctacgctcacagccaaagtctggaccgtctcatgaatcctctcatcgaccagtacctgtattacttgagcaaaacaaacgctccaagcggaaccaccacgatgtccaggcttcagttttctcaggccggagcaagtgacattcgggaccagtctagaaactggcttcctggaccctgttaccgccagcagcgagtatcaaagacagctgcggacaacaacaacagtgattactcgtggactggagctaccaagtaccacctcaatggaagagactctctggtgaacccgggcccagctatggccagccacaaggacgatgaagaaaaatattttcctcagagcggggttctcatcttcgggaaacaaggctcaaataaaactaatgtggacattgaaaaggttatgattacagacgaagaggaaatcaggaccaccaatcccgtggctacggagcagtatggttctgtatctaccaaccttcaaagcggcaacacacaagcagctacctcagatgtcaacacacaaggcgttcttcctggcatggtctggcaggacagagatgtgtacctgcaggggcccatctgggcaaagattccacacacggatggacactttcacccttctcctcttatgggaggatttggactgaagcaccctcctccgcagattctcatcaagaataccccggtacctgcgaatccttcgaccaccttcagtgcggcaaagtttgcttctttcatcacacagtactccacggggcaggtcagcgtggagatcgagtgggagctgcagaaggagaacagcaaacgctggaaccccgagatccagtatacttccaactacaacaaatctgttaatgtggactttactgtggacactaatggtgtgtattcagagcctcgccccattggcaccagatacctgactcgtaatctgtaa

SEQ ID NO: 3362 - DNA, 2208 bp, Artificial Sequence
  source: /note="Description of Artificial Sequence: Synthetic polynucleotide"
atggctgccgatggttatcttccagattggctcgaggacactctctctgaaggaataagacagtggtggaagctcaaacctggcccaccaccaccaaagcccgcagagcggcataaggacgacagcaggggtcttgtgcttcctgggtacaagtacctcggacccttcaacggactcgacaagggagagccggtcaacgaggcagacgccgcggccctcgagcacgacaaagcctacgaccggcagctcgacagcggagacaacccgtacctcaagtacaaccacgccgacgcggagtttcaggagcgccttaaagaagatacgtcttttgggggcaacctcggacgagcagtcttccaggcgaaaaagagggttcttgaacctctgggcctggttgaggaacctgttaagacggctccgggaaaaaagaggccggtagagcactctcctgtggagccagactcctcctcgggaaccggaaaggcgggccagcagcctgcaagaaaaagattgaattttggtcagactggagacgcagactcagtacctgacccccagcctctcggacagccaccagcagccccctctggtctgggaactaatacgatggctacaggcagtggcgcaccaatggcagacaataacgagggcgccgacggagtgggtaattcctcgggaaattggcattgcgattccacatggatgggcgacagagtcatcaccaccagcacccgaacctgggccctgcccacctacaacaaccacctctacaaacaaatttccagccaatcaggagcctcgaacgacaatcactactttggctacagcaccccttgggggtattttgacttcaacagattccactgccacttttcaccacgtgactggcaaagactcatcaacaacaactggggattccgacccaagagactcaacttcaagctctttaacattcaagtcaaagaggtcacgcagaatgacggtacgacgacgattgccaataaccttaccagcacggttcaggtgtttactgactcggagtaccagctcccgtacgtcctcggctcggcgcatcaaggatgcctcccgccgttcccagcagacgtctccatggtgccacagtatggatacctcaccctgaacaacgggagtcaggcagtaggacgctcttcattttactgcctggagtactttccttctcagatgctgcgtaccggaaacaactttaccttcagctacacttttgaggacgttcctttccacagcagctacgctcacagccagagtctggaccgtctcatgaatcctctcatcgaccagtacctgtattacttgagcagaacaaacactccaagtggaaccaccacgcagtcaaggcttcagttttctcaggccggagcgagtgacattcgggaccagtctaggaactggcttcctggaccctgttaccgccagcagcgagtatcaaagacatctgcggataacaacaacagtgaatactcgtggactggagctaccaagtaccacctcaatggcagagactctctggtgaatccgggcccggccatggcaagccacaaggacgatgaagaaaagttttttcctcagagcggggttctcatctttgggaagcaaggctcagagaaaacaaatgtggacattgaaaaggtcatgattacagacgaagaggaaatcaggacaaccaatcccgtggctacggagcagtatggttctgtatctaccaacctccagagaggcaacagacaagcagctaccgcagatgtcaacacacaaggcgttcttccaggcacggtctggcaggacagagatgtgtaccttcaggggcccatctgggcaaagattccacacacggacggacattttcacccctctcccctcatgggtggattcggacttaaacaccctcctccacagattctcatcaagaacaccccggtacctgcgaatccttcgaccaccttcagtgcggcaaagtttgcttccttcatcacacagtactccacgggacaggtcagcgtggagatcgagtgggagctgcagaaggaaaacagcaaacgctggaatcccgaaattcagtacacttccaactacaacaagtctgttaatgtggactttactgtggacactaatggcgtgtattcagagcctcgccccattggcaccagatacctgactcgtaatctgtaa
